United States Patent Application Publication US 2018/0305689 A1 - sequence listing, part 50

SEQ ID NO: 674471 - RNA, 19 nt, Artificial Sequence
  Description of Artificial Sequence: Synthetic oligonucleotide
  Antisense strand to SEQ ID NO: 674470
uuugcuacugacuuggcag

SEQ ID NO: 674472 - RNA, 19 nt, Artificial Sequence
  Description of Artificial Sequence: Synthetic oligonucleotide
  Sense strand starting at position 2176 of SEQ ID NO: 585874
cuggucaggcuuuauagau

SEQ ID NO: 674473 - RNA, 19 nt, Artificial Sequence
  Description of Artificial Sequence: Synthetic oligonucleotide
  Antisense strand to SEQ ID NO: 674472
aucuauaaagccugaccag

SEQ ID NO: 674474 - RNA, 19 nt, Artificial Sequence
  Description of Artificial Sequence: Synthetic oligonucleotide
  Sense strand starting at position 2216 of SEQ ID NO: 585874
aguuuagacuucuugagaa

SEQ ID NO: 674475 - RNA, 19 nt, Artificial Sequence
  Description of Artificial Sequence: Synthetic oligonucleotide
  Antisense strand to SEQ ID NO: 674474
uucucaagaagucuaaacu

SEQ ID NO: 674476 - RNA, 19 nt, Artificial Sequence
  Description of Artificial Sequence: Synthetic oligonucleotide
  Sense strand starting at position 2230 of SEQ ID NO: 585874
gagaaagcgcuugacaucu

SEQ ID NO: 674477 - RNA, 19 nt, Artificial Sequence
  Description of Artificial Sequence: Synthetic oligonucleotide
  Antisense strand to SEQ ID NO: 674476
agaugucaagcgcuuucuc

SEQ ID NO: 674478 - RNA, 19 nt, Artificial Sequence
  Description of Artificial Sequence: Synthetic oligonucleotide
  Sense strand starting at position 2340 of SEQ ID NO: 585874
uguaucuuuggccacaagu

SEQ ID NO: 674479 - RNA, 19 nt, Artificial Sequence
  Description of Artificial Sequence: Synthetic oligonucleotide
  Antisense strand to SEQ ID NO: 674478
acuuguggccaaagauaca

SEQ ID NO: 674480 - RNA, 19 nt, Artificial Sequence
  Description of Artificial Sequence: Synthetic oligonucleotide
  Sense strand starting at position 2360 of SEQ ID NO: 585874
cuucucgugguguaagaga

SEQ ID NO: 674481 - RNA, 19 nt, Artificial Sequence
  Description of Artificial Sequence: Synthetic oligonucleotide
  Antisense strand to SEQ ID NO: 674480
ucucuuacaccacgagaag

SEQ ID NO: 674482 - RNA, 19 nt, Artificial Sequence
  Description of Artificial Sequence: Synthetic oligonucleotide
  Sense strand starting at position 2371 of SEQ ID NO: 585874
guaagagaucuugguguug

SEQ ID NO: 674483 - RNA, 19 nt, Artificial Sequence
  Description of Artificial Sequence: Synthetic oligonucleotide
  Antisense strand to SEQ ID NO: 674482
caacaccaagaucucuuac

SEQ ID NO: 674484 - RNA, 19 nt, Artificial Sequence
  Description of Artificial Sequence: Synthetic oligonucleotide
  Sense strand starting at position 2382 of SEQ ID NO: 585874
ugguguugccugguagcau

SEQ ID NO: 674485 - RNA, 19 nt, Artificial Sequence
  Description of Artificial Sequence: Synthetic oligonucleotide
  Antisense strand to SEQ ID NO: 674484
augcuaccaggcaacacca

SEQ ID NO: 674486 - RNA, 19 nt, Artificial Sequence
  Description of Artificial Sequence: Synthetic oligonucleotide
  Sense strand starting at position 2975 of SEQ ID NO: 585874
gagcauaauuauuccaggu

SEQ ID NO: 674487 - RNA, 19 nt, Artificial Sequence
  Description of Artificial Sequence: Synthetic oligonucleotide
  Antisense strand to SEQ ID NO: 674486
accuggaauaauuaugcuc

SEQ ID NO: 674488 - RNA, 19 nt, Artificial Sequence
  Description of Artificial Sequence: Synthetic oligonucleotide
  Sense strand starting at position 3038 of SEQ ID NO: 585874
aggcuugccacucagaaga

SEQ ID NO: 674489 - RNA, 19 nt, Artificial Sequence
  Description of Artificial Sequence: Synthetic oligonucleotide
  Antisense strand to SEQ ID NO: 674488
ucuucugaguggcaagccu

SEQ ID NO: 674490 - RNA, 19 nt, Artificial Sequence
  Description of Artificial Sequence: Synthetic oligonucleotide
  Sense strand starting at position 3140 of SEQ ID NO: 585874
gaaaguuauugugccaacu

SEQ ID NO: 674491 - RNA, 19 nt, Artificial Sequence
  Description of Artificial Sequence: Synthetic oligonucleotide
  Antisense strand to SEQ ID NO: 674490
aguuggcacaauaacuuuc

SEQ ID NO: 674492 - RNA, 19 nt, Artificial Sequence
  Description of Artificial Sequence: Synthetic oligonucleotide
  Sense strand starting at position 3509 of SEQ ID NO: 585874
uggguuuacuuacuugaga

SEQ ID NO: 674493 - RNA, 19 nt, Artificial Sequence
  Description of Artificial Sequence: Synthetic oligonucleotide
  Antisense strand to SEQ ID NO: 674492
ucucaaguaaguaaaccca

SEQ ID NO: 674494 - RNA, 19 nt, Artificial Sequence
  Description of Artificial Sequence: Synthetic oligonucleotide
  Sense strand starting at position 3510 of SEQ ID NO: 585874
ggguuuacuuacuugagaa

SEQ ID NO: 674495 - RNA, 19 nt, Artificial Sequence
  Description of Artificial Sequence: Synthetic oligonucleotide
  Antisense strand to SEQ ID NO: 674494
uucucaaguaaguaaaccc

SEQ ID NO: 674496 - RNA, 19 nt, Artificial Sequence
  Description of Artificial Sequence: Synthetic oligonucleotide
  Sense strand starting at position 3511 of SEQ ID NO: 585874
gguuuacuuacuugagaag

SEQ ID NO: 674497 - RNA, 19 nt, Artificial Sequence
  Description of Artificial Sequence: Synthetic oligonucleotide
  Antisense strand to SEQ ID NO: 674496
cuucucaaguaaguaaacc

SEQ ID NO: 674498 - RNA, 19 nt, Artificial Sequence
  Description of Artificial Sequence: Synthetic oligonucleotide
  Sense strand starting at position 3512 of SEQ ID NO: 585874
guuuacuuacuugagaagu

SEQ ID NO: 674499 - RNA, 19 nt, Artificial Sequence
  Description of Artificial Sequence: Synthetic oligonucleotide
  Antisense strand to SEQ ID NO: 674498
acuucucaaguaaguaaac

SEQ ID NO: 674500 - RNA, 19 nt, Artificial Sequence
  Description of Artificial Sequence: Synthetic oligonucleotide
  Sense strand starting at position 3634 of SEQ ID NO: 585874
gcugucuugcuggcauuga

SEQ ID NO: 674501 - RNA, 19 nt, Artificial Sequence
  Description of Artificial Sequence: Synthetic oligonucleotide
  Antisense strand to SEQ ID NO: 674500
ucaaugccagcaagacagc

SEQ ID NO: 674502 - RNA, 19 nt, Artificial Sequence
  Description of Artificial Sequence: Synthetic oligonucleotide
  Sense strand starting at position 3645 of SEQ ID NO: 585874
ggcauugauucccuauaca

SEQ ID NO: 674503 - RNA, 19 nt, Artificial Sequence
  Description of Artificial Sequence: Synthetic oligonucleotide
  Antisense strand to SEQ ID NO: 674502
uguauagggaaucaaugcc

SEQ ID NO: 674504 - RNA, 19 nt, Artificial Sequence
  Description of Artificial Sequence: Synthetic oligonucleotide
  Sense strand starting at position 3788 of SEQ ID NO: 585874
acagcuauugcuugaacac

SEQ ID NO: 674505 - RNA, 19 nt, Artificial Sequence
  Description of Artificial Sequence: Synthetic oligonucleotide
  Antisense strand to SEQ ID NO: 674504
guguucaagcaauagcugu

SEQ ID NO: 674506 - RNA, 19 nt, Artificial Sequence
  Description of Artificial Sequence: Synthetic oligonucleotide
  Sense strand starting at position 178 of SEQ ID NO: 585875
ggagaaaucuguugauaca

SEQ ID NO: 674507 - RNA, 19 nt, Artificial Sequence
  Description of Artificial Sequence: Synthetic oligonucleotide
  Antisense strand to SEQ ID NO: 674506
uguaucaacagauuucucc

SEQ ID NO: 674508 - RNA, 19 nt, Artificial Sequence
  Description of Artificial Sequence: Synthetic oligonucleotide
  Sense strand starting at position 314 of SEQ ID NO: 585875
acacauacugucuggacuu

SEQ ID NO: 674509 - RNA, 19 nt, Artificial Sequence
  Description of Artificial Sequence: Synthetic oligonucleotide
  Antisense strand to SEQ ID NO: 674508
aaguccagacaguaugugu

SEQ ID NO: 674510 - RNA, 19 nt, Artificial Sequence
  Description of Artificial Sequence: Synthetic oligonucleotide
  Sense strand starting at position 320 of SEQ ID NO: 585875
acugucuggacuuggugaa

SEQ ID NO: 674511 - RNA, 19 nt, Artificial Sequence
  Description of Artificial Sequence: Synthetic oligonucleotide
  Antisense strand to SEQ ID NO: 674510
uucaccaaguccagacagu

SEQ ID NO: 674512 - RNA, 19 nt, Artificial Sequence
  Description of Artificial Sequence: Synthetic oligonucleotide
  Sense strand starting at position 339 of SEQ ID NO: 585875
gaaugauucugggaggcag

SEQ ID NO: 674513 - RNA, 19 nt, Artificial Sequence
  Description of Artificial Sequence: Synthetic oligonucleotide
  Antisense strand to SEQ ID NO: 674512
cugccucccagaaucauuc

SEQ ID NO: 674514 - RNA, 19 nt, Artificial Sequence
  Description of Artificial Sequence: Synthetic oligonucleotide
  Sense strand starting at position 341 of SEQ ID NO: 585875
augauucugggaggcagau

SEQ ID NO: 674515 - RNA, 19 nt, Artificial Sequence
  Description of Artificial Sequence: Synthetic oligonucleotide
  Antisense strand to SEQ ID NO: 674514
aucugccucccagaaucau

SEQ ID NO: 674516 - RNA, 19 nt, Artificial Sequence
  Description of Artificial Sequence: Synthetic oligonucleotide
  Sense strand starting at position 370 of SEQ ID NO: 585875
gagcaacauggcugagaaa

SEQ ID NO: 674517 - RNA, 19 nt, Artificial Sequence
  Description of Artificial Sequence: Synthetic oligonucleotide
  Antisense strand to SEQ ID NO: 674516
uuucucagccauguugcuc

SEQ ID NO: 674518 - RNA, 19 nt, Artificial Sequence
  Description of Artificial Sequence: Synthetic oligonucleotide
  Sense strand starting at position 379 of SEQ ID NO: 585875
ggcugagaaacgggaaauu

SEQ ID NO: 674519 - RNA, 19 nt, Artificial Sequence
  Description of Artificial Sequence: Synthetic oligonucleotide
  Antisense strand to SEQ ID NO: 674518
aauuucccguuucucagcc

SEQ ID NO: 674520 - RNA, 19 nt, Artificial Sequence
  Description of Artificial Sequence: Synthetic oligonucleotide
  Sense strand starting at position 434 of SEQ ID NO: 585875
gggaucccuuguucuaauc

SEQ ID NO: 674521 - RNA, 19 nt, Artificial Sequence
  Description of Artificial Sequence: Synthetic oligonucleotide
  Antisense strand to SEQ ID NO: 674520
gauuagaacaagggauccc

SEQ ID NO: 674522 - RNA, 19 nt, Artificial Sequence
  Description of Artificial Sequence: Synthetic oligonucleotide
  Sense strand starting at position 517 of SEQ ID NO: 585875
gagaaaugauaauaagagu

SEQ ID NO: 674523 - RNA, 19 nt, Artificial Sequence
  Description of Artificial Sequence: Synthetic oligonucleotide
  Antisense strand to SEQ ID NO: 674522
acucuuauuaucauuucuc

SEQ ID NO: 674524 - RNA, 19 nt, Artificial Sequence
  Description of Artificial Sequence: Synthetic oligonucleotide
  Sense strand starting at position 536 of SEQ ID NO: 585875
ugagguauuaagggaaagu

SEQ ID NO: 674525 - RNA, 19 nt, Artificial Sequence
  Description of Artificial Sequence: Synthetic oligonucleotide
  Antisense strand to SEQ ID NO: 674524
acuuucccuuaauaccuca

SEQ ID NO: 674526 - RNA, 19 nt, Artificial Sequence
  Description of Artificial Sequence: Synthetic oligonucleotide
  Sense strand starting at position 563 of SEQ ID NO: 585875
acagacuuguggugacaag

SEQ ID NO: 674527 - RNA, 19 nt, Artificial Sequence
  Description of Artificial Sequence: Synthetic oligonucleotide
  Antisense strand to SEQ ID NO: 674526
cuugucaccacaagucugu

SEQ ID NO: 674528 - RNA, 19 nt, Artificial Sequence
  Description of Artificial Sequence: Synthetic oligonucleotide
  Sense strand starting at position 595 of SEQ ID NO: 585875
gacaaauaauaggaguaga

SEQ ID NO: 674529 - RNA, 19 nt, Artificial Sequence
  Description of Artificial Sequence: Synthetic oligonucleotide
  Antisense strand to SEQ ID NO: 674528
ucuacuccuauuauuuguc

SEQ ID NO: 674530 - RNA, 19 nt, Artificial Sequence
  Description of Artificial Sequence: Synthetic oligonucleotide
  Sense strand starting at position 624 of SEQ ID NO: 585875
ggcagaaaugaugguaaau

SEQ ID NO: 674531 - RNA, 19 nt, Artificial Sequence
  Description of Artificial Sequence: Synthetic oligonucleotide
  Antisense strand to SEQ ID NO: 674530
auuuaccaucauuucugcc

SEQ ID NO: 674532 - RNA, 19 nt, Artificial Sequence
  Description of Artificial Sequence: Synthetic oligonucleotide
  Sense strand starting at position 680 of SEQ ID NO: 585875
ggacaugugucagagcaaa

SEQ ID NO: 674533 - RNA, 19 nt, Artificial Sequence
  Description of Artificial Sequence: Synthetic oligonucleotide
  Antisense strand to SEQ ID NO: 674532
uuugcucugacacaugucc

SEQ ID NO: 674534 - RNA, 19 nt, Artificial Sequence
  Description of Artificial Sequence: Synthetic oligonucleotide
  Sense strand starting at position 1017 of SEQ ID NO: 585875
agccuuuaagagggucaga

SEQ ID NO: 674535 - RNA, 19 nt, Artificial Sequence
  Description of Artificial Sequence: Synthetic oligonucleotide
  Antisense strand to SEQ ID NO: 674534
ucugacccucuuaaaggcu

SEQ ID NO: 674536 - RNA, 19 nt, Artificial Sequence
  Description of Artificial Sequence: Synthetic oligonucleotide
  Sense strand starting at position 1383 of SEQ ID NO: 585875
ccucuauuuccuugauguu

SEQ ID NO: 674537 - RNA, 19 nt, Artificial Sequence
  Description of Artificial Sequence: Synthetic oligonucleotide
  Antisense strand to SEQ ID NO: 674536
aacaucaaggaaauagagg

SEQ ID NO: 674538 - RNA, 19 nt, Artificial Sequence
  Description of Artificial Sequence: Synthetic oligonucleotide
  Sense strand starting at position 2276 of SEQ ID NO: 585875
gacuccugauuugaggaaa

SEQ ID NO: 674539 - RNA, 19 nt, Artificial Sequence
  Description of Artificial Sequence: Synthetic oligonucleotide
  Antisense strand to SEQ ID NO: 674538
uuuccucaaaucaggaguc

SEQ ID NO: 674540 - RNA, 19 nt, Artificial Sequence
  Description of Artificial Sequence: Synthetic oligonucleotide
  Sense strand starting at position 2474 of SEQ ID NO: 585875
gauguagaauuagagcuua

SEQ ID NO: 674541 - RNA, 19 nt, Artificial Sequence
  Description of Artificial Sequence: Synthetic oligonucleotide
  Antisense strand to SEQ ID NO: 674540
uaagcucuaauucuacauc

SEQ ID NO: 674542 - RNA, 19 nt, Artificial Sequence
  Description of Artificial Sequence: Synthetic oligonucleotide
  Sense strand starting at position 2530 of SEQ ID NO: 585875
cucagagacugauaacuua

SEQ ID NO: 674543 - RNA, 19 nt, Artificial Sequence
  Description of Artificial Sequence: Synthetic oligonucleotide
  Antisense strand to SEQ ID NO: 674542
uaaguuaucagucucugag

SEQ ID NO: 674544 - RNA, 19 nt, Artificial Sequence
  Description of Artificial Sequence: Synthetic oligonucleotide
  Sense strand starting at position 2631 of SEQ ID NO: 585875
gaagaagacuucgaaagac

SEQ ID NO: 674545 - RNA, 19 nt, Artificial Sequence
  Description of Artificial Sequence: Synthetic oligonucleotide
  Antisense strand to SEQ ID NO: 674544
gucuuucgaagucuucuuc

SEQ ID NO: 674546 - RNA, 19 nt, Artificial Sequence
  Description of Artificial Sequence: Synthetic oligonucleotide
  Sense strand starting at position 2756 of SEQ ID NO: 585875
uccgaaaucugucucagag

SEQ ID NO: 674547 - RNA, 19 nt, Artificial Sequence
  Description of Artificial Sequence: Synthetic oligonucleotide
  Antisense strand to SEQ ID NO: 674546
cucugagacagauuucgga

SEQ ID NO: 674548 - RNA, 19 nt, Artificial Sequence
  Description of Artificial Sequence: Synthetic oligonucleotide
  Sense strand starting at position 2758 of SEQ ID NO: 585875
cgaaaucugucucagagac

SEQ ID NO: 674549 - RNA, 19 nt, Artificial Sequence
  Description of Artificial Sequence: Synthetic oligonucleotide
  Antisense strand to SEQ ID NO: 674548
gucucugagacagauuucg

SEQ ID NO: 674550 - RNA, 19 nt, Artificial Sequence
  Description of Artificial Sequence: Synthetic oligonucleotide
  Sense strand starting at position 2847 of SEQ ID NO: 585875
gagguauaacccugacguc

SEQ ID NO: 674551 - RNA, 19 nt, Artificial Sequence
  Description of Artificial Sequence: Synthetic oligonucleotide
  Antisense strand to SEQ ID NO: 674550
gacgucaggguuauaccuc

SEQ ID NO: 674552 - RNA, 19 nt, Artificial Sequence
  Description of Artificial Sequence: Synthetic oligonucleotide
  Sense strand starting at position 2848 of SEQ ID NO: 585875
agguauaacccugacguca

SEQ ID NO: 674553 - RNA, 19 nt, Artificial Sequence
  Description of Artificial Sequence: Synthetic oligonucleotide
  Antisense strand to SEQ ID NO: 674552
ugacgucaggguuauaccu

SEQ ID NO: 674554 - RNA, 19 nt, Artificial Sequence
  Description of Artificial Sequence: Synthetic oligonucleotide
  Sense strand starting at position 2869 of SEQ ID NO: 585875
cugggaaacuccgaggcau

SEQ ID NO: 674555 - RNA, 19 nt, Artificial Sequence
  Description of Artificial Sequence: Synthetic oligonucleotide
  Antisense strand to SEQ ID NO: 674554
augccucggaguuucccag

SEQ ID NO: 674556 - RNA, 19 nt, Artificial Sequence
  Description of Artificial Sequence: Synthetic oligonucleotide
  Sense strand starting at position 3215 of SEQ ID NO: 585875
aguagucugucucaagcuu

SEQ ID NO: 674557 - RNA, 19 nt, Artificial Sequence
  Description of Artificial Sequence: Synthetic oligonucleotide
  Antisense strand to SEQ ID NO: 674556
aagcuugagacagacuacu

SEQ ID NO: 674558 - RNA, 19 nt, Artificial Sequence
  Description of Artificial Sequence: Synthetic oligonucleotide
  Sense strand starting at position 3322 of SEQ ID NO: 585875
uagcuauugucuugccaug

SEQ ID NO: 674559 - RNA, 19 nt, Artificial Sequence
  Description of Artificial Sequence: Synthetic oligonucleotide
  Antisense strand to SEQ ID NO: 674558
cauggcaagacaauagcua

SEQ ID NO: 674560 - RNA, 19 nt, Artificial Sequence
  Description of Artificial Sequence: Synthetic oligonucleotide
  Sense strand starting at position 3474 of SEQ ID NO: 585875
ggugaaggguccuucucag

SEQ ID NO: 674561 - RNA, 19 nt, Artificial Sequence
  Description of Artificial Sequence: Synthetic oligonucleotide
  Antisense strand to SEQ ID NO: 674560
cugagaaggacccuucacc

SEQ ID NO: 674562 - RNA, 19 nt, Artificial Sequence
  Description of Artificial Sequence: Synthetic oligonucleotide
  Sense strand starting at position 3504 of SEQ ID NO: 585875
ccuuaagaccucggaaaca

SEQ ID NO: 674563 - RNA, 19 nt, Artificial Sequence
  Description of Artificial Sequence: Synthetic oligonucleotide
  Antisense strand to SEQ ID NO: 674562
uguuuccgaggucuuaagg

SEQ ID NO: 674564 - RNA, 19 nt, Artificial Sequence
  Description of Artificial Sequence: Synthetic oligonucleotide
  Sense strand starting at position 3530 of SEQ ID NO: 585875
ggaggucacuaggcacauu

SEQ ID NO: 674565 - RNA, 19 nt, Artificial Sequence
  Description of Artificial Sequence: Synthetic oligonucleotide
  Antisense strand to SEQ ID NO: 674564
aaugugccuagugaccucc

SEQ ID NO: 674566 - RNA, 19 nt, Artificial Sequence
  Description of Artificial Sequence: Synthetic oligonucleotide
  Sense strand starting at position 3821 of SEQ ID NO: 585875
ugcgguagucgauugguca

SEQ ID NO: 674567 - RNA, 19 nt, Artificial Sequence
  Description of Artificial Sequence: Synthetic oligonucleotide
  Antisense strand to SEQ ID NO: 674566
ugaccaaucgacuaccgca

SEQ ID NO: 674568 - RNA, 19 nt, Artificial Sequence
  Description of Artificial Sequence: Synthetic oligonucleotide
  Sense strand starting at position 3822 of SEQ ID NO: 585875
gcgguagucgauuggucaa

SEQ ID NO: 674569 - RNA, 19 nt, Artificial Sequence
  Description of Artificial Sequence: Synthetic oligonucleotide
  Antisense strand to SEQ ID NO: 674568
uugaccaaucgacuaccgc

SEQ ID NO: 674570 - RNA, 19 nt, Artificial Sequence
  Description of Artificial Sequence: Synthetic oligonucleotide
  Sense strand starting at position 3824 of SEQ ID NO: 585875
gguagucgauuggucaagu

SEQ ID NO: 674571 - RNA, 19 nt, Artificial Sequence
  Description of Artificial Sequence: Synthetic oligonucleotide
  Antisense strand to SEQ ID NO: 674570
acuugaccaaucgacuacc

SEQ ID NO: 674572 - RNA, 19 nt, Artificial Sequence
  Description of Artificial Sequence: Synthetic oligonucleotide
  Sense strand starting at position 3873 of SEQ ID NO: 585875
ggcaaaccgcgccaugaua

SEQ ID NO: 674573 - RNA, 19 nt, Artificial Sequence
  Description of Artificial Sequence: Synthetic oligonucleotide
  Antisense strand to SEQ ID NO: 674572
uaucauggcgcgguuugcc

SEQ ID NO: 674574 - RNA, 19 nt, Artificial Sequence
  Description of Artificial Sequence: Synthetic oligonucleotide
  Sense strand starting at position 3884 of SEQ ID NO: 585875
ccaugauagggucgggauu

SEQ ID NO: 674575 - RNA, 19 nt, Artificial Sequence
  Description of Artificial Sequence: Synthetic oligonucleotide
  Antisense strand to SEQ ID NO: 674574
aaucccgacccuaucaugg

SEQ ID NO: 674576 - RNA, 19 nt, Artificial Sequence
  Description of Artificial Sequence: Synthetic oligonucleotide
  Sense strand starting at position 252 of SEQ ID NO: 585876
aggcaaguuacuugaagcu

SEQ ID NO: 674577 - RNA, 19 nt, Artificial Sequence
  Description of Artificial Sequence: Synthetic oligonucleotide
  Antisense strand to SEQ ID NO: 674576
agcuucaaguaacuugccu

SEQ ID NO: 674578 - RNA, 19 nt, Artificial Sequence
  Description of Artificial Sequence: Synthetic oligonucleotide
  Sense strand starting at position 310 of SEQ ID NO: 585876
gcauuaucacgguagccua

SEQ ID NO: 674579 - RNA, 19 nt, Artificial Sequence
  Description of Artificial Sequence: Synthetic oligonucleotide
  Antisense strand to SEQ ID NO: 674578
uaggcuaccgugauaaugc

SEQ ID NO: 674580 - RNA, 19 nt, Artificial Sequence
  Description of Artificial Sequence: Synthetic oligonucleotide
  Sense strand starting at position 359 of SEQ ID NO: 585876
uagcucuuggcacgaaaca

SEQ ID NO: 674581 - RNA, 19 nt, Artificial Sequence
  Description of Artificial Sequence: Synthetic oligonucleotide
  Antisense strand to SEQ ID NO: 674580
uguuucgugccaagagcua

SEQ ID NO: 674582 - RNA, 19 nt, Artificial Sequence
  Description of Artificial Sequence: Synthetic oligonucleotide
  Sense strand starting at position 436 of SEQ ID NO: 585876
uggaaaugaucacuguaau

SEQ ID NO: 674583 - RNA, 19 nt, Artificial Sequence
  Description of Artificial Sequence: Synthetic oligonucleotide
  Antisense strand to SEQ ID NO: 674582
auuacagugaucauuucca

SEQ ID NO: 674584 - RNA, 19 nt, Artificial Sequence
  Description of Artificial Sequence: Synthetic oligonucleotide
  Sense strand starting at position 437 of SEQ ID NO: 585876
ggaaaugaucacuguaauc

SEQ ID NO: 674585 - RNA, 19 nt, Artificial Sequence
  Description of Artificial Sequence: Synthetic oligonucleotide
  Antisense strand to SEQ ID NO: 674584
gauuacagugaucauuucc

SEQ ID NO: 674586 - RNA, 19 nt, Artificial Sequence
  Description of Artificial Sequence: Synthetic oligonucleotide
  Sense strand starting at position 439 of SEQ ID NO: 585876
aaaugaucacuguaaucgu

SEQ ID NO: 674587 - RNA, 19 nt, Artificial Sequence
  Description of Artificial Sequence: Synthetic oligonucleotide
  Antisense strand to SEQ ID NO: 674586
acgauuacagugaucauuu

SEQ ID NO: 674588 - RNA, 19 nt, Artificial Sequence
  Description of Artificial Sequence: Synthetic oligonucleotide
  Sense strand starting at position 446 of SEQ ID NO: 585876
cacuguaaucgucacaguu

SEQ ID NO: 674589 - RNA, 19 nt, Artificial Sequence
  Description of Artificial Sequence: Synthetic oligonucleotide
  Antisense strand to SEQ ID NO: 674588
aacugugacgauuacagug

SEQ ID NO: 674590 - RNA, 19 nt, Artificial Sequence
  Description of Artificial Sequence: Synthetic oligonucleotide
  Sense strand starting at position 894 of SEQ ID NO: 585876
ccacgucuuccuggaaguu

SEQ ID NO: 674591 - RNA, 19 nt, Artificial Sequence
  Description of Artificial Sequence: Synthetic oligonucleotide
  Antisense strand to SEQ ID NO: 674590
aacuuccaggaagacgugg

SEQ ID NO: 674592 - RNA, 19 nt, Artificial Sequence
  Description of Artificial Sequence: Synthetic oligonucleotide
  Sense strand starting at position 907 of SEQ ID NO: 585876
gaaguucucucccuucgca

SEQ ID NO: 674593 - RNA, 19 nt, Artificial Sequence
  Description of Artificial Sequence: Synthetic oligonucleotide
  Antisense strand to SEQ ID NO: 674592
ugcgaagggagagaacuuc

SEQ ID NO: 674594 - RNA, 19 nt, Artificial Sequence
  Description of Artificial Sequence: Synthetic oligonucleotide
  Sense strand starting at position 1076 of SEQ ID NO: 585876
gcacaucuucuagaguacu

SEQ ID NO: 674595 - RNA, 19 nt, Artificial Sequence
  Description of Artificial Sequence: Synthetic oligonucleotide
  Antisense strand to SEQ ID NO: 674594
aguacucuagaagaugugc

SEQ ID NO: 674596 - RNA, 19 nt, Artificial Sequence
  Description of Artificial Sequence: Synthetic oligonucleotide
  Sense strand starting at position 1084 of SEQ ID NO: 585876
ucuagaguacugcggacaa

SEQ ID NO: 674597 - RNA, 19 nt, Artificial Sequence
  Description of Artificial Sequence: Synthetic oligonucleotide
  Antisense strand to SEQ ID NO: 674596
uuguccgcaguacucuaga

SEQ ID NO: 674598 - RNA, 19 nt, Artificial Sequence
  Description of Artificial Sequence: Synthetic oligonucleotide
  Sense strand starting at position 1292 of SEQ ID NO: 585876
ggucccgaggcauaaagaa

SEQ ID NO: 674599 - RNA, 19 nt, Artificial Sequence
  Description of Artificial Sequence: Synthetic oligonucleotide
  Antisense strand to SEQ ID NO: 674598
uucuuuaugccucgggacc

SEQ ID NO: 674600 - RNA, 19 nt, Artificial Sequence
  Description of Artificial Sequence: Synthetic oligonucleotide
  Sense strand starting at position 2047 of SEQ ID NO: 585876
cagcuugcucucuggaagu

SEQ ID NO: 674601 - RNA, 19 nt, Artificial Sequence
  Description of Artificial Sequence: Synthetic oligonucleotide
  Antisense strand to SEQ ID NO: 674600
acuuccagagagcaagcug

SEQ ID NO: 674602 - RNA, 19 nt, Artificial Sequence
  Description of Artificial Sequence: Synthetic oligonucleotide
  Sense strand starting at position 2176 of SEQ ID NO: 585876
acggguaucauccacuaga

SEQ ID NO: 674603 - RNA, 19 nt, Artificial Sequence
  Description of Artificial Sequence: Synthetic oligonucleotide
  Antisense strand to SEQ ID NO: 674602
ucuaguggaugauacccgu

SEQ ID NO: 674604 - RNA, 19 nt, Artificial Sequence
  Description of Artificial Sequence: Synthetic oligonucleotide
  Sense strand starting at position 2194 of SEQ ID NO: 585876
aggcuacauccuggagaug

SEQ ID NO: 674605 - RNA, 19 nt, Artificial Sequence
  Description of Artificial Sequence: Synthetic oligonucleotide
  Antisense strand to SEQ ID NO: 674604
caucuccaggauguagccu

SEQ ID NO: 674606 - RNA, 19 nt, Artificial Sequence
  Description of Artificial Sequence: Synthetic oligonucleotide
  Sense strand starting at position 2339 of SEQ ID NO: 585876
cgggucuuuggcagugauu

SEQ ID NO: 674607 - RNA, 19 nt, Artificial Sequence
  Description of Artificial Sequence: Synthetic oligonucleotide
  Antisense strand to SEQ ID NO: 674606
aaucacugccaaagacccg

SEQ ID NO: 674608 - RNA, 19 nt, Artificial Sequence
  Description of Artificial Sequence: Synthetic oligonucleotide
  Sense strand starting at position 2341 of SEQ ID NO: 585876
ggucuuuggcagugauugu

SEQ ID NO: 674609 - RNA, 19 nt, Artificial Sequence
  Description of Artificial Sequence: Synthetic oligonucleotide
  Antisense strand to SEQ ID NO: 674608
acaaucacugccaaagacc

SEQ ID NO: 674610 - RNA, 19 nt, Artificial Sequence
  Description of Artificial Sequence: Synthetic oligonucleotide
  Sense strand starting at position 2348 of SEQ ID NO: 585876
ggcagugauuguccaugcu

SEQ ID NO: 674611 - RNA, 19 nt, Artificial Sequence
  Description of Artificial Sequence: Synthetic oligonucleotide
  Antisense strand to SEQ ID NO: 674610
agcauggacaaucacugcc

SEQ ID NO: 674612 - RNA, 19 nt, Artificial Sequence
  Description of Artificial Sequence: Synthetic oligonucleotide
  Sense strand starting at position 2351 of SEQ ID NO: 585876
agugauuguccaugcucaa

SEQ ID NO: 674613 - RNA, 19 nt, Artificial Sequence
  Description of Artificial Sequence: Synthetic oligonucleotide
  Antisense strand to SEQ ID NO: 674612
uugagcauggacaaucacu

SEQ ID NO: 674614 - RNA, 19 nt, Artificial Sequence
  Description of Artificial Sequence: Synthetic oligonucleotide
  Sense strand starting at position 2645 of SEQ ID NO: 585876
cuuacuuuguaaccuguaa

SEQ ID NO: 674615 - RNA, 19 nt, Artificial Sequence
  Description of Artificial Sequence: Synthetic oligonucleotide
  Antisense strand to SEQ ID NO: 674614
uuacagguuacaaaguaag

SEQ ID NO: 674616 - RNA, 19 nt, Artificial Sequence
  Description of Artificial Sequence: Synthetic oligonucleotide
  Sense strand starting at position 3022 of SEQ ID NO: 585876
uguagauaauugcuaauga

SEQ ID NO: 674617 - RNA, 19 nt, Artificial Sequence
  Description of Artificial Sequence: Synthetic oligonucleotide
  Antisense strand to SEQ ID NO: 674616
ucauuagcaauuaucuaca

SEQ ID NO: 674618 - RNA, 19 nt, Artificial Sequence
  Description of Artificial Sequence: Synthetic oligonucleotide
  Sense strand starting at position 3140 of SEQ ID NO: 585876
cauggaguuguacacuuua

SEQ ID NO: 674619 - RNA, 19 nt, Artificial Sequence
  Description of Artificial Sequence: Synthetic oligonucleotide
  Antisense strand to SEQ ID NO: 674618
uaaaguguacaacuccaug

SEQ ID NO: 674620 - RNA, 19 nt, Artificial Sequence
  Description of Artificial Sequence: Synthetic oligonucleotide
  Sense strand starting at position 3151 of SEQ ID NO: 585876
acacuuuaaugaguuguau

SEQ ID NO: 674621 - RNA, 19 nt, Artificial Sequence
  Description of Artificial Sequence: Synthetic oligonucleotide
  Antisense strand to SEQ ID NO: 674620
auacaacucauuaaagugu

SEQ ID NO: 674622 - RNA, 19 nt, Artificial Sequence
  Description of Artificial Sequence: Synthetic oligonucleotide
  Sense strand starting at position 3157 of SEQ ID NO: 585876
uaaugaguuguaugguaca

SEQ ID NO: 674623 - RNA, 19 nt, Artificial Sequence
  Description of Artificial Sequence: Synthetic oligonucleotide
  Antisense strand to SEQ ID NO: 674622
uguaccauacaacucauua

SEQ ID NO: 674624 - RNA, 19 nt, Artificial Sequence
  Description of Artificial Sequence: Synthetic oligonucleotide
  Sense strand starting at position 3162 of SEQ ID NO: 585876
aguuguaugguacagaaau

SEQ ID NO: 674625 - RNA, 19 nt, Artificial Sequence
  Description of Artificial Sequence: Synthetic oligonucleotide
  Antisense strand to SEQ ID NO: 674624
auuucuguaccauacaacu

SEQ ID NO: 674626 - RNA, 19 nt, Artificial Sequence
  Description of Artificial Sequence: Synthetic oligonucleotide
  Sense strand starting at position 3286 of SEQ ID NO: 585876
agcaauauaugugccuuau

SEQ ID NO: 674627 - RNA, 19 nt, Artificial Sequence
  Description of Artificial Sequence: Synthetic oligonucleotide
  Antisense strand to SEQ ID NO: 674626
auaaggcacauauauugcu

SEQ ID NO: 674628 - RNA, 19 nt, Artificial Sequence
  Description of Artificial Sequence: Synthetic oligonucleotide
  Sense strand starting at position 3292 of SEQ ID NO: 585876
auaugugccuuaucagcau

SEQ ID NO: 674629 - RNA, 19 nt, Artificial Sequence
  Description of Artificial Sequence: Synthetic oligonucleotide
  Antisense strand to SEQ ID NO: 674628
augcugauaaggcacauau

SEQ ID NO: 674630 - RNA, 19 nt, Artificial Sequence
  Description of Artificial Sequence: Synthetic oligonucleotide
  Sense strand starting at position 3295 of SEQ ID NO: 585876
ugugccuuaucagcauauu

SEQ ID NO: 674631 - RNA, 19 nt, Artificial Sequence
  Description of Artificial Sequence: Synthetic oligonucleotide
  Antisense strand to SEQ ID NO: 674630
aauaugcugauaaggcaca

SEQ ID NO: 674632 - RNA, 19 nt, Artificial Sequence
  Description of Artificial Sequence: Synthetic oligonucleotide
  Sense strand starting at position 3296 of SEQ ID NO: 585876
gugccuuaucagcauauua

SEQ ID NO: 674633 - RNA, 19 nt, Artificial Sequence
  Description of Artificial Sequence: Synthetic oligonucleotide
  Antisense strand to SEQ ID NO: 674632
uaauaugcugauaaggcac

SEQ ID NO: 674634 - RNA, 19 nt, Artificial Sequence
  Description of Artificial Sequence: Synthetic oligonucleotide
  Sense strand starting at position 3406 of SEQ ID NO: 585876
augugauguggagacaucu

SEQ ID NO: 674635 - RNA, 19 nt, Artificial Sequence
  Description of Artificial Sequence: Synthetic oligonucleotide
  Antisense strand to SEQ ID NO: 674634
agaugucuccacaucacau

SEQ ID NO: 674636 - RNA, 19 nt, Artificial Sequence
  Description of Artificial Sequence: Synthetic oligonucleotide
  Sense strand starting at position 3412 of SEQ ID NO: 585876
uguggagacaucuguaauu

SEQ ID NO: 674637 - RNA, 19 nt, Artificial Sequence
  Description of Artificial Sequence: Synthetic oligonucleotide
  Antisense strand to SEQ ID NO: 674636
aauuacagaugucuccaca

SEQ ID NO: 674638 - RNA, 19 nt, Artificial Sequence
  Description of Artificial Sequence: Synthetic oligonucleotide
  Sense strand starting at position 3417 of SEQ ID NO: 585876
agacaucuguaauugcaau

SEQ ID NO: 674639 - RNA, 19 nt, Artificial Sequence
  Description of Artificial Sequence: Synthetic oligonucleotide
  Antisense strand to SEQ ID NO: 674638
auugcaauuacagaugucu

SEQ ID NO: 674640 - RNA, 19 nt, Artificial Sequence
  Description of Artificial Sequence: Synthetic oligonucleotide
  Sense strand starting at position 3425 of SEQ ID NO: 585876
guaauugcaauuggugaca

SEQ ID NO: 674641 - RNA, 19 nt, Artificial Sequence
  Description of Artificial Sequence: Synthetic oligonucleotide
  Antisense strand to SEQ ID NO: 674640
ugucaccaauugcaauuac

SEQ ID NO: 674642 - RNA, 19 nt, Artificial Sequence
  Description of Artificial Sequence: Synthetic oligonucleotide
  Sense strand starting at position 3448 of SEQ ID NO: 585876
cagagauacggcuaaccca

SEQ ID NO: 674643 - RNA, 19 nt, Artificial Sequence
  Description of Artificial Sequence: Synthetic oligonucleotide
  Antisense strand to SEQ ID NO: 674642
uggguuagccguaucucug

SEQ ID NO: 674644 - RNA, 19 nt, Artificial Sequence
  Description of Artificial Sequence: Synthetic oligonucleotide
  Sense strand starting at position 3517 of SEQ ID NO: 585876
ccuuccuaauuagaggaaa

SEQ ID NO: 674645 - RNA, 19 nt, Artificial Sequence
  Description of Artificial Sequence: Synthetic oligonucleotide
  Antisense strand to SEQ ID NO: 674644
uuuccucuaauuaggaagg

SEQ ID NO: 674646 - RNA, 19 nt, Artificial Sequence
  Description of Artificial Sequence: Synthetic oligonucleotide
  Sense strand starting at position 3676 of SEQ ID NO: 585876
cuacaucaucauggaggua

SEQ ID NO: 674647 - RNA, 19 nt, Artificial Sequence
  Description of Artificial Sequence: Synthetic oligonucleotide
  Antisense strand to SEQ ID NO: 674646
uaccuccaugaugauguag

SEQ ID NO: 674648 - RNA, 19 nt, Artificial Sequence
  Description of Artificial Sequence: Synthetic oligonucleotide
  Sense strand starting at position 3762 of SEQ ID NO: 585876
ccucgacucccacaguuaa

SEQ ID NO: 674649 - RNA, 19 nt, Artificial Sequence
  Description of Artificial Sequence: Synthetic oligonucleotide
  Antisense strand to SEQ ID NO: 674648
uuaacugugggagucgagg

SEQ ID NO: 674650 - RNA, 19 nt, Artificial Sequence
  Description of Artificial Sequence: Synthetic oligonucleotide
  Sense strand starting at position 3810 of SEQ ID NO: 585876
agugaaauguuagaaagga

SEQ ID NO: 674651 - RNA, 19 nt, Artificial Sequence
  Description of Artificial Sequence: Synthetic oligonucleotide
  Antisense strand to SEQ ID NO: 674650
uccuuucuaacauuucacu

SEQ ID NO: 674652 - RNA, 19 nt, Artificial Sequence
  Description of Artificial Sequence: Synthetic oligonucleotide
  Sense strand starting at position 3903 of SEQ ID NO: 585876
uccugcugucucuaaagau

SEQ ID NO: 674653 - RNA, 19 nt, Artificial Sequence
  Description of Artificial Sequence: Synthetic oligonucleotide
  Antisense strand to SEQ ID NO: 674652
aucuuuagagacagcagga

SEQ ID NO: 674654 - RNA, 19 nt, Artificial Sequence
  Description of Artificial Sequence: Synthetic oligonucleotide
  Sense strand starting at position 3941 of SEQ ID NO: 585876
uguagaaagcuuggaugaa

SEQ ID NO: 674655 - RNA, 19 nt, Artificial Sequence
  Description of Artificial Sequence: Synthetic oligonucleotide
  Antisense strand to SEQ ID NO: 674654
uucauccaagcuuucuaca

SEQ ID NO: 674656 - RNA, 19 nt, Artificial Sequence
  Description of Artificial Sequence: Synthetic oligonucleotide
  Sense strand starting at position 284 of SEQ ID NO: 585877
agaauucuugaauguguau

SEQ ID NO: 674657 - RNA, 19 nt, Artificial Sequence
  Description of Artificial Sequence: Synthetic oligonucleotide
  Antisense strand to SEQ ID NO: 674656
auacacauucaagaauucu

SEQ ID NO: 674658 - RNA, 19 nt, Artificial Sequence
  Description of Artificial Sequence: Synthetic oligonucleotide
  Sense strand starting at position 290 of SEQ ID NO: 585877
cuugaauguguaugaacuu

SEQ ID NO: 674659 - RNA, 19 nt, Artificial Sequence
  Description of Artificial Sequence: Synthetic oligonucleotide
  Antisense strand to SEQ ID NO: 674658
aaguucauacacauucaag

SEQ ID NO: 674660 - RNA, 19 nt, Artificial Sequence
  Description of Artificial Sequence: Synthetic oligonucleotide
  Sense strand starting at position 299 of SEQ ID NO: 585877
guaugaacuuggcuuaaug

SEQ ID NO: 674661 - RNA, 19 nt, Artificial Sequence
  Description of Artificial Sequence: Synthetic oligonucleotide
  Antisense strand to SEQ ID NO: 674660
cauuaagccaaguucauac

SEQ ID NO: 674662 - RNA, 19 nt, Artificial Sequence
  Description of Artificial Sequence: Synthetic oligonucleotide
  Sense strand starting at position 301 of SEQ ID NO: 585877
augaacuuggcuuaauguu

SEQ ID NO: 674663 - RNA, 19 nt, Artificial Sequence
  Description of Artificial Sequence: Synthetic oligonucleotide
  Antisense strand to SEQ ID NO: 674662
aacauuaagccaaguucau

SEQ ID NO: 674664 - RNA, 19 nt, Artificial Sequence
  Description of Artificial Sequence: Synthetic oligonucleotide
  Sense strand starting at position 308 of SEQ ID NO: 585877
uggcuuaauguugccguaa

SEQ ID NO: 674665 - RNA, 19 nt, Artificial Sequence
  Description of Artificial Sequence: Synthetic oligonucleotide
  Antisense strand to SEQ ID NO: 674664
uuacggcaacauuaagcca

SEQ ID NO: 674666 - RNA, 19 nt, Artificial Sequence
  Description of Artificial Sequence: Synthetic oligonucleotide
  Sense strand starting at position 321 of SEQ ID NO: 585877
ccguaauccaacugaagga

SEQ ID NO: 674667 - RNA, 19 nt, Artificial Sequence
  Description of Artificial Sequence: Synthetic oligonucleotide
  Antisense strand to SEQ ID NO: 674666
uccuucaguuggauuacgg

SEQ ID NO: 674668 - RNA, 19 nt, Artificial Sequence
  Description of Artificial Sequence: Synthetic oligonucleotide
  Sense strand starting at position 400 of SEQ ID NO: 585877
auaaaugugguaugaagua

SEQ ID NO: 674669 - RNA, 19 nt, Artificial Sequence
  Description of Artificial Sequence: Synthetic oligonucleotide
  Antisense strand to SEQ ID NO: 674668
uacuucauaccacauuuau

SEQ ID NO: 674670 - RNA, 19 nt, Artificial Sequence
  Description of Artificial Sequence: Synthetic oligonucleotide
  Sense strand starting at position 405 of SEQ ID NO: 585877
ugugguaugaaguagacau

SEQ ID NO: 674671 - RNA, 19 nt, Artificial Sequence
  Description of Artificial Sequence: Synthetic oligonucleotide
  Antisense strand to SEQ ID NO: 674670
augucuacuucauaccaca

SEQ ID NO: 674672 - RNA, 19 nt, Artificial Sequence
  Description of Artificial Sequence: Synthetic oligonucleotide
  Sense strand starting at position 606 of SEQ ID NO: 585877
gcuggauaaaugcauguua

SEQ ID NO: 674673 - RNA, 19 nt, Artificial Sequence
  Description of Artificial Sequence: Synthetic oligonucleotide
  Antisense strand to SEQ ID NO: 674672
uaacaugcauuuauccagc

SEQ ID NO: 674674 - RNA, 19 nt, Artificial Sequence
  Description of Artificial Sequence: Synthetic oligonucleotide
  Sense strand starting at position 608 of SEQ ID NO: 585877
uggauaaaugcauguuaau

SEQ ID NO: 674675 - RNA, 19 nt, Artificial Sequence
  Description of Artificial Sequence: Synthetic oligonucleotide
  Antisense strand to SEQ ID NO: 674674
auuaacaugcauuuaucca

SEQ ID NO: 674676 - RNA, 19 nt, Artificial Sequence
  Description of Artificial Sequence: Synthetic oligonucleotide
  Sense strand starting at position 652 of SEQ ID NO: 585877
gagagauaguccuuccaag

SEQ ID NO: 674677 - RNA, 19 nt, Artificial Sequence
  Description of Artificial Sequence: Synthetic oligonucleotide
  Antisense strand to SEQ ID NO: 674676
cuuggaaggacuaucucuc

SEQ ID NO: 674678 - RNA, 19 nt, Artificial Sequence
  Description of Artificial Sequence: Synthetic oligonucleotide
  Sense strand starting at position 686 of SEQ ID NO: 585877
ggagucgaugcauacaaau

SEQ ID NO: 674679 - RNA, 19 nt, Artificial Sequence
  Description of Artificial Sequence: Synthetic oligonucleotide
  Antisense strand to SEQ ID NO: 674678
auuuguaugcaucgacucc

SEQ ID NO: 674680 - RNA, 19 nt, Artificial Sequence
  Description of Artificial Sequence: Synthetic oligonucleotide
  Sense strand starting at position 688 of SEQ ID NO: 585877
agucgaugcauacaaaugu

SEQ ID NO: 674681 - RNA, 19 nt, Artificial Sequence
  Description of Artificial Sequence: Synthetic oligonucleotide
  Antisense strand to SEQ ID NO: 674680
acauuuguaugcaucgacu

SEQ ID NO: 674682 - RNA, 19 nt, Artificial Sequence
  Description of Artificial Sequence: Synthetic oligonucleotide
  Sense strand starting at position 716 of SEQ ID NO: 585877
gcuagaggcaucuacaaag

SEQ ID NO: 674683 - RNA, 19 nt, Artificial Sequence
  Description of Artificial Sequence: Synthetic oligonucleotide
  Antisense strand to SEQ ID NO: 674682
cuuuguagaugccucuagc

SEQ ID NO: 674684 - RNA, 19 nt, Artificial Sequence
  Description of Artificial Sequence: Synthetic oligonucleotide
  Sense strand starting at position 784 of SEQ ID NO: 585877
caccuuguuuagcuaggaa

SEQ ID NO: 674685 - RNA, 19 nt, Artificial Sequence
  Description of Artificial Sequence: Synthetic oligonucleotide
  Antisense strand to SEQ ID NO: 674684
uuccuagcuaaacaaggug

SEQ ID NO: 674686 - RNA, 19 nt, Artificial Sequence
  Description of Artificial Sequence: Synthetic oligonucleotide
  Sense strand starting at position 919 of SEQ ID NO: 585877
ccuuauaaugguuagcaca

SEQ ID NO: 674687 - RNA, 19 nt, Artificial Sequence
  Description of Artificial Sequence: Synthetic oligonucleotide
  Antisense strand to SEQ ID NO: 674686
ugugcuaaccauuauaagg

SEQ ID NO: 674688 - RNA, 19 nt, Artificial Sequence
  Description of Artificial Sequence: Synthetic oligonucleotide
  Sense strand starting at position 921 of SEQ ID NO: 585877
uuauaaugguuagcacaaa

SEQ ID NO: 674689 - RNA, 19 nt, Artificial Sequence
  Description of Artificial Sequence: Synthetic oligonucleotide
  Antisense strand to SEQ ID NO: 674688
uuugugcuaaccauuauaa

SEQ ID NO: 674690 - RNA, 19 nt, Artificial Sequence
  Description of Artificial Sequence: Synthetic oligonucleotide
  Sense strand starting at position 971 of SEQ ID NO: 585877
ccacgcauugaaugacauu

SEQ ID NO: 674691 - RNA, 19 nt, Artificial Sequence
  Description of Artificial Sequence: Synthetic oligonucleotide
  Antisense strand to SEQ ID NO: 674690
aaugucauucaaugcgugg

SEQ ID NO: 674692 - RNA, 19 nt, Artificial Sequence
  Description of Artificial Sequence: Synthetic oligonucleotide
  Sense strand starting at position 1166 of SEQ ID NO: 585877
uucugaaguccauagguga

SEQ ID NO: 674693 - RNA, 19 nt, Artificial Sequence
  Description of Artificial Sequence: Synthetic oligonucleotide
  Antisense strand to SEQ ID NO: 674692
ucaccuauggacuucagaa

SEQ ID NO: 674694 - RNA, 19 nt, Artificial Sequence
  Description of Artificial Sequence: Synthetic oligonucleotide
  Sense strand starting at position 1169 of SEQ ID NO: 585877
ugaaguccauaggugaaau

SEQ ID NO: 674695 - RNA, 19 nt, Artificial Sequence
  Description of Artificial Sequence: Synthetic oligonucleotide
  Antisense strand to SEQ ID NO: 674694
auuucaccuauggacuuca

SEQ ID NO: 674696 - RNA, 19 nt, Artificial Sequence
  Description of Artificial Sequence: Synthetic oligonucleotide
  Sense strand starting at position 1212 of SEQ ID NO: 585877
cagcauaaaggucauggua

SEQ ID NO: 674697 - RNA, 19 nt, Artificial Sequence
  Description of Artificial Sequence: Synthetic oligonucleotide
  Antisense strand to SEQ ID NO: 674696
uaccaugaccuuuaugcug

SEQ ID NO: 674698 - RNA, 19 nt, Artificial Sequence
  Description of Artificial Sequence: Synthetic oligonucleotide
  Sense strand starting at position 1215 of SEQ ID NO: 585877
cauaaaggucaugguauau

SEQ ID NO: 674699 - RNA, 19 nt, Artificial Sequence
  Description of Artificial Sequence: Synthetic oligonucleotide
  Antisense strand to SEQ ID NO: 674698
auauaccaugaccuuuaug

SEQ ID NO: 674700 - RNA, 19 nt, Artificial Sequence
  Description of Artificial Sequence: Synthetic oligonucleotide
  Sense strand starting at position 1265 of SEQ ID NO: 585877
augcuucucgaccaaguau

SEQ ID NO: 674701 - RNA, 19 nt, Artificial Sequence
  Description of Artificial Sequence: Synthetic oligonucleotide
  Antisense strand to SEQ ID NO: 674700
auacuuggucgagaagcau

SEQ ID NO: 674702 - RNA, 19 nt, Artificial Sequence
  Description of Artificial Sequence: Synthetic oligonucleotide
  Sense strand starting at position 2469 of SEQ ID NO: 585877
cgcggaggccugaguuaau

SEQ ID NO: 674703 - RNA, 19 nt, Artificial Sequence
  Description of Artificial Sequence: Synthetic oligonucleotide
  Antisense strand to SEQ ID NO: 674702
auuaacucaggccuccgcg

SEQ ID NO: 674704 - RNA, 19 nt, Artificial Sequence
  Description of Artificial Sequence: Synthetic oligonucleotide
  Sense strand starting at position 2617 of SEQ ID NO: 585877
ugcguugucgcgaagagac

SEQ ID NO: 674705 - RNA, 19 nt, Artificial Sequence
  Description of Artificial Sequence: Synthetic oligonucleotide
  Antisense strand to SEQ ID NO: 674704
gucucuucgcgacaacgca

SEQ ID NO: 674706 - RNA, 19 nt, Artificial Sequence
  Description of Artificial Sequence: Synthetic oligonucleotide
  Sense strand starting at position 2896 of SEQ ID NO: 585877
ggugguuuggcggcuuaau

SEQ ID NO: 674707 - RNA, 19 nt, Artificial Sequence
  Description of Artificial Sequence: Synthetic oligonucleotide
  Antisense strand to SEQ ID NO: 674706
auuaagccgccaaaccacc

SEQ ID NO: 674708 - RNA, 19 nt, Artificial Sequence
  Description of Artificial Sequence: Synthetic oligonucleotide
  Sense strand starting at position 2897 of SEQ ID NO: 585877
gugguuuggcggcuuaauu

SEQ ID NO: 674709 - RNA, 19 nt, Artificial Sequence
  Description of Artificial Sequence: Synthetic oligonucleotide
  Antisense strand to SEQ ID NO: 674708
aauuaagccgccaaaccac

SEQ ID NO: 674710 - RNA, 19 nt, Artificial Sequence
  Description of Artificial Sequence: Synthetic oligonucleotide
  Sense strand starting at position 3152 of SEQ ID NO: 585877
ucaggugaugguuggguaa

SEQ ID NO: 674711 - RNA, 19 nt, Artificial Sequence
  Description of Artificial Sequence: Synthetic oligonucleotide
  Antisense strand to SEQ ID NO: 674710
uuacccaaccaucaccuga

SEQ ID NO: 674712 - RNA, 19 nt, Artificial Sequence
  Description of Artificial Sequence: Synthetic oligonucleotide
  Sense strand starting at position 3155 of SEQ ID NO: 585877
ggugaugguuggguaauaa

SEQ ID NO: 674713 - RNA, 19 nt, Artificial Sequence
  Description of Artificial Sequence: Synthetic oligonucleotide
  Antisense strand to SEQ ID NO: 674712
uuauuacccaaccaucacc

SEQ ID NO: 674714 - RNA, 19 nt, Artificial Sequence
  Description of Artificial Sequence: Synthetic oligonucleotide
  Sense strand starting at position 3159 of SEQ ID NO: 585877
augguuggguaauaaauuu

SEQ ID NO: 674715 - RNA, 19 nt, Artificial Sequence
  Description of Artificial Sequence: Synthetic oligonucleotide
  Antisense strand to SEQ ID NO: 674714
aaauuuauuacccaaccau

SEQ ID NO: 674716 - RNA, 19 nt, Artificial Sequence
  Description of Artificial Sequence: Synthetic oligonucleotide
  Sense strand starting at position 3166 of SEQ ID NO: 585877
gguaauaaauuugaacaac

SEQ ID NO: 674717 - RNA, 19 nt, Artificial Sequence
  Description of Artificial Sequence: Synthetic oligonucleotide
  Antisense strand to SEQ ID NO: 674716
guuguucaaauuuauuacc

SEQ ID NO: 674718 - RNA, 19 nt, Artificial Sequence
  Description of Artificial Sequence: Synthetic oligonucleotide
  Sense strand starting at position 3250 of SEQ ID NO: 585877
ugaugugcucaauauccca

SEQ ID NO: 674719 - RNA, 19 nt, Artificial Sequence
  Description of Artificial Sequence: Synthetic oligonucleotide
  Antisense strand to SEQ ID NO: 674718
ugggauauugagcacauca

SEQ ID NO: 674720 - RNA, 19 nt, Artificial Sequence
  Description of Artificial Sequence: Synthetic oligonucleotide
  Sense strand starting at position 3257 of SEQ ID NO: 585877
cucaauaucccaggcauga

SEQ ID NO: 674721 - RNA, 19 nt, Artificial Sequence
  Description of Artificial Sequence: Synthetic oligonucleotide
  Antisense strand to SEQ ID NO: 674720
ucaugccugggauauugag

SEQ ID NO: 674722 - RNA, 19 nt, Artificial Sequence
  Description of Artificial Sequence: Synthetic oligonucleotide
  Sense strand starting at position 3408 of SEQ ID NO: 585877
gaagcuuuccuggaaugcu

SEQ ID NO: 674723 - RNA, 19 nt, Artificial Sequence
  Description of Artificial Sequence: Synthetic oligonucleotide
  Antisense strand to SEQ ID NO: 674722
agcauuccaggaaagcuuc

SEQ ID NO: 674724 - RNA, 19 nt, Artificial Sequence
  Description of Artificial Sequence: Synthetic oligonucleotide
  Sense strand starting at position 3486 of SEQ ID NO: 585877
acucauauguugcuugaga

SEQ ID NO: 674725 - RNA, 19 nt, Artificial Sequence
  Description of Artificial Sequence: Synthetic oligonucleotide
  Antisense strand to SEQ ID NO: 674724
ucucaagcaacauaugagu

SEQ ID NO: 674726 - RNA, 19 nt, Artificial Sequence
  Description of Artificial Sequence: Synthetic oligonucleotide
  Sense strand starting at position 3487 of SEQ ID NO: 585877
cucauauguugcuugagaa

SEQ ID NO: 674727 - RNA, 19 nt, Artificial Sequence
  Description of Artificial Sequence: Synthetic oligonucleotide
  Antisense strand to SEQ ID NO: 674726
uucucaagcaacauaugag

SEQ ID NO: 674728 - RNA, 19 nt, Artificial Sequence
  Description of Artificial Sequence: Synthetic oligonucleotide
  Sense strand starting at position 3488 of SEQ ID NO: 585877
ucauauguugcuugagaag

SEQ ID NO: 674729 - RNA, 19 nt, Artificial Sequence
  Description of Artificial Sequence: Synthetic oligonucleotide
  Antisense strand to SEQ ID NO: 674728
cuucucaagcaacauauga

SEQ ID NO: 674730 - RNA, 19 nt, Artificial Sequence
  Description of Artificial Sequence: Synthetic oligonucleotide
  Sense strand starting at position 3535 of SEQ ID NO: 585877
uugcaaauugagugguaag

SEQ ID NO: 674731 - RNA, 19 nt, Artificial Sequence
  Description of Artificial Sequence: Synthetic oligonucleotide
  Antisense strand to SEQ ID NO: 674730
cuuaccacucaauuugcaa

SEQ ID NO: 674732 - RNA, 19 nt, Artificial Sequence
  Description of Artificial Sequence: Synthetic oligonucleotide
  Sense strand starting at position 3689 of SEQ ID NO: 585877
agccucacagcuuauagaa

SEQ ID NO: 674733 - RNA, 19 nt, Artificial Sequence
  Description of Artificial Sequence: Synthetic oligonucleotide
  Antisense strand to SEQ ID NO: 674732
uucuauaagcugugaggcu

SEQ ID NO: 674734 - RNA, 19 nt, Artificial Sequence
  Description of Artificial Sequence: Synthetic oligonucleotide
  Sense strand starting at position 3881 of SEQ ID NO: 585877
cugagaaauggcuggguga

SEQ ID NO: 674735 - RNA, 19 nt, Artificial Sequence
  Description of Artificial Sequence: Synthetic oligonucleotide
  Antisense strand to SEQ ID NO: 674734
ucacccagccauuucucag

SEQ ID NO: 674736 - RNA, 19 nt, Artificial Sequence
  Description of Artificial Sequence: Synthetic oligonucleotide
  Sense strand starting at position 137 of SEQ ID NO: 585878
acacgugggcuugaaucua

SEQ ID NO: 674737 - RNA, 19 nt, Artificial Sequence
  Description of Artificial Sequence: Synthetic oligonucleotide
  Antisense strand to SEQ ID NO: 674736
uagauucaagcccacgugu

SEQ ID NO: 674738 - RNA, 19 nt, Artificial Sequence
  Description of Artificial Sequence: Synthetic oligonucleotide
  Sense strand starting at position 294 of SEQ ID NO: 585878
acuuuagaaucagaaauag

SEQ ID NO: 674739 - RNA, 19 nt, Artificial Sequence
  Description of Artificial Sequence: Synthetic oligonucleotide
  Antisense strand to SEQ ID NO: 674738
cuauuucugauucuaaagu

SEQ ID NO: 674740 - RNA, 19 nt, Artificial Sequence
  Description of Artificial Sequence: Synthetic oligonucleotide
  Sense strand starting at position 360 of SEQ ID NO: 585878
gaccucuuuguauggaaga

SEQ ID NO: 674741 - RNA, 19 nt, Artificial Sequence
  Description of Artificial Sequence: Synthetic oligonucleotide
  Antisense strand to SEQ ID NO: 674740
ucuuccauacaaagagguc

SEQ ID NO: 674742 - RNA, 19 nt, Artificial Sequence
  Description of Artificial Sequence: Synthetic oligonucleotide
  Sense strand starting at position 699 of SEQ ID NO: 585878
ccggccgagaauuaauauu

SEQ ID NO: 674743 - RNA, 19 nt, Artificial Sequence
  Description of Artificial Sequence: Synthetic oligonucleotide
  Antisense strand to SEQ ID NO: 674742
aauauuaauucucggccgg

SEQ ID NO: 674744 - RNA, 19 nt, Artificial Sequence
  Description of Artificial Sequence: Synthetic oligonucleotide
  Sense strand starting at position 747 of SEQ ID NO: 585878
uguuguuaugcuuucuguu

SEQ ID NO: 674745 - RNA, 19 nt, Artificial Sequence
  Description of Artificial Sequence: Synthetic oligonucleotide
  Antisense strand to SEQ ID NO: 674744
aacagaaagcauaacaaca

SEQ ID NO: 674746 - RNA, 19 nt, Artificial Sequence
  Description of Artificial Sequence: Synthetic oligonucleotide
  Sense strand starting at position 748 of SEQ ID NO: 585878
guuguuaugcuuucuguug

SEQ ID NO: 674747 - RNA, 19 nt, Artificial Sequence
  Description of Artificial Sequence: Synthetic oligonucleotide
  Antisense strand to SEQ ID NO: 674746
caacagaaagcauaacaac

SEQ ID NO: 674748 - RNA, 19 nt, Artificial Sequence
  Description of Artificial Sequence: Synthetic oligonucleotide
  Sense strand starting at position 811 of SEQ ID NO: 585878
guuuaaguacuuugcauac

SEQ ID NO: 674749 - RNA, 19 nt, Artificial Sequence
  Description of Artificial Sequence: Synthetic oligonucleotide
  Antisense strand to SEQ ID NO: 674748
guaugcaaaguacuuaaac

SEQ ID NO: 674750 - RNA, 19 nt, Artificial Sequence
  Description of Artificial Sequence: Synthetic oligonucleotide
  Sense strand starting at position 896 of SEQ ID NO: 585878
ugagucuuggagugauuaa

SEQ ID NO: 674751 - RNA, 19 nt, Artificial Sequence
  Description of Artificial Sequence: Synthetic oligonucleotide
  Antisense strand to SEQ ID NO: 674750
uuaaucacuccaagacuca

SEQ ID NO: 674752 - RNA, 19 nt, Artificial Sequence
  Description of Artificial Sequence: Synthetic oligonucleotide
  Sense strand starting at position 937 of SEQ ID NO: 585878
cuaaacugggucuguuuaa

SEQ ID NO: 674753 - RNA, 19 nt, Artificial Sequence
  Description of Artificial Sequence: Synthetic oligonucleotide
  Antisense strand to SEQ ID NO: 674752
uuaaacagacccaguuuag

SEQ ID NO: 674754 - RNA, 19 nt, Artificial Sequence
  Description of Artificial Sequence: Synthetic oligonucleotide
  Sense strand starting at position 944 of SEQ ID NO: 585878
gggucuguuuaacuccaaa

SEQ ID NO: 674755 - RNA, 19 nt, Artificial Sequence
  Description of Artificial Sequence: Synthetic oligonucleotide
  Antisense strand to SEQ ID NO: 674754
uuuggaguuaaacagaccc

SEQ ID NO: 674756 - RNA, 19 nt, Artificial Sequence
  Description of Artificial Sequence: Synthetic oligonucleotide
  Sense strand starting at position 1387 of SEQ ID NO: 585878
ugugcacuuuccucucaua

SEQ ID NO: 674757 - RNA, 19 nt, Artificial Sequence
  Description of Artificial Sequence: Synthetic oligonucleotide
  Antisense strand to SEQ ID NO: 674756
uaugagaggaaagugcaca

SEQ ID NO: 674758 - RNA, 19 nt, Artificial Sequence
  Description of Artificial Sequence: Synthetic oligonucleotide
  Sense strand starting at position 1418 of SEQ ID NO: 585878
ccaagcaauuuagagauua

SEQ ID NO: 674759 - RNA, 19 nt, Artificial Sequence
  Description of Artificial Sequence: Synthetic oligonucleotide
  Antisense strand to SEQ ID NO: 674758
uaaucucuaaauugcuugg

SEQ ID NO: 674760 - RNA, 19 nt, Artificial Sequence
  Description of Artificial Sequence: Synthetic oligonucleotide
  Sense strand starting at position 1985 of SEQ ID NO: 585878
ggaagucaauucuucuugu

SEQ ID NO: 674761 - RNA, 19 nt, Artificial Sequence
  Description of Artificial Sequence: Synthetic oligonucleotide
  Antisense strand to SEQ ID NO: 674760
acaagaagaauugacuucc

SEQ ID NO: 674762 - RNA, 19 nt, Artificial Sequence
  Description of Artificial Sequence: Synthetic oligonucleotide
  Sense strand starting at position 1988 of SEQ ID NO: 585878
agucaauucuucuuguuag

SEQ ID NO: 674763 - RNA, 19 nt, Artificial Sequence
  Description of Artificial Sequence: Synthetic oligonucleotide
  Antisense strand to SEQ ID NO: 674762
cuaacaagaagaauugacu

SEQ ID NO: 674764 - RNA, 19 nt, Artificial Sequence
  Description of Artificial Sequence: Synthetic oligonucleotide
  Sense strand starting at position 2002 of SEQ ID NO: 585878
guuagaguaacugacguau

SEQ ID NO: 674765 - RNA, 19 nt, Artificial Sequence
  Description of Artificial Sequence: Synthetic oligonucleotide
  Antisense strand to SEQ ID NO: 674764
auacgucaguuacucuaac

SEQ ID NO: 674766 - RNA, 19 nt, Artificial Sequence
  Description of Artificial Sequence: Synthetic oligonucleotide
  Sense strand starting at position 2148 of SEQ ID NO: 585878
ggagcucuucuaugccaac

SEQ ID NO: 674767 - RNA, 19 nt, Artificial Sequence
  Description of Artificial Sequence: Synthetic oligonucleotide
  Antisense strand to SEQ ID NO: 674766
guuggcauagaagagcucc

SEQ ID NO: 674768 - RNA, 19 nt, Artificial Sequence
  Description of Artificial Sequence: Synthetic oligonucleotide
  Sense strand starting at position 2195 of SEQ ID NO: 585878
caggcugaugcuggugaaa

SEQ ID NO: 674769 - RNA, 19 nt, Artificial Sequence
  Description of Artificial Sequence: Synthetic oligonucleotide
  Antisense strand to SEQ ID NO: 674768
uuucaccagcaucagccug

SEQ ID NO: 674770 - RNA, 19 nt, Artificial Sequence
  Description of Artificial Sequence: Synthetic oligonucleotide
  Sense strand starting at position 2198 of SEQ ID NO: 585878
gcugaugcuggugaaaugu

SEQ ID NO: 674771 - RNA, 19 nt, Artificial Sequence
  Description of Artificial Sequence: Synthetic oligonucleotide
  Antisense strand to SEQ ID NO: 674770
acauuucaccagcaucagc

SEQ ID NO: 674772 - RNA, 19 nt, Artificial Sequence
  Description of Artificial Sequence: Synthetic oligonucleotide
  Sense strand starting at position 2381 of SEQ ID NO: 585878
ggccaagagcgaugaagau

SEQ ID NO: 674773 - RNA, 19 nt, Artificial Sequence
  Description of Artificial Sequence: Synthetic oligonucleotide
  Antisense strand to SEQ ID NO: 674772
aucuucaucgcucuuggcc

SEQ ID NO: 674774 - RNA, 19 nt, Artificial Sequence
  Description of Artificial Sequence: Synthetic oligonucleotide
  Sense strand starting at position 2388 of SEQ ID NO: 585878
agcgaugaagauuguaaug

SEQ ID NO: 674775 - RNA, 19 nt, Artificial Sequence
  Description of Artificial Sequence: Synthetic oligonucleotide
  Antisense strand to SEQ ID NO: 674774
cauuacaaucuucaucgcu

SEQ ID NO: 674776 - RNA, 19 nt, Artificial Sequence
  Description of Artificial Sequence: Synthetic oligonucleotide
  Sense strand starting at position 2505 of SEQ ID NO: 585878
ggacuugcucuggagagca

SEQ ID NO: 674777 - RNA, 19 nt, Artificial Sequence
  Description of Artificial Sequence: Synthetic oligonucleotide
  Antisense strand to SEQ ID NO: 674776
ugcucuccagagcaagucc

SEQ ID NO: 674778 - RNA, 19 nt, Artificial Sequence
  Description of Artificial Sequence: Synthetic oligonucleotide
  Sense strand starting at position 2507 of SEQ ID NO: 585878
acuugcucuggagagcaau

SEQ ID NO: 674779 - RNA, 19 nt, Artificial Sequence
  Description of Artificial Sequence: Synthetic oligonucleotide
  Antisense strand to SEQ ID NO: 674778
auugcucuccagagcaagu

SEQ ID NO: 674780 - RNA, 19 nt, Artificial Sequence
  Description of Artificial Sequence: Synthetic oligonucleotide
  Sense strand starting at position 2528 of SEQ ID NO: 585878
gacaaugaagugugugcaa

SEQ ID NO: 674781 - RNA, 19 nt, Artificial Sequence
  Description of Artificial Sequence: Synthetic oligonucleotide
  Antisense strand to SEQ ID NO: 674780
uugcacacacuucauuguc

SEQ ID NO: 674782 - RNA, 19 nt, Artificial Sequence
  Description of Artificial Sequence: Synthetic oligonucleotide
  Sense strand starting at position 2530 of SEQ ID NO: 585878
caaugaagugugugcaaag

SEQ ID NO: 674783 - RNA, 19 nt, Artificial Sequence
  Description of Artificial Sequence: Synthetic oligonucleotide
  Antisense strand to SEQ ID NO: 674782
cuuugcacacacuucauug

SEQ ID NO: 674784 - RNA, 19 nt, Artificial Sequence
  Description of Artificial Sequence: Synthetic oligonucleotide
  Sense strand starting at position 2661 of SEQ ID NO: 585878
cucgucucagcauggagaa

SEQ ID NO: 674785 - RNA, 19 nt, Artificial Sequence
  Description of Artificial Sequence: Synthetic oligonucleotide
  Antisense strand to SEQ ID NO: 674784
uucuccaugcugagacgag

SEQ ID NO: 674786 - RNA, 19 nt, Artificial Sequence
  Description of Artificial Sequence: Synthetic oligonucleotide
  Sense strand starting at position 2685 of SEQ ID NO: 585878
gaagcagagccauggaaga

SEQ ID NO: 674787 - RNA, 19 nt, Artificial Sequence
  Description of Artificial Sequence: Synthetic oligonucleotide
  Antisense strand to SEQ ID NO: 674786
ucuuccauggcucugcuuc

SEQ ID NO: 674788 - RNA, 19 nt, Artificial Sequence
  Description of Artificial Sequence: Synthetic oligonucleotide
  Sense strand starting at position 2696 of SEQ ID NO: 585878
auggaagauccuugauggu

SEQ ID NO: 674789 - RNA, 19 nt, Artificial Sequence
  Description of Artificial Sequence: Synthetic oligonucleotide
  Antisense strand to SEQ ID NO: 674788
accaucaaggaucuuccau

SEQ ID NO: 674790 - RNA, 19 nt, Artificial Sequence
  Description of Artificial Sequence: Synthetic oligonucleotide
  Sense strand starting at position 2702 of SEQ ID NO: 585878
gauccuugauggucaugga

SEQ ID NO: 674791 - RNA, 19 nt, Artificial Sequence
  Description of Artificial Sequence: Synthetic oligonucleotide
  Antisense strand to SEQ ID NO: 674790
uccaugaccaucaaggauc

SEQ ID NO: 674792 - RNA, 19 nt, Artificial Sequence
  Description of Artificial Sequence: Synthetic oligonucleotide
  Sense strand starting at position 2717 of SEQ ID NO: 585878
uggagugugaguggcaaau

SEQ ID NO: 674793 - RNA, 19 nt, Artificial Sequence
  Description of Artificial Sequence: Synthetic oligonucleotide
  Antisense strand to SEQ ID NO: 674792
auuugccacucacacucca

SEQ ID NO: 674794 - RNA, 19 nt, Artificial Sequence
  Description of Artificial Sequence: Synthetic oligonucleotide
  Sense strand starting at position 2723 of SEQ ID NO: 585878
gugaguggcaaauaaaugu

SEQ ID NO: 674795 - RNA, 19 nt, Artificial Sequence
  Description of Artificial Sequence: Synthetic oligonucleotide
  Antisense strand to SEQ ID NO: 674794
acauuuauuugccacucac

SEQ ID NO: 674796 - RNA, 19 nt, Artificial Sequence
  Description of Artificial Sequence: Synthetic oligonucleotide
  Sense strand starting at position 2747 of SEQ ID NO: 585878
gucaucaaccacugagagu

SEQ ID NO: 674797 - RNA, 19 nt, Artificial Sequence
  Description of Artificial Sequence: Synthetic oligonucleotide
  Antisense strand to SEQ ID NO: 674796
acucucagugguugaugac

SEQ ID NO: 674798 - RNA, 19 nt, Artificial Sequence
  Description of Artificial Sequence: Synthetic oligonucleotide
  Sense strand starting at position 2772 of SEQ ID NO: 585878
ccauuuguuucugcagcua

SEQ ID NO: 674799 - RNA, 19 nt, Artificial Sequence
  Description of Artificial Sequence: Synthetic oligonucleotide
  Antisense strand to SEQ ID NO: 674798
uagcugcagaaacaaaugg

SEQ ID NO: 674800 - RNA, 19 nt, Artificial Sequence
  Description of Artificial Sequence: Synthetic oligonucleotide
  Sense strand starting at position 2912 of SEQ ID NO: 585878
ccugcuauaccacgaguua

SEQ ID NO: 674801 - RNA, 19 nt, Artificial Sequence
  Description of Artificial Sequence: Synthetic oligonucleotide
  Antisense strand to SEQ ID NO: 674800
uaacucgugguauagcagg

SEQ ID NO: 674802 - RNA, 19 nt, Artificial Sequence
  Description of Artificial Sequence: Synthetic oligonucleotide
  Sense strand starting at position 2913 of SEQ ID NO: 585878
cugcuauaccacgaguuau

SEQ ID NO: 674803 - RNA, 19 nt, Artificial Sequence
  Description of Artificial Sequence: Synthetic oligonucleotide
  Antisense strand to SEQ ID NO: 674802
auaacucgugguauagcag

SEQ ID NO: 674804 - RNA, 19 nt, Artificial Sequence
  Description of Artificial Sequence: Synthetic oligonucleotide
  Sense strand starting at position 2924 of SEQ ID NO: 585878
cgaguuauccuuuaguuau

SEQ ID NO: 674805 - RNA, 19 nt, Artificial Sequence
  Description of Artificial Sequence: Synthetic oligonucleotide
  Antisense strand to SEQ ID NO: 674804
auaacuaaaggauaacucg

SEQ ID NO: 674806 - RNA, 19 nt, Artificial Sequence
  Description of Artificial Sequence: Synthetic oligonucleotide
  Sense strand starting at position 2973 of SEQ ID NO: 585878
ggcugcagucaccaggauu

SEQ ID NO: 674807 - RNA, 19 nt, Artificial Sequence
  Description of Artificial Sequence: Synthetic oligonucleotide
  Antisense strand to SEQ ID NO: 674806
aauccuggugacugcagcc

SEQ ID NO: 674808 - RNA, 19 nt, Artificial Sequence
  Description of Artificial Sequence: Synthetic oligonucleotide
  Sense strand starting at position 3079 of SEQ ID NO: 585878
agcucaauagcagaucuaa

SEQ ID NO: 674809 - RNA, 19 nt, Artificial Sequence
  Description of Artificial Sequence: Synthetic oligonucleotide
  Antisense strand to SEQ ID NO: 674808
uuagaucugcuauugagcu

SEQ ID NO: 674810 - RNA, 19 nt, Artificial Sequence
  Description of Artificial Sequence: Synthetic oligonucleotide
  Sense strand starting at position 3103 of SEQ ID NO: 585878
ggcacuucuuagcuaaucu

SEQ ID NO: 674811 - RNA, 19 nt, Artificial Sequence
  Description of Artificial Sequence: Synthetic oligonucleotide
  Antisense strand to SEQ ID NO: 674810
agauuagcuaagaagugcc

SEQ ID NO: 674812 - RNA, 19 nt, Artificial Sequence
  Description of Artificial Sequence: Synthetic oligonucleotide
  Sense strand starting at position 3155 of SEQ ID NO: 585878
agauaugugucagccagag

SEQ ID NO: 674813 - RNA, 19 nt, Artificial Sequence
  Description of Artificial Sequence: Synthetic oligonucleotide
  Antisense strand to SEQ ID NO: 674812
cucuggcugacacauaucu

SEQ ID NO: 674814 - RNA, 19 nt, Artificial Sequence
  Description of Artificial Sequence: Synthetic oligonucleotide
  Sense strand starting at position 3157 of SEQ ID NO: 585878
auaugugucagccagaguu

SEQ ID NO: 674815 - RNA, 19 nt, Artificial Sequence
  Description of Artificial Sequence: Synthetic oligonucleotide
  Antisense strand to SEQ ID NO: 674814
aacucuggcugacacauau

SEQ ID NO: 674816 - RNA, 19 nt, Artificial Sequence
  Description of Artificial Sequence: Synthetic oligonucleotide
  Sense strand starting at position 525 of SEQ ID NO: 585879
ccaagcuuccgcggagaaa

SEQ ID NO: 674817 - RNA, 19 nt, Artificial Sequence
  Description of Artificial Sequence: Synthetic oligonucleotide
  Antisense strand to SEQ ID NO: 674816
uuucuccgcggaagcuugg

SEQ ID NO: 674818 - RNA, 19 nt, Artificial Sequence
  Description of Artificial Sequence: Synthetic oligonucleotide
  Sense strand starting at position 563 of SEQ ID NO: 585879
uagaaaugcacucgaggga

SEQ ID NO: 674819 - RNA, 19 nt, Artificial Sequence
  Description of Artificial Sequence: Synthetic oligonucleotide
  Antisense strand to SEQ ID NO: 674818
ucccucgagugcauuucua

SEQ ID NO: 674820 - RNA, 19 nt, Artificial Sequence
  Description of Artificial Sequence: Synthetic oligonucleotide
  Sense strand starting at position 567 of SEQ ID NO: 585879
aaugcacucgagggaguua

SEQ ID NO: 674821 - RNA, 19 nt, Artificial Sequence
  Description of Artificial Sequence: Synthetic oligonucleotide
  Antisense strand to SEQ ID NO: 674820
uaacucccucgagugcauu

SEQ ID NO: 674822 - RNA, 19 nt, Artificial Sequence
  Description of Artificial Sequence: Synthetic oligonucleotide
  Sense strand starting at position 608 of SEQ ID NO: 585879
agcccuccuccaggagaaa

SEQ ID NO: 674823 - RNA, 19 nt, Artificial Sequence
  Description of Artificial Sequence: Synthetic oligonucleotide
  Antisense strand to SEQ ID NO: 674822
uuucuccuggaggagggcu

SEQ ID NO: 674824 - RNA, 19 nt, Artificial Sequence
  Description of Artificial Sequence: Synthetic oligonucleotide
  Sense strand starting at position 631 of SEQ ID NO: 585879
guucgaccuccgggaacuu

SEQ ID NO: 674825 - RNA, 19 nt, Artificial Sequence
  Description of Artificial Sequence: Synthetic oligonucleotide
  Antisense strand to SEQ ID NO: 674824
aaguucccggaggucgaac

SEQ ID NO: 674826 - RNA, 19 nt, Artificial Sequence
  Description of Artificial Sequence: Synthetic oligonucleotide
  Sense strand starting at position 727 of SEQ ID NO: 585879
uggucacgaucaucucauu

SEQ ID NO: 674827 - RNA, 19 nt, Artificial Sequence
  Description of Artificial Sequence: Synthetic oligonucleotide
  Antisense strand to SEQ ID NO: 674826
aaugagaugaucgugacca

SEQ ID NO: 674828 - RNA, 19 nt, Artificial Sequence
  Description of Artificial Sequence: Synthetic oligonucleotide
  Sense strand starting at position 732 of SEQ ID NO: 585879
acgaucaucucauugguga

SEQ ID NO: 674829 - RNA, 19 nt, Artificial Sequence
  Description of Artificial Sequence: Synthetic oligonucleotide
  Antisense strand to SEQ ID NO: 674828
ucaccaaugagaugaucgu

SEQ ID NO: 674830 - RNA, 19 nt, Artificial Sequence
  Description of Artificial Sequence: Synthetic oligonucleotide
  Sense strand starting at position 733 of SEQ ID NO: 585879
cgaucaucucauuggugag

SEQ ID NO: 674831 - RNA, 19 nt, Artificial Sequence
  Description of Artificial Sequence: Synthetic oligonucleotide
  Antisense strand to SEQ ID NO: 674830
cucaccaaugagaugaucg

SEQ ID NO: 674832 - RNA, 19 nt, Artificial Sequence
  Description of Artificial Sequence: Synthetic oligonucleotide
  Sense strand starting at position 1131 of SEQ ID NO: 585879
gggagaaguuauuccacuu

SEQ ID NO: 674833 - RNA, 19 nt, Artificial Sequence
  Description of Artificial Sequence: Synthetic oligonucleotide
  Antisense strand to SEQ ID NO: 674832
aaguggaauaacuucuccc

SEQ ID NO: 674834 - RNA, 19 nt, Artificial Sequence
  Description of Artificial Sequence: Synthetic oligonucleotide
  Sense strand starting at position 1735 of SEQ ID NO: 585879
ucgucucgccgcaguagua

SEQ ID NO: 674835 - RNA, 19 nt, Artificial Sequence
  Description of Artificial Sequence: Synthetic oligonucleotide
  Antisense strand to SEQ ID NO: 674834
uacuacugcggcgagacga

SEQ ID NO: 674836 - RNA, 19 nt, Artificial Sequence
  Description of Artificial Sequence: Synthetic oligonucleotide
  Sense strand starting at position 2020 of SEQ ID NO: 585879
ggacuuguugccgagguca

SEQ ID NO: 674837 - RNA, 19 nt, Artificial Sequence
  Description of Artificial Sequence: Synthetic oligonucleotide
  Antisense strand to SEQ ID NO: 674836
ugaccucggcaacaagucc

SEQ ID NO: 674838 - RNA, 19 nt, Artificial Sequence
  Description of Artificial Sequence: Synthetic oligonucleotide
  Sense strand starting at position 2069 of SEQ ID NO: 585879
gugguuucugcugugucau

SEQ ID NO: 674839 - RNA, 19 nt, Artificial Sequence
  Description of Artificial Sequence: Synthetic oligonucleotide
  Antisense strand to SEQ ID NO: 674838
augacacagcagaaaccac

SEQ ID NO: 674840 - RNA, 19 nt, Artificial Sequence
  Description of Artificial Sequence: Synthetic oligonucleotide
  Sense strand starting at position 2070 of SEQ ID NO: 585879
ugguuucugcugugucauu

SEQ ID NO: 674841 - RNA, 19 nt, Artificial Sequence
  Description of Artificial Sequence: Synthetic oligonucleotide
  Antisense strand to SEQ ID NO: 674840
aaugacacagcagaaacca

SEQ ID NO: 674842 - RNA, 19 nt, Artificial Sequence
  Description of Artificial Sequence: Synthetic oligonucleotide
  Sense strand starting at position 2202 of SEQ ID NO: 585879
uauuaccuuucggugagaa

SEQ ID NO: 674843 - RNA, 19 nt, Artificial Sequence
  Description of Artificial Sequence: Synthetic oligonucleotide
  Antisense strand to SEQ ID NO: 674842
uucucaccgaaagguaaua

SEQ ID NO: 674844 - RNA, 19 nt, Artificial Sequence
  Description of Artificial Sequence: Synthetic oligonucleotide
  Sense strand starting at position 2203 of SEQ ID NO: 585879
auuaccuuucggugagaac

SEQ ID NO: 674845 - RNA, 19 nt, Artificial Sequence
  Description of Artificial Sequence: Synthetic oligonucleotide
  Antisense strand to SEQ ID NO: 674844
guucucaccgaaagguaau

SEQ ID NO: 674846 - RNA, 19 nt, Artificial Sequence
  Description of Artificial Sequence: Synthetic oligonucleotide
  Sense strand starting at position 2204 of SEQ ID NO: 585879
uuaccuuucggugagaacu

SEQ ID NO: 674847 - RNA, 19 nt, Artificial Sequence
  Description of Artificial Sequence: Synthetic oligonucleotide
  Antisense strand to SEQ ID NO: 674846
aguucucaccgaaagguaa

SEQ ID NO: 674848 - RNA, 19 nt, Artificial Sequence
  Description of Artificial Sequence: Synthetic oligonucleotide
  Sense strand starting at position 2206 of SEQ ID NO: 585879
accuuucggugagaacuua

SEQ ID NO: 674849 - RNA, 19 nt, Artificial Sequence
  Description of Artificial Sequence: Synthetic oligonucleotide
  Antisense strand to SEQ ID NO: 674848
uaaguucucaccgaaaggu

SEQ ID NO: 674850 - RNA, 19 nt, Artificial Sequence
  Description of Artificial Sequence: Synthetic oligonucleotide
  Sense strand starting at position 2214 of SEQ ID NO: 585879
gugagaacuuacgcgagga

SEQ ID NO: 674851 - RNA, 19 nt, Artificial Sequence
  Description of Artificial Sequence: Synthetic oligonucleotide
  Antisense strand to SEQ ID NO: 674850
uccucgcguaaguucucac

SEQ ID NO: 674852 - RNA, 19 nt, Artificial Sequence
  Description of Artificial Sequence: Synthetic oligonucleotide
  Sense strand starting at position 2216 of SEQ ID NO: 585879
gagaacuuacgcgaggaga

SEQ ID NO: 674853 - RNA, 19 nt, Artificial Sequence
  Description of Artificial Sequence: Synthetic oligonucleotide
  Antisense strand to SEQ ID NO: 674852
ucuccucgcguaaguucuc

SEQ ID NO: 674854 - RNA, 19 nt, Artificial Sequence
  Description of Artificial Sequence: Synthetic oligonucleotide
  Sense strand starting at position 2493 of SEQ ID NO: 585879
gcgaguucagaggagucuu

SEQ ID NO: 674855 - RNA, 19 nt, Artificial Sequence
  Description of Artificial Sequence: Synthetic oligonucleotide
  Antisense strand to SEQ ID NO: 674854
aagacuccucugaacucgc

SEQ ID NO: 674856 - RNA, 19 nt, Artificial Sequence
  Description of Artificial Sequence: Synthetic oligonucleotide
  Sense strand starting at position 2504 of SEQ ID NO: 585879
ggagucuugcgcccuagca

SEQ ID NO: 674857 - RNA, 19 nt, Artificial Sequence
  Description of Artificial Sequence: Synthetic oligonucleotide
  Antisense strand to SEQ ID NO: 674856
ugcuagggcgcaagacucc

SEQ ID NO: 674858 - RNA, 19 nt, Artificial Sequence
  Description of Artificial Sequence: Synthetic oligonucleotide
  Sense strand starting at position 2505 of SEQ ID NO: 585879
gagucuugcgcccuagcaa

SEQ ID NO: 674859 - RNA, 19 nt, Artificial Sequence
  Description of Artificial Sequence: Synthetic oligonucleotide
  Antisense strand to SEQ ID NO: 674858
uugcuagggcgcaagacuc

SEQ ID NO: 674860 - RNA, 19 nt, Artificial Sequence
  Description of Artificial Sequence: Synthetic oligonucleotide
  Sense strand starting at position 2820 of SEQ ID NO: 585879
ccgcauuucucagugucuu

SEQ ID NO: 674861 - RNA, 19 nt, Artificial Sequence
  Description of Artificial Sequence: Synthetic oligonucleotide
  Antisense strand to SEQ ID NO: 674860
aagacacugagaaaugcgg

SEQ ID NO: 674862 - RNA, 19 nt, Artificial Sequence
  Description of Artificial Sequence: Synthetic oligonucleotide
  Sense strand starting at position 2821 of SEQ ID NO: 585879
cgcauuucucagugucuuu

SEQ ID NO: 674863 - RNA, 19 nt, Artificial Sequence
  Description of Artificial Sequence: Synthetic oligonucleotide
  Antisense strand to SEQ ID NO: 674862
aaagacacugagaaaugcg

SEQ ID NO: 674864 - RNA, 19 nt, Artificial Sequence
  Description of Artificial Sequence: Synthetic oligonucleotide
  Sense strand starting at position 2888 of SEQ ID NO: 585879
gaaguuuccuucuagaaag

SEQ ID NO: 674865 - RNA, 19 nt, Artificial Sequence
  Description of Artificial Sequence: Synthetic oligonucleotide
  Antisense strand to SEQ ID NO: 674864
cuuucuagaaggaaacuuc

SEQ ID NO: 674866 - RNA, 19 nt, Artificial Sequence
  Description of Artificial Sequence: Synthetic oligonucleotide
  Sense strand starting at position 3000 of SEQ ID NO: 585879
gugcguguuacucuccuua

SEQ ID NO: 674867 - RNA, 19 nt, Artificial Sequence
  Description of Artificial Sequence: Synthetic oligonucleotide
  Antisense strand to SEQ ID NO: 674866
uaaggagaguaacacgcac

SEQ ID NO: 674868 - RNA, 19 nt, Artificial Sequence
  Description of Artificial Sequence: Synthetic oligonucleotide
  Sense strand starting at position 3002 of SEQ ID NO: 585879
gcguguuacucuccuuacu

SEQ ID NO: 674869 - RNA, 19 nt, Artificial Sequence
  Description of Artificial Sequence: Synthetic oligonucleotide
  Antisense strand to SEQ ID NO: 674868
aguaaggagaguaacacgc

SEQ ID NO: 674870 - RNA, 19 nt, Artificial Sequence
  Description of Artificial Sequence: Synthetic oligonucleotide
  Sense strand starting at position 3012 of SEQ ID NO: 585879
cuccuuacuccggguauua

SEQ ID NO: 674871 - RNA, 19 nt, Artificial Sequence
  Description of Artificial Sequence: Synthetic oligonucleotide
  Antisense strand to SEQ ID NO: 674870
uaauacccggaguaaggag

SEQ ID NO: 674872 - RNA, 19 nt, Artificial Sequence
  Description of Artificial Sequence: Synthetic oligonucleotide
  Sense strand starting at position 3014 of SEQ ID NO: 585879
ccuuacuccggguauuaaa

SEQ ID NO: 674873 - RNA, 19 nt, Artificial Sequence
  Description of Artificial Sequence: Synthetic oligonucleotide
  Antisense strand to SEQ ID NO: 674872
uuuaauacccggaguaagg

SEQ ID NO: 674874 - RNA, 19 nt, Artificial Sequence
  Description of Artificial Sequence: Synthetic oligonucleotide
  Sense strand starting at position 3280 of SEQ ID NO: 585879
gaggguuuaacagaucgcu

SEQ ID NO: 674875 - RNA, 19 nt, Artificial Sequence
  Description of Artificial Sequence: Synthetic oligonucleotide
  Antisense strand to SEQ ID NO: 674874
agcgaucuguuaaacccuc

SEQ ID NO: 674876 - RNA, 19 nt, Artificial Sequence
  Description of Artificial Sequence: Synthetic oligonucleotide
  Sense strand starting at position 3283 of SEQ ID NO: 585879
gguuuaacagaucgcucua

SEQ ID NO: 674877 - RNA, 19 nt, Artificial Sequence
  Description of Artificial Sequence: Synthetic oligonucleotide
  Antisense strand to SEQ ID NO: 674876
uagagcgaucuguuaaacc

SEQ ID NO: 674878 - RNA, 19 nt, Artificial Sequence
  Description of Artificial Sequence: Synthetic oligonucleotide
  Sense strand starting at position 3285 of SEQ ID NO: 585879
uuuaacagaucgcucuaaa

SEQ ID NO: 674879 - RNA, 19 nt, Artificial Sequence
  Description of Artificial Sequence: Synthetic oligonucleotide
  Antisense strand to SEQ ID NO: 674878
uuuagagcgaucuguuaaa

SEQ ID NO: 674880 - RNA, 19 nt, Artificial Sequence
  Description of Artificial Sequence: Synthetic oligonucleotide
  Sense strand starting at position 3352 of SEQ ID NO: 585879
aggaaagaauauuccguuu

SEQ ID NO: 674881 - RNA, 19 nt, Artificial Sequence
  Description of Artificial Sequence: Synthetic oligonucleotide
  Antisense strand to SEQ ID NO: 674880
aaacggaauauucuuuccu

SEQ ID NO: 674882 - RNA, 19 nt, Artificial Sequence
  Description of Artificial Sequence: Synthetic oligonucleotide
  Sense strand starting at position 3366 of SEQ ID NO: 585879
cguuucuaacacgcguaau

SEQ ID NO: 674883 - RNA, 19 nt, Artificial Sequence
  Description of Artificial Sequence: Synthetic oligonucleotide
  Antisense strand to SEQ ID NO: 674882
auuacgcguguuagaaacg

SEQ ID NO: 674884 - RNA, 19 nt, Artificial Sequence
  Description of Artificial Sequence: Synthetic oligonucleotide
  Sense strand starting at position 3367 of SEQ ID NO: 585879
guuucuaacacgcguaaua

SEQ ID NO: 674885 - RNA, 19 nt, Artificial Sequence
  Description of Artificial Sequence: Synthetic oligonucleotide
  Antisense strand to SEQ ID NO: 674884
uauuacgcguguuagaaac

SEQ ID NO: 674886 - RNA, 19 nt, Artificial Sequence
  Description of Artificial Sequence: Synthetic oligonucleotide
  Sense strand starting at position 3369 of SEQ ID NO: 585879
uucuaacacgcguaauaaa

SEQ ID NO: 674887 - RNA, 19 nt, Artificial Sequence
  Description of Artificial Sequence: Synthetic oligonucleotide
  Antisense strand to SEQ ID NO: 674886
uuuauuacgcguguuagaa

SEQ ID NO: 674888 - RNA, 19 nt, Artificial Sequence
  Description of Artificial Sequence: Synthetic oligonucleotide
  Sense strand starting at position 3402 of SEQ ID NO: 585879
gagagaaugucugaagcau

SEQ ID NO: 674889 - RNA, 19 nt, Artificial Sequence
  Description of Artificial Sequence: Synthetic oligonucleotide
  Antisense strand to SEQ ID NO: 674888
augcuucagacauucucuc

SEQ ID NO: 674890 - RNA, 19 nt, Artificial Sequence
  Description of Artificial Sequence: Synthetic oligonucleotide
  Sense strand starting at position 3410 of SEQ ID NO: 585879
gucugaagcauugaagagu

SEQ ID NO: 674891 - RNA, 19 nt, Artificial Sequence
  Description of Artificial Sequence: Synthetic oligonucleotide
  Antisense strand to SEQ ID NO: 674890
acucuucaaugcuucagac

SEQ ID NO: 674892 - RNA, 19 nt, Artificial Sequence
  Description of Artificial Sequence: Synthetic oligonucleotide
  Sense strand starting at position 3470 of SEQ ID NO: 585879
guuggaagucaccgacuuu

SEQ ID NO: 674893 - RNA, 19 nt, Artificial Sequence
  Description of Artificial Sequence: Synthetic oligonucleotide
  Antisense strand to SEQ ID NO: 674892
aaagucggugacuuccaac

SEQ ID NO: 674894 - RNA, 19 nt, Artificial Sequence
  Description of Artificial Sequence: Synthetic oligonucleotide
  Sense strand starting at position 3752 of SEQ ID NO: 585879
gucuaucucuccuuggcaa

SEQ ID NO: 674895 - RNA, 19 nt, Artificial Sequence
  Description of Artificial Sequence: Synthetic oligonucleotide
  Antisense strand to SEQ ID NO: 674894
uugccaaggagagauagac

SEQ ID NO: 674896 - RNA, 19 nt, Artificial Sequence
  Description of Artificial Sequence: Synthetic oligonucleotide
  Sense strand starting at position 236 of SEQ ID NO: 585880
aguuaauaugugcacauau

SEQ ID NO: 674897 - RNA, 19 nt, Artificial Sequence
  Description of Artificial Sequence: Synthetic oligonucleotide
  Antisense strand to SEQ ID NO: 674896
auaugugcacauauuaacu

SEQ ID NO: 674898 - RNA, 19 nt, Artificial Sequence
  Description of Artificial Sequence: Synthetic oligonucleotide
  Sense strand starting at position 417 of SEQ ID NO: 585880
uucuuagaagcaugagaau

SEQ ID NO: 674899 - RNA, 19 nt, Artificial Sequence
  Description of Artificial Sequence: Synthetic oligonucleotide
  Antisense strand to SEQ ID NO: 674898
auucucaugcuucuaagaa

SEQ ID NO: 674900 - RNA, 19 nt, Artificial Sequence
  Description of Artificial Sequence: Synthetic oligonucleotide
  Sense strand starting at position 537 of SEQ ID NO: 585880
acauuuaauguguguacuu

SEQ ID NO: 674901 - RNA, 19 nt, Artificial Sequence
  Description of Artificial Sequence: Synthetic oligonucleotide
  Antisense strand to SEQ ID NO: 674900
aaguacacacauuaaaugu

SEQ ID NO: 674902 - RNA, 19 nt, Artificial Sequence
  Description of Artificial Sequence: Synthetic oligonucleotide
  Sense strand starting at position 594 of SEQ ID NO: 585880
ccaggacauguauacguau

SEQ ID NO: 674903 - RNA, 19 nt, Artificial Sequence
  Description of Artificial Sequence: Synthetic oligonucleotide
  Antisense strand to SEQ ID NO: 674902
auacguauacauguccugg

SEQ ID NO: 674904 - RNA, 19 nt, Artificial Sequence
  Description of Artificial Sequence: Synthetic oligonucleotide
  Sense strand starting at position 600 of SEQ ID NO: 585880
cauguauacguauaugaca

SEQ ID NO: 674905 - RNA, 19 nt, Artificial Sequence
  Description of Artificial Sequence: Synthetic oligonucleotide
  Antisense strand to SEQ ID NO: 674904
ugucauauacguauacaug

SEQ ID NO: 674906 - RNA, 19 nt, Artificial Sequence
  Description of Artificial Sequence: Synthetic oligonucleotide
  Sense strand starting at position 905 of SEQ ID NO: 585880
ggugcaugugguucguuau

SEQ ID NO: 674907 - RNA, 19 nt, Artificial Sequence
  Description of Artificial Sequence: Synthetic oligonucleotide
  Antisense strand to SEQ ID NO: 674906
auaacgaaccacaugcacc

SEQ ID NO: 674908 - RNA, 19 nt, Artificial Sequence
  Description of Artificial Sequence: Synthetic oligonucleotide
  Sense strand starting at position 915 of SEQ ID NO: 585880
guucguuauguuguguuca

SEQ ID NO: 674909 - RNA, 19 nt, Artificial Sequence
  Description of Artificial Sequence: Synthetic oligonucleotide
  Antisense strand to SEQ ID NO: 674908
ugaacacaacauaacgaac

SEQ ID NO: 674910 - RNA, 19 nt, Artificial Sequence
  Description of Artificial Sequence: Synthetic oligonucleotide
  Sense strand starting at position 1086 of SEQ ID NO: 585880
ugcauaaaccauuggauua

SEQ ID NO: 674911 - RNA, 19 nt, Artificial Sequence
  Description of Artificial Sequence: Synthetic oligonucleotide
  Antisense strand to SEQ ID NO: 674910
uaauccaaugguuuaugca

SEQ ID NO: 674912 - RNA, 19 nt, Artificial Sequence
  Description of Artificial Sequence: Synthetic oligonucleotide
  Sense strand starting at position 1178 of SEQ ID NO: 585880
gguccaugacuguacagau

SEQ ID NO: 674913 - RNA, 19 nt, Artificial Sequence
  Description of Artificial Sequence: Synthetic oligonucleotide
  Antisense strand to SEQ ID NO: 674912
aucuguacagucauggacc

SEQ ID NO: 674914 - RNA, 19 nt, Artificial Sequence
  Description of Artificial Sequence: Synthetic oligonucleotide
  Sense strand starting at position 1313 of SEQ ID NO: 585880
ucugauuggcaucacuaau

SEQ ID NO: 674915 - RNA, 19 nt, Artificial Sequence
  Description of Artificial Sequence: Synthetic oligonucleotide
  Antisense strand to SEQ ID NO: 674914
auuagugaugccaaucaga

SEQ ID NO: 674916 - RNA, 19 nt, Artificial Sequence
  Description of Artificial Sequence: Synthetic oligonucleotide
  Sense strand starting at position 1343 of SEQ ID NO: 585880
guucuuuagcgauaagaua

SEQ ID NO: 674917 - RNA, 19 nt, Artificial Sequence
  Description of Artificial Sequence: Synthetic oligonucleotide
  Antisense strand to SEQ ID NO: 674916
uaucuuaucgcuaaagaac

SEQ ID NO: 674918 - RNA, 19 nt, Artificial Sequence
  Description of Artificial Sequence: Synthetic oligonucleotide
  Sense strand starting at position 1407 of SEQ ID NO: 585880
agaagucauaaaggucagu

SEQ ID NO: 674919 - RNA, 19 nt, Artificial Sequence
  Description of Artificial Sequence: Synthetic oligonucleotide
  Antisense strand to SEQ ID NO: 674918
acugaccuuuaugacuucu

SEQ ID NO: 674920 - RNA, 19 nt, Artificial Sequence
  Description of Artificial Sequence: Synthetic oligonucleotide
  Sense strand starting at position 1508 of SEQ ID NO: 585880
aguuuagcuccagaaagau

SEQ ID NO: 674921 - RNA, 19 nt, Artificial Sequence
  Description of Artificial Sequence: Synthetic oligonucleotide
  Antisense strand to SEQ ID NO: 674920
aucuuucuggagcuaaacu

SEQ ID NO: 674922 - RNA, 19 nt, Artificial Sequence
  Description of Artificial Sequence: Synthetic oligonucleotide
  Sense strand starting at position 1604 of SEQ ID NO: 585880
cuuuauaucucaguggauc

SEQ ID NO: 674923 - RNA, 19 nt, Artificial Sequence
  Description of Artificial Sequence: Synthetic oligonucleotide
  Antisense strand to SEQ ID NO: 674922
gauccacugagauauaaag

SEQ ID NO: 674924 - RNA, 19 nt, Artificial Sequence
  Description of Artificial Sequence: Synthetic oligonucleotide
  Sense strand starting at position 1605 of SEQ ID NO: 585880
uuuauaucucaguggauca

SEQ ID NO: 674925 - RNA, 19 nt, Artificial Sequence
  Description of Artificial Sequence: Synthetic oligonucleotide
  Antisense strand to SEQ ID NO: 674924
ugauccacugagauauaaa

SEQ ID NO: 674926 - RNA, 19 nt, Artificial Sequence
  Description of Artificial Sequence: Synthetic oligonucleotide
  Sense strand starting at position 1638 of SEQ ID NO: 585880
gcggucaauggagaugaaa

SEQ ID NO: 674927 - RNA, 19 nt, Artificial Sequence
  Description of Artificial Sequence: Synthetic oligonucleotide
  Antisense strand to SEQ ID NO: 674926
uuucaucuccauugaccgc

SEQ ID NO: 674928 - RNA, 19 nt, Artificial Sequence
  Description of Artificial Sequence: Synthetic oligonucleotide
  Sense strand starting at position 2006 of SEQ ID NO: 585880
agggcugucaaucaguuua

SEQ ID NO: 674929 - RNA, 19 nt, Artificial Sequence
  Description of Artificial Sequence: Synthetic oligonucleotide
  Antisense strand to SEQ ID NO: 674928
uaaacugauugacagcccu

SEQ ID NO: 674930 - RNA, 19 nt, Artificial Sequence
  Description of Artificial Sequence: Synthetic oligonucleotide
  Sense strand starting at position 2063 of SEQ ID NO: 585880
ccauaaucagguuacaguu

SEQ ID NO: 674931 - RNA, 19 nt, Artificial Sequence
  Description of Artificial Sequence: Synthetic oligonucleotide
  Antisense strand to SEQ ID NO: 674930
aacuguaaccugauuaugg

SEQ ID NO: 674932 - RNA, 19 nt, Artificial Sequence
  Description of Artificial Sequence: Synthetic oligonucleotide
  Sense strand starting at position 2144 of SEQ ID NO: 585880
agaguaaaucauuggcaau

SEQ ID NO: 674933 - RNA, 19 nt, Artificial Sequence
  Description of Artificial Sequence: Synthetic oligonucleotide
  Antisense strand to SEQ ID NO: 674932
auugccaaugauuuacucu

SEQ ID NO: 674934 - RNA, 19 nt, Artificial Sequence
  Description of Artificial Sequence: Synthetic oligonucleotide
  Sense strand starting at position 2192 of SEQ ID NO: 585880
cuauuacucucuguugaag

SEQ ID NO: 674935 - RNA, 19 nt, Artificial Sequence
  Description of Artificial Sequence: Synthetic oligonucleotide
  Antisense strand to SEQ ID NO: 674934
cuucaacagagaguaauag

SEQ ID NO: 674936 - RNA, 19 nt, Artificial Sequence
  Description of Artificial Sequence: Synthetic oligonucleotide
  Sense strand starting at position 2195 of SEQ ID NO: 585880
uuacucucuguugaagaau

SEQ ID NO: 674937 - RNA, 19 nt, Artificial Sequence
  Description of Artificial Sequence: Synthetic oligonucleotide
  Antisense strand to SEQ ID NO: 674936
auucuucaacagagaguaa

SEQ ID NO: 674938 - RNA, 19 nt, Artificial Sequence
  Description of Artificial Sequence: Synthetic oligonucleotide
  Sense strand starting at position 2198 of SEQ ID NO: 585880
cucucuguugaagaauagu

SEQ ID NO: 674939 - RNA, 19 nt, Artificial Sequence
  Description of Artificial Sequence: Synthetic oligonucleotide
  Antisense strand to SEQ ID NO: 674938
acuauucuucaacagagag

SEQ ID NO: 674940 - RNA, 19 nt, Artificial Sequence
  Description of Artificial Sequence: Synthetic oligonucleotide
  Sense strand starting at position 2201 of SEQ ID NO: 585880
ucuguugaagaauaguuau

SEQ ID NO: 674941 - RNA, 19 nt, Artificial Sequence
  Description of Artificial Sequence: Synthetic oligonucleotide
  Antisense strand to SEQ ID NO: 674940
auaacuauucuucaacaga

SEQ ID NO: 674942 - RNA, 19 nt, Artificial Sequence
  Description of Artificial Sequence: Synthetic oligonucleotide
  Sense strand starting at position 2293 of SEQ ID NO: 585880
gcuggacauucuucuagaa

SEQ ID NO: 674943 - RNA, 19 nt, Artificial Sequence
  Description of Artificial Sequence: Synthetic oligonucleotide
  Antisense strand to SEQ ID NO: 674942
uucuagaagaauguccagc

SEQ ID NO: 674944 - RNA, 19 nt, Artificial Sequence
  Description of Artificial Sequence: Synthetic oligonucleotide
  Sense strand starting at position 2320 of SEQ ID NO: 585880
cuaaauuauuagguugaac

SEQ ID NO: 674945 - RNA, 19 nt, Artificial Sequence
  Description of Artificial Sequence: Synthetic oligonucleotide
  Antisense strand to SEQ ID NO: 674944
guucaaccuaauaauuuag

SEQ ID NO: 674946 - RNA, 19 nt, Artificial Sequence
  Description of Artificial Sequence: Synthetic oligonucleotide
  Sense strand starting at position 2355 of SEQ ID NO: 585880
auuuguaggucagagaaga

SEQ ID NO: 674947 - RNA, 19 nt, Artificial Sequence
  Description of Artificial Sequence: Synthetic oligonucleotide
  Antisense strand to SEQ ID NO: 674946
ucuucucugaccuacaaau

SEQ ID NO: 674948 - RNA, 19 nt, Artificial Sequence
  Description of Artificial Sequence: Synthetic oligonucleotide
  Sense strand starting at position 2413 of SEQ ID NO: 585880
acaaucuguguccauagga

SEQ ID NO: 674949 - RNA, 19 nt, Artificial Sequence
  Description of Artificial Sequence: Synthetic oligonucleotide
  Antisense strand to SEQ ID NO: 674948
uccuauggacacagauugu

SEQ ID NO: 674950 - RNA, 19 nt, Artificial Sequence
  Description of Artificial Sequence: Synthetic oligonucleotide
  Sense strand starting at position 2453 of SEQ ID NO: 585880
uuacauuguaaaggguaga

SEQ ID NO: 674951 - RNA, 19 nt, Artificial Sequence
  Description of Artificial Sequence: Synthetic oligonucleotide
  Antisense strand to SEQ ID NO: 674950
ucuacccuuuacaauguaa

SEQ ID NO: 674952 - RNA, 19 nt, Artificial Sequence
  Description of Artificial Sequence: Synthetic oligonucleotide
  Sense strand starting at position 2467 of SEQ ID NO: 585880
guagaaagaaauugccaga

SEQ ID NO: 674953 - RNA, 19 nt, Artificial Sequence
  Description of Artificial Sequence: Synthetic oligonucleotide
  Antisense strand to SEQ ID NO: 674952
ucuggcaauuucuuucuac

SEQ ID NO: 674954 - RNA, 19 nt, Artificial Sequence
  Description of Artificial Sequence: Synthetic oligonucleotide
  Sense strand starting at position 2780 of SEQ ID NO: 585880
cuggcaagaaauugaaguu

SEQ ID NO: 674955 - RNA, 19 nt, Artificial Sequence
  Description of Artificial Sequence: Synthetic oligonucleotide
  Antisense strand to SEQ ID NO: 674954
aacuucaauuucuugccag

SEQ ID NO: 674956 - RNA, 19 nt, Artificial Sequence
  Description of Artificial Sequence: Synthetic oligonucleotide
  Sense strand starting at position 2860 of SEQ ID NO: 585880
uugauaucaguccagucuu

SEQ ID NO: 674957 - RNA, 19 nt, Artificial Sequence
  Description of Artificial Sequence: Synthetic oligonucleotide
  Antisense strand to SEQ ID NO: 674956
aagacuggacugauaucaa

SEQ ID NO: 674958 - RNA, 19 nt, Artificial Sequence
  Description of Artificial Sequence: Synthetic oligonucleotide
  Sense strand starting at position 3029 of SEQ ID NO: 585880
gacuaaagucuaugguaag

SEQ ID NO: 674959 - RNA, 19 nt, Artificial Sequence
  Description of Artificial Sequence: Synthetic oligonucleotide
  Antisense strand to SEQ ID NO: 674958
cuuaccauagacuuuaguc

SEQ ID NO: 674960 - RNA, 19 nt, Artificial Sequence
  Description of Artificial Sequence: Synthetic oligonucleotide
  Sense strand starting at position 3192 of SEQ ID NO: 585880
aaauuauuaugaguaggca

SEQ ID NO: 674961 - RNA, 19 nt, Artificial Sequence
  Description of Artificial Sequence: Synthetic oligonucleotide
  Antisense strand to SEQ ID NO: 674960
ugccuacucauaauaauuu

SEQ ID NO: 674962 - RNA, 19 nt, Artificial Sequence
  Description of Artificial Sequence: Synthetic oligonucleotide
  Sense strand starting at position 3193 of SEQ ID NO: 585880
aauuauuaugaguaggcau

SEQ ID NO: 674963 - RNA, 19 nt, Artificial Sequence
  Description of Artificial Sequence: Synthetic oligonucleotide
  Antisense strand to SEQ ID NO: 674962
augccuacucauaauaauu

SEQ ID NO: 674964 - RNA, 19 nt, Artificial Sequence
  Description of Artificial Sequence: Synthetic oligonucleotide
  Sense strand starting at position 3323 of SEQ ID NO: 585880
auucuagaacuuggacuua

SEQ ID NO: 674965 - RNA, 19 nt, Artificial Sequence
  Description of Artificial Sequence: Synthetic oligonucleotide
  Antisense strand to SEQ ID NO: 674964
uaaguccaaguucuagaau

SEQ ID NO: 674966 - RNA, 19 nt, Artificial Sequence
  Description of Artificial Sequence: Synthetic oligonucleotide
  Sense strand starting at position 3735 of SEQ ID NO: 585880
acaaauuucuggcaaugaa

SEQ ID NO: 674967 - RNA, 19 nt, Artificial Sequence
  Description of Artificial Sequence: Synthetic oligonucleotide
  Antisense strand to SEQ ID NO: 674966
uucauugccagaaauuugu

SEQ ID NO: 674968 - RNA, 19 nt, Artificial Sequence
  Description of Artificial Sequence: Synthetic oligonucleotide
  Sense strand starting at position 3753 of SEQ ID NO: 585880
aguccuauagucuaucacu

SEQ ID NO: 674969 - RNA, 19 nt, Artificial Sequence
  Description of Artificial Sequence: Synthetic oligonucleotide
  Antisense strand to SEQ ID NO: 674968
agugauagacuauaggacu

SEQ ID NO: 674970 - RNA, 19 nt, Artificial Sequence
  Description of Artificial Sequence: Synthetic oligonucleotide
  Sense strand starting at position 3880 of SEQ ID NO: 585880
augcaauaucuagguauga

SEQ ID NO: 674971 - RNA, 19 nt, Artificial Sequence
  Description of Artificial Sequence: Synthetic oligonucleotide
  Antisense strand to SEQ ID NO: 674970
ucauaccuagauauugcau

SEQ ID NO: 674972 - RNA, 19 nt, Artificial Sequence
  Description of Artificial Sequence: Synthetic oligonucleotide
  Sense strand starting at position 3881 of SEQ ID NO: 585880
ugcaauaucuagguaugaa

SEQ ID NO: 674973 - RNA, 19 nt, Artificial Sequence
  Description of Artificial Sequence: Synthetic oligonucleotide
  Antisense strand to SEQ ID NO: 674972
uucauaccuagauauugca

SEQ ID NO: 674974 - RNA, 19 nt, Artificial Sequence
  Description of Artificial Sequence: Synthetic oligonucleotide
  Sense strand starting at position 3947 of SEQ ID NO: 585880
ggucuucuauucccagaag

SEQ ID NO: 674975 - RNA, 19 nt, Artificial Sequence
  Description of Artificial Sequence: Synthetic oligonucleotide
  Antisense strand to SEQ ID NO: 674974
cuucugggaauagaagacc

SEQ ID NO: 674976 - RNA, 19 nt, Artificial Sequence
  Description of Artificial Sequence: Synthetic oligonucleotide
  Sense strand starting at position 692 of SEQ ID NO: 585881
uaugaauaggcuuagcgua

SEQ ID NO: 674977 - RNA, 19 nt, Artificial Sequence
  Description of Artificial Sequence: Synthetic oligonucleotide
  Antisense strand to SEQ ID NO: 674976
uacgcuaagccuauucaua

SEQ ID NO: 674978 - RNA, 19 nt, Artificial Sequence
  Description of Artificial Sequence: Synthetic oligonucleotide
  Sense strand starting at position 877 of SEQ ID NO: 585881
aggccagguaacugucaau

SEQ ID NO: 674979 - RNA, 19 nt, Artificial Sequence
  Description of Artificial Sequence: Synthetic oligonucleotide
  Antisense strand to SEQ ID NO: 674978
auugacaguuaccuggccu

SEQ ID NO: 674980 - RNA, 19 nt, Artificial Sequence
  Description of Artificial Sequence: Synthetic oligonucleotide
  Sense strand starting at position 883 of SEQ ID NO: 585881
gguaacugucaauacuuaa

SEQ ID NO: 674981 - RNA, 19 nt, Artificial Sequence
  Description of Artificial Sequence: Synthetic oligonucleotide
  Antisense strand to SEQ ID NO: 674980
uuaaguauugacaguuacc

SEQ ID NO: 674982 - RNA, 19 nt, Artificial Sequence
  Description of Artificial Sequence: Synthetic oligonucleotide
  Sense strand starting at position 921 of SEQ ID NO: 585881
uaguuaagacagugauaga

SEQ ID NO: 674983 - RNA, 19 nt, Artificial Sequence
  Description of Artificial Sequence: Synthetic oligonucleotide
  Antisense strand to SEQ ID NO: 674982
ucuaucacugucuuaacua

SEQ ID NO: 674984 - RNA, 19 nt, Artificial Sequence
  Description of Artificial Sequence: Synthetic oligonucleotide
  Sense strand starting at position 997 of SEQ ID NO: 585881
ccaggaaacuuguuacacu

SEQ ID NO: 674985 - RNA, 19 nt, Artificial Sequence
  Description of Artificial Sequence: Synthetic oligonucleotide
  Antisense strand to SEQ ID NO: 674984
aguguaacaaguuuccugg

SEQ ID NO: 674986 - RNA, 19 nt, Artificial Sequence
  Description of Artificial Sequence: Synthetic oligonucleotide
  Sense strand starting at position 1177 of SEQ ID NO: 585881
cggcauuaucaggauggca

SEQ ID NO: 674987 - RNA, 19 nt, Artificial Sequence
  Description of Artificial Sequence: Synthetic oligonucleotide
  Antisense strand to SEQ ID NO: 674986
ugccauccugauaaugccg

SEQ ID NO: 674988 - RNA, 19 nt, Artificial Sequence
  Description of Artificial Sequence: Synthetic oligonucleotide
  Sense strand starting at position 1179 of SEQ ID NO: 585881
gcauuaucaggauggcaau

SEQ ID NO: 674989 - RNA, 19 nt, Artificial Sequence
  Description of Artificial Sequence: Synthetic oligonucleotide
  Antisense strand to SEQ ID NO: 674988
auugccauccugauaaugc

SEQ ID NO: 674990 - RNA, 19 nt, Artificial Sequence
  Description of Artificial Sequence: Synthetic oligonucleotide
  Sense strand starting at position 1263 of SEQ ID NO: 585881
cacauaccggcagaagauu

SEQ ID NO: 674991 - RNA, 19 nt, Artificial Sequence
  Description of Artificial Sequence: Synthetic oligonucleotide
  Antisense strand to SEQ ID NO: 674990
aaucuucugccgguaugug

SEQ ID NO: 674992 - RNA, 19 nt, Artificial Sequence
  Description of Artificial Sequence: Synthetic oligonucleotide
  Sense strand starting at position 1274 of SEQ ID NO: 585881
agaagauuccauuguuaac

SEQ ID NO: 674993 - RNA, 19 nt, Artificial Sequence
  Description of Artificial Sequence: Synthetic oligonucleotide
  Antisense strand to SEQ ID NO: 674992
guuaacaauggaaucuucu

SEQ ID NO: 674994 - RNA, 19 nt, Artificial Sequence
  Description of Artificial Sequence: Synthetic oligonucleotide
  Sense strand starting at position 1284 of SEQ ID NO: 585881
auuguuaacuccuuaccga

SEQ ID NO: 674995 - RNA, 19 nt, Artificial Sequence
  Description of Artificial Sequence: Synthetic oligonucleotide
  Antisense strand to SEQ ID NO: 674994
ucgguaaggaguuaacaau

SEQ ID NO: 674996 - RNA, 19 nt, Artificial Sequence
  Description of Artificial Sequence: Synthetic oligonucleotide
  Sense strand starting at position 1285 of SEQ ID NO: 585881
uuguuaacuccuuaccgaa

SEQ ID NO: 674997 - RNA, 19 nt, Artificial Sequence
  Description of Artificial Sequence: Synthetic oligonucleotide
  Antisense strand to SEQ ID NO: 674996
uucgguaaggaguuaacaa

SEQ ID NO: 674998 - RNA, 19 nt, Artificial Sequence
  Description of Artificial Sequence: Synthetic oligonucleotide
  Sense strand starting at position 1336 of SEQ ID NO: 585881
uguuaauguguauauggaa

SEQ ID NO: 674999 - RNA, 19 nt, Artificial Sequence
  Description of Artificial Sequence: Synthetic oligonucleotide
  Antisense strand to SEQ ID NO: 674998
uuccauauacacauuaaca

SEQ ID NO: 675000 - RNA, 19 nt, Artificial Sequence
  Description of Artificial Sequence: Synthetic oligonucleotide
  Sense strand starting at position 1360 of SEQ ID NO: 585881
agaccuaaacuaugugagu

SEQ ID NO: 675001 - RNA, 19 nt, Artificial Sequence
  Description of Artificial Sequence: Synthetic oligonucleotide
  Antisense strand to SEQ ID NO: 675000
acucacauaguuuaggucu

SEQ ID NO: 675002 - RNA, 19 nt, Artificial Sequence
  Description of Artificial Sequence: Synthetic oligonucleotide
  Sense strand starting at position 1361 of SEQ ID NO: 585881
gaccuaaacuaugugaguu

SEQ ID NO: 675003 - RNA, 19 nt, Artificial Sequence
  Description of Artificial Sequence: Synthetic oligonucleotide
  Antisense strand to SEQ ID NO: 675002
aacucacauaguuuagguc

SEQ ID NO: 675004 - RNA, 19 nt, Artificial Sequence
  Description of Artificial Sequence: Synthetic oligonucleotide
  Sense strand starting at position 1373 of SEQ ID NO: 585881
gugaguugugcugauuuau

SEQ ID NO: 675005 - RNA, 19 nt, Artificial Sequence
  Description of Artificial Sequence: Synthetic oligonucleotide
  Antisense strand to SEQ ID NO: 675004
auaaaucagcacaacucac

SEQ ID NO: 675006 - RNA, 19 nt, Artificial Sequence
  Description of Artificial Sequence: Synthetic oligonucleotide
  Sense strand starting at position 1394 of SEQ ID NO: 585881
cuuaacaauucgucuuaag

SEQ ID NO: 675007 - RNA, 19 nt, Artificial Sequence
  Description of Artificial Sequence: Synthetic oligonucleotide
  Antisense strand to SEQ ID NO: 675006
cuuaagacgaauuguuaag

SEQ ID NO: 675008 - RNA, 19 nt, Artificial Sequence
  Description of Artificial Sequence: Synthetic oligonucleotide
  Sense strand starting at position 1477 of SEQ ID NO: 585881
acagcucaaugagcuuaaa

SEQ ID NO: 675009 - RNA, 19 nt, Artificial Sequence
  Description of Artificial Sequence: Synthetic oligonucleotide
  Antisense strand to SEQ ID NO: 675008
uuuaagcucauugagcugu

SEQ ID NO: 675010 - RNA, 19 nt, Artificial Sequence
  Description of Artificial Sequence: Synthetic oligonucleotide
  Sense strand starting at position 1480 of SEQ ID NO: 585881
gcucaaugagcuuaaacca

SEQ ID NO: 675011 - RNA, 19 nt, Artificial Sequence
  Description of Artificial Sequence: Synthetic oligonucleotide
  Antisense strand to SEQ ID NO: 675010
ugguuuaagcucauugagc

SEQ ID NO: 675012 - RNA, 19 nt, Artificial Sequence
  Description of Artificial Sequence: Synthetic oligonucleotide
  Sense strand starting at position 1515 of SEQ ID NO: 585881
ggagucucugcuuaccuaa

SEQ ID NO: 675013 - RNA, 19 nt, Artificial Sequence
  Description of Artificial Sequence: Synthetic oligonucleotide
  Antisense strand to SEQ ID NO: 675012
uuagguaagcagagacucc

SEQ ID NO: 675014 - RNA, 19 nt, Artificial Sequence
  Description of Artificial Sequence: Synthetic oligonucleotide
  Sense strand starting at position 1574 of SEQ ID NO: 585881
uuacauaaaggcugugaaa

SEQ ID NO: 675015 - RNA, 19 nt, Artificial Sequence
  Description of Artificial Sequence: Synthetic oligonucleotide
  Antisense strand to SEQ ID NO: 675014
uuucacagccuuuauguaa

SEQ ID NO: 675016 - RNA, 19 nt, Artificial Sequence
  Description of Artificial Sequence: Synthetic oligonucleotide
  Sense strand starting at position 1597 of SEQ ID NO: 585881
aucugagcccuugaguuau

SEQ ID NO: 675017 - RNA, 19 nt, Artificial Sequence
  Description of Artificial Sequence: Synthetic oligonucleotide
  Antisense strand to SEQ ID NO: 675016
auaacucaagggcucagau

SEQ ID NO: 675018 - RNA, 19 nt, Artificial Sequence
  Description of Artificial Sequence: Synthetic oligonucleotide
  Sense strand starting at position 1898 of SEQ ID NO: 585881
agaugcuacugguuuaaac

SEQ ID NO: 675019 - RNA, 19 nt, Artificial Sequence
  Description of Artificial Sequence: Synthetic oligonucleotide
  Antisense strand to SEQ ID NO: 675018
guuuaaaccaguagcaucu

SEQ ID NO: 675020 - RNA, 19 nt, Artificial Sequence
  Description of Artificial Sequence: Synthetic oligonucleotide
  Sense strand starting at position 1900 of SEQ ID NO: 585881
augcuacugguuuaaacuu

SEQ ID NO: 675021 - RNA, 19 nt, Artificial Sequence
  Description of Artificial Sequence: Synthetic oligonucleotide
  Antisense strand to SEQ ID NO: 675020
aaguuuaaaccaguagcau

SEQ ID NO: 675022 - RNA, 19 nt, Artificial Sequence
  Description of Artificial Sequence: Synthetic oligonucleotide
  Sense strand starting at position 1908 of SEQ ID NO: 585881
gguuuaaacuuagucauau

SEQ ID NO: 675023 - RNA, 19 nt, Artificial Sequence
  Description of Artificial Sequence: Synthetic oligonucleotide
  Antisense strand to SEQ ID NO: 675022
auaugacuaaguuuaaacc

SEQ ID NO: 675024 - RNA, 19 nt, Artificial Sequence
  Description of Artificial Sequence: Synthetic oligonucleotide
  Sense strand starting at position 1909 of SEQ ID NO: 585881
guuuaaacuuagucauaug

SEQ ID NO: 675025 - RNA, 19 nt, Artificial Sequence
  Description of Artificial Sequence: Synthetic oligonucleotide
  Antisense strand to SEQ ID NO: 675024
cauaugacuaaguuuaaac

SEQ ID NO: 675026 - RNA, 19 nt, Artificial Sequence
  Description of Artificial Sequence: Synthetic oligonucleotide
  Sense strand starting at position 2091 of SEQ ID NO: 585881
gugugaucuccguuggcuc

SEQ ID NO: 675027 - RNA, 19 nt, Artificial Sequence
  Description of Artificial Sequence: Synthetic oligonucleotide
  Antisense strand to SEQ ID NO: 675026
gagccaacggagaucacac

SEQ ID NO: 675028 - RNA, 19 nt, Artificial Sequence
  Description of Artificial Sequence: Synthetic oligonucleotide
  Sense strand starting at position 2155 of SEQ ID NO: 585881
gaagcugagcuuugaagaa

SEQ ID NO: 675029 - RNA, 19 nt, Artificial Sequence
  Description of Artificial Sequence: Synthetic oligonucleotide
  Antisense strand to SEQ ID NO: 675028
uucuucaaagcucagcuuc

SEQ ID NO: 675030 - RNA, 19 nt, Artificial Sequence
  Description of Artificial Sequence: Synthetic oligonucleotide
  Sense strand starting at position 2159 of SEQ ID NO: 585881
cugagcuuugaagaaguca

SEQ ID NO: 675031 - RNA, 19 nt, Artificial Sequence
  Description of Artificial Sequence: Synthetic oligonucleotide
  Antisense strand to SEQ ID NO: 675030
ugacuucuucaaagcucag

SEQ ID NO: 675032 - RNA, 19 nt, Artificial Sequence
  Description of Artificial Sequence: Synthetic oligonucleotide
  Sense strand starting at position 2192 of SEQ ID NO: 585881
augcgaucucuugaaauuc

SEQ ID NO: 675033 - RNA, 19 nt, Artificial Sequence
  Description of Artificial Sequence: Synthetic oligonucleotide
  Antisense strand to SEQ ID NO: 675032
gaauuucaagagaucgcau

SEQ ID NO: 675034 - RNA, 19 nt, Artificial Sequence
  Description of Artificial Sequence: Synthetic oligonucleotide
  Sense strand starting at position 2249 of SEQ ID NO: 585881
uguacuggaccuugugaaa

SEQ ID NO: 675035 - RNA, 19 nt, Artificial Sequence
  Description of Artificial Sequence: Synthetic oligonucleotide
  Antisense strand to SEQ ID NO: 675034
uuucacaagguccaguaca

SEQ ID NO: 675036 - RNA, 19 nt, Artificial Sequence
  Description of Artificial Sequence: Synthetic oligonucleotide
  Sense strand starting at position 2473 of SEQ ID NO: 585881
guaguucuugaagaaguga

SEQ ID NO: 675037 - RNA, 19 nt, Artificial Sequence
  Description of Artificial Sequence: Synthetic oligonucleotide
  Antisense strand to SEQ ID NO: 675036
ucacuucuucaagaacuac

SEQ ID NO: 675038 - RNA, 19 nt, Artificial Sequence
  Description of Artificial Sequence: Synthetic oligonucleotide
  Sense strand starting at position 2704 of SEQ ID NO: 585881
uauuucuucugggagagac

SEQ ID NO: 675039 - RNA, 19 nt, Artificial Sequence
  Description of Artificial Sequence: Synthetic oligonucleotide
  Antisense strand to SEQ ID NO: 675038
gucucucccagaagaaaua

SEQ ID NO: 675040 - RNA, 19 nt, Artificial Sequence
  Description of Artificial Sequence: Synthetic oligonucleotide
  Sense strand starting at position 2735 of SEQ ID NO: 585881
uggacaaacuuucugguuu

SEQ ID NO: 675041 - RNA, 19 nt, Artificial Sequence
  Description of Artificial Sequence: Synthetic oligonucleotide
  Antisense strand to SEQ ID NO: 675040
aaaccagaaaguuugucca

SEQ ID NO: 675042 - RNA, 19 nt, Artificial Sequence
  Description of Artificial Sequence: Synthetic oligonucleotide
  Sense strand starting at position 2783 of SEQ ID NO: 585881
uaauuauguaggugggaga

SEQ ID NO: 675043 - RNA, 19 nt, Artificial Sequence
  Description of Artificial Sequence: Synthetic oligonucleotide
  Antisense strand to SEQ ID NO: 675042
ucucccaccuacauaauua

SEQ ID NO: 675044 - RNA, 19 nt, Artificial Sequence
  Description of Artificial Sequence: Synthetic oligonucleotide
  Sense strand starting at position 2872 of SEQ ID NO: 585881
gaaugagacuugucaaacc

SEQ ID NO: 675045 - RNA, 19 nt, Artificial Sequence
  Description of Artificial Sequence: Synthetic oligonucleotide
  Antisense strand to SEQ ID NO: 675044
gguuugacaagucucauuc

SEQ ID NO: 675046 - RNA, 19 nt, Artificial Sequence
  Description of Artificial Sequence: Synthetic oligonucleotide
  Sense strand starting at position 3421 of SEQ ID NO: 585881
guaugucacgaacauaagu

SEQ ID NO: 675047 - RNA, 19 nt, Artificial Sequence
  Description of Artificial Sequence: Synthetic oligonucleotide
  Antisense strand to SEQ ID NO: 675046
acuuauguucgugacauac

SEQ ID NO: 675048 - RNA, 19 nt, Artificial Sequence
  Description of Artificial Sequence: Synthetic oligonucleotide
  Sense strand starting at position 3515 of SEQ ID NO: 585881
ccuuauuuguuuguuucua

SEQ ID NO: 675049 - RNA, 19 nt, Artificial Sequence
  Description of Artificial Sequence: Synthetic oligonucleotide
  Antisense strand to SEQ ID NO: 675048
uagaaacaaacaaauaagg

SEQ ID NO: 675050 - RNA, 19 nt, Artificial Sequence
  Description of Artificial Sequence: Synthetic oligonucleotide
  Sense strand starting at position 3667 of SEQ ID NO: 585881
uugugccauguguauuuau

SEQ ID NO: 675051 - RNA, 19 nt, Artificial Sequence
  Description of Artificial Sequence: Synthetic oligonucleotide
  Antisense strand to SEQ ID NO: 675050
auaaauacacauggcacaa

SEQ ID NO: 675052 - RNA, 19 nt, Artificial Sequence
  Description of Artificial Sequence: Synthetic oligonucleotide
  Sense strand starting at position 3670 of SEQ ID NO: 585881
ugccauguguauuuauaua

SEQ ID NO: 675053 - RNA, 19 nt, Artificial Sequence
  Description of Artificial Sequence: Synthetic oligonucleotide
  Antisense strand to SEQ ID NO: 675052
uauauaaauacacauggca

SEQ ID NO: 675054 - RNA, 19 nt, Artificial Sequence
  Description of Artificial Sequence: Synthetic oligonucleotide
  Sense strand starting at position 3809 of SEQ ID NO: 585881
acuguauaugcauagaucu

SEQ ID NO: 675055 - RNA, 19 nt, Artificial Sequence
  Description of Artificial Sequence: Synthetic oligonucleotide
  Antisense strand to SEQ ID NO: 675054
agaucuaugcauauacagu

SEQ ID NO: 675056 - RNA, 19 nt, Artificial Sequence
  Description of Artificial Sequence: Synthetic oligonucleotide
  Sense strand starting at position 79 of SEQ ID NO: 585882
acaaauuaggacuguucuu

SEQ ID NO: 675057 - RNA, 19 nt, Artificial Sequence
  Description of Artificial Sequence: Synthetic oligonucleotide
  Antisense strand to SEQ ID NO: 675056
aagaacaguccuaauuugu

SEQ ID NO: 675058 - RNA, 19 nt, Artificial Sequence
  Description of Artificial Sequence: Synthetic oligonucleotide
  Sense strand starting at position 107 of SEQ ID NO: 585882
caguguugagcuuaaacca

SEQ ID NO: 675059 - RNA, 19 nt, Artificial Sequence
  Description of Artificial Sequence: Synthetic oligonucleotide
  Antisense strand to SEQ ID NO: 675058
ugguuuaagcucaacacug

SEQ ID NO: 675060 - RNA, 19 nt, Artificial Sequence
  Description of Artificial Sequence: Synthetic oligonucleotide
  Sense strand starting at position 137 of SEQ ID NO: 585882
gucacagcccaucaguuau

SEQ ID NO: 675061 - RNA, 19 nt, Artificial Sequence
  Description of Artificial Sequence: Synthetic oligonucleotide
  Antisense strand to SEQ ID NO: 675060
auaacugaugggcugugac

SEQ ID NO: 675062 - RNA, 19 nt, Artificial Sequence
  Description of Artificial Sequence: Synthetic oligonucleotide
  Sense strand starting at position 143 of SEQ ID NO: 585882
gcccaucaguuauuaauga

SEQ ID NO: 675063 - RNA, 19 nt, Artificial Sequence
  Description of Artificial Sequence: Synthetic oligonucleotide
  Antisense strand to SEQ ID NO: 675062
ucauuaauaacugaugggc

SEQ ID NO: 675064 - RNA, 19 nt, Artificial Sequence
  Description of Artificial Sequence: Synthetic oligonucleotide
  Sense strand starting at position 150 of SEQ ID NO: 585882
aguuauuaaugagucucaa

SEQ ID NO: 675065 - RNA, 19 nt, Artificial Sequence
  Description of Artificial Sequence: Synthetic oligonucleotide
  Antisense strand to SEQ ID NO: 675064
uugagacucauuaauaacu

SEQ ID NO: 675066 - RNA, 19 nt, Artificial Sequence
  Description of Artificial Sequence: Synthetic oligonucleotide
  Sense strand starting at position 276 of SEQ ID NO: 585882
uuuaguagauauuccacau

SEQ ID NO: 675067 - RNA, 19 nt, Artificial Sequence
  Description of Artificial Sequence: Synthetic oligonucleotide
  Antisense strand to SEQ ID NO: 675066
auguggaauaucuacuaaa

SEQ ID NO: 675068 - RNA, 19 nt, Artificial Sequence
  Description of Artificial Sequence: Synthetic oligonucleotide
  Sense strand starting at position 369 of SEQ ID NO: 585882
agaguucuacuguauguaa

SEQ ID NO: 675069 - RNA, 19 nt, Artificial Sequence
  Description of Artificial Sequence: Synthetic oligonucleotide
  Antisense strand to SEQ ID NO: 675068
uuacauacaguagaacucu

SEQ ID NO: 675070 - RNA, 19 nt, Artificial Sequence
  Description of Artificial Sequence: Synthetic oligonucleotide
  Sense strand starting at position 380 of SEQ ID NO: 585882
guauguaacaugggaacua

SEQ ID NO: 675071 - RNA, 19 nt, Artificial Sequence
  Description of Artificial Sequence: Synthetic oligonucleotide
  Antisense strand to SEQ ID NO: 675070
uaguucccauguuacauac

SEQ ID NO: 675072 - RNA, 19 nt, Artificial Sequence
  Description of Artificial Sequence: Synthetic oligonucleotide
  Sense strand starting at position 520 of SEQ ID NO: 585882
cuaguaaaggcuuaacucu

SEQ ID NO: 675073 - RNA, 19 nt, Artificial Sequence
  Description of Artificial Sequence: Synthetic oligonucleotide
  Antisense strand to SEQ ID NO: 675072
agaguuaagccuuuacuag

SEQ ID NO: 675074 - RNA, 19 nt, Artificial Sequence
  Description of Artificial Sequence: Synthetic oligonucleotide
  Sense strand starting at position 559 of SEQ ID NO: 585882
ccuggaagaauaugaguuu

SEQ ID NO: 675075 - RNA, 19 nt, Artificial Sequence
  Description of Artificial Sequence: Synthetic oligonucleotide
  Antisense strand to SEQ ID NO: 675074
aaacucauauucuuccagg

SEQ ID NO: 675076 - RNA, 19 nt, Artificial Sequence
  Description of Artificial Sequence: Synthetic oligonucleotide
  Sense strand starting at position 837 of SEQ ID NO: 585882
uucucucuaccaggaagua

SEQ ID NO: 675077 - RNA, 19 nt, Artificial Sequence
  Description of Artificial Sequence: Synthetic oligonucleotide
  Antisense strand to SEQ ID NO: 675076
uacuuccugguagagagaa

SEQ ID NO: 675078 - RNA, 19 nt, Artificial Sequence
  Description of Artificial Sequence: Synthetic oligonucleotide
  Sense strand starting at position 887 of SEQ ID NO: 585882
gagggauucuuggcucaaa

SEQ ID NO: 675079 - RNA, 19 nt, Artificial Sequence
  Description of Artificial Sequence: Synthetic oligonucleotide
  Antisense strand to SEQ ID NO: 675078
uuugagccaagaaucccuc

SEQ ID NO: 675080 - RNA, 19 nt, Artificial Sequence
  Description of Artificial Sequence: Synthetic oligonucleotide
  Sense strand starting at position 888 of SEQ ID NO: 585882
agggauucuuggcucaaag

SEQ ID NO: 675081 - RNA, 19 nt, Artificial Sequence
  Description of Artificial Sequence: Synthetic oligonucleotide
  Antisense strand to SEQ ID NO: 675080
cuuugagccaagaaucccu

SEQ ID NO: 675082 - RNA, 19 nt, Artificial Sequence
  Description of Artificial Sequence: Synthetic oligonucleotide
  Sense strand starting at position 1142 of SEQ ID NO: 585882
cugcgaaaccagggauaga

SEQ ID NO: 675083 - RNA, 19 nt, Artificial Sequence
  Description of Artificial Sequence: Synthetic oligonucleotide
  Antisense strand to SEQ ID NO: 675082
ucuaucccugguuucgcag

SEQ ID NO: 675084 - RNA, 19 nt, Artificial Sequence
  Description of Artificial Sequence: Synthetic oligonucleotide
  Sense strand starting at position 1170 of SEQ ID NO: 585882
auauuaacggauuacaugu

SEQ ID NO: 675085 - RNA, 19 nt, Artificial Sequence
  Description of Artificial Sequence: Synthetic oligonucleotide
  Antisense strand to SEQ ID NO: 675084
acauguaauccguuaauau

SEQ ID NO: 675086 - RNA, 19 nt, Artificial Sequence
  Description of Artificial Sequence: Synthetic oligonucleotide
  Sense strand starting at position 1176 of SEQ ID NO: 585882
acggauuacauguggaguu

SEQ ID NO: 675087 - RNA, 19 nt, Artificial Sequence
  Description of Artificial Sequence: Synthetic oligonucleotide
  Antisense strand to SEQ ID NO: 675086
aacuccacauguaauccgu

SEQ ID NO: 675088 - RNA, 19 nt, Artificial Sequence
  Description of Artificial Sequence: Synthetic oligonucleotide
  Sense strand starting at position 1375 of SEQ ID NO: 585882
caaguuauugauggcauga

SEQ ID NO: 675089 - RNA, 19 nt, Artificial Sequence
  Description of Artificial Sequence: Synthetic oligonucleotide
  Antisense strand to SEQ ID NO: 675088
ucaugccaucaauaacuug

SEQ ID NO: 675090 - RNA, 19 nt, Artificial Sequence
  Description of Artificial Sequence: Synthetic oligonucleotide
  Sense strand starting at position 1537 of SEQ ID NO: 585882
gucauagcccucuauucca

SEQ ID NO: 675091 - RNA, 19 nt, Artificial Sequence
  Description of Artificial Sequence: Synthetic oligonucleotide
  Antisense strand to SEQ ID NO: 675090
uggaauagagggcuaugac

SEQ ID NO: 675092 - RNA, 19 nt, Artificial Sequence
  Description of Artificial Sequence: Synthetic oligonucleotide
  Sense strand starting at position 1558 of SEQ ID NO: 585882
ugcauaggccucugagaag

SEQ ID NO: 675093 - RNA, 19 nt, Artificial Sequence
  Description of Artificial Sequence: Synthetic oligonucleotide
  Antisense strand to SEQ ID NO: 675092
cuucucagaggccuaugca

SEQ ID NO: 675094 - RNA, 19 nt, Artificial Sequence
  Description of Artificial Sequence: Synthetic oligonucleotide
  Sense strand starting at position 1892 of SEQ ID NO: 585882
agcugcuugaaguaggaaa

SEQ ID NO: 675095 - RNA, 19 nt, Artificial Sequence
  Description of Artificial Sequence: Synthetic oligonucleotide
  Antisense strand to SEQ ID NO: 675094
uuuccuacuucaagcagcu

SEQ ID NO: 675096 - RNA, 19 nt, Artificial Sequence
  Description of Artificial Sequence: Synthetic oligonucleotide
  Sense strand starting at position 1922 of SEQ ID NO: 585882
auggcaagauugccaaaua

SEQ ID NO: 675097 - RNA, 19 nt, Artificial Sequence
  Description of Artificial Sequence: Synthetic oligonucleotide
  Antisense strand to SEQ ID NO: 675096
uauuuggcaaucuugccau

SEQ ID NO: 675098 - RNA, 19 nt, Artificial Sequence
  Description of Artificial Sequence: Synthetic oligonucleotide
  Sense strand starting at position 2168 of SEQ ID NO: 585882
gcuguaauauuacucauga

SEQ ID NO: 675099 - RNA, 19 nt, Artificial Sequence
  Description of Artificial Sequence: Synthetic oligonucleotide
  Antisense strand to SEQ ID NO: 675098
ucaugaguaauauuacagc

SEQ ID NO: 675100 - RNA, 19 nt, Artificial Sequence
  Description of Artificial Sequence: Synthetic oligonucleotide
  Sense strand starting at position 2227 of SEQ ID NO: 585882
guagaauuguaaccuaauu

SEQ ID NO: 675101 - RNA, 19 nt, Artificial Sequence
  Description of Artificial Sequence: Synthetic oligonucleotide
  Antisense strand to SEQ ID NO: 675100
aauuagguuacaauucuac

SEQ ID NO: 675102 - RNA, 19 nt, Artificial Sequence
  Description of Artificial Sequence: Synthetic oligonucleotide
  Sense strand starting at position 2235 of SEQ ID NO: 585882
guaaccuaauuggcuuaaa

SEQ ID NO: 675103 - RNA, 19 nt, Artificial Sequence
  Description of Artificial Sequence: Synthetic oligonucleotide
  Antisense strand to SEQ ID NO: 675102
uuuaagccaauuagguuac

SEQ ID NO: 675104 - RNA, 19 nt, Artificial Sequence
  Description of Artificial Sequence: Synthetic oligonucleotide
  Sense strand starting at position 2651 of SEQ ID NO: 585882
acaaauuauugagcuguau

SEQ ID NO: 675105 - RNA, 19 nt, Artificial Sequence
  Description of Artificial Sequence: Synthetic oligonucleotide
  Antisense strand to SEQ ID NO: 675104
auacagcucaauaauuugu

SEQ ID NO: 675106 - RNA, 19 nt, Artificial Sequence
  Description of Artificial Sequence: Synthetic oligonucleotide
  Sense strand starting at position 2655 of SEQ ID NO: 585882
auuauugagcuguaucuua

SEQ ID NO: 675107 - RNA, 19 nt, Artificial Sequence
  Description of Artificial Sequence: Synthetic oligonucleotide
  Antisense strand to SEQ ID NO: 675106
uaagauacagcucaauaau

SEQ ID NO: 675108 - RNA, 19 nt, Artificial Sequence
  Description of Artificial Sequence: Synthetic oligonucleotide
  Sense strand starting at position 2764 of SEQ ID NO: 585882
ugaucuauuaccuguggga

SEQ ID NO: 675109 - RNA, 19 nt, Artificial Sequence
  Description of Artificial Sequence: Synthetic oligonucleotide
  Antisense strand to SEQ ID NO: 675108
ucccacagguaauagauca

SEQ ID NO: 675110 - RNA, 19 nt, Artificial Sequence
  Description of Artificial Sequence: Synthetic oligonucleotide
  Sense strand starting at position 2766 of SEQ ID NO: 585882
aucuauuaccugugggauc

SEQ ID NO: 675111 - RNA, 19 nt, Artificial Sequence
  Description of Artificial Sequence: Synthetic oligonucleotide
  Antisense strand to SEQ ID NO: 675110
gaucccacagguaauagau

SEQ ID NO: 675112 - RNA, 19 nt, Artificial Sequence
  Description of Artificial Sequence: Synthetic oligonucleotide
  Sense strand starting at position 2777 of SEQ ID NO: 585882
gugggaucaggagguuauu

SEQ ID NO: 675113 - RNA, 19 nt, Artificial Sequence
  Description of Artificial Sequence: Synthetic oligonucleotide
  Antisense strand to SEQ ID NO: 675112
aauaaccuccugaucccac

SEQ ID NO: 675114 - RNA, 19 nt, Artificial Sequence
  Description of Artificial Sequence: Synthetic oligonucleotide
  Sense strand starting at position 2783 of SEQ ID NO: 585882
ucaggagguuauuauuuga

SEQ ID NO: 675115 - RNA, 19 nt, Artificial Sequence
  Description of Artificial Sequence: Synthetic oligonucleotide
  Antisense strand to SEQ ID NO: 675114
ucaaauaauaaccuccuga

SEQ ID NO: 675116 - RNA, 19 nt, Artificial Sequence
  Description of Artificial Sequence: Synthetic oligonucleotide
  Sense strand starting at position 3007 of SEQ ID NO: 585882
acccucaguuacuugugaa

SEQ ID NO: 675117 - RNA, 19 nt, Artificial Sequence
  Description of Artificial Sequence: Synthetic oligonucleotide
  Antisense strand to SEQ ID NO: 675116
uucacaaguaacugagggu

SEQ ID NO: 675118 - RNA, 19 nt, Artificial Sequence
  Description of Artificial Sequence: Synthetic oligonucleotide
  Sense strand starting at position 3052 of SEQ ID NO: 585882
caaugacagcuugacaagu

SEQ ID NO: 675119 - RNA, 19 nt, Artificial Sequence
  Description of Artificial Sequence: Synthetic oligonucleotide
  Antisense strand to SEQ ID NO: 675118
acuugucaagcugucauug

SEQ ID NO: 675120 - RNA, 19 nt, Artificial Sequence
  Description of Artificial Sequence: Synthetic oligonucleotide
  Sense strand starting at position 3413 of SEQ ID NO: 585882
gccucugugauauaagagu

SEQ ID NO: 675121 - RNA, 19 nt, Artificial Sequence
  Description of Artificial Sequence: Synthetic oligonucleotide
  Antisense strand to SEQ ID NO: 675120
acucuuauaucacagaggc

SEQ ID NO: 675122 - RNA, 19 nt, Artificial Sequence
  Description of Artificial Sequence: Synthetic oligonucleotide
  Sense strand starting at position 3419 of SEQ ID NO: 585882
gugauauaagaguguauca

SEQ ID NO: 675123 - RNA, 19 nt, Artificial Sequence
  Description of Artificial Sequence: Synthetic oligonucleotide
  Antisense strand to SEQ ID NO: 675122
ugauacacucuuauaucac

SEQ ID NO: 675124 - RNA, 19 nt, Artificial Sequence
  Description of Artificial Sequence: Synthetic oligonucleotide
  Sense strand starting at position 3438 of SEQ ID NO: 585882
caaagagaguaagacauuu

SEQ ID NO: 675125 - RNA, 19 nt, Artificial Sequence
  Description of Artificial Sequence: Synthetic oligonucleotide
  Antisense strand to SEQ ID NO: 675124
aaaugucuuacucucuuug

SEQ ID NO: 675126 - RNA, 19 nt, Artificial Sequence
  Description of Artificial Sequence: Synthetic oligonucleotide
  Sense strand starting at position 3582 of SEQ ID NO: 585882
gauucugcaccucagauga

SEQ ID NO: 675127 - RNA, 19 nt, Artificial Sequence
  Description of Artificial Sequence: Synthetic oligonucleotide
  Antisense strand to SEQ ID NO: 675126
ucaucugaggugcagaauc

SEQ ID NO: 675128 - RNA, 19 nt, Artificial Sequence
  Description of Artificial Sequence: Synthetic oligonucleotide
  Sense strand starting at position 3610 of SEQ ID NO: 585882
cggcgaucaccugaccaaa

SEQ ID NO: 675129 - RNA, 19 nt, Artificial Sequence
  Description of Artificial Sequence: Synthetic oligonucleotide
  Antisense strand to SEQ ID NO: 675128
uuuggucaggugaucgccg

SEQ ID NO: 675130 - RNA, 19 nt, Artificial Sequence
  Description of Artificial Sequence: Synthetic oligonucleotide
  Sense strand starting at position 3731 of SEQ ID NO: 585882
gggucucaaugggugagua

SEQ ID NO: 675131 - RNA, 19 nt, Artificial Sequence
  Description of Artificial Sequence: Synthetic oligonucleotide
  Antisense strand to SEQ ID NO: 675130
uacucacccauugagaccc

SEQ ID NO: 675132 - RNA, 19 nt, Artificial Sequence
  Description of Artificial Sequence: Synthetic oligonucleotide
  Sense strand starting at position 3744 of SEQ ID NO: 585882
ugaguaggauuugaacaga

SEQ ID NO: 675133 - RNA, 19 nt, Artificial Sequence
  Description of Artificial Sequence: Synthetic oligonucleotide
  Antisense strand to SEQ ID NO: 675132
ucuguucaaauccuacuca

SEQ ID NO: 675134 - RNA, 19 nt, Artificial Sequence
  Description of Artificial Sequence: Synthetic oligonucleotide
  Sense strand starting at position 3906 of SEQ ID NO: 585882
agaagaaagugcuucuagu

SEQ ID NO: 675135 - RNA, 19 nt, Artificial Sequence
  Description of Artificial Sequence: Synthetic oligonucleotide
  Antisense strand to SEQ ID NO: 675134
acuagaagcacuuucuucu

SEQ ID NO: 675136 - RNA, 19 nt, Artificial Sequence
  Description of Artificial Sequence: Synthetic oligonucleotide
  Sense strand starting at position 19 of SEQ ID NO: 585883
ggcuuauccaguggauauu

SEQ ID NO: 675137 - RNA, 19 nt, Artificial Sequence
  Description of Artificial Sequence: Synthetic oligonucleotide
  Antisense strand to SEQ ID NO: 675136
aauauccacuggauaagcc

SEQ ID NO: 675138 - RNA, 19 nt, Artificial Sequence
  Description of Artificial Sequence: Synthetic oligonucleotide
  Sense strand starting at position 931 of SEQ ID NO: 585883
ggaaucauucuugguacaa

SEQ ID NO: 675139 - RNA, 19 nt, Artificial Sequence
  Description of Artificial Sequence: Synthetic oligonucleotide
  Antisense strand to SEQ ID NO: 675138
uuguaccaagaaugauucc

SEQ ID NO: 675140 - RNA, 19 nt, Artificial Sequence
  Description of Artificial Sequence: Synthetic oligonucleotide
  Sense strand starting at position 958 of SEQ ID NO: 585883
ugcgugucugcggugagaa

SEQ ID NO: 675141 - RNA, 19 nt, Artificial Sequence
  Description of Artificial Sequence: Synthetic oligonucleotide
  Antisense strand to SEQ ID NO: 675140
uucucaccgcagacacgca

SEQ ID NO: 675142 - RNA, 19 nt, Artificial Sequence
  Description of Artificial Sequence: Synthetic oligonucleotide
  Sense strand starting at position 1045 of SEQ ID NO: 585883
gguugcaggcugaguugaa

SEQ ID NO: 675143 - RNA, 19 nt, Artificial Sequence
  Description of Artificial Sequence: Synthetic oligonucleotide
  Antisense strand to SEQ ID NO: 675142
uucaacucagccugcaacc

SEQ ID NO: 675144 - RNA, 19 nt, Artificial Sequence
  Description of Artificial Sequence: Synthetic oligonucleotide
  Sense strand starting at position 1049 of SEQ ID NO: 585883
gcaggcugaguugaaguaa

SEQ ID NO: 675145 - RNA, 19 nt, Artificial Sequence
  Description of Artificial Sequence: Synthetic oligonucleotide
  Antisense strand to SEQ ID NO: 675144
uuacuucaacucagccugc

SEQ ID NO: 675146 - RNA, 19 nt, Artificial Sequence
  Description of Artificial Sequence: Synthetic oligonucleotide
  Sense strand starting at position 1163 of SEQ ID NO: 585883
gagguauaugcccacagca

SEQ ID NO: 675147 - RNA, 19 nt, Artificial Sequence
  Description of Artificial Sequence: Synthetic oligonucleotide
  Antisense strand to SEQ ID NO: 675146
ugcugugggcauauaccuc

SEQ ID NO: 675148 - RNA, 19 nt, Artificial Sequence
  Description of Artificial Sequence: Synthetic oligonucleotide
  Sense strand starting at position 1165 of SEQ ID NO: 585883
gguauaugcccacagcaau

SEQ ID NO: 675149 - RNA, 19 nt, Artificial Sequence
  Description of Artificial Sequence: Synthetic oligonucleotide
  Antisense strand to SEQ ID NO: 675148
auugcugugggcauauacc

SEQ ID NO: 675150 - RNA, 19 nt, Artificial Sequence
  Description of Artificial Sequence: Synthetic oligonucleotide
  Sense strand starting at position 1747 of SEQ ID NO: 585883
gcgugugaagcgcuuugaa

SEQ ID NO: 675151 - RNA, 19 nt, Artificial Sequence
  Description of Artificial Sequence: Synthetic oligonucleotide
  Antisense strand to SEQ ID NO: 675150
uucaaagcgcuucacacgc

SEQ ID NO: 675152 - RNA, 19 nt, Artificial Sequence
  Description of Artificial Sequence: Synthetic oligonucleotide
  Sense strand starting at position 1749 of SEQ ID NO: 585883
gugugaagcgcuuugaagu

SEQ ID NO: 675153 - RNA, 19 nt, Artificial Sequence
  Description of Artificial Sequence: Synthetic oligonucleotide
  Antisense strand to SEQ ID NO: 675152
acuucaaagcgcuucacac

SEQ ID NO: 675154 - RNA, 19 nt, Artificial Sequence
  Description of Artificial Sequence: Synthetic oligonucleotide
  Sense strand starting at position 1961 of SEQ ID NO: 585883
cucuuccucugucugagaa

SEQ ID NO: 675155 - RNA, 19 nt, Artificial Sequence
  Description of Artificial Sequence: Synthetic oligonucleotide
  Antisense strand to SEQ ID NO: 675154
uucucagacagaggaagag

SEQ ID NO: 675156 - RNA, 19 nt, Artificial Sequence
  Description of Artificial Sequence: Synthetic oligonucleotide
  Sense strand starting at position 2145 of SEQ ID NO: 585883
ucaaaugcagcauaguauu

SEQ ID NO: 675157 - RNA, 19 nt, Artificial Sequence
  Description of Artificial Sequence: Synthetic oligonucleotide
  Antisense strand to SEQ ID NO: 675156
aauacuaugcugcauuuga

SEQ ID NO: 675158 - RNA, 19 nt, Artificial Sequence
  Description of Artificial Sequence: Synthetic oligonucleotide
  Sense strand starting at position 2189 of SEQ ID NO: 585883
cuagcucuaguuuauauga

SEQ ID NO: 675159 - RNA, 19 nt, Artificial Sequence
  Description of Artificial Sequence: Synthetic oligonucleotide
  Antisense strand to SEQ ID NO: 675158
ucauauaaacuagagcuag

SEQ ID NO: 675160 - RNA, 19 nt, Artificial Sequence
  Description of Artificial Sequence: Synthetic oligonucleotide
  Sense strand starting at position 2196 of SEQ ID NO: 585883
uaguuuauaugacuaggca

SEQ ID NO: 675161 - RNA, 19 nt, Artificial Sequence
  Description of Artificial Sequence: Synthetic oligonucleotide
  Antisense strand to SEQ ID NO: 675160
ugccuagucauauaaacua

SEQ ID NO: 675162 - RNA, 19 nt, Artificial Sequence
  Description of Artificial Sequence: Synthetic oligonucleotide
  Sense strand starting at position 2220 of SEQ ID NO: 585883
aaacuaguguagguaguau

SEQ ID NO: 675163 - RNA, 19 nt, Artificial Sequence
  Description of Artificial Sequence: Synthetic oligonucleotide
  Antisense strand to SEQ ID NO: 675162
auacuaccuacacuaguuu

SEQ ID NO: 675164 - RNA, 19 nt, Artificial Sequence
  Description of Artificial Sequence: Synthetic oligonucleotide
  Sense strand starting at position 2229 of SEQ ID NO: 585883
uagguaguauucuuaaaga

SEQ ID NO: 675165 - RNA, 19 nt, Artificial Sequence
  Description of Artificial Sequence: Synthetic oligonucleotide
  Antisense strand to SEQ ID NO: 675164
ucuuuaagaauacuaccua

SEQ ID NO: 675166 - RNA, 19 nt, Artificial Sequence
  Description of Artificial Sequence: Synthetic oligonucleotide
  Sense strand starting at position 2265 of SEQ ID NO: 585883
agcugaauguuuccucaaa

SEQ ID NO: 675167 - RNA, 19 nt, Artificial Sequence
  Description of Artificial Sequence: Synthetic oligonucleotide
  Antisense strand to SEQ ID NO: 675166
uuugaggaaacauucagcu

SEQ ID NO: 675168 - RNA, 19 nt, Artificial Sequence
  Description of Artificial Sequence: Synthetic oligonucleotide
  Sense strand starting at position 2266 of SEQ ID NO: 585883
gcugaauguuuccucaaag

SEQ ID NO: 675169 - RNA, 19 nt, Artificial Sequence
  Description of Artificial Sequence: Synthetic oligonucleotide
  Antisense strand to SEQ ID NO: 675168
cuuugaggaaacauucagc

SEQ ID NO: 675170 - RNA, 19 nt, Artificial Sequence
  Description of Artificial Sequence: Synthetic oligonucleotide
  Sense strand starting at position 2267 of SEQ ID NO: 585883
cugaauguuuccucaaaga

SEQ ID NO: 675171 - RNA, 19 nt, Artificial Sequence
  Description of Artificial Sequence: Synthetic oligonucleotide
  Antisense strand to SEQ ID NO: 675170
ucuuugaggaaacauucag

SEQ ID NO: 675172 - RNA, 19 nt, Artificial Sequence
  Description of Artificial Sequence: Synthetic oligonucleotide
  Sense strand starting at position 2288 of SEQ ID NO: 585883
gcuugauuauauccauagg

SEQ ID NO: 675173 - RNA, 19 nt, Artificial Sequence
  Description of Artificial Sequence: Synthetic oligonucleotide
  Antisense strand to SEQ ID NO: 675172
ccuauggauauaaucaagc

SEQ ID NO: 675174 - RNA, 19 nt, Artificial Sequence
  Description of Artificial Sequence: Synthetic oligonucleotide
  Sense strand starting at position 2481 of SEQ ID NO: 585883
acaauaaaguuagcagauu

SEQ ID NO: 675175 - RNA, 19 nt, Artificial Sequence
  Description of Artificial Sequence: Synthetic oligonucleotide
  Antisense strand to SEQ ID NO: 675174
aaucugcuaacuuuauugu

SEQ ID NO: 675176 - RNA, 19 nt, Artificial Sequence
  Description of Artificial Sequence: Synthetic oligonucleotide
  Sense strand starting at position 2646 of SEQ ID NO: 585883
auaacuauuugauaggcaa

SEQ ID NO: 675177 - RNA, 19 nt, Artificial Sequence
  Description of Artificial Sequence: Synthetic oligonucleotide
  Antisense strand to SEQ ID NO: 675176
uugccuaucaaauaguuau

SEQ ID NO: 675178 - RNA, 19 nt, Artificial Sequence
  Description of Artificial Sequence: Synthetic oligonucleotide
  Sense strand starting at position 2697 of SEQ ID NO: 585883
gucugugaauuauuaacca

SEQ ID NO: 675179 - RNA, 19 nt, Artificial Sequence
  Description of Artificial Sequence: Synthetic oligonucleotide
  Antisense strand to SEQ ID NO: 675178
ugguuaauaauucacagac

SEQ ID NO: 675180 - RNA, 19 nt, Artificial Sequence
  Description of Artificial Sequence: Synthetic oligonucleotide
  Sense strand starting at position 2701 of SEQ ID NO: 585883
gugaauuauuaaccaaguc

SEQ ID NO: 675181 - RNA, 19 nt, Artificial Sequence
  Description of Artificial Sequence: Synthetic oligonucleotide
  Antisense strand to SEQ ID NO: 675180
gacuugguuaauaauucac

SEQ ID NO: 675182 - RNA, 19 nt, Artificial Sequence
  Description of Artificial Sequence: Synthetic oligonucleotide
  Sense strand starting at position 2747 of SEQ ID NO: 585883
guuacuuacacagguagga

SEQ ID NO: 675183 - RNA, 19 nt, Artificial Sequence
  Description of Artificial Sequence: Synthetic oligonucleotide
  Antisense strand to SEQ ID NO: 675182
uccuaccuguguaaguaac

SEQ ID NO: 675184 - RNA, 19 nt, Artificial Sequence
  Description of Artificial Sequence: Synthetic oligonucleotide
  Sense strand starting at position 2845 of SEQ ID NO: 585883
caaugacaggugugcaauu

SEQ ID NO: 675185 - RNA, 19 nt, Artificial Sequence
  Description of Artificial Sequence: Synthetic oligonucleotide
  Antisense strand to SEQ ID NO: 675184
aauugcacaccugucauug

SEQ ID NO: 675186 - RNA, 19 nt, Artificial Sequence
  Description of Artificial Sequence: Synthetic oligonucleotide
  Sense strand starting at position 2846 of SEQ ID NO: 585883
aaugacaggugugcaauua

SEQ ID NO: 675187 - RNA, 19 nt, Artificial Sequence
  Description of Artificial Sequence: Synthetic oligonucleotide
  Antisense strand to SEQ ID NO: 675186
uaauugcacaccugucauu

SEQ ID NO: 675188 - RNA, 19 nt, Artificial Sequence
  Description of Artificial Sequence: Synthetic oligonucleotide
  Sense strand starting at position 2855 of SEQ ID NO: 585883
ugugcaauuaguuaacgau

SEQ ID NO: 675189 - RNA, 19 nt, Artificial Sequence
  Description of Artificial Sequence: Synthetic oligonucleotide
  Antisense strand to SEQ ID NO: 675188
aucguuaacuaauugcaca

SEQ ID NO: 675190 - RNA, 19 nt, Artificial Sequence
  Description of Artificial Sequence: Synthetic oligonucleotide
  Sense strand starting at position 2915 of SEQ ID NO: 585883
acaaauaagcugugaagag

SEQ ID NO: 675191 - RNA, 19 nt, Artificial Sequence
  Description of Artificial Sequence: Synthetic oligonucleotide
  Antisense strand to SEQ ID NO: 675190
cucuucacagcuuauuugu

SEQ ID NO: 675192 - RNA, 19 nt, Artificial Sequence
  Description of Artificial Sequence: Synthetic oligonucleotide
  Sense strand starting at position 3042 of SEQ ID NO: 585883
gguggauguauauauucuu

SEQ ID NO: 675193 - RNA, 19 nt, Artificial Sequence
  Description of Artificial Sequence: Synthetic oligonucleotide
  Antisense strand to SEQ ID NO: 675192
aagaauauauacauccacc

SEQ ID NO: 675194 - RNA, 19 nt, Artificial Sequence
  Description of Artificial Sequence: Synthetic oligonucleotide
  Sense strand starting at position 3164 of SEQ ID NO: 585883
gcuuuaguauuauuugugu

SEQ ID NO: 675195 - RNA, 19 nt, Artificial Sequence
  Description of Artificial Sequence: Synthetic oligonucleotide
  Antisense strand to SEQ ID NO: 675194
acacaaauaauacuaaagc

SEQ ID NO: 675196 - RNA, 19 nt, Artificial Sequence
  Description of Artificial Sequence: Synthetic oligonucleotide
  Sense strand starting at position 3419 of SEQ ID NO: 585883
ugguaagaguagguacaau

SEQ ID NO: 675197 - RNA, 19 nt, Artificial Sequence
  Description of Artificial Sequence: Synthetic oligonucleotide
  Antisense strand to SEQ ID NO: 675196
auuguaccuacucuuacca

SEQ ID NO: 675198 - RNA, 19 nt, Artificial Sequence
  Description of Artificial Sequence: Synthetic oligonucleotide
  Sense strand starting at position 3439 of SEQ ID NO: 585883
auaccuguguaacuugauu

SEQ ID NO: 675199 - RNA, 19 nt, Artificial Sequence
  Description of Artificial Sequence: Synthetic oligonucleotide
  Antisense strand to SEQ ID NO: 675198
aaucaaguuacacagguau

SEQ ID NO: 675200 - RNA, 19 nt, Artificial Sequence
  Description of Artificial Sequence: Synthetic oligonucleotide
  Sense strand starting at position 3510 of SEQ ID NO: 585883
gccucuugauaucuuagaa

SEQ ID NO: 675201 - RNA, 19 nt, Artificial Sequence
  Description of Artificial Sequence: Synthetic oligonucleotide
  Antisense strand to SEQ ID NO: 675200
uucuaagauaucaagaggc

SEQ ID NO: 675202 - RNA, 19 nt, Artificial Sequence
  Description of Artificial Sequence: Synthetic oligonucleotide
  Sense strand starting at position 3728 of SEQ ID NO: 585883
aguguuucccaaggcaaag

SEQ ID NO: 675203 - RNA, 19 nt, Artificial Sequence
  Description of Artificial Sequence: Synthetic oligonucleotide
  Antisense strand to SEQ ID NO: 675202
cuuugccuugggaaacacu

SEQ ID NO: 675204 - RNA, 19 nt, Artificial Sequence
  Description of Artificial Sequence: Synthetic oligonucleotide
  Sense strand starting at position 3770 of SEQ ID NO: 585883
ggaaucuugccuuaugcca

SEQ ID NO: 675205 - RNA, 19 nt, Artificial Sequence
  Description of Artificial Sequence: Synthetic oligonucleotide
  Antisense strand to SEQ ID NO: 675204
uggcauaaggcaagauucc

SEQ ID NO: 675206 - RNA, 19 nt, Artificial Sequence
  Description of Artificial Sequence: Synthetic oligonucleotide
  Sense strand starting at position 3806 of SEQ ID NO: 585883
auacauaucuggcuccaga

SEQ ID NO: 675207 - RNA, 19 nt, Artificial Sequence
  Description of Artificial Sequence: Synthetic oligonucleotide
  Antisense strand to SEQ ID NO: 675206
ucuggagccagauauguau

SEQ ID NO: 675208 - RNA, 19 nt, Artificial Sequence
  Description of Artificial Sequence: Synthetic oligonucleotide
  Sense strand starting at position 3846 of SEQ ID NO: 585883
gauauugcauuacuaggua

SEQ ID NO: 675209 - RNA, 19 nt, Artificial Sequence
  Description of Artificial Sequence: Synthetic oligonucleotide
  Antisense strand to SEQ ID NO: 675208
uaccuaguaaugcaauauc

SEQ ID NO: 675210 - RNA, 19 nt, Artificial Sequence
  Description of Artificial Sequence: Synthetic oligonucleotide
  Sense strand starting at position 3854 of SEQ ID NO: 585883
auuacuagguaccuugaaa

SEQ ID NO: 675211 - RNA, 19 nt, Artificial Sequence
  Description of Artificial Sequence: Synthetic oligonucleotide
  Antisense strand to SEQ ID NO: 675210
uuucaagguaccuaguaau

SEQ ID NO: 675212 - RNA, 19 nt, Artificial Sequence
  Description of Artificial Sequence: Synthetic oligonucleotide
  Sense strand starting at position 3912 of SEQ ID NO: 585883
caaggaguccuauggcuuu

SEQ ID NO: 675213 - RNA, 19 nt, Artificial Sequence
  Description of Artificial Sequence: Synthetic oligonucleotide
  Antisense strand to SEQ ID NO: 675212
aaagccauaggacuccuug

SEQ ID NO: 675214 - RNA, 19 nt, Artificial Sequence
  Description of Artificial Sequence: Synthetic oligonucleotide
  Sense strand starting at position 3915 of SEQ ID NO: 585883
ggaguccuauggcuuuaua

SEQ ID NO: 675215 - RNA, 19 nt, Artificial Sequence
  Description of Artificial Sequence: Synthetic oligonucleotide
  Antisense strand to SEQ ID NO: 675214
uauaaagccauaggacucc

SEQ ID NO: 675216 - RNA, 19 nt, Artificial Sequence
  Description of Artificial Sequence: Synthetic oligonucleotide
  Sense strand starting at position 78 of SEQ ID NO: 585884
ccugaaugcuucucauuga

SEQ ID NO: 675217 - RNA, 19 nt, Artificial Sequence
  Description of Artificial Sequence: Synthetic oligonucleotide
  Antisense strand to SEQ ID NO: 675216
ucaaugagaagcauucagg

SEQ ID NO: 675218 - RNA, 19 nt, Artificial Sequence
  Description of Artificial Sequence: Synthetic oligonucleotide
  Sense strand starting at position 89 of SEQ ID NO: 585884
cucauugauguauauucca

SEQ ID NO: 675219 - RNA, 19 nt, Artificial Sequence
  Description of Artificial Sequence: Synthetic oligonucleotide
  Antisense strand to SEQ ID NO: 675218
uggaauauacaucaaugag

SEQ ID NO: 675220 - RNA, 19 nt, Artificial Sequence
  Description of Artificial Sequence: Synthetic oligonucleotide
  Sense strand starting at position 92 of SEQ ID NO: 585884
auugauguauauuccacau

SEQ ID NO: 675221 - RNA, 19 nt, Artificial Sequence
  Description of Artificial Sequence: Synthetic oligonucleotide
  Antisense strand to SEQ ID NO: 675220
auguggaauauacaucaau

SEQ ID NO: 675222 - RNA, 19 nt, Artificial Sequence
  Description of Artificial Sequence: Synthetic oligonucleotide
  Sense strand starting at position 96 of SEQ ID NO: 585884
auguauauuccacauggcu

SEQ ID NO: 675223 - RNA, 19 nt, Artificial Sequence
  Description of Artificial Sequence: Synthetic oligonucleotide
  Antisense strand to SEQ ID NO: 675222
agccauguggaauauacau

SEQ ID NO: 675224 - RNA, 19 nt, Artificial Sequence
  Description of Artificial Sequence: Synthetic oligonucleotide
  Sense strand starting at position 326 of SEQ ID NO: 585884
aacaucauucugggaagua

SEQ ID NO: 675225 - RNA, 19 nt, Artificial Sequence
  Description of Artificial Sequence: Synthetic oligonucleotide
  Antisense strand to SEQ ID NO: 675224
uacuucccagaaugauguu

SEQ ID NO: 675226 - RNA, 19 nt, Artificial Sequence
  Description of Artificial Sequence: Synthetic oligonucleotide
  Sense strand starting at position 388 of SEQ ID NO: 585884
gaaugacaguaacugguuu

SEQ ID NO: 675227 - RNA, 19 nt, Artificial Sequence
  Description of Artificial Sequence: Synthetic oligonucleotide
  Antisense strand to SEQ ID NO: 675226
aaaccaguuacugucauuc

SEQ ID NO: 675228 - RNA, 19 nt, Artificial Sequence
  Description of Artificial Sequence: Synthetic oligonucleotide
  Sense strand starting at position 392 of SEQ ID NO: 585884
gacaguaacugguuugaca

SEQ ID NO: 675229 - RNA, 19 nt, Artificial Sequence
  Description of Artificial Sequence: Synthetic oligonucleotide
  Antisense strand to SEQ ID NO: 675228
ugucaaaccaguuacuguc

SEQ ID NO: 675230 - RNA, 19 nt, Artificial Sequence
  Description of Artificial Sequence: Synthetic oligonucleotide
  Sense strand starting at position 394 of SEQ ID NO: 585884
caguaacugguuugacaau

SEQ ID NO: 675231 - RNA, 19 nt, Artificial Sequence
  Description of Artificial Sequence: Synthetic oligonucleotide
  Antisense strand to SEQ ID NO: 675230
auugucaaaccaguuacug

SEQ ID NO: 675232 - RNA, 19 nt, Artificial Sequence
  Description of Artificial Sequence: Synthetic oligonucleotide
  Sense strand starting at position 414 of SEQ ID NO: 585884
acaacagccuggucaagau

SEQ ID NO: 675233 - RNA, 19 nt, Artificial Sequence
  Description of Artificial Sequence: Synthetic oligonucleotide
  Antisense strand to SEQ ID NO: 675232
aucuugaccaggcuguugu

SEQ ID NO: 675234 - RNA, 19 nt, Artificial Sequence
  Description of Artificial Sequence: Synthetic oligonucleotide
  Sense strand starting at position 507 of SEQ ID NO: 585884
aaaggacuccugugguaaa

SEQ ID NO: 675235 - RNA, 19 nt, Artificial Sequence
  Description of Artificial Sequence: Synthetic oligonucleotide
  Antisense strand to SEQ ID NO: 675234
uuuaccacaggaguccuuu

SEQ ID NO: 675236 - RNA, 19 nt, Artificial Sequence
  Description of Artificial Sequence: Synthetic oligonucleotide
  Sense strand starting at position 599 of SEQ ID NO: 585884
aguagaaagcuuuguaaag

SEQ ID NO: 675237 - RNA, 19 nt, Artificial Sequence
  Description of Artificial Sequence: Synthetic oligonucleotide
  Antisense strand to SEQ ID NO: 675236
cuuuacaaagcuuucuacu

SEQ ID NO: 675238 - RNA, 19 nt, Artificial Sequence
  Description of Artificial Sequence: Synthetic oligonucleotide
  Sense strand starting at position 600 of SEQ ID NO: 585884
guagaaagcuuuguaaaga

SEQ ID NO: 675239 - RNA, 19 nt, Artificial Sequence
  Description of Artificial Sequence: Synthetic oligonucleotide
  Antisense strand to SEQ ID NO: 675238
ucuuuacaaagcuuucuac

SEQ ID NO: 675240 - RNA, 19 nt, Artificial Sequence
  Description of Artificial Sequence: Synthetic oligonucleotide
  Sense strand starting at position 728 of SEQ ID NO: 585884
gggauaugcugagcucuaa

SEQ ID NO: 675241 - RNA, 19 nt, Artificial Sequence
  Description of Artificial Sequence: Synthetic oligonucleotide
  Antisense strand to SEQ ID NO: 675240
uuagagcucagcauauccc

SEQ ID NO: 675242 - RNA, 19 nt, Artificial Sequence
  Description of Artificial Sequence: Synthetic oligonucleotide
  Sense strand starting at position 807 of SEQ ID NO: 585884
caggaaagugcacaucuua

SEQ ID NO: 675243 - RNA, 19 nt, Artificial Sequence
  Description of Artificial Sequence: Synthetic oligonucleotide
  Antisense strand to SEQ ID NO: 675242
uaagaugugcacuuuccug

SEQ ID NO: 675244 - RNA, 19 nt, Artificial Sequence
  Description of Artificial Sequence: Synthetic oligonucleotide
  Sense strand starting at position 908 of SEQ ID NO: 585884
aaacucauuucgcuuggua

SEQ ID NO: 675245 - RNA, 19 nt, Artificial Sequence
  Description of Artificial Sequence: Synthetic oligonucleotide
  Antisense strand to SEQ ID NO: 675244
uaccaagcgaaaugaguuu

SEQ ID NO: 675246 - RNA, 19 nt, Artificial Sequence
  Description of Artificial Sequence: Synthetic oligonucleotide
  Sense strand starting at position 910 of SEQ ID NO: 585884
acucauuucgcuugguaau

SEQ ID NO: 675247 - RNA, 19 nt, Artificial Sequence
  Description of Artificial Sequence: Synthetic oligonucleotide
  Antisense strand to SEQ ID NO: 675246
auuaccaagcgaaaugagu

SEQ ID NO: 675248 - RNA, 19 nt, Artificial Sequence
  Description of Artificial Sequence: Synthetic oligonucleotide
  Sense strand starting at position 911 of SEQ ID NO: 585884
cucauuucgcuugguaauu

SEQ ID NO: 675249 - RNA, 19 nt, Artificial Sequence
  Description of Artificial Sequence: Synthetic oligonucleotide
  Antisense strand to SEQ ID NO: 675248
aauuaccaagcgaaaugag

SEQ ID NO: 675250 - RNA, 19 nt, Artificial Sequence
  Description of Artificial Sequence: Synthetic oligonucleotide
  Sense strand starting at position 941 of SEQ ID NO: 585884
cugaacuucgucuauacaa

SEQ ID NO: 675251 - RNA, 19 nt, Artificial Sequence
  Description of Artificial Sequence: Synthetic oligonucleotide
  Antisense strand to SEQ ID NO: 675250
uuguauagacgaaguucag

SEQ ID NO: 675252 - RNA, 19 nt, Artificial Sequence
  Description of Artificial Sequence: Synthetic oligonucleotide
  Sense strand starting at position 2009 of SEQ ID NO: 585884
uuauuuacauauggagaag

SEQ ID NO: 675253 - RNA, 19 nt, Artificial Sequence
  Description of Artificial Sequence: Synthetic oligonucleotide
  Antisense strand to SEQ ID NO: 675252
cuucuccauauguaaauaa

SEQ ID NO: 675254 - RNA, 19 nt, Artificial Sequence
  Description of Artificial Sequence: Synthetic oligonucleotide
  Sense strand starting at position 2032 of SEQ ID NO: 585884
guccuuguugauuaucaca

SEQ ID NO: 675255 - RNA, 19 nt, Artificial Sequence
  Description of Artificial Sequence: Synthetic oligonucleotide
  Antisense strand to SEQ ID NO: 675254
ugugauaaucaacaaggac

SEQ ID NO: 675256 - RNA, 19 nt, Artificial Sequence
  Description of Artificial Sequence: Synthetic oligonucleotide
  Sense strand starting at position 2222 of SEQ ID NO: 585884
ugcacaagauuauuggaga

SEQ ID NO: 675257 - RNA, 19 nt, Artificial Sequence
  Description of Artificial Sequence: Synthetic oligonucleotide
  Antisense strand to SEQ ID NO: 675256
ucuccaauaaucuugugca

SEQ ID NO: 675258 - RNA, 19 nt, Artificial Sequence
  Description of Artificial Sequence: Synthetic oligonucleotide
  Sense strand starting at position 2351 of SEQ ID NO: 585884
gcugauauggaauguaauu

SEQ ID NO: 675259 - RNA, 19 nt, Artificial Sequence
  Description of Artificial Sequence: Synthetic oligonucleotide
  Antisense strand to SEQ ID NO: 675258
aauuacauuccauaucagc

SEQ ID NO: 675260 - RNA, 19 nt, Artificial Sequence
  Description of Artificial Sequence: Synthetic oligonucleotide
  Sense strand starting at position 2501 of SEQ ID NO: 585884
gcgcggugugaacuaguau

SEQ ID NO: 675261 - RNA, 19 nt, Artificial Sequence
  Description of Artificial Sequence: Synthetic oligonucleotide
  Antisense strand to SEQ ID NO: 675260
auacuaguucacaccgcgc

SEQ ID NO: 675262 - RNA, 19 nt, Artificial Sequence
  Description of Artificial Sequence: Synthetic oligonucleotide
  Sense strand starting at position 2507 of SEQ ID NO: 585884
ugugaacuaguaugauuau

SEQ ID NO: 675263 - RNA, 19 nt, Artificial Sequence
  Description of Artificial Sequence: Synthetic oligonucleotide
  Antisense strand to SEQ ID NO: 675262
auaaucauacuaguucaca

SEQ ID NO: 675264 - RNA, 19 nt, Artificial Sequence
  Description of Artificial Sequence: Synthetic oligonucleotide
  Sense strand starting at position 2532 of SEQ ID NO: 585884
cagugauuacuaggaaagu

SEQ ID NO: 675265 - RNA, 19 nt, Artificial Sequence
  Description of Artificial Sequence: Synthetic oligonucleotide
  Antisense strand to SEQ ID NO: 675264
acuuuccuaguaaucacug

SEQ ID NO: 675266 - RNA, 19 nt, Artificial Sequence
  Description of Artificial Sequence: Synthetic oligonucleotide
  Sense strand starting at position 2541 of SEQ ID NO: 585884
cuaggaaaguuauucuaca

SEQ ID NO: 675267 - RNA, 19 nt, Artificial Sequence
  Description of Artificial Sequence: Synthetic oligonucleotide
  Antisense strand to SEQ ID NO: 675266
uguagaauaacuuuccuag

SEQ ID NO: 675268 - RNA, 19 nt, Artificial Sequence
  Description of Artificial Sequence: Synthetic oligonucleotide
  Sense strand starting at position 2562 of SEQ ID NO: 585884
acaggucucuacucuauau

SEQ ID NO: 675269 - RNA, 19 nt, Artificial Sequence
  Description of Artificial Sequence: Synthetic oligonucleotide
  Antisense strand to SEQ ID NO: 675268
auauagaguagagaccugu

SEQ ID NO: 675270 - RNA, 19 nt, Artificial Sequence
  Description of Artificial Sequence: Synthetic oligonucleotide
  Sense strand starting at position 2564 of SEQ ID NO: 585884
aggucucuacucuauauua

SEQ ID NO: 675271 - RNA, 19 nt, Artificial Sequence
  Description of Artificial Sequence: Synthetic oligonucleotide
  Antisense strand to SEQ ID NO: 675270
uaauauagaguagagaccu

SEQ ID NO: 675272 - RNA, 19 nt, Artificial Sequence
  Description of Artificial Sequence: Synthetic oligonucleotide
  Sense strand starting at position 2623 of SEQ ID NO: 585884
uuccuuagugcauagacuu

SEQ ID NO: 675273 - RNA, 19 nt, Artificial Sequence
  Description of Artificial Sequence: Synthetic oligonucleotide
  Antisense strand to SEQ ID NO: 675272
aagucuaugcacuaaggaa

SEQ ID NO: 675274 - RNA, 19 nt, Artificial Sequence
  Description of Artificial Sequence: Synthetic oligonucleotide
  Sense strand starting at position 2630 of SEQ ID NO: 585884
gugcauagacuugaaccau

SEQ ID NO: 675275 - RNA, 19 nt, Artificial Sequence
  Description of Artificial Sequence: Synthetic oligonucleotide
  Antisense strand to SEQ ID NO: 675274
augguucaagucuaugcac

SEQ ID NO: 675276 - RNA, 19 nt, Artificial Sequence
  Description of Artificial Sequence: Synthetic oligonucleotide
  Sense strand starting at position 2696 of SEQ ID NO: 585884
gauacaauaggguguaaau

SEQ ID NO: 675277 - RNA, 19 nt, Artificial Sequence
  Description of Artificial Sequence: Synthetic oligonucleotide
  Antisense strand to SEQ ID NO: 675276
auuuacacccuauuguauc

SEQ ID NO: 675278 - RNA, 19 nt, Artificial Sequence
  Description of Artificial Sequence: Synthetic oligonucleotide
  Sense strand starting at position 2708 of SEQ ID NO: 585884
uguaaauaguaagcaucaa

SEQ ID NO: 675279 - RNA, 19 nt, Artificial Sequence
  Description of Artificial Sequence: Synthetic oligonucleotide
  Antisense strand to SEQ ID NO: 675278
uugaugcuuacuauuuaca

SEQ ID NO: 675280 - RNA, 19 nt, Artificial Sequence
  Description of Artificial Sequence: Synthetic oligonucleotide
  Sense strand starting at position 2767 of SEQ ID NO: 585884
cugcauugguuaccaacaa

SEQ ID NO: 675281 - RNA, 19 nt, Artificial Sequence
  Description of Artificial Sequence: Synthetic oligonucleotide
  Antisense strand to SEQ ID NO: 675280
uuguugguaaccaaugcag

SEQ ID NO: 675282 - RNA, 19 nt, Artificial Sequence
  Description of Artificial Sequence: Synthetic oligonucleotide
  Sense strand starting at position 2882 of SEQ ID NO: 585884
gcauuucugagaugcuggu

SEQ ID NO: 675283 - RNA, 19 nt, Artificial Sequence
  Description of Artificial Sequence: Synthetic oligonucleotide
  Antisense strand to SEQ ID NO: 675282
accagcaucucagaaaugc

SEQ ID NO: 675284 - RNA, 19 nt, Artificial Sequence
  Description of Artificial Sequence: Synthetic oligonucleotide
  Sense strand starting at position 3000 of SEQ ID NO: 585884
cuacgcauuuguuugcaau

SEQ ID NO: 675285 - RNA, 19 nt, Artificial Sequence
  Description of Artificial Sequence: Synthetic oligonucleotide
  Antisense strand to SEQ ID NO: 675284
auugcaaacaaaugcguag

SEQ ID NO: 675286 - RNA, 19 nt, Artificial Sequence
  Description of Artificial Sequence: Synthetic oligonucleotide
  Sense strand starting at position 3102 of SEQ ID NO: 585884
gagaauccucaguaauguu

SEQ ID NO: 675287 - RNA, 19 nt, Artificial Sequence
  Description of Artificial Sequence: Synthetic oligonucleotide
  Antisense strand to SEQ ID NO: 675286
aacauuacugaggauucuc

SEQ ID NO: 675288 - RNA, 19 nt, Artificial Sequence
  Description of Artificial Sequence: Synthetic oligonucleotide
  Sense strand starting at position 3176 of SEQ ID NO: 585884
auuauugucuuccugaaga

SEQ ID NO: 675289 - RNA, 19 nt, Artificial Sequence
  Description of Artificial Sequence: Synthetic oligonucleotide
  Antisense strand to SEQ ID NO: 675288
ucuucaggaagacaauaau

SEQ ID NO: 675290 - RNA, 19 nt, Artificial Sequence
  Description of Artificial Sequence: Synthetic oligonucleotide
  Sense strand starting at position 3748 of SEQ ID NO: 585884
auugaauuccaguagcugu

SEQ ID NO: 675291 - RNA, 19 nt, Artificial Sequence
  Description of Artificial Sequence: Synthetic oligonucleotide
  Antisense strand to SEQ ID NO: 675290
acagcuacuggaauucaau

SEQ ID NO: 675292 - RNA, 19 nt, Artificial Sequence
  Description of Artificial Sequence: Synthetic oligonucleotide
  Sense strand starting at position 3789 of SEQ ID NO: 585884
uguuaugaccacuauacuc

SEQ ID NO: 675293 - RNA, 19 nt, Artificial Sequence
  Description of Artificial Sequence: Synthetic oligonucleotide
  Antisense strand to SEQ ID NO: 675292
gaguauaguggucauaaca

SEQ ID NO: 675294 - RNA, 19 nt, Artificial Sequence
  Description of Artificial Sequence: Synthetic oligonucleotide
  Sense strand starting at position 3902 of SEQ ID NO: 585884
gacaauagcgucuacagua

SEQ ID NO: 675295 - RNA, 19 nt, Artificial Sequence
  Description of Artificial Sequence: Synthetic oligonucleotide
  Antisense strand to SEQ ID NO: 675294
uacuguagacgcuauuguc

SEQ ID NO: 675296 - RNA, 19 nt, Artificial Sequence
  Description of Artificial Sequence: Synthetic oligonucleotide
  Sense strand starting at position 6 of SEQ ID NO: 585885
cuuaucuuuaugcgaagag

SEQ ID NO: 675297 - RNA, 19 nt, Artificial Sequence
  Description of Artificial Sequence: Synthetic oligonucleotide
  Antisense strand to SEQ ID NO: 675296
cucuucgcauaaagauaag

SEQ ID NO: 675298 - RNA, 19 nt, Artificial Sequence
  Description of Artificial Sequence: Synthetic oligonucleotide
  Sense strand starting at position 10 of SEQ ID NO: 585885
ucuuuaugcgaagaggagu

SEQ ID NO: 675299 - RNA, 19 nt, Artificial Sequence
  Description of Artificial Sequence: Synthetic oligonucleotide
  Antisense strand to SEQ ID NO: 675298
acuccucuucgcauaaaga

SEQ ID NO: 675300 - RNA, 19 nt, Artificial Sequence
  Description of Artificial Sequence: Synthetic oligonucleotide
  Sense strand starting at position 202 of SEQ ID NO: 585885
cugugauacuuccuuauug

SEQ ID NO: 675301 - RNA, 19 nt, Artificial Sequence
  Description of Artificial Sequence: Synthetic oligonucleotide
  Antisense strand to SEQ ID NO: 675300
caauaaggaaguaucacag

SEQ ID NO: 675302 - RNA, 19 nt, Artificial Sequence
  Description of Artificial Sequence: Synthetic oligonucleotide
  Sense strand starting at position 204 of SEQ ID NO: 585885
gugauacuuccuuauugca

SEQ ID NO: 675303 - RNA, 19 nt, Artificial Sequence
  Description of Artificial Sequence: Synthetic oligonucleotide
  Antisense strand to SEQ ID NO: 675302
ugcaauaaggaaguaucac

SEQ ID NO: 675304 - RNA, 19 nt, Artificial Sequence
  Description of Artificial Sequence: Synthetic oligonucleotide
  Sense strand starting at position 724 of SEQ ID NO: 585885
uggcaaggauguguacaaa

SEQ ID NO: 675305 - RNA, 19 nt, Artificial Sequence
  Description of Artificial Sequence: Synthetic oligonucleotide
  Antisense strand to SEQ ID NO: 675304
uuuguacacauccuugcca

SEQ ID NO: 675306 - RNA, 19 nt, Artificial Sequence
  Description of Artificial Sequence: Synthetic oligonucleotide
  Sense strand starting at position 749 of SEQ ID NO: 585885
agacaagugacauguguga

SEQ ID NO: 675307 - RNA, 19 nt, Artificial Sequence
  Description of Artificial Sequence: Synthetic oligonucleotide
  Antisense strand to SEQ ID NO: 675306
ucacacaugucacuugucu

SEQ ID NO: 675308 - RNA, 19 nt, Artificial Sequence
  Description of Artificial Sequence: Synthetic oligonucleotide
  Sense strand starting at position 751 of SEQ ID NO: 585885
acaagugacaugugugaac

SEQ ID NO: 675309 - RNA, 19 nt, Artificial Sequence
  Description of Artificial Sequence: Synthetic oligonucleotide
  Antisense strand to SEQ ID NO: 675308
guucacacaugucacuugu

SEQ ID NO: 675310 - RNA, 19 nt, Artificial Sequence
  Description of Artificial Sequence: Synthetic oligonucleotide
  Sense strand starting at position 792 of SEQ ID NO: 585885
uguagucaauaucuuuaca

SEQ ID NO: 675311 - RNA, 19 nt, Artificial Sequence
  Description of Artificial Sequence: Synthetic oligonucleotide
  Antisense strand to SEQ ID NO: 675310
uguaaagauauugacuaca

SEQ ID NO: 675312 - RNA, 19 nt, Artificial Sequence
  Description of Artificial Sequence: Synthetic oligonucleotide
  Sense strand starting at position 821 of SEQ ID NO: 585885
aguuuaaucuuccugugac

SEQ ID NO: 675313 - RNA, 19 nt, Artificial Sequence
  Description of Artificial Sequence: Synthetic oligonucleotide
  Antisense strand to SEQ ID NO: 675312
gucacaggaagauuaaacu

SEQ ID NO: 675314 - RNA, 19 nt, Artificial Sequence
  Description of Artificial Sequence: Synthetic oligonucleotide
  Sense strand starting at position 2035 of SEQ ID NO: 585885
uuccuugugauagggaauu

SEQ ID NO: 675315 - RNA, 19 nt, Artificial Sequence
  Description of Artificial Sequence: Synthetic oligonucleotide
  Antisense strand to SEQ ID NO: 675314
aauucccuaucacaaggaa

SEQ ID NO: 675316 - RNA, 19 nt, Artificial Sequence
  Description of Artificial Sequence: Synthetic oligonucleotide
  Sense strand starting at position 2091 of SEQ ID NO: 585885
ugcauaugugaguacuuac

SEQ ID NO: 675317 - RNA, 19 nt, Artificial Sequence
  Description of Artificial Sequence: Synthetic oligonucleotide
  Antisense strand to SEQ ID NO: 675316
guaaguacucacauaugca

SEQ ID NO: 675318 - RNA, 19 nt, Artificial Sequence
  Description of Artificial Sequence: Synthetic oligonucleotide
  Sense strand starting at position 2094 of SEQ ID NO: 585885
auaugugaguacuuacaaa

SEQ ID NO: 675319 - RNA, 19 nt, Artificial Sequence
  Description of Artificial Sequence: Synthetic oligonucleotide
  Antisense strand to SEQ ID NO: 675318
uuuguaaguacucacauau

SEQ ID NO: 675320 - RNA, 19 nt, Artificial Sequence
  Description of Artificial Sequence: Synthetic oligonucleotide
  Sense strand starting at position 2201 of SEQ ID NO: 585885
auaauuauuucugucgcua

SEQ ID NO: 675321 - RNA, 19 nt, Artificial Sequence
  Description of Artificial Sequence: Synthetic oligonucleotide
  Antisense strand to SEQ ID NO: 675320
uagcgacagaaauaauuau

SEQ ID NO: 675322 - RNA, 19 nt, Artificial Sequence
  Description of Artificial Sequence: Synthetic oligonucleotide
  Sense strand starting at position 2268 of SEQ ID NO: 585885
ucagcugaguaaucacauu

SEQ ID NO: 675323 - RNA, 19 nt, Artificial Sequence
  Description of Artificial Sequence: Synthetic oligonucleotide
  Antisense strand to SEQ ID NO: 675322
aaugugauuacucagcuga

SEQ ID NO: 675324 - RNA, 19 nt, Artificial Sequence
  Description of Artificial Sequence: Synthetic oligonucleotide
  Sense strand starting at position 2376 of SEQ ID NO: 585885
uuacauauuugagaaguca

SEQ ID NO: 675325 - RNA, 19 nt, Artificial Sequence
  Description of Artificial Sequence: Synthetic oligonucleotide
  Antisense strand to SEQ ID NO: 675324
ugacuucucaaauauguaa

SEQ ID NO: 675326 - RNA, 19 nt, Artificial Sequence
  Description of Artificial Sequence: Synthetic oligonucleotide
  Sense strand starting at position 2481 of SEQ ID NO: 585885
cauaguguaaggugugaau

SEQ ID NO: 675327 - RNA, 19 nt, Artificial Sequence
  Description of Artificial Sequence: Synthetic oligonucleotide
  Antisense strand to SEQ ID NO: 675326
auucacaccuuacacuaug

SEQ ID NO: 675328 - RNA, 19 nt, Artificial Sequence
  Description of Artificial Sequence: Synthetic oligonucleotide
  Sense strand starting at position 2483 of SEQ ID NO: 585885
uaguguaaggugugaauca

SEQ ID NO: 675329 - RNA, 19 nt, Artificial Sequence
  Description of Artificial Sequence: Synthetic oligonucleotide
  Antisense strand to SEQ ID NO: 675328
ugauucacaccuuacacua

SEQ ID NO: 675330 - RNA, 19 nt, Artificial Sequence
  Description of Artificial Sequence: Synthetic oligonucleotide
  Sense strand starting at position 2553 of SEQ ID NO: 585885
ggagaacuguuucucugug

SEQ ID NO: 675331 - RNA, 19 nt, Artificial Sequence
  Description of Artificial Sequence: Synthetic oligonucleotide
  Antisense strand to SEQ ID NO: 675330
cacagagaaacaguucucc

SEQ ID NO: 675332 - RNA, 19 nt, Artificial Sequence
  Description of Artificial Sequence: Synthetic oligonucleotide
  Sense strand starting at position 2572 of SEQ ID NO: 585885
cucugcaacuugguagaaa

SEQ ID NO: 675333 - RNA, 19 nt, Artificial Sequence
  Description of Artificial Sequence: Synthetic oligonucleotide
  Antisense strand to SEQ ID NO: 675332
uuucuaccaaguugcagag

SEQ ID NO: 675334 - RNA, 19 nt, Artificial Sequence
  Description of Artificial Sequence: Synthetic oligonucleotide
  Sense strand starting at position 2823 of SEQ ID NO: 585885
gccugucauaguguucgau

SEQ ID NO: 675335 - RNA, 19 nt, Artificial Sequence
  Description of Artificial Sequence: Synthetic oligonucleotide
  Antisense strand to SEQ ID NO: 675334
aucgaacacuaugacaggc

SEQ ID NO: 675336 - RNA, 19 nt, Artificial Sequence
  Description of Artificial Sequence: Synthetic oligonucleotide
  Sense strand starting at position 2835 of SEQ ID NO: 585885
guucgauauuugcuaugga

SEQ ID NO: 675337 - RNA, 19 nt, Artificial Sequence
  Description of Artificial Sequence: Synthetic oligonucleotide
  Antisense strand to SEQ ID NO: 675336
uccauagcaaauaucgaac

SEQ ID NO: 675338 - RNA, 19 nt, Artificial Sequence
  Description of Artificial Sequence: Synthetic oligonucleotide
  Sense strand starting at position 2849 of SEQ ID NO: 585885
auggaaugcccuuggacaa

SEQ ID NO: 675339 - RNA, 19 nt, Artificial Sequence
  Description of Artificial Sequence: Synthetic oligonucleotide
  Antisense strand to SEQ ID NO: 675338
uuguccaagggcauuccau

SEQ ID NO: 675340 - RNA, 19 nt, Artificial Sequence
  Description of Artificial Sequence: Synthetic oligonucleotide
  Sense strand starting at position 2850 of SEQ ID NO: 585885
uggaaugcccuuggacaaa

SEQ ID NO: 675341 - RNA, 19 nt, Artificial Sequence
  Description of Artificial Sequence: Synthetic oligonucleotide
  Antisense strand to SEQ ID NO: 675340
uuuguccaagggcauucca

SEQ ID NO: 675342 - RNA, 19 nt, Artificial Sequence
  Description of Artificial Sequence: Synthetic oligonucleotide
  Sense strand starting at position 2870 of SEQ ID NO: 585885
agguauuugcagggcaagu

SEQ ID NO: 675343 - RNA, 19 nt, Artificial Sequence
  Description of Artificial Sequence: Synthetic oligonucleotide
  Antisense strand to SEQ ID NO: 675342
acuugcccugcaaauaccu

SEQ ID NO: 675344 - RNA, 19 nt, Artificial Sequence
  Description of Artificial Sequence: Synthetic oligonucleotide
  Sense strand starting at position 2982 of SEQ ID NO: 585885
aguaauaugccauagucag

SEQ ID NO: 675345 - RNA, 19 nt, Artificial Sequence
  Description of Artificial Sequence: Synthetic oligonucleotide
  Antisense strand to SEQ ID NO: 675344
cugacuauggcauauuacu

SEQ ID NO: 675346 - RNA, 19 nt, Artificial Sequence
  Description of Artificial Sequence: Synthetic oligonucleotide
  Sense strand starting at position 3108 of SEQ ID NO: 585885
gcacuugauaccuggauug

SEQ ID NO: 675347 - RNA, 19 nt, Artificial Sequence
  Description of Artificial Sequence: Synthetic oligonucleotide
  Antisense strand to SEQ ID NO: 675346
caauccagguaucaagugc

SEQ ID NO: 675348 - RNA, 19 nt, Artificial Sequence
  Description of Artificial Sequence: Synthetic oligonucleotide
  Sense strand starting at position 3149 of SEQ ID NO: 585885
ugcugaggagcucaucaaa

SEQ ID NO: 675349 - RNA, 19 nt, Artificial Sequence
  Description of Artificial Sequence: Synthetic oligonucleotide
  Antisense strand to SEQ ID NO: 675348
uuugaugagcuccucagca

SEQ ID NO: 675350 - RNA, 19 nt, Artificial Sequence
  Description of Artificial Sequence: Synthetic oligonucleotide
  Sense strand starting at position 3152 of SEQ ID NO: 585885
ugaggagcucaucaaacgu

SEQ ID NO: 675351 - RNA, 19 nt, Artificial Sequence
  Description of Artificial Sequence: Synthetic oligonucleotide
  Antisense strand to SEQ ID NO: 675350
acguuugaugagcuccuca

SEQ ID NO: 675352 - RNA, 19 nt, Artificial Sequence
  Description of Artificial Sequence: Synthetic oligonucleotide
  Sense strand starting at position 3269 of SEQ ID NO: 585885
aguccucugcagggaugaa

SEQ ID NO: 675353 - RNA, 19 nt, Artificial Sequence
  Description of Artificial Sequence: Synthetic oligonucleotide
  Antisense strand to SEQ ID NO: 675352
uucaucccugcagaggacu

SEQ ID NO: 675354 - RNA, 19 nt, Artificial Sequence
  Description of Artificial Sequence: Synthetic oligonucleotide
  Sense strand starting at position 3270 of SEQ ID NO: 585885
guccucugcagggaugaaa

SEQ ID NO: 675355 - RNA, 19 nt, Artificial Sequence
  Description of Artificial Sequence: Synthetic oligonucleotide
  Antisense strand to SEQ ID NO: 675354
uuucaucccugcagaggac

SEQ ID NO: 675356 - RNA, 19 nt, Artificial Sequence
  Description of Artificial Sequence: Synthetic oligonucleotide
  Sense strand starting at position 3404 of SEQ ID NO: 585885
gguguaaugcaagacuacu

SEQ ID NO: 675357 - RNA, 19 nt, Artificial Sequence
  Description of Artificial Sequence: Synthetic oligonucleotide
  Antisense strand to SEQ ID NO: 675356
aguagucuugcauuacacc

SEQ ID NO: 675358 - RNA, 19 nt, Artificial Sequence
  Description of Artificial Sequence: Synthetic oligonucleotide
  Sense strand starting at position 3416 of SEQ ID NO: 585885
gacuacuaguggucugaag

SEQ ID NO: 675359 - RNA, 19 nt, Artificial Sequence
  Description of Artificial Sequence: Synthetic oligonucleotide
  Antisense strand to SEQ ID NO: 675358
cuucagaccacuaguaguc

SEQ ID NO: 675360 - RNA, 19 nt, Artificial Sequence
  Description of Artificial Sequence: Synthetic oligonucleotide
  Sense strand starting at position 3565 of SEQ ID NO: 585885
cagucauaugcccauggaa

SEQ ID NO: 675361 - RNA, 19 nt, Artificial Sequence
  Description of Artificial Sequence: Synthetic oligonucleotide
  Antisense strand to SEQ ID NO: 675360
uuccaugggcauaugacug

SEQ ID NO: 675362 - RNA, 19 nt, Artificial Sequence
  Description of Artificial Sequence: Synthetic oligonucleotide
  Sense strand starting at position 3567 of SEQ ID NO: 585885
gucauaugcccauggaaua

SEQ ID NO: 675363 - RNA, 19 nt, Artificial Sequence
  Description of Artificial Sequence: Synthetic oligonucleotide
  Antisense strand to SEQ ID NO: 675362
uauuccaugggcauaugac

SEQ ID NO: 675364 - RNA, 19 nt, Artificial Sequence
  Description of Artificial Sequence: Synthetic oligonucleotide
  Sense strand starting at position 3568 of SEQ ID NO: 585885
ucauaugcccauggaauaa

SEQ ID NO: 675365 - RNA, 19 nt, Artificial Sequence
  Description of Artificial Sequence: Synthetic oligonucleotide
  Antisense strand to SEQ ID NO: 675364
uuauuccaugggcauauga

SEQ ID NO: 675366 - RNA, 19 nt, Artificial Sequence
  Description of Artificial Sequence: Synthetic oligonucleotide
  Sense strand starting at position 3623 of SEQ ID NO: 585885
guaauagcagcucaaugau

SEQ ID NO: 675367 - RNA, 19 nt, Artificial Sequence
  Description of Artificial Sequence: Synthetic oligonucleotide
  Antisense strand to SEQ ID NO: 675366
aucauugagcugcuauuac

SEQ ID NO: 675368 - RNA, 19 nt, Artificial Sequence
  Description of Artificial Sequence: Synthetic oligonucleotide
  Sense strand starting at position 3781 of SEQ ID NO: 585885
gggauuaagaagcgagauu

SEQ ID NO: 675369 - RNA, 19 nt, Artificial Sequence
  Description of Artificial Sequence: Synthetic oligonucleotide
  Antisense strand to SEQ ID NO: 675368
aaucucgcuucuuaauccc

SEQ ID NO: 675370 - RNA, 19 nt, Artificial Sequence
  Description of Artificial Sequence: Synthetic oligonucleotide
  Sense strand starting at position 3904 of SEQ ID NO: 585885
ccuccacagcaguauauau

SEQ ID NO: 675371 - RNA, 19 nt, Artificial Sequence
  Description of Artificial Sequence: Synthetic oligonucleotide
  Antisense strand to SEQ ID NO: 675370
auauauacugcuguggagg

SEQ ID NO: 675372 - RNA, 19 nt, Artificial Sequence
  Description of Artificial Sequence: Synthetic oligonucleotide
  Sense strand starting at position 3937 of SEQ ID NO: 585885
cagauaugauaugccaguu

SEQ ID NO: 675373 - RNA, 19 nt, Artificial Sequence
  Description of Artificial Sequence: Synthetic oligonucleotide
  Antisense strand to SEQ ID NO: 675372
aacuggcauaucauaucug

SEQ ID NO: 675374 - RNA, 19 nt, Artificial Sequence
  Description of Artificial Sequence: Synthetic oligonucleotide
  Sense strand starting at position 3943 of SEQ ID NO: 585885
ugauaugccaguuaggaua

SEQ ID NO: 675375 - RNA, 19 nt, Artificial Sequence
  Description of Artificial Sequence: Synthetic oligonucleotide
  Antisense strand to SEQ ID NO: 675374
uauccuaacuggcauauca

SEQ ID NO: 675376 - RNA, 19 nt, Artificial Sequence
  Description of Artificial Sequence: Synthetic oligonucleotide
  Sense strand starting at position 27 of SEQ ID NO: 585886
aauguauaaucagauggga

SEQ ID NO: 675377 - RNA, 19 nt, Artificial Sequence
  Description of Artificial Sequence: Synthetic oligonucleotide
  Antisense strand to SEQ ID NO: 675376
ucccaucugauuauacauu

SEQ ID NO: 675378 - RNA, 19 nt, Artificial Sequence
  Description of Artificial Sequence: Synthetic oligonucleotide
  Sense strand starting at position 55 of SEQ ID NO: 585886
cuguuccuagaguguauaa

SEQ ID NO: 675379 - RNA, 19 nt, Artificial Sequence
  Description of Artificial Sequence: Synthetic oligonucleotide
  Antisense strand to SEQ ID NO: 675378
uuauacacucuaggaacag

SEQ ID NO: 675380 - RNA, 19 nt, Artificial Sequence
  Description of Artificial Sequence: Synthetic oligonucleotide
  Sense strand starting at position 57 of SEQ ID NO: 585886
guuccuagaguguauaaua

SEQ ID NO: 675381 - RNA, 19 nt, Artificial Sequence
  Description of Artificial Sequence: Synthetic oligonucleotide
  Antisense strand to SEQ ID NO: 675380
uauuauacacucuaggaac

SEQ ID NO: 675382 - RNA, 19 nt, Artificial Sequence
  Description of Artificial Sequence: Synthetic oligonucleotide
  Sense strand starting at position 119 of SEQ ID NO: 585886
uuggauuacucagcuuuau

SEQ ID NO: 675383 - RNA, 19 nt, Artificial Sequence
  Description of Artificial Sequence: Synthetic oligonucleotide
  Antisense strand to SEQ ID NO: 675382
auaaagcugaguaauccaa

SEQ ID NO: 675384 - RNA, 19 nt, Artificial Sequence
  Description of Artificial Sequence: Synthetic oligonucleotide
  Sense strand starting at position 318 of SEQ ID NO: 585886
uaagauguaguguguauuc

SEQ ID NO: 675385 - RNA, 19 nt, Artificial Sequence
  Description of Artificial Sequence: Synthetic oligonucleotide
  Antisense strand to SEQ ID NO: 675384
gaauacacacuacaucuua

SEQ ID NO: 675386 - RNA, 19 nt, Artificial Sequence
  Description of Artificial Sequence: Synthetic oligonucleotide
  Sense strand starting at position 436 of SEQ ID NO: 585886
gaugaucucugagcacuag

SEQ ID NO: 675387 - RNA, 19 nt, Artificial Sequence
  Description of Artificial Sequence: Synthetic oligonucleotide
  Antisense strand to SEQ ID NO: 675386
cuagugcucagagaucauc

SEQ ID NO: 675388 - RNA, 19 nt, Artificial Sequence
  Description of Artificial Sequence: Synthetic oligonucleotide
  Sense strand starting at position 442 of SEQ ID NO: 585886
cucugagcacuagaaaguu

SEQ ID NO: 675389 - RNA, 19 nt, Artificial Sequence
  Description of Artificial Sequence: Synthetic oligonucleotide
  Antisense strand to SEQ ID NO: 675388
aacuuucuagugcucagag

SEQ ID NO: 675390 - RNA, 19 nt, Artificial Sequence
  Description of Artificial Sequence: Synthetic oligonucleotide
  Sense strand starting at position 514 of SEQ ID NO: 585886
uuuauaauacugugucuac

SEQ ID NO: 675391 - RNA, 19 nt, Artificial Sequence
  Description of Artificial Sequence: Synthetic oligonucleotide
  Antisense strand to SEQ ID NO: 675390
guagacacaguauuauaaa

SEQ ID NO: 675392 - RNA, 19 nt, Artificial Sequence
  Description of Artificial Sequence: Synthetic oligonucleotide
  Sense strand starting at position 515 of SEQ ID NO: 585886
uuauaauacugugucuacu

SEQ ID NO: 675393 - RNA, 19 nt, Artificial Sequence
  Description of Artificial Sequence: Synthetic oligonucleotide
  Antisense strand to SEQ ID NO: 675392
aguagacacaguauuauaa

SEQ ID NO: 675394 - RNA, 19 nt, Artificial Sequence
  Description of Artificial Sequence: Synthetic oligonucleotide
  Sense strand starting at position 639 of SEQ ID NO: 585886
ugaucaugagugugggaga

SEQ ID NO: 675395 - RNA, 19 nt, Artificial Sequence
  Description of Artificial Sequence: Synthetic oligonucleotide
  Antisense strand to SEQ ID NO: 675394
ucucccacacucaugauca

SEQ ID NO: 675396 - RNA, 19 nt, Artificial Sequence
  Description of Artificial Sequence: Synthetic oligonucleotide
  Sense strand starting at position 835 of SEQ ID NO: 585886
uugaauguauuguccuaca

SEQ ID NO: 675397 - RNA, 19 nt, Artificial Sequence
  Description of Artificial Sequence: Synthetic oligonucleotide
  Antisense strand to SEQ ID NO: 675396
uguaggacaauacauucaa

SEQ ID NO: 675398 - RNA, 19 nt, Artificial Sequence
  Description of Artificial Sequence: Synthetic oligonucleotide
  Sense strand starting at position 933 of SEQ ID NO: 585886
aggucucuacaguaauguu

SEQ ID NO: 675399 - RNA, 19 nt, Artificial Sequence
  Description of Artificial Sequence: Synthetic oligonucleotide
  Antisense strand to SEQ ID NO: 675398
aacauuacuguagagaccu

SEQ ID NO: 675400 - RNA, 19 nt, Artificial Sequence
  Description of Artificial Sequence: Synthetic oligonucleotide
  Sense strand starting at position 2160 of SEQ ID NO: 585886
acgucuugaucuuucuaaa

SEQ ID NO: 675401 - RNA, 19 nt, Artificial Sequence
  Description of Artificial Sequence: Synthetic oligonucleotide
  Antisense strand to SEQ ID NO: 675400
uuuagaaagaucaagacgu

SEQ ID NO: 675402 - RNA, 19 nt, Artificial Sequence
  Description of Artificial Sequence: Synthetic oligonucleotide
  Sense strand starting at position 2346 of SEQ ID NO: 585886
guuaguuuaucuucugaaa

SEQ ID NO: 675403 - RNA, 19 nt, Artificial Sequence
  Description of Artificial Sequence: Synthetic oligonucleotide
  Antisense strand to SEQ ID NO: 675402
uuucagaagauaaacuaac

SEQ ID NO: 675404 - RNA, 19 nt, Artificial Sequence
  Description of Artificial Sequence: Synthetic oligonucleotide
  Sense strand starting at position 2391 of SEQ ID NO: 585886
agaaguaauuaggcuauca

SEQ ID NO: 675405 - RNA, 19 nt, Artificial Sequence
  Description of Artificial Sequence: Synthetic oligonucleotide
  Antisense strand to SEQ ID NO: 675404
ugauagccuaauuacuucu

SEQ ID NO: 675406 - RNA, 19 nt, Artificial Sequence
  Description of Artificial Sequence: Synthetic oligonucleotide
  Sense strand starting at position 2412 of SEQ ID NO: 585886
ggcugagcuuuauuucuua

SEQ ID NO: 675407 - RNA, 19 nt, Artificial Sequence
  Description of Artificial Sequence: Synthetic oligonucleotide
  Antisense strand to SEQ ID NO: 675406
uaagaaauaaagcucagcc

SEQ ID NO: 675408 - RNA, 19 nt, Artificial Sequence
  Description of Artificial Sequence: Synthetic oligonucleotide
  Sense strand starting at position 2449 of SEQ ID NO: 585886
gcacuuuagcaguaaugac

SEQ ID NO: 675409 - RNA, 19 nt, Artificial Sequence
  Description of Artificial Sequence: Synthetic oligonucleotide
  Antisense strand to SEQ ID NO: 675408
gucauuacugcuaaagugc

SEQ ID NO: 675410 - RNA, 19 nt, Artificial Sequence
  Description of Artificial Sequence: Synthetic oligonucleotide
  Sense strand starting at position 2541 of SEQ ID NO: 585886
ugguauggagugugaagau

SEQ ID NO: 675411 - RNA, 19 nt, Artificial Sequence
  Description of Artificial Sequence: Synthetic oligonucleotide
  Antisense strand to SEQ ID NO: 675410
aucuucacacuccauacca

SEQ ID NO: 675412 - RNA, 19 nt, Artificial Sequence
  Description of Artificial Sequence: Synthetic oligonucleotide
  Sense strand starting at position 2709 of SEQ ID NO: 585886
aacugauauuagucagugu

SEQ ID NO: 675413 - RNA, 19 nt, Artificial Sequence
  Description of Artificial Sequence: Synthetic oligonucleotide
  Antisense strand to SEQ ID NO: 675412
acacugacuaauaucaguu

SEQ ID NO: 675414 - RNA, 19 nt, Artificial Sequence
  Description of Artificial Sequence: Synthetic oligonucleotide
  Sense strand starting at position 2710 of SEQ ID NO: 585886
acugauauuagucagugua

SEQ ID NO: 675415 - RNA, 19 nt, Artificial Sequence
  Description of Artificial Sequence: Synthetic oligonucleotide
  Antisense strand to SEQ ID NO: 675414
uacacugacuaauaucagu

SEQ ID NO: 675416 - RNA, 19 nt, Artificial Sequence
  Description of Artificial Sequence: Synthetic oligonucleotide
  Sense strand starting at position 2712 of SEQ ID NO: 585886
ugauauuagucaguguaaa

SEQ ID NO: 675417 - RNA, 19 nt, Artificial Sequence
  Description of Artificial Sequence: Synthetic oligonucleotide
  Antisense strand to SEQ ID NO: 675416
uuuacacugacuaauauca

SEQ ID NO: 675418 - RNA, 19 nt, Artificial Sequence
  Description of Artificial Sequence: Synthetic oligonucleotide
  Sense strand starting at position 2927 of SEQ ID NO: 585886
ugcugagucauccaaggug

SEQ ID NO: 675419 - RNA, 19 nt, Artificial Sequence
  Description of Artificial Sequence: Synthetic oligonucleotide
  Antisense strand to SEQ ID NO: 675418
caccuuggaugacucagca

SEQ ID NO: 675420 - RNA, 19 nt, Artificial Sequence
  Description of Artificial Sequence: Synthetic oligonucleotide
  Sense strand starting at position 2930 of SEQ ID NO: 585886
ugagucauccaaggugcaa

SEQ ID NO: 675421 - RNA, 19 nt, Artificial Sequence
  Description of Artificial Sequence: Synthetic oligonucleotide
  Antisense strand to SEQ ID NO: 675420
uugcaccuuggaugacuca

SEQ ID NO: 675422 - RNA, 19 nt, Artificial Sequence
  Description of Artificial Sequence: Synthetic oligonucleotide
  Sense strand starting at position 2965 of SEQ ID NO: 585886
uuucucuagguguaugagu

SEQ ID NO: 675423 - RNA, 19 nt, Artificial Sequence
  Description of Artificial Sequence: Synthetic oligonucleotide
  Antisense strand to SEQ ID NO: 675422
acucauacaccuagagaaa

SEQ ID NO: 675424 - RNA, 19 nt, Artificial Sequence
  Description of Artificial Sequence: Synthetic oligonucleotide
  Sense strand starting at position 3005 of SEQ ID NO: 585886
gggucuuaagaagguuuaa

SEQ ID NO: 675425 - RNA, 19 nt, Artificial Sequence
  Description of Artificial Sequence: Synthetic oligonucleotide
  Antisense strand to SEQ ID NO: 675424
uuaaaccuucuuaagaccc

SEQ ID NO: 675426 - RNA, 19 nt, Artificial Sequence
  Description of Artificial Sequence: Synthetic oligonucleotide
  Sense strand starting at position 3088 of SEQ ID NO: 585886
uuggaaucuuaaucuuuga

SEQ ID NO: 675427 - RNA, 19 nt, Artificial Sequence
  Description of Artificial Sequence: Synthetic oligonucleotide
  Antisense strand to SEQ ID NO: 675426
ucaaagauuaagauuccaa

SEQ ID NO: 675428 - RNA, 19 nt, Artificial Sequence
  Description of Artificial Sequence: Synthetic oligonucleotide
  Sense strand starting at position 3095 of SEQ ID NO: 585886
cuuaaucuuugagcuagag

SEQ ID NO: 675429 - RNA, 19 nt, Artificial Sequence
  Description of Artificial Sequence: Synthetic oligonucleotide
  Antisense strand to SEQ ID NO: 675428
cucuagcucaaagauuaag

SEQ ID NO: 675430 - RNA, 19 nt, Artificial Sequence
  Description of Artificial Sequence: Synthetic oligonucleotide
  Sense strand starting at position 3104 of SEQ ID NO: 585886
ugagcuagagacugaacua

SEQ ID NO: 675431 - RNA, 19 nt, Artificial Sequence
  Description of Artificial Sequence: Synthetic oligonucleotide
  Antisense strand to SEQ ID NO: 675430
uaguucagucucuagcuca

SEQ ID NO: 675432 - RNA, 19 nt, Artificial Sequence
  Description of Artificial Sequence: Synthetic oligonucleotide
  Sense strand starting at position 3130 of SEQ ID NO: 585886
uggcauuaacccuaugcca

SEQ ID NO: 675433 - RNA, 19 nt, Artificial Sequence
  Description of Artificial Sequence: Synthetic oligonucleotide
  Antisense strand to SEQ ID NO: 675432
uggcauaggguuaaugcca

SEQ ID NO: 675434 - RNA, 19 nt, Artificial Sequence
  Description of Artificial Sequence: Synthetic oligonucleotide
  Sense strand starting at position 3132 of SEQ ID NO: 585886
gcauuaacccuaugccaug

SEQ ID NO: 675435 - RNA, 19 nt, Artificial Sequence
  Description of Artificial Sequence: Synthetic oligonucleotide
  Antisense strand to SEQ ID NO: 675434
cauggcauaggguuaaugc

SEQ ID NO: 675436 - RNA, 19 nt, Artificial Sequence
  Description of Artificial Sequence: Synthetic oligonucleotide
  Sense strand starting at position 3150 of SEQ ID NO: 585886
gggucugggcucuguugaa

SEQ ID NO: 675437 - RNA, 19 nt, Artificial Sequence
  Description of Artificial Sequence: Synthetic oligonucleotide
  Antisense strand to SEQ ID NO: 675436
uucaacagagcccagaccc

SEQ ID NO: 675438 - RNA, 19 nt, Artificial Sequence
  Description of Artificial Sequence: Synthetic oligonucleotide
  Sense strand starting at position 3154 of SEQ ID NO: 585886
cugggcucuguugaaagua

SEQ ID NO: 675439 - RNA, 19 nt, Artificial Sequence
  Description of Artificial Sequence: Synthetic oligonucleotide
  Antisense strand to SEQ ID NO: 675438
uacuuucaacagagcccag

SEQ ID NO: 675440 - RNA, 19 nt, Artificial Sequence
  Description of Artificial Sequence: Synthetic oligonucleotide
  Sense strand starting at position 3187 of SEQ ID NO: 585886
agguuacaugcauacacau

SEQ ID NO: 675441 - RNA, 19 nt, Artificial Sequence
  Description of Artificial Sequence: Synthetic oligonucleotide
  Antisense strand to SEQ ID NO: 675440
auguguaugcauguaaccu

SEQ ID NO: 675442 - RNA, 19 nt, Artificial Sequence
  Description of Artificial Sequence: Synthetic oligonucleotide
  Sense strand starting at position 3528 of SEQ ID NO: 585886
cuccuaggauuccucagaa

SEQ ID NO: 675443 - RNA, 19 nt, Artificial Sequence
  Description of Artificial Sequence: Synthetic oligonucleotide
  Antisense strand to SEQ ID NO: 675442
uucugaggaauccuaggag

SEQ ID NO: 675444 - RNA, 19 nt, Artificial Sequence
  Description of Artificial Sequence: Synthetic oligonucleotide
  Sense strand starting at position 3813 of SEQ ID NO: 585886
ugaccacuuuccucaguuu

SEQ ID NO: 675445 - RNA, 19 nt, Artificial Sequence
  Description of Artificial Sequence: Synthetic oligonucleotide
  Antisense strand to SEQ ID NO: 675444
aaacugaggaaagugguca

SEQ ID NO: 675446 - RNA, 19 nt, Artificial Sequence
  Description of Artificial Sequence: Synthetic oligonucleotide
  Sense strand starting at position 3857 of SEQ ID NO: 585886
gccuuuagucucguagagu

SEQ ID NO: 675447 - RNA, 19 nt, Artificial Sequence
  Description of Artificial Sequence: Synthetic oligonucleotide
  Antisense strand to SEQ ID NO: 675446
acucuacgagacuaaaggc

SEQ ID NO: 675448 - RNA, 19 nt, Artificial Sequence
  Description of Artificial Sequence: Synthetic oligonucleotide
  Sense strand starting at position 3887 of SEQ ID NO: 585886
ggcccauuccuggaagcca

SEQ ID NO: 675449 - RNA, 19 nt, Artificial Sequence
  Description of Artificial Sequence: Synthetic oligonucleotide
  Antisense strand to SEQ ID NO: 675448
uggcuuccaggaaugggcc

SEQ ID NO: 675450 - RNA, 19 nt, Artificial Sequence
  Description of Artificial Sequence: Synthetic oligonucleotide
  Sense strand starting at position 3941 of SEQ ID NO: 585886
acaucuugguguuuaauac

SEQ ID NO: 675451 - RNA, 19 nt, Artificial Sequence
  Description of Artificial Sequence: Synthetic oligonucleotide
  Antisense strand to SEQ ID NO: 675450
guauuaaacaccaagaugu

SEQ ID NO: 675452 - RNA, 19 nt, Artificial Sequence
  Description of Artificial Sequence: Synthetic oligonucleotide
  Sense strand starting at position 3948 of SEQ ID NO: 585886
gguguuuaauaccuuuauc

SEQ ID NO: 675453 - RNA, 19 nt, Artificial Sequence
  Description of Artificial Sequence: Synthetic oligonucleotide
  Antisense strand to SEQ ID NO: 675452
gauaaagguauuaaacacc

SEQ ID NO: 675454 - RNA, 19 nt, Artificial Sequence
  Description of Artificial Sequence: Synthetic oligonucleotide
  Sense strand starting at position 3958 of SEQ ID NO: 585886
accuuuauccaguaagagc

SEQ ID NO: 675455 - RNA, 19 nt, Artificial Sequence
  Description of Artificial Sequence: Synthetic oligonucleotide
  Antisense strand to SEQ ID NO: 675454
gcucuuacuggauaaaggu

SEQ ID NO: 675456 - RNA, 19 nt, Artificial Sequence
  Description of Artificial Sequence: Synthetic oligonucleotide
  Sense strand starting at position 99 of SEQ ID NO: 585887
ucaucaguguccuuaagag

SEQ ID NO: 675457 - RNA, 19 nt, Artificial Sequence
  Description of Artificial Sequence: Synthetic oligonucleotide
  Antisense strand to SEQ ID NO: 675456
cucuuaaggacacugauga

SEQ ID NO: 675458 - RNA, 19 nt, Artificial Sequence
  Description of Artificial Sequence: Synthetic oligonucleotide
  Sense strand starting at position 103 of SEQ ID NO: 585887
caguguccuuaagagaaua

SEQ ID NO: 675459 - RNA, 19 nt, Artificial Sequence
  Description of Artificial Sequence: Synthetic oligonucleotide
  Antisense strand to SEQ ID NO: 675458
uauucucuuaaggacacug

SEQ ID NO: 675460 - RNA, 19 nt, Artificial Sequence
  Description of Artificial Sequence: Synthetic oligonucleotide
  Sense strand starting at position 226 of SEQ ID NO: 585887
ucaguuugauucuugaaag

SEQ ID NO: 675461 - RNA, 19 nt, Artificial Sequence
  Description of Artificial Sequence: Synthetic oligonucleotide
  Antisense strand to SEQ ID NO: 675460
cuuucaagaaucaaacuga

SEQ ID NO: 675462 - RNA, 19 nt, Artificial Sequence
  Description of Artificial Sequence: Synthetic oligonucleotide
  Sense strand starting at position 329 of SEQ ID NO: 585887
uuuguucuauuuccuguua

SEQ ID NO: 675463 - RNA, 19 nt, Artificial Sequence
  Description of Artificial Sequence: Synthetic oligonucleotide
  Antisense strand to SEQ ID NO: 675462
uaacaggaaauagaacaaa

SEQ ID NO: 675464 - RNA, 19 nt, Artificial Sequence
  Description of Artificial Sequence: Synthetic oligonucleotide
  Sense strand starting at position 330 of SEQ ID NO: 585887
uuguucuauuuccuguuaa

SEQ ID NO: 675465 - RNA, 19 nt, Artificial Sequence
  Description of Artificial Sequence: Synthetic oligonucleotide
  Antisense strand to SEQ ID NO: 675464
uuaacaggaaauagaacaa

SEQ ID NO: 675466 - RNA, 19 nt, Artificial Sequence
  Description of Artificial Sequence: Synthetic oligonucleotide
  Sense strand starting at position 342 of SEQ ID NO: 585887
cuguuaacacauugauagu

SEQ ID NO: 675467 - RNA, 19 nt, Artificial Sequence
  Description of Artificial Sequence: Synthetic oligonucleotide
  Antisense strand to SEQ ID NO: 675466
acuaucaauguguuaacag

SEQ ID NO: 675468 - RNA, 19 nt, Artificial Sequence
  Description of Artificial Sequence: Synthetic oligonucleotide
  Sense strand starting at position 348 of SEQ ID NO: 585887
acacauugauaguacauca

SEQ ID NO: 675469 - RNA, 19 nt, Artificial Sequence
  Description of Artificial Sequence: Synthetic oligonucleotide
  Antisense strand to SEQ ID NO: 675468
ugauguacuaucaaugugu

SEQ ID NO: 675470 - RNA, 19 nt, Artificial Sequence
  Description of Artificial Sequence: Synthetic oligonucleotide
  Sense strand starting at position 361 of SEQ ID NO: 585887
acaucauauucguuccaua

SEQ ID NO: 675471 - RNA, 19 nt, Artificial Sequence
  Description of Artificial Sequence: Synthetic oligonucleotide
  Antisense strand to SEQ ID NO: 675470
uauggaacgaauaugaugu

SEQ ID NO: 675472 - RNA, 19 nt, Artificial Sequence
  Description of Artificial Sequence: Synthetic oligonucleotide
  Sense strand starting at position 366 of SEQ ID NO: 585887
auauucguuccauacaugu

SEQ ID NO: 675473 - RNA, 19 nt, Artificial Sequence
  Description of Artificial Sequence: Synthetic oligonucleotide
  Antisense strand to SEQ ID NO: 675472
acauguauggaacgaauau

SEQ ID NO: 675474 - RNA, 19 nt, Artificial Sequence
  Description of Artificial Sequence: Synthetic oligonucleotide
  Sense strand starting at position 394 of SEQ ID NO: 585887
gcagcagaauccuuaaacu

SEQ ID NO: 675475 - RNA, 19 nt, Artificial Sequence
  Description of Artificial Sequence: Synthetic oligonucleotide
  Antisense strand to SEQ ID NO: 675474
aguuuaaggauucugcugc

SEQ ID NO: 675476 - RNA, 19 nt, Artificial Sequence
  Description of Artificial Sequence: Synthetic oligonucleotide
  Sense strand starting at position 622 of SEQ ID NO: 585887
aggugucaauacucugcua

SEQ ID NO: 675477 - RNA, 19 nt, Artificial Sequence
  Description of Artificial Sequence: Synthetic oligonucleotide
  Antisense strand to SEQ ID NO: 675476
uagcagaguauugacaccu

SEQ ID NO: 675478 - RNA, 19 nt, Artificial Sequence
  Description of Artificial Sequence: Synthetic oligonucleotide
  Sense strand starting at position 624 of SEQ ID NO: 585887
gugucaauacucugcuacu

SEQ ID NO: 675479 - RNA, 19 nt, Artificial Sequence
  Description of Artificial Sequence: Synthetic oligonucleotide
  Antisense strand to SEQ ID NO: 675478
aguagcagaguauugacac

SEQ ID NO: 675480 - RNA, 19 nt, Artificial Sequence
  Description of Artificial Sequence: Synthetic oligonucleotide
  Sense strand starting at position 641 of SEQ ID NO: 585887
cuguaugaacaguguagua

SEQ ID NO: 675481 - RNA, 19 nt, Artificial Sequence
  Description of Artificial Sequence: Synthetic oligonucleotide
  Antisense strand to SEQ ID NO: 675480
uacuacacuguucauacag

SEQ ID NO: 675482 - RNA, 19 nt, Artificial Sequence
  Description of Artificial Sequence: Synthetic oligonucleotide
  Sense strand starting at position 643 of SEQ ID NO: 585887
guaugaacaguguaguaag

SEQ ID NO: 675483 - RNA, 19 nt, Artificial Sequence
  Description of Artificial Sequence: Synthetic oligonucleotide
  Antisense strand to SEQ ID NO: 675482
cuuacuacacuguucauac

SEQ ID NO: 675484 - RNA, 19 nt, Artificial Sequence
  Description of Artificial Sequence: Synthetic oligonucleotide
  Sense strand starting at position 650 of SEQ ID NO: 585887
caguguaguaagcagaagu

SEQ ID NO: 675485 - RNA, 19 nt, Artificial Sequence
  Description of Artificial Sequence: Synthetic oligonucleotide
  Antisense strand to SEQ ID NO: 675484
acuucugcuuacuacacug

SEQ ID NO: 675486 - RNA, 19 nt, Artificial Sequence
  Description of Artificial Sequence: Synthetic oligonucleotide
  Sense strand starting at position 749 of SEQ ID NO: 585887
accuuuagaguaugcuaaa

SEQ ID NO: 675487 - RNA, 19 nt, Artificial Sequence
  Description of Artificial Sequence: Synthetic oligonucleotide
  Antisense strand to SEQ ID NO: 675486
uuuagcauacucuaaaggu

SEQ ID NO: 675488 - RNA, 19 nt, Artificial Sequence
  Description of Artificial Sequence: Synthetic oligonucleotide
  Sense strand starting at position 750 of SEQ ID NO: 585887
ccuuuagaguaugcuaaag

SEQ ID NO: 675489 - RNA, 19 nt, Artificial Sequence
  Description of Artificial Sequence: Synthetic oligonucleotide
  Antisense strand to SEQ ID NO: 675488
cuuuagcauacucuaaagg

SEQ ID NO: 675490 - RNA, 19 nt, Artificial Sequence
  Description of Artificial Sequence: Synthetic oligonucleotide
  Sense strand starting at position 863 of SEQ ID NO: 585887
auuauauugccguacaguu

SEQ ID NO: 675491 - RNA, 19 nt, Artificial Sequence
  Description of Artificial Sequence: Synthetic oligonucleotide
  Antisense strand to SEQ ID NO: 675490
aacuguacggcaauauaau

SEQ ID NO: 675492 - RNA, 19 nt, Artificial Sequence
  Description of Artificial Sequence: Synthetic oligonucleotide
  Sense strand starting at position 872 of SEQ ID NO: 585887
ccguacaguugcucugaau

SEQ ID NO: 675493 - RNA, 19 nt, Artificial Sequence
  Description of Artificial Sequence: Synthetic oligonucleotide
  Antisense strand to SEQ ID NO: 675492
auucagagcaacuguacgg

SEQ ID NO: 675494 - RNA, 19 nt, Artificial Sequence
  Description of Artificial Sequence: Synthetic oligonucleotide
  Sense strand starting at position 949 of SEQ ID NO: 585887
gggccuaaauuucgugaac

SEQ ID NO: 675495 - RNA, 19 nt, Artificial Sequence
  Description of Artificial Sequence: Synthetic oligonucleotide
  Antisense strand to SEQ ID NO: 675494
guucacgaaauuuaggccc

SEQ ID NO: 675496 - RNA, 19 nt, Artificial Sequence
  Description of Artificial Sequence: Synthetic oligonucleotide
  Sense strand starting at position 950 of SEQ ID NO: 585887
ggccuaaauuucgugaacu

SEQ ID NO: 675497 - RNA, 19 nt, Artificial Sequence
  Description of Artificial Sequence: Synthetic oligonucleotide
  Antisense strand to SEQ ID NO: 675496
aguucacgaaauuuaggcc

SEQ ID NO: 675498 - RNA, 19 nt, Artificial Sequence
  Description of Artificial Sequence: Synthetic oligonucleotide
  Sense strand starting at position 958 of SEQ ID NO: 585887
uuucgugaacuacggagaa

SEQ ID NO: 675499 - RNA, 19 nt, Artificial Sequence
  Description of Artificial Sequence: Synthetic oligonucleotide
  Antisense strand to SEQ ID NO: 675498
uucuccguaguucacgaaa

SEQ ID NO: 675500 - RNA, 19 nt, Artificial Sequence
  Description of Artificial Sequence: Synthetic oligonucleotide
  Sense strand starting at position 1167 of SEQ ID NO: 585887
uacgacugugccugaacau

SEQ ID NO: 675501 - RNA, 19 nt, Artificial Sequence
  Description of Artificial Sequence: Synthetic oligonucleotide
  Antisense strand to SEQ ID NO: 675500
auguucaggcacagucgua

SEQ ID NO: 675502 - RNA, 19 nt, Artificial Sequence
  Description of Artificial Sequence: Synthetic oligonucleotide
  Sense strand starting at position 1466 of SEQ ID NO: 585887
cugagucaucuuuaacuag

SEQ ID NO: 675503 - RNA, 19 nt, Artificial Sequence
  Description of Artificial Sequence: Synthetic oligonucleotide
  Antisense strand to SEQ ID NO: 675502
cuaguuaaagaugacucag

SEQ ID NO: 675504 - RNA, 19 nt, Artificial Sequence
  Description of Artificial Sequence: Synthetic oligonucleotide
  Sense strand starting at position 1622 of SEQ ID NO: 585887
gcucgauuccaaugaagcu

SEQ ID NO: 675505 - RNA, 19 nt, Artificial Sequence
  Description of Artificial Sequence: Synthetic oligonucleotide
  Antisense strand to SEQ ID NO: 675504
agcuucauuggaaucgagc

SEQ ID NO: 675506 - RNA, 19 nt, Artificial Sequence
  Description of Artificial Sequence: Synthetic oligonucleotide
  Sense strand starting at position 3015 of SEQ ID NO: 585887
gcagaaucgucccuagggu

SEQ ID NO: 675507 - RNA, 19 nt, Artificial Sequence
  Description of Artificial Sequence: Synthetic oligonucleotide
  Antisense strand to SEQ ID NO: 675506
acccuagggacgauucugc

SEQ ID NO: 675508 - RNA, 19 nt, Artificial Sequence
  Description of Artificial Sequence: Synthetic oligonucleotide
  Sense strand starting at position 3302 of SEQ ID NO: 585887
guguuuaauacucagacgu

SEQ ID NO: 675509 - RNA, 19 nt, Artificial Sequence
  Description of Artificial Sequence: Synthetic oligonucleotide
  Antisense strand to SEQ ID NO: 675508
acgucugaguauuaaacac

SEQ ID NO: 675510 - RNA, 19 nt, Artificial Sequence
  Description of Artificial Sequence: Synthetic oligonucleotide
  Sense strand starting at position 3312 of SEQ ID NO: 585887
cucagacguuucucacaau

SEQ ID NO: 675511 - RNA, 19 nt, Artificial Sequence
  Description of Artificial Sequence: Synthetic oligonucleotide
  Antisense strand to SEQ ID NO: 675510
auugugagaaacgucugag

SEQ ID NO: 675512 - RNA, 19 nt, Artificial Sequence
  Description of Artificial Sequence: Synthetic oligonucleotide
  Sense strand starting at position 3318 of SEQ ID NO: 585887
cguuucucacaaugugaaa

SEQ ID NO: 675513 - RNA, 19 nt, Artificial Sequence
  Description of Artificial Sequence: Synthetic oligonucleotide
  Antisense strand to SEQ ID NO: 675512
uuucacauugugagaaacg

SEQ ID NO: 675514 - RNA, 19 nt, Artificial Sequence
  Description of Artificial Sequence: Synthetic oligonucleotide
  Sense strand starting at position 3408 of SEQ ID NO: 585887
uguccauaucccuggcagu

SEQ ID NO: 675515 - RNA, 19 nt, Artificial Sequence
  Description of Artificial Sequence: Synthetic oligonucleotide
  Antisense strand to SEQ ID NO: 675514
acugccagggauauggaca

SEQ ID NO: 675516 - RNA, 19 nt, Artificial Sequence
  Description of Artificial Sequence: Synthetic oligonucleotide
  Sense strand starting at position 3409 of SEQ ID NO: 585887
guccauaucccuggcaguu

SEQ ID NO: 675517 - RNA, 19 nt, Artificial Sequence
  Description of Artificial Sequence: Synthetic oligonucleotide
  Antisense strand to SEQ ID NO: 675516
aacugccagggauauggac

SEQ ID NO: 675518 - RNA, 19 nt, Artificial Sequence
  Description of Artificial Sequence: Synthetic oligonucleotide
  Sense strand starting at position 3421 of SEQ ID NO: 585887
ggcaguuucuuccuugaaa

SEQ ID NO: 675519 - RNA, 19 nt, Artificial Sequence
  Description of Artificial Sequence: Synthetic oligonucleotide
  Antisense strand to SEQ ID NO: 675518
uuucaaggaagaaacugcc

SEQ ID NO: 675520 - RNA, 19 nt, Artificial Sequence
  Description of Artificial Sequence: Synthetic oligonucleotide
  Sense strand starting at position 3422 of SEQ ID NO: 585887
gcaguuucuuccuugaaac

SEQ ID NO: 675521 - RNA, 19 nt, Artificial Sequence
  Description of Artificial Sequence: Synthetic oligonucleotide
  Antisense strand to SEQ ID NO: 675520
guuucaaggaagaaacugc

SEQ ID NO: 675522 - RNA, 19 nt, Artificial Sequence
  Description of Artificial Sequence: Synthetic oligonucleotide
  Sense strand starting at position 3505 of SEQ ID NO: 585887
uguagcuacagugagaauu

SEQ ID NO: 675523 - RNA, 19 nt, Artificial Sequence
  Description of Artificial Sequence: Synthetic oligonucleotide
  Antisense strand to SEQ ID NO: 675522
aauucucacuguagcuaca

SEQ ID NO: 675524 - RNA, 19 nt, Artificial Sequence
  Description of Artificial Sequence: Synthetic oligonucleotide
  Sense strand starting at position 3616 of SEQ ID NO: 585887
accugaagucugggcuaua

SEQ ID NO: 675525 - RNA, 19 nt, Artificial Sequence
  Description of Artificial Sequence: Synthetic oligonucleotide
  Antisense strand to SEQ ID NO: 675524
uauagcccagacuucaggu

SEQ ID NO: 675526 - RNA, 19 nt, Artificial Sequence
  Description of Artificial Sequence: Synthetic oligonucleotide
  Sense strand starting at position 3617 of SEQ ID NO: 585887
ccugaagucugggcuauag

SEQ ID NO: 675527 - RNA, 19 nt, Artificial Sequence
  Description of Artificial Sequence: Synthetic oligonucleotide
  Antisense strand to SEQ ID NO: 675526
cuauagcccagacuucagg

SEQ ID NO: 675528 - RNA, 19 nt, Artificial Sequence
  Description of Artificial Sequence: Synthetic oligonucleotide
  Sense strand starting at position 3619 of SEQ ID NO: 585887
ugaagucugggcuauagca

SEQ ID NO: 675529 - RNA, 19 nt, Artificial Sequence
  Description of Artificial Sequence: Synthetic oligonucleotide
  Antisense strand to SEQ ID NO: 675528
ugcuauagcccagacuuca

SEQ ID NO: 675530 - RNA, 19 nt, Artificial Sequence
  Description of Artificial Sequence: Synthetic oligonucleotide
  Sense strand starting at position 3665 of SEQ ID NO: 585887
agcugaaaguacuuaugau

SEQ ID NO: 675531 - RNA, 19 nt, Artificial Sequence
  Description of Artificial Sequence: Synthetic oligonucleotide
  Antisense strand to SEQ ID NO: 675530
aucauaaguacuuucagcu

SEQ ID NO: 675532 - RNA, 19 nt, Artificial Sequence
  Description of Artificial Sequence: Synthetic oligonucleotide
  Sense strand starting at position 3702 of SEQ ID NO: 585887
auuauucuccauuggugau

SEQ ID NO: 675533 - RNA, 19 nt, Artificial Sequence
  Description of Artificial Sequence: Synthetic oligonucleotide
  Antisense strand to SEQ ID NO: 675532
aucaccaauggagaauaau

SEQ ID NO: 675534 - RNA, 19 nt, Artificial Sequence
  Description of Artificial Sequence: Synthetic oligonucleotide
  Sense strand starting at position 3955 of SEQ ID NO: 585887
augguaggaugauguauuu

SEQ ID NO: 675535 - RNA, 19 nt, Artificial Sequence
  Description of Artificial Sequence: Synthetic oligonucleotide
  Antisense strand to SEQ ID NO: 675534
aaauacaucauccuaccau

SEQ ID NO: 675536 - RNA, 19 nt, Artificial Sequence
  Description of Artificial Sequence: Synthetic oligonucleotide
  Sense strand starting at position 72 of SEQ ID NO: 585888
gagaauugcuugucuacag

SEQ ID NO: 675537 - RNA, 19 nt, Artificial Sequence
  Description of Artificial Sequence: Synthetic oligonucleotide
  Antisense strand to SEQ ID NO: 675536
cuguagacaagcaauucuc

SEQ ID NO: 675538 - RNA, 19 nt, Artificial Sequence
  Description of Artificial Sequence: Synthetic oligonucleotide
  Sense strand starting at position 73 of SEQ ID NO: 585888
agaauugcuugucuacaga

SEQ ID NO: 675539 - RNA, 19 nt, Artificial Sequence
  Description of Artificial Sequence: Synthetic oligonucleotide
  Antisense strand to SEQ ID NO: 675538
ucuguagacaagcaauucu

SEQ ID NO: 675540 - RNA, 19 nt, Artificial Sequence
  Description of Artificial Sequence: Synthetic oligonucleotide
  Sense strand starting at position 207 of SEQ ID NO: 585888
aguaaacuguuucuaggau

SEQ ID NO: 675541 - RNA, 19 nt, Artificial Sequence
  Description of Artificial Sequence: Synthetic oligonucleotide
  Antisense strand to SEQ ID NO: 675540
auccuagaaacaguuuacu

SEQ ID NO: 675542 - RNA, 19 nt, Artificial Sequence
  Description of Artificial Sequence: Synthetic oligonucleotide
  Sense strand starting at position 253 of SEQ ID NO: 585888
gugaaucagagccacugau

SEQ ID NO: 675543 - RNA, 19 nt, Artificial Sequence
  Description of Artificial Sequence: Synthetic oligonucleotide
  Antisense strand to SEQ ID NO: 675542
aucaguggcucugauucac

SEQ ID NO: 675544 - RNA, 19 nt, Artificial Sequence
  Description of Artificial Sequence: Synthetic oligonucleotide
  Sense strand starting at position 289 of SEQ ID NO: 585888
uaaaguacuggguaacuuu

SEQ ID NO: 675545 - RNA, 19 nt, Artificial Sequence
  Description of Artificial Sequence: Synthetic oligonucleotide
  Antisense strand to SEQ ID NO: 675544
aaaguuacccaguacuuua

SEQ ID NO: 675546 - RNA, 19 nt, Artificial Sequence
  Description of Artificial Sequence: Synthetic oligonucleotide
  Sense strand starting at position 333 of SEQ ID NO: 585888
ugacuuuaguuggucauaa

SEQ ID NO: 675547 - RNA, 19 nt, Artificial Sequence
  Description of Artificial Sequence: Synthetic oligonucleotide
  Antisense strand to SEQ ID NO: 675546
uuaugaccaacuaaaguca

SEQ ID NO: 675548 - RNA, 19 nt, Artificial Sequence
  Description of Artificial Sequence: Synthetic oligonucleotide
  Sense strand starting at position 334 of SEQ ID NO: 585888
gacuuuaguuggucauaag

SEQ ID NO: 675549 - RNA, 19 nt, Artificial Sequence
  Description of Artificial Sequence: Synthetic oligonucleotide
  Antisense strand to SEQ ID NO: 675548
cuuaugaccaacuaaaguc

SEQ ID NO: 675550 - RNA, 19 nt, Artificial Sequence
  Description of Artificial Sequence: Synthetic oligonucleotide
  Sense strand starting at position 335 of SEQ ID NO: 585888
acuuuaguuggucauaaga

SEQ ID NO: 675551 - RNA, 19 nt, Artificial Sequence
  Description of Artificial Sequence: Synthetic oligonucleotide
  Antisense strand to SEQ ID NO: 675550
ucuuaugaccaacuaaagu

SEQ ID NO: 675552 - RNA, 19 nt, Artificial Sequence
  Description of Artificial Sequence: Synthetic oligonucleotide
  Sense strand starting at position 457 of SEQ ID NO: 585888
gggcaaucugggcaaacua

SEQ ID NO: 675553 - RNA, 19 nt, Artificial Sequence
  Description of Artificial Sequence: Synthetic oligonucleotide
  Antisense strand to SEQ ID NO: 675552
uaguuugcccagauugccc

SEQ ID NO: 675554 - RNA, 19 nt, Artificial Sequence
  Description of Artificial Sequence: Synthetic oligonucleotide
  Sense strand starting at position 530 of SEQ ID NO: 585888
acaguuguuaguuauaaag

SEQ ID NO: 675555 - RNA, 19 nt, Artificial Sequence
  Description of Artificial Sequence: Synthetic oligonucleotide
  Antisense strand to SEQ ID NO: 675554
cuuuauaacuaacaacugu

SEQ ID NO: 675556 - RNA, 19 nt, Artificial Sequence
  Description of Artificial Sequence: Synthetic oligonucleotide
  Sense strand starting at position 549 of SEQ ID NO: 585888
ugugacacuguuuacuuau

SEQ ID NO: 675557 - RNA, 19 nt, Artificial Sequence
  Description of Artificial Sequence: Synthetic oligonucleotide
  Antisense strand to SEQ ID NO: 675556
auaaguaaacagugucaca

SEQ ID NO: 675558 - RNA, 19 nt, Artificial Sequence
  Description of Artificial Sequence: Synthetic oligonucleotide
  Sense strand starting at position 551 of SEQ ID NO: 585888
ugacacuguuuacuuauau

SEQ ID NO: 675559 - RNA, 19 nt, Artificial Sequence
  Description of Artificial Sequence: Synthetic oligonucleotide
  Antisense strand to SEQ ID NO: 675558
auauaaguaaacaguguca

SEQ ID NO: 675560 - RNA, 19 nt, Artificial Sequence
  Description of Artificial Sequence: Synthetic oligonucleotide
  Sense strand starting at position 774 of SEQ ID NO: 585888
cuguauguccuuuaacuau

SEQ ID NO: 675561 - RNA, 19 nt, Artificial Sequence
  Description of Artificial Sequence: Synthetic oligonucleotide
  Antisense strand to SEQ ID NO: 675560
auaguuaaaggacauacag

SEQ ID NO: 675562 - RNA, 19 nt, Artificial Sequence
  Description of Artificial Sequence: Synthetic oligonucleotide
  Sense strand starting at position 839 of SEQ ID NO: 585888
uguaauuaguaacugagua

SEQ ID NO: 675563 - RNA, 19 nt, Artificial Sequence
  Description of Artificial Sequence: Synthetic oligonucleotide
  Antisense strand to SEQ ID NO: 675562
uacucaguuacuaauuaca

SEQ ID NO: 675564 - RNA, 19 nt, Artificial Sequence
  Description of Artificial Sequence: Synthetic oligonucleotide
  Sense strand starting at position 844 of SEQ ID NO: 585888
uuaguaacugaguaaguga

SEQ ID NO: 675565 - RNA, 19 nt, Artificial Sequence
  Description of Artificial Sequence: Synthetic oligonucleotide
  Antisense strand to SEQ ID NO: 675564
ucacuuacucaguuacuaa

SEQ ID NO: 675566 - RNA, 19 nt, Artificial Sequence
  Description of Artificial Sequence: Synthetic oligonucleotide
  Sense strand starting at position 1308 of SEQ ID NO: 585888
agaauauaagagugucuuu

SEQ ID NO: 675567 - RNA, 19 nt, Artificial Sequence
  Description of Artificial Sequence: Synthetic oligonucleotide
  Antisense strand to SEQ ID NO: 675566
aaagacacucuuauauucu

SEQ ID NO: 675568 - RNA, 19 nt, Artificial Sequence
  Description of Artificial Sequence: Synthetic oligonucleotide
  Sense strand starting at position 1556 of SEQ ID NO: 585888
uuccuugaaugaguauuaa

SEQ ID NO: 675569 - RNA, 19 nt, Artificial Sequence
  Description of Artificial Sequence: Synthetic oligonucleotide
  Antisense strand to SEQ ID NO: 675568
uuaauacucauucaaggaa

SEQ ID NO: 675570 - RNA, 19 nt, Artificial Sequence
  Description of Artificial Sequence: Synthetic oligonucleotide
  Sense strand starting at position 1615 of SEQ ID NO: 585888
uuuggccuucugcaagaau

SEQ ID NO: 675571 - RNA, 19 nt, Artificial Sequence
  Description of Artificial Sequence: Synthetic oligonucleotide
  Antisense strand to SEQ ID NO: 675570
auucuugcagaaggccaaa

SEQ ID NO: 675572 - RNA, 19 nt, Artificial Sequence
  Description of Artificial Sequence: Synthetic oligonucleotide
  Sense strand starting at position 1618 of SEQ ID NO: 585888
ggccuucugcaagaauaca

SEQ ID NO: 675573 - RNA, 19 nt, Artificial Sequence
  Description of Artificial Sequence: Synthetic oligonucleotide
  Antisense strand to SEQ ID NO: 675572
uguauucuugcagaaggcc

SEQ ID NO: 675574 - RNA, 19 nt, Artificial Sequence
  Description of Artificial Sequence: Synthetic oligonucleotide
  Sense strand starting at position 1626 of SEQ ID NO: 585888
gcaagaauacauuguucug

SEQ ID NO: 675575 - RNA, 19 nt, Artificial Sequence
  Description of Artificial Sequence: Synthetic oligonucleotide
  Antisense strand to SEQ ID NO: 675574
cagaacaauguauucuugc

SEQ ID NO: 675576 - RNA, 19 nt, Artificial Sequence
  Description of Artificial Sequence: Synthetic oligonucleotide
  Sense strand starting at position 1654 of SEQ ID NO: 585888
gaaccaaccuauccgagua

SEQ ID NO: 675577 - RNA, 19 nt, Artificial Sequence
  Description of Artificial Sequence: Synthetic oligonucleotide
  Antisense strand to SEQ ID NO: 675576
uacucggauagguugguuc

SEQ ID NO: 675578 - RNA, 19 nt, Artificial Sequence
  Description of Artificial Sequence: Synthetic oligonucleotide
  Sense strand starting at position 1715 of SEQ ID NO: 585888
gccauugagggcuaacuaa

SEQ ID NO: 675579 - RNA, 19 nt, Artificial Sequence
  Description of Artificial Sequence: Synthetic oligonucleotide
  Antisense strand to SEQ ID NO: 675578
uuaguuagcccucaauggc

SEQ ID NO: 675580 - RNA, 19 nt, Artificial Sequence
  Description of Artificial Sequence: Synthetic oligonucleotide
  Sense strand starting at position 1791 of SEQ ID NO: 585888
aaucaucacugagugcaga

SEQ ID NO: 675581 - RNA, 19 nt, Artificial Sequence
  Description of Artificial Sequence: Synthetic oligonucleotide
  Antisense strand to SEQ ID NO: 675580
ucugcacucagugaugauu

SEQ ID NO: 675582 - RNA, 19 nt, Artificial Sequence
  Description of Artificial Sequence: Synthetic oligonucleotide
  Sense strand starting at position 1844 of SEQ ID NO: 585888
guuaguaugcaguucugca

SEQ ID NO: 675583 - RNA, 19 nt, Artificial Sequence
  Description of Artificial Sequence: Synthetic oligonucleotide
  Antisense strand to SEQ ID NO: 675582
ugcagaacugcauacuaac

SEQ ID NO: 675584 - RNA, 19 nt, Artificial Sequence
  Description of Artificial Sequence: Synthetic oligonucleotide
  Sense strand starting at position 2405 of SEQ ID NO: 585888
augcauugacaauauguaa

SEQ ID NO: 675585 - RNA, 19 nt, Artificial Sequence
  Description of Artificial Sequence: Synthetic oligonucleotide
  Antisense strand to SEQ ID NO: 675584
uuacauauugucaaugcau

SEQ ID NO: 675586 - RNA, 19 nt, Artificial Sequence
  Description of Artificial Sequence: Synthetic oligonucleotide
  Sense strand starting at position 2474 of SEQ ID NO: 585888
ugagcuaaacaguaauacu

SEQ ID NO: 675587 - RNA, 19 nt, Artificial Sequence
  Description of Artificial Sequence: Synthetic oligonucleotide
  Antisense strand to SEQ ID NO: 675586
aguauuacuguuuagcuca

SEQ ID NO: 675588 - RNA, 19 nt, Artificial Sequence
  Description of Artificial Sequence: Synthetic oligonucleotide
  Sense strand starting at position 2525 of SEQ ID NO: 585888
ugugaaugugcgaggcacu

SEQ ID NO: 675589 - RNA, 19 nt, Artificial Sequence
  Description of Artificial Sequence: Synthetic oligonucleotide
  Antisense strand to SEQ ID NO: 675588
agugccucgcacauucaca

SEQ ID NO: 675590 - RNA, 19 nt, Artificial Sequence
  Description of Artificial Sequence: Synthetic oligonucleotide
  Sense strand starting at position 2594 of SEQ ID NO: 585888
cugugauguagguaacauc

SEQ ID NO: 675591 - RNA, 19 nt, Artificial Sequence
  Description of Artificial Sequence: Synthetic oligonucleotide
  Antisense strand to SEQ ID NO: 675590
gauguuaccuacaucacag

SEQ ID NO: 675592 - RNA, 19 nt, Artificial Sequence
  Description of Artificial Sequence: Synthetic oligonucleotide
  Sense strand starting at position 2614 of SEQ ID NO: 585888
ucaugaucaucaccaguuu

SEQ ID NO: 675593 - RNA, 19 nt, Artificial Sequence
  Description of Artificial Sequence: Synthetic oligonucleotide
  Antisense strand to SEQ ID NO: 675592
aaacuggugaugaucauga

SEQ ID NO: 675594 - RNA, 19 nt, Artificial Sequence
  Description of Artificial Sequence: Synthetic oligonucleotide
  Sense strand starting at position 2677 of SEQ ID NO: 585888
gaaggucaauaguuuguaa

SEQ ID NO: 675595 - RNA, 19 nt, Artificial Sequence
  Description of Artificial Sequence: Synthetic oligonucleotide
  Antisense strand to SEQ ID NO: 675594
uuacaaacuauugaccuuc

SEQ ID NO: 675596 - RNA, 19 nt, Artificial Sequence
  Description of Artificial Sequence: Synthetic oligonucleotide
  Sense strand starting at position 2804 of SEQ ID NO: 585888
gcuccaaggcagugaauuu

SEQ ID NO: 675597 - RNA, 19 nt, Artificial Sequence
  Description of Artificial Sequence: Synthetic oligonucleotide
  Antisense strand to SEQ ID NO: 675596
aaauucacugccuuggagc

SEQ ID NO: 675598 - RNA, 19 nt, Artificial Sequence
  Description of Artificial Sequence: Synthetic oligonucleotide
  Sense strand starting at position 2975 of SEQ ID NO: 585888
uucugagaaccuuaauguc

SEQ ID NO: 675599 - RNA, 19 nt, Artificial Sequence
  Description of Artificial Sequence: Synthetic oligonucleotide
  Antisense strand to SEQ ID NO: 675598
gacauuaagguucucagaa

SEQ ID NO: 675600 - RNA, 19 nt, Artificial Sequence
  Description of Artificial Sequence: Synthetic oligonucleotide
  Sense strand starting at position 3091 of SEQ ID NO: 585888
acuagcaugugacuaugaa

SEQ ID NO: 675601 - RNA, 19 nt, Artificial Sequence
  Description of Artificial Sequence: Synthetic oligonucleotide
  Antisense strand to SEQ ID NO: 675600
uucauagucacaugcuagu

SEQ ID NO: 675602 - RNA, 19 nt, Artificial Sequence
  Description of Artificial Sequence: Synthetic oligonucleotide
  Sense strand starting at position 3092 of SEQ ID NO: 585888
cuagcaugugacuaugaag

SEQ ID NO: 675603 - RNA, 19 nt, Artificial Sequence
  Description of Artificial Sequence: Synthetic oligonucleotide
  Antisense strand to SEQ ID NO: 675602
cuucauagucacaugcuag

SEQ ID NO: 675604 - RNA, 19 nt, Artificial Sequence
  Description of Artificial Sequence: Synthetic oligonucleotide
  Sense strand starting at position 3115 of SEQ ID NO: 585888
caggaagugacauguguag

SEQ ID NO: 675605 - RNA, 19 nt, Artificial Sequence
  Description of Artificial Sequence: Synthetic oligonucleotide
  Antisense strand to SEQ ID NO: 675604
cuacacaugucacuuccug

SEQ ID NO: 675606 - RNA, 19 nt, Artificial Sequence
  Description of Artificial Sequence: Synthetic oligonucleotide
  Sense strand starting at position 3149 of SEQ ID NO: 585888
caggucacggucugaauuu

SEQ ID NO: 675607 - RNA, 19 nt, Artificial Sequence
  Description of Artificial Sequence: Synthetic oligonucleotide
  Antisense strand to SEQ ID NO: 675606
aaauucagaccgugaccug

SEQ ID NO: 675608 - RNA, 19 nt, Artificial Sequence
  Description of Artificial Sequence: Synthetic oligonucleotide
  Sense strand starting at position 3565 of SEQ ID NO: 585888
acauuugauucggaggaga

SEQ ID NO: 675609 - RNA, 19 nt, Artificial Sequence
  Description of Artificial Sequence: Synthetic oligonucleotide
  Antisense strand to SEQ ID NO: 675608
ucuccuccgaaucaaaugu

SEQ ID NO: 675610 - RNA, 19 nt, Artificial Sequence
  Description of Artificial Sequence: Synthetic oligonucleotide
  Sense strand starting at position 3618 of SEQ ID NO: 585888
agaguaaugcuugaaccca

SEQ ID NO: 675611 - RNA, 19 nt, Artificial Sequence
  Description of Artificial Sequence: Synthetic oligonucleotide
  Antisense strand to SEQ ID NO: 675610
uggguucaagcauuacucu

SEQ ID NO: 675612 - RNA, 19 nt, Artificial Sequence
  Description of Artificial Sequence: Synthetic oligonucleotide
  Sense strand starting at position 3646 of SEQ ID NO: 585888
ccuccuucucuguaggaaa

SEQ ID NO: 675613 - RNA, 19 nt, Artificial Sequence
  Description of Artificial Sequence: Synthetic oligonucleotide
  Antisense strand to SEQ ID NO: 675612
uuuccuacagagaaggagg

SEQ ID NO: 675614 - RNA, 19 nt, Artificial Sequence
  Description of Artificial Sequence: Synthetic oligonucleotide
  Sense strand starting at position 3691 of SEQ ID NO: 585888
agcaaccuuguaugacaua

SEQ ID NO: 675615 - RNA, 19 nt, Artificial Sequence
  Description of Artificial Sequence: Synthetic oligonucleotide
  Antisense strand to SEQ ID NO: 675614
uaugucauacaagguugcu

SEQ ID NO: 675616 - RNA, 19 nt, Artificial Sequence
  Description of Artificial Sequence: Synthetic oligonucleotide
  Sense strand starting at position 365 of SEQ ID NO: 585889
acauguauuugaugagguu

SEQ ID NO: 675617 - RNA, 19 nt, Artificial Sequence
  Description of Artificial Sequence: Synthetic oligonucleotide
  Antisense strand to SEQ ID NO: 675616
aaccucaucaaauacaugu

SEQ ID NO: 675618 - RNA, 19 nt, Artificial Sequence
  Description of Artificial Sequence: Synthetic oligonucleotide
  Sense strand starting at position 374 of SEQ ID NO: 585889
ugaugagguucugaccauu

SEQ ID NO: 675619 - RNA, 19 nt, Artificial Sequence
  Description of Artificial Sequence: Synthetic oligonucleotide
  Antisense strand to SEQ ID NO: 675618
aauggucagaaccucauca

SEQ ID NO: 675620 - RNA, 19 nt, Artificial Sequence
  Description of Artificial Sequence: Synthetic oligonucleotide
  Sense strand starting at position 424 of SEQ ID NO: 585889
acguucuacuaugaaauag

SEQ ID NO: 675621 - RNA, 19 nt, Artificial Sequence
  Description of Artificial Sequence: Synthetic oligonucleotide
  Antisense strand to SEQ ID NO: 675620
cuauuucauaguagaacgu

SEQ ID NO: 675622 - RNA, 19 nt, Artificial Sequence
  Description of Artificial Sequence: Synthetic oligonucleotide
  Sense strand starting at position 472 of SEQ ID NO: 585889
ucaucaguguccuuaagag

SEQ ID NO: 675623 - RNA, 19 nt, Artificial Sequence
  Description of Artificial Sequence: Synthetic oligonucleotide
  Antisense strand to SEQ ID NO: 675622
cucuuaaggacacugauga

SEQ ID NO: 675624 - RNA, 19 nt, Artificial Sequence
  Description of Artificial Sequence: Synthetic oligonucleotide
  Sense strand starting at position 476 of SEQ ID NO: 585889
caguguccuuaagagaaua

SEQ ID NO: 675625 - RNA, 19 nt, Artificial Sequence
  Description of Artificial Sequence: Synthetic oligonucleotide
  Antisense strand to SEQ ID NO: 675624
uauucucuuaaggacacug

SEQ ID NO: 675626 - RNA, 19 nt, Artificial Sequence
  Description of Artificial Sequence: Synthetic oligonucleotide
  Sense strand starting at position 599 of SEQ ID NO: 585889
ucaguuugauucuugaaag

SEQ ID NO: 675627 - RNA, 19 nt, Artificial Sequence
  Description of Artificial Sequence: Synthetic oligonucleotide
  Antisense strand to SEQ ID NO: 675626
cuuucaagaaucaaacuga

SEQ ID NO: 675628 - RNA, 19 nt, Artificial Sequence
  Description of Artificial Sequence: Synthetic oligonucleotide
  Sense strand starting at position 702 of SEQ ID NO: 585889
uuuguucuauuuccuguua

SEQ ID NO: 675629 - RNA, 19 nt, Artificial Sequence
  Description of Artificial Sequence: Synthetic oligonucleotide
  Antisense strand to SEQ ID NO: 675628
uaacaggaaauagaacaaa

SEQ ID NO: 675630 - RNA, 19 nt, Artificial Sequence
  Description of Artificial Sequence: Synthetic oligonucleotide
  Sense strand starting at position 703 of SEQ ID NO: 585889
uuguucuauuuccuguuaa

SEQ ID NO: 675631 - RNA, 19 nt, Artificial Sequence
  Description of Artificial Sequence: Synthetic oligonucleotide
  Antisense strand to SEQ ID NO: 675630
uuaacaggaaauagaacaa

SEQ ID NO: 675632 - RNA, 19 nt, Artificial Sequence
  Description of Artificial Sequence: Synthetic oligonucleotide
  Sense strand starting at position 715 of SEQ ID NO: 585889
cuguuaacacauugauagu

SEQ ID NO: 675633 - RNA, 19 nt, Artificial Sequence
  Description of Artificial Sequence: Synthetic oligonucleotide
  Antisense strand to SEQ ID NO: 675632
acuaucaauguguuaacag

SEQ ID NO: 675634 - RNA, 19 nt, Artificial Sequence
  Description of Artificial Sequence: Synthetic oligonucleotide
  Sense strand starting at position 721 of SEQ ID NO: 585889
acacauugauaguacauca

SEQ ID NO: 675635 - RNA, 19 nt, Artificial Sequence
  Description of Artificial Sequence: Synthetic oligonucleotide
  Antisense strand to SEQ ID NO: 675634
ugauguacuaucaaugugu

SEQ ID NO: 675636 - RNA, 19 nt, Artificial Sequence
  Description of Artificial Sequence: Synthetic oligonucleotide
  Sense strand starting at position 734 of SEQ ID NO: 585889
acaucauauucguuccaua

SEQ ID NO: 675637 - RNA, 19 nt, Artificial Sequence
  Description of Artificial Sequence: Synthetic oligonucleotide
  Antisense strand to SEQ ID NO: 675636
uauggaacgaauaugaugu

SEQ ID NO: 675638 - RNA, 19 nt, Artificial Sequence
  Description of Artificial Sequence: Synthetic oligonucleotide
  Sense strand starting at position 739 of SEQ ID NO: 585889
auauucguuccauacaugu

SEQ ID NO: 675639 - RNA, 19 nt, Artificial Sequence
  Description of Artificial Sequence: Synthetic oligonucleotide
  Antisense strand to SEQ ID NO: 675638
acauguauggaacgaauau

SEQ ID NO: 675640 - RNA, 19 nt, Artificial Sequence
  Description of Artificial Sequence: Synthetic oligonucleotide
  Sense strand starting at position 767 of SEQ ID NO: 585889
gcagcagaauccuuaaacu

SEQ ID NO: 675641 - RNA, 19 nt, Artificial Sequence
  Description of Artificial Sequence: Synthetic oligonucleotide
  Antisense strand to SEQ ID NO: 675640
aguuuaaggauucugcugc

SEQ ID NO: 675642 - RNA, 19 nt, Artificial Sequence
  Description of Artificial Sequence: Synthetic oligonucleotide
  Sense strand starting at position 995 of SEQ ID NO: 585889
aggugucaauacucugcua

SEQ ID NO: 675643 - RNA, 19 nt, Artificial Sequence
  Description of Artificial Sequence: Synthetic oligonucleotide
  Antisense strand to SEQ ID NO: 675642
uagcagaguauugacaccu

SEQ ID NO: 675644 - RNA, 19 nt, Artificial Sequence
  Description of Artificial Sequence: Synthetic oligonucleotide
  Sense strand starting at position 997 of SEQ ID NO: 585889
gugucaauacucugcuacu

SEQ ID NO: 675645 - RNA, 19 nt, Artificial Sequence
  Description of Artificial Sequence: Synthetic oligonucleotide
  Antisense strand to SEQ ID NO: 675644
aguagcagaguauugacac

SEQ ID NO: 675646 - RNA, 19 nt, Artificial Sequence
  Description of Artificial Sequence: Synthetic oligonucleotide
  Sense strand starting at position 1014 of SEQ ID NO: 585889
cuguaugaacaguguagua

SEQ ID NO: 675647 - RNA, 19 nt, Artificial Sequence
  Description of Artificial Sequence: Synthetic oligonucleotide
  Antisense strand to SEQ ID NO: 675646
uacuacacuguucauacag

SEQ ID NO: 675648 - RNA, 19 nt, Artificial Sequence
  Description of Artificial Sequence: Synthetic oligonucleotide
  Sense strand starting at position 1016 of SEQ ID NO: 585889
guaugaacaguguaguaag

SEQ ID NO: 675649 - RNA, 19 nt, Artificial Sequence
  Description of Artificial Sequence: Synthetic oligonucleotide
  Antisense strand to SEQ ID NO: 675648
cuuacuacacuguucauac

SEQ ID NO: 675650 - RNA, 19 nt, Artificial Sequence
  Description of Artificial Sequence: Synthetic oligonucleotide
  Sense strand starting at position 1023 of SEQ ID NO: 585889
caguguaguaagcagaagu

SEQ ID NO: 675651 - RNA, 19 nt, Artificial Sequence
  Description of Artificial Sequence: Synthetic oligonucleotide
  Antisense strand to SEQ ID NO: 675650
acuucugcuuacuacacug

SEQ ID NO: 675652 - RNA, 19 nt, Artificial Sequence
  Description of Artificial Sequence: Synthetic oligonucleotide
  Sense strand starting at position 1122 of SEQ ID NO: 585889
accuuuagaguaugcuaaa

SEQ ID NO: 675653 - RNA, 19 nt, Artificial Sequence
  Description of Artificial Sequence: Synthetic oligonucleotide
  Antisense strand to SEQ ID NO: 675652
uuuagcauacucuaaaggu

SEQ ID NO: 675654 - RNA, 19 nt, Artificial Sequence
  Description of Artificial Sequence: Synthetic oligonucleotide
  Sense strand starting at position 1123 of SEQ ID NO: 585889
ccuuuagaguaugcuaaag

SEQ ID NO: 675655 - RNA, 19 nt, Artificial Sequence
  Description of Artificial Sequence: Synthetic oligonucleotide
  Antisense strand to SEQ ID NO: 675654
cuuuagcauacucuaaagg

SEQ ID NO: 675656 - RNA, 19 nt, Artificial Sequence
  Description of Artificial Sequence: Synthetic oligonucleotide
  Sense strand starting at position 1236 of SEQ ID NO: 585889
auuauauugccguacaguu

SEQ ID NO: 675657 - RNA, 19 nt, Artificial Sequence
  Description of Artificial Sequence: Synthetic oligonucleotide
  Antisense strand to SEQ ID NO: 675656
aacuguacggcaauauaau

SEQ ID NO: 675658 - RNA, 19 nt, Artificial Sequence
  Description of Artificial Sequence: Synthetic oligonucleotide
  Sense strand starting at position 1245 of SEQ ID NO: 585889
ccguacaguugcucugaau

SEQ ID NO: 675659 - RNA, 19 nt, Artificial Sequence
  Description of Artificial Sequence: Synthetic oligonucleotide
  Antisense strand to SEQ ID NO: 675658
auucagagcaacuguacgg

SEQ ID NO: 675660 - RNA, 19 nt, Artificial Sequence
  Description of Artificial Sequence: Synthetic oligonucleotide
  Sense strand starting at position 1322 of SEQ ID NO: 585889
gggccuaaauuucgugaac

SEQ ID NO: 675661 - RNA, 19 nt, Artificial Sequence
  Description of Artificial Sequence: Synthetic oligonucleotide
  Antisense strand to SEQ ID NO: 675660
guucacgaaauuuaggccc

SEQ ID NO: 675662 - RNA, 19 nt, Artificial Sequence
  Description of Artificial Sequence: Synthetic oligonucleotide
  Sense strand starting at position 1323 of SEQ ID NO: 585889
ggccuaaauuucgugaacu

SEQ ID NO: 675663 - RNA, 19 nt, Artificial Sequence
  Description of Artificial Sequence: Synthetic oligonucleotide
  Antisense strand to SEQ ID NO: 675662
aguucacgaaauuuaggcc

SEQ ID NO: 675664 - RNA, 19 nt, Artificial Sequence
  Description of Artificial Sequence: Synthetic oligonucleotide
  Sense strand starting at position 1324 of SEQ ID NO: 585889
gccuaaauuucgugaacua

SEQ ID NO: 675665 - RNA, 19 nt, Artificial Sequence
  Description of Artificial Sequence: Synthetic oligonucleotide
  Antisense strand to SEQ ID NO: 675664
uaguucacgaaauuuaggc

SEQ ID NO: 675666 - RNA, 19 nt, Artificial Sequence
  Description of Artificial Sequence: Synthetic oligonucleotide
  Sense strand starting at position 1331 of SEQ ID NO: 585889
uuucgugaacuacggagaa

SEQ ID NO: 675667 - RNA, 19 nt, Artificial Sequence
  Description of Artificial Sequence: Synthetic oligonucleotide
  Antisense strand to SEQ ID NO: 675666
uucuccguaguucacgaaa

SEQ ID NO: 675668 - RNA, 19 nt, Artificial Sequence
  Description of Artificial Sequence: Synthetic oligonucleotide
  Sense strand starting at position 1540 of SEQ ID NO: 585889
uacgacugugccugaacau

SEQ ID NO: 675669 - RNA, 19 nt, Artificial Sequence
  Description of Artificial Sequence: Synthetic oligonucleotide
  Antisense strand to SEQ ID NO: 675668
auguucaggcacagucgua

SEQ ID NO: 675670 - RNA, 19 nt, Artificial Sequence
  Description of Artificial Sequence: Synthetic oligonucleotide
  Sense strand starting at position 1839 of SEQ ID NO: 585889
cugagucaucuuuaacuag

SEQ ID NO: 675671 - RNA, 19 nt, Artificial Sequence
  Description of Artificial Sequence: Synthetic oligonucleotide
  Antisense strand to SEQ ID NO: 675670
cuaguuaaagaugacucag

SEQ ID NO: 675672 - RNA, 19 nt, Artificial Sequence
  Description of Artificial Sequence: Synthetic oligonucleotide
  Sense strand starting at position 1995 of SEQ ID NO: 585889
gcucgauuccaaugaagcu

SEQ ID NO: 675673 - RNA, 19 nt, Artificial Sequence
  Description of Artificial Sequence: Synthetic oligonucleotide
  Antisense strand to SEQ ID NO: 675672
agcuucauuggaaucgagc

SEQ ID NO: 675674 - RNA, 19 nt, Artificial Sequence
  Description of Artificial Sequence: Synthetic oligonucleotide
  Sense strand starting at position 3388 of SEQ ID NO: 585889
gcagaaucgucccuagggu

SEQ ID NO: 675675 - RNA, 19 nt, Artificial Sequence
  Description of Artificial Sequence: Synthetic oligonucleotide
  Antisense strand to SEQ ID NO: 675674
acccuagggacgauucugc

SEQ ID NO: 675676 - RNA, 19 nt, Artificial Sequence
  Description of Artificial Sequence: Synthetic oligonucleotide
  Sense strand starting at position 3521 of SEQ ID NO: 585889
aggguuucguuguuucgau

SEQ ID NO: 675677 - RNA, 19 nt, Artificial Sequence
  Description of Artificial Sequence: Synthetic oligonucleotide
  Antisense strand to SEQ ID NO: 675676
aucgaaacaacgaaacccu

SEQ ID NO: 675678 - RNA, 19 nt, Artificial Sequence
  Description of Artificial Sequence: Synthetic oligonucleotide
  Sense strand starting at position 3522 of SEQ ID NO: 585889
ggguuucguuguuucgauu

SEQ ID NO: 675679 - RNA, 19 nt, Artificial Sequence
  Description of Artificial Sequence: Synthetic oligonucleotide
  Antisense strand to SEQ ID NO: 675678
aaucgaaacaacgaaaccc

SEQ ID NO: 675680 - RNA, 19 nt, Artificial Sequence
  Description of Artificial Sequence: Synthetic oligonucleotide
  Sense strand starting at position 3675 of SEQ ID NO: 585889
guguuuaauacucagacgu

SEQ ID NO: 675681 - RNA, 19 nt, Artificial Sequence
  Description of Artificial Sequence: Synthetic oligonucleotide
  Antisense strand to SEQ ID NO: 675680
acgucugaguauuaaacac

SEQ ID NO: 675682 - RNA, 19 nt, Artificial Sequence
  Description of Artificial Sequence: Synthetic oligonucleotide
  Sense strand starting at position 3685 of SEQ ID NO: 585889
cucagacguuucucacaau

SEQ ID NO: 675683 - RNA, 19 nt, Artificial Sequence
  Description of Artificial Sequence: Synthetic oligonucleotide
  Antisense strand to SEQ ID NO: 675682
auugugagaaacgucugag

SEQ ID NO: 675684 - RNA, 19 nt, Artificial Sequence
  Description of Artificial Sequence: Synthetic oligonucleotide
  Sense strand starting at position 3691 of SEQ ID NO: 585889
cguuucucacaaugugaaa

SEQ ID NO: 675685 - RNA, 19 nt, Artificial Sequence
  Description of Artificial Sequence: Synthetic oligonucleotide
  Antisense strand to SEQ ID NO: 675684
uuucacauugugagaaacg

SEQ ID NO: 675686 - RNA, 19 nt, Artificial Sequence
  Description of Artificial Sequence: Synthetic oligonucleotide
  Sense strand starting at position 3781 of SEQ ID NO: 585889
uguccauaucccuggcagu

SEQ ID NO: 675687 - RNA, 19 nt, Artificial Sequence
  Description of Artificial Sequence: Synthetic oligonucleotide
  Antisense strand to SEQ ID NO: 675686
acugccagggauauggaca

SEQ ID NO: 675688 - RNA, 19 nt, Artificial Sequence
  Description of Artificial Sequence: Synthetic oligonucleotide
  Sense strand starting at position 3782 of SEQ ID NO: 585889
guccauaucccuggcaguu

SEQ ID NO: 675689 - RNA, 19 nt, Artificial Sequence
  Description of Artificial Sequence: Synthetic oligonucleotide
  Antisense strand to SEQ ID NO: 675688
aacugccagggauauggac

SEQ ID NO: 675690 - RNA, 19 nt, Artificial Sequence
  Description of Artificial Sequence: Synthetic oligonucleotide
  Sense strand starting at position 3794 of SEQ ID NO: 585889
ggcaguuucuuccuugaaa

SEQ ID NO: 675691 - RNA, 19 nt, Artificial Sequence
  Description of Artificial Sequence: Synthetic oligonucleotide
  Antisense strand to SEQ ID NO: 675690
uuucaaggaagaaacugcc

SEQ ID NO: 675692 - RNA, 19 nt, Artificial Sequence
  Description of Artificial Sequence: Synthetic oligonucleotide
  Sense strand starting at position 3795 of SEQ ID NO: 585889
gcaguuucuuccuugaaac

SEQ ID NO: 675693 - RNA, 19 nt, Artificial Sequence
  Description of Artificial Sequence: Synthetic oligonucleotide
  Antisense strand to SEQ ID NO: 675692
guuucaaggaagaaacugc

SEQ ID NO: 675694 - RNA, 19 nt, Artificial Sequence
  Description of Artificial Sequence: Synthetic oligonucleotide
  Sense strand starting at position 3878 of SEQ ID NO: 585889
uguagcuacagugagaauu

SEQ ID NO: 675695 - RNA, 19 nt, Artificial Sequence
  Description of Artificial Sequence: Synthetic oligonucleotide
  Antisense strand to SEQ ID NO: 675694
aauucucacuguagcuaca

SEQ ID NO: 675696 - RNA, 19 nt, Artificial Sequence
  Description of Artificial Sequence: Synthetic oligonucleotide
  Sense strand starting at position 136 of SEQ ID NO: 585890
ggauaagaggauugcuuga

SEQ ID NO: 675697 - RNA, 19 nt, Artificial Sequence
  Description of Artificial Sequence: Synthetic oligonucleotide
  Antisense strand to SEQ ID NO: 675696
ucaagcaauccucuuaucc

SEQ ID NO: 675698 - RNA, 19 nt, Artificial Sequence
  Description of Artificial Sequence: Synthetic oligonucleotide
  Sense strand starting at position 680 of SEQ ID NO: 585890
ccacuacgcccagacaaau

SEQ ID NO: 675699 - RNA, 19 nt, Artificial Sequence
  Description of Artificial Sequence: Synthetic oligonucleotide
  Antisense strand to SEQ ID NO: 675698
auuugucugggcguagugg

SEQ ID NO: 675700 - RNA, 19 nt, Artificial Sequence
  Description of Artificial Sequence: Synthetic oligonucleotide
  Sense strand starting at position 739 of SEQ ID NO: 585890
gcaacuuuaugcucugaaa

SEQ ID NO: 675701 - RNA, 19 nt, Artificial Sequence
  Description of Artificial Sequence: Synthetic oligonucleotide
  Antisense strand to SEQ ID NO: 675700
uuucagagcauaaaguugc

SEQ ID NO: 675702 - RNA, 19 nt, Artificial Sequence
  Description of Artificial Sequence: Synthetic oligonucleotide
  Sense strand starting at position 835 of SEQ ID NO: 585890
cuagaaauguaauccugag

SEQ ID NO: 675703 - RNA, 19 nt, Artificial Sequence
  Description of Artificial Sequence: Synthetic oligonucleotide
  Antisense strand to SEQ ID NO: 675702
cucaggauuacauuucuag

SEQ ID NO: 675704 - RNA, 19 nt, Artificial Sequence
  Description of Artificial Sequence: Synthetic oligonucleotide
  Sense strand starting at position 847 of SEQ ID NO: 585890
uccugagaacgaugaguuu

SEQ ID NO: 675705 - RNA, 19 nt, Artificial Sequence
  Description of Artificial Sequence: Synthetic oligonucleotide
  Antisense strand to SEQ ID NO: 675704
aaacucaucguucucagga

SEQ ID NO: 675706 - RNA, 19 nt, Artificial Sequence
  Description of Artificial Sequence: Synthetic oligonucleotide
  Sense strand starting at position 858 of SEQ ID NO: 585890
augaguuucugguccugac

SEQ ID NO: 675707 - RNA, 19 nt, Artificial Sequence
  Description of Artificial Sequence: Synthetic oligonucleotide
  Antisense strand to SEQ ID NO: 675706
gucaggaccagaaacucau

SEQ ID NO: 675708 - RNA, 19 nt, Artificial Sequence
  Description of Artificial Sequence: Synthetic oligonucleotide
  Sense strand starting at position 862 of SEQ ID NO: 585890
guuucugguccugaccgau

SEQ ID NO: 675709 - RNA, 19 nt, Artificial Sequence
  Description of Artificial Sequence: Synthetic oligonucleotide
  Antisense strand to SEQ ID NO: 675708
aucggucaggaccagaaac

SEQ ID NO: 675710 - RNA, 19 nt, Artificial Sequence
  Description of Artificial Sequence: Synthetic oligonucleotide
  Sense strand starting at position 876 of SEQ ID NO: 585890
ccgauacucagcuaggcaa

SEQ ID NO: 675711 - RNA, 19 nt, Artificial Sequence
  Description of Artificial Sequence: Synthetic oligonucleotide
  Antisense strand to SEQ ID NO: 675710
uugccuagcugaguaucgg

SEQ ID NO: 675712 - RNA, 19 nt, Artificial Sequence
  Description of Artificial Sequence: Synthetic oligonucleotide
  Sense strand starting at position 900 of SEQ ID NO: 585890
cugaacucucuguagcaua

SEQ ID NO: 675713 - RNA, 19 nt, Artificial Sequence
  Description of Artificial Sequence: Synthetic oligonucleotide
  Antisense strand to SEQ ID NO: 675712
uaugcuacagagaguucag

SEQ ID NO: 675714 - RNA, 19 nt, Artificial Sequence
  Description of Artificial Sequence: Synthetic oligonucleotide
  Sense strand starting at position 934 of SEQ ID NO: 585890
auugaugggucccugauca

SEQ ID NO: 675715 - RNA, 19 nt, Artificial Sequence
  Description of Artificial Sequence: Synthetic oligonucleotide
  Antisense strand to SEQ ID NO: 675714
ugaucagggacccaucaau

SEQ ID NO: 675716 - RNA, 19 nt, Artificial Sequence
  Description of Artificial Sequence: Synthetic oligonucleotide
  Sense strand starting at position 1242 of SEQ ID NO: 585890
agucuauaucgauauagac

SEQ ID NO: 675717 - RNA, 19 nt, Artificial Sequence
  Description of Artificial Sequence: Synthetic oligonucleotide
  Antisense strand to SEQ ID NO: 675716
gucuauaucgauauagacu

SEQ ID NO: 675718 - RNA, 19 nt, Artificial Sequence
  Description of Artificial Sequence: Synthetic oligonucleotide
  Sense strand starting at position 1285 of SEQ ID NO: 585890
cuuugacaggucugaucga

SEQ ID NO: 675719 - RNA, 19 nt, Artificial Sequence
  Description of Artificial Sequence: Synthetic oligonucleotide
  Antisense strand to SEQ ID NO: 675718
ucgaucagaccugucaaag

SEQ ID NO: 675720 - RNA, 19 nt, Artificial Sequence
  Description of Artificial Sequence: Synthetic oligonucleotide
  Sense strand starting at position 1349 of SEQ ID NO: 585890
accauauugcggugaaagg

SEQ ID NO: 675721 - RNA, 19 nt, Artificial Sequence
  Description of Artificial Sequence: Synthetic oligonucleotide
  Antisense strand to SEQ ID NO: 675720
ccuuucaccgcaauauggu

SEQ ID NO: 675722 - RNA, 19 nt, Artificial Sequence
  Description of Artificial Sequence: Synthetic oligonucleotide
  Sense strand starting at position 1443 of SEQ ID NO: 585890
aagccaacgggcuauuaua

SEQ ID NO: 675723 - RNA, 19 nt, Artificial Sequence
  Description of Artificial Sequence: Synthetic oligonucleotide
  Antisense strand to SEQ ID NO: 675722
uauaauagcccguuggcuu

SEQ ID NO: 675724 - RNA, 19 nt, Artificial Sequence
  Description of Artificial Sequence: Synthetic oligonucleotide
  Sense strand starting at position 1606 of SEQ ID NO: 585890
ggugaguucgaguucucgu

SEQ ID NO: 675725 - RNA, 19 nt, Artificial Sequence
  Description of Artificial Sequence: Synthetic oligonucleotide
  Antisense strand to SEQ ID NO: 675724
acgagaacucgaacucacc

SEQ ID NO: 675726 - RNA, 19 nt, Artificial Sequence
  Description of Artificial Sequence: Synthetic oligonucleotide
  Sense strand starting at position 1607 of SEQ ID NO: 585890
gugaguucgaguucucgua

SEQ ID NO: 675727 - RNA, 19 nt, Artificial Sequence
  Description of Artificial Sequence: Synthetic oligonucleotide
  Antisense strand to SEQ ID NO: 675726
uacgagaacucgaacucac

SEQ ID NO: 675728 - RNA, 19 nt, Artificial Sequence
  Description of Artificial Sequence: Synthetic oligonucleotide
  Sense strand starting at position 1611 of SEQ ID NO: 585890
guucgaguucucguaacuu

SEQ ID NO: 675729 - RNA, 19 nt, Artificial Sequence
  Description of Artificial Sequence: Synthetic oligonucleotide
  Antisense strand to SEQ ID NO: 675728
aaguuacgagaacucgaac

SEQ ID NO: 675730 - RNA, 19 nt, Artificial Sequence
  Description of Artificial Sequence: Synthetic oligonucleotide
  Sense strand starting at position 1619 of SEQ ID NO: 585890
ucucguaacuuguuaggga

SEQ ID NO: 675731 - RNA, 19 nt, Artificial Sequence
  Description of Artificial Sequence: Synthetic oligonucleotide
  Antisense strand to SEQ ID NO: 675730
ucccuaacaaguuacgaga

SEQ ID NO: 675732 - RNA, 19 nt, Artificial Sequence
  Description of Artificial Sequence: Synthetic oligonucleotide
  Sense strand starting at position 1667 of SEQ ID NO: 585890
acacaaucucuggguauuc

SEQ ID NO: 675733 - RNA, 19 nt, Artificial Sequence
  Description of Artificial Sequence: Synthetic oligonucleotide
  Antisense strand to SEQ ID NO: 675732
gaauacccagagauugugu

SEQ ID NO: 675734 - RNA, 19 nt, Artificial Sequence
  Description of Artificial Sequence: Synthetic oligonucleotide
  Sense strand starting at position 1764 of SEQ ID NO: 585890
gucaguuuccucugggauu

SEQ ID NO: 675735 - RNA, 19 nt, Artificial Sequence
  Description of Artificial Sequence: Synthetic oligonucleotide
  Antisense strand to SEQ ID NO: 675734
aaucccagaggaaacugac

SEQ ID NO: 675736 - RNA, 19 nt, Artificial Sequence
  Description of Artificial Sequence: Synthetic oligonucleotide
  Sense strand starting at position 1881 of SEQ ID NO: 585890
guccaucacggauaggauu

SEQ ID NO: 675737 - RNA, 19 nt, Artificial Sequence
  Description of Artificial Sequence: Synthetic oligonucleotide
  Antisense strand to SEQ ID NO: 675736
aauccuauccgugauggac

SEQ ID NO: 675738 - RNA, 19 nt, Artificial Sequence
  Description of Artificial Sequence: Synthetic oligonucleotide
  Sense strand starting at position 2102 of SEQ ID NO: 585890
acguaaagagcucagacua

SEQ ID NO: 675739 - RNA, 19 nt, Artificial Sequence
  Description of Artificial Sequence: Synthetic oligonucleotide
  Antisense strand to SEQ ID NO: 675738
uagucugagcucuuuacgu

SEQ ID NO: 675740 - RNA, 19 nt, Artificial Sequence
  Description of Artificial Sequence: Synthetic oligonucleotide
  Sense strand starting at position 2122 of SEQ ID NO: 585890
ggauccuccucgcuaggaa

SEQ ID NO: 675741 - RNA, 19 nt, Artificial Sequence
  Description of Artificial Sequence: Synthetic oligonucleotide
  Antisense strand to SEQ ID NO: 675740
uuccuagcgaggaggaucc

SEQ ID NO: 675742 - RNA, 19 nt, Artificial Sequence
  Description of Artificial Sequence: Synthetic oligonucleotide
  Sense strand starting at position 2123 of SEQ ID NO: 585890
gauccuccucgcuaggaaa

SEQ ID NO: 675743 - RNA, 19 nt, Artificial Sequence
  Description of Artificial Sequence: Synthetic oligonucleotide
  Antisense strand to SEQ ID NO: 675742
uuuccuagcgaggaggauc

SEQ ID NO: 675744 - RNA, 19 nt, Artificial Sequence
  Description of Artificial Sequence: Synthetic oligonucleotide
  Sense strand starting at position 2217 of SEQ ID NO: 585890
aguuaaucccuucguuaac

SEQ ID NO: 675745 - RNA, 19 nt, Artificial Sequence
  Description of Artificial Sequence: Synthetic oligonucleotide
  Antisense strand to SEQ ID NO: 675744
guuaacgaagggauuaacu

SEQ ID NO: 675746 - RNA, 19 nt, Artificial Sequence
  Description of Artificial Sequence: Synthetic oligonucleotide
  Sense strand starting at position 2333 of SEQ ID NO: 585890
aggacucaaccuuguauau

SEQ ID NO: 675747 - RNA, 19 nt, Artificial Sequence
  Description of Artificial Sequence: Synthetic oligonucleotide
  Antisense strand to SEQ ID NO: 675746
auauacaagguugaguccu

SEQ ID NO: 675748 - RNA, 19 nt, Artificial Sequence
  Description of Artificial Sequence: Synthetic oligonucleotide
  Sense strand starting at position 2438 of SEQ ID NO: 585890
gucauauagcucgagcaga

SEQ ID NO: 675749 - RNA, 19 nt, Artificial Sequence
  Description of Artificial Sequence: Synthetic oligonucleotide
  Antisense strand to SEQ ID NO: 675748
ucugcucgagcuauaugac

SEQ ID NO: 675750 - RNA, 19 nt, Artificial Sequence
  Description of Artificial Sequence: Synthetic oligonucleotide
  Sense strand starting at position 2491 of SEQ ID NO: 585890
gacugccuacuucgauuua

SEQ ID NO: 675751 - RNA, 19 nt, Artificial Sequence
  Description of Artificial Sequence: Synthetic oligonucleotide
  Antisense strand to SEQ ID NO: 675750
uaaaucgaaguaggcaguc

SEQ ID NO: 675752 - RNA, 19 nt, Artificial Sequence
  Description of Artificial Sequence: Synthetic oligonucleotide
  Sense strand starting at position 2572 of SEQ ID NO: 585890
ucaguucgccaguacugaa

SEQ ID NO: 675753 - RNA, 19 nt, Artificial Sequence
  Description of Artificial Sequence: Synthetic oligonucleotide
  Antisense strand to SEQ ID NO: 675752
uucaguacuggcgaacuga

SEQ ID NO: 675754 - RNA, 19 nt, Artificial Sequence
  Description of Artificial Sequence: Synthetic oligonucleotide
  Sense strand starting at position 2576 of SEQ ID NO: 585890
uucgccaguacugaagauu

SEQ ID NO: 675755 - RNA, 19 nt, Artificial Sequence
  Description of Artificial Sequence: Synthetic oligonucleotide
  Antisense strand to SEQ ID NO: 675754
aaucuucaguacuggcgaa

SEQ ID NO: 675756 - RNA, 19 nt, Artificial Sequence
  Description of Artificial Sequence: Synthetic oligonucleotide
  Sense strand starting at position 2582 of SEQ ID NO: 585890
aguacugaagauugagguu

SEQ ID NO: 675757 - RNA, 19 nt, Artificial Sequence
  Description of Artificial Sequence: Synthetic oligonucleotide
  Antisense strand to SEQ ID NO: 675756
aaccucaaucuucaguacu

SEQ ID NO: 675758 - RNA, 19 nt, Artificial Sequence
  Description of Artificial Sequence: Synthetic oligonucleotide
  Sense strand starting at position 2622 of SEQ ID NO: 585890
uuucuaucaguuugguuaa

SEQ ID NO: 675759 - RNA, 19 nt, Artificial Sequence
  Description of Artificial Sequence: Synthetic oligonucleotide
  Antisense strand to SEQ ID NO: 675758
uuaaccaaacugauagaaa

SEQ ID NO: 675760 - RNA, 19 nt, Artificial Sequence
  Description of Artificial Sequence: Synthetic oligonucleotide
  Sense strand starting at position 2671 of SEQ ID NO: 585890
agaggaaggugucuccuuu

SEQ ID NO: 675761 - RNA, 19 nt, Artificial Sequence
  Description of Artificial Sequence: Synthetic oligonucleotide
  Antisense strand to SEQ ID NO: 675760
aaaggagacaccuuccucu

SEQ ID NO: 675762 - RNA, 19 nt, Artificial Sequence
  Description of Artificial Sequence: Synthetic oligonucleotide
  Sense strand starting at position 2675 of SEQ ID NO: 585890
gaaggugucuccuuugaac

SEQ ID NO: 675763 - RNA, 19 nt, Artificial Sequence
  Description of Artificial Sequence: Synthetic oligonucleotide
  Antisense strand to SEQ ID NO: 675762
guucaaaggagacaccuuc

SEQ ID NO: 675764 - RNA, 19 nt, Artificial Sequence
  Description of Artificial Sequence: Synthetic oligonucleotide
  Sense strand starting at position 2845 of SEQ ID NO: 585890
uuuaauuuaugcgugcuga

SEQ ID NO: 675765 - RNA, 19 nt, Artificial Sequence
  Description of Artificial Sequence: Synthetic oligonucleotide
  Antisense strand to SEQ ID NO: 675764
ucagcacgcauaaauuaaa

SEQ ID NO: 675766 - RNA, 19 nt, Artificial Sequence
  Description of Artificial Sequence: Synthetic oligonucleotide
  Sense strand starting at position 2846 of SEQ ID NO: 585890
uuaauuuaugcgugcugaa

SEQ ID NO: 675767 - RNA, 19 nt, Artificial Sequence
  Description of Artificial Sequence: Synthetic oligonucleotide
  Antisense strand to SEQ ID NO: 675766
uucagcacgcauaaauuaa

SEQ ID NO: 675768 - RNA, 19 nt, Artificial Sequence
  Description of Artificial Sequence: Synthetic oligonucleotide
  Sense strand starting at position 2882 of SEQ ID NO: 585890
guaggugcgcguuacauuu

SEQ ID NO: 675769 - RNA, 19 nt, Artificial Sequence
  Description of Artificial Sequence: Synthetic oligonucleotide
  Antisense strand to SEQ ID NO: 675768
aaauguaacgcgcaccuac

SEQ ID NO: 675770 - RNA, 19 nt, Artificial Sequence
  Description of Artificial Sequence: Synthetic oligonucleotide
  Sense strand starting at position 2888 of SEQ ID NO: 585890
gcgcguuacauuuaucucu

SEQ ID NO: 675771 - RNA, 19 nt, Artificial Sequence
  Description of Artificial Sequence: Synthetic oligonucleotide
  Antisense strand to SEQ ID NO: 675770
agagauaaauguaacgcgc

SEQ ID NO: 675772 - RNA, 19 nt, Artificial Sequence
  Description of Artificial Sequence: Synthetic oligonucleotide
  Sense strand starting at position 2890 of SEQ ID NO: 585890
gcguuacauuuaucucuuu

SEQ ID NO: 675773 - RNA, 19 nt, Artificial Sequence
  Description of Artificial Sequence: Synthetic oligonucleotide
  Antisense strand to SEQ ID NO: 675772
aaagagauaaauguaacgc

SEQ ID NO: 675774 - RNA, 19 nt, Artificial Sequence
  Description of Artificial Sequence: Synthetic oligonucleotide
  Sense strand starting at position 2935 of SEQ ID NO: 585890
cguauuuccugucccagga

SEQ ID NO: 675775 - RNA, 19 nt, Artificial Sequence
  Description of Artificial Sequence: Synthetic oligonucleotide
  Antisense strand to SEQ ID NO: 675774
uccugggacaggaaauacg

SEQ ID NO: 675776 - RNA, 19 nt, Artificial Sequence
  Description of Artificial Sequence: Synthetic oligonucleotide
  Sense strand starting at position 268 of SEQ ID NO: 585891
gggaauuaguccugacucc

SEQ ID NO: 675777 - RNA, 19 nt, Artificial Sequence
  Description of Artificial Sequence: Synthetic oligonucleotide
  Antisense strand to SEQ ID NO: 675776
ggagucaggacuaauuccc

SEQ ID NO: 675778 - RNA, 19 nt, Artificial Sequence
  Description of Artificial Sequence: Synthetic oligonucleotide
  Sense strand starting at position 376 of SEQ ID NO: 585891
cucacaaauccaugaggua

SEQ ID NO: 675779 - RNA, 19 nt, Artificial Sequence
  Description of Artificial Sequence: Synthetic oligonucleotide
  Antisense strand to SEQ ID NO: 675778
uaccucauggauuugugag

SEQ ID NO: 675780 - RNA, 19 nt, Artificial Sequence
  Description of Artificial Sequence: Synthetic oligonucleotide
  Sense strand starting at position 379 of SEQ ID NO: 585891
acaaauccaugagguagaa

SEQ ID NO: 675781 - RNA, 19 nt, Artificial Sequence
  Description of Artificial Sequence: Synthetic oligonucleotide
  Antisense strand to SEQ ID NO: 675780
uucuaccucauggauuugu

SEQ ID NO: 675782 - RNA, 19 nt, Artificial Sequence
  Description of Artificial Sequence: Synthetic oligonucleotide
  Sense strand starting at position 391 of SEQ ID NO: 585891
gguagaaacuguuauccca

SEQ ID NO: 675783 - RNA, 19 nt, Artificial Sequence
  Description of Artificial Sequence: Synthetic oligonucleotide
  Antisense strand to SEQ ID NO: 675782
ugggauaacaguuucuacc

SEQ ID NO: 675784 - RNA, 19 nt, Artificial Sequence
  Description of Artificial Sequence: Synthetic oligonucleotide
  Sense strand starting at position 434 of SEQ ID NO: 585891
ucaggagauucaguggcuu

SEQ ID NO: 675785 - RNA, 19 nt, Artificial Sequence
  Description of Artificial Sequence: Synthetic oligonucleotide
  Antisense strand to SEQ ID NO: 675784
aagccacugaaucuccuga

SEQ ID NO: 675786 - RNA, 19 nt, Artificial Sequence
  Description of Artificial Sequence: Synthetic oligonucleotide
  Sense strand starting at position 500 of SEQ ID NO: 585891
gauucuaaagccuguaagu

SEQ ID NO: 675787 - RNA, 19 nt, Artificial Sequence
  Description of Artificial Sequence: Synthetic oligonucleotide
  Antisense strand to SEQ ID NO: 675786
acuuacaggcuuuagaauc

SEQ ID NO: 675788 - RNA, 19 nt, Artificial Sequence
  Description of Artificial Sequence: Synthetic oligonucleotide
  Sense strand starting at position 977 of SEQ ID NO: 585891
ggccaaguguuuccaugua

SEQ ID NO: 675789 - RNA, 19 nt, Artificial Sequence
  Description of Artificial Sequence: Synthetic oligonucleotide
  Antisense strand to SEQ ID NO: 675788
uacauggaaacacuuggcc

SEQ ID NO: 675790 - RNA, 19 nt, Artificial Sequence
  Description of Artificial Sequence: Synthetic oligonucleotide
  Sense strand starting at position 1147 of SEQ ID NO: 585891
cuucccgaucucugugaau

SEQ ID NO: 675791 - RNA, 19 nt, Artificial Sequence
  Description of Artificial Sequence: Synthetic oligonucleotide
  Antisense strand to SEQ ID NO: 675790
auucacagagaucgggaag

SEQ ID NO: 675792 - RNA, 19 nt, Artificial Sequence
  Description of Artificial Sequence: Synthetic oligonucleotide
  Sense strand starting at position 1149 of SEQ ID NO: 585891
ucccgaucucugugaauca

SEQ ID NO: 675793 - RNA, 19 nt, Artificial Sequence
  Description of Artificial Sequence: Synthetic oligonucleotide
  Antisense strand to SEQ ID NO: 675792
ugauucacagagaucggga

SEQ ID NO: 675794 - RNA, 19 nt, Artificial Sequence
  Description of Artificial Sequence: Synthetic oligonucleotide
  Sense strand starting at position 1270 of SEQ ID NO: 585891
agugcuuaauguuuagauu

SEQ ID NO: 675795 - RNA, 19 nt, Artificial Sequence
  Description of Artificial Sequence: Synthetic oligonucleotide
  Antisense strand to SEQ ID NO: 675794
aaucuaaacauuaagcacu

SEQ ID NO: 675796 - RNA, 19 nt, Artificial Sequence
  Description of Artificial Sequence: Synthetic oligonucleotide
  Sense strand starting at position 1273 of SEQ ID NO: 585891
gcuuaauguuuagauuuac

SEQ ID NO: 675797 - RNA, 19 nt, Artificial Sequence
  Description of Artificial Sequence: Synthetic oligonucleotide
  Antisense strand to SEQ ID NO: 675796
guaaaucuaaacauuaagc

SEQ ID NO: 675798 - RNA, 19 nt, Artificial Sequence
  Description of Artificial Sequence: Synthetic oligonucleotide
  Sense strand starting at position 1279 of SEQ ID NO: 585891
uguuuagauuuacagaucu

SEQ ID NO: 675799 - RNA, 19 nt, Artificial Sequence
  Description of Artificial Sequence: Synthetic oligonucleotide
  Antisense strand to SEQ ID NO: 675798
agaucuguaaaucuaaaca

SEQ ID NO: 675800 - RNA, 19 nt, Artificial Sequence
  Description of Artificial Sequence: Synthetic oligonucleotide
  Sense strand starting at position 1286 of SEQ ID NO: 585891
auuuacagaucuuggccaa

SEQ ID NO: 675801 - RNA, 19 nt, Artificial Sequence
  Description of Artificial Sequence: Synthetic oligonucleotide
  Antisense strand to SEQ ID NO: 675800
uuggccaagaucuguaaau

SEQ ID NO: 675802 - RNA, 19 nt, Artificial Sequence
  Description of Artificial Sequence: Synthetic oligonucleotide
  Sense strand starting at position 1343 of SEQ ID NO: 585891
gagaccacuucuccgcuua

SEQ ID NO: 675803 - RNA, 19 nt, Artificial Sequence
  Description of Artificial Sequence: Synthetic oligonucleotide
  Antisense strand to SEQ ID NO: 675802
uaagcggagaaguggucuc

SEQ ID NO: 675804 - RNA, 19 nt, Artificial Sequence
  Description of Artificial Sequence: Synthetic oligonucleotide
  Sense strand starting at position 1417 of SEQ ID NO: 585891
agcagauuauuagaauaca

SEQ ID NO: 675805 - RNA, 19 nt, Artificial Sequence
  Description of Artificial Sequence: Synthetic oligonucleotide
  Antisense strand to SEQ ID NO: 675804
uguauucuaauaaucugcu

SEQ ID NO: 675806 - RNA, 19 nt, Artificial Sequence
  Description of Artificial Sequence: Synthetic oligonucleotide
  Sense strand starting at position 1447 of SEQ ID NO: 585891
acacgcaugaugggauuaa

SEQ ID NO: 675807 - RNA, 19 nt, Artificial Sequence
  Description of Artificial Sequence: Synthetic oligonucleotide
  Antisense strand to SEQ ID NO: 675806
uuaaucccaucaugcgugu

SEQ ID NO: 675808 - RNA, 19 nt, Artificial Sequence
  Description of Artificial Sequence: Synthetic oligonucleotide
  Sense strand starting at position 1831 of SEQ ID NO: 585891
ggcugaauuucugggcauu

SEQ ID NO: 675809 - RNA, 19 nt, Artificial Sequence
  Description of Artificial Sequence: Synthetic oligonucleotide
  Antisense strand to SEQ ID NO: 675808
aaugcccagaaauucagcc

SEQ ID NO: 675810 - RNA, 19 nt, Artificial Sequence
  Description of Artificial Sequence: Synthetic oligonucleotide
  Sense strand starting at position 1844 of SEQ ID NO: 585891
ggcauuaucuuguugcuca

SEQ ID NO: 675811 - RNA, 19 nt, Artificial Sequence
  Description of Artificial Sequence: Synthetic oligonucleotide
  Antisense strand to SEQ ID NO: 675810
ugagcaacaagauaaugcc

SEQ ID NO: 675812 - RNA, 19 nt, Artificial Sequence
  Description of Artificial Sequence: Synthetic oligonucleotide
  Sense strand starting at position 2004 of SEQ ID NO: 585891
gcgcgaugggacuuguagu

SEQ ID NO: 675813 - RNA, 19 nt, Artificial Sequence
  Description of Artificial Sequence: Synthetic oligonucleotide
  Antisense strand to SEQ ID NO: 675812
acuacaagucccaucgcgc

SEQ ID NO: 675814 - RNA, 19 nt, Artificial Sequence
  Description of Artificial Sequence: Synthetic oligonucleotide
  Sense strand starting at position 2460 of SEQ ID NO: 585891
uugguugugggccaggaaa

SEQ ID NO: 675815 - RNA, 19 nt, Artificial Sequence
  Description of Artificial Sequence: Synthetic oligonucleotide
  Antisense strand to SEQ ID NO: 675814
uuuccuggcccacaaccaa

SEQ ID NO: 675816 - RNA, 19 nt, Artificial Sequence
  Description of Artificial Sequence: Synthetic oligonucleotide
  Sense strand starting at position 2586 of SEQ ID NO: 585891
gucuuauuauuaguaacac

SEQ ID NO: 675817 - RNA, 19 nt, Artificial Sequence
  Description of Artificial Sequence: Synthetic oligonucleotide
  Antisense strand to SEQ ID NO: 675816
guguuacuaauaauaagac

SEQ ID NO: 675818 - RNA, 19 nt, Artificial Sequence
  Description of Artificial Sequence: Synthetic oligonucleotide
  Sense strand starting at position 2618 of SEQ ID NO: 585891
gcccaaucccagugacuuc

SEQ ID NO: 675819 - RNA, 19 nt, Artificial Sequence
  Description of Artificial Sequence: Synthetic oligonucleotide
  Antisense strand to SEQ ID NO: 675818
gaagucacugggauugggc

SEQ ID NO: 675820 - RNA, 19 nt, Artificial Sequence
  Description of Artificial Sequence: Synthetic oligonucleotide
  Sense strand starting at position 2655 of SEQ ID NO: 585891
uugggaaucuuucucauua

SEQ ID NO: 675821 - RNA, 19 nt, Artificial Sequence
  Description of Artificial Sequence: Synthetic oligonucleotide
  Antisense strand to SEQ ID NO: 675820
uaaugagaaagauucccaa

SEQ ID NO: 675822 - RNA, 19 nt, Artificial Sequence
  Description of Artificial Sequence: Synthetic oligonucleotide
  Sense strand starting at position 2656 of SEQ ID NO: 585891
ugggaaucuuucucauuaa

SEQ ID NO: 675823 - RNA, 19 nt, Artificial Sequence
  Description of Artificial Sequence: Synthetic oligonucleotide
  Antisense strand to SEQ ID NO: 675822
uuaaugagaaagauuccca

SEQ ID NO: 675824 - RNA, 19 nt, Artificial Sequence
  Description of Artificial Sequence: Synthetic oligonucleotide
  Sense strand starting at position 2657 of SEQ ID NO: 585891
gggaaucuuucucauuaag

SEQ ID NO: 675825 - RNA, 19 nt, Artificial Sequence
  Description of Artificial Sequence: Synthetic oligonucleotide
  Antisense strand to SEQ ID NO: 675824
cuuaaugagaaagauuccc

SEQ ID NO: 675826 - RNA, 19 nt, Artificial Sequence
  Description of Artificial Sequence: Synthetic oligonucleotide
  Sense strand starting at position 2686 of SEQ ID NO: 585891
gaugauucuucugagcgag

SEQ ID NO: 675827 - RNA, 19 nt, Artificial Sequence
  Description of Artificial Sequence: Synthetic oligonucleotide
  Antisense strand to SEQ ID NO: 675826
cucgcucagaagaaucauc

SEQ ID NO: 675828 - RNA, 19 nt, Artificial Sequence
  Description of Artificial Sequence: Synthetic oligonucleotide
  Sense strand starting at position 2688 of SEQ ID NO: 585891
ugauucuucugagcgagua

SEQ ID NO: 675829 - RNA, 19 nt, Artificial Sequence
  Description of Artificial Sequence: Synthetic oligonucleotide
  Antisense strand to SEQ ID NO: 675828
uacucgcucagaagaauca

SEQ ID NO: 675830 - RNA, 19 nt, Artificial Sequence
  Description of Artificial Sequence: Synthetic oligonucleotide
  Sense strand starting at position 2689 of SEQ ID NO: 585891
gauucuucugagcgaguaa

SEQ ID NO: 675831 - RNA, 19 nt, Artificial Sequence
  Description of Artificial Sequence: Synthetic oligonucleotide
  Antisense strand to SEQ ID NO: 675830
uuacucgcucagaagaauc

SEQ ID NO: 675832 - RNA, 19 nt, Artificial Sequence
  Description of Artificial Sequence: Synthetic oligonucleotide
  Sense strand starting at position 2690 of SEQ ID NO: 585891
auucuucugagcgaguaau

SEQ ID NO: 675833 - RNA, 19 nt, Artificial Sequence
  Description of Artificial Sequence: Synthetic oligonucleotide
  Antisense strand to SEQ ID NO: 675832
auuacucgcucagaagaau

SEQ ID NO: 675834 - RNA, 19 nt, Artificial Sequence
  Description of Artificial Sequence: Synthetic oligonucleotide
  Sense strand starting at position 2700 of SEQ ID NO: 585891
gcgaguaauguugggaaac

SEQ ID NO: 675835 - RNA, 19 nt, Artificial Sequence
  Description of Artificial Sequence: Synthetic oligonucleotide
  Antisense strand to SEQ ID NO: 675834
guuucccaacauuacucgc

SEQ ID NO: 675836 - RNA, 19 nt, Artificial Sequence
  Description of Artificial Sequence: Synthetic oligonucleotide
  Sense strand starting at position 2849 of SEQ ID NO: 585891
gcaaguauuugcgaggcaa

SEQ ID NO: 675837 - RNA, 19 nt, Artificial Sequence
  Description of Artificial Sequence: Synthetic oligonucleotide
  Antisense strand to SEQ ID NO: 675836
uugccucgcaaauacuugc

SEQ ID NO: 675838 - RNA, 19 nt, Artificial Sequence
  Description of Artificial Sequence: Synthetic oligonucleotide
  Sense strand starting at position 2851 of SEQ ID NO: 585891
aaguauuugcgaggcaagu

SEQ ID NO: 675839 - RNA, 19 nt, Artificial Sequence
  Description of Artificial Sequence: Synthetic oligonucleotide
  Antisense strand to SEQ ID NO: 675838
acuugccucgcaaauacuu

SEQ ID NO: 675840 - RNA, 19 nt, Artificial Sequence
  Description of Artificial Sequence: Synthetic oligonucleotide
  Sense strand starting at position 3008 of SEQ ID NO: 585891
cgcagauucugggcuugga

SEQ ID NO: 675841 - RNA, 19 nt, Artificial Sequence
  Description of Artificial Sequence: Synthetic oligonucleotide
  Antisense strand to SEQ ID NO: 675840
uccaagcccagaaucugcg

SEQ ID NO: 675842 - RNA, 19 nt, Artificial Sequence
  Description of Artificial Sequence: Synthetic oligonucleotide
  Sense strand starting at position 3018 of SEQ ID NO: 585891
gggcuuggauccuaacacu

SEQ ID NO: 675843 - RNA, 19 nt, Artificial Sequence
  Description of Artificial Sequence: Synthetic oligonucleotide
  Antisense strand to SEQ ID NO: 675842
aguguuaggauccaagccc

SEQ ID NO: 675844 - RNA, 19 nt, Artificial Sequence
  Description of Artificial Sequence: Synthetic oligonucleotide
  Sense strand starting at position 3062 of SEQ ID NO: 585891
ugaccuuaauccucagugu

SEQ ID NO: 675845 - RNA, 19 nt, Artificial Sequence
  Description of Artificial Sequence: Synthetic oligonucleotide
  Antisense strand to SEQ ID NO: 675844
acacugaggauuaagguca

SEQ ID NO: 675846 - RNA, 19 nt, Artificial Sequence
  Description of Artificial Sequence: Synthetic oligonucleotide
  Sense strand starting at position 3128 of SEQ ID NO: 585891
acagaaagagucugucaca

SEQ ID NO: 675847 - RNA, 19 nt, Artificial Sequence
  Description of Artificial Sequence: Synthetic oligonucleotide
  Antisense strand to SEQ ID NO: 675846
ugugacagacucuuucugu

SEQ ID NO: 675848 - RNA, 19 nt, Artificial Sequence
  Description of Artificial Sequence: Synthetic oligonucleotide
  Sense strand starting at position 3131 of SEQ ID NO: 585891
gaaagagucugucacagug

SEQ ID NO: 675849 - RNA, 19 nt, Artificial Sequence
  Description of Artificial Sequence: Synthetic oligonucleotide
  Antisense strand to SEQ ID NO: 675848
cacugugacagacucuuuc

SEQ ID NO: 675850 - RNA, 19 nt, Artificial Sequence
  Description of Artificial Sequence: Synthetic oligonucleotide
  Sense strand starting at position 3480 of SEQ ID NO: 585891
agaagucgcuccucaugau

SEQ ID NO: 675851 - RNA, 19 nt, Artificial Sequence
  Description of Artificial Sequence: Synthetic oligonucleotide
  Antisense strand to SEQ ID NO: 675850
aucaugaggagcgacuucu

SEQ ID NO: 675852 - RNA, 19 nt, Artificial Sequence
  Description of Artificial Sequence: Synthetic oligonucleotide
  Sense strand starting at position 3499 of SEQ ID NO: 585891
guuguuuacuuccuggaua

SEQ ID NO: 675853 - RNA, 19 nt, Artificial Sequence
  Description of Artificial Sequence: Synthetic oligonucleotide
  Antisense strand to SEQ ID NO: 675852
uauccaggaaguaaacaac

SEQ ID NO: 675854 - RNA, 19 nt, Artificial Sequence
  Description of Artificial Sequence: Synthetic oligonucleotide
  Sense strand starting at position 3502 of SEQ ID NO: 585891
guuuacuuccuggauagca

SEQ ID NO: 675855 - RNA, 19 nt, Artificial Sequence
  Description of Artificial Sequence: Synthetic oligonucleotide
  Antisense strand to SEQ ID NO: 675854
ugcuauccaggaaguaaac

SEQ ID NO: 675856 - RNA, 19 nt, Artificial Sequence
  Description of Artificial Sequence: Synthetic oligonucleotide
  Sense strand starting at position 3 of SEQ ID NO: 585892
gcuuaaagauaaucccgaa

SEQ ID NO: 675857 - RNA, 19 nt, Artificial Sequence
  Description of Artificial Sequence: Synthetic oligonucleotide
  Antisense strand to SEQ ID NO: 675856
uucgggauuaucuuuaagc

SEQ ID NO: 675858 - RNA, 19 nt, Artificial Sequence
  Description of Artificial Sequence: Synthetic oligonucleotide
  Sense strand starting at position 295 of SEQ ID NO: 585892
uuuagaaagcuguguaaag

SEQ ID NO: 675859 - RNA, 19 nt, Artificial Sequence
  Description of Artificial Sequence: Synthetic oligonucleotide
  Antisense strand to SEQ ID NO: 675858
cuuuacacagcuuucuaaa

SEQ ID NO: 675860 - RNA, 19 nt, Artificial Sequence
  Description of Artificial Sequence: Synthetic oligonucleotide
  Sense strand starting at position 296 of SEQ ID NO: 585892
uuagaaagcuguguaaaga

SEQ ID NO: 675861 - RNA, 19 nt, Artificial Sequence
  Description of Artificial Sequence: Synthetic oligonucleotide
  Antisense strand to SEQ ID NO: 675860
ucuuuacacagcuuucuaa

SEQ ID NO: 675862 - RNA, 19 nt, Artificial Sequence
  Description of Artificial Sequence: Synthetic oligonucleotide
  Sense strand starting at position 339 of SEQ ID NO: 585892
cuggcaaugaccgaugacu

SEQ ID NO: 675863 - RNA, 19 nt, Artificial Sequence
  Description of Artificial Sequence: Synthetic oligonucleotide
  Antisense strand to SEQ ID NO: 675862
agucaucggucauugccag

SEQ ID NO: 675864 - RNA, 19 nt, Artificial Sequence
  Description of Artificial Sequence: Synthetic oligonucleotide
  Sense strand starting at position 341 of SEQ ID NO: 585892
ggcaaugaccgaugacuuu

SEQ ID NO: 675865 - RNA, 19 nt, Artificial Sequence
  Description of Artificial Sequence: Synthetic oligonucleotide
  Antisense strand to SEQ ID NO: 675864
aaagucaucggucauugcc

SEQ ID NO: 675866 - RNA, 19 nt, Artificial Sequence
  Description of Artificial Sequence: Synthetic oligonucleotide
  Sense strand starting at position 347 of SEQ ID NO: 585892
gaccgaugacuuugaugac

SEQ ID NO: 675867 - RNA, 19 nt, Artificial Sequence
  Description of Artificial Sequence: Synthetic oligonucleotide
  Antisense strand to SEQ ID NO: 675866
gucaucaaagucaucgguc

SEQ ID NO: 675868 - RNA, 19 nt, Artificial Sequence
  Description of Artificial Sequence: Synthetic oligonucleotide
  Sense strand starting at position 575 of SEQ ID NO: 585892
ugcuuagcccaucauagau

SEQ ID NO: 675869 - RNA, 19 nt, Artificial Sequence
  Description of Artificial Sequence: Synthetic oligonucleotide
  Antisense strand to SEQ ID NO: 675868
aucuaugaugggcuaagca

SEQ ID NO: 675870 - RNA, 19 nt, Artificial Sequence
  Description of Artificial Sequence: Synthetic oligonucleotide
  Sense strand starting at position 740 of SEQ ID NO: 585892
uggauucugccacggaaca

SEQ ID NO: 675871 - RNA, 19 nt, Artificial Sequence
  Description of Artificial Sequence: Synthetic oligonucleotide
  Antisense strand to SEQ ID NO: 675870
uguuccguggcagaaucca

SEQ ID NO: 675872 - RNA, 19 nt, Artificial Sequence
  Description of Artificial Sequence: Synthetic oligonucleotide
  Sense strand starting at position 741 of SEQ ID NO: 585892
ggauucugccacggaacaa

SEQ ID NO: 675873 - RNA, 19 nt, Artificial Sequence
  Description of Artificial Sequence: Synthetic oligonucleotide
  Antisense strand to SEQ ID NO: 675872
uuguuccguggcagaaucc

SEQ ID NO: 675874 - RNA, 19 nt, Artificial Sequence
  Description of Artificial Sequence: Synthetic oligonucleotide
  Sense strand starting at position 979 of SEQ ID NO: 585892
ggcgcaaguguguugaacu

SEQ ID NO: 675875 - RNA, 19 nt, Artificial Sequence
  Description of Artificial Sequence: Synthetic oligonucleotide
  Antisense strand to SEQ ID NO: 675874
aguucaacacacuugcgcc

SEQ ID NO: 675876 - RNA, 19 nt, Artificial Sequence
  Description of Artificial Sequence: Synthetic oligonucleotide
  Sense strand starting at position 1131 of SEQ ID NO: 585892
gggccuuuaaggcauagaa

SEQ ID NO: 675877 - RNA, 19 nt, Artificial Sequence
  Description of Artificial Sequence: Synthetic oligonucleotide
  Antisense strand to SEQ ID NO: 675876
uucuaugccuuaaaggccc

SEQ ID NO: 675878 - RNA, 19 nt, Artificial Sequence
  Description of Artificial Sequence: Synthetic oligonucleotide
  Sense strand starting at position 1133 of SEQ ID NO: 585892
gccuuuaaggcauagaaua

SEQ ID NO: 675879 - RNA, 19 nt, Artificial Sequence
  Description of Artificial Sequence: Synthetic oligonucleotide
  Antisense strand to SEQ ID NO: 675878
uauucuaugccuuaaaggc

SEQ ID NO: 675880 - RNA, 19 nt, Artificial Sequence
  Description of Artificial Sequence: Synthetic oligonucleotide
  Sense strand starting at position 1150 of SEQ ID NO: 585892
uagugagaauguccuaaag

SEQ ID NO: 675881 - RNA, 19 nt, Artificial Sequence
  Description of Artificial Sequence: Synthetic oligonucleotide
  Antisense strand to SEQ ID NO: 675880
cuuuaggacauucucacua

SEQ ID NO: 675882 - RNA, 19 nt, Artificial Sequence
  Description of Artificial Sequence: Synthetic oligonucleotide
  Sense strand starting at position 1234 of SEQ ID NO: 585892
gaauauugaugucagauuu

SEQ ID NO: 675883 - RNA, 19 nt, Artificial Sequence
  Description of Artificial Sequence: Synthetic oligonucleotide
  Antisense strand to SEQ ID NO: 675882
aaaucugacaucaauauuc

SEQ ID NO: 675884 - RNA, 19 nt, Artificial Sequence
  Description of Artificial Sequence: Synthetic oligonucleotide
  Sense strand starting at position 1555 of SEQ ID NO: 585892
gucagauauucuucugacu

SEQ ID NO: 675885 - RNA, 19 nt, Artificial Sequence
  Description of Artificial Sequence: Synthetic oligonucleotide
  Antisense strand to SEQ ID NO: 675884
agucagaagaauaucugac

SEQ ID NO: 675886 - RNA, 19 nt, Artificial Sequence
  Description of Artificial Sequence: Synthetic oligonucleotide
  Sense strand starting at position 1588 of SEQ ID NO: 585892
gagugccauguugaagagu

SEQ ID NO: 675887 - RNA, 19 nt, Artificial Sequence
  Description of Artificial Sequence: Synthetic oligonucleotide
  Antisense strand to SEQ ID NO: 675886
acucuucaacauggcacuc

SEQ ID NO: 675888 - RNA, 19 nt, Artificial Sequence
  Description of Artificial Sequence: Synthetic oligonucleotide
  Sense strand starting at position 1613 of SEQ ID NO: 585892
uauggaagaucagucccua

SEQ ID NO: 675889 - RNA, 19 nt, Artificial Sequence
  Description of Artificial Sequence: Synthetic oligonucleotide
  Antisense strand to SEQ ID NO: 675888
uagggacugaucuuccaua

SEQ ID NO: 675890 - RNA, 19 nt, Artificial Sequence
  Description of Artificial Sequence: Synthetic oligonucleotide
  Sense strand starting at position 1749 of SEQ ID NO: 585892
acugucaccgcagauaauu

SEQ ID NO: 675891 - RNA, 19 nt, Artificial Sequence
  Description of Artificial Sequence: Synthetic oligonucleotide
  Antisense strand to SEQ ID NO: 675890
aauuaucugcggugacagu

SEQ ID NO: 675892 - RNA, 19 nt, Artificial Sequence
  Description of Artificial Sequence: Synthetic oligonucleotide
  Sense strand starting at position 1777 of SEQ ID NO: 585892
ugaucaaauagcgaugcuu

SEQ ID NO: 675893 - RNA, 19 nt, Artificial Sequence
  Description of Artificial Sequence: Synthetic oligonucleotide
  Antisense strand to SEQ ID NO: 675892
aagcaucgcuauuugauca

SEQ ID NO: 675894 - RNA, 19 nt, Artificial Sequence
  Description of Artificial Sequence: Synthetic oligonucleotide
  Sense strand starting at position 1835 of SEQ ID NO: 585892
gggagagccuucucaugag

SEQ ID NO: 675895 - RNA, 19 nt, Artificial Sequence
  Description of Artificial Sequence: Synthetic oligonucleotide
  Antisense strand to SEQ ID NO: 675894
cucaugagaaggcucuccc

SEQ ID NO: 675896 - RNA, 19 nt, Artificial Sequence
  Description of Artificial Sequence: Synthetic oligonucleotide
  Sense strand starting at position 1923 of SEQ ID NO: 585892
auuagacuacaguguuaag

SEQ ID NO: 675897 - RNA, 19 nt, Artificial Sequence
  Description of Artificial Sequence: Synthetic oligonucleotide
  Antisense strand to SEQ ID NO: 675896
cuuaacacuguagucuaau

SEQ ID NO: 675898 - RNA, 19 nt, Artificial Sequence
  Description of Artificial Sequence: Synthetic oligonucleotide
  Sense strand starting at position 1943 of SEQ ID NO: 585892
agcaaagauccagguaaga

SEQ ID NO: 675899 - RNA, 19 nt, Artificial Sequence
  Description of Artificial Sequence: Synthetic oligonucleotide
  Antisense strand to SEQ ID NO: 675898
ucuuaccuggaucuuugcu

SEQ ID NO: 675900 - RNA, 19 nt, Artificial Sequence
  Description of Artificial Sequence: Synthetic oligonucleotide
  Sense strand starting at position 1983 of SEQ ID NO: 585892
uaauguggucaauaguaug

SEQ ID NO: 675901 - RNA, 19 nt, Artificial Sequence
  Description of Artificial Sequence: Synthetic oligonucleotide
  Antisense strand to SEQ ID NO: 675900
cauacuauugaccacauua

SEQ ID NO: 675902 - RNA, 19 nt, Artificial Sequence
  Description of Artificial Sequence: Synthetic oligonucleotide
  Sense strand starting at position 2045 of SEQ ID NO: 585892
cgugaaucuuaaucuagaa

SEQ ID NO: 675903 - RNA, 19 nt, Artificial Sequence
  Description of Artificial Sequence: Synthetic oligonucleotide
  Antisense strand to SEQ ID NO: 675902
uucuagauuaagauucacg

SEQ ID NO: 675904 - RNA, 19 nt, Artificial Sequence
  Description of Artificial Sequence: Synthetic oligonucleotide
  Sense strand starting at position 2196 of SEQ ID NO: 585892
ccuaacugugcugaucaua

SEQ ID NO: 675905 - RNA, 19 nt, Artificial Sequence
  Description of Artificial Sequence: Synthetic oligonucleotide
  Antisense strand to SEQ ID NO: 675904
uaugaucagcacaguuagg

SEQ ID NO: 675906 - RNA, 19 nt, Artificial Sequence
  Description of Artificial Sequence: Synthetic oligonucleotide
  Sense strand starting at position 2234 of SEQ ID NO: 585892
uggccugaauaacuauaga

SEQ ID NO: 675907 - RNA, 19 nt, Artificial Sequence
  Description of Artificial Sequence: Synthetic oligonucleotide
  Antisense strand to SEQ ID NO: 675906
ucuauaguuauucaggcca

SEQ ID NO: 675908 - RNA, 19 nt, Artificial Sequence
  Description of Artificial Sequence: Synthetic oligonucleotide
  Sense strand starting at position 2291 of SEQ ID NO: 585892
ccuuuaacuggcgaagaaa

SEQ ID NO: 675909 - RNA, 19 nt, Artificial Sequence
  Description of Artificial Sequence: Synthetic oligonucleotide
  Antisense strand to SEQ ID NO: 675908
uuucuucgccaguuaaagg

SEQ ID NO: 675910 - RNA, 19 nt, Artificial Sequence
  Description of Artificial Sequence: Synthetic oligonucleotide
  Sense strand starting at position 2326 of SEQ ID NO: 585892
gaggaagugacuugcugaa

SEQ ID NO: 675911 - RNA, 19 nt, Artificial Sequence
  Description of Artificial Sequence: Synthetic oligonucleotide
  Antisense strand to SEQ ID NO: 675910
uucagcaagucacuuccuc

SEQ ID NO: 675912 - RNA, 19 nt, Artificial Sequence
  Description of Artificial Sequence: Synthetic oligonucleotide
  Sense strand starting at position 2328 of SEQ ID NO: 585892
ggaagugacuugcugaaua

SEQ ID NO: 675913 - RNA, 19 nt, Artificial Sequence
  Description of Artificial Sequence: Synthetic oligonucleotide
  Antisense strand to SEQ ID NO: 675912
uauucagcaagucacuucc

SEQ ID NO: 675914 - RNA, 19 nt, Artificial Sequence
  Description of Artificial Sequence: Synthetic oligonucleotide
  Sense strand starting at position 2330 of SEQ ID NO: 585892
aagugacuugcugaauauc

SEQ ID NO: 675915 - RNA, 19 nt, Artificial Sequence
  Description of Artificial Sequence: Synthetic oligonucleotide
  Antisense strand to SEQ ID NO: 675914
gauauucagcaagucacuu

SEQ ID NO: 675916 - RNA, 19 nt, Artificial Sequence
  Description of Artificial Sequence: Synthetic oligonucleotide
  Sense strand starting at position 2507 of SEQ ID NO: 585892
gcgggaagccuugaaccua

SEQ ID NO: 675917 - RNA, 19 nt, Artificial Sequence
  Description of Artificial Sequence: Synthetic oligonucleotide
  Antisense strand to SEQ ID NO: 675916
uagguucaaggcuucccgc

SEQ ID NO: 675918 - RNA, 19 nt, Artificial Sequence
  Description of Artificial Sequence: Synthetic oligonucleotide
  Sense strand starting at position 2767 of SEQ ID NO: 585892
gucuuuaugguucaggaga

SEQ ID NO: 675919 - RNA, 19 nt, Artificial Sequence
  Description of Artificial Sequence: Synthetic oligonucleotide
  Antisense strand to SEQ ID NO: 675918
ucuccugaaccauaaagac

SEQ ID NO: 675920 - RNA, 19 nt, Artificial Sequence
  Description of Artificial Sequence: Synthetic oligonucleotide
  Sense strand starting at position 2794 of SEQ ID NO: 585892
aggguuacgcuauaaugaa

SEQ ID NO: 675921 - RNA, 19 nt, Artificial Sequence
  Description of Artificial Sequence: Synthetic oligonucleotide
  Antisense strand to SEQ ID NO: 675920
uucauuauagcguaacccu

SEQ ID NO: 675922 - RNA, 19 nt, Artificial Sequence
  Description of Artificial Sequence: Synthetic oligonucleotide
  Sense strand starting at position 2890 of SEQ ID NO: 585892
uuggaugcauucuccauaa

SEQ ID NO: 675923 - RNA, 19 nt, Artificial Sequence
  Description of Artificial Sequence: Synthetic oligonucleotide
  Antisense strand to SEQ ID NO: 675922
uuauggagaaugcauccaa

SEQ ID NO: 675924 - RNA, 19 nt, Artificial Sequence
  Description of Artificial Sequence: Synthetic oligonucleotide
  Sense strand starting at position 2957 of SEQ ID NO: 585892
augcuaauugucgaaacau

SEQ ID NO: 675925 - RNA, 19 nt, Artificial Sequence
  Description of Artificial Sequence: Synthetic oligonucleotide
  Antisense strand to SEQ ID NO: 675924
auguuucgacaauuagcau

SEQ ID NO: 675926 - RNA, 19 nt, Artificial Sequence
  Description of Artificial Sequence: Synthetic oligonucleotide
  Sense strand starting at position 2973 of SEQ ID NO: 585892
cauacauggccaggagauu

SEQ ID NO: 675927 - RNA, 19 nt, Artificial Sequence
  Description of Artificial Sequence: Synthetic oligonucleotide
  Antisense strand to SEQ ID NO: 675926
aaucuccuggccauguaug

SEQ ID NO: 675928 - RNA, 19 nt, Artificial Sequence
  Description of Artificial Sequence: Synthetic oligonucleotide
  Sense strand starting at position 2984 of SEQ ID NO: 585892
aggagauugaaccgcauua

SEQ ID NO: 675929 - RNA, 19 nt, Artificial Sequence
  Description of Artificial Sequence: Synthetic oligonucleotide
  Antisense strand to SEQ ID NO: 675928
uaaugcgguucaaucuccu

SEQ ID NO: 675930 - RNA, 19 nt, Artificial Sequence
  Description of Artificial Sequence: Synthetic oligonucleotide
  Sense strand starting at position 3456 of SEQ ID NO: 585892
ucuugauugucaucauaua

SEQ ID NO: 675931 - RNA, 19 nt, Artificial Sequence
  Description of Artificial Sequence: Synthetic oligonucleotide
  Antisense strand to SEQ ID NO: 675930
uauaugaugacaaucaaga

SEQ ID NO: 675932 - RNA, 19 nt, Artificial Sequence
  Description of Artificial Sequence: Synthetic oligonucleotide
  Sense strand starting at position 3627 of SEQ ID NO: 585892
cugauugacauucgauuag

SEQ ID NO: 675933 - RNA, 19 nt, Artificial Sequence
  Description of Artificial Sequence: Synthetic oligonucleotide
  Antisense strand to SEQ ID NO: 675932
cuaaucgaaugucaaucag

SEQ ID NO: 675934 - RNA, 19 nt, Artificial Sequence
  Description of Artificial Sequence: Synthetic oligonucleotide
  Sense strand starting at position 3654 of SEQ ID NO: 585892
uauuauuggcguuuagugu

SEQ ID NO: 675935 - RNA, 19 nt, Artificial Sequence
  Description of Artificial Sequence: Synthetic oligonucleotide
  Antisense strand to SEQ ID NO: 675934
acacuaaacgccaauaaua

SEQ ID NO: 675936 - RNA, 19 nt, Artificial Sequence
  Description of Artificial Sequence: Synthetic oligonucleotide
  Sense strand starting at position 91 of SEQ ID NO: 585893
uuggaugcauucuccauaa

SEQ ID NO: 675937 - RNA, 19 nt, Artificial Sequence
  Description of Artificial Sequence: Synthetic oligonucleotide
  Antisense strand to SEQ ID NO: 675936
uuauggagaaugcauccaa

SEQ ID NO: 675938 - RNA, 19 nt, Artificial Sequence
  Description of Artificial Sequence: Synthetic oligonucleotide
  Sense strand starting at position 158 of SEQ ID NO: 585893
augcuaauugucgaaacau

SEQ ID NO: 675939 - RNA, 19 nt, Artificial Sequence
  Description of Artificial Sequence: Synthetic oligonucleotide
  Antisense strand to SEQ ID NO: 675938
auguuucgacaauuagcau

SEQ ID NO: 675940 - RNA, 19 nt, Artificial Sequence
  Description of Artificial Sequence: Synthetic oligonucleotide
  Sense strand starting at position 174 of SEQ ID NO: 585893
cauacauggccaggagauu

SEQ ID NO: 675941 - RNA, 19 nt, Artificial Sequence
  Description of Artificial Sequence: Synthetic oligonucleotide
  Antisense strand to SEQ ID NO: 675940
aaucuccuggccauguaug

SEQ ID NO: 675942 - RNA, 19 nt, Artificial Sequence
  Description of Artificial Sequence: Synthetic oligonucleotide
  Sense strand starting at position 185 of SEQ ID NO: 585893
aggagauugaaccgcauua

SEQ ID NO: 675943 - RNA, 19 nt, Artificial Sequence
  Description of Artificial Sequence: Synthetic oligonucleotide
  Antisense strand to SEQ ID NO: 675942
uaaugcgguucaaucuccu

SEQ ID NO: 675944 - RNA, 19 nt, Artificial Sequence
  Description of Artificial Sequence: Synthetic oligonucleotide
  Sense strand starting at position 606 of SEQ ID NO: 585893
gucaguagagugcauugau

SEQ ID NO: 675945 - RNA, 19 nt, Artificial Sequence
  Description of Artificial Sequence: Synthetic oligonucleotide
  Antisense strand to SEQ ID NO: 675944
aucaaugcacucuacugac

SEQ ID NO: 675946 - RNA, 19 nt, Artificial Sequence
  Description of Artificial Sequence: Synthetic oligonucleotide
  Sense strand starting at position 654 of SEQ ID NO: 585893
aggucuugauugucaucau

SEQ ID NO: 675947 - RNA, 19 nt, Artificial Sequence
  Description of Artificial Sequence: Synthetic oligonucleotide
  Antisense strand to SEQ ID NO: 675946
augaugacaaucaagaccu

SEQ ID NO: 675948 - RNA, 19 nt, Artificial Sequence
  Description of Artificial Sequence: Synthetic oligonucleotide
  Sense strand starting at position 657 of SEQ ID NO: 585893
ucuugauugucaucauaua

SEQ ID NO: 675949 - RNA, 19 nt, Artificial Sequence
  Description of Artificial Sequence: Synthetic oligonucleotide
  Antisense strand to SEQ ID NO: 675948
uauaugaugacaaucaaga

SEQ ID NO: 675950 - RNA, 19 nt, Artificial Sequence
  Description of Artificial Sequence: Synthetic oligonucleotide
  Sense strand starting at position 828 of SEQ ID NO: 585893
cugauugacauucgauuag

SEQ ID NO: 675951 - RNA, 19 nt, Artificial Sequence
  Description of Artificial Sequence: Synthetic oligonucleotide
  Antisense strand to SEQ ID NO: 675950
cuaaucgaaugucaaucag

SEQ ID NO: 675952 - RNA, 19 nt, Artificial Sequence
  Description of Artificial Sequence: Synthetic oligonucleotide
  Sense strand starting at position 855 of SEQ ID NO: 585893
uauuauuggcguuuagugu

SEQ ID NO: 675953 - RNA, 19 nt, Artificial Sequence
  Description of Artificial Sequence: Synthetic oligonucleotide
  Antisense strand to SEQ ID NO: 675952
acacuaaacgccaauaaua

SEQ ID NO: 675954 - RNA, 19 nt, Artificial Sequence
  Description of Artificial Sequence: Synthetic oligonucleotide
  Sense strand starting at position 917 of SEQ ID NO: 585893
ggcccuugccuguaggaaa

SEQ ID NO: 675955 - RNA, 19 nt, Artificial Sequence
  Description of Artificial Sequence: Synthetic oligonucleotide
  Antisense strand to SEQ ID NO: 675954
uuuccuacaggcaagggcc

SEQ ID NO: 675956 - RNA, 19 nt, Artificial Sequence
  Description of Artificial Sequence: Synthetic oligonucleotide
  Sense strand starting at position 1227 of SEQ ID NO: 585893
ucaguucuguuaccagaug

SEQ ID NO: 675957 - RNA, 19 nt, Artificial Sequence
  Description of Artificial Sequence: Synthetic oligonucleotide
  Antisense strand to SEQ ID NO: 675956
caucugguaacagaacuga

SEQ ID NO: 675958 - RNA, 19 nt, Artificial Sequence
  Description of Artificial Sequence: Synthetic oligonucleotide
  Sense strand starting at position 1340 of SEQ ID NO: 585893
ccguuccaucaagagauaa

SEQ ID NO: 675959 - RNA, 19 nt, Artificial Sequence
  Description of Artificial Sequence: Synthetic oligonucleotide
  Antisense strand to SEQ ID NO: 675958
uuaucucuugauggaacgg

SEQ ID NO: 675960 - RNA, 19 nt, Artificial Sequence
  Description of Artificial Sequence: Synthetic oligonucleotide
  Sense strand starting at position 1446 of SEQ ID NO: 585893
aggugcuuugcauggauuu

SEQ ID NO: 675961 - RNA, 19 nt, Artificial Sequence
  Description of Artificial Sequence: Synthetic oligonucleotide
  Antisense strand to SEQ ID NO: 675960
aaauccaugcaaagcaccu

SEQ ID NO: 675962 - RNA, 19 nt, Artificial Sequence
  Description of Artificial Sequence: Synthetic oligonucleotide
  Sense strand starting at position 1620 of SEQ ID NO: 585893
gagcauauuccacgggaua

SEQ ID NO: 675963 - RNA, 19 nt, Artificial Sequence
  Description of Artificial Sequence: Synthetic oligonucleotide
  Antisense strand to SEQ ID NO: 675962
uaucccguggaauaugcuc

SEQ ID NO: 675964 - RNA, 19 nt, Artificial Sequence
  Description of Artificial Sequence: Synthetic oligonucleotide
  Sense strand starting at position 1621 of SEQ ID NO: 585893
agcauauuccacgggauag

SEQ ID NO: 675965 - RNA, 19 nt, Artificial Sequence
  Description of Artificial Sequence: Synthetic oligonucleotide
  Antisense strand to SEQ ID NO: 675964
cuaucccguggaauaugcu

SEQ ID NO: 675966 - RNA, 19 nt, Artificial Sequence
  Description of Artificial Sequence: Synthetic oligonucleotide
  Sense strand starting at position 1659 of SEQ ID NO: 585893
aucugagugaccugugacu

SEQ ID NO: 675967 - RNA, 19 nt, Artificial Sequence
  Description of Artificial Sequence: Synthetic oligonucleotide
  Antisense strand to SEQ ID NO: 675966
agucacaggucacucagau

SEQ ID NO: 675968 - RNA, 19 nt, Artificial Sequence
  Description of Artificial Sequence: Synthetic oligonucleotide
  Sense strand starting at position 1677 of SEQ ID NO: 585893
uugcgaggcagcuuguaau

SEQ ID NO: 675969 - RNA, 19 nt, Artificial Sequence
  Description of Artificial Sequence: Synthetic oligonucleotide
  Antisense strand to SEQ ID NO: 675968
auuacaagcugccucgcaa

SEQ ID NO: 675970 - RNA, 19 nt, Artificial Sequence
  Description of Artificial Sequence: Synthetic oligonucleotide
  Sense strand starting at position 1689 of SEQ ID NO: 585893
uuguaauuucuaggcaugu

SEQ ID NO: 675971 - RNA, 19 nt, Artificial Sequence
  Description of Artificial Sequence: Synthetic oligonucleotide
  Antisense strand to SEQ ID NO: 675970
acaugccuagaaauuacaa

SEQ ID NO: 675972 - RNA, 19 nt, Artificial Sequence
  Description of Artificial Sequence: Synthetic oligonucleotide
  Sense strand starting at position 1760 of SEQ ID NO: 585893
uccggugagcuguaaagaa

SEQ ID NO: 675973 - RNA, 19 nt, Artificial Sequence
  Description of Artificial Sequence: Synthetic oligonucleotide
  Antisense strand to SEQ ID NO: 675972
uucuuuacagcucaccgga

SEQ ID NO: 675974 - RNA, 19 nt, Artificial Sequence
  Description of Artificial Sequence: Synthetic oligonucleotide
  Sense strand starting at position 1806 of SEQ ID NO: 585893
cuucuaguccacugggaga

SEQ ID NO: 675975 - RNA, 19 nt, Artificial Sequence
  Description of Artificial Sequence: Synthetic oligonucleotide
  Antisense strand to SEQ ID NO: 675974
ucucccaguggacuagaag

SEQ ID NO: 675976 - RNA, 19 nt, Artificial Sequence
  Description of Artificial Sequence: Synthetic oligonucleotide
  Sense strand starting at position 2099 of SEQ ID NO: 585893
aggugaaggcucugauuaa

SEQ ID NO: 675977 - RNA, 19 nt, Artificial Sequence
  Description of Artificial Sequence: Synthetic oligonucleotide
  Antisense strand to SEQ ID NO: 675976
uuaaucagagccuucaccu

SEQ ID NO: 675978 - RNA, 19 nt, Artificial Sequence
  Description of Artificial Sequence: Synthetic oligonucleotide
  Sense strand starting at position 2113 of SEQ ID NO: 585893
auuaaugucauagguggga

SEQ ID NO: 675979 - RNA, 19 nt, Artificial Sequence
  Description of Artificial Sequence: Synthetic oligonucleotide
  Antisense strand to SEQ ID NO: 675978
ucccaccuaugacauuaau

SEQ ID NO: 675980 - RNA, 19 nt, Artificial Sequence
  Description of Artificial Sequence: Synthetic oligonucleotide
  Sense strand starting at position 2139 of SEQ ID NO: 585893
acaagaaauuguguuauuc

SEQ ID NO: 675981 - RNA, 19 nt, Artificial Sequence
  Description of Artificial Sequence: Synthetic oligonucleotide
  Antisense strand to SEQ ID NO: 675980
gaauaacacaauuucuugu

SEQ ID NO: 675982 - RNA, 19 nt, Artificial Sequence
  Description of Artificial Sequence: Synthetic oligonucleotide
  Sense strand starting at position 2150 of SEQ ID NO: 585893
uguuauucugugcauaaac

SEQ ID NO: 675983 - RNA, 19 nt, Artificial Sequence
  Description of Artificial Sequence: Synthetic oligonucleotide
  Antisense strand to SEQ ID NO: 675982
guuuaugcacagaauaaca

SEQ ID NO: 675984 - RNA, 19 nt, Artificial Sequence
  Description of Artificial Sequence: Synthetic oligonucleotide
  Sense strand starting at position 2332 of SEQ ID NO: 585893
cagucccuuccuugaggaa

SEQ ID NO: 675985 - RNA, 19 nt, Artificial Sequence
  Description of Artificial Sequence: Synthetic oligonucleotide
  Antisense strand to SEQ ID NO: 675984
uuccucaaggaagggacug

SEQ ID NO: 675986 - RNA, 19 nt, Artificial Sequence
  Description of Artificial Sequence: Synthetic oligonucleotide
  Sense strand starting at position 2369 of SEQ ID NO: 585893
agguuaguuuccuuuggaa

SEQ ID NO: 675987 - RNA, 19 nt, Artificial Sequence
  Description of Artificial Sequence: Synthetic oligonucleotide
  Antisense strand to SEQ ID NO: 675986
uuccaaaggaaacuaaccu

SEQ ID NO: 675988 - RNA, 19 nt, Artificial Sequence
  Description of Artificial Sequence: Synthetic oligonucleotide
  Sense strand starting at position 2409 of SEQ ID NO: 585893
gucaguugucaauauagua

SEQ ID NO: 675989 - RNA, 19 nt, Artificial Sequence
  Description of Artificial Sequence: Synthetic oligonucleotide
  Antisense strand to SEQ ID NO: 675988
uacuauauugacaacugac

SEQ ID NO: 675990 - RNA, 19 nt, Artificial Sequence
  Description of Artificial Sequence: Synthetic oligonucleotide
  Sense strand starting at position 2442 of SEQ ID NO: 585893
ucuguaacuccuggucaaa

SEQ ID NO: 675991 - RNA, 19 nt, Artificial Sequence
  Description of Artificial Sequence: Synthetic oligonucleotide
  Antisense strand to SEQ ID NO: 675990
uuugaccaggaguuacaga

SEQ ID NO: 675992 - RNA, 19 nt, Artificial Sequence
  Description of Artificial Sequence: Synthetic oligonucleotide
  Sense strand starting at position 2487 of SEQ ID NO: 585893
agcagcugucguucugaca

SEQ ID NO: 675993 - RNA, 19 nt, Artificial Sequence
  Description of Artificial Sequence: Synthetic oligonucleotide
  Antisense strand to SEQ ID NO: 675992
ugucagaacgacagcugcu

SEQ ID NO: 675994 - RNA, 19 nt, Artificial Sequence
  Description of Artificial Sequence: Synthetic oligonucleotide
  Sense strand starting at position 2496 of SEQ ID NO: 585893
cguucugacacggaaggaa

SEQ ID NO: 675995 - RNA, 19 nt, Artificial Sequence
  Description of Artificial Sequence: Synthetic oligonucleotide
  Antisense strand to SEQ ID NO: 675994
uuccuuccgugucagaacg

SEQ ID NO: 675996 - RNA, 19 nt, Artificial Sequence
  Description of Artificial Sequence: Synthetic oligonucleotide
  Sense strand starting at position 2704 of SEQ ID NO: 585893
augaauguuguauagcacu

SEQ ID NO: 675997 - RNA, 19 nt, Artificial Sequence
  Description of Artificial Sequence: Synthetic oligonucleotide
  Antisense strand to SEQ ID NO: 675996
agugcuauacaacauucau

SEQ ID NO: 675998 - RNA, 19 nt, Artificial Sequence
  Description of Artificial Sequence: Synthetic oligonucleotide
  Sense strand starting at position 2749 of SEQ ID NO: 585893
caacaauaugguuggaucu

SEQ ID NO: 675999 - RNA, 19 nt, Artificial Sequence
  Description of Artificial Sequence: Synthetic oligonucleotide
  Antisense strand to SEQ ID NO: 675998
agauccaaccauauuguug

SEQ ID NO: 676000 - RNA, 19 nt, Artificial Sequence
  Description of Artificial Sequence: Synthetic oligonucleotide
  Sense strand starting at position 2769 of SEQ ID NO: 585893
auaauaugacgcugagcaa

SEQ ID NO: 676001 - RNA, 19 nt, Artificial Sequence
  Description of Artificial Sequence: Synthetic oligonucleotide
  Antisense strand to SEQ ID NO: 676000
uugcucagcgucauauuau

SEQ ID NO: 676002 - RNA, 19 nt, Artificial Sequence
  Description of Artificial Sequence: Synthetic oligonucleotide
  Sense strand starting at position 2770 of SEQ ID NO: 585893
uaauaugacgcugagcaaa

SEQ ID NO: 676003 - RNA, 19 nt, Artificial Sequence
  Description of Artificial Sequence: Synthetic oligonucleotide
  Antisense strand to SEQ ID NO: 676002
uuugcucagcgucauauua

SEQ ID NO: 676004 - RNA, 19 nt, Artificial Sequence
  Description of Artificial Sequence: Synthetic oligonucleotide
  Sense strand starting at position 2855 of SEQ ID NO: 585893
gucgucugugcuguuggaa

SEQ ID NO: 676005 - RNA, 19 nt, Artificial Sequence
  Description of Artificial Sequence: Synthetic oligonucleotide
  Antisense strand to SEQ ID NO: 676004
uuccaacagcacagacgac

SEQ ID NO: 676006 - RNA, 19 nt, Artificial Sequence
  Description of Artificial Sequence: Synthetic oligonucleotide
  Sense strand starting at position 2974 of SEQ ID NO: 585893
gugcacacuucccuauuua

SEQ ID NO: 676007 - RNA, 19 nt, Artificial Sequence
  Description of Artificial Sequence: Synthetic oligonucleotide
  Antisense strand to SEQ ID NO: 676006
uaaauagggaagugugcac

SEQ ID NO: 676008 - RNA, 19 nt, Artificial Sequence
  Description of Artificial Sequence: Synthetic oligonucleotide
  Sense strand starting at position 3145 of SEQ ID NO: 585893
ggucgaaauuugcucugua

SEQ ID NO: 676009 - RNA, 19 nt, Artificial Sequence
  Description of Artificial Sequence: Synthetic oligonucleotide
  Antisense strand to SEQ ID NO: 676008
uacagagcaaauuucgacc

SEQ ID NO: 676010 - RNA, 19 nt, Artificial Sequence
  Description of Artificial Sequence: Synthetic oligonucleotide
  Sense strand starting at position 3146 of SEQ ID NO: 585893
gucgaaauuugcucuguaa

SEQ ID NO: 676011 - RNA, 19 nt, Artificial Sequence
  Description of Artificial Sequence: Synthetic oligonucleotide
  Antisense strand to SEQ ID NO: 676010
uuacagagcaaauuucgac

SEQ ID NO: 676012 - RNA, 19 nt, Artificial Sequence
  Description of Artificial Sequence: Synthetic oligonucleotide
  Sense strand starting at position 3148 of SEQ ID NO: 585893
cgaaauuugcucuguaacu

SEQ ID NO: 676013 - RNA, 19 nt, Artificial Sequence
  Description of Artificial Sequence: Synthetic oligonucleotide
  Antisense strand to SEQ ID NO: 676012
aguuacagagcaaauuucg

SEQ ID NO: 676014 - RNA, 19 nt, Artificial Sequence
  Description of Artificial Sequence: Synthetic oligonucleotide
  Sense strand starting at position 3928 of SEQ ID NO: 585893
acaugaaugguuugaugac

SEQ ID NO: 676015 - RNA, 19 nt, Artificial Sequence
  Description of Artificial Sequence: Synthetic oligonucleotide
  Antisense strand to SEQ ID NO: 676014
gucaucaaaccauucaugu

SEQ ID NO: 676016 - RNA, 19 nt, Artificial Sequence
  Description of Artificial Sequence: Synthetic oligonucleotide
  Sense strand starting at position 19 of SEQ ID NO: 585894
gaaggaacaauguguguau

SEQ ID NO: 676017 - RNA, 19 nt, Artificial Sequence
  Description of Artificial Sequence: Synthetic oligonucleotide
  Antisense strand to SEQ ID NO: 676016
auacacacauuguuccuuc

SEQ ID NO: 676018 - RNA, 19 nt, Artificial Sequence
  Description of Artificial Sequence: Synthetic oligonucleotide
  Sense strand starting at position 76 of SEQ ID NO: 585894
aaagcagauguaugaggau

SEQ ID NO: 676019 - RNA, 19 nt, Artificial Sequence
  Description of Artificial Sequence: Synthetic oligonucleotide
  Antisense strand to SEQ ID NO: 676018
auccucauacaucugcuuu

SEQ ID NO: 676020 - RNA, 19 nt, Artificial Sequence
  Description of Artificial Sequence: Synthetic oligonucleotide
  Sense strand starting at position 102 of SEQ ID NO: 585894
guacauggcguauaaugaa

SEQ ID NO: 676021 - RNA, 19 nt, Artificial Sequence
  Description of Artificial Sequence: Synthetic oligonucleotide
  Antisense strand to SEQ ID NO: 676020
uucauuauacgccauguac

SEQ ID NO: 676022 - RNA, 19 nt, Artificial Sequence
  Description of Artificial Sequence: Synthetic oligonucleotide
  Sense strand starting at position 130 of SEQ ID NO: 585894
ggagaaaccugucugguuc

SEQ ID NO: 676023 - RNA, 19 nt, Artificial Sequence
  Description of Artificial Sequence: Synthetic oligonucleotide
  Antisense strand to SEQ ID NO: 676022
gaaccagacagguuucucc

SEQ ID NO: 676024 - RNA, 19 nt, Artificial Sequence
  Description of Artificial Sequence: Synthetic oligonucleotide
  Sense strand starting at position 131 of SEQ ID NO: 585894
gagaaaccugucugguucu

SEQ ID NO: 676025 - RNA, 19 nt, Artificial Sequence
  Description of Artificial Sequence: Synthetic oligonucleotide
  Antisense strand to SEQ ID NO: 676024
agaaccagacagguuucuc

SEQ ID NO: 676026 - RNA, 19 nt, Artificial Sequence
  Description of Artificial Sequence: Synthetic oligonucleotide
  Sense strand starting at position 299 of SEQ ID NO: 585894
ggguguguucagggaacag

SEQ ID NO: 676027 - RNA, 19 nt, Artificial Sequence
  Description of Artificial Sequence: Synthetic oligonucleotide
  Antisense strand to SEQ ID NO: 676026
cuguucccugaacacaccc

SEQ ID NO: 676028 - RNA, 19 nt, Artificial Sequence
  Description of Artificial Sequence: Synthetic oligonucleotide
  Sense strand starting at position 446 of SEQ ID NO: 585894
uaaguuucgagugaaggua

SEQ ID NO: 676029 - RNA, 19 nt, Artificial Sequence
  Description of Artificial Sequence: Synthetic oligonucleotide
  Antisense strand to SEQ ID NO: 676028
uaccuucacucgaaacuua

SEQ ID NO: 676030 - RNA, 19 nt, Artificial Sequence
  Description of Artificial Sequence: Synthetic oligonucleotide
  Sense strand starting at position 459 of SEQ ID NO: 585894
aagguaucggcugagccau

SEQ ID NO: 676031 - RNA, 19 nt, Artificial Sequence
  Description of Artificial Sequence: Synthetic oligonucleotide
  Antisense strand to SEQ ID NO: 676030
auggcucagccgauaccuu

SEQ ID NO: 676032 - RNA, 19 nt, Artificial Sequence
  Description of Artificial Sequence: Synthetic oligonucleotide
  Sense strand starting at position 481 of SEQ ID NO: 585894
guagaauccagucagugag

SEQ ID NO: 676033 - RNA, 19 nt, Artificial Sequence
  Description of Artificial Sequence: Synthetic oligonucleotide
  Antisense strand to SEQ ID NO: 676032
cucacugacuggauucuac

SEQ ID NO: 676034 - RNA, 19 nt, Artificial Sequence
  Description of Artificial Sequence: Synthetic oligonucleotide
  Sense strand starting at position 547 of SEQ ID NO: 585894
agaggucacgcacaaauau

SEQ ID NO: 676035 - RNA, 19 nt, Artificial Sequence
  Description of Artificial Sequence: Synthetic oligonucleotide
  Antisense strand to SEQ ID NO: 676034
auauuugugcgugaccucu

SEQ ID NO: 676036 - RNA, 19 nt, Artificial Sequence
  Description of Artificial Sequence: Synthetic oligonucleotide
  Sense strand starting at position 712 of SEQ ID NO: 585894
guugcucuaccagaacuuu

SEQ ID NO: 676037 - RNA, 19 nt, Artificial Sequence
  Description of Artificial Sequence: Synthetic oligonucleotide
  Antisense strand to SEQ ID NO: 676036
aaaguucugguagagcaac

SEQ ID NO: 676038 - RNA, 19 nt, Artificial Sequence
  Description of Artificial Sequence: Synthetic oligonucleotide
  Sense strand starting at position 775 of SEQ ID NO: 585894
uccuguuagagaugaggau

SEQ ID NO: 676039 - RNA, 19 nt, Artificial Sequence
  Description of Artificial Sequence: Synthetic oligonucleotide
  Antisense strand to SEQ ID NO: 676038
auccucaucucuaacagga

SEQ ID NO: 676040 - RNA, 19 nt, Artificial Sequence
  Description of Artificial Sequence: Synthetic oligonucleotide
  Sense strand starting at position 906 of SEQ ID NO: 585894
ccguuucuucuacaccgaa

SEQ ID NO: 676041 - RNA, 19 nt, Artificial Sequence
  Description of Artificial Sequence: Synthetic oligonucleotide
  Antisense strand to SEQ ID NO: 676040
uucgguguagaagaaacgg

SEQ ID NO: 676042 - RNA, 19 nt, Artificial Sequence
  Description of Artificial Sequence: Synthetic oligonucleotide
  Sense strand starting at position 1314 of SEQ ID NO: 585894
agaucagcucucggaacaa

SEQ ID NO: 676043 - RNA, 19 nt, Artificial Sequence
  Description of Artificial Sequence: Synthetic oligonucleotide
  Antisense strand to SEQ ID NO: 676042
uuguuccgagagcugaucu

SEQ ID NO: 676044 - RNA, 19 nt, Artificial Sequence
  Description of Artificial Sequence: Synthetic oligonucleotide
  Sense strand starting at position 1829 of SEQ ID NO: 585894
gcgagaagcucagccauuu

SEQ ID NO: 676045 - RNA, 19 nt, Artificial Sequence
  Description of Artificial Sequence: Synthetic oligonucleotide
  Antisense strand to SEQ ID NO: 676044
aaauggcugagcuucucgc

SEQ ID NO: 676046 - RNA, 19 nt, Artificial Sequence
  Description of Artificial Sequence: Synthetic oligonucleotide
  Sense strand starting at position 1872 of SEQ ID NO: 585894
ccgccugcucacuagauaa

SEQ ID NO: 676047 - RNA, 19 nt, Artificial Sequence
  Description of Artificial Sequence: Synthetic oligonucleotide
  Antisense strand to SEQ ID NO: 676046
uuaucuagugagcaggcgg

SEQ ID NO: 676048 - RNA, 19 nt, Artificial Sequence
  Description of Artificial Sequence: Synthetic oligonucleotide
  Sense strand starting at position 1928 of SEQ ID NO: 585894
guagcaagcguggaaauca

SEQ ID NO: 676049 - RNA, 19 nt, Artificial Sequence
  Description of Artificial Sequence: Synthetic oligonucleotide
  Antisense strand to SEQ ID NO: 676048
ugauuuccacgcuugcuac

SEQ ID NO: 676050 - RNA, 19 nt, Artificial Sequence
  Description of Artificial Sequence: Synthetic oligonucleotide
  Sense strand starting at position 2317 of SEQ ID NO: 585894
ggguaaugggucugggcuu

SEQ ID NO: 676051 - RNA, 19 nt, Artificial Sequence
  Description of Artificial Sequence: Synthetic oligonucleotide
  Antisense strand to SEQ ID NO: 676050
aagcccagacccauuaccc

SEQ ID NO: 676052 - RNA, 19 nt, Artificial Sequence
  Description of Artificial Sequence: Synthetic oligonucleotide
  Sense strand starting at position 2460 of SEQ ID NO: 585894
ccgcaaugagcauagagua

SEQ ID NO: 676053 - RNA, 19 nt, Artificial Sequence
  Description of Artificial Sequence: Synthetic oligonucleotide
  Antisense strand to SEQ ID NO: 676052
uacucuaugcucauugcgg

SEQ ID NO: 676054 - RNA, 19 nt, Artificial Sequence
  Description of Artificial Sequence: Synthetic oligonucleotide
  Sense strand starting at position 2502 of SEQ ID NO: 585894
uagaguguccgugaaggga

SEQ ID NO: 676055 - RNA, 19 nt, Artificial Sequence
  Description of Artificial Sequence: Synthetic oligonucleotide
  Antisense strand to SEQ ID NO: 676054
ucccuucacggacacucua

SEQ ID NO: 676056 - RNA, 19 nt, Artificial Sequence
  Description of Artificial Sequence: Synthetic oligonucleotide
  Sense strand starting at position 2554 of SEQ ID NO: 585894
cuuugacucuuagcuggaa

SEQ ID NO: 676057 - RNA, 19 nt, Artificial Sequence
  Description of Artificial Sequence: Synthetic oligonucleotide
  Antisense strand to SEQ ID NO: 676056
uuccagcuaagagucaaag

SEQ ID NO: 676058 - RNA, 19 nt, Artificial Sequence
  Description of Artificial Sequence: Synthetic oligonucleotide
  Sense strand starting at position 2579 of SEQ ID NO: 585894
acgggaagcuacucuaaag

SEQ ID NO: 676059 - RNA, 19 nt, Artificial Sequence
  Description of Artificial Sequence: Synthetic oligonucleotide
  Antisense strand to SEQ ID NO: 676058
cuuuagaguagcuucccgu

SEQ ID NO: 676060 - RNA, 19 nt, Artificial Sequence
  Description of Artificial Sequence: Synthetic oligonucleotide
  Sense strand starting at position 2819 of SEQ ID NO: 585894
uucuguguuaacuagugau

SEQ ID NO: 676061 - RNA, 19 nt, Artificial Sequence
  Description of Artificial Sequence: Synthetic oligonucleotide
  Antisense strand to SEQ ID NO: 676060
aucacuaguuaacacagaa

SEQ ID NO: 676062 - RNA, 19 nt, Artificial Sequence
  Description of Artificial Sequence: Synthetic oligonucleotide
  Sense strand starting at position 3038 of SEQ ID NO: 585894
ggcuuuguuagagaggaau

SEQ ID NO: 676063 - RNA, 19 nt, Artificial Sequence
  Description of Artificial Sequence: Synthetic oligonucleotide
  Antisense strand to SEQ ID NO: 676062
auuccucucuaacaaagcc

SEQ ID NO: 676064 - RNA, 19 nt, Artificial Sequence
  Description of Artificial Sequence: Synthetic oligonucleotide
  Sense strand starting at position 3057 of SEQ ID NO: 585894
agccucuaacuugaaguua

SEQ ID NO: 676065 - RNA, 19 nt, Artificial Sequence
  Description of Artificial Sequence: Synthetic oligonucleotide
  Antisense strand to SEQ ID NO: 676064
uaacuucaaguuagaggcu

SEQ ID NO: 676066 - RNA, 19 nt, Artificial Sequence
  Description of Artificial Sequence: Synthetic oligonucleotide
  Sense strand starting at position 3071 of SEQ ID NO: 585894
aguuaacccuguucuuuga

SEQ ID NO: 676067 - RNA, 19 nt, Artificial Sequence
  Description of Artificial Sequence: Synthetic oligonucleotide
  Antisense strand to SEQ ID NO: 676066
ucaaagaacaggguuaacu

SEQ ID NO: 676068 - RNA, 19 nt, Artificial Sequence
  Description of Artificial Sequence: Synthetic oligonucleotide
  Sense strand starting at position 3109 of SEQ ID NO: 585894
cgguccgucggaaagcaua

SEQ ID NO: 676069 - RNA, 19 nt, Artificial Sequence
  Description of Artificial Sequence: Synthetic oligonucleotide
  Antisense strand to SEQ ID NO: 676068
uaugcuuuccgacggaccg

SEQ ID NO: 676070 - RNA, 19 nt, Artificial Sequence
  Description of Artificial Sequence: Synthetic oligonucleotide
  Sense strand starting at position 3157 of SEQ ID NO: 585894
aacuuacggccugguaaga

SEQ ID NO: 676071 - RNA, 19 nt, Artificial Sequence
  Description of Artificial Sequence: Synthetic oligonucleotide
  Antisense strand to SEQ ID NO: 676070
ucuuaccaggccguaaguu

SEQ ID NO: 676072 - RNA, 19 nt, Artificial Sequence
  Description of Artificial Sequence: Synthetic oligonucleotide
  Sense strand starting at position 3192 of SEQ ID NO: 585894
acuuauaauuugggaaauc

SEQ ID NO: 676073 - RNA, 19 nt, Artificial Sequence
  Description of Artificial Sequence: Synthetic oligonucleotide
  Antisense strand to SEQ ID NO: 676072
gauuucccaaauuauaagu

SEQ ID NO: 676074 - RNA, 19 nt, Artificial Sequence
  Description of Artificial Sequence: Synthetic oligonucleotide
  Sense strand starting at position 3300 of SEQ ID NO: 585894
acuauuaacucugugugac

SEQ ID NO: 676075 - RNA, 19 nt, Artificial Sequence
  Description of Artificial Sequence: Synthetic oligonucleotide
  Antisense strand to SEQ ID NO: 676074
gucacacagaguuaauagu

SEQ ID NO: 676076 - RNA, 19 nt, Artificial Sequence
  Description of Artificial Sequence: Synthetic oligonucleotide
  Sense strand starting at position 3301 of SEQ ID NO: 585894
cuauuaacucugugugacu

SEQ ID NO: 676077 - RNA, 19 nt, Artificial Sequence
  Description of Artificial Sequence: Synthetic oligonucleotide
  Antisense strand to SEQ ID NO: 676076
agucacacagaguuaauag

SEQ ID NO: 676078 - RNA, 19 nt, Artificial Sequence
  Description of Artificial Sequence: Synthetic oligonucleotide
  Sense strand starting at position 3321 of SEQ ID NO: 585894
ugcauaagucguuugcauu

SEQ ID NO: 676079 - RNA, 19 nt, Artificial Sequence
  Description of Artificial Sequence: Synthetic oligonucleotide
  Antisense strand to SEQ ID NO: 676078
aaugcaaacgacuuaugca

SEQ ID NO: 676080 - RNA, 19 nt, Artificial Sequence
  Description of Artificial Sequence: Synthetic oligonucleotide
  Sense strand starting at position 3322 of SEQ ID NO: 585894
gcauaagucguuugcauuu

SEQ ID NO: 676081 - RNA, 19 nt, Artificial Sequence
  Description of Artificial Sequence: Synthetic oligonucleotide
  Antisense strand to SEQ ID NO: 676080
aaaugcaaacgacuuaugc

SEQ ID NO: 676082 - RNA, 19 nt, Artificial Sequence
  Description of Artificial Sequence: Synthetic oligonucleotide
  Sense strand starting at position 3480 of SEQ ID NO: 585894
gucaaauuaucucuuggua

SEQ ID NO: 676083 - RNA, 19 nt, Artificial Sequence
  Description of Artificial Sequence: Synthetic oligonucleotide
  Antisense strand to SEQ ID NO: 676082
uaccaagagauaauuugac

SEQ ID NO: 676084 - RNA, 19 nt, Artificial Sequence
  Description of Artificial Sequence: Synthetic oligonucleotide
  Sense strand starting at position 3515 of SEQ ID NO: 585894
gcugcugagauauguauuu

SEQ ID NO: 676085 - RNA, 19 nt, Artificial Sequence
  Description of Artificial Sequence: Synthetic oligonucleotide
  Antisense strand to SEQ ID NO: 676084
aaauacauaucucagcagc

SEQ ID NO: 676086 - RNA, 19 nt, Artificial Sequence
  Description of Artificial Sequence: Synthetic oligonucleotide
  Sense strand starting at position 3531 of SEQ ID NO: 585894
uuuaccucuugaucggaaa

SEQ ID NO: 676087 - RNA, 19 nt, Artificial Sequence
  Description of Artificial Sequence: Synthetic oligonucleotide
  Antisense strand to SEQ ID NO: 676086
uuuccgaucaagagguaaa

SEQ ID NO: 676088 - RNA, 19 nt, Artificial Sequence
  Description of Artificial Sequence: Synthetic oligonucleotide
  Sense strand starting at position 3532 of SEQ ID NO: 585894
uuaccucuugaucggaaau

SEQ ID NO: 676089 - RNA, 19 nt, Artificial Sequence
  Description of Artificial Sequence: Synthetic oligonucleotide
  Antisense strand to SEQ ID NO: 676088
auuuccgaucaagagguaa

SEQ ID NO: 676090 - RNA, 19 nt, Artificial Sequence
  Description of Artificial Sequence: Synthetic oligonucleotide
  Sense strand starting at position 3741 of SEQ ID NO: 585894
ugaccuuguuucccaagau

SEQ ID NO: 676091 - RNA, 19 nt, Artificial Sequence
  Description of Artificial Sequence: Synthetic oligonucleotide
  Antisense strand to SEQ ID NO: 676090
aucuugggaaacaagguca

SEQ ID NO: 676092 - RNA, 19 nt, Artificial Sequence
  Description of Artificial Sequence: Synthetic oligonucleotide
  Sense strand starting at position 3813 of SEQ ID NO: 585894
ccuuccguuggagauaauu

SEQ ID NO: 676093 - RNA, 19 nt, Artificial Sequence
  Description of Artificial Sequence: Synthetic oligonucleotide
  Antisense strand to SEQ ID NO: 676092
aauuaucuccaacggaagg

SEQ ID NO: 676094 - RNA, 19 nt, Artificial Sequence
  Description of Artificial Sequence: Synthetic oligonucleotide
  Sense strand starting at position 3932 of SEQ ID NO: 585894
guucuuucuguguuguauc

SEQ ID NO: 676095 - RNA, 19 nt, Artificial Sequence
  Description of Artificial Sequence: Synthetic oligonucleotide
  Antisense strand to SEQ ID NO: 676094
gauacaacacagaaagaac

SEQ ID NO: 676096 - RNA, 19 nt, Artificial Sequence
  Description of Artificial Sequence: Synthetic oligonucleotide
  Sense strand starting at position 23 of SEQ ID NO: 585895
caggguguuccaugaagau

SEQ ID NO: 676097 - RNA, 19 nt, Artificial Sequence
  Description of Artificial Sequence: Synthetic oligonucleotide
  Antisense strand to SEQ ID NO: 676096
aucuucauggaacacccug

SEQ ID NO: 676098 - RNA, 19 nt, Artificial Sequence
  Description of Artificial Sequence: Synthetic oligonucleotide
  Sense strand starting at position 72 of SEQ ID NO: 585895
gacugaaagcaaugugaga

SEQ ID NO: 676099 - RNA, 19 nt, Artificial Sequence
  Description of Artificial Sequence: Synthetic oligonucleotide
  Antisense strand to SEQ ID NO: 676098
ucucacauugcuuucaguc

SEQ ID NO: 676100 - RNA, 19 nt, Artificial Sequence
  Description of Artificial Sequence: Synthetic oligonucleotide
  Sense strand starting at position 115 of SEQ ID NO: 585895
agaugagggucuguguaga

SEQ ID NO: 676101 - RNA, 19 nt, Artificial Sequence
  Description of Artificial Sequence: Synthetic oligonucleotide
  Antisense strand to SEQ ID NO: 676100
ucuacacagacccucaucu

SEQ ID NO: 676102 - RNA, 19 nt, Artificial Sequence
  Description of Artificial Sequence: Synthetic oligonucleotide
  Sense strand starting at position 136 of SEQ ID NO: 585895
gggccaacuccaugaacau

SEQ ID NO: 676103 - RNA, 19 nt, Artificial Sequence
  Description of Artificial Sequence: Synthetic oligonucleotide
  Antisense strand to SEQ ID NO: 676102
auguucauggaguuggccc

SEQ ID NO: 676104 - RNA, 19 nt, Artificial Sequence
  Description of Artificial Sequence: Synthetic oligonucleotide
  Sense strand starting at position 204 of SEQ ID NO: 585895
gggugaucagggugaccau

SEQ ID NO: 676105 - RNA, 19 nt, Artificial Sequence
  Description of Artificial Sequence: Synthetic oligonucleotide
  Antisense strand to SEQ ID NO: 676104
auggucacccugaucaccc

SEQ ID NO: 676106 - RNA, 19 nt, Artificial Sequence
  Description of Artificial Sequence: Synthetic oligonucleotide
  Sense strand starting at position 296 of SEQ ID NO: 585895
cucagauucucacucagag

SEQ ID NO: 676107 - RNA, 19 nt, Artificial Sequence
  Description of Artificial Sequence: Synthetic oligonucleotide
  Antisense strand to SEQ ID NO: 676106
cucugagugagaaucugag

SEQ ID NO: 676108 - RNA, 19 nt, Artificial Sequence
  Description of Artificial Sequence: Synthetic oligonucleotide
  Sense strand starting at position 338 of SEQ ID NO: 585895
ucuguuacccgagacauga

SEQ ID NO: 676109 - RNA, 19 nt, Artificial Sequence
  Description of Artificial Sequence: Synthetic oligonucleotide
  Antisense strand to SEQ ID NO: 676108
ucaugucucggguaacaga

SEQ ID NO: 676110 - RNA, 19 nt, Artificial Sequence
  Description of Artificial Sequence: Synthetic oligonucleotide
  Sense strand starting at position 390 of SEQ ID NO: 585895
gugaaucagacagguucca

SEQ ID NO: 676111 - RNA, 19 nt, Artificial Sequence
  Description of Artificial Sequence: Synthetic oligonucleotide
  Antisense strand to SEQ ID NO: 676110
uggaaccugucugauucac

SEQ ID NO: 676112 - RNA, 19 nt, Artificial Sequence
  Description of Artificial Sequence: Synthetic oligonucleotide
  Sense strand starting at position 399 of SEQ ID NO: 585895
acagguuccaagugaugag

SEQ ID NO: 676113 - RNA, 19 nt, Artificial Sequence
  Description of Artificial Sequence: Synthetic oligonucleotide
  Antisense strand to SEQ ID NO: 676112
cucaucacuuggaaccugu

SEQ ID NO: 676114 - RNA, 19 nt, Artificial Sequence
  Description of Artificial Sequence: Synthetic oligonucleotide
  Sense strand starting at position 495 of SEQ ID NO: 585895
uaggguucuccagaggucu

SEQ ID NO: 676115 - RNA, 19 nt, Artificial Sequence
  Description of Artificial Sequence: Synthetic oligonucleotide
  Antisense strand to SEQ ID NO: 676114
agaccucuggagaacccua

SEQ ID NO: 676116 - RNA, 19 nt, Artificial Sequence
  Description of Artificial Sequence: Synthetic oligonucleotide
  Sense strand starting at position 503 of SEQ ID NO: 585895
uccagaggucugcaaaucu

SEQ ID NO: 676117 - RNA, 19 nt, Artificial Sequence
  Description of Artificial Sequence: Synthetic oligonucleotide
  Antisense strand to SEQ ID NO: 676116
agauuugcagaccucugga

SEQ ID NO: 676118 - RNA, 19 nt, Artificial Sequence
  Description of Artificial Sequence: Synthetic oligonucleotide
  Sense strand starting at position 546 of SEQ ID NO: 585895
agaggaaaggccugaccuu

SEQ ID NO: 676119 - RNA, 19 nt, Artificial Sequence
  Description of Artificial Sequence: Synthetic oligonucleotide
  Antisense strand to SEQ ID NO: 676118
aaggucaggccuuuccucu

SEQ ID NO: 676120 - RNA, 19 nt, Artificial Sequence
  Description of Artificial Sequence: Synthetic oligonucleotide
  Sense strand starting at position 580 of SEQ ID NO: 585895
gucauuaaugcacauguga

SEQ ID NO: 676121 - RNA, 19 nt, Artificial Sequence
  Description of Artificial Sequence: Synthetic oligonucleotide
  Antisense strand to SEQ ID NO: 676120
ucacaugugcauuaaugac

SEQ ID NO: 676122 - RNA, 19 nt, Artificial Sequence
  Description of Artificial Sequence: Synthetic oligonucleotide
  Sense strand starting at position 618 of SEQ ID NO: 585895
cuuucuguucccuagagaa

SEQ ID NO: 676123 - RNA, 19 nt, Artificial Sequence
  Description of Artificial Sequence: Synthetic oligonucleotide
  Antisense strand to SEQ ID NO: 676122
uucucuagggaacagaaag

SEQ ID NO: 676124 - RNA, 19 nt, Artificial Sequence
  Description of Artificial Sequence: Synthetic oligonucleotide
  Sense strand starting at position 672 of SEQ ID NO: 585895
agcuuaaacuggucacaua

SEQ ID NO: 676125 - RNA, 19 nt, Artificial Sequence
  Description of Artificial Sequence: Synthetic oligonucleotide
  Antisense strand to SEQ ID NO: 676124
uaugugaccaguuuaagcu

SEQ ID NO: 676126 - RNA, 19 nt, Artificial Sequence
  Description of Artificial Sequence: Synthetic oligonucleotide
  Sense strand starting at position 673 of SEQ ID NO: 585895
gcuuaaacuggucacauaa

SEQ ID NO: 676127 - RNA, 19 nt, Artificial Sequence
  Description of Artificial Sequence: Synthetic oligonucleotide
  Antisense strand to SEQ ID NO: 676126
uuaugugaccaguuuaagc

SEQ ID NO: 676128 - RNA, 19 nt, Artificial Sequence
  Description of Artificial Sequence: Synthetic oligonucleotide
  Sense strand starting at position 739 of SEQ ID NO: 585895
ggagcacucacugggacua

SEQ ID NO: 676129 - RNA, 19 nt, Artificial Sequence
  Description of Artificial Sequence: Synthetic oligonucleotide
  Antisense strand to SEQ ID NO: 676128
uagucccagugagugcucc

SEQ ID NO: 676130 - RNA, 19 nt, Artificial Sequence
  Description of Artificial Sequence: Synthetic oligonucleotide
  Sense strand starting at position 845 of SEQ ID NO: 585895
ucaagagaccaggguucua

SEQ ID NO: 676131 - RNA, 19 nt, Artificial Sequence
  Description of Artificial Sequence: Synthetic oligonucleotide
  Antisense strand to SEQ ID NO: 676130
uagaacccuggucucuuga

SEQ ID NO: 676132 - RNA, 19 nt, Artificial Sequence
  Description of Artificial Sequence: Synthetic oligonucleotide
  Sense strand starting at position 954 of SEQ ID NO: 585895
uggucucuaugagcucaaa

SEQ ID NO: 676133 - RNA, 19 nt, Artificial Sequence
  Description of Artificial Sequence: Synthetic oligonucleotide
  Antisense strand to SEQ ID NO: 676132
uuugagcucauagagacca

SEQ ID NO: 676134 - RNA, 19 nt, Artificial Sequence
  Description of Artificial Sequence: Synthetic oligonucleotide
  Sense strand starting at position 988 of SEQ ID NO: 585895
auucuaugguuucuaucua

SEQ ID NO: 676135 - RNA, 19 nt, Artificial Sequence
  Description of Artificial Sequence: Synthetic oligonucleotide
  Antisense strand to SEQ ID NO: 676134
uagauagaaaccauagaau

SEQ ID NO: 676136 - RNA, 19 nt, Artificial Sequence
  Description of Artificial Sequence: Synthetic oligonucleotide
  Sense strand starting at position 992 of SEQ ID NO: 585895
uaugguuucuaucuaagga

SEQ ID NO: 676137 - RNA, 19 nt, Artificial Sequence
  Description of Artificial Sequence: Synthetic oligonucleotide
  Antisense strand to SEQ ID NO: 676136
uccuuagauagaaaccaua

SEQ ID NO: 676138 - RNA, 19 nt, Artificial Sequence
  Description of Artificial Sequence: Synthetic oligonucleotide
  Sense strand starting at position 1006 of SEQ ID NO: 585895
aaggauacauaggaauaga

SEQ ID NO: 676139 - RNA, 19 nt, Artificial Sequence
  Description of Artificial Sequence: Synthetic oligonucleotide
  Antisense strand to SEQ ID NO: 676138
ucuauuccuauguauccuu

SEQ ID NO: 676140 - RNA, 19 nt, Artificial Sequence
  Description of Artificial Sequence: Synthetic oligonucleotide
  Sense strand starting at position 1087 of SEQ ID NO: 585895
gcuccugagguauaucaag

SEQ ID NO: 676141 - RNA, 19 nt, Artificial Sequence
  Description of Artificial Sequence: Synthetic oligonucleotide
  Antisense strand to SEQ ID NO: 676140
cuugauauaccucaggagc

SEQ ID NO: 676142 - RNA, 19 nt, Artificial Sequence
  Description of Artificial Sequence: Synthetic oligonucleotide
  Sense strand starting at position 1203 of SEQ ID NO: 585895
gaaggaacaauguguguau

SEQ ID NO: 676143 - RNA, 19 nt, Artificial Sequence
  Description of Artificial Sequence: Synthetic oligonucleotide
  Antisense strand to SEQ ID NO: 676142
auacacacauuguuccuuc

SEQ ID NO: 676144 - RNA, 19 nt, Artificial Sequence
  Description of Artificial Sequence: Synthetic oligonucleotide
  Sense strand starting at position 1260 of SEQ ID NO: 585895
aaagcagauguaugaggau

SEQ ID NO: 676145 - RNA, 19 nt, Artificial Sequence
  Description of Artificial Sequence: Synthetic oligonucleotide
  Antisense strand to SEQ ID NO: 676144
auccucauacaucugcuuu

SEQ ID NO: 676146 - RNA, 19 nt, Artificial Sequence
  Description of Artificial Sequence: Synthetic oligonucleotide
  Sense strand starting at position 1286 of SEQ ID NO: 585895
guacauggcguauaaugaa

SEQ ID NO: 676147 - RNA, 19 nt, Artificial Sequence
  Description of Artificial Sequence: Synthetic oligonucleotide
  Antisense strand to SEQ ID NO: 676146
uucauuauacgccauguac

SEQ ID NO: 676148 - RNA, 19 nt, Artificial Sequence
  Description of Artificial Sequence: Synthetic oligonucleotide
  Sense strand starting at position 1314 of SEQ ID NO: 585895
ggagaaaccugucugguuc

SEQ ID NO: 676149 - RNA, 19 nt, Artificial Sequence
  Description of Artificial Sequence: Synthetic oligonucleotide
  Antisense strand to SEQ ID NO: 676148
gaaccagacagguuucucc

SEQ ID NO: 676150 - RNA, 19 nt, Artificial Sequence
  Description of Artificial Sequence: Synthetic oligonucleotide
  Sense strand starting at position 1315 of SEQ ID NO: 585895
gagaaaccugucugguucu

SEQ ID NO: 676151 - RNA, 19 nt, Artificial Sequence
  Description of Artificial Sequence: Synthetic oligonucleotide
  Antisense strand to SEQ ID NO: 676150
agaaccagacagguuucuc

SEQ ID NO: 676152 - RNA, 19 nt, Artificial Sequence
  Description of Artificial Sequence: Synthetic oligonucleotide
  Sense strand starting at position 1483 of SEQ ID NO: 585895
ggguguguucagggaacag

SEQ ID NO: 676153 - RNA, 19 nt, Artificial Sequence
  Description of Artificial Sequence: Synthetic oligonucleotide
  Antisense strand to SEQ ID NO: 676152
cuguucccugaacacaccc

SEQ ID NO: 676154 - RNA, 19 nt, Artificial Sequence
  Description of Artificial Sequence: Synthetic oligonucleotide
  Sense strand starting at position 1630 of SEQ ID NO: 585895
uaaguuucgagugaaggua

SEQ ID NO: 676155 - RNA, 19 nt, Artificial Sequence
  Description of Artificial Sequence: Synthetic oligonucleotide
  Antisense strand to SEQ ID NO: 676154
uaccuucacucgaaacuua

SEQ ID NO: 676156 - RNA, 19 nt, Artificial Sequence
  Description of Artificial Sequence: Synthetic oligonucleotide
  Sense strand starting at position 1665 of SEQ ID NO: 585895
guagaauccagucagugag

SEQ ID NO: 676157 - RNA, 19 nt, Artificial Sequence
  Description of Artificial Sequence: Synthetic oligonucleotide
  Antisense strand to SEQ ID NO: 676156
cucacugacuggauucuac

SEQ ID NO: 676158 - RNA, 19 nt, Artificial Sequence
  Description of Artificial Sequence: Synthetic oligonucleotide
  Sense strand starting at position 1731 of SEQ ID NO: 585895
agaggucacgcacaaauau

SEQ ID NO: 676159 - RNA, 19 nt, Artificial Sequence
  Description of Artificial Sequence: Synthetic oligonucleotide
  Antisense strand to SEQ ID NO: 676158
auauuugugcgugaccucu

SEQ ID NO: 676160 - RNA, 19 nt, Artificial Sequence
  Description of Artificial Sequence: Synthetic oligonucleotide
  Sense strand starting at position 1896 of SEQ ID NO: 585895
guugcucuaccagaacuuu

SEQ ID NO: 676161 - RNA, 19 nt, Artificial Sequence
  Description of Artificial Sequence: Synthetic oligonucleotide
  Antisense strand to SEQ ID NO: 676160
aaaguucugguagagcaac

SEQ ID NO: 676162 - RNA, 19 nt, Artificial Sequence
  Description of Artificial Sequence: Synthetic oligonucleotide
  Sense strand starting at position 1959 of SEQ ID NO: 585895
uccuguuagagaugaggau

SEQ ID NO: 676163 - RNA, 19 nt, Artificial Sequence
  Description of Artificial Sequence: Synthetic oligonucleotide
  Antisense strand to SEQ ID NO: 676162
auccucaucucuaacagga

SEQ ID NO: 676164 - RNA, 19 nt, Artificial Sequence
  Description of Artificial Sequence: Synthetic oligonucleotide
  Sense strand starting at position 2498 of SEQ ID NO: 585895
agaucagcucucggaacaa

SEQ ID NO: 676165 - RNA, 19 nt, Artificial Sequence
  Description of Artificial Sequence: Synthetic oligonucleotide
  Antisense strand to SEQ ID NO: 676164
uuguuccgagagcugaucu

SEQ ID NO: 676166 - RNA, 19 nt, Artificial Sequence
  Description of Artificial Sequence: Synthetic oligonucleotide
  Sense strand starting at position 3013 of SEQ ID NO: 585895
gcgagaagcucagccauuu

SEQ ID NO: 676167 - RNA, 19 nt, Artificial Sequence
  Description of Artificial Sequence: Synthetic oligonucleotide
  Antisense strand to SEQ ID NO: 676166
aaauggcugagcuucucgc

SEQ ID NO: 676168 - RNA, 19 nt, Artificial Sequence
  Description of Artificial Sequence: Synthetic oligonucleotide
  Sense strand starting at position 3644 of SEQ ID NO: 585895
ccgcaaugagcauagagua

SEQ ID NO: 676169 - RNA, 19 nt, Artificial Sequence
  Description of Artificial Sequence: Synthetic oligonucleotide
  Antisense strand to SEQ ID NO: 676168
uacucuaugcucauugcgg

SEQ ID NO: 676170 - RNA, 19 nt, Artificial Sequence
  Description of Artificial Sequence: Synthetic oligonucleotide
  Sense strand starting at position 3686 of SEQ ID NO: 585895
uagaguguccgugaaggga

SEQ ID NO: 676171 - RNA, 19 nt, Artificial Sequence
  Description of Artificial Sequence: Synthetic oligonucleotide
  Antisense strand to SEQ ID NO: 676170
ucccuucacggacacucua

SEQ ID NO: 676172 - RNA, 19 nt, Artificial Sequence
  Description of Artificial Sequence: Synthetic oligonucleotide
  Sense strand starting at position 3738 of SEQ ID NO: 585895
cuuugacucuuagcuggaa

SEQ ID NO: 676173 - RNA, 19 nt, Artificial Sequence
  Description of Artificial Sequence: Synthetic oligonucleotide
  Antisense strand to SEQ ID NO: 676172
uuccagcuaagagucaaag

SEQ ID NO: 676174 - RNA, 19 nt, Artificial Sequence
  Description of Artificial Sequence: Synthetic oligonucleotide
  Sense strand starting at position 3763 of SEQ ID NO: 585895
acgggaagcuacucuaaag

SEQ ID NO: 676175 - RNA, 19 nt, Artificial Sequence
  Description of Artificial Sequence: Synthetic oligonucleotide
  Antisense strand to SEQ ID NO: 676174
cuuuagaguagcuucccgu

SEQ ID NO: 676176 - RNA, 19 nt, Artificial Sequence
  Description of Artificial Sequence: Synthetic oligonucleotide
  Sense strand starting at position 78 of SEQ ID NO: 585896
uuucgaggguacucuaaau

SEQ ID NO: 676177 - RNA, 19 nt, Artificial Sequence
  Description of Artificial Sequence: Synthetic oligonucleotide
  Antisense strand to SEQ ID NO: 676176
auuuagaguacccucgaaa

SEQ ID NO: 676178 - RNA, 19 nt, Artificial Sequence
  Description of Artificial Sequence: Synthetic oligonucleotide
  Sense strand starting at position 232 of SEQ ID NO: 585896
guuugaguaugucuagaaa

SEQ ID NO: 676179 - RNA, 19 nt, Artificial Sequence
  Description of Artificial Sequence: Synthetic oligonucleotide
  Antisense strand to SEQ ID NO: 676178
uuucuagacauacucaaac

SEQ ID NO: 676180 - RNA, 19 nt, Artificial Sequence
  Description of Artificial Sequence: Synthetic oligonucleotide
  Sense strand starting at position 300 of SEQ ID NO: 585896
ggugauaagccucagagua

SEQ ID NO: 676181 - RNA, 19 nt, Artificial Sequence
  Description of Artificial Sequence: Synthetic oligonucleotide
  Antisense strand to SEQ ID NO: 676180
uacucugaggcuuaucacc

SEQ ID NO: 676182 - RNA, 19 nt, Artificial Sequence
  Description of Artificial Sequence: Synthetic oligonucleotide
  Sense strand starting at position 685 of SEQ ID NO: 585896
gggccuagaaauggaguua

SEQ ID NO: 676183 - RNA, 19 nt, Artificial Sequence
  Description of Artificial Sequence: Synthetic oligonucleotide
  Antisense strand to SEQ ID NO: 676182
uaacuccauuucuaggccc

SEQ ID NO: 676184 - RNA, 19 nt, Artificial Sequence
  Description of Artificial Sequence: Synthetic oligonucleotide
  Sense strand starting at position 792 of SEQ ID NO: 585896
agaagauggcacuggcaaa

SEQ ID NO: 676185 - RNA, 19 nt, Artificial Sequence
  Description of Artificial Sequence: Synthetic oligonucleotide
  Antisense strand to SEQ ID NO: 676184
uuugccagugccaucuucu

SEQ ID NO: 676186 - RNA, 19 nt, Artificial Sequence
  Description of Artificial Sequence: Synthetic oligonucleotide
  Sense strand starting at position 1049 of SEQ ID NO: 585896
acaucaagacuuuguuguu

SEQ ID NO: 676187 - RNA, 19 nt, Artificial Sequence
  Description of Artificial Sequence: Synthetic oligonucleotide
  Antisense strand to SEQ ID NO: 676186
aacaacaaagucuugaugu

SEQ ID NO: 676188 - RNA, 19 nt, Artificial Sequence
  Description of Artificial Sequence: Synthetic oligonucleotide
  Sense strand starting at position 1554 of SEQ ID NO: 585896
cguccaucggcuucucauu

SEQ ID NO: 676189 - RNA, 19 nt, Artificial Sequence
  Description of Artificial Sequence: Synthetic oligonucleotide
  Antisense strand to SEQ ID NO: 676188
aaugagaagccgauggacg

SEQ ID NO: 676190 - RNA, 19 nt, Artificial Sequence
  Description of Artificial Sequence: Synthetic oligonucleotide
  Sense strand starting at position 1590 of SEQ ID NO: 585896
gagagcucuccugaguaac

SEQ ID NO: 676191 - RNA, 19 nt, Artificial Sequence
  Description of Artificial Sequence: Synthetic oligonucleotide
  Antisense strand to SEQ ID NO: 676190
guuacucaggagagcucuc

SEQ ID NO: 676192 - RNA, 19 nt, Artificial Sequence
  Description of Artificial Sequence: Synthetic oligonucleotide
  Sense strand starting at position 2245 of SEQ ID NO: 585896
guuguccuugcuuuguaau

SEQ ID NO: 676193 - RNA, 19 nt, Artificial Sequence
  Description of Artificial Sequence: Synthetic oligonucleotide
  Antisense strand to SEQ ID NO: 676192
auuacaaagcaaggacaac

SEQ ID NO: 676194 - RNA, 19 nt, Artificial Sequence
  Description of Artificial Sequence: Synthetic oligonucleotide
  Sense strand starting at position 2251 of SEQ ID NO: 585896
cuugcuuuguaauuggaga

SEQ ID NO: 676195 - RNA, 19 nt, Artificial Sequence
  Description of Artificial Sequence: Synthetic oligonucleotide
  Antisense strand to SEQ ID NO: 676194
ucuccaauuacaaagcaag

SEQ ID NO: 676196 - RNA, 19 nt, Artificial Sequence
  Description of Artificial Sequence: Synthetic oligonucleotide
  Sense strand starting at position 2252 of SEQ ID NO: 585896
uugcuuuguaauuggagaa

SEQ ID NO: 676197 - RNA, 19 nt, Artificial Sequence
  Description of Artificial Sequence: Synthetic oligonucleotide
  Antisense strand to SEQ ID NO: 676196
uucuccaauuacaaagcaa

SEQ ID NO: 676198 - RNA, 19 nt, Artificial Sequence
  Description of Artificial Sequence: Synthetic oligonucleotide
  Sense strand starting at position 2253 of SEQ ID NO: 585896
ugcuuuguaauuggagaau

SEQ ID NO: 676199 - RNA, 19 nt, Artificial Sequence
  Description of Artificial Sequence: Synthetic oligonucleotide
  Antisense strand to SEQ ID NO: 676198
auucuccaauuacaaagca

SEQ ID NO: 676200 - RNA, 19 nt, Artificial Sequence
  Description of Artificial Sequence: Synthetic oligonucleotide
  Sense strand starting at position 2256 of SEQ ID NO: 585896
uuuguaauuggagaaugcu

SEQ ID NO: 676201 - RNA, 19 nt, Artificial Sequence
  Description of Artificial Sequence: Synthetic oligonucleotide
  Antisense strand to SEQ ID NO: 676200
agcauucuccaauuacaaa

SEQ ID NO: 676202 - RNA, 19 nt, Artificial Sequence
  Description of Artificial Sequence: Synthetic oligonucleotide
  Sense strand starting at position 2264 of SEQ ID NO: 585896
uggagaaugcuuuguaauu

SEQ ID NO: 676203 - RNA, 19 nt, Artificial Sequence
  Description of Artificial Sequence: Synthetic oligonucleotide
  Antisense strand to SEQ ID NO: 676202
aauuacaaagcauucucca

SEQ ID NO: 676204 - RNA, 19 nt, Artificial Sequence
  Description of Artificial Sequence: Synthetic oligonucleotide
  Sense strand starting at position 2265 of SEQ ID NO: 585896
ggagaaugcuuuguaauug

SEQ ID NO: 676205 - RNA, 19 nt, Artificial Sequence
  Description of Artificial Sequence: Synthetic oligonucleotide
  Antisense strand to SEQ ID NO: 676204
caauuacaaagcauucucc

SEQ ID NO: 676206 - RNA, 19 nt, Artificial Sequence
  Description of Artificial Sequence: Synthetic oligonucleotide
  Sense strand starting at position 2269 of SEQ ID NO: 585896
aaugcuuuguaauuggaga

SEQ ID NO: 676207 - RNA, 19 nt, Artificial Sequence
  Description of Artificial Sequence: Synthetic oligonucleotide
  Antisense strand to SEQ ID NO: 676206
ucuccaauuacaaagcauu

SEQ ID NO: 676208 - RNA, 19 nt, Artificial Sequence
  Description of Artificial Sequence: Synthetic oligonucleotide
  Sense strand starting at position 2270 of SEQ ID NO: 585896
augcuuuguaauuggagaa

SEQ ID NO: 676209 - RNA, 19 nt, Artificial Sequence
  Description of Artificial Sequence: Synthetic oligonucleotide
  Antisense strand to SEQ ID NO: 676208
uucuccaauuacaaagcau

SEQ ID NO: 676210 - RNA, 19 nt, Artificial Sequence
  Description of Artificial Sequence: Synthetic oligonucleotide
  Sense strand starting at position 2749 of SEQ ID NO: 585896
cguacagacuuugaauuua

SEQ ID NO: 676211 - RNA, 19 nt, Artificial Sequence
  Description of Artificial Sequence: Synthetic oligonucleotide
  Antisense strand to SEQ ID NO: 676210
uaaauucaaagucuguacg

SEQ ID NO: 676212 - RNA, 19 nt, Artificial Sequence
  Description of Artificial Sequence: Synthetic oligonucleotide
  Sense strand starting at position 2771 of SEQ ID NO: 585896
ggcccugagcguucaucuu

SEQ ID NO: 676213 - RNA, 19 nt, Artificial Sequence
  Description of Artificial Sequence: Synthetic oligonucleotide
  Antisense strand to SEQ ID NO: 676212
aagaugaacgcucagggcc

SEQ ID NO: 676214 - RNA, 19 nt, Artificial Sequence
  Description of Artificial Sequence: Synthetic oligonucleotide
  Sense strand starting at position 2842 of SEQ ID NO: 585896
cugagucuguacuccaaau

SEQ ID NO: 676215 - RNA, 19 nt, Artificial Sequence
  Description of Artificial Sequence: Synthetic oligonucleotide
  Antisense strand to SEQ ID NO: 676214
auuuggaguacagacucag

SEQ ID NO: 676216 - RNA, 19 nt, Artificial Sequence
  Description of Artificial Sequence: Synthetic oligonucleotide
  Sense strand starting at position 2909 of SEQ ID NO: 585896
uuugguucuuguucuauuu

SEQ ID NO: 676217 - RNA, 19 nt, Artificial Sequence
  Description of Artificial Sequence: Synthetic oligonucleotide
  Antisense strand to SEQ ID NO: 676216
aaauagaacaagaaccaaa

SEQ ID NO: 676218 - RNA, 19 nt, Artificial Sequence
  Description of Artificial Sequence: Synthetic oligonucleotide
  Sense strand starting at position 2977 of SEQ ID NO: 585896
agagccuuccuaugcaaca

SEQ ID NO: 676219 - RNA, 19 nt, Artificial Sequence
  Description of Artificial Sequence: Synthetic oligonucleotide
  Antisense strand to SEQ ID NO: 676218
uguugcauaggaaggcucu

SEQ ID NO: 676220 - RNA, 19 nt, Artificial Sequence
  Description of Artificial Sequence: Synthetic oligonucleotide
  Sense strand starting at position 2993 of SEQ ID NO: 585896
acagaaagauucguuuauu

SEQ ID NO: 676221 - RNA, 19 nt, Artificial Sequence
  Description of Artificial Sequence: Synthetic oligonucleotide
  Antisense strand to SEQ ID NO: 676220
aauaaacgaaucuuucugu

SEQ ID NO: 676222 - RNA, 19 nt, Artificial Sequence
  Description of Artificial Sequence: Synthetic oligonucleotide
  Sense strand starting at position 2994 of SEQ ID NO: 585896
cagaaagauucguuuauuc

SEQ ID NO: 676223 - RNA, 19 nt, Artificial Sequence
  Description of Artificial Sequence: Synthetic oligonucleotide
  Antisense strand to SEQ ID NO: 676222
gaauaaacgaaucuuucug

SEQ ID NO: 676224 - RNA, 19 nt, Artificial Sequence
  Description of Artificial Sequence: Synthetic oligonucleotide
  Sense strand starting at position 2996 of SEQ ID NO: 585896
gaaagauucguuuauucca

SEQ ID NO: 676225 - RNA, 19 nt, Artificial Sequence
  Description of Artificial Sequence: Synthetic oligonucleotide
  Antisense strand to SEQ ID NO: 676224
uggaauaaacgaaucuuuc

SEQ ID NO: 676226 - RNA, 19 nt, Artificial Sequence
  Description of Artificial Sequence: Synthetic oligonucleotide
  Sense strand starting at position 2998 of SEQ ID NO: 585896
aagauucguuuauuccaga

SEQ ID NO: 676227 - RNA, 19 nt, Artificial Sequence
  Description of Artificial Sequence: Synthetic oligonucleotide
  Antisense strand to SEQ ID NO: 676226
ucuggaauaaacgaaucuu

SEQ ID NO: 676228 - RNA, 19 nt, Artificial Sequence
  Description of Artificial Sequence: Synthetic oligonucleotide
  Sense strand starting at position 2999 of SEQ ID NO: 585896
agauucguuuauuccagaa

SEQ ID NO: 676229 - RNA, 19 nt, Artificial Sequence
  Description of Artificial Sequence: Synthetic oligonucleotide
  Antisense strand to SEQ ID NO: 676228
uucuggaauaaacgaaucu

SEQ ID NO: 676230 - RNA, 19 nt, Artificial Sequence
  Description of Artificial Sequence: Synthetic oligonucleotide
  Sense strand starting at position 3003 of SEQ ID NO: 585896
ucguuuauuccagaaagga

SEQ ID NO: 676231 - RNA, 19 nt, Artificial Sequence
  Description of Artificial Sequence: Synthetic oligonucleotide
  Antisense strand to SEQ ID NO: 676230
uccuuucuggaauaaacga

SEQ ID NO: 676232 - RNA, 19 nt, Artificial Sequence
  Description of Artificial Sequence: Synthetic oligonucleotide
  Sense strand starting at position 3079 of SEQ ID NO: 585896
aaggaagggucgcuuggau

SEQ ID NO: 676233 - RNA, 19 nt, Artificial Sequence
  Description of Artificial Sequence: Synthetic oligonucleotide
  Antisense strand to SEQ ID NO: 676232
auccaagcgacccuuccuu

SEQ ID NO: 676234 - RNA, 19 nt, Artificial Sequence
  Description of Artificial Sequence: Synthetic oligonucleotide
  Sense strand starting at position 3113 of SEQ ID NO: 585896
ugaaauguuaccuguguga

SEQ ID NO: 676235 - RNA, 19 nt, Artificial Sequence
  Description of Artificial Sequence: Synthetic oligonucleotide
  Antisense strand to SEQ ID NO: 676234
ucacacagguaacauuuca

SEQ ID NO: 676236 - RNA, 19 nt, Artificial Sequence
  Description of Artificial Sequence: Synthetic oligonucleotide
  Sense strand starting at position 3116 of SEQ ID NO: 585896
aauguuaccugugugacua

SEQ ID NO: 676237 - RNA, 19 nt, Artificial Sequence
  Description of Artificial Sequence: Synthetic oligonucleotide
  Antisense strand to SEQ ID NO: 676236
uagucacacagguaacauu

SEQ ID NO: 676238 - RNA, 19 nt, Artificial Sequence
  Description of Artificial Sequence: Synthetic oligonucleotide
  Sense strand starting at position 3317 of SEQ ID NO: 585896
agugacaugguccauaguu

SEQ ID NO: 676239 - RNA, 19 nt, Artificial Sequence
  Description of Artificial Sequence: Synthetic oligonucleotide
  Antisense strand to SEQ ID NO: 676238
aacuauggaccaugucacu

SEQ ID NO: 676240 - RNA, 19 nt, Artificial Sequence
  Description of Artificial Sequence: Synthetic oligonucleotide
  Sense strand starting at position 3420 of SEQ ID NO: 585896
gggaguccuccugaucucu

SEQ ID NO: 676241 - RNA, 19 nt, Artificial Sequence
  Description of Artificial Sequence: Synthetic oligonucleotide
  Antisense strand to SEQ ID NO: 676240
agagaucaggaggacuccc

SEQ ID NO: 676242 - RNA, 19 nt, Artificial Sequence
  Description of Artificial Sequence: Synthetic oligonucleotide
  Sense strand starting at position 3543 of SEQ ID NO: 585896
aguguuauuugggauaaau

SEQ ID NO: 676243 - RNA, 19 nt, Artificial Sequence
  Description of Artificial Sequence: Synthetic oligonucleotide
  Antisense strand to SEQ ID NO: 676242
auuuaucccaaauaacacu

SEQ ID NO: 676244 - RNA, 19 nt, Artificial Sequence
  Description of Artificial Sequence: Synthetic oligonucleotide
  Sense strand starting at position 3554 of SEQ ID NO: 585896
ggauaaaugguaugguguu

SEQ ID NO: 676245 - RNA, 19 nt, Artificial Sequence
  Description of Artificial Sequence: Synthetic oligonucleotide
  Antisense strand to SEQ ID NO: 676244
aacaccauaccauuuaucc

SEQ ID NO: 676246 - RNA, 19 nt, Artificial Sequence
  Description of Artificial Sequence: Synthetic oligonucleotide
  Sense strand starting at position 3560 of SEQ ID NO: 585896
augguaugguguuuauaug

SEQ ID NO: 676247 - RNA, 19 nt, Artificial Sequence
  Description of Artificial Sequence: Synthetic oligonucleotide
  Antisense strand to SEQ ID NO: 676246
cauauaaacaccauaccau

SEQ ID NO: 676248 - RNA, 19 nt, Artificial Sequence
  Description of Artificial Sequence: Synthetic oligonucleotide
  Sense strand starting at position 3561 of SEQ ID NO: 585896
ugguaugguguuuauauga

SEQ ID NO: 676249 - RNA, 19 nt, Artificial Sequence
  Description of Artificial Sequence: Synthetic oligonucleotide
  Antisense strand to SEQ ID NO: 676248
ucauauaaacaccauacca

SEQ ID NO: 676250 - RNA, 19 nt, Artificial Sequence
  Description of Artificial Sequence: Synthetic oligonucleotide
  Sense strand starting at position 3568 of SEQ ID NO: 585896
guguuuauaugauuaccau

SEQ ID NO: 676251 - RNA, 19 nt, Artificial Sequence
  Description of Artificial Sequence: Synthetic oligonucleotide
  Antisense strand to SEQ ID NO: 676250
augguaaucauauaaacac

SEQ ID NO: 676252 - RNA, 19 nt, Artificial Sequence
  Description of Artificial Sequence: Synthetic oligonucleotide
  Sense strand starting at position 3777 of SEQ ID NO: 585896
uccugaggucuuggagaga

SEQ ID NO: 676253 - RNA, 19 nt, Artificial Sequence
  Description of Artificial Sequence: Synthetic oligonucleotide
  Antisense strand to SEQ ID NO: 676252
ucucuccaagaccucagga

SEQ ID NO: 676254 - RNA, 19 nt, Artificial Sequence
  Description of Artificial Sequence: Synthetic oligonucleotide
  Sense strand starting at position 3835 of SEQ ID NO: 585896
ggccacauuucuuagauag

SEQ ID NO: 676255 - RNA, 19 nt, Artificial Sequence
  Description of Artificial Sequence: Synthetic oligonucleotide
  Antisense strand to SEQ ID NO: 676254
cuaucuaagaaauguggcc

SEQ ID NO: 676256 - RNA, 19 nt, Artificial Sequence
  Description of Artificial Sequence: Synthetic oligonucleotide
  Sense strand starting at position 25 of SEQ ID NO: 585897
uuucgaggguacucuaaau

SEQ ID NO: 676257 - RNA, 19 nt, Artificial Sequence
  Description of Artificial Sequence: Synthetic oligonucleotide
  Antisense strand to SEQ ID NO: 676256
auuuagaguacccucgaaa

SEQ ID NO: 676258 - RNA, 19 nt, Artificial Sequence
  Description of Artificial Sequence: Synthetic oligonucleotide
  Sense strand starting at position 179 of SEQ ID NO: 585897
guuugaguaugucuagaaa

SEQ ID NO: 676259 - RNA, 19 nt, Artificial Sequence
  Description of Artificial Sequence: Synthetic oligonucleotide
  Antisense strand to SEQ ID NO: 676258
uuucuagacauacucaaac

SEQ ID NO: 676260 - RNA, 19 nt, Artificial Sequence
  Description of Artificial Sequence: Synthetic oligonucleotide
  Sense strand starting at position 247 of SEQ ID NO: 585897
ggugauaagccucagagua

SEQ ID NO: 676261 - RNA, 19 nt, Artificial Sequence
  Description of Artificial Sequence: Synthetic oligonucleotide
  Antisense strand to SEQ ID NO: 676260
uacucugaggcuuaucacc

SEQ ID NO: 676262 - RNA, 19 nt, Artificial Sequence
  Description of Artificial Sequence: Synthetic oligonucleotide
  Sense strand starting at position 632 of SEQ ID NO: 585897
gggccuagaaauggaguua

SEQ ID NO: 676263 - RNA, 19 nt, Artificial Sequence
  Description of Artificial Sequence: Synthetic oligonucleotide
  Antisense strand to SEQ ID NO: 676262
uaacuccauuucuaggccc

SEQ ID NO: 676264 - RNA, 19 nt, Artificial Sequence
  Description of Artificial Sequence: Synthetic oligonucleotide
  Sense strand starting at position 739 of SEQ ID NO: 585897
agaagauggcacuggcaaa

SEQ ID NO: 676265 - RNA, 19 nt, Artificial Sequence
  Description of Artificial Sequence: Synthetic oligonucleotide
  Antisense strand to SEQ ID NO: 676264
uuugccagugccaucuucu

SEQ ID NO: 676266 - RNA, 19 nt, Artificial Sequence
  Description of Artificial Sequence: Synthetic oligonucleotide
  Sense strand starting at position 996 of SEQ ID NO: 585897
acaucaagacuuuguuguu

SEQ ID NO: 676267 - RNA, 19 nt, Artificial Sequence
  Description of Artificial Sequence: Synthetic oligonucleotide
  Antisense strand to SEQ ID NO: 676266
aacaacaaagucuugaugu

SEQ ID NO: 676268 - RNA, 19 nt, Artificial Sequence
  Description of Artificial Sequence: Synthetic oligonucleotide
  Sense strand starting at position 1501 of SEQ ID NO: 585897
cguccaucggcuucucauu

SEQ ID NO: 676269 - RNA, 19 nt, Artificial Sequence
  Description of Artificial Sequence: Synthetic oligonucleotide
  Antisense strand to SEQ ID NO: 676268
aaugagaagccgauggacg

SEQ ID NO: 676270 - RNA, 19 nt, Artificial Sequence
  Description of Artificial Sequence: Synthetic oligonucleotide
  Sense strand starting at position 1537 of SEQ ID NO: 585897
gagagcucuccugaguaac

SEQ ID NO: 676271 - RNA, 19 nt, Artificial Sequence
  Description of Artificial Sequence: Synthetic oligonucleotide
  Antisense strand to SEQ ID NO: 676270
guuacucaggagagcucuc

SEQ ID NO: 676272 - RNA, 19 nt, Artificial Sequence
  Description of Artificial Sequence: Synthetic oligonucleotide
  Sense strand starting at position 2192 of SEQ ID NO: 585897
guuguccuugcuuuguaau

SEQ ID NO: 676273 - RNA, 19 nt, Artificial Sequence
  Description of Artificial Sequence: Synthetic oligonucleotide
  Antisense strand to SEQ ID NO: 676272
auuacaaagcaaggacaac

SEQ ID NO: 676274 - RNA, 19 nt, Artificial Sequence
  Description of Artificial Sequence: Synthetic oligonucleotide
  Sense strand starting at position 2198 of SEQ ID NO: 585897
cuugcuuuguaauuggaga

SEQ ID NO: 676275 - RNA, 19 nt, Artificial Sequence
  Description of Artificial Sequence: Synthetic oligonucleotide
  Antisense strand to SEQ ID NO: 676274
ucuccaauuacaaagcaag

SEQ ID NO: 676276 - RNA, 19 nt, Artificial Sequence
  Description of Artificial Sequence: Synthetic oligonucleotide
  Sense strand starting at position 2199 of SEQ ID NO: 585897
uugcuuuguaauuggagaa

SEQ ID NO: 676277 - RNA, 19 nt, Artificial Sequence
  Description of Artificial Sequence: Synthetic oligonucleotide
  Antisense strand to SEQ ID NO: 676276
uucuccaauuacaaagcaa

SEQ ID NO: 676278 - RNA, 19 nt, Artificial Sequence
  Description of Artificial Sequence: Synthetic oligonucleotide
  Sense strand starting at position 2200 of SEQ ID NO: 585897
ugcuuuguaauuggagaau

SEQ ID NO: 676279 - RNA, 19 nt, Artificial Sequence
  Description of Artificial Sequence: Synthetic oligonucleotide
  Antisense strand to SEQ ID NO: 676278
auucuccaauuacaaagca

SEQ ID NO: 676280 - RNA, 19 nt, Artificial Sequence
  Description of Artificial Sequence: Synthetic oligonucleotide
  Sense strand starting at position 2203 of SEQ ID NO: 585897
uuuguaauuggagaaugcu

SEQ ID NO: 676281 - RNA, 19 nt, Artificial Sequence
  Description of Artificial Sequence: Synthetic oligonucleotide
  Antisense strand to SEQ ID NO: 676280
agcauucuccaauuacaaa

SEQ ID NO: 676282 - RNA, 19 nt, Artificial Sequence
  Description of Artificial Sequence: Synthetic oligonucleotide
  Sense strand starting at position 2211 of SEQ ID NO: 585897
uggagaaugcuuuguaauu

SEQ ID NO: 676283 - RNA, 19 nt, Artificial Sequence
  Description of Artificial Sequence: Synthetic oligonucleotide
  Antisense strand to SEQ ID NO: 676282
aauuacaaagcauucucca

SEQ ID NO: 676284 - RNA, 19 nt, Artificial Sequence
  Description of Artificial Sequence: Synthetic oligonucleotide
  Sense strand starting at position 2212 of SEQ ID NO: 585897
ggagaaugcuuuguaauug

SEQ ID NO: 676285 - RNA, 19 nt, Artificial Sequence
  Description of Artificial Sequence: Synthetic oligonucleotide
  Antisense strand to SEQ ID NO: 676284
caauuacaaagcauucucc

SEQ ID NO: 676286 - RNA, 19 nt, Artificial Sequence
  Description of Artificial Sequence: Synthetic oligonucleotide
  Sense strand starting at position 2216 of SEQ ID NO: 585897
aaugcuuuguaauuggaga

SEQ ID NO: 676287 - RNA, 19 nt, Artificial Sequence
  Description of Artificial Sequence: Synthetic oligonucleotide
  Antisense strand to SEQ ID NO: 676286
ucuccaauuacaaagcauu

SEQ ID NO: 676288 - RNA, 19 nt, Artificial Sequence
  Description of Artificial Sequence: Synthetic oligonucleotide
  Sense strand starting at position 2217 of SEQ ID NO: 585897
augcuuuguaauuggagaa

SEQ ID NO: 676289 - RNA, 19 nt, Artificial Sequence
  Description of Artificial Sequence: Synthetic oligonucleotide
  Antisense strand to SEQ ID NO: 676288
uucuccaauuacaaagcau

SEQ ID NO: 676290 - RNA, 19 nt, Artificial Sequence
  Description of Artificial Sequence: Synthetic oligonucleotide
  Sense strand starting at position 2696 of SEQ ID NO: 585897
cguacagacuuugaauuua

SEQ ID NO: 676291 - RNA, 19 nt, Artificial Sequence
  Description of Artificial Sequence: Synthetic oligonucleotide
  Antisense strand to SEQ ID NO: 676290
uaaauucaaagucuguacg

SEQ ID NO: 676292 - RNA, 19 nt, Artificial Sequence
  Description of Artificial Sequence: Synthetic oligonucleotide
  Sense strand starting at position 2718 of SEQ ID NO: 585897
ggcccugagcguucaucuu

SEQ ID NO: 676293 - RNA, 19 nt, Artificial Sequence
  Description of Artificial Sequence: Synthetic oligonucleotide
  Antisense strand to SEQ ID NO: 676292
aagaugaacgcucagggcc

SEQ ID NO: 676294 - RNA, 19 nt, Artificial Sequence
  Description of Artificial Sequence: Synthetic oligonucleotide
  Sense strand starting at position 2789 of SEQ ID NO: 585897
cugagucuguacuccaaau

SEQ ID NO: 676295 - RNA, 19 nt, Artificial Sequence
  Description of Artificial Sequence: Synthetic oligonucleotide
  Antisense strand to SEQ ID NO: 676294
auuuggaguacagacucag

SEQ ID NO: 676296 - RNA, 19 nt, Artificial Sequence
  Description of Artificial Sequence: Synthetic oligonucleotide
  Sense strand starting at position 2856 of SEQ ID NO: 585897
uuugguucuuguucuauuu

SEQ ID NO: 676297 - RNA, 19 nt, Artificial Sequence
  Description of Artificial Sequence: Synthetic oligonucleotide
  Antisense strand to SEQ ID NO: 676296
aaauagaacaagaaccaaa

SEQ ID NO: 676298 - RNA, 19 nt, Artificial Sequence
  Description of Artificial Sequence: Synthetic oligonucleotide
  Sense strand starting at position 2924 of SEQ ID NO: 585897
agagccuuccuaugcaaca

SEQ ID NO: 676299 - RNA, 19 nt, Artificial Sequence
  Description of Artificial Sequence: Synthetic oligonucleotide
  Antisense strand to SEQ ID NO: 676298
uguugcauaggaaggcucu

SEQ ID NO: 676300 - RNA, 19 nt, Artificial Sequence
  Description of Artificial Sequence: Synthetic oligonucleotide
  Sense strand starting at position 2940 of SEQ ID NO: 585897
acagaaagauucguuuauu

SEQ ID NO: 676301 - RNA, 19 nt, Artificial Sequence
  Description of Artificial Sequence: Synthetic oligonucleotide
  Antisense strand to SEQ ID NO: 676300
aauaaacgaaucuuucugu

SEQ ID NO: 676302 - RNA, 19 nt, Artificial Sequence
  Description of Artificial Sequence: Synthetic oligonucleotide
  Sense strand starting at position 2941 of SEQ ID NO: 585897
cagaaagauucguuuauuc

SEQ ID NO: 676303 - RNA, 19 nt, Artificial Sequence
  Description of Artificial Sequence: Synthetic oligonucleotide
  Antisense strand to SEQ ID NO: 676302
gaauaaacgaaucuuucug

SEQ ID NO: 676304 - RNA, 19 nt, Artificial Sequence
  Description of Artificial Sequence: Synthetic oligonucleotide
  Sense strand starting at position 2943 of SEQ ID NO: 585897
gaaagauucguuuauucca

SEQ ID NO: 676305 - RNA, 19 nt, Artificial Sequence
  Description of Artificial Sequence: Synthetic oligonucleotide
  Antisense strand to SEQ ID NO: 676304
uggaauaaacgaaucuuuc

SEQ ID NO: 676306 - RNA, 19 nt, Artificial Sequence
  Description of Artificial Sequence: Synthetic oligonucleotide
  Sense strand starting at position 2945 of SEQ ID NO: 585897
aagauucguuuauuccaga

SEQ ID NO: 676307 - RNA, 19 nt, Artificial Sequence
  Description of Artificial Sequence: Synthetic oligonucleotide
  Antisense strand to SEQ ID NO: 676306
ucuggaauaaacgaaucuu

SEQ ID NO: 676308 - RNA, 19 nt, Artificial Sequence
  Description of Artificial Sequence: Synthetic oligonucleotide
  Sense strand starting at position 2946 of SEQ ID NO: 585897
agauucguuuauuccagaa

SEQ ID NO: 676309 - RNA, 19 nt, Artificial Sequence
  Description of Artificial Sequence: Synthetic oligonucleotide
  Antisense strand to SEQ ID NO: 676308
uucuggaauaaacgaaucu

SEQ ID NO: 676310 - RNA, 19 nt, Artificial Sequence
  Description of Artificial Sequence: Synthetic oligonucleotide
  Sense strand starting at position 2950 of SEQ ID NO: 585897
ucguuuauuccagaaagga

SEQ ID NO: 676311 - RNA, 19 nt, Artificial Sequence
  Description of Artificial Sequence: Synthetic oligonucleotide
  Antisense strand to SEQ ID NO: 676310
uccuuucuggaauaaacga

SEQ ID NO: 676312 - RNA, 19 nt, Artificial Sequence
  Description of Artificial Sequence: Synthetic oligonucleotide
  Sense strand starting at position 3026 of SEQ ID NO: 585897
aaggaagggucgcuuggau

SEQ ID NO: 676313 - RNA, 19 nt, Artificial Sequence
  Description of Artificial Sequence: Synthetic oligonucleotide
  Antisense strand to SEQ ID NO: 676312
auccaagcgacccuuccuu

SEQ ID NO: 676314 - RNA, 19 nt, Artificial Sequence
  Description of Artificial Sequence: Synthetic oligonucleotide
  Sense strand starting at position 3060 of SEQ ID NO: 585897
ugaaauguuaccuguguga

SEQ ID NO: 676315 - RNA, 19 nt, Artificial Sequence
  Description of Artificial Sequence: Synthetic oligonucleotide
  Antisense strand to SEQ ID NO: 676314
ucacacagguaacauuuca

SEQ ID NO: 676316 - RNA, 19 nt, Artificial Sequence
  Description of Artificial Sequence: Synthetic oligonucleotide
  Sense strand starting at position 3063 of SEQ ID NO: 585897
aauguuaccugugugacua

SEQ ID NO: 676317 - RNA, 19 nt, Artificial Sequence
  Description of Artificial Sequence: Synthetic oligonucleotide
  Antisense strand to SEQ ID NO: 676316
uagucacacagguaacauu

SEQ ID NO: 676318 - RNA, 19 nt, Artificial Sequence
  Description of Artificial Sequence: Synthetic oligonucleotide
  Sense strand starting at position 3264 of SEQ ID NO: 585897
agugacaugguccauaguu

SEQ ID NO: 676319 - RNA, 19 nt, Artificial Sequence
  Description of Artificial Sequence: Synthetic oligonucleotide
  Antisense strand to SEQ ID NO: 676318
aacuauggaccaugucacu

SEQ ID NO: 676320 - RNA, 19 nt, Artificial Sequence
  Description of Artificial Sequence: Synthetic oligonucleotide
  Sense strand starting at position 3367 of SEQ ID NO: 585897
gggaguccuccugaucucu

SEQ ID NO: 676321 - RNA, 19 nt, Artificial Sequence
  Description of Artificial Sequence: Synthetic oligonucleotide
  Antisense strand to SEQ ID NO: 676320
agagaucaggaggacuccc

SEQ ID NO: 676322 - RNA, 19 nt, Artificial Sequence
  Description of Artificial Sequence: Synthetic oligonucleotide
  Sense strand starting at position 3490 of SEQ ID NO: 585897
aguguuauuugggauaaau

SEQ ID NO: 676323 - RNA, 19 nt, Artificial Sequence
  Description of Artificial Sequence: Synthetic oligonucleotide
  Antisense strand to SEQ ID NO: 676322
auuuaucccaaauaacacu

SEQ ID NO: 676324 - RNA, 19 nt, Artificial Sequence
  Description of Artificial Sequence: Synthetic oligonucleotide
  Sense strand starting at position 3501 of SEQ ID NO: 585897
ggauaaaugguaugguguu

SEQ ID NO: 676325 - RNA, 19 nt, Artificial Sequence
  Description of Artificial Sequence: Synthetic oligonucleotide
  Antisense strand to SEQ ID NO: 676324
aacaccauaccauuuaucc

SEQ ID NO: 676326 - RNA, 19 nt, Artificial Sequence
  Description of Artificial Sequence: Synthetic oligonucleotide
  Sense strand starting at position 3507 of SEQ ID NO: 585897
augguaugguguuuauaug

SEQ ID NO: 676327 - RNA, 19 nt, Artificial Sequence
  Description of Artificial Sequence: Synthetic oligonucleotide
  Antisense strand to SEQ ID NO: 676326
cauauaaacaccauaccau

SEQ ID NO: 676328 - RNA, 19 nt, Artificial Sequence
  Description of Artificial Sequence: Synthetic oligonucleotide
  Sense strand starting at position 3508 of SEQ ID NO: 585897
ugguaugguguuuauauga

SEQ ID NO: 676329 - RNA, 19 nt, Artificial Sequence
  Description of Artificial Sequence: Synthetic oligonucleotide
  Antisense strand to SEQ ID NO: 676328
ucauauaaacaccauacca

SEQ ID NO: 676330 - RNA, 19 nt, Artificial Sequence
  Description of Artificial Sequence: Synthetic oligonucleotide
  Sense strand starting at position 3515 of SEQ ID NO: 585897
guguuuauaugauuaccau

SEQ ID NO: 676331 - RNA, 19 nt, Artificial Sequence
  Description of Artificial Sequence: Synthetic oligonucleotide
  Antisense strand to SEQ ID NO: 676330
augguaaucauauaaacac

SEQ ID NO: 676332 - RNA, 19 nt, Artificial Sequence
  Description of Artificial Sequence: Synthetic oligonucleotide
  Sense strand starting at position 3724 of SEQ ID NO: 585897
uccugaggucuuggagaga

SEQ ID NO: 676333 - RNA, 19 nt, Artificial Sequence
  Description of Artificial Sequence: Synthetic oligonucleotide
  Antisense strand to SEQ ID NO: 676332
ucucuccaagaccucagga

SEQ ID NO: 676334 - RNA, 19 nt, Artificial Sequence
  Description of Artificial Sequence: Synthetic oligonucleotide
  Sense strand starting at position 3782 of SEQ ID NO: 585897
ggccacauuucuuagauag

SEQ ID NO: 676335 - RNA, 19 nt, Artificial Sequence
  Description of Artificial Sequence: Synthetic oligonucleotide
  Antisense strand to SEQ ID NO: 676334
cuaucuaagaaauguggcc

SEQ ID NO: 676336 - RNA, 19 nt, Artificial Sequence
  Description of Artificial Sequence: Synthetic oligonucleotide
  Sense strand starting at position 26 of SEQ ID NO: 585898
gaacucuaccgguauucua

SEQ ID NO: 676337 - RNA, 19 nt, Artificial Sequence
  Description of Artificial Sequence: Synthetic oligonucleotide
  Antisense strand to SEQ ID NO: 676336
uagaauaccgguagaguuc

SEQ ID NO: 676338 - RNA, 19 nt, Artificial Sequence
  Description of Artificial Sequence: Synthetic oligonucleotide
  Sense strand starting at position 84 of SEQ ID NO: 585898
cccagauauccaggucaga

SEQ ID NO: 676339 - RNA, 19 nt, Artificial Sequence
  Description of Artificial Sequence: Synthetic oligonucleotide
  Antisense strand to SEQ ID NO: 676338
ucugaccuggauaucuggg

SEQ ID NO: 676340 - RNA, 19 nt, Artificial Sequence
  Description of Artificial Sequence: Synthetic oligonucleotide
  Sense strand starting at position 95 of SEQ ID NO: 585898
aggucagacucuccucauu

SEQ ID NO: 676341 - RNA, 19 nt, Artificial Sequence
  Description of Artificial Sequence: Synthetic oligonucleotide
  Antisense strand to SEQ ID NO: 676340
aaugaggagagucugaccu

SEQ ID NO: 676342 - RNA, 19 nt, Artificial Sequence
  Description of Artificial Sequence: Synthetic oligonucleotide
  Sense strand starting at position 97 of SEQ ID NO: 585898
gucagacucuccucauucu

SEQ ID NO: 676343 - RNA, 19 nt, Artificial Sequence
  Description of Artificial Sequence: Synthetic oligonucleotide
  Antisense strand to SEQ ID NO: 676342
agaaugaggagagucugac

SEQ ID NO: 676344 - RNA, 19 nt, Artificial Sequence
  Description of Artificial Sequence: Synthetic oligonucleotide
  Sense strand starting at position 114 of SEQ ID NO: 585898
cuugaauuaucugcacagu

SEQ ID NO: 676345 - RNA, 19 nt, Artificial Sequence
  Description of Artificial Sequence: Synthetic oligonucleotide
  Antisense strand to SEQ ID NO: 676344
acugugcagauaauucaag

SEQ ID NO: 676346 - RNA, 19 nt, Artificial Sequence
  Description of Artificial Sequence: Synthetic oligonucleotide
  Sense strand starting at position 115 of SEQ ID NO: 585898
uugaauuaucugcacaguc

SEQ ID NO: 676347 - RNA, 19 nt, Artificial Sequence
  Description of Artificial Sequence: Synthetic oligonucleotide
  Antisense strand to SEQ ID NO: 676346
gacugugcagauaauucaa

SEQ ID NO: 676348 - RNA, 19 nt, Artificial Sequence
  Description of Artificial Sequence: Synthetic oligonucleotide
  Sense strand starting at position 321 of SEQ ID NO: 585898
gugcaagagccuuugcuuu

SEQ ID NO: 676349 - RNA, 19 nt, Artificial Sequence
  Description of Artificial Sequence: Synthetic oligonucleotide
  Antisense strand to SEQ ID NO: 676348
aaagcaaaggcucuugcac

SEQ ID NO: 676350 - RNA, 19 nt, Artificial Sequence
  Description of Artificial Sequence: Synthetic oligonucleotide
  Sense strand starting at position 395 of SEQ ID NO: 585898
gaaagagugacccgcaaag

SEQ ID NO: 676351 - RNA, 19 nt, Artificial Sequence
  Description of Artificial Sequence: Synthetic oligonucleotide
  Antisense strand to SEQ ID NO: 676350
cuuugcgggucacucuuuc

SEQ ID NO: 676352 - RNA, 19 nt, Artificial Sequence
  Description of Artificial Sequence: Synthetic oligonucleotide
  Sense strand starting at position 665 of SEQ ID NO: 585898
agcgguagagauugauuca

SEQ ID NO: 676353 - RNA, 19 nt, Artificial Sequence
  Description of Artificial Sequence: Synthetic oligonucleotide
  Antisense strand to SEQ ID NO: 676352
ugaaucaaucucuaccgcu

SEQ ID NO: 676354 - RNA, 19 nt, Artificial Sequence
  Description of Artificial Sequence: Synthetic oligonucleotide
  Sense strand starting at position 736 of SEQ ID NO: 585898
cgaaaugucuugcucaagu

SEQ ID NO: 676355 - RNA, 19 nt, Artificial Sequence
  Description of Artificial Sequence: Synthetic oligonucleotide
  Antisense strand to SEQ ID NO: 676354
acuugagcaagacauuucg

SEQ ID NO: 676356 - RNA, 19 nt, Artificial Sequence
  Description of Artificial Sequence: Synthetic oligonucleotide
  Sense strand starting at position 779 of SEQ ID NO: 585898
ucuggacccuuagaaucua

SEQ ID NO: 676357 - RNA, 19 nt, Artificial Sequence
  Description of Artificial Sequence: Synthetic oligonucleotide
  Antisense strand to SEQ ID NO: 676356
uagauucuaaggguccaga

SEQ ID NO: 676358 - RNA, 19 nt, Artificial Sequence
  Description of Artificial Sequence: Synthetic oligonucleotide
  Sense strand starting at position 899 of SEQ ID NO: 585898
ugaggacugggcuggauau

SEQ ID NO: 676359 - RNA, 19 nt, Artificial Sequence
  Description of Artificial Sequence: Synthetic oligonucleotide
  Antisense strand to SEQ ID NO: 676358
auauccagcccaguccuca

SEQ ID NO: 676360 - RNA, 19 nt, Artificial Sequence
  Description of Artificial Sequence: Synthetic oligonucleotide
  Sense strand starting at position 1119 of SEQ ID NO: 585898
uagagucaccgccgggaaa

SEQ ID NO: 676361 - RNA, 19 nt, Artificial Sequence
  Description of Artificial Sequence: Synthetic oligonucleotide
  Antisense strand to SEQ ID NO: 676360
uuucccggcggugacucua

SEQ ID NO: 676362 - RNA, 19 nt, Artificial Sequence
  Description of Artificial Sequence: Synthetic oligonucleotide
  Sense strand starting at position 1186 of SEQ ID NO: 585898
cguagugagacucacuuua

SEQ ID NO: 676363 - RNA, 19 nt, Artificial Sequence
  Description of Artificial Sequence: Synthetic oligonucleotide
  Antisense strand to SEQ ID NO: 676362
uaaagugagucucacuacg

SEQ ID NO: 676364 - RNA, 19 nt, Artificial Sequence
  Description of Artificial Sequence: Synthetic oligonucleotide
  Sense strand starting at position 1226 of SEQ ID NO: 585898
aggucacugccggaucuaa

SEQ ID NO: 676365 - RNA, 19 nt, Artificial Sequence
  Description of Artificial Sequence: Synthetic oligonucleotide
  Antisense strand to SEQ ID NO: 676364
uuagauccggcagugaccu

SEQ ID NO: 676366 - RNA, 19 nt, Artificial Sequence
  Description of Artificial Sequence: Synthetic oligonucleotide
  Sense strand starting at position 1285 of SEQ ID NO: 585898
cggcgagucccuagagacu

SEQ ID NO: 676367 - RNA, 19 nt, Artificial Sequence
  Description of Artificial Sequence: Synthetic oligonucleotide
  Antisense strand to SEQ ID NO: 676366
agucucuagggacucgccg

SEQ ID NO: 676368 - RNA, 19 nt, Artificial Sequence
  Description of Artificial Sequence: Synthetic oligonucleotide
  Sense strand starting at position 1294 of SEQ ID NO: 585898
ccuagagacucaccgugua

SEQ ID NO: 676369 - RNA, 19 nt, Artificial Sequence
  Description of Artificial Sequence: Synthetic oligonucleotide
  Antisense strand to SEQ ID NO: 676368
uacacggugagucucuagg

SEQ ID NO: 676370 - RNA, 19 nt, Artificial Sequence
  Description of Artificial Sequence: Synthetic oligonucleotide
  Sense strand starting at position 1304 of SEQ ID NO: 585898
caccguguacacugagaua

SEQ ID NO: 676371 - RNA, 19 nt, Artificial Sequence
  Description of Artificial Sequence: Synthetic oligonucleotide
  Antisense strand to SEQ ID NO: 676370
uaucucaguguacacggug

SEQ ID NO: 676372 - RNA, 19 nt, Artificial Sequence
  Description of Artificial Sequence: Synthetic oligonucleotide
  Sense strand starting at position 1498 of SEQ ID NO: 585898
ugaggagcgguuuguaugu

SEQ ID NO: 676373 - RNA, 19 nt, Artificial Sequence
  Description of Artificial Sequence: Synthetic oligonucleotide
  Antisense strand to SEQ ID NO: 676372
acauacaaaccgcuccuca

SEQ ID NO: 676374 - RNA, 19 nt, Artificial Sequence
  Description of Artificial Sequence: Synthetic oligonucleotide
  Sense strand starting at position 1505 of SEQ ID NO: 585898
cgguuuguaugucugguga

SEQ ID NO: 676375 - RNA, 19 nt, Artificial Sequence
  Description of Artificial Sequence: Synthetic oligonucleotide
  Antisense strand to SEQ ID NO: 676374
ucaccagacauacaaaccg

SEQ ID NO: 676376 - RNA, 19 nt, Artificial Sequence
  Description of Artificial Sequence: Synthetic oligonucleotide
  Sense strand starting at position 1579 of SEQ ID NO: 585898
ccucuaguucuugggcgau

SEQ ID NO: 676377 - RNA, 19 nt, Artificial Sequence
  Description of Artificial Sequence: Synthetic oligonucleotide
  Antisense strand to SEQ ID NO: 676376
aucgcccaagaacuagagg

SEQ ID NO: 676378 - RNA, 19 nt, Artificial Sequence
  Description of Artificial Sequence: Synthetic oligonucleotide
  Sense strand starting at position 1581 of SEQ ID NO: 585898
ucuaguucuugggcgauga

SEQ ID NO: 676379 - RNA, 19 nt, Artificial Sequence
  Description of Artificial Sequence: Synthetic oligonucleotide
  Antisense strand to SEQ ID NO: 676378
ucaucgcccaagaacuaga

SEQ ID NO: 676380 - RNA, 19 nt, Artificial Sequence
  Description of Artificial Sequence: Synthetic oligonucleotide
  Sense strand starting at position 1583 of SEQ ID NO: 585898
uaguucuugggcgaugagu

SEQ ID NO: 676381 - RNA, 19 nt, Artificial Sequence
  Description of Artificial Sequence: Synthetic oligonucleotide
  Antisense strand to SEQ ID NO: 676380
acucaucgcccaagaacua

SEQ ID NO: 676382 - RNA, 19 nt, Artificial Sequence
  Description of Artificial Sequence: Synthetic oligonucleotide
  Sense strand starting at position 1810 of SEQ ID NO: 585898
gguagauccucuccaguuc

SEQ ID NO: 676383 - RNA, 19 nt, Artificial Sequence
  Description of Artificial Sequence: Synthetic oligonucleotide
  Antisense strand to SEQ ID NO: 676382
gaacuggagaggaucuacc

SEQ ID NO: 676384 - RNA, 19 nt, Artificial Sequence
  Description of Artificial Sequence: Synthetic oligonucleotide
  Sense strand starting at position 1821 of SEQ ID NO: 585898
uccaguucucaccaggaca

SEQ ID NO: 676385 - RNA, 19 nt, Artificial Sequence
  Description of Artificial Sequence: Synthetic oligonucleotide
  Antisense strand to SEQ ID NO: 676384
uguccuggugagaacugga

SEQ ID NO: 676386 - RNA, 19 nt, Artificial Sequence
  Description of Artificial Sequence: Synthetic oligonucleotide
  Sense strand starting at position 1930 of SEQ ID NO: 585898
gugugugcucuccaacauc

SEQ ID NO: 676387 - RNA, 19 nt, Artificial Sequence
  Description of Artificial Sequence: Synthetic oligonucleotide
  Antisense strand to SEQ ID NO: 676386
gauguuggagagcacacac

SEQ ID NO: 676388 - RNA, 19 nt, Artificial Sequence
  Description of Artificial Sequence: Synthetic oligonucleotide
  Sense strand starting at position 2010 of SEQ ID NO: 585898
acggguuaucgggaagcca

SEQ ID NO: 676389 - RNA, 19 nt, Artificial Sequence
  Description of Artificial Sequence: Synthetic oligonucleotide
  Antisense strand to SEQ ID NO: 676388
uggcuucccgauaacccgu

SEQ ID NO: 676390 - RNA, 19 nt, Artificial Sequence
  Description of Artificial Sequence: Synthetic oligonucleotide
  Sense strand starting at position 2077 of SEQ ID NO: 585898
cuuguacuccuacgacuua

SEQ ID NO: 676391 - RNA, 19 nt, Artificial Sequence
  Description of Artificial Sequence: Synthetic oligonucleotide
  Antisense strand to SEQ ID NO: 676390
uaagucguaggaguacaag

SEQ ID NO: 676392 - RNA, 19 nt, Artificial Sequence
  Description of Artificial Sequence: Synthetic oligonucleotide
  Sense strand starting at position 2125 of SEQ ID NO: 585898
ugagaaccgaguugggaau

SEQ ID NO: 676393 - RNA, 19 nt, Artificial Sequence
  Description of Artificial Sequence: Synthetic oligonucleotide
  Antisense strand to SEQ ID NO: 676392
auucccaacucgguucuca

SEQ ID NO: 676394 - RNA, 19 nt, Artificial Sequence
  Description of Artificial Sequence: Synthetic oligonucleotide
  Sense strand starting at position 2240 of SEQ ID NO: 585898
aggccuugucuccacgaca

SEQ ID NO: 676395 - RNA, 19 nt, Artificial Sequence
  Description of Artificial Sequence: Synthetic oligonucleotide
  Antisense strand to SEQ ID NO: 676394
ugucguggagacaaggccu

SEQ ID NO: 676396 - RNA, 19 nt, Artificial Sequence
  Description of Artificial Sequence: Synthetic oligonucleotide
  Sense strand starting at position 2243 of SEQ ID NO: 585898
ccuugucuccacgacaaca

SEQ ID NO: 676397 - RNA, 19 nt, Artificial Sequence
  Description of Artificial Sequence: Synthetic oligonucleotide
  Antisense strand to SEQ ID NO: 676396
uguugucguggagacaagg

SEQ ID NO: 676398 - RNA, 19 nt, Artificial Sequence
  Description of Artificial Sequence: Synthetic oligonucleotide
  Sense strand starting at position 2409 of SEQ ID NO: 585898
gguuuaguucuggaaauac

SEQ ID NO: 676399 - RNA, 19 nt, Artificial Sequence
  Description of Artificial Sequence: Synthetic oligonucleotide
  Antisense strand to SEQ ID NO: 676398
guauuuccagaacuaaacc

SEQ ID NO: 676400 - RNA, 19 nt, Artificial Sequence
  Description of Artificial Sequence: Synthetic oligonucleotide
  Sense strand starting at position 2526 of SEQ ID NO: 585898
aguaaguguggugggagau

SEQ ID NO: 676401 - RNA, 19 nt, Artificial Sequence
  Description of Artificial Sequence: Synthetic oligonucleotide
  Antisense strand to SEQ ID NO: 676400
aucucccaccacacuuacu

SEQ ID NO: 676402 - RNA, 19 nt, Artificial Sequence
  Description of Artificial Sequence: Synthetic oligonucleotide
  Sense strand starting at position 2566 of SEQ ID NO: 585898
uugcaucgugcuccuuauu

SEQ ID NO: 676403 - RNA, 19 nt, Artificial Sequence
  Description of Artificial Sequence: Synthetic oligonucleotide
  Antisense strand to SEQ ID NO: 676402
aauaaggagcacgaugcaa

SEQ ID NO: 676404 - RNA, 19 nt, Artificial Sequence
  Description of Artificial Sequence: Synthetic oligonucleotide
  Sense strand starting at position 3071 of SEQ ID NO: 585898
gaaagaucuuauucccguc

SEQ ID NO: 676405 - RNA, 19 nt, Artificial Sequence
  Description of Artificial Sequence: Synthetic oligonucleotide
  Antisense strand to SEQ ID NO: 676404
gacgggaauaagaucuuuc

SEQ ID NO: 676406 - RNA, 19 nt, Artificial Sequence
  Description of Artificial Sequence: Synthetic oligonucleotide
  Sense strand starting at position 3374 of SEQ ID NO: 585898
ggccaaagucauuggagga

SEQ ID NO: 676407 - RNA, 19 nt, Artificial Sequence
  Description of Artificial Sequence: Synthetic oligonucleotide
  Antisense strand to SEQ ID NO: 676406
uccuccaaugacuuuggcc

SEQ ID NO: 676408 - RNA, 19 nt, Artificial Sequence
  Description of Artificial Sequence: Synthetic oligonucleotide
  Sense strand starting at position 3375 of SEQ ID NO: 585898
gccaaagucauuggaggac

SEQ ID NO: 676409 - RNA, 19 nt, Artificial Sequence
  Description of Artificial Sequence: Synthetic oligonucleotide
  Antisense strand to SEQ ID NO: 676408
guccuccaaugacuuuggc

SEQ ID NO: 676410 - RNA, 19 nt, Artificial Sequence
  Description of Artificial Sequence: Synthetic oligonucleotide
  Sense strand starting at position 3450 of SEQ ID NO: 585898
aucacuuaugcugagggua

SEQ ID NO: 676411 - RNA, 19 nt, Artificial Sequence
  Description of Artificial Sequence: Synthetic oligonucleotide
  Antisense strand to SEQ ID NO: 676410
uacccucagcauaagugau

SEQ ID NO: 676412 - RNA, 19 nt, Artificial Sequence
  Description of Artificial Sequence: Synthetic oligonucleotide
  Sense strand starting at position 3631 of SEQ ID NO: 585898
acguauacccaguguuucu

SEQ ID NO: 676413 - RNA, 19 nt, Artificial Sequence
  Description of Artificial Sequence: Synthetic oligonucleotide
  Antisense strand to SEQ ID NO: 676412
agaaacacuggguauacgu

SEQ ID NO: 676414 - RNA, 19 nt, Artificial Sequence
  Description of Artificial Sequence: Synthetic oligonucleotide
  Sense strand starting at position 3867 of SEQ ID NO: 585898
ggaggaagaugagaaauca

SEQ ID NO: 676415 - RNA, 19 nt, Artificial Sequence
  Description of Artificial Sequence: Synthetic oligonucleotide
  Antisense strand to SEQ ID NO: 676414
ugauuucucaucuuccucc

SEQ ID NO: 676416 - RNA, 19 nt, Artificial Sequence
  Description of Artificial Sequence: Synthetic oligonucleotide
  Sense strand starting at position 361 of SEQ ID NO: 585899
caggaagugugcuuaccua

SEQ ID NO: 676417 - RNA, 19 nt, Artificial Sequence
  Description of Artificial Sequence: Synthetic oligonucleotide
  Antisense strand to SEQ ID NO: 676416
uagguaagcacacuuccug

SEQ ID NO: 676418 - RNA, 19 nt, Artificial Sequence
  Description of Artificial Sequence: Synthetic oligonucleotide
  Sense strand starting at position 436 of SEQ ID NO: 585899
aucugaaguuaucuuugca

SEQ ID NO: 676419 - RNA, 19 nt, Artificial Sequence
  Description of Artificial Sequence: Synthetic oligonucleotide
  Antisense strand to SEQ ID NO: 676418
ugcaaagauaacuucagau

SEQ ID NO: 676420 - RNA, 19 nt, Artificial Sequence
  Description of Artificial Sequence: Synthetic oligonucleotide
  Sense strand starting at position 506 of SEQ ID NO: 585899
ucuccauaugucuacuaga

SEQ ID NO: 676421 - RNA, 19 nt, Artificial Sequence
  Description of Artificial Sequence: Synthetic oligonucleotide
  Antisense strand to SEQ ID NO: 676420
ucuaguagacauauggaga

SEQ ID NO: 676422 - RNA, 19 nt, Artificial Sequence
  Description of Artificial Sequence: Synthetic oligonucleotide
  Sense strand starting at position 649 of SEQ ID NO: 585899
gucagaccuugucucuauu

SEQ ID NO: 676423 - RNA, 19 nt, Artificial Sequence
  Description of Artificial Sequence: Synthetic oligonucleotide
  Antisense strand to SEQ ID NO: 676422
aauagagacaaggucugac

SEQ ID NO: 676424 - RNA, 19 nt, Artificial Sequence
  Description of Artificial Sequence: Synthetic oligonucleotide
  Sense strand starting at position 864 of SEQ ID NO: 585899
aucuuaaauuuacgacuga

SEQ ID NO: 676425 - RNA, 19 nt, Artificial Sequence
  Description of Artificial Sequence: Synthetic oligonucleotide
  Antisense strand to SEQ ID NO: 676424
ucagucguaaauuuaagau

SEQ ID NO: 676426 - RNA, 19 nt, Artificial Sequence
  Description of Artificial Sequence: Synthetic oligonucleotide
  Sense strand starting at position 865 of SEQ ID NO: 585899
ucuuaaauuuacgacugaa

SEQ ID NO: 676427 - RNA, 19 nt, Artificial Sequence
  Description of Artificial Sequence: Synthetic oligonucleotide
  Antisense strand to SEQ ID NO: 676426
uucagucguaaauuuaaga

SEQ ID NO: 676428 - RNA, 19 nt, Artificial Sequence
  Description of Artificial Sequence: Synthetic oligonucleotide
  Sense strand starting at position 1019 of SEQ ID NO: 585899
gggucugcucuccaguuaa

SEQ ID NO: 676429 - RNA, 19 nt, Artificial Sequence
  Description of Artificial Sequence: Synthetic oligonucleotide
  Antisense strand to SEQ ID NO: 676428
uuaacuggagagcagaccc

SEQ ID NO: 676430 - RNA, 19 nt, Artificial Sequence
  Description of Artificial Sequence: Synthetic oligonucleotide
  Sense strand starting at position 1051 of SEQ ID NO: 585899
gaacgaauuuagugcauuu

SEQ ID NO: 676431 - RNA, 19 nt, Artificial Sequence
  Description of Artificial Sequence: Synthetic oligonucleotide
  Antisense strand to SEQ ID NO: 676430
aaaugcacuaaauucguuc

SEQ ID NO: 676432 - RNA, 19 nt, Artificial Sequence
  Description of Artificial Sequence: Synthetic oligonucleotide
  Sense strand starting at position 1070 of SEQ ID NO: 585899
gcacaagaagugcauuaca

SEQ ID NO: 676433 - RNA, 19 nt, Artificial Sequence
  Description of Artificial Sequence: Synthetic oligonucleotide
  Antisense strand to SEQ ID NO: 676432
uguaaugcacuucuugugc

SEQ ID NO: 676434 - RNA, 19 nt, Artificial Sequence
  Description of Artificial Sequence: Synthetic oligonucleotide
  Sense strand starting at position 1157 of SEQ ID NO: 585899
uucuguggucgucuuguaa

SEQ ID NO: 676435 - RNA, 19 nt, Artificial Sequence
  Description of Artificial Sequence: Synthetic oligonucleotide
  Antisense strand to SEQ ID NO: 676434
uuacaagacgaccacagaa

SEQ ID NO: 676436 - RNA, 19 nt, Artificial Sequence
  Description of Artificial Sequence: Synthetic oligonucleotide
  Sense strand starting at position 1212 of SEQ ID NO: 585899
uaaggucaggguugagaau

SEQ ID NO: 676437 - RNA, 19 nt, Artificial Sequence
  Description of Artificial Sequence: Synthetic oligonucleotide
  Antisense strand to SEQ ID NO: 676436
auucucaacccugaccuua

SEQ ID NO: 676438 - RNA, 19 nt, Artificial Sequence
  Description of Artificial Sequence: Synthetic oligonucleotide
  Sense strand starting at position 1221 of SEQ ID NO: 585899
gguugagaaucguccucac

SEQ ID NO: 676439 - RNA, 19 nt, Artificial Sequence
  Description of Artificial Sequence: Synthetic oligonucleotide
  Antisense strand to SEQ ID NO: 676438
gugaggacgauucucaacc

SEQ ID NO: 676440 - RNA, 19 nt, Artificial Sequence
  Description of Artificial Sequence: Synthetic oligonucleotide
  Sense strand starting at position 1224 of SEQ ID NO: 585899
ugagaaucguccucacuuu

SEQ ID NO: 676441 - RNA, 19 nt, Artificial Sequence
  Description of Artificial Sequence: Synthetic oligonucleotide
  Antisense strand to SEQ ID NO: 676440
aaagugaggacgauucuca

SEQ ID NO: 676442 - RNA, 19 nt, Artificial Sequence
  Description of Artificial Sequence: Synthetic oligonucleotide
  Sense strand starting at position 1281 of SEQ ID NO: 585899
accggaauccuucggguaa

SEQ ID NO: 676443 - RNA, 19 nt, Artificial Sequence
  Description of Artificial Sequence: Synthetic oligonucleotide
  Antisense strand to SEQ ID NO: 676442
uuacccgaaggauuccggu

SEQ ID NO: 676444 - RNA, 19 nt, Artificial Sequence
  Description of Artificial Sequence: Synthetic oligonucleotide
  Sense strand starting at position 2168 of SEQ ID NO: 585899
gggauuaucuucuucguga

SEQ ID NO: 676445 - RNA, 19 nt, Artificial Sequence
  Description of Artificial Sequence: Synthetic oligonucleotide
  Antisense strand to SEQ ID NO: 676444
ucacgaagaagauaauccc

SEQ ID NO: 676446 - RNA, 19 nt, Artificial Sequence
  Description of Artificial Sequence: Synthetic oligonucleotide
  Sense strand starting at position 2169 of SEQ ID NO: 585899
ggauuaucuucuucgugag

SEQ ID NO: 676447 - RNA, 19 nt, Artificial Sequence
  Description of Artificial Sequence: Synthetic oligonucleotide
  Antisense strand to SEQ ID NO: 676446
cucacgaagaagauaaucc

SEQ ID NO: 676448 - RNA, 19 nt, Artificial Sequence
  Description of Artificial Sequence: Synthetic oligonucleotide
  Sense strand starting at position 2171 of SEQ ID NO: 585899
auuaucuucuucgugagga

SEQ ID NO: 676449 - RNA, 19 nt, Artificial Sequence
  Description of Artificial Sequence: Synthetic oligonucleotide
  Antisense strand to SEQ ID NO: 676448
uccucacgaagaagauaau

SEQ ID NO: 676450 - RNA, 19 nt, Artificial Sequence
  Description of Artificial Sequence: Synthetic oligonucleotide
  Sense strand starting at position 2173 of SEQ ID NO: 585899
uaucuucuucgugaggaau

SEQ ID NO: 676451 - RNA, 19 nt, Artificial Sequence
  Description of Artificial Sequence: Synthetic oligonucleotide
  Antisense strand to SEQ ID NO: 676450
auuccucacgaagaagaua

SEQ ID NO: 676452 - RNA, 19 nt, Artificial Sequence
  Description of Artificial Sequence: Synthetic oligonucleotide
  Sense strand starting at position 2176 of SEQ ID NO: 585899
cuucuucgugaggaaugaa

SEQ ID NO: 676453 - RNA, 19 nt, Artificial Sequence
  Description of Artificial Sequence: Synthetic oligonucleotide
  Antisense strand to SEQ ID NO: 676452
uucauuccucacgaagaag

SEQ ID NO: 676454 - RNA, 19 nt, Artificial Sequence
  Description of Artificial Sequence: Synthetic oligonucleotide
  Sense strand starting at position 2179 of SEQ ID NO: 585899
cuucgugaggaaugaaguu

SEQ ID NO: 676455 - RNA, 19 nt, Artificial Sequence
  Description of Artificial Sequence: Synthetic oligonucleotide
  Antisense strand to SEQ ID NO: 676454
aacuucauuccucacgaag

SEQ ID NO: 676456 - RNA, 19 nt, Artificial Sequence
  Description of Artificial Sequence: Synthetic oligonucleotide
  Sense strand starting at position 2188 of SEQ ID NO: 585899
gaaugaaguuccuuagucu

SEQ ID NO: 676457 - RNA, 19 nt, Artificial Sequence
  Description of Artificial Sequence: Synthetic oligonucleotide
  Antisense strand to SEQ ID NO: 676456
agacuaaggaacuucauuc

SEQ ID NO: 676458 - RNA, 19 nt, Artificial Sequence
  Description of Artificial Sequence: Synthetic oligonucleotide
  Sense strand starting at position 2191 of SEQ ID NO: 585899
ugaaguuccuuagucuaau

SEQ ID NO: 676459 - RNA, 19 nt, Artificial Sequence
  Description of Artificial Sequence: Synthetic oligonucleotide
  Antisense strand to SEQ ID NO: 676458
auuagacuaaggaacuuca

SEQ ID NO: 676460 - RNA, 19 nt, Artificial Sequence
  Description of Artificial Sequence: Synthetic oligonucleotide
  Sense strand starting at position 2194 of SEQ ID NO: 585899
aguuccuuagucuaauauu

SEQ ID NO: 676461 - RNA, 19 nt, Artificial Sequence
  Description of Artificial Sequence: Synthetic oligonucleotide
  Antisense strand to SEQ ID NO: 676460
aauauuagacuaaggaacu

SEQ ID NO: 676462 - RNA, 19 nt, Artificial Sequence
  Description of Artificial Sequence: Synthetic oligonucleotide
  Sense strand starting at position 2318 of SEQ ID NO: 585899
augacacucugguuauuac

SEQ ID NO: 676463 - RNA, 19 nt, Artificial Sequence
  Description of Artificial Sequence: Synthetic oligonucleotide
  Antisense strand to SEQ ID NO: 676462
guaauaaccagagugucau

SEQ ID NO: 676464 - RNA, 19 nt, Artificial Sequence
  Description of Artificial Sequence: Synthetic oligonucleotide
  Sense strand starting at position 2431 of SEQ ID NO: 585899
ugagcaacgguucaucaga

SEQ ID NO: 676465 - RNA, 19 nt, Artificial Sequence
  Description of Artificial Sequence: Synthetic oligonucleotide
  Antisense strand to SEQ ID NO: 676464
ucugaugaaccguugcuca

SEQ ID NO: 676466 - RNA, 19 nt, Artificial Sequence
  Description of Artificial Sequence: Synthetic oligonucleotide
  Sense strand starting at position 2556 of SEQ ID NO: 585899
cuaugcuaacaguguauau

SEQ ID NO: 676467 - RNA, 19 nt, Artificial Sequence
  Description of Artificial Sequence: Synthetic oligonucleotide
  Antisense strand to SEQ ID NO: 676466
auauacacuguuagcauag

SEQ ID NO: 676468 - RNA, 19 nt, Artificial Sequence
  Description of Artificial Sequence: Synthetic oligonucleotide
  Sense strand starting at position 2569 of SEQ ID NO: 585899
guauauaggaaaugguuua

SEQ ID NO: 676469 - RNA, 19 nt, Artificial Sequence
  Description of Artificial Sequence: Synthetic oligonucleotide
  Antisense strand to SEQ ID NO: 676468
uaaaccauuuccuauauac

SEQ ID NO: 676470 - RNA, 19 nt, Artificial Sequence
  Description of Artificial Sequence: Synthetic oligonucleotide
  Sense strand starting at position 2587 of SEQ ID NO: 585899
augauagcuguccaacuca

SEQ ID NO: 676471 - RNA, 19 nt, Artificial Sequence
  Description of Artificial Sequence: Synthetic oligonucleotide
  Antisense strand to SEQ ID NO: 676470
ugaguuggacagcuaucau

SEQ ID NO: 676472 - RNA, 19 nt, Artificial Sequence
  Description of Artificial Sequence: Synthetic oligonucleotide
  Sense strand starting at position 2661 of SEQ ID NO: 585899
caaaguuaaggauguaucu

SEQ ID NO: 676473 - RNA, 19 nt, Artificial Sequence
  Description of Artificial Sequence: Synthetic oligonucleotide
  Antisense strand to SEQ ID NO: 676472
agauacauccuuaacuuug

SEQ ID NO: 676474 - RNA, 19 nt, Artificial Sequence
  Description of Artificial Sequence: Synthetic oligonucleotide
  Sense strand starting at position 2762 of SEQ ID NO: 585899
uuucccagacaaugagauu

SEQ ID NO: 676475 - RNA, 19 nt, Artificial Sequence
  Description of Artificial Sequence: Synthetic oligonucleotide
  Antisense strand to SEQ ID NO: 676474
aaucucauugucugggaaa

SEQ ID NO: 676476 - RNA, 19 nt, Artificial Sequence
  Description of Artificial Sequence: Synthetic oligonucleotide
  Sense strand starting at position 2775 of SEQ ID NO: 585899
gagauuuaguauuagcauu

SEQ ID NO: 676477 - RNA, 19 nt, Artificial Sequence
  Description of Artificial Sequence: Synthetic oligonucleotide
  Antisense strand to SEQ ID NO: 676476
aaugcuaauacuaaaucuc

SEQ ID NO: 676478 - RNA, 19 nt, Artificial Sequence
  Description of Artificial Sequence: Synthetic oligonucleotide
  Sense strand starting at position 3116 of SEQ ID NO: 585899
uaagaauuauaggauugga

SEQ ID NO: 676479 - RNA, 19 nt, Artificial Sequence
  Description of Artificial Sequence: Synthetic oligonucleotide
  Antisense strand to SEQ ID NO: 676478
uccaauccuauaauucuua

SEQ ID NO: 676480 - RNA, 19 nt, Artificial Sequence
  Description of Artificial Sequence: Synthetic oligonucleotide
  Sense strand starting at position 3314 of SEQ ID NO: 585899
gagggauguacugaggcuu

SEQ ID NO: 676481 - RNA, 19 nt, Artificial Sequence
  Description of Artificial Sequence: Synthetic oligonucleotide
  Antisense strand to SEQ ID NO: 676480
aagccucaguacaucccuc

SEQ ID NO: 676482 - RNA, 19 nt, Artificial Sequence
  Description of Artificial Sequence: Synthetic oligonucleotide
  Sense strand starting at position 3399 of SEQ ID NO: 585899
aagaguugaugucuugaaa

SEQ ID NO: 676483 - RNA, 19 nt, Artificial Sequence
  Description of Artificial Sequence: Synthetic oligonucleotide
  Antisense strand to SEQ ID NO: 676482
uuucaagacaucaacucuu

SEQ ID NO: 676484 - RNA, 19 nt, Artificial Sequence
  Description of Artificial Sequence: Synthetic oligonucleotide
  Sense strand starting at position 3482 of SEQ ID NO: 585899
ucuuaaagguauccucuga

SEQ ID NO: 676485 - RNA, 19 nt, Artificial Sequence
  Description of Artificial Sequence: Synthetic oligonucleotide
  Antisense strand to SEQ ID NO: 676484
ucagaggauaccuuuaaga

SEQ ID NO: 676486 - RNA, 19 nt, Artificial Sequence
  Description of Artificial Sequence: Synthetic oligonucleotide
  Sense strand starting at position 3486 of SEQ ID NO: 585899
aaagguauccucugaauug

SEQ ID NO: 676487 - RNA, 19 nt, Artificial Sequence
  Description of Artificial Sequence: Synthetic oligonucleotide
  Antisense strand to SEQ ID NO: 676486
caauucagaggauaccuuu

SEQ ID NO: 676488 - RNA, 19 nt, Artificial Sequence
  Description of Artificial Sequence: Synthetic oligonucleotide
  Sense strand starting at position 3498 of SEQ ID NO: 585899
ugaauugucuuucccuaug

SEQ ID NO: 676489 - RNA, 19 nt, Artificial Sequence
  Description of Artificial Sequence: Synthetic oligonucleotide
  Antisense strand to SEQ ID NO: 676488
cauagggaaagacaauuca

SEQ ID NO: 676490 - RNA, 19 nt, Artificial Sequence
  Description of Artificial Sequence: Synthetic oligonucleotide
  Sense strand starting at position 3501 of SEQ ID NO: 585899
auugucuuucccuauguga

SEQ ID NO: 676491 - RNA, 19 nt, Artificial Sequence
  Description of Artificial Sequence: Synthetic oligonucleotide
  Antisense strand to SEQ ID NO: 676490
ucacauagggaaagacaau

SEQ ID NO: 676492 - RNA, 19 nt, Artificial Sequence
  Description of Artificial Sequence: Synthetic oligonucleotide
  Sense strand starting at position 3570 of SEQ ID NO: 585899
ugcacauggcuuuagagau

SEQ ID NO: 676493 - RNA, 19 nt, Artificial Sequence
  Description of Artificial Sequence: Synthetic oligonucleotide
  Antisense strand to SEQ ID NO: 676492
aucucuaaagccaugugca

SEQ ID NO: 676494 - RNA, 19 nt, Artificial Sequence
  Description of Artificial Sequence: Synthetic oligonucleotide
  Sense strand starting at position 3576 of SEQ ID NO: 585899
uggcuuuagagauguucca

SEQ ID NO: 676495 - RNA, 19 nt, Artificial Sequence
  Description of Artificial Sequence: Synthetic oligonucleotide
  Antisense strand to SEQ ID NO: 676494
uggaacaucucuaaagcca

SEQ ID NO: 676496 - RNA, 19 nt, Artificial Sequence
  Description of Artificial Sequence: Synthetic oligonucleotide
  Sense strand starting at position 175 of SEQ ID NO: 585900
ugagguaaauuauuacaug

SEQ ID NO: 676497 - RNA, 19 nt, Artificial Sequence
  Description of Artificial Sequence: Synthetic oligonucleotide
  Antisense strand to SEQ ID NO: 676496
cauguaauaauuuaccuca

SEQ ID NO: 676498 - RNA, 19 nt, Artificial Sequence
  Description of Artificial Sequence: Synthetic oligonucleotide
  Sense strand starting at position 248 of SEQ ID NO: 585900
guacuccacuguuuaauaa

SEQ ID NO: 676499 - RNA, 19 nt, Artificial Sequence
  Description of Artificial Sequence: Synthetic oligonucleotide
  Antisense strand to SEQ ID NO: 676498
uuauuaaacaguggaguac

SEQ ID NO: 676500 - RNA, 19 nt, Artificial Sequence
  Description of Artificial Sequence: Synthetic oligonucleotide
  Sense strand starting at position 396 of SEQ ID NO: 585900
aagaaaccguaaguauaau

SEQ ID NO: 676501 - RNA, 19 nt, Artificial Sequence
  Description of Artificial Sequence: Synthetic oligonucleotide
  Antisense strand to SEQ ID NO: 676500
auuauacuuacgguuucuu

SEQ ID NO: 676502 - RNA, 19 nt, Artificial Sequence
  Description of Artificial Sequence: Synthetic oligonucleotide
  Sense strand starting at position 589 of SEQ ID NO: 585900
augauauugacaggaguuc

SEQ ID NO: 676503 - RNA, 19 nt, Artificial Sequence
  Description of Artificial Sequence: Synthetic oligonucleotide
  Antisense strand to SEQ ID NO: 676502
gaacuccugucaauaucau

SEQ ID NO: 676504 - RNA, 19 nt, Artificial Sequence
  Description of Artificial Sequence: Synthetic oligonucleotide
  Sense strand starting at position 709 of SEQ ID NO: 585900
augcaaacacuggguuaaa

SEQ ID NO: 676505 - RNA, 19 nt, Artificial Sequence
  Description of Artificial Sequence: Synthetic oligonucleotide
  Antisense strand to SEQ ID NO: 676504
uuuaacccaguguuugcau

SEQ ID NO: 676506 - RNA, 19 nt, Artificial Sequence
  Description of Artificial Sequence: Synthetic oligonucleotide
  Sense strand starting at position 966 of SEQ ID NO: 585900
ggcuuacuccucuagacaa

SEQ ID NO: 676507 - RNA, 19 nt, Artificial Sequence
  Description of Artificial Sequence: Synthetic oligonucleotide
  Antisense strand to SEQ ID NO: 676506
uugucuagaggaguaagcc

SEQ ID NO: 676508 - RNA, 19 nt, Artificial Sequence
  Description of Artificial Sequence: Synthetic oligonucleotide
  Sense strand starting at position 1024 of SEQ ID NO: 585900
ucgguauucccuuugcagu

SEQ ID NO: 676509 - RNA, 19 nt, Artificial Sequence
  Description of Artificial Sequence: Synthetic oligonucleotide
  Antisense strand to SEQ ID NO: 676508
acugcaaagggaauaccga

SEQ ID NO: 676510 - RNA, 19 nt, Artificial Sequence
  Description of Artificial Sequence: Synthetic oligonucleotide
  Sense strand starting at position 1040 of SEQ ID NO: 585900
agugcucagagugaguaau

SEQ ID NO: 676511 - RNA, 19 nt, Artificial Sequence
  Description of Artificial Sequence: Synthetic oligonucleotide
  Antisense strand to SEQ ID NO: 676510
auuacucacucugagcacu

SEQ ID NO: 676512 - RNA, 19 nt, Artificial Sequence
  Description of Artificial Sequence: Synthetic oligonucleotide
  Sense strand starting at position 1051 of SEQ ID NO: 585900
ugaguaauucgugcggcca

SEQ ID NO: 676513 - RNA, 19 nt, Artificial Sequence
  Description of Artificial Sequence: Synthetic oligonucleotide
  Antisense strand to SEQ ID NO: 676512
uggccgcacgaauuacuca

SEQ ID NO: 676514 - RNA, 19 nt, Artificial Sequence
  Description of Artificial Sequence: Synthetic oligonucleotide
  Sense strand starting at position 1097 of SEQ ID NO: 585900
gaacaaagaucguuggaac

SEQ ID NO: 676515 - RNA, 19 nt, Artificial Sequence
  Description of Artificial Sequence: Synthetic oligonucleotide
  Antisense strand to SEQ ID NO: 676514
guuccaacgaucuuuguuc

SEQ ID NO: 676516 - RNA, 19 nt, Artificial Sequence
  Description of Artificial Sequence: Synthetic oligonucleotide
  Sense strand starting at position 1098 of SEQ ID NO: 585900
aacaaagaucguuggaacu

SEQ ID NO: 676517 - RNA, 19 nt, Artificial Sequence
  Description of Artificial Sequence: Synthetic oligonucleotide
  Antisense strand to SEQ ID NO: 676516
aguuccaacgaucuuuguu

SEQ ID NO: 676518 - RNA, 19 nt, Artificial Sequence
  Description of Artificial Sequence: Synthetic oligonucleotide
  Sense strand starting at position 1148 of SEQ ID NO: 585900
aucccuugaaaucguggaa

SEQ ID NO: 676519 - RNA, 19 nt, Artificial Sequence
  Description of Artificial Sequence: Synthetic oligonucleotide
  Antisense strand to SEQ ID NO: 676518
uuccacgauuucaagggau

SEQ ID NO: 676520 - RNA, 19 nt, Artificial Sequence
  Description of Artificial Sequence: Synthetic oligonucleotide
  Sense strand starting at position 1151 of SEQ ID NO: 585900
ccuugaaaucguggaagua

SEQ ID NO: 676521 - RNA, 19 nt, Artificial Sequence
  Description of Artificial Sequence: Synthetic oligonucleotide
  Antisense strand to SEQ ID NO: 676520
uacuuccacgauuucaagg

SEQ ID NO: 676522 - RNA, 19 nt, Artificial Sequence
  Description of Artificial Sequence: Synthetic oligonucleotide
  Sense strand starting at position 1152 of SEQ ID NO: 585900
cuugaaaucguggaaguau

SEQ ID NO: 676523 - RNA, 19 nt, Artificial Sequence
  Description of Artificial Sequence: Synthetic oligonucleotide
  Antisense strand to SEQ ID NO: 676522
auacuuccacgauuucaag

SEQ ID NO: 676524 - RNA, 19 nt, Artificial Sequence
  Description of Artificial Sequence: Synthetic oligonucleotide
  Sense strand starting at position 1514 of SEQ ID NO: 585900
cggagaucgagccauuaca

SEQ ID NO: 676525 - RNA, 19 nt, Artificial Sequence
  Description of Artificial Sequence: Synthetic oligonucleotide
  Antisense strand to SEQ ID NO: 676524
uguaauggcucgaucuccg

SEQ ID NO: 676526 - RNA, 19 nt, Artificial Sequence
  Description of Artificial Sequence: Synthetic oligonucleotide
  Sense strand starting at position 1738 of SEQ ID NO: 585900
gaugguuuauaggcuuaaa

SEQ ID NO: 676527 - RNA, 19 nt, Artificial Sequence
  Description of Artificial Sequence: Synthetic oligonucleotide
  Antisense strand to SEQ ID NO: 676526
uuuaagccuauaaaccauc

SEQ ID NO: 676528 - RNA, 19 nt, Artificial Sequence
  Description of Artificial Sequence: Synthetic oligonucleotide
  Sense strand starting at position 1790 of SEQ ID NO: 585900
aucaguuuccuccagaugu

SEQ ID NO: 676529 - RNA, 19 nt, Artificial Sequence
  Description of Artificial Sequence: Synthetic oligonucleotide
  Antisense strand to SEQ ID NO: 676528
acaucuggaggaaacugau

SEQ ID NO: 676530 - RNA, 19 nt, Artificial Sequence
  Description of Artificial Sequence: Synthetic oligonucleotide
  Sense strand starting at position 1905 of SEQ ID NO: 585900
ugguccucgcuggagaaau

SEQ ID NO: 676531 - RNA, 19 nt, Artificial Sequence
  Description of Artificial Sequence: Synthetic oligonucleotide
  Antisense strand to SEQ ID NO: 676530
auuucuccagcgaggacca

SEQ ID NO: 676532 - RNA, 19 nt, Artificial Sequence
  Description of Artificial Sequence: Synthetic oligonucleotide
  Sense strand starting at position 2031 of SEQ ID NO: 585900
ggcgucguucccagggaua

SEQ ID NO: 676533 - RNA, 19 nt, Artificial Sequence
  Description of Artificial Sequence: Synthetic oligonucleotide
  Antisense strand to SEQ ID NO: 676532
uaucccugggaacgacgcc

SEQ ID NO: 676534 - RNA, 19 nt, Artificial Sequence
  Description of Artificial Sequence: Synthetic oligonucleotide
  Sense strand starting at position 2138 of SEQ ID NO: 585900
cgaggucucgccucuggua

SEQ ID NO: 676535 - RNA, 19 nt, Artificial Sequence
  Description of Artificial Sequence: Synthetic oligonucleotide
  Antisense strand to SEQ ID NO: 676534
uaccagaggcgagaccucg

SEQ ID NO: 676536 - RNA, 19 nt, Artificial Sequence
  Description of Artificial Sequence: Synthetic oligonucleotide
  Sense strand starting at position 2462 of SEQ ID NO: 585900
gccucaguugaagagugaa

SEQ ID NO: 676537 - RNA, 19 nt, Artificial Sequence
  Description of Artificial Sequence: Synthetic oligonucleotide
  Antisense strand to SEQ ID NO: 676536
uucacucuucaacugaggc

SEQ ID NO: 676538 - RNA, 19 nt, Artificial Sequence
  Description of Artificial Sequence: Synthetic oligonucleotide
  Sense strand starting at position 2773 of SEQ ID NO: 585900
ggccucagaguguaggaua

SEQ ID NO: 676539 - RNA, 19 nt, Artificial Sequence
  Description of Artificial Sequence: Synthetic oligonucleotide
  Antisense strand to SEQ ID NO: 676538
uauccuacacucugaggcc

SEQ ID NO: 676540 - RNA, 19 nt, Artificial Sequence
  Description of Artificial Sequence: Synthetic oligonucleotide
  Sense strand starting at position 2784 of SEQ ID NO: 585900
guaggauauacuggcacuu

SEQ ID NO: 676541 - RNA, 19 nt, Artificial Sequence
  Description of Artificial Sequence: Synthetic oligonucleotide
  Antisense strand to SEQ ID NO: 676540
aagugccaguauauccuac

SEQ ID NO: 676542 - RNA, 19 nt, Artificial Sequence
  Description of Artificial Sequence: Synthetic oligonucleotide
  Sense strand starting at position 2841 of SEQ ID NO: 585900
agaaguaaauuggucacau

SEQ ID NO: 676543 - RNA, 19 nt, Artificial Sequence
  Description of Artificial Sequence: Synthetic oligonucleotide
  Antisense strand to SEQ ID NO: 676542
augugaccaauuuacuucu

SEQ ID NO: 676544 - RNA, 19 nt, Artificial Sequence
  Description of Artificial Sequence: Synthetic oligonucleotide
  Sense strand starting at position 2842 of SEQ ID NO: 585900
gaaguaaauuggucacauc

SEQ ID NO: 676545 - RNA, 19 nt, Artificial Sequence
  Description of Artificial Sequence: Synthetic oligonucleotide
  Antisense strand to SEQ ID NO: 676544
gaugugaccaauuuacuuc

SEQ ID NO: 676546 - RNA, 19 nt, Artificial Sequence
  Description of Artificial Sequence: Synthetic oligonucleotide
  Sense strand starting at position 2941 of SEQ ID NO: 585900
acaccaugugaugguauca

SEQ ID NO: 676547 - RNA, 19 nt, Artificial Sequence
  Description of Artificial Sequence: Synthetic oligonucleotide
  Antisense strand to SEQ ID NO: 676546
ugauaccaucacauggugu

SEQ ID NO: 676548 - RNA, 19 nt, Artificial Sequence
  Description of Artificial Sequence: Synthetic oligonucleotide
  Sense strand starting at position 3015 of SEQ ID NO: 585900
guuuccagucuagaucaau

SEQ ID NO: 676549 - RNA, 19 nt, Artificial Sequence
  Description of Artificial Sequence: Synthetic oligonucleotide
  Antisense strand to SEQ ID NO: 676548
auugaucuagacuggaaac

SEQ ID NO: 676550 - RNA, 19 nt, Artificial Sequence
  Description of Artificial Sequence: Synthetic oligonucleotide
  Sense strand starting at position 3043 of SEQ ID NO: 585900
caugguuauguccaggcua

SEQ ID NO: 676551 - RNA, 19 nt, Artificial Sequence
  Description of Artificial Sequence: Synthetic oligonucleotide
  Antisense strand to SEQ ID NO: 676550
uagccuggacauaaccaug

SEQ ID NO: 676552 - RNA, 19 nt, Artificial Sequence
  Description of Artificial Sequence: Synthetic oligonucleotide
  Sense strand starting at position 3076 of SEQ ID NO: 585900
acugaugagugguucaaug

SEQ ID NO: 676553 - RNA, 19 nt, Artificial Sequence
  Description of Artificial Sequence: Synthetic oligonucleotide
  Antisense strand to SEQ ID NO: 676552
cauugaaccacucaucagu

SEQ ID NO: 676554 - RNA, 19 nt, Artificial Sequence
  Description of Artificial Sequence: Synthetic oligonucleotide
  Sense strand starting at position 3078 of SEQ ID NO: 585900
ugaugagugguucaauguc

SEQ ID NO: 676555 - RNA, 19 nt, Artificial Sequence
  Description of Artificial Sequence: Synthetic oligonucleotide
  Antisense strand to SEQ ID NO: 676554
gacauugaaccacucauca

SEQ ID NO: 676556 - RNA, 19 nt, Artificial Sequence
  Description of Artificial Sequence: Synthetic oligonucleotide
  Sense strand starting at position 3244 of SEQ ID NO: 585900
auguaacuccaugaaaugu

SEQ ID NO: 676557 - RNA, 19 nt, Artificial Sequence
  Description of Artificial Sequence: Synthetic oligonucleotide
  Antisense strand to SEQ ID NO: 676556
acauuucauggaguuacau

SEQ ID NO: 676558 - RNA, 19 nt, Artificial Sequence
  Description of Artificial Sequence: Synthetic oligonucleotide
  Sense strand starting at position 3390 of SEQ ID NO: 585900
uagaguuaccagcaaugug

SEQ ID NO: 676559 - RNA, 19 nt, Artificial Sequence
  Description of Artificial Sequence: Synthetic oligonucleotide
  Antisense strand to SEQ ID NO: 676558
cacauugcugguaacucua

SEQ ID NO: 676560 - RNA, 19 nt, Artificial Sequence
  Description of Artificial Sequence: Synthetic oligonucleotide
  Sense strand starting at position 3423 of SEQ ID NO: 585900
aaauuaacagaugguugua

SEQ ID NO: 676561 - RNA, 19 nt, Artificial Sequence
  Description of Artificial Sequence: Synthetic oligonucleotide
  Antisense strand to SEQ ID NO: 676560
uacaaccaucuguuaauuu

SEQ ID NO: 676562 - RNA, 19 nt, Artificial Sequence
  Description of Artificial Sequence: Synthetic oligonucleotide
  Sense strand starting at position 3425 of SEQ ID NO: 585900
auuaacagaugguuguauu

SEQ ID NO: 676563 - RNA, 19 nt, Artificial Sequence
  Description of Artificial Sequence: Synthetic oligonucleotide
  Antisense strand to SEQ ID NO: 676562
aauacaaccaucuguuaau

SEQ ID NO: 676564 - RNA, 19 nt, Artificial Sequence
  Description of Artificial Sequence: Synthetic oligonucleotide
  Sense strand starting at position 3464 of SEQ ID NO: 585900
ugagauagccauuagugau

SEQ ID NO: 676565 - RNA, 19 nt, Artificial Sequence
  Description of Artificial Sequence: Synthetic oligonucleotide
  Antisense strand to SEQ ID NO: 676564
aucacuaauggcuaucuca

SEQ ID NO: 676566 - RNA, 19 nt, Artificial Sequence
  Description of Artificial Sequence: Synthetic oligonucleotide
  Sense strand starting at position 3679 of SEQ ID NO: 585900
ggaauuagauccuauuuau

SEQ ID NO: 676567 - RNA, 19 nt, Artificial Sequence
  Description of Artificial Sequence: Synthetic oligonucleotide
  Antisense strand to SEQ ID NO: 676566
auaaauaggaucuaauucc

SEQ ID NO: 676568 - RNA, 19 nt, Artificial Sequence
  Description of Artificial Sequence: Synthetic oligonucleotide
  Sense strand starting at position 3789 of SEQ ID NO: 585900
cauugaaaccacugagagu

SEQ ID NO: 676569 - RNA, 19 nt, Artificial Sequence
  Description of Artificial Sequence: Synthetic oligonucleotide
  Antisense strand to SEQ ID NO: 676568
acucucagugguuucaaug

SEQ ID NO: 676570 - RNA, 19 nt, Artificial Sequence
  Description of Artificial Sequence: Synthetic oligonucleotide
  Sense strand starting at position 3842 of SEQ ID NO: 585900
gacuguccuggguguauuu

SEQ ID NO: 676571 - RNA, 19 nt, Artificial Sequence
  Description of Artificial Sequence: Synthetic oligonucleotide
  Antisense strand to SEQ ID NO: 676570
aaauacacccaggacaguc

SEQ ID NO: 676572 - RNA, 19 nt, Artificial Sequence
  Description of Artificial Sequence: Synthetic oligonucleotide
  Sense strand starting at position 3878 of SEQ ID NO: 585900
ccugucucacacuacagau

SEQ ID NO: 676573 - RNA, 19 nt, Artificial Sequence
  Description of Artificial Sequence: Synthetic oligonucleotide
  Antisense strand to SEQ ID NO: 676572
aucuguagugugagacagg

SEQ ID NO: 676574 - RNA, 19 nt, Artificial Sequence
  Description of Artificial Sequence: Synthetic oligonucleotide
  Sense strand starting at position 3953 of SEQ ID NO: 585900
agccuucuacgggagaaua

SEQ ID NO: 676575 - RNA, 19 nt, Artificial Sequence
  Description of Artificial Sequence: Synthetic oligonucleotide
  Antisense strand to SEQ ID NO: 676574
uauucucccguagaaggcu

SEQ ID NO: 676576 - RNA, 19 nt, Artificial Sequence
  Description of Artificial Sequence: Synthetic oligonucleotide
  Sense strand starting at position 152 of SEQ ID NO: 585901
gaacauguggagugauuga

SEQ ID NO: 676577 - RNA, 19 nt, Artificial Sequence
  Description of Artificial Sequence: Synthetic oligonucleotide
  Antisense strand to SEQ ID NO: 676576
ucaaucacuccacauguuc

SEQ ID NO: 676578 - RNA, 19 nt, Artificial Sequence
  Description of Artificial Sequence: Synthetic oligonucleotide
  Sense strand starting at position 284 of SEQ ID NO: 585901
gaacgaaaguuucucugag

SEQ ID NO: 676579 - RNA, 19 nt, Artificial Sequence
  Description of Artificial Sequence: Synthetic oligonucleotide
  Antisense strand to SEQ ID NO: 676578
cucagagaaacuuucguuc

SEQ ID NO: 676580 - RNA, 19 nt, Artificial Sequence
  Description of Artificial Sequence: Synthetic oligonucleotide
  Sense strand starting at position 285 of SEQ ID NO: 585901
aacgaaaguuucucugaga

SEQ ID NO: 676581 - RNA, 19 nt, Artificial Sequence
  Description of Artificial Sequence: Synthetic oligonucleotide
  Antisense strand to SEQ ID NO: 676580
ucucagagaaacuuucguu

SEQ ID NO: 676582 - RNA, 19 nt, Artificial Sequence
  Description of Artificial Sequence: Synthetic oligonucleotide
  Sense strand starting at position 286 of SEQ ID NO: 585901
acgaaaguuucucugagag

SEQ ID NO: 676583 - RNA, 19 nt, Artificial Sequence
  Description of Artificial Sequence: Synthetic oligonucleotide
  Antisense strand to SEQ ID NO: 676582
cucucagagaaacuuucgu

SEQ ID NO: 676584 - RNA, 19 nt, Artificial Sequence
  Description of Artificial Sequence: Synthetic oligonucleotide
  Sense strand starting at position 542 of SEQ ID NO: 585901
aaaguucucugagcugaua

SEQ ID NO: 676585 - RNA, 19 nt, Artificial Sequence
  Description of Artificial Sequence: Synthetic oligonucleotide
  Antisense strand to SEQ ID NO: 676584
uaucagcucagagaacuuu

SEQ ID NO: 676586 - RNA, 19 nt, Artificial Sequence
  Description of Artificial Sequence: Synthetic oligonucleotide
  Sense strand starting at position 622 of SEQ ID NO: 585901
auagaacauucuguagcua

SEQ ID NO: 676587 - RNA, 19 nt, Artificial Sequence
  Description of Artificial Sequence: Synthetic oligonucleotide
  Antisense strand to SEQ ID NO: 676586
uagcuacagaauguucuau

SEQ ID NO: 676588 - RNA, 19 nt, Artificial Sequence
  Description of Artificial Sequence: Synthetic oligonucleotide
  Sense strand starting at position 640 of SEQ ID NO: 585901
auuauaaaugcgcaaagaa

SEQ ID NO: 676589 - RNA, 19 nt, Artificial Sequence
  Description of Artificial Sequence: Synthetic oligonucleotide
  Antisense strand to SEQ ID NO: 676588
uucuuugcgcauuuauaau

SEQ ID NO: 676590 - RNA, 19 nt, Artificial Sequence
  Description of Artificial Sequence: Synthetic oligonucleotide
  Sense strand starting at position 793 of SEQ ID NO: 585901
agcaaugguuaucuuuaga

SEQ ID NO: 676591 - RNA, 19 nt, Artificial Sequence
  Description of Artificial Sequence: Synthetic oligonucleotide
  Antisense strand to SEQ ID NO: 676590
ucuaaagauaaccauugcu

SEQ ID NO: 676592 - RNA, 19 nt, Artificial Sequence
  Description of Artificial Sequence: Synthetic oligonucleotide
  Sense strand starting at position 916 of SEQ ID NO: 585901
ccacgaguuccucacuuau

SEQ ID NO: 676593 - RNA, 19 nt, Artificial Sequence
  Description of Artificial Sequence: Synthetic oligonucleotide
  Antisense strand to SEQ ID NO: 676592
auaagugaggaacucgugg

SEQ ID NO: 676594 - RNA, 19 nt, Artificial Sequence
  Description of Artificial Sequence: Synthetic oligonucleotide
  Sense strand starting at position 1178 of SEQ ID NO: 585901
ccaaguuagauuuggcguu

SEQ ID NO: 676595 - RNA, 19 nt, Artificial Sequence
  Description of Artificial Sequence: Synthetic oligonucleotide
  Antisense strand to SEQ ID NO: 676594
aacgccaaaucuaacuugg

SEQ ID NO: 676596 - RNA, 19 nt, Artificial Sequence
  Description of Artificial Sequence: Synthetic oligonucleotide
  Sense strand starting at position 1277 of SEQ ID NO: 585901
aagaguaaaucuuuagguu

SEQ ID NO: 676597 - RNA, 19 nt, Artificial Sequence
  Description of Artificial Sequence: Synthetic oligonucleotide
  Antisense strand to SEQ ID NO: 676596
aaccuaaagauuuacucuu

SEQ ID NO: 676598 - RNA, 19 nt, Artificial Sequence
  Description of Artificial Sequence: Synthetic oligonucleotide
  Sense strand starting at position 1331 of SEQ ID NO: 585901
ggcuuccuuccuuauugaa

SEQ ID NO: 676599 - RNA, 19 nt, Artificial Sequence
  Description of Artificial Sequence: Synthetic oligonucleotide
  Antisense strand to SEQ ID NO: 676598
uucaauaaggaaggaagcc

SEQ ID NO: 676600 - RNA, 19 nt, Artificial Sequence
  Description of Artificial Sequence: Synthetic oligonucleotide
  Sense strand starting at position 1383 of SEQ ID NO: 585901
agauuaggauucguuuaga

SEQ ID NO: 676601 - RNA, 19 nt, Artificial Sequence
  Description of Artificial Sequence: Synthetic oligonucleotide
  Antisense strand to SEQ ID NO: 676600
ucuaaacgaauccuaaucu

SEQ ID NO: 676602 - RNA, 19 nt, Artificial Sequence
  Description of Artificial Sequence: Synthetic oligonucleotide
  Sense strand starting at position 1553 of SEQ ID NO: 585901
ggacacccauucuuagauu

SEQ ID NO: 676603 - RNA, 19 nt, Artificial Sequence
  Description of Artificial Sequence: Synthetic oligonucleotide
  Antisense strand to SEQ ID NO: 676602
aaucuaagaaugggugucc

SEQ ID NO: 676604 - RNA, 19 nt, Artificial Sequence
  Description of Artificial Sequence: Synthetic oligonucleotide
  Sense strand starting at position 1564 of SEQ ID NO: 585901
cuuagauugcacuacaaug

SEQ ID NO: 676605 - RNA, 19 nt, Artificial Sequence
  Description of Artificial Sequence: Synthetic oligonucleotide
  Antisense strand to SEQ ID NO: 676604
cauuguagugcaaucuaag

SEQ ID NO: 676606 - RNA, 19 nt, Artificial Sequence
  Description of Artificial Sequence: Synthetic oligonucleotide
  Sense strand starting at position 1686 of SEQ ID NO: 585901
ccauucucucuaugaugga

SEQ ID NO: 676607 - RNA, 19 nt, Artificial Sequence
  Description of Artificial Sequence: Synthetic oligonucleotide
  Antisense strand to SEQ ID NO: 676606
uccaucauagagagaaugg

SEQ ID NO: 676608 - RNA, 19 nt, Artificial Sequence
  Description of Artificial Sequence: Synthetic oligonucleotide
  Sense strand starting at position 1742 of SEQ ID NO: 585901
gacuaagugguccgggaga

SEQ ID NO: 676609 - RNA, 19 nt, Artificial Sequence
  Description of Artificial Sequence: Synthetic oligonucleotide
  Antisense strand to SEQ ID NO: 676608
ucucccggaccacuuaguc

SEQ ID NO: 676610 - RNA, 19 nt, Artificial Sequence
  Description of Artificial Sequence: Synthetic oligonucleotide
  Sense strand starting at position 1744 of SEQ ID NO: 585901
cuaagugguccgggagaag

SEQ ID NO: 676611 - RNA, 19 nt, Artificial Sequence
  Description of Artificial Sequence: Synthetic oligonucleotide
  Antisense strand to SEQ ID NO: 676610
cuucucccggaccacuuag

SEQ ID NO: 676612 - RNA, 19 nt, Artificial Sequence
  Description of Artificial Sequence: Synthetic oligonucleotide
  Sense strand starting at position 2216 of SEQ ID NO: 585901
gagguucuugccuagggaa

SEQ ID NO: 676613 - RNA, 19 nt, Artificial Sequence
  Description of Artificial Sequence: Synthetic oligonucleotide
  Antisense strand to SEQ ID NO: 676612
uucccuaggcaagaaccuc

SEQ ID NO: 676614 - RNA, 19 nt, Artificial Sequence
  Description of Artificial Sequence: Synthetic oligonucleotide
  Sense strand starting at position 2218 of SEQ ID NO: 585901
gguucuugccuagggaaga

SEQ ID NO: 676615 - RNA, 19 nt, Artificial Sequence
  Description of Artificial Sequence: Synthetic oligonucleotide
  Antisense strand to SEQ ID NO: 676614
ucuucccuaggcaagaacc

SEQ ID NO: 676616 - RNA, 19 nt, Artificial Sequence
  Description of Artificial Sequence: Synthetic oligonucleotide
  Sense strand starting at position 2410 of SEQ ID NO: 585901
gguuauuguagguaacuga

SEQ ID NO: 676617 - RNA, 19 nt, Artificial Sequence
  Description of Artificial Sequence: Synthetic oligonucleotide
  Antisense strand to SEQ ID NO: 676616
ucaguuaccuacaauaacc

SEQ ID NO: 676618 - RNA, 19 nt, Artificial Sequence
  Description of Artificial Sequence: Synthetic oligonucleotide
  Sense strand starting at position 2585 of SEQ ID NO: 585901
gcaagcuccuaauuuguua

SEQ ID NO: 676619 - RNA, 19 nt, Artificial Sequence
  Description of Artificial Sequence: Synthetic oligonucleotide
  Antisense strand to SEQ ID NO: 676618
uaacaaauuaggagcuugc

SEQ ID NO: 676620 - RNA, 19 nt, Artificial Sequence
  Description of Artificial Sequence: Synthetic oligonucleotide
  Sense strand starting at position 2589 of SEQ ID NO: 585901
gcuccuaauuuguuauuag

SEQ ID NO: 676621 - RNA, 19 nt, Artificial Sequence
  Description of Artificial Sequence: Synthetic oligonucleotide
  Antisense strand to SEQ ID NO: 676620
cuaauaacaaauuaggagc

SEQ ID NO: 676622 - RNA, 19 nt, Artificial Sequence
  Description of Artificial Sequence: Synthetic oligonucleotide
  Sense strand starting at position 2618 of SEQ ID NO: 585901
agaacagaguuacucuuua

SEQ ID NO: 676623 - RNA, 19 nt, Artificial Sequence
  Description of Artificial Sequence: Synthetic oligonucleotide
  Antisense strand to SEQ ID NO: 676622
uaaagaguaacucuguucu

SEQ ID NO: 676624 - RNA, 19 nt, Artificial Sequence
  Description of Artificial Sequence: Synthetic oligonucleotide
  Sense strand starting at position 2623 of SEQ ID NO: 585901
agaguuacucuuuaaagua

SEQ ID NO: 676625 - RNA, 19 nt, Artificial Sequence
  Description of Artificial Sequence: Synthetic oligonucleotide
  Antisense strand to SEQ ID NO: 676624
uacuuuaaagaguaacucu

SEQ ID NO: 676626 - RNA, 19 nt, Artificial Sequence
  Description of Artificial Sequence: Synthetic oligonucleotide
  Sense strand starting at position 2816 of SEQ ID NO: 585901
ccaagcuuugaaggaaacu

SEQ ID NO: 676627 - RNA, 19 nt, Artificial Sequence
  Description of Artificial Sequence: Synthetic oligonucleotide
  Antisense strand to SEQ ID NO: 676626
aguuuccuucaaagcuugg

SEQ ID NO: 676628 - RNA, 19 nt, Artificial Sequence
  Description of Artificial Sequence: Synthetic oligonucleotide
  Sense strand starting at position 2838 of SEQ ID NO: 585901
gacuaucaacagugcagaa

SEQ ID NO: 676629 - RNA, 19 nt, Artificial Sequence
  Description of Artificial Sequence: Synthetic oligonucleotide
  Antisense strand to SEQ ID NO: 676628
uucugcacuguugauaguc

SEQ ID NO: 676630 - RNA, 19 nt, Artificial Sequence
  Description of Artificial Sequence: Synthetic oligonucleotide
  Sense strand starting at position 2859 of SEQ ID NO: 585901
ccaguuauagugcagacaa

SEQ ID NO: 676631 - RNA, 19 nt, Artificial Sequence
  Description of Artificial Sequence: Synthetic oligonucleotide
  Antisense strand to SEQ ID NO: 676630
uugucugcacuauaacugg

SEQ ID NO: 676632 - RNA, 19 nt, Artificial Sequence
  Description of Artificial Sequence: Synthetic oligonucleotide
  Sense strand starting at position 2861 of SEQ ID NO: 585901
aguuauagugcagacaaau

SEQ ID NO: 676633 - RNA, 19 nt, Artificial Sequence
  Description of Artificial Sequence: Synthetic oligonucleotide
  Antisense strand to SEQ ID NO: 676632
auuugucugcacuauaacu

SEQ ID NO: 676634 - RNA, 19 nt, Artificial Sequence
  Description of Artificial Sequence: Synthetic oligonucleotide
  Sense strand starting at position 2871 of SEQ ID NO: 585901
cagacaaauguguguauaa

SEQ ID NO: 676635 - RNA, 19 nt, Artificial Sequence
  Description of Artificial Sequence: Synthetic oligonucleotide
  Antisense strand to SEQ ID NO: 676634
uuauacacacauuugucug

SEQ ID NO: 676636 - RNA, 19 nt, Artificial Sequence
  Description of Artificial Sequence: Synthetic oligonucleotide
  Sense strand starting at position 2872 of SEQ ID NO: 585901
agacaaauguguguauaau

SEQ ID NO: 676637 - RNA, 19 nt, Artificial Sequence
  Description of Artificial Sequence: Synthetic oligonucleotide
  Antisense strand to SEQ ID NO: 676636
auuauacacacauuugucu

SEQ ID NO: 676638 - RNA, 19 nt, Artificial Sequence
  Description of Artificial Sequence: Synthetic oligonucleotide
  Sense strand starting at position 2873 of SEQ ID NO: 585901
gacaaauguguguauaaug

SEQ ID NO: 676639 - RNA, 19 nt, Artificial Sequence
  Description of Artificial Sequence: Synthetic oligonucleotide
  Antisense strand to SEQ ID NO: 676638
cauuauacacacauuuguc

SEQ ID NO: 676640 - RNA, 19 nt, Artificial Sequence
  Description of Artificial Sequence: Synthetic oligonucleotide
  Sense strand starting at position 2999 of SEQ ID NO: 585901
acuaaaccuuccuugggua

SEQ ID NO: 676641 - RNA, 19 nt, Artificial Sequence
  Description of Artificial Sequence: Synthetic oligonucleotide
  Antisense strand to SEQ ID NO: 676640
uacccaaggaagguuuagu

SEQ ID NO: 676642 - RNA, 19 nt, Artificial Sequence
  Description of Artificial Sequence: Synthetic oligonucleotide
  Sense strand starting at position 3011 of SEQ ID NO: 585901
uuggguaguguucacauga

SEQ ID NO: 676643 - RNA, 19 nt, Artificial Sequence
  Description of Artificial Sequence: Synthetic oligonucleotide
  Antisense strand to SEQ ID NO: 676642
ucaugugaacacuacccaa

SEQ ID NO: 676644 - RNA, 19 nt, Artificial Sequence
  Description of Artificial Sequence: Synthetic oligonucleotide
  Sense strand starting at position 3184 of SEQ ID NO: 585901
ggauacaucagcuaccgaa

SEQ ID NO: 676645 - RNA, 19 nt, Artificial Sequence
  Description of Artificial Sequence: Synthetic oligonucleotide
  Antisense strand to SEQ ID NO: 676644
uucgguagcugauguaucc

SEQ ID NO: 676646 - RNA, 19 nt, Artificial Sequence
  Description of Artificial Sequence: Synthetic oligonucleotide
  Sense strand starting at position 3228 of SEQ ID NO: 585901
ugacauucuggugggagga

SEQ ID NO: 676647 - RNA, 19 nt, Artificial Sequence
  Description of Artificial Sequence: Synthetic oligonucleotide
  Antisense strand to SEQ ID NO: 676646
uccucccaccagaauguca

SEQ ID NO: 676648 - RNA, 19 nt, Artificial Sequence
  Description of Artificial Sequence: Synthetic oligonucleotide
  Sense strand starting at position 3657 of SEQ ID NO: 585901
augagaaaguauguaaagu

SEQ ID NO: 676649 - RNA, 19 nt, Artificial Sequence
  Description of Artificial Sequence: Synthetic oligonucleotide
  Antisense strand to SEQ ID NO: 676648
acuuuacauacuuucucau

SEQ ID NO: 676650 - RNA, 19 nt, Artificial Sequence
  Description of Artificial Sequence: Synthetic oligonucleotide
  Sense strand starting at position 3726 of SEQ ID NO: 585901
cugugucaagaucaauuaa

SEQ ID NO: 676651 - RNA, 19 nt, Artificial Sequence
  Description of Artificial Sequence: Synthetic oligonucleotide
  Antisense strand to SEQ ID NO: 676650
uuaauugaucuugacacag

SEQ ID NO: 676652 - RNA, 19 nt, Artificial Sequence
  Description of Artificial Sequence: Synthetic oligonucleotide
  Sense strand starting at position 3747 of SEQ ID NO: 585901
augcaaagaugagucucua

SEQ ID NO: 676653 - RNA, 19 nt, Artificial Sequence
  Description of Artificial Sequence: Synthetic oligonucleotide
  Antisense strand to SEQ ID NO: 676652
uagagacucaucuuugcau

SEQ ID NO: 676654 - RNA, 19 nt, Artificial Sequence
  Description of Artificial Sequence: Synthetic oligonucleotide
  Sense strand starting at position 3893 of SEQ ID NO: 585901
gcucauugacccuaagcaa

SEQ ID NO: 676655 - RNA, 19 nt, Artificial Sequence
  Description of Artificial Sequence: Synthetic oligonucleotide
  Antisense strand to SEQ ID NO: 676654
uugcuuagggucaaugagc

SEQ ID NO: 676656 - RNA, 19 nt, Artificial Sequence
  Description of Artificial Sequence: Synthetic oligonucleotide
  Sense strand starting at position 12 of SEQ ID NO: 585902
gaacuaucaugcccggcua

SEQ ID NO: 676657 - RNA, 19 nt, Artificial Sequence
  Description of Artificial Sequence: Synthetic oligonucleotide
  Antisense strand to SEQ ID NO: 676656
uagccgggcaugauaguuc

SEQ ID NO: 676658 - RNA, 19 nt, Artificial Sequence
  Description of Artificial Sequence: Synthetic oligonucleotide
  Sense strand starting at position 177 of SEQ ID NO: 585902
guaucuauacccugacacu

SEQ ID NO: 676659 - RNA, 19 nt, Artificial Sequence
  Description of Artificial Sequence: Synthetic oligonucleotide
  Antisense strand to SEQ ID NO: 676658
agugucaggguauagauac

SEQ ID NO: 676660 - RNA, 19 nt, Artificial Sequence
  Description of Artificial Sequence: Synthetic oligonucleotide
  Sense strand starting at position 196 of SEQ ID NO: 585902
gcugguuacugucuauaau

SEQ ID NO: 676661 - RNA, 19 nt, Artificial Sequence
  Description of Artificial Sequence: Synthetic oligonucleotide
  Antisense strand to SEQ ID NO: 676660
auuauagacaguaaccagc

SEQ ID NO: 676662 - RNA, 19 nt, Artificial Sequence
  Description of Artificial Sequence: Synthetic oligonucleotide
  Sense strand starting at position 197 of SEQ ID NO: 585902
cugguuacugucuauaauc

SEQ ID NO: 676663 - RNA, 19 nt, Artificial Sequence
  Description of Artificial Sequence: Synthetic oligonucleotide
  Antisense strand to SEQ ID NO: 676662
gauuauagacaguaaccag

SEQ ID NO: 676664 - RNA, 19 nt, Artificial Sequence
  Description of Artificial Sequence: Synthetic oligonucleotide
  Sense strand starting at position 368 of SEQ ID NO: 585902
uuuauuaugcaccgugaug

SEQ ID NO: 676665 - RNA, 19 nt, Artificial Sequence
  Description of Artificial Sequence: Synthetic oligonucleotide
  Antisense strand to SEQ ID NO: 676664
caucacggugcauaauaaa

SEQ ID NO: 676666 - RNA, 19 nt, Artificial Sequence
  Description of Artificial Sequence: Synthetic oligonucleotide
  Sense strand starting at position 674 of SEQ ID NO: 585902
gucucaaaggcaugacgaa

SEQ ID NO: 676667 - RNA, 19 nt, Artificial Sequence
  Description of Artificial Sequence: Synthetic oligonucleotide
  Antisense strand to SEQ ID NO: 676666
uucgucaugccuuugagac

SEQ ID NO: 676668 - RNA, 19 nt, Artificial Sequence
  Description of Artificial Sequence: Synthetic oligonucleotide
  Sense strand starting at position 747 of SEQ ID NO: 585902
guaggagcccauuacaauc

SEQ ID NO: 676669 - RNA, 19 nt, Artificial Sequence
  Description of Artificial Sequence: Synthetic oligonucleotide
  Antisense strand to SEQ ID NO: 676668
gauuguaaugggcuccuac

SEQ ID NO: 676670 - RNA, 19 nt, Artificial Sequence
  Description of Artificial Sequence: Synthetic oligonucleotide
  Sense strand starting at position 796 of SEQ ID NO: 585902
gugugacaauaaguaaacu

SEQ ID NO: 676671 - RNA, 19 nt, Artificial Sequence
  Description of Artificial Sequence: Synthetic oligonucleotide
  Antisense strand to SEQ ID NO: 676670
aguuuacuuauugucacac

SEQ ID NO: 676672 - RNA, 19 nt, Artificial Sequence
  Description of Artificial Sequence: Synthetic oligonucleotide
  Sense strand starting at position 831 of SEQ ID NO: 585902
gggaaaguccaacguggaa

SEQ ID NO: 676673 - RNA, 19 nt, Artificial Sequence
  Description of Artificial Sequence: Synthetic oligonucleotide
  Antisense strand to SEQ ID NO: 676672
uuccacguuggacuuuccc

SEQ ID NO: 676674 - RNA, 19 nt, Artificial Sequence
  Description of Artificial Sequence: Synthetic oligonucleotide
  Sense strand starting at position 845 of SEQ ID NO: 585902
uggaaaguauuugguagga

SEQ ID NO: 676675 - RNA, 19 nt, Artificial Sequence
  Description of Artificial Sequence: Synthetic oligonucleotide
  Antisense strand to SEQ ID NO: 676674
uccuaccaaauacuuucca

SEQ ID NO: 676676 - RNA, 19 nt, Artificial Sequence
  Description of Artificial Sequence: Synthetic oligonucleotide
  Sense strand starting at position 847 of SEQ ID NO: 585902
gaaaguauuugguaggagu

SEQ ID NO: 676677 - RNA, 19 nt, Artificial Sequence
  Description of Artificial Sequence: Synthetic oligonucleotide
  Antisense strand to SEQ ID NO: 676676
acuccuaccaaauacuuuc

SEQ ID NO: 676678 - RNA, 19 nt, Artificial Sequence
  Description of Artificial Sequence: Synthetic oligonucleotide
  Sense strand starting at position 850 of SEQ ID NO: 585902
aguauuugguaggagugaa

SEQ ID NO: 676679 - RNA, 19 nt, Artificial Sequence
  Description of Artificial Sequence: Synthetic oligonucleotide
  Antisense strand to SEQ ID NO: 676678
uucacuccuaccaaauacu

SEQ ID NO: 676680 - RNA, 19 nt, Artificial Sequence
  Description of Artificial Sequence: Synthetic oligonucleotide
  Sense strand starting at position 916 of SEQ ID NO: 585902
caggaagaauacuccaguu

SEQ ID NO: 676681 - RNA, 19 nt, Artificial Sequence
  Description of Artificial Sequence: Synthetic oligonucleotide
  Antisense strand to SEQ ID NO: 676680
aacuggaguauucuuccug

SEQ ID NO: 676682 - RNA, 19 nt, Artificial Sequence
  Description of Artificial Sequence: Synthetic oligonucleotide
  Sense strand starting at position 970 of SEQ ID NO: 585902
cgucaacaucguuccaguu

SEQ ID NO: 676683 - RNA, 19 nt, Artificial Sequence
  Description of Artificial Sequence: Synthetic oligonucleotide
  Antisense strand to SEQ ID NO: 676682
aacuggaacgauguugacg

SEQ ID NO: 676684 - RNA, 19 nt, Artificial Sequence
  Description of Artificial Sequence: Synthetic oligonucleotide
  Sense strand starting at position 1122 of SEQ ID NO: 585902
gugucuuucguacugugua

SEQ ID NO: 676685 - RNA, 19 nt, Artificial Sequence
  Description of Artificial Sequence: Synthetic oligonucleotide
  Antisense strand to SEQ ID NO: 676684
uacacaguacgaaagacac

SEQ ID NO: 676686 - RNA, 19 nt, Artificial Sequence
  Description of Artificial Sequence: Synthetic oligonucleotide
  Sense strand starting at position 1134 of SEQ ID NO: 585902
cuguguaugcggagcuguu

SEQ ID NO: 676687 - RNA, 19 nt, Artificial Sequence
  Description of Artificial Sequence: Synthetic oligonucleotide
  Antisense strand to SEQ ID NO: 676686
aacagcuccgcauacacag

SEQ ID NO: 676688 - RNA, 19 nt, Artificial Sequence
  Description of Artificial Sequence: Synthetic oligonucleotide
  Sense strand starting at position 1178 of SEQ ID NO: 585902
acugcaguccuccaggaaa

SEQ ID NO: 676689 - RNA, 19 nt, Artificial Sequence
  Description of Artificial Sequence: Synthetic oligonucleotide
  Antisense strand to SEQ ID NO: 676688
uuuccuggaggacugcagu

SEQ ID NO: 676690 - RNA, 19 nt, Artificial Sequence
  Description of Artificial Sequence: Synthetic oligonucleotide
  Sense strand starting at position 1332 of SEQ ID NO: 585902
cuggcucucuucuccaaga

SEQ ID NO: 676691 - RNA, 19 nt, Artificial Sequence
  Description of Artificial Sequence: Synthetic oligonucleotide
  Antisense strand to SEQ ID NO: 676690
ucuuggagaagagagccag

SEQ ID NO: 676692 - RNA, 19 nt, Artificial Sequence
  Description of Artificial Sequence: Synthetic oligonucleotide
  Sense strand starting at position 1334 of SEQ ID NO: 585902
ggcucucuucuccaagacu

SEQ ID NO: 676693 - RNA, 19 nt, Artificial Sequence
  Description of Artificial Sequence: Synthetic oligonucleotide
  Antisense strand to SEQ ID NO: 676692
agucuuggagaagagagcc

SEQ ID NO: 676694 - RNA, 19 nt, Artificial Sequence
  Description of Artificial Sequence: Synthetic oligonucleotide
  Sense strand starting at position 1601 of SEQ ID NO: 585902
gucguaagcggcuaggaaa

SEQ ID NO: 676695 - RNA, 19 nt, Artificial Sequence
  Description of Artificial Sequence: Synthetic oligonucleotide
  Antisense strand to SEQ ID NO: 676694
uuuccuagccgcuuacgac

SEQ ID NO: 676696 - RNA, 19 nt, Artificial Sequence
  Description of Artificial Sequence: Synthetic oligonucleotide
  Sense strand starting at position 1622 of SEQ ID NO: 585902
aacugagucguugauuagu

SEQ ID NO: 676697 - RNA, 19 nt, Artificial Sequence
  Description of Artificial Sequence: Synthetic oligonucleotide
  Antisense strand to SEQ ID NO: 676696
acuaaucaacgacucaguu

SEQ ID NO: 676698 - RNA, 19 nt, Artificial Sequence
  Description of Artificial Sequence: Synthetic oligonucleotide
  Sense strand starting at position 1824 of SEQ ID NO: 585902
ucuuguucgcgucucugaa

SEQ ID NO: 676699 - RNA, 19 nt, Artificial Sequence
  Description of Artificial Sequence: Synthetic oligonucleotide
  Antisense strand to SEQ ID NO: 676698
uucagagacgcgaacaaga

SEQ ID NO: 676700 - RNA, 19 nt, Artificial Sequence
  Description of Artificial Sequence: Synthetic oligonucleotide
  Sense strand starting at position 2001 of SEQ ID NO: 585902
uccggugauuggccuaaca

SEQ ID NO: 676701 - RNA, 19 nt, Artificial Sequence
  Description of Artificial Sequence: Synthetic oligonucleotide
  Antisense strand to SEQ ID NO: 676700
uguuaggccaaucaccgga

SEQ ID NO: 676702 - RNA, 19 nt, Artificial Sequence
  Description of Artificial Sequence: Synthetic oligonucleotide
  Sense strand starting at position 2003 of SEQ ID NO: 585902
cggugauuggccuaacaug

SEQ ID NO: 676703 - RNA, 19 nt, Artificial Sequence
  Description of Artificial Sequence: Synthetic oligonucleotide
  Antisense strand to SEQ ID NO: 676702
cauguuaggccaaucaccg

SEQ ID NO: 676704 - RNA, 19 nt, Artificial Sequence
  Description of Artificial Sequence: Synthetic oligonucleotide
  Sense strand starting at position 2122 of SEQ ID NO: 585902
agacaaagguucuugugga

SEQ ID NO: 676705 - RNA, 19 nt, Artificial Sequence
  Description of Artificial Sequence: Synthetic oligonucleotide
  Antisense strand to SEQ ID NO: 676704
uccacaagaaccuuugucu

SEQ ID NO: 676706 - RNA, 19 nt, Artificial Sequence
  Description of Artificial Sequence: Synthetic oligonucleotide
  Sense strand starting at position 2193 of SEQ ID NO: 585902
aggacuuauauccgggauu

SEQ ID NO: 676707 - RNA, 19 nt, Artificial Sequence
  Description of Artificial Sequence: Synthetic oligonucleotide
  Antisense strand to SEQ ID NO: 676706
aaucccggauauaaguccu

SEQ ID NO: 676708 - RNA, 19 nt, Artificial Sequence
  Description of Artificial Sequence: Synthetic oligonucleotide
  Sense strand starting at position 2195 of SEQ ID NO: 585902
gacuuauauccgggauugu

SEQ ID NO: 676709 - RNA, 19 nt, Artificial Sequence
  Description of Artificial Sequence: Synthetic oligonucleotide
  Antisense strand to SEQ ID NO: 676708
acaaucccggauauaaguc

SEQ ID NO: 676710 - RNA, 19 nt, Artificial Sequence
  Description of Artificial Sequence: Synthetic oligonucleotide
  Sense strand starting at position 2196 of SEQ ID NO: 585902
acuuauauccgggauugug

SEQ ID NO: 676711 - RNA, 19 nt, Artificial Sequence
  Description of Artificial Sequence: Synthetic oligonucleotide
  Antisense strand to SEQ ID NO: 676710
cacaaucccggauauaagu

SEQ ID NO: 676712 - RNA, 19 nt, Artificial Sequence
  Description of Artificial Sequence: Synthetic oligonucleotide
  Sense strand starting at position 2241 of SEQ ID NO: 585902
acauguggguuuguuuaua

SEQ ID NO: 676713 - RNA, 19 nt, Artificial Sequence
  Description of Artificial Sequence: Synthetic oligonucleotide
  Antisense strand to SEQ ID NO: 676712
uauaaacaaacccacaugu

SEQ ID NO: 676714 - RNA, 19 nt, Artificial Sequence
  Description of Artificial Sequence: Synthetic oligonucleotide
  Sense strand starting at position 2938 of SEQ ID NO: 585902
ggagaagcgguacauuauu

SEQ ID NO: 676715 - RNA, 19 nt, Artificial Sequence
  Description of Artificial Sequence: Synthetic oligonucleotide
  Antisense strand to SEQ ID NO: 676714
aauaauguaccgcuucucc

SEQ ID NO: 676716 - RNA, 19 nt, Artificial Sequence
  Description of Artificial Sequence: Synthetic oligonucleotide
  Sense strand starting at position 2988 of SEQ ID NO: 585902
aagugaauggccuagccua

SEQ ID NO: 676717 - RNA, 19 nt, Artificial Sequence
  Description of Artificial Sequence: Synthetic oligonucleotide
  Antisense strand to SEQ ID NO: 676716
uaggcuaggccauucacuu

SEQ ID NO: 676718 - RNA, 19 nt, Artificial Sequence
  Description of Artificial Sequence: Synthetic oligonucleotide
  Sense strand starting at position 3221 of SEQ ID NO: 585902
gccuccaucguuuaaauug

SEQ ID NO: 676719 - RNA, 19 nt, Artificial Sequence
  Description of Artificial Sequence: Synthetic oligonucleotide
  Antisense strand to SEQ ID NO: 676718
caauuuaaacgauggaggc

SEQ ID NO: 676720 - RNA, 19 nt, Artificial Sequence
  Description of Artificial Sequence: Synthetic oligonucleotide
  Sense strand starting at position 3411 of SEQ ID NO: 585902
cauaaauugcugggccaga

SEQ ID NO: 676721 - RNA, 19 nt, Artificial Sequence
  Description of Artificial Sequence: Synthetic oligonucleotide
  Antisense strand to SEQ ID NO: 676720
ucuggcccagcaauuuaug

SEQ ID NO: 676722 - RNA, 19 nt, Artificial Sequence
  Description of Artificial Sequence: Synthetic oligonucleotide
  Sense strand starting at position 3416 of SEQ ID NO: 585902
auugcugggccagaguauu

SEQ ID NO: 676723 - RNA, 19 nt, Artificial Sequence
  Description of Artificial Sequence: Synthetic oligonucleotide
  Antisense strand to SEQ ID NO: 676722
aauacucuggcccagcaau

SEQ ID NO: 676724 - RNA, 19 nt, Artificial Sequence
  Description of Artificial Sequence: Synthetic oligonucleotide
  Sense strand starting at position 3426 of SEQ ID NO: 585902
cagaguauuucuccgcuga

SEQ ID NO: 676725 - RNA, 19 nt, Artificial Sequence
  Description of Artificial Sequence: Synthetic oligonucleotide
  Antisense strand to SEQ ID NO: 676724
ucagcggagaaauacucug

SEQ ID NO: 676726 - RNA, 19 nt, Artificial Sequence
  Description of Artificial Sequence: Synthetic oligonucleotide
  Sense strand starting at position 3427 of SEQ ID NO: 585902
agaguauuucuccgcugag

SEQ ID NO: 676727 - RNA, 19 nt, Artificial Sequence
  Description of Artificial Sequence: Synthetic oligonucleotide
  Antisense strand to SEQ ID NO: 676726
cucagcggagaaauacucu

SEQ ID NO: 676728 - RNA, 19 nt, Artificial Sequence
  Description of Artificial Sequence: Synthetic oligonucleotide
  Sense strand starting at position 3428 of SEQ ID NO: 585902
gaguauuucuccgcugaga

SEQ ID NO: 676729 - RNA, 19 nt, Artificial Sequence
  Description of Artificial Sequence: Synthetic oligonucleotide
  Antisense strand to SEQ ID NO: 676728
ucucagcggagaaauacuc

SEQ ID NO: 676730 - RNA, 19 nt, Artificial Sequence
  Description of Artificial Sequence: Synthetic oligonucleotide
  Sense strand starting at position 3430 of SEQ ID NO: 585902
guauuucuccgcugagagc

SEQ ID NO: 676731 - RNA, 19 nt, Artificial Sequence
  Description of Artificial Sequence: Synthetic oligonucleotide
  Antisense strand to SEQ ID NO: 676730
gcucucagcggagaaauac

SEQ ID NO: 676732 - RNA, 19 nt, Artificial Sequence
  Description of Artificial Sequence: Synthetic oligonucleotide
  Sense strand starting at position 3566 of SEQ ID NO: 585902
gugcuuacucuugugcaua

SEQ ID NO: 676733 - RNA, 19 nt, Artificial Sequence
  Description of Artificial Sequence: Synthetic oligonucleotide
  Antisense strand to SEQ ID NO: 676732
uaugcacaagaguaagcac

SEQ ID NO: 676734 - RNA, 19 nt, Artificial Sequence
  Description of Artificial Sequence: Synthetic oligonucleotide
  Sense strand starting at position 3614 of SEQ ID NO: 585902
ggcagauuaggugaggcuu

SEQ ID NO: 676735 - RNA, 19 nt, Artificial Sequence
  Description of Artificial Sequence: Synthetic oligonucleotide
  Antisense strand to SEQ ID NO: 676734
aagccucaccuaaucugcc

SEQ ID NO: 676736 - RNA, 19 nt, Artificial Sequence
  Description of Artificial Sequence: Synthetic oligonucleotide
  Sense strand starting at position 237 of SEQ ID NO: 585903
uaugaaagacucugacgau

SEQ ID NO: 676737 - RNA, 19 nt, Artificial Sequence
  Description of Artificial Sequence: Synthetic oligonucleotide
  Antisense strand to SEQ ID NO: 676736
aucgucagagucuuucaua

SEQ ID NO: 676738 - RNA, 19 nt, Artificial Sequence
  Description of Artificial Sequence: Synthetic oligonucleotide
  Sense strand starting at position 246 of SEQ ID NO: 585903
cucugacgaucacuuugaa

SEQ ID NO: 676739 - RNA, 19 nt, Artificial Sequence
  Description of Artificial Sequence: Synthetic oligonucleotide
  Antisense strand to SEQ ID NO: 676738
uucaaagugaucgucagag

SEQ ID NO: 676740 - RNA, 19 nt, Artificial Sequence
  Description of Artificial Sequence: Synthetic oligonucleotide
  Sense strand starting at position 249 of SEQ ID NO: 585903
ugacgaucacuuugaaagg

SEQ ID NO: 676741 - RNA, 19 nt, Artificial Sequence
  Description of Artificial Sequence: Synthetic oligonucleotide
  Antisense strand to SEQ ID NO: 676740
ccuuucaaagugaucguca

SEQ ID NO: 676742 - RNA, 19 nt, Artificial Sequence
  Description of Artificial Sequence: Synthetic oligonucleotide
  Sense strand starting at position 438 of SEQ ID NO: 585903
auauaaagauaggaggaua

SEQ ID NO: 676743 - RNA, 19 nt, Artificial Sequence
  Description of Artificial Sequence: Synthetic oligonucleotide
  Antisense strand to SEQ ID NO: 676742
uauccuccuaucuuuauau

SEQ ID NO: 676744 - RNA, 19 nt, Artificial Sequence
  Description of Artificial Sequence: Synthetic oligonucleotide
  Sense strand starting at position 451 of SEQ ID NO: 585903
aggauauaguccuuggcau

SEQ ID NO: 676745 - RNA, 19 nt, Artificial Sequence
  Description of Artificial Sequence: Synthetic oligonucleotide
  Antisense strand to SEQ ID NO: 676744
augccaaggacuauauccu

SEQ ID NO: 676746 - RNA, 19 nt, Artificial Sequence
  Description of Artificial Sequence: Synthetic oligonucleotide
  Sense strand starting at position 481 of SEQ ID NO: 585903
auaugaaggguaugcaaau

SEQ ID NO: 676747 - RNA, 19 nt, Artificial Sequence
  Description of Artificial Sequence: Synthetic oligonucleotide
  Antisense strand to SEQ ID NO: 676746
auuugcauacccuucauau

SEQ ID NO: 676748 - RNA, 19 nt, Artificial Sequence
  Description of Artificial Sequence: Synthetic oligonucleotide
  Sense strand starting at position 517 of SEQ ID NO: 585903
guauuauaacagcagguau

SEQ ID NO: 676749 - RNA, 19 nt, Artificial Sequence
  Description of Artificial Sequence: Synthetic oligonucleotide
  Antisense strand to SEQ ID NO: 676748
auaccugcuguuauaauac

SEQ ID NO: 676750 - RNA, 19 nt, Artificial Sequence
  Description of Artificial Sequence: Synthetic oligonucleotide
  Sense strand starting at position 599 of SEQ ID NO: 585903
gcacuaugccuggaauaca

SEQ ID NO: 676751 - RNA, 19 nt, Artificial Sequence
  Description of Artificial Sequence: Synthetic oligonucleotide
  Antisense strand to SEQ ID NO: 676750
uguauuccaggcauagugc

SEQ ID NO: 676752 - RNA, 19 nt, Artificial Sequence
  Description of Artificial Sequence: Synthetic oligonucleotide
  Sense strand starting at position 610 of SEQ ID NO: 585903
ggaauacaguaugugauca

SEQ ID NO: 676753 - RNA, 19 nt, Artificial Sequence
  Description of Artificial Sequence: Synthetic oligonucleotide
  Antisense strand to SEQ ID NO: 676752
ugaucacauacuguauucc

SEQ ID NO: 676754 - RNA, 19 nt, Artificial Sequence
  Description of Artificial Sequence: Synthetic oligonucleotide
  Sense strand starting at position 614 of SEQ ID NO: 585903
uacaguaugugaucaugaa

SEQ ID NO: 676755 - RNA, 19 nt, Artificial Sequence
  Description of Artificial Sequence: Synthetic oligonucleotide
  Antisense strand to SEQ ID NO: 676754
uucaugaucacauacugua

SEQ ID NO: 676756 - RNA, 19 nt, Artificial Sequence
  Description of Artificial Sequence: Synthetic oligonucleotide
  Sense strand starting at position 677 of SEQ ID NO: 585903
agccaaucacugugaagag

SEQ ID NO: 676757 - RNA, 19 nt, Artificial Sequence
  Description of Artificial Sequence: Synthetic oligonucleotide
  Antisense strand to SEQ ID NO: 676756
cucuucacagugauuggcu

SEQ ID NO: 676758 - RNA, 19 nt, Artificial Sequence
  Description of Artificial Sequence: Synthetic oligonucleotide
  Sense strand starting at position 689 of SEQ ID NO: 585903
ugaagagagcgcaguguuu

SEQ ID NO: 676759 - RNA, 19 nt, Artificial Sequence
  Description of Artificial Sequence: Synthetic oligonucleotide
  Antisense strand to SEQ ID NO: 676758
aaacacugcgcucucuuca

SEQ ID NO: 676760 - RNA, 19 nt, Artificial Sequence
  Description of Artificial Sequence: Synthetic oligonucleotide
  Sense strand starting at position 741 of SEQ ID NO: 585903
caaggugaguaggaauuua

SEQ ID NO: 676761 - RNA, 19 nt, Artificial Sequence
  Description of Artificial Sequence: Synthetic oligonucleotide
  Antisense strand to SEQ ID NO: 676760
uaaauuccuacucaccuug

SEQ ID NO: 676762 - RNA, 19 nt, Artificial Sequence
  Description of Artificial Sequence: Synthetic oligonucleotide
  Sense strand starting at position 882 of SEQ ID NO: 585903
acauauuggugggcucaua

SEQ ID NO: 676763 - RNA, 19 nt, Artificial Sequence
  Description of Artificial Sequence: Synthetic oligonucleotide
  Antisense strand to SEQ ID NO: 676762
uaugagcccaccaauaugu

SEQ ID NO: 676764 - RNA, 19 nt, Artificial Sequence
  Description of Artificial Sequence: Synthetic oligonucleotide
  Sense strand starting at position 916 of SEQ ID NO: 585903
aauguuauugcauaggcaa

SEQ ID NO: 676765 - RNA, 19 nt, Artificial Sequence
  Description of Artificial Sequence: Synthetic oligonucleotide
  Antisense strand to SEQ ID NO: 676764
uugccuaugcaauaacauu

SEQ ID NO: 676766 - RNA, 19 nt, Artificial Sequence
  Description of Artificial Sequence: Synthetic oligonucleotide
  Sense strand starting at position 949 of SEQ ID NO: 585903
gaauuucggaagugcagua

SEQ ID NO: 676767 - RNA, 19 nt, Artificial Sequence
  Description of Artificial Sequence: Synthetic oligonucleotide
  Antisense strand to SEQ ID NO: 676766
uacugcacuuccgaaauuc

SEQ ID NO: 676768 - RNA, 19 nt, Artificial Sequence
  Description of Artificial Sequence: Synthetic oligonucleotide
  Sense strand starting at position 993 of SEQ ID NO: 585903
agaugaauuugagaggagu

SEQ ID NO: 676769 - RNA, 19 nt, Artificial Sequence
  Description of Artificial Sequence: Synthetic oligonucleotide
  Antisense strand to SEQ ID NO: 676768
acuccucucaaauucaucu

SEQ ID NO: 676770 - RNA, 19 nt, Artificial Sequence
  Description of Artificial Sequence: Synthetic oligonucleotide
  Sense strand starting at position 1085 of SEQ ID NO: 585903
ccauuauaaguaugauuag

SEQ ID NO: 676771 - RNA, 19 nt, Artificial Sequence
  Description of Artificial Sequence: Synthetic oligonucleotide
  Antisense strand to SEQ ID NO: 676770
cuaaucauacuuauaaugg

SEQ ID NO: 676772 - RNA, 19 nt, Artificial Sequence
  Description of Artificial Sequence: Synthetic oligonucleotide
  Sense strand starting at position 1159 of SEQ ID NO: 585903
gaagaaaccgcacagugau

SEQ ID NO: 676773 - RNA, 19 nt, Artificial Sequence
  Description of Artificial Sequence: Synthetic oligonucleotide
  Antisense strand to SEQ ID NO: 676772
aucacugugcgguuucuuc

SEQ ID NO: 676774 - RNA, 19 nt, Artificial Sequence
  Description of Artificial Sequence: Synthetic oligonucleotide
  Sense strand starting at position 1401 of SEQ ID NO: 585903
uaaagugguguguauuaua

SEQ ID NO: 676775 - RNA, 19 nt, Artificial Sequence
  Description of Artificial Sequence: Synthetic oligonucleotide
  Antisense strand to SEQ ID NO: 676774
uauaauacacaccacuuua

SEQ ID NO: 676776 - RNA, 19 nt, Artificial Sequence
  Description of Artificial Sequence: Synthetic oligonucleotide
  Sense strand starting at position 1497 of SEQ ID NO: 585903
ggcacagaucugggugaau

SEQ ID NO: 676777 - RNA, 19 nt, Artificial Sequence
  Description of Artificial Sequence: Synthetic oligonucleotide
  Antisense strand to SEQ ID NO: 676776
auucacccagaucugugcc

SEQ ID NO: 676778 - RNA, 19 nt, Artificial Sequence
  Description of Artificial Sequence: Synthetic oligonucleotide
  Sense strand starting at position 1499 of SEQ ID NO: 585903
cacagaucugggugaaucu

SEQ ID NO: 676779 - RNA, 19 nt, Artificial Sequence
  Description of Artificial Sequence: Synthetic oligonucleotide
  Antisense strand to SEQ ID NO: 676778
agauucacccagaucugug

SEQ ID NO: 676780 - RNA, 19 nt, Artificial Sequence
  Description of Artificial Sequence: Synthetic oligonucleotide
  Sense strand starting at position 1569 of SEQ ID NO: 585903
gggucuucgaugcaaggga

SEQ ID NO: 676781 - RNA, 19 nt, Artificial Sequence
  Description of Artificial Sequence: Synthetic oligonucleotide
  Antisense strand to SEQ ID NO: 676780
ucccuugcaucgaagaccc

SEQ ID NO: 676782 - RNA, 19 nt, Artificial Sequence
  Description of Artificial Sequence: Synthetic oligonucleotide
  Sense strand starting at position 2440 of SEQ ID NO: 585903
gcugaucuucaagcgugua

SEQ ID NO: 676783 - RNA, 19 nt, Artificial Sequence
  Description of Artificial Sequence: Synthetic oligonucleotide
  Antisense strand to SEQ ID NO: 676782
uacacgcuugaagaucagc

SEQ ID NO: 676784 - RNA, 19 nt, Artificial Sequence
  Description of Artificial Sequence: Synthetic oligonucleotide
  Sense strand starting at position 2556 of SEQ ID NO: 585903
gcucuuuccgcaguuguuu

SEQ ID NO: 676785 - RNA, 19 nt, Artificial Sequence
  Description of Artificial Sequence: Synthetic oligonucleotide
  Antisense strand to SEQ ID NO: 676784
aaacaacugcggaaagagc

SEQ ID NO: 676786 - RNA, 19 nt, Artificial Sequence
  Description of Artificial Sequence: Synthetic oligonucleotide
  Sense strand starting at position 2664 of SEQ ID NO: 585903
uuuauuaucagugagguug

SEQ ID NO: 676787 - RNA, 19 nt, Artificial Sequence
  Description of Artificial Sequence: Synthetic oligonucleotide
  Antisense strand to SEQ ID NO: 676786
caaccucacugauaauaaa

SEQ ID NO: 676788 - RNA, 19 nt, Artificial Sequence
  Description of Artificial Sequence: Synthetic oligonucleotide
  Sense strand starting at position 2680 of SEQ ID NO: 585903
uugugagcucuuuaaggau

SEQ ID NO: 676789 - RNA, 19 nt, Artificial Sequence
  Description of Artificial Sequence: Synthetic oligonucleotide
  Antisense strand to SEQ ID NO: 676788
auccuuaaagagcucacaa

SEQ ID NO: 676790 - RNA, 19 nt, Artificial Sequence
  Description of Artificial Sequence: Synthetic oligonucleotide
  Sense strand starting at position 2719 of SEQ ID NO: 585903
uuuauuagccaggacaauu

SEQ ID NO: 676791 - RNA, 19 nt, Artificial Sequence
  Description of Artificial Sequence: Synthetic oligonucleotide
  Antisense strand to SEQ ID NO: 676790
aauuguccuggcuaauaaa

SEQ ID NO: 676792 - RNA, 19 nt, Artificial Sequence
  Description of Artificial Sequence: Synthetic oligonucleotide
  Sense strand starting at position 3393 of SEQ ID NO: 585903
cgcuuugcucaaguuuacu

SEQ ID NO: 676793 - RNA, 19 nt, Artificial Sequence
  Description of Artificial Sequence: Synthetic oligonucleotide
  Antisense strand to SEQ ID NO: 676792
aguaaacuugagcaaagcg

SEQ ID NO: 676794 - RNA, 19 nt, Artificial Sequence
  Description of Artificial Sequence: Synthetic oligonucleotide
  Sense strand starting at position 3402 of SEQ ID NO: 585903
caaguuuacuuggugauug

SEQ ID NO: 676795 - RNA, 19 nt, Artificial Sequence
  Description of Artificial Sequence: Synthetic oligonucleotide
  Antisense strand to SEQ ID NO: 676794
caaucaccaaguaaacuug

SEQ ID NO: 676796 - RNA, 19 nt, Artificial Sequence
  Description of Artificial Sequence: Synthetic oligonucleotide
  Sense strand starting at position 3455 of SEQ ID NO: 585903
agucaugucauuugaguuu

SEQ ID NO: 676797 - RNA, 19 nt, Artificial Sequence
  Description of Artificial Sequence: Synthetic oligonucleotide
  Antisense strand to SEQ ID NO: 676796
aaacucaaaugacaugacu

SEQ ID NO: 676798 - RNA, 19 nt, Artificial Sequence
  Description of Artificial Sequence: Synthetic oligonucleotide
  Sense strand starting at position 3505 of SEQ ID NO: 585903
gcuguaagacaguaaagua

SEQ ID NO: 676799 - RNA, 19 nt, Artificial Sequence
  Description of Artificial Sequence: Synthetic oligonucleotide
  Antisense strand to SEQ ID NO: 676798
uacuuuacugucuuacagc

SEQ ID NO: 676800 - RNA, 19 nt, Artificial Sequence
  Description of Artificial Sequence: Synthetic oligonucleotide
  Sense strand starting at position 3638 of SEQ ID NO: 585903
ggguuguuuggucuguguu

SEQ ID NO: 676801 - RNA, 19 nt, Artificial Sequence
  Description of Artificial Sequence: Synthetic oligonucleotide
  Antisense strand to SEQ ID NO: 676800
aacacagaccaaacaaccc

SEQ ID NO: 676802 - RNA, 19 nt, Artificial Sequence
  Description of Artificial Sequence: Synthetic oligonucleotide
  Sense strand starting at position 3724 of SEQ ID NO: 585903
auuguagcaguuuaaucau

SEQ ID NO: 676803 - RNA, 19 nt, Artificial Sequence
  Description of Artificial Sequence: Synthetic oligonucleotide
  Antisense strand to SEQ ID NO: 676802
augauuaaacugcuacaau

SEQ ID NO: 676804 - RNA, 19 nt, Artificial Sequence
  Description of Artificial Sequence: Synthetic oligonucleotide
  Sense strand starting at position 3765 of SEQ ID NO: 585903
gugggauuggcugagcaaa

SEQ ID NO: 676805 - RNA, 19 nt, Artificial Sequence
  Description of Artificial Sequence: Synthetic oligonucleotide
  Antisense strand to SEQ ID NO: 676804
uuugcucagccaaucccac

SEQ ID NO: 676806 - RNA, 19 nt, Artificial Sequence
  Description of Artificial Sequence: Synthetic oligonucleotide
  Sense strand starting at position 3767 of SEQ ID NO: 585903
gggauuggcugagcaaacu

SEQ ID NO: 676807 - RNA, 19 nt, Artificial Sequence
  Description of Artificial Sequence: Synthetic oligonucleotide
  Antisense strand to SEQ ID NO: 676806
aguuugcucagccaauccc

SEQ ID NO: 676808 - RNA, 19 nt, Artificial Sequence
  Description of Artificial Sequence: Synthetic oligonucleotide
  Sense strand starting at position 3865 of SEQ ID NO: 585903
uuaguauguguguucuugu

SEQ ID NO: 676809 - RNA, 19 nt, Artificial Sequence
  Description of Artificial Sequence: Synthetic oligonucleotide
  Antisense strand to SEQ ID NO: 676808
acaagaacacacauacuaa

SEQ ID NO: 676810 - RNA, 19 nt, Artificial Sequence
  Description of Artificial Sequence: Synthetic oligonucleotide
  Sense strand starting at position 3923 of SEQ ID NO: 585903
cuuuaucuugaguaguaua

SEQ ID NO: 676811 - RNA, 19 nt, Artificial Sequence
  Description of Artificial Sequence: Synthetic oligonucleotide
  Antisense strand to SEQ ID NO: 676810
uauacuacucaagauaaag

SEQ ID NO: 676812 - RNA, 19 nt, Artificial Sequence
  Description of Artificial Sequence: Synthetic oligonucleotide
  Sense strand starting at position 3965 of SEQ ID NO: 585903
gauuuaggguuauagaaag

SEQ ID NO: 676813 - RNA, 19 nt, Artificial Sequence
  Description of Artificial Sequence: Synthetic oligonucleotide
  Antisense strand to SEQ ID NO: 676812
cuuucuauaacccuaaauc

SEQ ID NO: 676814 - RNA, 19 nt, Artificial Sequence
  Description of Artificial Sequence: Synthetic oligonucleotide
  Sense strand starting at position 3982 of SEQ ID NO: 585903
agaugcucuguuuaagacu

SEQ ID NO: 676815 - RNA, 19 nt, Artificial Sequence
  Description of Artificial Sequence: Synthetic oligonucleotide
  Antisense strand to SEQ ID NO: 676814
agucuuaaacagagcaucu

SEQ ID NO: 676816 - RNA, 19 nt, Artificial Sequence
  Description of Artificial Sequence: Synthetic oligonucleotide
  Sense strand starting at position 69 of SEQ ID NO: 585904
gcccucaugcccuauuaga

SEQ ID NO: 676817 - RNA, 19 nt, Artificial Sequence
  Description of Artificial Sequence: Synthetic oligonucleotide
  Antisense strand to SEQ ID NO: 676816
ucuaauagggcaugagggc

SEQ ID NO: 676818 - RNA, 19 nt, Artificial Sequence
  Description of Artificial Sequence: Synthetic oligonucleotide
  Sense strand starting at position 179 of SEQ ID NO: 585904
aguucuagauccuucucca

SEQ ID NO: 676819 - RNA, 19 nt, Artificial Sequence
  Description of Artificial Sequence: Synthetic oligonucleotide
  Antisense strand to SEQ ID NO: 676818
uggagaaggaucuagaacu

SEQ ID NO: 676820 - RNA, 19 nt, Artificial Sequence
  Description of Artificial Sequence: Synthetic oligonucleotide
  Sense strand starting at position 364 of SEQ ID NO: 585904
gggugauggcuccgagaca

SEQ ID NO: 676821 - RNA, 19 nt, Artificial Sequence
  Description of Artificial Sequence: Synthetic oligonucleotide
  Antisense strand to SEQ ID NO: 676820
ugucucggagccaucaccc

SEQ ID NO: 676822 - RNA, 19 nt, Artificial Sequence
  Description of Artificial Sequence: Synthetic oligonucleotide
  Sense strand starting at position 416 of SEQ ID NO: 585904
gguggcuuaaacgaaagau

SEQ ID NO: 676823 - RNA, 19 nt, Artificial Sequence
  Description of Artificial Sequence: Synthetic oligonucleotide
  Antisense strand to SEQ ID NO: 676822
aucuuucguuuaagccacc

SEQ ID NO: 676824 - RNA, 19 nt, Artificial Sequence
  Description of Artificial Sequence: Synthetic oligonucleotide
  Sense strand starting at position 500 of SEQ ID NO: 585904
acccguuaucccuaaagag

SEQ ID NO: 676825 - RNA, 19 nt, Artificial Sequence
  Description of Artificial Sequence: Synthetic oligonucleotide
  Antisense strand to SEQ ID NO: 676824
cucuuuagggauaacgggu

SEQ ID NO: 676826 - RNA, 19 nt, Artificial Sequence
  Description of Artificial Sequence: Synthetic oligonucleotide
  Sense strand starting at position 1288 of SEQ ID NO: 585904
uugauaucuaaacguguag

SEQ ID NO: 676827 - RNA, 19 nt, Artificial Sequence
  Description of Artificial Sequence: Synthetic oligonucleotide
  Antisense strand to SEQ ID NO: 676826
cuacacguuuagauaucaa

SEQ ID NO: 676828 - RNA, 19 nt, Artificial Sequence
  Description of Artificial Sequence: Synthetic oligonucleotide
  Sense strand starting at position 1292 of SEQ ID NO: 585904
uaucuaaacguguaguaau

SEQ ID NO: 676829 - RNA, 19 nt, Artificial Sequence
  Description of Artificial Sequence: Synthetic oligonucleotide
  Antisense strand to SEQ ID NO: 676828
auuacuacacguuuagaua

SEQ ID NO: 676830 - RNA, 19 nt, Artificial Sequence
  Description of Artificial Sequence: Synthetic oligonucleotide
  Sense strand starting at position 1305 of SEQ ID NO: 585904
aguaauuucuggcauacag

SEQ ID NO: 676831 - RNA, 19 nt, Artificial Sequence
  Description of Artificial Sequence: Synthetic oligonucleotide
  Antisense strand to SEQ ID NO: 676830
cuguaugccagaaauuacu

SEQ ID NO: 676832 - RNA, 19 nt, Artificial Sequence
  Description of Artificial Sequence: Synthetic oligonucleotide
  Sense strand starting at position 1313 of SEQ ID NO: 585904
cuggcauacagucgaauau

SEQ ID NO: 676833 - RNA, 19 nt, Artificial Sequence
  Description of Artificial Sequence: Synthetic oligonucleotide
  Antisense strand to SEQ ID NO: 676832
auauucgacuguaugccag

SEQ ID NO: 676834 - RNA, 19 nt, Artificial Sequence
  Description of Artificial Sequence: Synthetic oligonucleotide
  Sense strand starting at position 1314 of SEQ ID NO: 585904
uggcauacagucgaauauu

SEQ ID NO: 676835 - RNA, 19 nt, Artificial Sequence
  Description of Artificial Sequence: Synthetic oligonucleotide
  Antisense strand to SEQ ID NO: 676834
aauauucgacuguaugcca

SEQ ID NO: 676836 - RNA, 19 nt, Artificial Sequence
  Description of Artificial Sequence: Synthetic oligonucleotide
  Sense strand starting at position 1356 of SEQ ID NO: 585904
cguagaacuuucucaucag

SEQ ID NO: 676837 - RNA, 19 nt, Artificial Sequence
  Description of Artificial Sequence: Synthetic oligonucleotide
  Antisense strand to SEQ ID NO: 676836
cugaugagaaaguucuacg

SEQ ID NO: 676838 - RNA, 19 nt, Artificial Sequence
  Description of Artificial Sequence: Synthetic oligonucleotide
  Sense strand starting at position 2204 of SEQ ID NO: 585904
ggccucugauuggugggaa

SEQ ID NO: 676839 - RNA, 19 nt, Artificial Sequence
  Description of Artificial Sequence: Synthetic oligonucleotide
  Antisense strand to SEQ ID NO: 676838
uucccaccaaucagaggcc

SEQ ID NO: 676840 - RNA, 19 nt, Artificial Sequence
  Description of Artificial Sequence: Synthetic oligonucleotide
  Sense strand starting at position 2207 of SEQ ID NO: 585904
cucugauuggugggaauca

SEQ ID NO: 676841 - RNA, 19 nt, Artificial Sequence
  Description of Artificial Sequence: Synthetic oligonucleotide
  Antisense strand to SEQ ID NO: 676840
ugauucccaccaaucagag

SEQ ID NO: 676842 - RNA, 19 nt, Artificial Sequence
  Description of Artificial Sequence: Synthetic oligonucleotide
  Sense strand starting at position 2396 of SEQ ID NO: 585904
uuugaaagcuccguagaau

SEQ ID NO: 676843 - RNA, 19 nt, Artificial Sequence
  Description of Artificial Sequence: Synthetic oligonucleotide
  Antisense strand to SEQ ID NO: 676842
auucuacggagcuuucaaa

SEQ ID NO: 676844 - RNA, 19 nt, Artificial Sequence
  Description of Artificial Sequence: Synthetic oligonucleotide
  Sense strand starting at position 2397 of SEQ ID NO: 585904
uugaaagcuccguagaaug

SEQ ID NO: 676845 - RNA, 19 nt, Artificial Sequence
  Description of Artificial Sequence: Synthetic oligonucleotide
  Antisense strand to SEQ ID NO: 676844
cauucuacggagcuuucaa

SEQ ID NO: 676846 - RNA, 19 nt, Artificial Sequence
  Description of Artificial Sequence: Synthetic oligonucleotide
  Sense strand starting at position 2399 of SEQ ID NO: 585904
gaaagcuccguagaaugau

SEQ ID NO: 676847 - RNA, 19 nt, Artificial Sequence
  Description of Artificial Sequence: Synthetic oligonucleotide
  Antisense strand to SEQ ID NO: 676846
aucauucuacggagcuuuc

SEQ ID NO: 676848 - RNA, 19 nt, Artificial Sequence
  Description of Artificial Sequence: Synthetic oligonucleotide
  Sense strand starting at position 2454 of SEQ ID NO: 585904
aagggauagugauuauagu

SEQ ID NO: 676849 - RNA, 19 nt, Artificial Sequence
  Description of Artificial Sequence: Synthetic oligonucleotide
  Antisense strand to SEQ ID NO: 676848
acuauaaucacuaucccuu

SEQ ID NO: 676850 - RNA, 19 nt, Artificial Sequence
  Description of Artificial Sequence: Synthetic oligonucleotide
  Sense strand starting at position 2461 of SEQ ID NO: 585904
agugauuauaguuggguca

SEQ ID NO: 676851 - RNA, 19 nt, Artificial Sequence
  Description of Artificial Sequence: Synthetic oligonucleotide
  Antisense strand to SEQ ID NO: 676850
ugacccaacuauaaucacu

SEQ ID NO: 676852 - RNA, 19 nt, Artificial Sequence
  Description of Artificial Sequence: Synthetic oligonucleotide
  Sense strand starting at position 2499 of SEQ ID NO: 585904
acaagaagcuggguuagaa

SEQ ID NO: 676853 - RNA, 19 nt, Artificial Sequence
  Description of Artificial Sequence: Synthetic oligonucleotide
  Antisense strand to SEQ ID NO: 676852
uucuaacccagcuucuugu

SEQ ID NO: 676854 - RNA, 19 nt, Artificial Sequence
  Description of Artificial Sequence: Synthetic oligonucleotide
  Sense strand starting at position 2557 of SEQ ID NO: 585904
gguaacaucucagccaauu

SEQ ID NO: 676855 - RNA, 19 nt, Artificial Sequence
  Description of Artificial Sequence: Synthetic oligonucleotide
  Antisense strand to SEQ ID NO: 676854
aauuggcugagauguuacc

SEQ ID NO: 676856 - RNA, 19 nt, Artificial Sequence
  Description of Artificial Sequence: Synthetic oligonucleotide
  Sense strand starting at position 2595 of SEQ ID NO: 585904
ggaagaauguauguagagu

SEQ ID NO: 676857 - RNA, 19 nt, Artificial Sequence
  Description of Artificial Sequence: Synthetic oligonucleotide
  Antisense strand to SEQ ID NO: 676856
acucuacauacauucuucc

SEQ ID NO: 676858 - RNA, 19 nt, Artificial Sequence
  Description of Artificial Sequence: Synthetic oligonucleotide
  Sense strand starting at position 2627 of SEQ ID NO: 585904
ggaacaagauaugcugagu

SEQ ID NO: 676859 - RNA, 19 nt, Artificial Sequence
  Description of Artificial Sequence: Synthetic oligonucleotide
  Antisense strand to SEQ ID NO: 676858
acucagcauaucuuguucc

SEQ ID NO: 676860 - RNA, 19 nt, Artificial Sequence
  Description of Artificial Sequence: Synthetic oligonucleotide
  Sense strand starting at position 2630 of SEQ ID NO: 585904
acaagauaugcugaguacu

SEQ ID NO: 676861 - RNA, 19 nt, Artificial Sequence
  Description of Artificial Sequence: Synthetic oligonucleotide
  Antisense strand to SEQ ID NO: 676860
aguacucagcauaucuugu

SEQ ID NO: 676862 - RNA, 19 nt, Artificial Sequence
  Description of Artificial Sequence: Synthetic oligonucleotide
  Sense strand starting at position 2632 of SEQ ID NO: 585904
aagauaugcugaguacuug

SEQ ID NO: 676863 - RNA, 19 nt, Artificial Sequence
  Description of Artificial Sequence: Synthetic oligonucleotide
  Antisense strand to SEQ ID NO: 676862
caaguacucagcauaucuu

SEQ ID NO: 676864 - RNA, 19 nt, Artificial Sequence
  Description of Artificial Sequence: Synthetic oligonucleotide
  Sense strand starting at position 2751 of SEQ ID NO: 585904
ugccuuguagaccauagaa

SEQ ID NO: 676865 - RNA, 19 nt, Artificial Sequence
  Description of Artificial Sequence: Synthetic oligonucleotide
  Antisense strand to SEQ ID NO: 676864
uucuauggucuacaaggca

SEQ ID NO: 676866 - RNA, 19 nt, Artificial Sequence
  Description of Artificial Sequence: Synthetic oligonucleotide
  Sense strand starting at position 3004 of SEQ ID NO: 585904
ugucauggaucagccaaua

SEQ ID NO: 676867 - RNA, 19 nt, Artificial Sequence
  Description of Artificial Sequence: Synthetic oligonucleotide
  Antisense strand to SEQ ID NO: 676866
uauuggcugauccaugaca

SEQ ID NO: 676868 - RNA, 19 nt, Artificial Sequence
  Description of Artificial Sequence: Synthetic oligonucleotide
  Sense strand starting at position 3024 of SEQ ID NO: 585904
uuugcuucccuacauuagu

SEQ ID NO: 676869 - RNA, 19 nt, Artificial Sequence
  Description of Artificial Sequence: Synthetic oligonucleotide
  Antisense strand to SEQ ID NO: 676868
acuaauguagggaagcaaa

SEQ ID NO: 676870 - RNA, 19 nt, Artificial Sequence
  Description of Artificial Sequence: Synthetic oligonucleotide
  Sense strand starting at position 3108 of SEQ ID NO: 585904
auacuauuccggugauggu

SEQ ID NO: 676871 - RNA, 19 nt, Artificial Sequence
  Description of Artificial Sequence: Synthetic oligonucleotide
  Antisense strand to SEQ ID NO: 676870
accaucaccggaauaguau

SEQ ID NO: 676872 - RNA, 19 nt, Artificial Sequence
  Description of Artificial Sequence: Synthetic oligonucleotide
  Sense strand starting at position 3109 of SEQ ID NO: 585904
uacuauuccggugaugguu

SEQ ID NO: 676873 - RNA, 19 nt, Artificial Sequence
  Description of Artificial Sequence: Synthetic oligonucleotide
  Antisense strand to SEQ ID NO: 676872
aaccaucaccggaauagua

SEQ ID NO: 676874 - RNA, 19 nt, Artificial Sequence
  Description of Artificial Sequence: Synthetic oligonucleotide
  Sense strand starting at position 3180 of SEQ ID NO: 585904
cuguacuuguacuuccaaa

SEQ ID NO: 676875 - RNA, 19 nt, Artificial Sequence
  Description of Artificial Sequence: Synthetic oligonucleotide
  Antisense strand to SEQ ID NO: 676874
uuuggaaguacaaguacag

SEQ ID NO: 676876 - RNA, 19 nt, Artificial Sequence
  Description of Artificial Sequence: Synthetic oligonucleotide
  Sense strand starting at position 3321 of SEQ ID NO: 585904
gagacaaugcauuguaaag

SEQ ID NO: 676877 - RNA, 19 nt, Artificial Sequence
  Description of Artificial Sequence: Synthetic oligonucleotide
  Antisense strand to SEQ ID NO: 676876
cuuuacaaugcauugucuc

SEQ ID NO: 676878 - RNA, 19 nt, Artificial Sequence
  Description of Artificial Sequence: Synthetic oligonucleotide
  Sense strand starting at position 3341 of SEQ ID NO: 585904
uagaauaugcaguauaugu

SEQ ID NO: 676879 - RNA, 19 nt, Artificial Sequence
  Description of Artificial Sequence: Synthetic oligonucleotide
  Antisense strand to SEQ ID NO: 676878
acauauacugcauauucua

SEQ ID NO: 676880 - RNA, 19 nt, Artificial Sequence
  Description of Artificial Sequence: Synthetic oligonucleotide
  Sense strand starting at position 3370 of SEQ ID NO: 585904
gacuauugaucaguacaga

SEQ ID NO: 676881 - RNA, 19 nt, Artificial Sequence
  Description of Artificial Sequence: Synthetic oligonucleotide
  Antisense strand to SEQ ID NO: 676880
ucuguacugaucaauaguc

SEQ ID NO: 676882 - RNA, 19 nt, Artificial Sequence
  Description of Artificial Sequence: Synthetic oligonucleotide
  Sense strand starting at position 3406 of SEQ ID NO: 585904
uaggaauugugauugcuga

SEQ ID NO: 676883 - RNA, 19 nt, Artificial Sequence
  Description of Artificial Sequence: Synthetic oligonucleotide
  Antisense strand to SEQ ID NO: 676882
ucagcaaucacaauuccua

SEQ ID NO: 676884 - RNA, 19 nt, Artificial Sequence
  Description of Artificial Sequence: Synthetic oligonucleotide
  Sense strand starting at position 3498 of SEQ ID NO: 585904
auauccuguuauguaugua

SEQ ID NO: 676885 - RNA, 19 nt, Artificial Sequence
  Description of Artificial Sequence: Synthetic oligonucleotide
  Antisense strand to SEQ ID NO: 676884
uacauacauaacaggauau

SEQ ID NO: 676886 - RNA, 19 nt, Artificial Sequence
  Description of Artificial Sequence: Synthetic oligonucleotide
  Sense strand starting at position 3502 of SEQ ID NO: 585904
ccuguuauguauguauaua

SEQ ID NO: 676887 - RNA, 19 nt, Artificial Sequence
  Description of Artificial Sequence: Synthetic oligonucleotide
  Antisense strand to SEQ ID NO: 676886
uauauacauacauaacagg

SEQ ID NO: 676888 - RNA, 19 nt, Artificial Sequence
  Description of Artificial Sequence: Synthetic oligonucleotide
  Sense strand starting at position 3559 of SEQ ID NO: 585904
aguaguaguuaacucacau

SEQ ID NO: 676889 - RNA, 19 nt, Artificial Sequence
  Description of Artificial Sequence: Synthetic oligonucleotide
  Antisense strand to SEQ ID NO: 676888
augugaguuaacuacuacu

SEQ ID NO: 676890 - RNA, 19 nt, Artificial Sequence
  Description of Artificial Sequence: Synthetic oligonucleotide
  Sense strand starting at position 3656 of SEQ ID NO: 585904
ggaguucgauguucaagga

SEQ ID NO: 676891 - RNA, 19 nt, Artificial Sequence
  Description of Artificial Sequence: Synthetic oligonucleotide
  Antisense strand to SEQ ID NO: 676890
uccuugaacaucgaacucc

SEQ ID NO: 676892 - RNA, 19 nt, Artificial Sequence
  Description of Artificial Sequence: Synthetic oligonucleotide
  Sense strand starting at position 3706 of SEQ ID NO: 585904
ggagauguagacuguaaga

SEQ ID NO: 676893 - RNA, 19 nt, Artificial Sequence
  Description of Artificial Sequence: Synthetic oligonucleotide
  Antisense strand to SEQ ID NO: 676892
ucuuacagucuacaucucc

SEQ ID NO: 676894 - RNA, 19 nt, Artificial Sequence
  Description of Artificial Sequence: Synthetic oligonucleotide
  Sense strand starting at position 3953 of SEQ ID NO: 585904
guagaacuggccuaguaaa

SEQ ID NO: 676895 - RNA, 19 nt, Artificial Sequence
  Description of Artificial Sequence: Synthetic oligonucleotide
  Antisense strand to SEQ ID NO: 676894
uuuacuaggccaguucuac

SEQ ID NO: 676896 - RNA, 19 nt, Artificial Sequence
  Description of Artificial Sequence: Synthetic oligonucleotide
  Sense strand starting at position 33 of SEQ ID NO: 585905
aaguauggcuaucccagua

SEQ ID NO: 676897 - RNA, 19 nt, Artificial Sequence
  Description of Artificial Sequence: Synthetic oligonucleotide
  Antisense strand to SEQ ID NO: 676896
uacugggauagccauacuu

SEQ ID NO: 676898 - RNA, 19 nt, Artificial Sequence
  Description of Artificial Sequence: Synthetic oligonucleotide
  Sense strand starting at position 318 of SEQ ID NO: 585905
aguaauaggucacuagagu

SEQ ID NO: 676899 - RNA, 19 nt, Artificial Sequence
  Description of Artificial Sequence: Synthetic oligonucleotide
  Antisense strand to SEQ ID NO: 676898
acucuagugaccuauuacu

SEQ ID NO: 676900 - RNA, 19 nt, Artificial Sequence
  Description of Artificial Sequence: Synthetic oligonucleotide
  Sense strand starting at position 319 of SEQ ID NO: 585905
guaauaggucacuagaguu

SEQ ID NO: 676901 - RNA, 19 nt, Artificial Sequence
  Description of Artificial Sequence: Synthetic oligonucleotide
  Antisense strand to SEQ ID NO: 676900
aacucuagugaccuauuac

SEQ ID NO: 676902 - RNA, 19 nt, Artificial Sequence
  Description of Artificial Sequence: Synthetic oligonucleotide
  Sense strand starting at position 327 of SEQ ID NO: 585905
ucacuagaguuucugauac

SEQ ID NO: 676903 - RNA, 19 nt, Artificial Sequence
  Description of Artificial Sequence: Synthetic oligonucleotide
  Antisense strand to SEQ ID NO: 676902
guaucagaaacucuaguga

SEQ ID NO: 676904 - RNA, 19 nt, Artificial Sequence
  Description of Artificial Sequence: Synthetic oligonucleotide
  Sense strand starting at position 447 of SEQ ID NO: 585905
agaagcugugguugaccua

SEQ ID NO: 676905 - RNA, 19 nt, Artificial Sequence
  Description of Artificial Sequence: Synthetic oligonucleotide
  Antisense strand to SEQ ID NO: 676904
uaggucaaccacagcuucu

SEQ ID NO: 676906 - RNA, 19 nt, Artificial Sequence
  Description of Artificial Sequence: Synthetic oligonucleotide
  Sense strand starting at position 448 of SEQ ID NO: 585905
gaagcugugguugaccuaa

SEQ ID NO: 676907 - RNA, 19 nt, Artificial Sequence
  Description of Artificial Sequence: Synthetic oligonucleotide
  Antisense strand to SEQ ID NO: 676906
uuaggucaaccacagcuuc

SEQ ID NO: 676908 - RNA, 19 nt, Artificial Sequence
  Description of Artificial Sequence: Synthetic oligonucleotide
  Sense strand starting at position 450 of SEQ ID NO: 585905
agcugugguugaccuaauu

SEQ ID NO: 676909 - RNA, 19 nt, Artificial Sequence
  Description of Artificial Sequence: Synthetic oligonucleotide
  Antisense strand to SEQ ID NO: 676908
aauuaggucaaccacagcu

SEQ ID NO: 676910 - RNA, 19 nt, Artificial Sequence
  Description of Artificial Sequence: Synthetic oligonucleotide
  Sense strand starting at position 609 of SEQ ID NO: 585905
cauuaagcagcuugugaug

SEQ ID NO: 676911 - RNA, 19 nt, Artificial Sequence
  Description of Artificial Sequence: Synthetic oligonucleotide
  Antisense strand to SEQ ID NO: 676910
caucacaagcugcuuaaug

SEQ ID NO: 676912 - RNA, 19 nt, Artificial Sequence
  Description of Artificial Sequence: Synthetic oligonucleotide
  Sense strand starting at position 773 of SEQ ID NO: 585905
ggcugaaccuucuuauguc

SEQ ID NO: 676913 - RNA, 19 nt, Artificial Sequence
  Description of Artificial Sequence: Synthetic oligonucleotide
  Antisense strand to SEQ ID NO: 676912
gacauaagaagguucagcc

SEQ ID NO: 676914 - RNA, 19 nt, Artificial Sequence
  Description of Artificial Sequence: Synthetic oligonucleotide
  Sense strand starting at position 918 of SEQ ID NO: 585905
gccagugucgcuuuggaac

SEQ ID NO: 676915 - RNA, 19 nt, Artificial Sequence
  Description of Artificial Sequence: Synthetic oligonucleotide
  Antisense strand to SEQ ID NO: 676914
guuccaaagcgacacuggc

SEQ ID NO: 676916 - RNA, 19 nt, Artificial Sequence
  Description of Artificial Sequence: Synthetic oligonucleotide
  Sense strand starting at position 959 of SEQ ID NO: 585905
agagcucacagauguggau

SEQ ID NO: 676917 - RNA, 19 nt, Artificial Sequence
  Description of Artificial Sequence: Synthetic oligonucleotide
  Antisense strand to SEQ ID NO: 676916
auccacaucugugagcucu

SEQ ID NO: 676918 - RNA, 19 nt, Artificial Sequence
  Description of Artificial Sequence: Synthetic oligonucleotide
  Sense strand starting at position 980 of SEQ ID NO: 585905
acugcaguuugagucuuau

SEQ ID NO: 676919 - RNA, 19 nt, Artificial Sequence
  Description of Artificial Sequence: Synthetic oligonucleotide
  Antisense strand to SEQ ID NO: 676918
auaagacucaaacugcagu

SEQ ID NO: 676920 - RNA, 19 nt, Artificial Sequence
  Description of Artificial Sequence: Synthetic oligonucleotide
  Sense strand starting at position 986 of SEQ ID NO: 585905
guuugagucuuauugcaau

SEQ ID NO: 676921 - RNA, 19 nt, Artificial Sequence
  Description of Artificial Sequence: Synthetic oligonucleotide
  Antisense strand to SEQ ID NO: 676920
auugcaauaagacucaaac

SEQ ID NO: 676922 - RNA, 19 nt, Artificial Sequence
  Description of Artificial Sequence: Synthetic oligonucleotide
  Sense strand starting at position 992 of SEQ ID NO: 585905
gucuuauugcaaugagcac

SEQ ID NO: 676923 - RNA, 19 nt, Artificial Sequence
  Description of Artificial Sequence: Synthetic oligonucleotide
  Antisense strand to SEQ ID NO: 676922
gugcucauugcaauaagac

SEQ ID NO: 676924 - RNA, 19 nt, Artificial Sequence
  Description of Artificial Sequence: Synthetic oligonucleotide
  Sense strand starting at position 1062 of SEQ ID NO: 585905
gcccucaugcccuauuaga

SEQ ID NO: 676925 - RNA, 19 nt, Artificial Sequence
  Description of Artificial Sequence: Synthetic oligonucleotide
  Antisense strand to SEQ ID NO: 676924
ucuaauagggcaugagggc

SEQ ID NO: 676926 - RNA, 19 nt, Artificial Sequence
  Description of Artificial Sequence: Synthetic oligonucleotide
  Sense strand starting at position 1172 of SEQ ID NO: 585905
aguucuagauccuucucca

SEQ ID NO: 676927 - RNA, 19 nt, Artificial Sequence
  Description of Artificial Sequence: Synthetic oligonucleotide
  Antisense strand to SEQ ID NO: 676926
uggagaaggaucuagaacu

SEQ ID NO: 676928 - RNA, 19 nt, Artificial Sequence
  Description of Artificial Sequence: Synthetic oligonucleotide
  Sense strand starting at position 1287 of SEQ ID NO: 585905
uagagaagccgcuguaagu

SEQ ID NO: 676929 - RNA, 19 nt, Artificial Sequence
  Description of Artificial Sequence: Synthetic oligonucleotide
  Antisense strand to SEQ ID NO: 676928
acuuacagcggcuucucua

SEQ ID NO: 676930 - RNA, 19 nt, Artificial Sequence
  Description of Artificial Sequence: Synthetic oligonucleotide
  Sense strand starting at position 1357 of SEQ ID NO: 585905
gggugauggcuccgagaca

SEQ ID NO: 676931 - RNA, 19 nt, Artificial Sequence
  Description of Artificial Sequence: Synthetic oligonucleotide
  Antisense strand to SEQ ID NO: 676930
ugucucggagccaucaccc

SEQ ID NO: 676932 - RNA, 19 nt, Artificial Sequence
  Description of Artificial Sequence: Synthetic oligonucleotide
  Sense strand starting at position 1409 of SEQ ID NO: 585905
gguggcuuaaacgaaagau

SEQ ID NO: 676933 - RNA, 19 nt, Artificial Sequence
  Description of Artificial Sequence: Synthetic oligonucleotide
  Antisense strand to SEQ ID NO: 676932
aucuuucguuuaagccacc

SEQ ID NO: 676934 - RNA, 19 nt, Artificial Sequence
  Description of Artificial Sequence: Synthetic oligonucleotide
  Sense strand starting at position 1493 of SEQ ID NO: 585905
acccguuaucccuaaagag

SEQ ID NO: 676935 - RNA, 19 nt, Artificial Sequence
  Description of Artificial Sequence: Synthetic oligonucleotide
  Antisense strand to SEQ ID NO: 676934
cucuuuagggauaacgggu

SEQ ID NO: 676936 - RNA, 19 nt, Artificial Sequence
  Description of Artificial Sequence: Synthetic oligonucleotide
  Sense strand starting at position 2281 of SEQ ID NO: 585905
uugauaucuaaacguguag

SEQ ID NO: 676937 - RNA, 19 nt, Artificial Sequence
  Description of Artificial Sequence: Synthetic oligonucleotide
  Antisense strand to SEQ ID NO: 676936
cuacacguuuagauaucaa

SEQ ID NO: 676938 - RNA, 19 nt, Artificial Sequence
  Description of Artificial Sequence: Synthetic oligonucleotide
  Sense strand starting at position 2285 of SEQ ID NO: 585905
uaucuaaacguguaguaau

SEQ ID NO: 676939 - RNA, 19 nt, Artificial Sequence
  Description of Artificial Sequence: Synthetic oligonucleotide
  Antisense strand to SEQ ID NO: 676938
auuacuacacguuuagaua

SEQ ID NO: 676940 - RNA, 19 nt, Artificial Sequence
  Description of Artificial Sequence: Synthetic oligonucleotide
  Sense strand starting at position 2298 of SEQ ID NO: 585905
aguaauuucuggcauacag

SEQ ID NO: 676941 - RNA, 19 nt, Artificial Sequence
  Description of Artificial Sequence: Synthetic oligonucleotide
  Antisense strand to SEQ ID NO: 676940
cuguaugccagaaauuacu

SEQ ID NO: 676942 - RNA, 19 nt, Artificial Sequence
  Description of Artificial Sequence: Synthetic oligonucleotide
  Sense strand starting at position 2306 of SEQ ID NO: 585905
cuggcauacagucgaauau

SEQ ID NO: 676943 - RNA, 19 nt, Artificial Sequence
  Description of Artificial Sequence: Synthetic oligonucleotide
  Antisense strand to SEQ ID NO: 676942
auauucgacuguaugccag

SEQ ID NO: 676944 - RNA, 19 nt, Artificial Sequence
  Description of Artificial Sequence: Synthetic oligonucleotide
  Sense strand starting at position 2307 of SEQ ID NO: 585905
uggcauacagucgaauauu

SEQ ID NO: 676945 - RNA, 19 nt, Artificial Sequence
  Description of Artificial Sequence: Synthetic oligonucleotide
  Antisense strand to SEQ ID NO: 676944
aauauucgacuguaugcca

SEQ ID NO: 676946 - RNA, 19 nt, Artificial Sequence
  Description of Artificial Sequence: Synthetic oligonucleotide
  Sense strand starting at position 2349 of SEQ ID NO: 585905
cguagaacuuucucaucag

SEQ ID NO: 676947 - RNA, 19 nt, Artificial Sequence
  Description of Artificial Sequence: Synthetic oligonucleotide
  Antisense strand to SEQ ID NO: 676946
cugaugagaaaguucuacg

SEQ ID NO: 676948 - RNA, 19 nt, Artificial Sequence
  Description of Artificial Sequence: Synthetic oligonucleotide
  Sense strand starting at position 3197 of SEQ ID NO: 585905
ggccucugauuggugggaa

SEQ ID NO: 676949 - RNA, 19 nt, Artificial Sequence
  Description of Artificial Sequence: Synthetic oligonucleotide
  Antisense strand to SEQ ID NO: 676948
uucccaccaaucagaggcc

SEQ ID NO: 676950 - RNA, 19 nt, Artificial Sequence
  Description of Artificial Sequence: Synthetic oligonucleotide
  Sense strand starting at position 3200 of SEQ ID NO: 585905
cucugauuggugggaauca

SEQ ID NO: 676951 - RNA, 19 nt, Artificial Sequence
  Description of Artificial Sequence: Synthetic oligonucleotide
  Antisense strand to SEQ ID NO: 676950
ugauucccaccaaucagag

SEQ ID NO: 676952 - RNA, 19 nt, Artificial Sequence
  Description of Artificial Sequence: Synthetic oligonucleotide
  Sense strand starting at position 3389 of SEQ ID NO: 585905
uuugaaagcuccguagaau

SEQ ID NO: 676953 - RNA, 19 nt, Artificial Sequence
  Description of Artificial Sequence: Synthetic oligonucleotide
  Antisense strand to SEQ ID NO: 676952
auucuacggagcuuucaaa

SEQ ID NO: 676954 - RNA, 19 nt, Artificial Sequence
  Description of Artificial Sequence: Synthetic oligonucleotide
  Sense strand starting at position 3390 of SEQ ID NO: 585905
uugaaagcuccguagaaug

SEQ ID NO: 676955 - RNA, 19 nt, Artificial Sequence
  Description of Artificial Sequence: Synthetic oligonucleotide
  Antisense strand to SEQ ID NO: 676954
cauucuacggagcuuucaa

SEQ ID NO: 676956 - RNA, 19 nt, Artificial Sequence
  Description of Artificial Sequence: Synthetic oligonucleotide
  Sense strand starting at position 3392 of SEQ ID NO: 585905
gaaagcuccguagaaugau

SEQ ID NO: 676957 - RNA, 19 nt, Artificial Sequence
  Description of Artificial Sequence: Synthetic oligonucleotide
  Antisense strand to SEQ ID NO: 676956
aucauucuacggagcuuuc

SEQ ID NO: 676958 - RNA, 19 nt, Artificial Sequence
  Description of Artificial Sequence: Synthetic oligonucleotide
  Sense strand starting at position 3447 of SEQ ID NO: 585905
aagggauagugauuauagu

SEQ ID NO: 676959 - RNA, 19 nt, Artificial Sequence
  Description of Artificial Sequence: Synthetic oligonucleotide
  Antisense strand to SEQ ID NO: 676958
acuauaaucacuaucccuu

SEQ ID NO: 676960 - RNA, 19 nt, Artificial Sequence
  Description of Artificial Sequence: Synthetic oligonucleotide
  Sense strand starting at position 3454 of SEQ ID NO: 585905
agugauuauaguuggguca

SEQ ID NO: 676961 - RNA, 19 nt, Artificial Sequence
  Description of Artificial Sequence: Synthetic oligonucleotide
  Antisense strand to SEQ ID NO: 676960
ugacccaacuauaaucacu

SEQ ID NO: 676962 - RNA, 19 nt, Artificial Sequence
  Description of Artificial Sequence: Synthetic oligonucleotide
  Sense strand starting at position 3492 of SEQ ID NO: 585905
acaagaagcuggguuagaa

SEQ ID NO: 676963 - RNA, 19 nt, Artificial Sequence
  Description of Artificial Sequence: Synthetic oligonucleotide
  Antisense strand to SEQ ID NO: 676962
uucuaacccagcuucuugu

SEQ ID NO: 676964 - RNA, 19 nt, Artificial Sequence
  Description of Artificial Sequence: Synthetic oligonucleotide
  Sense strand starting at position 3550 of SEQ ID NO: 585905
gguaacaucucagccaauu

SEQ ID NO: 676965 - RNA, 19 nt, Artificial Sequence
  Description of Artificial Sequence: Synthetic oligonucleotide
  Antisense strand to SEQ ID NO: 676964
aauuggcugagauguuacc

SEQ ID NO: 676966 - RNA, 19 nt, Artificial Sequence
  Description of Artificial Sequence: Synthetic oligonucleotide
  Sense strand starting at position 3588 of SEQ ID NO: 585905
ggaagaauguauguagagu

SEQ ID NO: 676967 - RNA, 19 nt, Artificial Sequence
  Description of Artificial Sequence: Synthetic oligonucleotide
  Antisense strand to SEQ ID NO: 676966
acucuacauacauucuucc

SEQ ID NO: 676968 - RNA, 19 nt, Artificial Sequence
  Description of Artificial Sequence: Synthetic oligonucleotide
  Sense strand starting at position 3620 of SEQ ID NO: 585905
ggaacaagauaugcugagu

SEQ ID NO: 676969 - RNA, 19 nt, Artificial Sequence
  Description of Artificial Sequence: Synthetic oligonucleotide
  Antisense strand to SEQ ID NO: 676968
acucagcauaucuuguucc

SEQ ID NO: 676970 - RNA, 19 nt, Artificial Sequence
  Description of Artificial Sequence: Synthetic oligonucleotide
  Sense strand starting at position 3623 of SEQ ID NO: 585905
acaagauaugcugaguacu

SEQ ID NO: 676971 - RNA, 19 nt, Artificial Sequence
  Description of Artificial Sequence: Synthetic oligonucleotide
  Antisense strand to SEQ ID NO: 676970
aguacucagcauaucuugu

SEQ ID NO: 676972 - RNA, 19 nt, Artificial Sequence
  Description of Artificial Sequence: Synthetic oligonucleotide
  Sense strand starting at position 3625 of SEQ ID NO: 585905
aagauaugcugaguacuug

SEQ ID NO: 676973 - RNA, 19 nt, Artificial Sequence
  Description of Artificial Sequence: Synthetic oligonucleotide
  Antisense strand to SEQ ID NO: 676972
caaguacucagcauaucuu

SEQ ID NO: 676974 - RNA, 19 nt, Artificial Sequence
  Description of Artificial Sequence: Synthetic oligonucleotide
  Sense strand starting at position 3744 of SEQ ID NO: 585905
ugccuuguagaccauagaa

SEQ ID NO: 676975 - RNA, 19 nt, Artificial Sequence
  Description of Artificial Sequence: Synthetic oligonucleotide
  Antisense strand to SEQ ID NO: 676974
uucuauggucuacaaggca

SEQ ID NO: 676976 - RNA, 19 nt, Artificial Sequence
  Description of Artificial Sequence: Synthetic oligonucleotide
  Sense strand starting at position 229 of SEQ ID NO: 585906
cuucuuccugauugagcua

SEQ ID NO: 676977 - RNA, 19 nt, Artificial Sequence
  Description of Artificial Sequence: Synthetic oligonucleotide
  Antisense strand to SEQ ID NO: 676976
uagcucaaucaggaagaag

SEQ ID NO: 676978 - RNA, 19 nt, Artificial Sequence
  Description of Artificial Sequence: Synthetic oligonucleotide
  Sense strand starting at position 234 of SEQ ID NO: 585906
uccugauugagcuagaggu

SEQ ID NO: 676979 - RNA, 19 nt, Artificial Sequence
  Description of Artificial Sequence: Synthetic oligonucleotide
  Antisense strand to SEQ ID NO: 676978
accucuagcucaaucagga

SEQ ID NO: 676980 - RNA, 19 nt, Artificial Sequence
  Description of Artificial Sequence: Synthetic oligonucleotide
  Sense strand starting at position 236 of SEQ ID NO: 585906
cugauugagcuagagguga

SEQ ID NO: 676981 - RNA, 19 nt, Artificial Sequence
  Description of Artificial Sequence: Synthetic oligonucleotide
  Antisense strand to SEQ ID NO: 676980
ucaccucuagcucaaucag

SEQ ID NO: 676982 - RNA, 19 nt, Artificial Sequence
  Description of Artificial Sequence: Synthetic oligonucleotide
  Sense strand starting at position 318 of SEQ ID NO: 585906
uggugaugaucaucucagu

SEQ ID NO: 676983 - RNA, 19 nt, Artificial Sequence
  Description of Artificial Sequence: Synthetic oligonucleotide
  Antisense strand to SEQ ID NO: 676982
acugagaugaucaucacca

SEQ ID NO: 676984 - RNA, 19 nt, Artificial Sequence
  Description of Artificial Sequence: Synthetic oligonucleotide
  Sense strand starting at position 324 of SEQ ID NO: 585906
ugaucaucucagugccuau

SEQ ID NO: 676985 - RNA, 19 nt, Artificial Sequence
  Description of Artificial Sequence: Synthetic oligonucleotide
  Antisense strand to SEQ ID NO: 676984
auaggcacugagaugauca

SEQ ID NO: 676986 - RNA, 19 nt, Artificial Sequence
  Description of Artificial Sequence: Synthetic oligonucleotide
  Sense strand starting at position 637 of SEQ ID NO: 585906
gccaucagguccuccuaaa

SEQ ID NO: 676987 - RNA, 19 nt, Artificial Sequence
  Description of Artificial Sequence: Synthetic oligonucleotide
  Antisense strand to SEQ ID NO: 676986
uuuaggaggaccugauggc

SEQ ID NO: 676988 - RNA, 19 nt, Artificial Sequence
  Description of Artificial Sequence: Synthetic oligonucleotide
  Sense strand starting at position 678 of SEQ ID NO: 585906
ccacauucugccugucgaa

SEQ ID NO: 676989 - RNA, 19 nt, Artificial Sequence
  Description of Artificial Sequence: Synthetic oligonucleotide
  Antisense strand to SEQ ID NO: 676988
uucgacaggcagaaugugg

SEQ ID NO: 676990 - RNA, 19 nt, Artificial Sequence
  Description of Artificial Sequence: Synthetic oligonucleotide
  Sense strand starting at position 1136 of SEQ ID NO: 585906
ucggccuuggcagagaaau

SEQ ID NO: 676991 - RNA, 19 nt, Artificial Sequence
  Description of Artificial Sequence: Synthetic oligonucleotide
  Antisense strand to SEQ ID NO: 676990
auuucucugccaaggccga

SEQ ID NO: 676992 - RNA, 19 nt, Artificial Sequence
  Description of Artificial Sequence: Synthetic oligonucleotide
  Sense strand starting at position 1138 of SEQ ID NO: 585906
ggccuuggcagagaaauca

SEQ ID NO: 676993 - RNA, 19 nt, Artificial Sequence
  Description of Artificial Sequence: Synthetic oligonucleotide
  Antisense strand to SEQ ID NO: 676992
ugauuucucugccaaggcc

SEQ ID NO: 676994 - RNA, 19 nt, Artificial Sequence
  Description of Artificial Sequence: Synthetic oligonucleotide
  Sense strand starting at position 1180 of SEQ ID NO: 585906
ucaacuacccuucgggaaa

SEQ ID NO: 676995 - RNA, 19 nt, Artificial Sequence
  Description of Artificial Sequence: Synthetic oligonucleotide
  Antisense strand to SEQ ID NO: 676994
uuucccgaaggguaguuga

SEQ ID NO: 676996 - RNA, 19 nt, Artificial Sequence
  Description of Artificial Sequence: Synthetic oligonucleotide
  Sense strand starting at position 1730 of SEQ ID NO: 585906
gccuucgucucccucagaa

SEQ ID NO: 676997 - RNA, 19 nt, Artificial Sequence
  Description of Artificial Sequence: Synthetic oligonucleotide
  Antisense strand to SEQ ID NO: 676996
uucugagggagacgaaggc

SEQ ID NO: 676998 - RNA, 19 nt, Artificial Sequence
  Description of Artificial Sequence: Synthetic oligonucleotide
  Sense strand starting at position 1732 of SEQ ID NO: 585906
cuucgucucccucagaaga

SEQ ID NO: 676999 - RNA, 19 nt, Artificial Sequence
  Description of Artificial Sequence: Synthetic oligonucleotide
  Antisense strand to SEQ ID NO: 676998
ucuucugagggagacgaag

SEQ ID NO: 677000 - RNA, 19 nt, Artificial Sequence
  Description of Artificial Sequence: Synthetic oligonucleotide
  Sense strand starting at position 2234 of SEQ ID NO: 585906
cgaggucugccucaacuga

SEQ ID NO: 677001 - RNA, 19 nt, Artificial Sequence
  Description of Artificial Sequence: Synthetic oligonucleotide
  Antisense strand to SEQ ID NO: 677000
ucaguugaggcagaccucg

SEQ ID NO: 677002 - RNA, 19 nt, Artificial Sequence
  Description of Artificial Sequence: Synthetic oligonucleotide
  Sense strand starting at position 2293 of SEQ ID NO: 585906
gacacaaauuagggauugu

SEQ ID NO: 677003 - RNA, 19 nt, Artificial Sequence
  Description of Artificial Sequence: Synthetic oligonucleotide
  Antisense strand to SEQ ID NO: 677002
acaaucccuaauuuguguc

SEQ ID NO: 677004 - RNA, 19 nt, Artificial Sequence
  Description of Artificial Sequence: Synthetic oligonucleotide
  Sense strand starting at position 2297 of SEQ ID NO: 585906
caaauuagggauuguaauu

SEQ ID NO: 677005 - RNA, 19 nt, Artificial Sequence
  Description of Artificial Sequence: Synthetic oligonucleotide
  Antisense strand to SEQ ID NO: 677004
aauuacaaucccuaauuug

SEQ ID NO: 677006 - RNA, 19 nt, Artificial Sequence
  Description of Artificial Sequence: Synthetic oligonucleotide
  Sense strand starting at position 2324 of SEQ ID NO: 585906
uugccuugaucugucagca

SEQ ID NO: 677007 - RNA, 19 nt, Artificial Sequence
  Description of Artificial Sequence: Synthetic oligonucleotide
  Antisense strand to SEQ ID NO: 677006
ugcugacagaucaaggcaa

SEQ ID NO: 677008 - RNA, 19 nt, Artificial Sequence
  Description of Artificial Sequence: Synthetic oligonucleotide
  Sense strand starting at position 2361 of SEQ ID NO: 585906
gugggaagaacuugcucau

SEQ ID NO: 677009 - RNA, 19 nt, Artificial Sequence
  Description of Artificial Sequence: Synthetic oligonucleotide
  Antisense strand to SEQ ID NO: 677008
augagcaaguucuucccac

SEQ ID NO: 677010 - RNA, 19 nt, Artificial Sequence
  Description of Artificial Sequence: Synthetic oligonucleotide
  Sense strand starting at position 2364 of SEQ ID NO: 585906
ggaagaacuugcucauuag

SEQ ID NO: 677011 - RNA, 19 nt, Artificial Sequence
  Description of Artificial Sequence: Synthetic oligonucleotide
  Antisense strand to SEQ ID NO: 677010
cuaaugagcaaguucuucc

SEQ ID NO: 677012 - RNA, 19 nt, Artificial Sequence
  Description of Artificial Sequence: Synthetic oligonucleotide
  Sense strand starting at position 2365 of SEQ ID NO: 585906
gaagaacuugcucauuagu

SEQ ID NO: 677013 - RNA, 19 nt, Artificial Sequence
  Description of Artificial Sequence: Synthetic oligonucleotide
  Antisense strand to SEQ ID NO: 677012
acuaaugagcaaguucuuc

SEQ ID NO: 677014 - RNA, 19 nt, Artificial Sequence
  Description of Artificial Sequence: Synthetic oligonucleotide
  Sense strand starting at position 2367 of SEQ ID NO: 585906
agaacuugcucauuagugu

SEQ ID NO: 677015 - RNA, 19 nt, Artificial Sequence
  Description of Artificial Sequence: Synthetic oligonucleotide
  Antisense strand to SEQ ID NO: 677014
acacuaaugagcaaguucu

SEQ ID NO: 677016 - RNA, 19 nt, Artificial Sequence
  Description of Artificial Sequence: Synthetic oligonucleotide
  Sense strand starting at position 2695 of SEQ ID NO: 585906
cguaaauugccgucccacu

SEQ ID NO: 677017 - RNA, 19 nt, Artificial Sequence
  Description of Artificial Sequence: Synthetic oligonucleotide
  Antisense strand to SEQ ID NO: 677016
agugggacggcaauuuacg

SEQ ID NO: 677018 - RNA, 19 nt, Artificial Sequence
  Description of Artificial Sequence: Synthetic oligonucleotide
  Sense strand starting at position 2713 of SEQ ID NO: 585906
uuccguaucgcuuaauguu

SEQ ID NO: 677019 - RNA, 19 nt, Artificial Sequence
  Description of Artificial Sequence: Synthetic oligonucleotide
  Antisense strand to SEQ ID NO: 677018
aacauuaagcgauacggaa

SEQ ID NO: 677020 - RNA, 19 nt, Artificial Sequence
  Description of Artificial Sequence: Synthetic oligonucleotide
  Sense strand starting at position 2721 of SEQ ID NO: 585906
cgcuuaauguugcuacaac

SEQ ID NO: 677021 - RNA, 19 nt, Artificial Sequence
  Description of Artificial Sequence: Synthetic oligonucleotide
  Antisense strand to SEQ ID NO: 677020
guuguagcaacauuaagcg

SEQ ID NO: 677022 - RNA, 19 nt, Artificial Sequence
  Description of Artificial Sequence: Synthetic oligonucleotide
  Sense strand starting at position 2748 of SEQ ID NO: 585906
uugggaagcugggaagaau

SEQ ID NO: 677023 - RNA, 19 nt, Artificial Sequence
  Description of Artificial Sequence: Synthetic oligonucleotide
  Antisense strand to SEQ ID NO: 677022
auucuucccagcuucccaa

SEQ ID NO: 677024 - RNA, 19 nt, Artificial Sequence
  Description of Artificial Sequence: Synthetic oligonucleotide
  Sense strand starting at position 2804 of SEQ ID NO: 585906
cucagucugcgccagauau

SEQ ID NO: 677025 - RNA, 19 nt, Artificial Sequence
  Description of Artificial Sequence: Synthetic oligonucleotide
  Antisense strand to SEQ ID NO: 677024
auaucuggcgcagacugag

SEQ ID NO: 677026 - RNA, 19 nt, Artificial Sequence
  Description of Artificial Sequence: Synthetic oligonucleotide
  Sense strand starting at position 2815 of SEQ ID NO: 585906
ccagauauggcuuaggcuu

SEQ ID NO: 677027 - RNA, 19 nt, Artificial Sequence
  Description of Artificial Sequence: Synthetic oligonucleotide
  Antisense strand to SEQ ID NO: 677026
aagccuaagccauaucugg

SEQ ID NO: 677028 - RNA, 19 nt, Artificial Sequence
  Description of Artificial Sequence: Synthetic oligonucleotide
  Sense strand starting at position 2869 of SEQ ID NO: 585906
auaccagguuaagaaauau

SEQ ID NO: 677029 - RNA, 19 nt, Artificial Sequence
  Description of Artificial Sequence: Synthetic oligonucleotide
  Antisense strand to SEQ ID NO: 677028
auauuucuuaaccugguau

SEQ ID NO: 677030 - RNA, 19 nt, Artificial Sequence
  Description of Artificial Sequence: Synthetic oligonucleotide
  Sense strand starting at position 2884 of SEQ ID NO: 585906
auauguaaauccuuuagga

SEQ ID NO: 677031 - RNA, 19 nt, Artificial Sequence
  Description of Artificial Sequence: Synthetic oligonucleotide
  Antisense strand to SEQ ID NO: 677030
uccuaaaggauuuacauau

SEQ ID NO: 677032 - RNA, 19 nt, Artificial Sequence
  Description of Artificial Sequence: Synthetic oligonucleotide
  Sense strand starting at position 2919 of SEQ ID NO: 585906
uaacgcucaguccgucaua

SEQ ID NO: 677033 - RNA, 19 nt, Artificial Sequence
  Description of Artificial Sequence: Synthetic oligonucleotide
  Antisense strand to SEQ ID NO: 677032
uaugacggacugagcguua

SEQ ID NO: 677034 - RNA, 19 nt, Artificial Sequence
  Description of Artificial Sequence: Synthetic oligonucleotide
  Sense strand starting at position 2920 of SEQ ID NO: 585906
aacgcucaguccgucauau

SEQ ID NO: 677035 - RNA, 19 nt, Artificial Sequence
  Description of Artificial Sequence: Synthetic oligonucleotide
  Antisense strand to SEQ ID NO: 677034
auaugacggacugagcguu

SEQ ID NO: 677036 - RNA, 19 nt, Artificial Sequence
  Description of Artificial Sequence: Synthetic oligonucleotide
  Sense strand starting at position 2922 of SEQ ID NO: 585906
cgcucaguccgucauauaa

SEQ ID NO: 677037 - RNA, 19 nt, Artificial Sequence
  Description of Artificial Sequence: Synthetic oligonucleotide
  Antisense strand to SEQ ID NO: 677036
uuauaugacggacugagcg

SEQ ID NO: 677038 - RNA, 19 nt, Artificial Sequence
  Description of Artificial Sequence: Synthetic oligonucleotide
  Sense strand starting at position 3028 of SEQ ID NO: 585906
uucuguacgucuuuaacga

SEQ ID NO: 677039 - RNA, 19 nt, Artificial Sequence
  Description of Artificial Sequence: Synthetic oligonucleotide
  Antisense strand to SEQ ID NO: 677038
ucguuaaagacguacagaa

SEQ ID NO: 677040 - RNA, 19 nt, Artificial Sequence
  Description of Artificial Sequence: Synthetic oligonucleotide
  Sense strand starting at position 3029 of SEQ ID NO: 585906
ucuguacgucuuuaacgau

SEQ ID NO: 677041 - RNA, 19 nt, Artificial Sequence
  Description of Artificial Sequence: Synthetic oligonucleotide
  Antisense strand to SEQ ID NO: 677040
aucguuaaagacguacaga

SEQ ID NO: 677042 - RNA, 19 nt, Artificial Sequence
  Description of Artificial Sequence: Synthetic oligonucleotide
  Sense strand starting at position 3035 of SEQ ID NO: 585906
cgucuuuaacgauauggac

SEQ ID NO: 677043 - RNA, 19 nt, Artificial Sequence
  Description of Artificial Sequence: Synthetic oligonucleotide
  Antisense strand to SEQ ID NO: 677042
guccauaucguuaaagacg

SEQ ID NO: 677044 - RNA, 19 nt, Artificial Sequence
  Description of Artificial Sequence: Synthetic oligonucleotide
  Sense strand starting at position 3149 of SEQ ID NO: 585906
uuauauuuguccuacuguu

SEQ ID NO: 677045 - RNA, 19 nt, Artificial Sequence
  Description of Artificial Sequence: Synthetic oligonucleotide
  Antisense strand to SEQ ID NO: 677044
aacaguaggacaaauauaa

SEQ ID NO: 677046 - RNA, 19 nt, Artificial Sequence
  Description of Artificial Sequence: Synthetic oligonucleotide
  Sense strand starting at position 3156 of SEQ ID NO: 585906
uguccuacuguugacaauu

SEQ ID NO: 677047 - RNA, 19 nt, Artificial Sequence
  Description of Artificial Sequence: Synthetic oligonucleotide
  Antisense strand to SEQ ID NO: 677046
aauugucaacaguaggaca

SEQ ID NO: 677048 - RNA, 19 nt, Artificial Sequence
  Description of Artificial Sequence: Synthetic oligonucleotide
  Sense strand starting at position 3197 of SEQ ID NO: 585906
uaaggaguccauugaugua

SEQ ID NO: 677049 - RNA, 19 nt, Artificial Sequence
  Description of Artificial Sequence: Synthetic oligonucleotide
  Antisense strand to SEQ ID NO: 677048
uacaucaauggacuccuua

SEQ ID NO: 677050 - RNA, 19 nt, Artificial Sequence
  Description of Artificial Sequence: Synthetic oligonucleotide
  Sense strand starting at position 3200 of SEQ ID NO: 585906
ggaguccauugauguauuu

SEQ ID NO: 677051 - RNA, 19 nt, Artificial Sequence
  Description of Artificial Sequence: Synthetic oligonucleotide
  Antisense strand to SEQ ID NO: 677050
aaauacaucaauggacucc

SEQ ID NO: 677052 - RNA, 19 nt, Artificial Sequence
  Description of Artificial Sequence: Synthetic oligonucleotide
  Sense strand starting at position 3377 of SEQ ID NO: 585906
auuaaucgugcauauuacu

SEQ ID NO: 677053 - RNA, 19 nt, Artificial Sequence
  Description of Artificial Sequence: Synthetic oligonucleotide
  Antisense strand to SEQ ID NO: 677052
aguaauaugcacgauuaau

SEQ ID NO: 677054 - RNA, 19 nt, Artificial Sequence
  Description of Artificial Sequence: Synthetic oligonucleotide
  Sense strand starting at position 3660 of SEQ ID NO: 585906
cccagaucgcgcuacugua

SEQ ID NO: 677055 - RNA, 19 nt, Artificial Sequence
  Description of Artificial Sequence: Synthetic oligonucleotide
  Antisense strand to SEQ ID NO: 677054
uacaguagcgcgaucuggg

SEQ ID NO: 677056 - RNA, 19 nt, Artificial Sequence
  Description of Artificial Sequence: Synthetic oligonucleotide
  Sense strand starting at position 167 of SEQ ID NO: 585907
gcuggauuauagguguaaa

SEQ ID NO: 677057 - RNA, 19 nt, Artificial Sequence
  Description of Artificial Sequence: Synthetic oligonucleotide
  Antisense strand to SEQ ID NO: 677056
uuuacaccuauaauccagc

SEQ ID NO: 677058 - RNA, 19 nt, Artificial Sequence
  Description of Artificial Sequence: Synthetic oligonucleotide
  Sense strand starting at position 168 of SEQ ID NO: 585907
cuggauuauagguguaaac

SEQ ID NO: 677059 - RNA, 19 nt, Artificial Sequence
  Description of Artificial Sequence: Synthetic oligonucleotide
  Antisense strand to SEQ ID NO: 677058
guuuacaccuauaauccag

SEQ ID NO: 677060 - RNA, 19 nt, Artificial Sequence
  Description of Artificial Sequence: Synthetic oligonucleotide
  Sense strand starting at position 311 of SEQ ID NO: 585907
guaagcacuagaugaaugu

SEQ ID NO: 677061 - RNA, 19 nt, Artificial Sequence
  Description of Artificial Sequence: Synthetic oligonucleotide
  Antisense strand to SEQ ID NO: 677060
acauucaucuagugcuuac

SEQ ID NO: 677062 - RNA, 19 nt, Artificial Sequence
  Description of Artificial Sequence: Synthetic oligonucleotide
  Sense strand starting at position 320 of SEQ ID NO: 585907
agaugaauguuggcuacua

SEQ ID NO: 677063 - RNA, 19 nt, Artificial Sequence
  Description of Artificial Sequence: Synthetic oligonucleotide
  Antisense strand to SEQ ID NO: 677062
uaguagccaacauucaucu

SEQ ID NO: 677064 - RNA, 19 nt, Artificial Sequence
  Description of Artificial Sequence: Synthetic oligonucleotide
  Sense strand starting at position 330 of SEQ ID NO: 585907
uggcuacuauagucuaaua

SEQ ID NO: 677065 - RNA, 19 nt, Artificial Sequence
  Description of Artificial Sequence: Synthetic oligonucleotide
  Antisense strand to SEQ ID NO: 677064
uauuagacuauaguagcca

SEQ ID NO: 677066 - RNA, 19 nt, Artificial Sequence
  Description of Artificial Sequence: Synthetic oligonucleotide
  Sense strand starting at position 400 of SEQ ID NO: 585907
augugaaucuaggcuuucu

SEQ ID NO: 677067 - RNA, 19 nt, Artificial Sequence
  Description of Artificial Sequence: Synthetic oligonucleotide
  Antisense strand to SEQ ID NO: 677066
agaaagccuagauucacau

SEQ ID NO: 677068 - RNA, 19 nt, Artificial Sequence
  Description of Artificial Sequence: Synthetic oligonucleotide
  Sense strand starting at position 429 of SEQ ID NO: 585907
gccucaagucacggagaaa

SEQ ID NO: 677069 - RNA, 19 nt, Artificial Sequence
  Description of Artificial Sequence: Synthetic oligonucleotide
  Antisense strand to SEQ ID NO: 677068
uuucuccgugacuugaggc

SEQ ID NO: 677070 - RNA, 19 nt, Artificial Sequence
  Description of Artificial Sequence: Synthetic oligonucleotide
  Sense strand starting at position 502 of SEQ ID NO: 585907
aacagagugccucagcaaa

SEQ ID NO: 677071 - RNA, 19 nt, Artificial Sequence
  Description of Artificial Sequence: Synthetic oligonucleotide
  Antisense strand to SEQ ID NO: 677070
uuugcugaggcacucuguu

SEQ ID NO: 677072 - RNA, 19 nt, Artificial Sequence
  Description of Artificial Sequence: Synthetic oligonucleotide
  Sense strand starting at position 537 of SEQ ID NO: 585907
agucuaaacuuggccucua

SEQ ID NO: 677073 - RNA, 19 nt, Artificial Sequence
  Description of Artificial Sequence: Synthetic oligonucleotide
  Antisense strand to SEQ ID NO: 677072
uagaggccaaguuuagacu

SEQ ID NO: 677074 - RNA, 19 nt, Artificial Sequence
  Description of Artificial Sequence: Synthetic oligonucleotide
  Sense strand starting at position 577 of SEQ ID NO: 585907
ugugauaucuuucugauga

SEQ ID NO: 677075 - RNA, 19 nt, Artificial Sequence
  Description of Artificial Sequence: Synthetic oligonucleotide
  Antisense strand to SEQ ID NO: 677074
ucaucagaaagauaucaca

SEQ ID NO: 677076 - RNA, 19 nt, Artificial Sequence
  Description of Artificial Sequence: Synthetic oligonucleotide
  Sense strand starting at position 600 of SEQ ID NO: 585907
ccagguccuguaugagcua

SEQ ID NO: 677077 - RNA, 19 nt, Artificial Sequence
  Description of Artificial Sequence: Synthetic oligonucleotide
  Antisense strand to SEQ ID NO: 677076
uagcucauacaggaccugg

SEQ ID NO: 677078 - RNA, 19 nt, Artificial Sequence
  Description of Artificial Sequence: Synthetic oligonucleotide
  Sense strand starting at position 647 of SEQ ID NO: 585907
gagagcuucugacugugca

SEQ ID NO: 677079 - RNA, 19 nt, Artificial Sequence
  Description of Artificial Sequence: Synthetic oligonucleotide
  Antisense strand to SEQ ID NO: 677078
ugcacagucagaagcucuc

SEQ ID NO: 677080 - RNA, 19 nt, Artificial Sequence
  Description of Artificial Sequence: Synthetic oligonucleotide
  Sense strand starting at position 664 of SEQ ID NO: 585907
cacacuucuggugggaaga

SEQ ID NO: 677081 - RNA, 19 nt, Artificial Sequence
  Description of Artificial Sequence: Synthetic oligonucleotide
  Antisense strand to SEQ ID NO: 677080
ucuucccaccagaagugug

SEQ ID NO: 677082 - RNA, 19 nt, Artificial Sequence
  Description of Artificial Sequence: Synthetic oligonucleotide
  Sense strand starting at position 665 of SEQ ID NO: 585907
acacuucuggugggaagau

SEQ ID NO: 677083 - RNA, 19 nt, Artificial Sequence
  Description of Artificial Sequence: Synthetic oligonucleotide
  Antisense strand to SEQ ID NO: 677082
aucuucccaccagaagugu

SEQ ID NO: 677084 - RNA, 19 nt, Artificial Sequence
  Description of Artificial Sequence: Synthetic oligonucleotide
  Sense strand starting at position 707 of SEQ ID NO: 585907
auccaaucugaugggagua

SEQ ID NO: 677085 - RNA, 19 nt, Artificial Sequence
  Description of Artificial Sequence: Synthetic oligonucleotide
  Antisense strand to SEQ ID NO: 677084
uacucccaucagauuggau

SEQ ID NO: 677086 - RNA, 19 nt, Artificial Sequence
  Description of Artificial Sequence: Synthetic oligonucleotide
  Sense strand starting at position 708 of SEQ ID NO: 585907
uccaaucugaugggaguau

SEQ ID NO: 677087 - RNA, 19 nt, Artificial Sequence
  Description of Artificial Sequence: Synthetic oligonucleotide
  Antisense strand to SEQ ID NO: 677086
auacucccaucagauugga

SEQ ID NO: 677088 - RNA, 19 nt, Artificial Sequence
  Description of Artificial Sequence: Synthetic oligonucleotide
  Sense strand starting at position 742 of SEQ ID NO: 585907
gggucuuguggagaccuua

SEQ ID NO: 677089 - RNA, 19 nt, Artificial Sequence
  Description of Artificial Sequence: Synthetic oligonucleotide
  Antisense strand to SEQ ID NO: 677088
uaaggucuccacaagaccc

SEQ ID NO: 677090 - RNA, 19 nt, Artificial Sequence
  Description of Artificial Sequence: Synthetic oligonucleotide
  Sense strand starting at position 1661 of SEQ ID NO: 585907
guccuuaaguacuccaaca

SEQ ID NO: 677091 - RNA, 19 nt, Artificial Sequence
  Description of Artificial Sequence: Synthetic oligonucleotide
  Antisense strand to SEQ ID NO: 677090
uguuggaguacuuaaggac

SEQ ID NO: 677092 - RNA, 19 nt, Artificial Sequence
  Description of Artificial Sequence: Synthetic oligonucleotide
  Sense strand starting at position 1705 of SEQ ID NO: 585907
ggcuucucuaggugggaua

SEQ ID NO: 677093 - RNA, 19 nt, Artificial Sequence
  Description of Artificial Sequence: Synthetic oligonucleotide
  Antisense strand to SEQ ID NO: 677092
uaucccaccuagagaagcc

SEQ ID NO: 677094 - RNA, 19 nt, Artificial Sequence
  Description of Artificial Sequence: Synthetic oligonucleotide
  Sense strand starting at position 1706 of SEQ ID NO: 585907
gcuucucuaggugggauaa

SEQ ID NO: 677095 - RNA, 19 nt, Artificial Sequence
  Description of Artificial Sequence: Synthetic oligonucleotide
  Antisense strand to SEQ ID NO: 677094
uuaucccaccuagagaagc

SEQ ID NO: 677096 - RNA, 19 nt, Artificial Sequence
  Description of Artificial Sequence: Synthetic oligonucleotide
  Sense strand starting at position 1707 of SEQ ID NO: 585907
cuucucuaggugggauaaa

SEQ ID NO: 677097 - RNA, 19 nt, Artificial Sequence
  Description of Artificial Sequence: Synthetic oligonucleotide
  Antisense strand to SEQ ID NO: 677096
uuuaucccaccuagagaag

SEQ ID NO: 677098 - RNA, 19 nt, Artificial Sequence
  Description of Artificial Sequence: Synthetic oligonucleotide
  Sense strand starting at position 2178 of SEQ ID NO: 585907
cgcauuuagugggcccaaa

SEQ ID NO: 677099 - RNA, 19 nt, Artificial Sequence
  Description of Artificial Sequence: Synthetic oligonucleotide
  Antisense strand to SEQ ID NO: 677098
uuugggcccacuaaaugcg

SEQ ID NO: 677100 - RNA, 19 nt, Artificial Sequence
  Description of Artificial Sequence: Synthetic oligonucleotide
  Sense strand starting at position 2346 of SEQ ID NO: 585907
gggcucucgcgguugguaa

SEQ ID NO: 677101 - RNA, 19 nt, Artificial Sequence
  Description of Artificial Sequence: Synthetic oligonucleotide
  Antisense strand to SEQ ID NO: 677100
uuaccaaccgcgagagccc

SEQ ID NO: 677102 - RNA, 19 nt, Artificial Sequence
  Description of Artificial Sequence: Synthetic oligonucleotide
  Sense strand starting at position 2640 of SEQ ID NO: 585907
aagguagauuagguuguaa

SEQ ID NO: 677103 - RNA, 19 nt, Artificial Sequence
  Description of Artificial Sequence: Synthetic oligonucleotide
  Antisense strand to SEQ ID NO: 677102
uuacaaccuaaucuaccuu

SEQ ID NO: 677104 - RNA, 19 nt, Artificial Sequence
  Description of Artificial Sequence: Synthetic oligonucleotide
  Sense strand starting at position 2722 of SEQ ID NO: 585907
ggaggaagaucuuaaagug

SEQ ID NO: 677105 - RNA, 19 nt, Artificial Sequence
  Description of Artificial Sequence: Synthetic oligonucleotide
  Antisense strand to SEQ ID NO: 677104
cacuuuaagaucuuccucc

SEQ ID NO: 677106 - RNA, 19 nt, Artificial Sequence
  Description of Artificial Sequence: Synthetic oligonucleotide
  Sense strand starting at position 2748 of SEQ ID NO: 585907
uguguuaggacucgagaaa

SEQ ID NO: 677107 - RNA, 19 nt, Artificial Sequence
  Description of Artificial Sequence: Synthetic oligonucleotide
  Antisense strand to SEQ ID NO: 677106
uuucucgaguccuaacaca

SEQ ID NO: 677108 - RNA, 19 nt, Artificial Sequence
  Description of Artificial Sequence: Synthetic oligonucleotide
  Sense strand starting at position 2749 of SEQ ID NO: 585907
guguuaggacucgagaaag

SEQ ID NO: 677109 - RNA, 19 nt, Artificial Sequence
  Description of Artificial Sequence: Synthetic oligonucleotide
  Antisense strand to SEQ ID NO: 677108
cuuucucgaguccuaacac

SEQ ID NO: 677110 - RNA, 19 nt, Artificial Sequence
  Description of Artificial Sequence: Synthetic oligonucleotide
  Sense strand starting at position 2836 of SEQ ID NO: 585907
agauuugaauaagauguca

SEQ ID NO: 677111 - RNA, 19 nt, Artificial Sequence
  Description of Artificial Sequence: Synthetic oligonucleotide
  Antisense strand to SEQ ID NO: 677110
ugacaucuuauucaaaucu

SEQ ID NO: 677112 - RNA, 19 nt, Artificial Sequence
  Description of Artificial Sequence: Synthetic oligonucleotide
  Sense strand starting at position 3031 of SEQ ID NO: 585907
ugcugagccauggagagaa

SEQ ID NO: 677113 - RNA, 19 nt, Artificial Sequence
  Description of Artificial Sequence: Synthetic oligonucleotide
  Antisense strand to SEQ ID NO: 677112
uucucuccauggcucagca

SEQ ID NO: 677114 - RNA, 19 nt, Artificial Sequence
  Description of Artificial Sequence: Synthetic oligonucleotide
  Sense strand starting at position 3218 of SEQ ID NO: 585907
uucucuccacuugauaguu

SEQ ID NO: 677115 - RNA, 19 nt, Artificial Sequence
  Description of Artificial Sequence: Synthetic oligonucleotide
  Antisense strand to SEQ ID NO: 677114
aacuaucaaguggagagaa

SEQ ID NO: 677116 - RNA, 19 nt, Artificial Sequence
  Description of Artificial Sequence: Synthetic oligonucleotide
  Sense strand starting at position 3327 of SEQ ID NO: 585907
gguggaccuggcuauaauu

SEQ ID NO: 677117 - RNA, 19 nt, Artificial Sequence
  Description of Artificial Sequence: Synthetic oligonucleotide
  Antisense strand to SEQ ID NO: 677116
aauuauagccagguccacc

SEQ ID NO: 677118 - RNA, 19 nt, Artificial Sequence
  Description of Artificial Sequence: Synthetic oligonucleotide
  Sense strand starting at position 3346 of SEQ ID NO: 585907
caaggauuaugacuuuguu

SEQ ID NO: 677119 - RNA, 19 nt, Artificial Sequence
  Description of Artificial Sequence: Synthetic oligonucleotide
  Antisense strand to SEQ ID NO: 677118
aacaaagucauaauccuug

SEQ ID NO: 677120 - RNA, 19 nt, Artificial Sequence
  Description of Artificial Sequence: Synthetic oligonucleotide
  Sense strand starting at position 3349 of SEQ ID NO: 585907
ggauuaugacuuuguuauu

SEQ ID NO: 677121 - RNA, 19 nt, Artificial Sequence
  Description of Artificial Sequence: Synthetic oligonucleotide
  Antisense strand to SEQ ID NO: 677120
aauaacaaagucauaaucc

SEQ ID NO: 677122 - RNA, 19 nt, Artificial Sequence
  Description of Artificial Sequence: Synthetic oligonucleotide
  Sense strand starting at position 3401 of SEQ ID NO: 585907
auugaauuggagugucuuu

SEQ ID NO: 677123 - RNA, 19 nt, Artificial Sequence
  Description of Artificial Sequence: Synthetic oligonucleotide
  Antisense strand to SEQ ID NO: 677122
aaagacacuccaauucaau

SEQ ID NO: 677124 - RNA, 19 nt, Artificial Sequence
  Description of Artificial Sequence: Synthetic oligonucleotide
  Sense strand starting at position 3755 of SEQ ID NO: 585907
ggauguuuccagugacagg

SEQ ID NO: 677125 - RNA, 19 nt, Artificial Sequence
  Description of Artificial Sequence: Synthetic oligonucleotide
  Antisense strand to SEQ ID NO: 677124
ccugucacuggaaacaucc

SEQ ID NO: 677126 - RNA, 19 nt, Artificial Sequence
  Description of Artificial Sequence: Synthetic oligonucleotide
  Sense strand starting at position 3913 of SEQ ID NO: 585907
agcaauuaguuccuacagu

SEQ ID NO: 677127 - RNA, 19 nt, Artificial Sequence
  Description of Artificial Sequence: Synthetic oligonucleotide
  Antisense strand to SEQ ID NO: 677126
acuguaggaacuaauugcu

SEQ ID NO: 677128 - RNA, 19 nt, Artificial Sequence
  Description of Artificial Sequence: Synthetic oligonucleotide
  Sense strand starting at position 3921 of SEQ ID NO: 585907
guuccuacagugcauaaau

SEQ ID NO: 677129 - RNA, 19 nt, Artificial Sequence
  Description of Artificial Sequence: Synthetic oligonucleotide
  Antisense strand to SEQ ID NO: 677128
auuuaugcacuguaggaac

SEQ ID NO: 677130 - RNA, 19 nt, Artificial Sequence
  Description of Artificial Sequence: Synthetic oligonucleotide
  Sense strand starting at position 3938 of SEQ ID NO: 585907
auaauaaagcagugugcua

SEQ ID NO: 677131 - RNA, 19 nt, Artificial Sequence
  Description of Artificial Sequence: Synthetic oligonucleotide
  Antisense strand to SEQ ID NO: 677130
uagcacacugcuuuauuau

SEQ ID NO: 677132 - RNA, 19 nt, Artificial Sequence
  Description of Artificial Sequence: Synthetic oligonucleotide
  Sense strand starting at position 3952 of SEQ ID NO: 585907
ugcuaagugcuagggauga

SEQ ID NO: 677133 - RNA, 19 nt, Artificial Sequence
  Description of Artificial Sequence: Synthetic oligonucleotide
  Antisense strand to SEQ ID NO: 677132
ucaucccuagcacuuagca

SEQ ID NO: 677134 - RNA, 19 nt, Artificial Sequence
  Description of Artificial Sequence: Synthetic oligonucleotide
  Sense strand starting at position 3965 of SEQ ID NO: 585907
ggaugaggauaacaauagu

SEQ ID NO: 677135 - RNA, 19 nt, Artificial Sequence
  Description of Artificial Sequence: Synthetic oligonucleotide
  Antisense strand to SEQ ID NO: 677134
acuauuguuauccucaucc

SEQ ID NO: 677136 - RNA, 19 nt, Artificial Sequence
  Description of Artificial Sequence: Synthetic oligonucleotide
  Sense strand starting at position 128 of SEQ ID NO: 585908
agcaguuguaaauauucga

SEQ ID NO: 677137 - RNA, 19 nt, Artificial Sequence
  Description of Artificial Sequence: Synthetic oligonucleotide
  Antisense strand to SEQ ID NO: 677136
ucgaauauuuacaacugcu

SEQ ID NO: 677138 - RNA, 19 nt, Artificial Sequence
  Description of Artificial Sequence: Synthetic oligonucleotide
  Sense strand starting at position 135 of SEQ ID NO: 585908
guaaauauucgaggcaaca

SEQ ID NO: 677139 - RNA, 19 nt, Artificial Sequence
  Description of Artificial Sequence: Synthetic oligonucleotide
  Antisense strand to SEQ ID NO: 677138
uguugccucgaauauuuac

SEQ ID NO: 677140 - RNA, 19 nt, Artificial Sequence
  Description of Artificial Sequence: Synthetic oligonucleotide
  Sense strand starting at position 284 of SEQ ID NO: 585908
gaaaccaauucggugagaa

SEQ ID NO: 677141 - RNA, 19 nt, Artificial Sequence
  Description of Artificial Sequence: Synthetic oligonucleotide
  Antisense strand to SEQ ID NO: 677140
uucucaccgaauugguuuc

SEQ ID NO: 677142 - RNA, 19 nt, Artificial Sequence
  Description of Artificial Sequence: Synthetic oligonucleotide
  Sense strand starting at position 285 of SEQ ID NO: 585908
aaaccaauucggugagaag

SEQ ID NO: 677143 - RNA, 19 nt, Artificial Sequence
  Description of Artificial Sequence: Synthetic oligonucleotide
  Antisense strand to SEQ ID NO: 677142
cuucucaccgaauugguuu

SEQ ID NO: 677144 - RNA, 19 nt, Artificial Sequence
  Description of Artificial Sequence: Synthetic oligonucleotide
  Sense strand starting at position 595 of SEQ ID NO: 585908
cuuaaaucuugggugagag

SEQ ID NO: 677145 - RNA, 19 nt, Artificial Sequence
  Description of Artificial Sequence: Synthetic oligonucleotide
  Antisense strand to SEQ ID NO: 677144
cucucacccaagauuuaag

SEQ ID NO: 677146 - RNA, 19 nt, Artificial Sequence
  Description of Artificial Sequence: Synthetic oligonucleotide
  Sense strand starting at position 596 of SEQ ID NO: 585908
uuaaaucuugggugagagu

SEQ ID NO: 677147 - RNA, 19 nt, Artificial Sequence
  Description of Artificial Sequence: Synthetic oligonucleotide
  Antisense strand to SEQ ID NO: 677146
acucucacccaagauuuaa

SEQ ID NO: 677148 - RNA, 19 nt, Artificial Sequence
  Description of Artificial Sequence: Synthetic oligonucleotide
  Sense strand starting at position 663 of SEQ ID NO: 585908
uuugcugaucauuacuaga

SEQ ID NO: 677149 - RNA, 19 nt, Artificial Sequence
  Description of Artificial Sequence: Synthetic oligonucleotide
  Antisense strand to SEQ ID NO: 677148
ucuaguaaugaucagcaaa

SEQ ID NO: 677150 - RNA, 19 nt, Artificial Sequence
  Description of Artificial Sequence: Synthetic oligonucleotide
  Sense strand starting at position 665 of SEQ ID NO: 585908
ugcugaucauuacuagaac

SEQ ID NO: 677151 - RNA, 19 nt, Artificial Sequence
  Description of Artificial Sequence: Synthetic oligonucleotide
  Antisense strand to SEQ ID NO: 677150
guucuaguaaugaucagca

SEQ ID NO: 677152 - RNA, 19 nt, Artificial Sequence
  Description of Artificial Sequence: Synthetic oligonucleotide
  Sense strand starting at position 744 of SEQ ID NO: 585908
agggcuuacguggacaauu

SEQ ID NO: 677153 - RNA, 19 nt, Artificial Sequence
  Description of Artificial Sequence: Synthetic oligonucleotide
  Antisense strand to SEQ ID NO: 677152
aauuguccacguaagcccu

SEQ ID NO: 677154 - RNA, 19 nt, Artificial Sequence
  Description of Artificial Sequence: Synthetic oligonucleotide
  Sense strand starting at position 794 of SEQ ID NO: 585908
uccuaaauaugcuugugaa

SEQ ID NO: 677155 - RNA, 19 nt, Artificial Sequence
  Description of Artificial Sequence: Synthetic oligonucleotide
  Antisense strand to SEQ ID NO: 677154
uucacaagcauauuuagga

SEQ ID NO: 677156 - RNA, 19 nt, Artificial Sequence
  Description of Artificial Sequence: Synthetic oligonucleotide
  Sense strand starting at position 795 of SEQ ID NO: 585908
ccuaaauaugcuugugaaa

SEQ ID NO: 677157 - RNA, 19 nt, Artificial Sequence
  Description of Artificial Sequence: Synthetic oligonucleotide
  Antisense strand to SEQ ID NO: 677156
uuucacaagcauauuuagg

SEQ ID NO: 677158 - RNA, 19 nt, Artificial Sequence
  Description of Artificial Sequence: Synthetic oligonucleotide
  Sense strand starting at position 916 of SEQ ID NO: 585908
cgucuugucaguguucuca

SEQ ID NO: 677159 - RNA, 19 nt, Artificial Sequence
  Description of Artificial Sequence: Synthetic oligonucleotide
  Antisense strand to SEQ ID NO: 677158
ugagaacacugacaagacg

SEQ ID NO: 677160 - RNA, 19 nt, Artificial Sequence
  Description of Artificial Sequence: Synthetic oligonucleotide
  Sense strand starting at position 924 of SEQ ID NO: 585908
caguguucucaguuccgca

SEQ ID NO: 677161 - RNA, 19 nt, Artificial Sequence
  Description of Artificial Sequence: Synthetic oligonucleotide
  Antisense strand to SEQ ID NO: 677160
ugcggaacugagaacacug

SEQ ID NO: 677162 - RNA, 19 nt, Artificial Sequence
  Description of Artificial Sequence: Synthetic oligonucleotide
  Sense strand starting at position 2000 of SEQ ID NO: 585908
gagcgagcgcugaggaauu

SEQ ID NO: 677163 - RNA, 19 nt, Artificial Sequence
  Description of Artificial Sequence: Synthetic oligonucleotide
  Antisense strand to SEQ ID NO: 677162
aauuccucagcgcucgcuc

SEQ ID NO: 677164 - RNA, 19 nt, Artificial Sequence
  Description of Artificial Sequence: Synthetic oligonucleotide
  Sense strand starting at position 2020 of SEQ ID NO: 585908
gguggacacuaggaauuua

SEQ ID NO: 677165 - RNA, 19 nt, Artificial Sequence
  Description of Artificial Sequence: Synthetic oligonucleotide
  Antisense strand to SEQ ID NO: 677164
uaaauuccuaguguccacc

SEQ ID NO: 677166 - RNA, 19 nt, Artificial Sequence
  Description of Artificial Sequence: Synthetic oligonucleotide
  Sense strand starting at position 2271 of SEQ ID NO: 585908
cucuuaagacgucacaacu

SEQ ID NO: 677167 - RNA, 19 nt, Artificial Sequence
  Description of Artificial Sequence: Synthetic oligonucleotide
  Antisense strand to SEQ ID NO: 677166
aguugugacgucuuaagag

SEQ ID NO: 677168 - RNA, 19 nt, Artificial Sequence
  Description of Artificial Sequence: Synthetic oligonucleotide
  Sense strand starting at position 2288 of SEQ ID NO: 585908
cugguuguuacugagaacu

SEQ ID NO: 677169 - RNA, 19 nt, Artificial Sequence
  Description of Artificial Sequence: Synthetic oligonucleotide
  Antisense strand to SEQ ID NO: 677168
aguucucaguaacaaccag

SEQ ID NO: 677170 - RNA, 19 nt, Artificial Sequence
  Description of Artificial Sequence: Synthetic oligonucleotide
  Sense strand starting at position 2431 of SEQ ID NO: 585908
auaagacuccaaggcuuua

SEQ ID NO: 677171 - RNA, 19 nt, Artificial Sequence
  Description of Artificial Sequence: Synthetic oligonucleotide
  Antisense strand to SEQ ID NO: 677170
uaaagccuuggagucuuau

SEQ ID NO: 677172 - RNA, 19 nt, Artificial Sequence
  Description of Artificial Sequence: Synthetic oligonucleotide
  Sense strand starting at position 2442 of SEQ ID NO: 585908
aggcuuuaccgagaucuuc

SEQ ID NO: 677173 - RNA, 19 nt, Artificial Sequence
  Description of Artificial Sequence: Synthetic oligonucleotide
  Antisense strand to SEQ ID NO: 677172
gaagaucucgguaaagccu

SEQ ID NO: 677174 - RNA, 19 nt, Artificial Sequence
  Description of Artificial Sequence: Synthetic oligonucleotide
  Sense strand starting at position 2650 of SEQ ID NO: 585908
augagagggcaguaugagu

SEQ ID NO: 677175 - RNA, 19 nt, Artificial Sequence
  Description of Artificial Sequence: Synthetic oligonucleotide
  Antisense strand to SEQ ID NO: 677174
acucauacugcccucucau

SEQ ID NO: 677176 - RNA, 19 nt, Artificial Sequence
  Description of Artificial Sequence: Synthetic oligonucleotide
  Sense strand starting at position 2678 of SEQ ID NO: 585908
acauuauguuaguugauca

SEQ ID NO: 677177 - RNA, 19 nt, Artificial Sequence
  Description of Artificial Sequence: Synthetic oligonucleotide
  Antisense strand to SEQ ID NO: 677176
ugaucaacuaacauaaugu

SEQ ID NO: 677178 - RNA, 19 nt, Artificial Sequence
  Description of Artificial Sequence: Synthetic oligonucleotide
  Sense strand starting at position 2683 of SEQ ID NO: 585908
auguuaguugaucaucuuu

SEQ ID NO: 677179 - RNA, 19 nt, Artificial Sequence
  Description of Artificial Sequence: Synthetic oligonucleotide
  Antisense strand to SEQ ID NO: 677178
aaagaugaucaacuaacau

SEQ ID NO: 677180 - RNA, 19 nt, Artificial Sequence
  Description of Artificial Sequence: Synthetic oligonucleotide
  Sense strand starting at position 2757 of SEQ ID NO: 585908
uaauauugccuugagaguc

SEQ ID NO: 677181 - RNA, 19 nt, Artificial Sequence
  Description of Artificial Sequence: Synthetic oligonucleotide
  Antisense strand to SEQ ID NO: 677180
gacucucaaggcaauauua

SEQ ID NO: 677182 - RNA, 19 nt, Artificial Sequence
  Description of Artificial Sequence: Synthetic oligonucleotide
  Sense strand starting at position 2984 of SEQ ID NO: 585908
gaaagucuccugggaagua

SEQ ID NO: 677183 - RNA, 19 nt, Artificial Sequence
  Description of Artificial Sequence: Synthetic oligonucleotide
  Antisense strand to SEQ ID NO: 677182
uacuucccaggagacuuuc

SEQ ID NO: 677184 - RNA, 19 nt, Artificial Sequence
  Description of Artificial Sequence: Synthetic oligonucleotide
  Sense strand starting at position 3091 of SEQ ID NO: 585908
acaauuucuuugccagguu

SEQ ID NO: 677185 - RNA, 19 nt, Artificial Sequence
  Description of Artificial Sequence: Synthetic oligonucleotide
  Antisense strand to SEQ ID NO: 677184
aaccuggcaaagaaauugu

SEQ ID NO: 677186 - RNA, 19 nt, Artificial Sequence
  Description of Artificial Sequence: Synthetic oligonucleotide
  Sense strand starting at position 3194 of SEQ ID NO: 585908
aggcuucuccuacauuaag

SEQ ID NO: 677187 - RNA, 19 nt, Artificial Sequence
  Description of Artificial Sequence: Synthetic oligonucleotide
  Antisense strand to SEQ ID NO: 677186
cuuaauguaggagaagccu

SEQ ID NO: 677188 - RNA, 19 nt, Artificial Sequence
  Description of Artificial Sequence: Synthetic oligonucleotide
  Sense strand starting at position 3316 of SEQ ID NO: 585908
acagguugucagcaaauca

SEQ ID NO: 677189 - RNA, 19 nt, Artificial Sequence
  Description of Artificial Sequence: Synthetic oligonucleotide
  Antisense strand to SEQ ID NO: 677188
ugauuugcugacaaccugu

SEQ ID NO: 677190 - RNA, 19 nt, Artificial Sequence
  Description of Artificial Sequence: Synthetic oligonucleotide
  Sense strand starting at position 3367 of SEQ ID NO: 585908
auaauaucuucgcugagga

SEQ ID NO: 677191 - RNA, 19 nt, Artificial Sequence
  Description of Artificial Sequence: Synthetic oligonucleotide
  Antisense strand to SEQ ID NO: 677190
uccucagcgaagauauuau

SEQ ID NO: 677192 - RNA, 19 nt, Artificial Sequence
  Description of Artificial Sequence: Synthetic oligonucleotide
  Sense strand starting at position 3392 of SEQ ID NO: 585908
auuuguuaaucaccagugu

SEQ ID NO: 677193 - RNA, 19 nt, Artificial Sequence
  Description of Artificial Sequence: Synthetic oligonucleotide
  Antisense strand to SEQ ID NO: 677192
acacuggugauuaacaaau

SEQ ID NO: 677194 - RNA, 19 nt, Artificial Sequence
  Description of Artificial Sequence: Synthetic oligonucleotide
  Sense strand starting at position 3393 of SEQ ID NO: 585908
uuuguuaaucaccagugua

SEQ ID NO: 677195 - RNA, 19 nt, Artificial Sequence
  Description of Artificial Sequence: Synthetic oligonucleotide
  Antisense strand to SEQ ID NO: 677194
uacacuggugauuaacaaa

SEQ ID NO: 677196 - RNA, 19 nt, Artificial Sequence
  Description of Artificial Sequence: Synthetic oligonucleotide
  Sense strand starting at position 3396 of SEQ ID NO: 585908
guuaaucaccaguguagag

SEQ ID NO: 677197 - RNA, 19 nt, Artificial Sequence
  Description of Artificial Sequence: Synthetic oligonucleotide
  Antisense strand to SEQ ID NO: 677196
cucuacacuggugauuaac

SEQ ID NO: 677198 - RNA, 19 nt, Artificial Sequence
  Description of Artificial Sequence: Synthetic oligonucleotide
  Sense strand starting at position 3480 of SEQ ID NO: 585908
aagauuuauugugagaaug

SEQ ID NO: 677199 - RNA, 19 nt, Artificial Sequence
  Description of Artificial Sequence: Synthetic oligonucleotide
  Antisense strand to SEQ ID NO: 677198
cauucucacaauaaaucuu

SEQ ID NO: 677200 - RNA, 19 nt, Artificial Sequence
  Description of Artificial Sequence: Synthetic oligonucleotide
  Sense strand starting at position 3482 of SEQ ID NO: 585908
gauuuauugugagaaugau

SEQ ID NO: 677201 - RNA, 19 nt, Artificial Sequence
  Description of Artificial Sequence: Synthetic oligonucleotide
  Antisense strand to SEQ ID NO: 677200
aucauucucacaauaaauc

SEQ ID NO: 677202 - RNA, 19 nt, Artificial Sequence
  Description of Artificial Sequence: Synthetic oligonucleotide
  Sense strand starting at position 3488 of SEQ ID NO: 585908
uugugagaaugauugaugu

SEQ ID NO: 677203 - RNA, 19 nt, Artificial Sequence
  Description of Artificial Sequence: Synthetic oligonucleotide
  Antisense strand to SEQ ID NO: 677202
acaucaaucauucucacaa

SEQ ID NO: 677204 - RNA, 19 nt, Artificial Sequence
  Description of Artificial Sequence: Synthetic oligonucleotide
  Sense strand starting at position 3765 of SEQ ID NO: 585908
acuaaagagcuaugugaaa

SEQ ID NO: 677205 - RNA, 19 nt, Artificial Sequence
  Description of Artificial Sequence: Synthetic oligonucleotide
  Antisense strand to SEQ ID NO: 677204
uuucacauagcucuuuagu

SEQ ID NO: 677206 - RNA, 19 nt, Artificial Sequence
  Description of Artificial Sequence: Synthetic oligonucleotide
  Sense strand starting at position 3792 of SEQ ID NO: 585908
uggccaauacuuugugaaa

SEQ ID NO: 677207 - RNA, 19 nt, Artificial Sequence
  Description of Artificial Sequence: Synthetic oligonucleotide
  Antisense strand to SEQ ID NO: 677206
uuucacaaaguauuggcca

SEQ ID NO: 677208 - RNA, 19 nt, Artificial Sequence
  Description of Artificial Sequence: Synthetic oligonucleotide
  Sense strand starting at position 3793 of SEQ ID NO: 585908
ggccaauacuuugugaaau

SEQ ID NO: 677209 - RNA, 19 nt, Artificial Sequence
  Description of Artificial Sequence: Synthetic oligonucleotide
  Antisense strand to SEQ ID NO: 677208
auuucacaaaguauuggcc

SEQ ID NO: 677210 - RNA, 19 nt, Artificial Sequence
  Description of Artificial Sequence: Synthetic oligonucleotide
  Sense strand starting at position 3881 of SEQ ID NO: 585908
ugggcucuggaaugugaua

SEQ ID NO: 677211 - RNA, 19 nt, Artificial Sequence
  Description of Artificial Sequence: Synthetic oligonucleotide
  Antisense strand to SEQ ID NO: 677210
uaucacauuccagagccca

SEQ ID NO: 677212 - RNA, 19 nt, Artificial Sequence
  Description of Artificial Sequence: Synthetic oligonucleotide
  Sense strand starting at position 3883 of SEQ ID NO: 585908
ggcucuggaaugugauaau

SEQ ID NO: 677213 - RNA, 19 nt, Artificial Sequence
  Description of Artificial Sequence: Synthetic oligonucleotide
  Antisense strand to SEQ ID NO: 677212
auuaucacauuccagagcc

SEQ ID NO: 677214 - RNA, 19 nt, Artificial Sequence
  Description of Artificial Sequence: Synthetic oligonucleotide
  Sense strand starting at position 3921 of SEQ ID NO: 585908
ggccuuacugcauacauua

SEQ ID NO: 677215 - RNA, 19 nt, Artificial Sequence
  Description of Artificial Sequence: Synthetic oligonucleotide
  Antisense strand to SEQ ID NO: 677214
uaauguaugcaguaaggcc

SEQ ID NO: 677216 - RNA, 19 nt, Artificial Sequence
  Description of Artificial Sequence: Synthetic oligonucleotide
  Sense strand starting at position 127 of SEQ ID NO: 585909
agcaguuguaaauauucga

SEQ ID NO: 677217 - RNA, 19 nt, Artificial Sequence
  Description of Artificial Sequence: Synthetic oligonucleotide
  Antisense strand to SEQ ID NO: 677216
ucgaauauuuacaacugcu

SEQ ID NO: 677218 - RNA, 19 nt, Artificial Sequence
  Description of Artificial Sequence: Synthetic oligonucleotide
  Sense strand starting at position 134 of SEQ ID NO: 585909
guaaauauucgaggcaaca

SEQ ID NO: 677219 - RNA, 19 nt, Artificial Sequence
  Description of Artificial Sequence: Synthetic oligonucleotide
  Antisense strand to SEQ ID NO: 677218
uguugccucgaauauuuac

SEQ ID NO: 677220 - RNA, 19 nt, Artificial Sequence
  Description of Artificial Sequence: Synthetic oligonucleotide
  Sense strand starting at position 283 of SEQ ID NO: 585909
gaaaccaauucggugagaa

SEQ ID NO: 677221 - RNA, 19 nt, Artificial Sequence
  Description of Artificial Sequence: Synthetic oligonucleotide
  Antisense strand to SEQ ID NO: 677220
uucucaccgaauugguuuc

SEQ ID NO: 677222 - RNA, 19 nt, Artificial Sequence
  Description of Artificial Sequence: Synthetic oligonucleotide
  Sense strand starting at position 284 of SEQ ID NO: 585909
aaaccaauucggugagaag

SEQ ID NO: 677223 - RNA, 19 nt, Artificial Sequence
  Description of Artificial Sequence: Synthetic oligonucleotide
  Antisense strand to SEQ ID NO: 677222
cuucucaccgaauugguuu

SEQ ID NO: 677224 - RNA, 19 nt, Artificial Sequence
  Description of Artificial Sequence: Synthetic oligonucleotide
  Sense strand starting at position 594 of SEQ ID NO: 585909
cuuaaaucuugggugagag

SEQ ID NO: 677225 - RNA, 19 nt, Artificial Sequence
  Description of Artificial Sequence: Synthetic oligonucleotide
  Antisense strand to SEQ ID NO: 677224
cucucacccaagauuuaag

SEQ ID NO: 677226 - RNA, 19 nt, Artificial Sequence
  Description of Artificial Sequence: Synthetic oligonucleotide
  Sense strand starting at position 595 of SEQ ID NO: 585909
uuaaaucuugggugagagu

SEQ ID NO: 677227 - RNA, 19 nt, Artificial Sequence
  Description of Artificial Sequence: Synthetic oligonucleotide
  Antisense strand to SEQ ID NO: 677226
acucucacccaagauuuaa

SEQ ID NO: 677228 - RNA, 19 nt, Artificial Sequence
  Description of Artificial Sequence: Synthetic oligonucleotide
  Sense strand starting at position 662 of SEQ ID NO: 585909
uuugcugaucauuacuaga

SEQ ID NO: 677229 - RNA, 19 nt, Artificial Sequence
  Description of Artificial Sequence: Synthetic oligonucleotide
  Antisense strand to SEQ ID NO: 677228
ucuaguaaugaucagcaaa

SEQ ID NO: 677230 - RNA, 19 nt, Artificial Sequence
  Description of Artificial Sequence: Synthetic oligonucleotide
  Sense strand starting at position 664 of SEQ ID NO: 585909
ugcugaucauuacuagaac

SEQ ID NO: 677231 - RNA, 19 nt, Artificial Sequence
  Description of Artificial Sequence: Synthetic oligonucleotide
  Antisense strand to SEQ ID NO: 677230
guucuaguaaugaucagca

SEQ ID NO: 677232 - RNA, 19 nt, Artificial Sequence
  Description of Artificial Sequence: Synthetic oligonucleotide
  Sense strand starting at position 743 of SEQ ID NO: 585909
agggcuuacguggacaauu

SEQ ID NO: 677233 - RNA, 19 nt, Artificial Sequence
  Description of Artificial Sequence: Synthetic oligonucleotide
  Antisense strand to SEQ ID NO: 677232
aauuguccacguaagcccu

SEQ ID NO: 677234 - RNA, 19 nt, Artificial Sequence
  Description of Artificial Sequence: Synthetic oligonucleotide
  Sense strand starting at position 793 of SEQ ID NO: 585909
uccuaaauaugcuugugaa

SEQ ID NO: 677235 - RNA, 19 nt, Artificial Sequence
  Description of Artificial Sequence: Synthetic oligonucleotide
  Antisense strand to SEQ ID NO: 677234
uucacaagcauauuuagga

SEQ ID NO: 677236 - RNA, 19 nt, Artificial Sequence
  Description of Artificial Sequence: Synthetic oligonucleotide
  Sense strand starting at position 794 of SEQ ID NO: 585909
ccuaaauaugcuugugaaa

SEQ ID NO: 677237 - RNA, 19 nt, Artificial Sequence
  Description of Artificial Sequence: Synthetic oligonucleotide
  Antisense strand to SEQ ID NO: 677236
uuucacaagcauauuuagg

SEQ ID NO: 677238 - RNA, 19 nt, Artificial Sequence
  Description of Artificial Sequence: Synthetic oligonucleotide
  Sense strand starting at position 915 of SEQ ID NO: 585909
cgucuugucaguguucuca

SEQ ID NO: 677239 - RNA, 19 nt, Artificial Sequence
  Description of Artificial Sequence: Synthetic oligonucleotide
  Antisense strand to SEQ ID NO: 677238
ugagaacacugacaagacg

SEQ ID NO: 677240 - RNA, 19 nt, Artificial Sequence
  Description of Artificial Sequence: Synthetic oligonucleotide
  Sense strand starting at position 923 of SEQ ID NO: 585909
caguguucucaguuccgca

SEQ ID NO: 677241 - RNA, 19 nt, Artificial Sequence
  Description of Artificial Sequence: Synthetic oligonucleotide
  Antisense strand to SEQ ID NO: 677240
ugcggaacugagaacacug

SEQ ID NO: 677242 - RNA, 19 nt, Artificial Sequence
  Description of Artificial Sequence: Synthetic oligonucleotide
  Sense strand starting at position 1999 of SEQ ID NO: 585909
gagcgagcgcugaggaauu

SEQ ID NO: 677243 - RNA, 19 nt, Artificial Sequence
  Description of Artificial Sequence: Synthetic oligonucleotide
  Antisense strand to SEQ ID NO: 677242
aauuccucagcgcucgcuc

SEQ ID NO: 677244 - RNA, 19 nt, Artificial Sequence
  Description of Artificial Sequence: Synthetic oligonucleotide
  Sense strand starting at position 2019 of SEQ ID NO: 585909
gguggacacuaggaauuua

SEQ ID NO: 677245 - RNA, 19 nt, Artificial Sequence
  Description of Artificial Sequence: Synthetic oligonucleotide
  Antisense strand to SEQ ID NO: 677244
uaaauuccuaguguccacc

SEQ ID NO: 677246 - RNA, 19 nt, Artificial Sequence
  Description of Artificial Sequence: Synthetic oligonucleotide
  Sense strand starting at position 2270 of SEQ ID NO: 585909
cucuuaagacgucacaacu

SEQ ID NO: 677247 - RNA, 19 nt, Artificial Sequence
  Description of Artificial Sequence: Synthetic oligonucleotide
  Antisense strand to SEQ ID NO: 677246
aguugugacgucuuaagag

SEQ ID NO: 677248 - RNA, 19 nt, Artificial Sequence
  Description of Artificial Sequence: Synthetic oligonucleotide
  Sense strand starting at position 2287 of SEQ ID NO: 585909
cugguuguuacugagaacu

SEQ ID NO: 677249 - RNA, 19 nt, Artificial Sequence
  Description of Artificial Sequence: Synthetic oligonucleotide
  Antisense strand to SEQ ID NO: 677248
aguucucaguaacaaccag

SEQ ID NO: 677250 - RNA, 19 nt, Artificial Sequence
  Description of Artificial Sequence: Synthetic oligonucleotide
  Sense strand starting at position 2430 of SEQ ID NO: 585909
auaagacuccaaggcuuua

SEQ ID NO: 677251 - RNA, 19 nt, Artificial Sequence
  Description of Artificial Sequence: Synthetic oligonucleotide
  Antisense strand to SEQ ID NO: 677250
uaaagccuuggagucuuau

SEQ ID NO: 677252 - RNA, 19 nt, Artificial Sequence
  Description of Artificial Sequence: Synthetic oligonucleotide
  Sense strand starting at position 2441 of SEQ ID NO: 585909
aggcuuuaccgagaucuuc

SEQ ID NO: 677253 - RNA, 19 nt, Artificial Sequence
  Description of Artificial Sequence: Synthetic oligonucleotide
  Antisense strand to SEQ ID NO: 677252
gaagaucucgguaaagccu

SEQ ID NO: 677254 - RNA, 19 nt, Artificial Sequence
  Description of Artificial Sequence: Synthetic oligonucleotide
  Sense strand starting at position 2649 of SEQ ID NO: 585909
augagagggcaguaugagu

SEQ ID NO: 677255 - RNA, 19 nt, Artificial Sequence
  Description of Artificial Sequence: Synthetic oligonucleotide
  Antisense strand to SEQ ID NO: 677254
acucauacugcccucucau

SEQ ID NO: 677256 - RNA, 19 nt, Artificial Sequence
  Description of Artificial Sequence: Synthetic oligonucleotide
  Sense strand starting at position 2677 of SEQ ID NO: 585909
acauuauguuaguugauca

SEQ ID NO: 677257 - RNA, 19 nt, Artificial Sequence
  Description of Artificial Sequence: Synthetic oligonucleotide
  Antisense strand to SEQ ID NO: 677256
ugaucaacuaacauaaugu

SEQ ID NO: 677258 - RNA, 19 nt, Artificial Sequence
  Description of Artificial Sequence: Synthetic oligonucleotide
  Sense strand starting at position 2682 of SEQ ID NO: 585909
auguuaguugaucaucuuu

SEQ ID NO: 677259 - RNA, 19 nt, Artificial Sequence
  Description of Artificial Sequence: Synthetic oligonucleotide
  Antisense strand to SEQ ID NO: 677258
aaagaugaucaacuaacau

SEQ ID NO: 677260 - RNA, 19 nt, Artificial Sequence
  Description of Artificial Sequence: Synthetic oligonucleotide
  Sense strand starting at position 2756 of SEQ ID NO: 585909
uaauauugccuugagaguc

SEQ ID NO: 677261 - RNA, 19 nt, Artificial Sequence
  Description of Artificial Sequence: Synthetic oligonucleotide
  Antisense strand to SEQ ID NO: 677260
gacucucaaggcaauauua

SEQ ID NO: 677262 - RNA, 19 nt, Artificial Sequence
  Description of Artificial Sequence: Synthetic oligonucleotide
  Sense strand starting at position 2983 of SEQ ID NO: 585909
gaaagucuccugggaagua

SEQ ID NO: 677263 - RNA, 19 nt, Artificial Sequence
  Description of Artificial Sequence: Synthetic oligonucleotide
  Antisense strand to SEQ ID NO: 677262
uacuucccaggagacuuuc

SEQ ID NO: 677264 - RNA, 19 nt, Artificial Sequence
  Description of Artificial Sequence: Synthetic oligonucleotide
  Sense strand starting at position 3090 of SEQ ID NO: 585909
acaauuucuuugccagguu

SEQ ID NO: 677265 - RNA, 19 nt, Artificial Sequence
  Description of Artificial Sequence: Synthetic oligonucleotide
  Antisense strand to SEQ ID NO: 677264
aaccuggcaaagaaauugu

SEQ ID NO: 677266 - RNA, 19 nt, Artificial Sequence
  Description of Artificial Sequence: Synthetic oligonucleotide
  Sense strand starting at position 3193 of SEQ ID NO: 585909
aggcuucuccuacauuaag

SEQ ID NO: 677267 - RNA, 19 nt, Artificial Sequence
  Description of Artificial Sequence: Synthetic oligonucleotide
  Antisense strand to SEQ ID NO: 677266
cuuaauguaggagaagccu

SEQ ID NO: 677268 - RNA, 19 nt, Artificial Sequence
  Description of Artificial Sequence: Synthetic oligonucleotide
  Sense strand starting at position 3315 of SEQ ID NO: 585909
acagguugucagcaaauca

SEQ ID NO: 677269 - RNA, 19 nt, Artificial Sequence
  Description of Artificial Sequence: Synthetic oligonucleotide
  Antisense strand to SEQ ID NO: 677268
ugauuugcugacaaccugu

SEQ ID NO: 677270 - RNA, 19 nt, Artificial Sequence
  Description of Artificial Sequence: Synthetic oligonucleotide
  Sense strand starting at position 3366 of SEQ ID NO: 585909
auaauaucuucgcugagga

SEQ ID NO: 677271 - RNA, 19 nt, Artificial Sequence
  Description of Artificial Sequence: Synthetic oligonucleotide
  Antisense strand to SEQ ID NO: 677270
uccucagcgaagauauuau

SEQ ID NO: 677272 - RNA, 19 nt, Artificial Sequence
  Description of Artificial Sequence: Synthetic oligonucleotide
  Sense strand starting at position 3391 of SEQ ID NO: 585909
auuuguuaaucaccagugu

SEQ ID NO: 677273 - RNA, 19 nt, Artificial Sequence
  Description of Artificial Sequence: Synthetic oligonucleotide
  Antisense strand to SEQ ID NO: 677272
acacuggugauuaacaaau

SEQ ID NO: 677274 - RNA, 19 nt, Artificial Sequence
  Description of Artificial Sequence: Synthetic oligonucleotide
  Sense strand starting at position 3392 of SEQ ID NO: 585909
uuuguuaaucaccagugua

SEQ ID NO: 677275 - RNA, 19 nt, Artificial Sequence
  Description of Artificial Sequence: Synthetic oligonucleotide
  Antisense strand to SEQ ID NO: 677274
uacacuggugauuaacaaa

SEQ ID NO: 677276 - RNA, 19 nt, Artificial Sequence
  Description of Artificial Sequence: Synthetic oligonucleotide
  Sense strand starting at position 3395 of SEQ ID NO: 585909
guuaaucaccaguguagag

SEQ ID NO: 677277 - RNA, 19 nt, Artificial Sequence
  Description of Artificial Sequence: Synthetic oligonucleotide
  Antisense strand to SEQ ID NO: 677276
cucuacacuggugauuaac

SEQ ID NO: 677278 - RNA, 19 nt, Artificial Sequence
  Description of Artificial Sequence: Synthetic oligonucleotide
  Sense strand starting at position 3479 of SEQ ID NO: 585909
aagauuuauugugagaaug

SEQ ID NO: 677279 - RNA, 19 nt, Artificial Sequence
  Description of Artificial Sequence: Synthetic oligonucleotide
  Antisense strand to SEQ ID NO: 677278
cauucucacaauaaaucuu

SEQ ID NO: 677280 - RNA, 19 nt, Artificial Sequence
  Description of Artificial Sequence: Synthetic oligonucleotide
  Sense strand starting at position 3481 of SEQ ID NO: 585909
gauuuauugugagaaugau

SEQ ID NO: 677281 - RNA, 19 nt, Artificial Sequence
  Description of Artificial Sequence: Synthetic oligonucleotide
  Antisense strand to SEQ ID NO: 677280
aucauucucacaauaaauc

SEQ ID NO: 677282 - RNA, 19 nt, Artificial Sequence
  Description of Artificial Sequence: Synthetic oligonucleotide
  Sense strand starting at position 3487 of SEQ ID NO: 585909
uugugagaaugauugaugu

SEQ ID NO: 677283 - RNA, 19 nt, Artificial Sequence
  Description of Artificial Sequence: Synthetic oligonucleotide
  Antisense strand to SEQ ID NO: 677282
acaucaaucauucucacaa

SEQ ID NO: 677284 - RNA, 19 nt, Artificial Sequence
  Description of Artificial Sequence: Synthetic oligonucleotide
  Sense strand starting at position 3764 of SEQ ID NO: 585909
acuaaagagcuaugugaaa

SEQ ID NO: 677285 - RNA, 19 nt, Artificial Sequence
  Description of Artificial Sequence: Synthetic oligonucleotide
  Antisense strand to SEQ ID NO: 677284
uuucacauagcucuuuagu

SEQ ID NO: 677286 - RNA, 19 nt, Artificial Sequence
  Description of Artificial Sequence: Synthetic oligonucleotide
  Sense strand starting at position 3791 of SEQ ID NO: 585909
uggccaauacuuugugaaa

SEQ ID NO: 677287 - RNA, 19 nt, Artificial Sequence
  Description of Artificial Sequence: Synthetic oligonucleotide
  Antisense strand to SEQ ID NO: 677286
uuucacaaaguauuggcca

SEQ ID NO: 677288 - RNA, 19 nt, Artificial Sequence
  Description of Artificial Sequence: Synthetic oligonucleotide
  Sense strand starting at position 3792 of SEQ ID NO: 585909
ggccaauacuuugugaaau

SEQ ID NO: 677289 - RNA, 19 nt, Artificial Sequence
  Description of Artificial Sequence: Synthetic oligonucleotide
  Antisense strand to SEQ ID NO: 677288
auuucacaaaguauuggcc

SEQ ID NO: 677290 - RNA, 19 nt, Artificial Sequence
  Description of Artificial Sequence: Synthetic oligonucleotide
  Sense strand starting at position 3880 of SEQ ID NO: 585909
ugggcucuggaaugugaua

SEQ ID NO: 677291 - RNA, 19 nt, Artificial Sequence
  Description of Artificial Sequence: Synthetic oligonucleotide
  Antisense strand to SEQ ID NO: 677290
uaucacauuccagagccca

SEQ ID NO: 677292 - RNA, 19 nt, Artificial Sequence
  Description of Artificial Sequence: Synthetic oligonucleotide
  Sense strand starting at position 3882 of SEQ ID NO: 585909
ggcucuggaaugugauaau

SEQ ID NO: 677293 - RNA, 19 nt, Artificial Sequence
  Description of Artificial Sequence: Synthetic oligonucleotide
  Antisense strand to SEQ ID NO: 677292
auuaucacauuccagagcc

SEQ ID NO: 677294 - RNA, 19 nt, Artificial Sequence
  Description of Artificial Sequence: Synthetic oligonucleotide
  Sense strand starting at position 3920 of SEQ ID NO: 585909
ggccuuacugcauacauua

SEQ ID NO: 677295 - RNA, 19 nt, Artificial Sequence
  Description of Artificial Sequence: Synthetic oligonucleotide
  Antisense strand to SEQ ID NO: 677294
uaauguaugcaguaaggcc

SEQ ID NO: 677296 - RNA, 19 nt, Artificial Sequence
  Description of Artificial Sequence: Synthetic oligonucleotide
  Sense strand starting at position 434 of SEQ ID NO: 585910
gccauaacuguagacaauc

SEQ ID NO: 677297 - RNA, 19 nt, Artificial Sequence
  Description of Artificial Sequence: Synthetic oligonucleotide
  Antisense strand to SEQ ID NO: 677296
gauugucuacaguuauggc

SEQ ID NO: 677298 - RNA, 19 nt, Artificial Sequence
  Description of Artificial Sequence: Synthetic oligonucleotide
  Sense strand starting at position 552 of SEQ ID NO: 585910
aucuacaaaucuguguuaa

SEQ ID NO: 677299 - RNA, 19 nt, Artificial Sequence
  Description of Artificial Sequence: Synthetic oligonucleotide
  Antisense strand to SEQ ID NO: 677298
uuaacacagauuuguagau

SEQ ID NO: 677300 - RNA, 19 nt, Artificial Sequence
  Description of Artificial Sequence: Synthetic oligonucleotide
  Sense strand starting at position 553 of SEQ ID NO: 585910
ucuacaaaucuguguuaau

SEQ ID NO: 677301 - RNA, 19 nt, Artificial Sequence
  Description of Artificial Sequence: Synthetic oligonucleotide
  Antisense strand to SEQ ID NO: 677300
auuaacacagauuuguaga

SEQ ID NO: 677302 - RNA, 19 nt, Artificial Sequence
  Description of Artificial Sequence: Synthetic oligonucleotide
  Sense strand starting at position 554 of SEQ ID NO: 585910
cuacaaaucuguguuaauu

SEQ ID NO: 677303 - RNA, 19 nt, Artificial Sequence
  Description of Artificial Sequence: Synthetic oligonucleotide
  Antisense strand to SEQ ID NO: 677302
aauuaacacagauuuguag

SEQ ID NO: 677304 - RNA, 19 nt, Artificial Sequence
  Description of Artificial Sequence: Synthetic oligonucleotide
  Sense strand starting at position 584 of SEQ ID NO: 585910
accuacuaagaguguaaau

SEQ ID NO: 677305 - RNA, 19 nt, Artificial Sequence
  Description of Artificial Sequence: Synthetic oligonucleotide
  Antisense strand to SEQ ID NO: 677304
auuuacacucuuaguaggu

SEQ ID NO: 677306 - RNA, 19 nt, Artificial Sequence
  Description of Artificial Sequence: Synthetic oligonucleotide
  Sense strand starting at position 753 of SEQ ID NO: 585910
cggaccugugcuuggagaa

SEQ ID NO: 677307 - RNA, 19 nt, Artificial Sequence
  Description of Artificial Sequence: Synthetic oligonucleotide
  Antisense strand to SEQ ID NO: 677306
uucuccaagcacagguccg

SEQ ID NO: 677308 - RNA, 19 nt, Artificial Sequence
  Description of Artificial Sequence: Synthetic oligonucleotide
  Sense strand starting at position 754 of SEQ ID NO: 585910
ggaccugugcuuggagaau

SEQ ID NO: 677309 - RNA, 19 nt, Artificial Sequence
  Description of Artificial Sequence: Synthetic oligonucleotide
  Antisense strand to SEQ ID NO: 677308
auucuccaagcacaggucc

SEQ ID NO: 677310 - RNA, 19 nt, Artificial Sequence
  Description of Artificial Sequence: Synthetic oligonucleotide
  Sense strand starting at position 810 of SEQ ID NO: 585910
gugggacccugucccuaaa

SEQ ID NO: 677311 - RNA, 19 nt, Artificial Sequence
  Description of Artificial Sequence: Synthetic oligonucleotide
  Antisense strand to SEQ ID NO: 677310
uuuagggacagggucccac

SEQ ID NO: 677312 - RNA, 19 nt, Artificial Sequence
  Description of Artificial Sequence: Synthetic oligonucleotide
  Sense strand starting at position 984 of SEQ ID NO: 585910
cucucuuuaucugugagga

SEQ ID NO: 677313 - RNA, 19 nt, Artificial Sequence
  Description of Artificial Sequence: Synthetic oligonucleotide
  Antisense strand to SEQ ID NO: 677312
uccucacagauaaagagag

SEQ ID NO: 677314 - RNA, 19 nt, Artificial Sequence
  Description of Artificial Sequence: Synthetic oligonucleotide
  Sense strand starting at position 985 of SEQ ID NO: 585910
ucucuuuaucugugaggag

SEQ ID NO: 677315 - RNA, 19 nt, Artificial Sequence
  Description of Artificial Sequence: Synthetic oligonucleotide
  Antisense strand to SEQ ID NO: 677314
cuccucacagauaaagaga

SEQ ID NO: 677316 - RNA, 19 nt, Artificial Sequence
  Description of Artificial Sequence: Synthetic oligonucleotide
  Sense strand starting at position 1060 of SEQ ID NO: 585910
uuaggaaucuaucaagaaa

SEQ ID NO: 677317 - RNA, 19 nt, Artificial Sequence
  Description of Artificial Sequence: Synthetic oligonucleotide
  Antisense strand to SEQ ID NO: 677316
uuucuugauagauuccuaa

SEQ ID NO: 677318 - RNA, 19 nt, Artificial Sequence
  Description of Artificial Sequence: Synthetic oligonucleotide
  Sense strand starting at position 1079 of SEQ ID NO: 585910
caguaagcucuguagguau

SEQ ID NO: 677319 - RNA, 19 nt, Artificial Sequence
  Description of Artificial Sequence: Synthetic oligonucleotide
  Antisense strand to SEQ ID NO: 677318
auaccuacagagcuuacug

SEQ ID NO: 677320 - RNA, 19 nt, Artificial Sequence
  Description of Artificial Sequence: Synthetic oligonucleotide
  Sense strand starting at position 1112 of SEQ ID NO: 585910
gcaaacgcucugcuaaguu

SEQ ID NO: 677321 - RNA, 19 nt, Artificial Sequence
  Description of Artificial Sequence: Synthetic oligonucleotide
  Antisense strand to SEQ ID NO: 677320
aacuuagcagagcguuugc

SEQ ID NO: 677322 - RNA, 19 nt, Artificial Sequence
  Description of Artificial Sequence: Synthetic oligonucleotide
  Sense strand starting at position 1305 of SEQ ID NO: 585910
ucugguaaaugguccuaaa

SEQ ID NO: 677323 - RNA, 19 nt, Artificial Sequence
  Description of Artificial Sequence: Synthetic oligonucleotide
  Antisense strand to SEQ ID NO: 677322
uuuaggaccauuuaccaga

SEQ ID NO: 677324 - RNA, 19 nt, Artificial Sequence
  Description of Artificial Sequence: Synthetic oligonucleotide
  Sense strand starting at position 1333 of SEQ ID NO: 585910
ggcguuuaacauggacacu

SEQ ID NO: 677325 - RNA, 19 nt, Artificial Sequence
  Description of Artificial Sequence: Synthetic oligonucleotide
  Antisense strand to SEQ ID NO: 677324
aguguccauguuaaacgcc

SEQ ID NO: 677326 - RNA, 19 nt, Artificial Sequence
  Description of Artificial Sequence: Synthetic oligonucleotide
  Sense strand starting at position 1467 of SEQ ID NO: 585910
acgcguugccggucucaaa

SEQ ID NO: 677327 - RNA, 19 nt, Artificial Sequence
  Description of Artificial Sequence: Synthetic oligonucleotide
  Antisense strand to SEQ ID NO: 677326
uuugagaccggcaacgcgu

SEQ ID NO: 677328 - RNA, 19 nt, Artificial Sequence
  Description of Artificial Sequence: Synthetic oligonucleotide
  Sense strand starting at position 2123 of SEQ ID NO: 585910
gaaccuucgccucaaacga

SEQ ID NO: 677329 - RNA, 19 nt, Artificial Sequence
  Description of Artificial Sequence: Synthetic oligonucleotide
  Antisense strand to SEQ ID NO: 677328
ucguuugaggcgaagguuc

SEQ ID NO: 677330 - RNA, 19 nt, Artificial Sequence
  Description of Artificial Sequence: Synthetic oligonucleotide
  Sense strand starting at position 2347 of SEQ ID NO: 585910
gccucaggaguguaaguuu

SEQ ID NO: 677331 - RNA, 19 nt, Artificial Sequence
  Description of Artificial Sequence: Synthetic oligonucleotide
  Antisense strand to SEQ ID NO: 677330
aaacuuacacuccugaggc

SEQ ID NO: 677332 - RNA, 19 nt, Artificial Sequence
  Description of Artificial Sequence: Synthetic oligonucleotide
  Sense strand starting at position 2350 of SEQ ID NO: 585910
ucaggaguguaaguuuaag

SEQ ID NO: 677333 - RNA, 19 nt, Artificial Sequence
  Description of Artificial Sequence: Synthetic oligonucleotide
  Antisense strand to SEQ ID NO: 677332
cuuaaacuuacacuccuga

SEQ ID NO: 677334 - RNA, 19 nt, Artificial Sequence
  Description of Artificial Sequence: Synthetic oligonucleotide
  Sense strand starting at position 2671 of SEQ ID NO: 585910
gagcgaugauuggcgauga

SEQ ID NO: 677335 - RNA, 19 nt, Artificial Sequence
  Description of Artificial Sequence: Synthetic oligonucleotide
  Antisense strand to SEQ ID NO: 677334
ucaucgccaaucaucgcuc

SEQ ID NO: 677336 - RNA, 19 nt, Artificial Sequence
  Description of Artificial Sequence: Synthetic oligonucleotide
  Sense strand starting at position 2673 of SEQ ID NO: 585910
gcgaugauuggcgaugaag

SEQ ID NO: 677337 - RNA, 19 nt, Artificial Sequence
  Description of Artificial Sequence: Synthetic oligonucleotide
  Antisense strand to SEQ ID NO: 677336
cuucaucgccaaucaucgc

SEQ ID NO: 677338 - RNA, 19 nt, Artificial Sequence
  Description of Artificial Sequence: Synthetic oligonucleotide
  Sense strand starting at position 2675 of SEQ ID NO: 585910
gaugauuggcgaugaagga

SEQ ID NO: 677339 - RNA, 19 nt, Artificial Sequence
  Description of Artificial Sequence: Synthetic oligonucleotide
  Antisense strand to SEQ ID NO: 677338
uccuucaucgccaaucauc

SEQ ID NO: 677340 - RNA, 19 nt, Artificial Sequence
  Description of Artificial Sequence: Synthetic oligonucleotide
  Sense strand starting at position 3177 of SEQ ID NO: 585910
guucgugcgcuguccauau

SEQ ID NO: 677341 - RNA, 19 nt, Artificial Sequence
  Description of Artificial Sequence: Synthetic oligonucleotide
  Antisense strand to SEQ ID NO: 677340
auauggacagcgcacgaac

SEQ ID NO: 677342 - RNA, 19 nt, Artificial Sequence
  Description of Artificial Sequence: Synthetic oligonucleotide
  Sense strand starting at position 3186 of SEQ ID NO: 585910
cuguccauauccgucauuu

SEQ ID NO: 677343 - RNA, 19 nt, Artificial Sequence
  Description of Artificial Sequence: Synthetic oligonucleotide
  Antisense strand to SEQ ID NO: 677342
aaaugacggauauggacag

SEQ ID NO: 677344 - RNA, 19 nt, Artificial Sequence
  Description of Artificial Sequence: Synthetic oligonucleotide
  Sense strand starting at position 3409 of SEQ ID NO: 585910
ugaguucuggcacagguaa

SEQ ID NO: 677345 - RNA, 19 nt, Artificial Sequence
  Description of Artificial Sequence: Synthetic oligonucleotide
  Antisense strand to SEQ ID NO: 677344
uuaccugugccagaacuca

SEQ ID NO: 677346 - RNA, 19 nt, Artificial Sequence
  Description of Artificial Sequence: Synthetic oligonucleotide
  Sense strand starting at position 3411 of SEQ ID NO: 585910
aguucuggcacagguaauu

SEQ ID NO: 677347 - RNA, 19 nt, Artificial Sequence
  Description of Artificial Sequence: Synthetic oligonucleotide
  Antisense strand to SEQ ID NO: 677346
aauuaccugugccagaacu

SEQ ID NO: 677348 - RNA, 19 nt, Artificial Sequence
  Description of Artificial Sequence: Synthetic oligonucleotide
  Sense strand starting at position 3427 of SEQ ID NO: 585910
auuaaaucugcuugugauu

SEQ ID NO: 677349 - RNA, 19 nt, Artificial Sequence
  Description of Artificial Sequence: Synthetic oligonucleotide
  Antisense strand to SEQ ID NO: 677348
aaucacaagcagauuuaau

SEQ ID NO: 677350 - RNA, 19 nt, Artificial Sequence
  Description of Artificial Sequence: Synthetic oligonucleotide
  Sense strand starting at position 3432 of SEQ ID NO: 585910
aucugcuugugauugacaa

SEQ ID NO: 677351 - RNA, 19 nt, Artificial Sequence
  Description of Artificial Sequence: Synthetic oligonucleotide
  Antisense strand to SEQ ID NO: 677350
uugucaaucacaagcagau

SEQ ID NO: 677352 - RNA, 19 nt, Artificial Sequence
  Description of Artificial Sequence: Synthetic oligonucleotide
  Sense strand starting at position 3433 of SEQ ID NO: 585910
ucugcuugugauugacaag

SEQ ID NO: 677353 - RNA, 19 nt, Artificial Sequence
  Description of Artificial Sequence: Synthetic oligonucleotide
  Antisense strand to SEQ ID NO: 677352
cuugucaaucacaagcaga

SEQ ID NO: 677354 - RNA, 19 nt, Artificial Sequence
  Description of Artificial Sequence: Synthetic oligonucleotide
  Sense strand starting at position 3610 of SEQ ID NO: 585910
aggauaccugccugucuga

SEQ ID NO: 677355 - RNA, 19 nt, Artificial Sequence
  Description of Artificial Sequence: Synthetic oligonucleotide
  Antisense strand to SEQ ID NO: 677354
ucagacaggcagguauccu

SEQ ID NO: 677356 - RNA, 19 nt, Artificial Sequence
  Description of Artificial Sequence: Synthetic oligonucleotide
  Sense strand starting at position 3661 of SEQ ID NO: 585910
gaagaagccuagucaucug

SEQ ID NO: 677357 - RNA, 19 nt, Artificial Sequence
  Description of Artificial Sequence: Synthetic oligonucleotide
  Antisense strand to SEQ ID NO: 677356
cagaugacuaggcuucuuc

SEQ ID NO: 677358 - RNA, 19 nt, Artificial Sequence
  Description of Artificial Sequence: Synthetic oligonucleotide
  Sense strand starting at position 3722 of SEQ ID NO: 585910
aacugaagggcuuguggau

SEQ ID NO: 677359 - RNA, 19 nt, Artificial Sequence
  Description of Artificial Sequence: Synthetic oligonucleotide
  Antisense strand to SEQ ID NO: 677358
auccacaagcccuucaguu

SEQ ID NO: 677360 - RNA, 19 nt, Artificial Sequence
  Description of Artificial Sequence: Synthetic oligonucleotide
  Sense strand starting at position 3798 of SEQ ID NO: 585910
gcgacagaugauuagcuuu

SEQ ID NO: 677361 - RNA, 19 nt, Artificial Sequence
  Description of Artificial Sequence: Synthetic oligonucleotide
  Antisense strand to SEQ ID NO: 677360
aaagcuaaucaucugucgc

SEQ ID NO: 677362 - RNA, 19 nt, Artificial Sequence
  Description of Artificial Sequence: Synthetic oligonucleotide
  Sense strand starting at position 3800 of SEQ ID NO: 585910
gacagaugauuagcuuugu

SEQ ID NO: 677363 - RNA, 19 nt, Artificial Sequence
  Description of Artificial Sequence: Synthetic oligonucleotide
  Antisense strand to SEQ ID NO: 677362
acaaagcuaaucaucuguc

SEQ ID NO: 677364 - RNA, 19 nt, Artificial Sequence
  Description of Artificial Sequence: Synthetic oligonucleotide
  Sense strand starting at position 3801 of SEQ ID NO: 585910
acagaugauuagcuuugua

SEQ ID NO: 677365 - RNA, 19 nt, Artificial Sequence
  Description of Artificial Sequence: Synthetic oligonucleotide
  Antisense strand to SEQ ID NO: 677364
uacaaagcuaaucaucugu

SEQ ID NO: 677366 - RNA, 19 nt, Artificial Sequence
  Description of Artificial Sequence: Synthetic oligonucleotide
  Sense strand starting at position 3804 of SEQ ID NO: 585910
gaugauuagcuuuguaagu

SEQ ID NO: 677367 - RNA, 19 nt, Artificial Sequence
  Description of Artificial Sequence: Synthetic oligonucleotide
  Antisense strand to SEQ ID NO: 677366
acuuacaaagcuaaucauc

SEQ ID NO: 677368 - RNA, 19 nt, Artificial Sequence
  Description of Artificial Sequence: Synthetic oligonucleotide
  Sense strand starting at position 3805 of SEQ ID NO: 585910
augauuagcuuuguaaguc

SEQ ID NO: 677369 - RNA, 19 nt, Artificial Sequence
  Description of Artificial Sequence: Synthetic oligonucleotide
  Antisense strand to SEQ ID NO: 677368
gacuuacaaagcuaaucau

SEQ ID NO: 677370 - RNA, 19 nt, Artificial Sequence
  Description of Artificial Sequence: Synthetic oligonucleotide
  Sense strand starting at position 3809 of SEQ ID NO: 585910
uuagcuuuguaagucaaga

SEQ ID NO: 677371 - RNA, 19 nt, Artificial Sequence
  Description of Artificial Sequence: Synthetic oligonucleotide
  Antisense strand to SEQ ID NO: 677370
ucuugacuuacaaagcuaa

SEQ ID NO: 677372 - RNA, 19 nt, Artificial Sequence
  Description of Artificial Sequence: Synthetic oligonucleotide
  Sense strand starting at position 3811 of SEQ ID NO: 585910
agcuuuguaagucaagaug

SEQ ID NO: 677373 - RNA, 19 nt, Artificial Sequence
  Description of Artificial Sequence: Synthetic oligonucleotide
  Antisense strand to SEQ ID NO: 677372
caucuugacuuacaaagcu

SEQ ID NO: 677374 - RNA, 19 nt, Artificial Sequence
  Description of Artificial Sequence: Synthetic oligonucleotide
  Sense strand starting at position 3820 of SEQ ID NO: 585910
agucaagaugagcacuuua

SEQ ID NO: 677375 - RNA, 19 nt, Artificial Sequence
  Description of Artificial Sequence: Synthetic oligonucleotide
  Antisense strand to SEQ ID NO: 677374
uaaagugcucaucuugacu

SEQ ID NO: 677376 - RNA, 19 nt, Artificial Sequence
  Description of Artificial Sequence: Synthetic oligonucleotide
  Sense strand starting at position 349 of SEQ ID NO: 585911
aggugucuucuccauggca

SEQ ID NO: 677377 - RNA, 19 nt, Artificial Sequence
  Description of Artificial Sequence: Synthetic oligonucleotide
  Antisense strand to SEQ ID NO: 677376
ugccauggagaagacaccu

SEQ ID NO: 677378 - RNA, 19 nt, Artificial Sequence
  Description of Artificial Sequence: Synthetic oligonucleotide
  Sense strand starting at position 456 of SEQ ID NO: 585911
agggaagagcuauggcaau

SEQ ID NO: 677379 - RNA, 19 nt, Artificial Sequence
  Description of Artificial Sequence: Synthetic oligonucleotide
  Antisense strand to SEQ ID NO: 677378
auugccauagcucuucccu

SEQ ID NO: 677380 - RNA, 19 nt, Artificial Sequence
  Description of Artificial Sequence: Synthetic oligonucleotide
  Sense strand starting at position 462 of SEQ ID NO: 585911
gagcuauggcaaugccuga

SEQ ID NO: 677381 - RNA, 19 nt, Artificial Sequence
  Description of Artificial Sequence: Synthetic oligonucleotide
  Antisense strand to SEQ ID NO: 677380
ucaggcauugccauagcuc

SEQ ID NO: 677382 - RNA, 19 nt, Artificial Sequence
  Description of Artificial Sequence: Synthetic oligonucleotide
  Sense strand starting at position 841 of SEQ ID NO: 585911
gagggacugagugguccau

SEQ ID NO: 677383 - RNA, 19 nt, Artificial Sequence
  Description of Artificial Sequence: Synthetic oligonucleotide
  Antisense strand to SEQ ID NO: 677382
auggaccacucagucccuc

SEQ ID NO: 677384 - RNA, 19 nt, Artificial Sequence
  Description of Artificial Sequence: Synthetic oligonucleotide
  Sense strand starting at position 845 of SEQ ID NO: 585911
gacugagugguccauaccu

SEQ ID NO: 677385 - RNA, 19 nt, Artificial Sequence
  Description of Artificial Sequence: Synthetic oligonucleotide
  Antisense strand to SEQ ID NO: 677384
agguauggaccacucaguc

SEQ ID NO: 677386 - RNA, 19 nt, Artificial Sequence
  Description of Artificial Sequence: Synthetic oligonucleotide
  Sense strand starting at position 976 of SEQ ID NO: 585911
uccaucauccuccguggaa

SEQ ID NO: 677387 - RNA, 19 nt, Artificial Sequence
  Description of Artificial Sequence: Synthetic oligonucleotide
  Antisense strand to SEQ ID NO: 677386
uuccacggaggaugaugga

SEQ ID NO: 677388 - RNA, 19 nt, Artificial Sequence
  Description of Artificial Sequence: Synthetic oligonucleotide
  Sense strand starting at position 977 of SEQ ID NO: 585911
ccaucauccuccguggaaa

SEQ ID NO: 677389 - RNA, 19 nt, Artificial Sequence
  Description of Artificial Sequence: Synthetic oligonucleotide
  Antisense strand to SEQ ID NO: 677388
uuuccacggaggaugaugg

SEQ ID NO: 677390 - RNA, 19 nt, Artificial Sequence
  Description of Artificial Sequence: Synthetic oligonucleotide
  Sense strand starting at position 1203 of SEQ ID NO: 585911
gggaacucuuagcccuuua

SEQ ID NO: 677391 - RNA, 19 nt, Artificial Sequence
  Description of Artificial Sequence: Synthetic oligonucleotide
  Antisense strand to SEQ ID NO: 677390
uaaagggcuaagaguuccc

SEQ ID NO: 677392 - RNA, 19 nt, Artificial Sequence
  Description of Artificial Sequence: Synthetic oligonucleotide
  Sense strand starting at position 1274 of SEQ ID NO: 585911
cuguguugagucugagucu

SEQ ID NO: 677393 - RNA, 19 nt, Artificial Sequence
  Description of Artificial Sequence: Synthetic oligonucleotide
  Antisense strand to SEQ ID NO: 677392
agacucagacucaacacag

SEQ ID NO: 677394 - RNA, 19 nt, Artificial Sequence
  Description of Artificial Sequence: Synthetic oligonucleotide
  Sense strand starting at position 1277 of SEQ ID NO: 585911
uguugagucugagucuuga

SEQ ID NO: 677395 - RNA, 19 nt, Artificial Sequence
  Description of Artificial Sequence: Synthetic oligonucleotide
  Antisense strand to SEQ ID NO: 677394
ucaagacucagacucaaca

SEQ ID NO: 677396 - RNA, 19 nt, Artificial Sequence
  Description of Artificial Sequence: Synthetic oligonucleotide
  Sense strand starting at position 1290 of SEQ ID NO: 585911
ucuugaaccaucgggauga

SEQ ID NO: 677397 - RNA, 19 nt, Artificial Sequence
  Description of Artificial Sequence: Synthetic oligonucleotide
  Antisense strand to SEQ ID NO: 677396
ucaucccgaugguucaaga

SEQ ID NO: 677398 - RNA, 19 nt, Artificial Sequence
  Description of Artificial Sequence: Synthetic oligonucleotide
  Sense strand starting at position 1294 of SEQ ID NO: 585911
gaaccaucgggaugacauu

SEQ ID NO: 677399 - RNA, 19 nt, Artificial Sequence
  Description of Artificial Sequence: Synthetic oligonucleotide
  Antisense strand to SEQ ID NO: 677398
aaugucaucccgaugguuc

SEQ ID NO: 677400 - RNA, 19 nt, Artificial Sequence
  Description of Artificial Sequence: Synthetic oligonucleotide
  Sense strand starting at position 1303 of SEQ ID NO: 585911
ggaugacauuugugaauuc

SEQ ID NO: 677401 - RNA, 19 nt, Artificial Sequence
  Description of Artificial Sequence: Synthetic oligonucleotide
  Antisense strand to SEQ ID NO: 677400
gaauucacaaaugucaucc

SEQ ID NO: 677402 - RNA, 19 nt, Artificial Sequence
  Description of Artificial Sequence: Synthetic oligonucleotide
  Sense strand starting at position 1552 of SEQ ID NO: 585911
auacaaaccugagaaugaa

SEQ ID NO: 677403 - RNA, 19 nt, Artificial Sequence
  Description of Artificial Sequence: Synthetic oligonucleotide
  Antisense strand to SEQ ID NO: 677402
uucauucucagguuuguau

SEQ ID NO: 677404 - RNA, 19 nt, Artificial Sequence
  Description of Artificial Sequence: Synthetic oligonucleotide
  Sense strand starting at position 1696 of SEQ ID NO: 585911
gggacaguuucuguggaag

SEQ ID NO: 677405 - RNA, 19 nt, Artificial Sequence
  Description of Artificial Sequence: Synthetic oligonucleotide
  Antisense strand to SEQ ID NO: 677404
cuuccacagaaacuguccc

SEQ ID NO: 677406 - RNA, 19 nt, Artificial Sequence
  Description of Artificial Sequence: Synthetic oligonucleotide
  Sense strand starting at position 1744 of SEQ ID NO: 585911
ugagaaagcuucuucuuuc

SEQ ID NO: 677407 - RNA, 19 nt, Artificial Sequence
  Description of Artificial Sequence: Synthetic oligonucleotide
  Antisense strand to SEQ ID NO: 677406
gaaagaagaagcuuucuca

SEQ ID NO: 677408 - RNA, 19 nt, Artificial Sequence
  Description of Artificial Sequence: Synthetic oligonucleotide
  Sense strand starting at position 2083 of SEQ ID NO: 585911
auaggagcucauugucagu

SEQ ID NO: 677409 - RNA, 19 nt, Artificial Sequence
  Description of Artificial Sequence: Synthetic oligonucleotide
  Antisense strand to SEQ ID NO: 677408
acugacaaugagcuccuau

SEQ ID NO: 677410 - RNA, 19 nt, Artificial Sequence
  Description of Artificial Sequence: Synthetic oligonucleotide
  Sense strand starting at position 2088 of SEQ ID NO: 585911
agcucauugucaguggagu

SEQ ID NO: 677411 - RNA, 19 nt, Artificial Sequence
  Description of Artificial Sequence: Synthetic oligonucleotide
  Antisense strand to SEQ ID NO: 677410
acuccacugacaaugagcu

SEQ ID NO: 677412 - RNA, 19 nt, Artificial Sequence
  Description of Artificial Sequence: Synthetic oligonucleotide
  Sense strand starting at position 2248 of SEQ ID NO: 585911
acucucuuuggaugucaaa

SEQ ID NO: 677413 - RNA, 19 nt, Artificial Sequence
  Description of Artificial Sequence: Synthetic oligonucleotide
  Antisense strand to SEQ ID NO: 677412
uuugacauccaaagagagu

SEQ ID NO: 677414 - RNA, 19 nt, Artificial Sequence
  Description of Artificial Sequence: Synthetic oligonucleotide
  Sense strand starting at position 2421 of SEQ ID NO: 585911
gaguccauguuccuguuaa

SEQ ID NO: 677415 - RNA, 19 nt, Artificial Sequence
  Description of Artificial Sequence: Synthetic oligonucleotide
  Antisense strand to SEQ ID NO: 677414
uuaacaggaacauggacuc

SEQ ID NO: 677416 - RNA, 19 nt, Artificial Sequence
  Description of Artificial Sequence: Synthetic oligonucleotide
  Sense strand starting at position 2525 of SEQ ID NO: 585911
cggauaguuccucaagcga

SEQ ID NO: 677417 - RNA, 19 nt, Artificial Sequence
  Description of Artificial Sequence: Synthetic oligonucleotide
  Antisense strand to SEQ ID NO: 677416
ucgcuugaggaacuauccg

SEQ ID NO: 677418 - RNA, 19 nt, Artificial Sequence
  Description of Artificial Sequence: Synthetic oligonucleotide
  Sense strand starting at position 2566 of SEQ ID NO: 585911
caccgacgucgugaaugaa

SEQ ID NO: 677419 - RNA, 19 nt, Artificial Sequence
  Description of Artificial Sequence: Synthetic oligonucleotide
  Antisense strand to SEQ ID NO: 677418
uucauucacgacgucggug

SEQ ID NO: 677420 - RNA, 19 nt, Artificial Sequence
  Description of Artificial Sequence: Synthetic oligonucleotide
  Sense strand starting at position 2630 of SEQ ID NO: 585911
gcgucauucuaaccaugga

SEQ ID NO: 677421 - RNA, 19 nt, Artificial Sequence
  Description of Artificial Sequence: Synthetic oligonucleotide
  Antisense strand to SEQ ID NO: 677420
uccaugguuagaaugacgc

SEQ ID NO: 677422 - RNA, 19 nt, Artificial Sequence
  Description of Artificial Sequence: Synthetic oligonucleotide
  Sense strand starting at position 2643 of SEQ ID NO: 585911
cauggauuguggguccuga

SEQ ID NO: 677423 - RNA, 19 nt, Artificial Sequence
  Description of Artificial Sequence: Synthetic oligonucleotide
  Antisense strand to SEQ ID NO: 677422
ucaggacccacaauccaug

SEQ ID NO: 677424 - RNA, 19 nt, Artificial Sequence
  Description of Artificial Sequence: Synthetic oligonucleotide
  Sense strand starting at position 2687 of SEQ ID NO: 585911
uguccugagaugugugaga

SEQ ID NO: 677425 - RNA, 19 nt, Artificial Sequence
  Description of Artificial Sequence: Synthetic oligonucleotide
  Antisense strand to SEQ ID NO: 677424
ucucacacaucucaggaca

SEQ ID NO: 677426 - RNA, 19 nt, Artificial Sequence
  Description of Artificial Sequence: Synthetic oligonucleotide
  Sense strand starting at position 2694 of SEQ ID NO: 585911
agaugugugagaggcugua

SEQ ID NO: 677427 - RNA, 19 nt, Artificial Sequence
  Description of Artificial Sequence: Synthetic oligonucleotide
  Antisense strand to SEQ ID NO: 677426
uacagccucucacacaucu

SEQ ID NO: 677428 - RNA, 19 nt, Artificial Sequence
  Description of Artificial Sequence: Synthetic oligonucleotide
  Sense strand starting at position 2706 of SEQ ID NO: 585911
ggcuguauauguguccuga

SEQ ID NO: 677429 - RNA, 19 nt, Artificial Sequence
  Description of Artificial Sequence: Synthetic oligonucleotide
  Antisense strand to SEQ ID NO: 677428
ucaggacacauauacagcc

SEQ ID NO: 677430 - RNA, 19 nt, Artificial Sequence
  Description of Artificial Sequence: Synthetic oligonucleotide
  Sense strand starting at position 2712 of SEQ ID NO: 585911
auauguguccugaggugug

SEQ ID NO: 677431 - RNA, 19 nt, Artificial Sequence
  Description of Artificial Sequence: Synthetic oligonucleotide
  Antisense strand to SEQ ID NO: 677430
cacaccucaggacacauau

SEQ ID NO: 677432 - RNA, 19 nt, Artificial Sequence
  Description of Artificial Sequence: Synthetic oligonucleotide
  Sense strand starting at position 2804 of SEQ ID NO: 585911
ugaguccugagguauguga

SEQ ID NO: 677433 - RNA, 19 nt, Artificial Sequence
  Description of Artificial Sequence: Synthetic oligonucleotide
  Antisense strand to SEQ ID NO: 677432
ucacauaccucaggacuca

SEQ ID NO: 677434 - RNA, 19 nt, Artificial Sequence
  Description of Artificial Sequence: Synthetic oligonucleotide
  Sense strand starting at position 2844 of SEQ ID NO: 585911
ggugaggguuguguguauu

SEQ ID NO: 677435 - RNA, 19 nt, Artificial Sequence
  Description of Artificial Sequence: Synthetic oligonucleotide
  Antisense strand to SEQ ID NO: 677434
aauacacacaacccucacc

SEQ ID NO: 677436 - RNA, 19 nt, Artificial Sequence
  Description of Artificial Sequence: Synthetic oligonucleotide
  Sense strand starting at position 2856 of SEQ ID NO: 585911
guguauucugaggugcguu

SEQ ID NO: 677437 - RNA, 19 nt, Artificial Sequence
  Description of Artificial Sequence: Synthetic oligonucleotide
  Antisense strand to SEQ ID NO: 677436
aacgcaccucagaauacac

SEQ ID NO: 677438 - RNA, 19 nt, Artificial Sequence
  Description of Artificial Sequence: Synthetic oligonucleotide
  Sense strand starting at position 2985 of SEQ ID NO: 585911
gugagauguuguguaugug

SEQ ID NO: 677439 - RNA, 19 nt, Artificial Sequence
  Description of Artificial Sequence: Synthetic oligonucleotide
  Antisense strand to SEQ ID NO: 677438
cacauacacaacaucucac

SEQ ID NO: 677440 - RNA, 19 nt, Artificial Sequence
  Description of Artificial Sequence: Synthetic oligonucleotide
  Sense strand starting at position 2986 of SEQ ID NO: 585911
ugagauguuguguaugugu

SEQ ID NO: 677441 - RNA, 19 nt, Artificial Sequence
  Description of Artificial Sequence: Synthetic oligonucleotide
  Antisense strand to SEQ ID NO: 677440
acacauacacaacaucuca

SEQ ID NO: 677442 - RNA, 19 nt, Artificial Sequence
  Description of Artificial Sequence: Synthetic oligonucleotide
  Sense strand starting at position 2993 of SEQ ID NO: 585911
uuguguauguguccugaag

SEQ ID NO: 677443 - RNA, 19 nt, Artificial Sequence
  Description of Artificial Sequence: Synthetic oligonucleotide
  Antisense strand to SEQ ID NO: 677442
cuucaggacacauacacaa

SEQ ID NO: 677444 - RNA, 19 nt, Artificial Sequence
  Description of Artificial Sequence: Synthetic oligonucleotide
  Sense strand starting at position 3078 of SEQ ID NO: 585911
guguguauccugaggugug

SEQ ID NO: 677445 - RNA, 19 nt, Artificial Sequence
  Description of Artificial Sequence: Synthetic oligonucleotide
  Antisense strand to SEQ ID NO: 677444
cacaccucaggauacacac

SEQ ID NO: 677446 - RNA, 19 nt, Artificial Sequence
  Description of Artificial Sequence: Synthetic oligonucleotide
  Sense strand starting at position 3738 of SEQ ID NO: 585911
uguguccugagauauguga

SEQ ID NO: 677447 - RNA, 19 nt, Artificial Sequence
  Description of Artificial Sequence: Synthetic oligonucleotide
  Antisense strand to SEQ ID NO: 677446
ucacauaucucaggacaca

SEQ ID NO: 677448 - RNA, 19 nt, Artificial Sequence
  Description of Artificial Sequence: Synthetic oligonucleotide
  Sense strand starting at position 3742 of SEQ ID NO: 585911
uccugagauaugugagggu

SEQ ID NO: 677449 - RNA, 19 nt, Artificial Sequence
  Description of Artificial Sequence: Synthetic oligonucleotide
  Antisense strand to SEQ ID NO: 677448
acccucacauaucucagga

SEQ ID NO: 677450 - RNA, 19 nt, Artificial Sequence
  Description of Artificial Sequence: Synthetic oligonucleotide
  Sense strand starting at position 3746 of SEQ ID NO: 585911
gagauaugugaggguugug

SEQ ID NO: 677451 - RNA, 19 nt, Artificial Sequence
  Description of Artificial Sequence: Synthetic oligonucleotide
  Antisense strand to SEQ ID NO: 677450
cacaacccucacauaucuc

SEQ ID NO: 677452 - RNA, 19 nt, Artificial Sequence
  Description of Artificial Sequence: Synthetic oligonucleotide
  Sense strand starting at position 3876 of SEQ ID NO: 585911
uguguuuguguccugaggu

SEQ ID NO: 677453 - RNA, 19 nt, Artificial Sequence
  Description of Artificial Sequence: Synthetic oligonucleotide
  Antisense strand to SEQ ID NO: 677452
accucaggacacaaacaca

SEQ ID NO: 677454 - RNA, 19 nt, Artificial Sequence
  Description of Artificial Sequence: Synthetic oligonucleotide
  Sense strand starting at position 3879 of SEQ ID NO: 585911
guuuguguccugaggugug

SEQ ID NO: 677455 - RNA, 19 nt, Artificial Sequence
  Description of Artificial Sequence: Synthetic oligonucleotide
  Antisense strand to SEQ ID NO: 677454
cacaccucaggacacaaac

SEQ ID NO: 677456 - RNA, 19 nt, Artificial Sequence
  Description of Artificial Sequence: Synthetic oligonucleotide
  Sense strand starting at position 45 of SEQ ID NO: 585912
ugccuucuccuggauuaga

SEQ ID NO: 677457 - RNA, 19 nt, Artificial Sequence
  Description of Artificial Sequence: Synthetic oligonucleotide
  Antisense strand to SEQ ID NO: 677456
ucuaauccaggagaaggca

SEQ ID NO: 677458 - RNA, 19 nt, Artificial Sequence
  Description of Artificial Sequence: Synthetic oligonucleotide
  Sense strand starting at position 443 of SEQ ID NO: 585912
ccagcauccugguugggaa

SEQ ID NO: 677459 - RNA, 19 nt, Artificial Sequence
  Description of Artificial Sequence: Synthetic oligonucleotide
  Antisense strand to SEQ ID NO: 677458
uucccaaccaggaugcugg

SEQ ID NO: 677460 - RNA, 19 nt, Artificial Sequence
  Description of Artificial Sequence: Synthetic oligonucleotide
  Sense strand starting at position 461 of SEQ ID NO: 585912
agggaagagcuauggcaau

SEQ ID NO: 677461 - RNA, 19 nt, Artificial Sequence
  Description of Artificial Sequence: Synthetic oligonucleotide
  Antisense strand to SEQ ID NO: 677460
auugccauagcucuucccu

SEQ ID NO: 677462 - RNA, 19 nt, Artificial Sequence
  Description of Artificial Sequence: Synthetic oligonucleotide
  Sense strand starting at position 597 of SEQ ID NO: 585912
cgaagcugaccaggugaaa

SEQ ID NO: 677463 - RNA, 19 nt, Artificial Sequence
  Description of Artificial Sequence: Synthetic oligonucleotide
  Antisense strand to SEQ ID NO: 677462
uuucaccuggucagcuucg

SEQ ID NO: 677464 - RNA, 19 nt, Artificial Sequence
  Description of Artificial Sequence: Synthetic oligonucleotide
  Sense strand starting at position 978 of SEQ ID NO: 585912
uccaucauccuccguggaa

SEQ ID NO: 677465 - RNA, 19 nt, Artificial Sequence
  Description of Artificial Sequence: Synthetic oligonucleotide
  Antisense strand to SEQ ID NO: 677464
uuccacggaggaugaugga

SEQ ID NO: 677466 - RNA, 19 nt, Artificial Sequence
  Description of Artificial Sequence: Synthetic oligonucleotide
  Sense strand starting at position 979 of SEQ ID NO: 585912
ccaucauccuccguggaaa

SEQ ID NO: 677467 - RNA, 19 nt, Artificial Sequence
  Description of Artificial Sequence: Synthetic oligonucleotide
  Antisense strand to SEQ ID NO: 677466
uuuccacggaggaugaugg

SEQ ID NO: 677468 - RNA, 19 nt, Artificial Sequence
  Description of Artificial Sequence: Synthetic oligonucleotide
  Sense strand starting at position 1194 of SEQ ID NO: 585912
gggaacucuuagcccuuua

SEQ ID NO: 677469 - RNA, 19 nt, Artificial Sequence
  Description of Artificial Sequence: Synthetic oligonucleotide
  Antisense strand to SEQ ID NO: 677468
uaaagggcuaagaguuccc

SEQ ID NO: 677470 - RNA, 19 nt, Artificial Sequence
  Description of Artificial Sequence: Synthetic oligonucleotide
  Sense strand starting at position 1265 of SEQ ID NO: 585912
cuguguugagucguguuga

SEQ ID NO: 677471 - RNA, 19 nt, Artificial Sequence
  Description of Artificial Sequence: Synthetic oligonucleotide
  Antisense strand to SEQ ID NO: 677470
ucaacacgacucaacacag

SEQ ID NO: 677472 - RNA, 19 nt, Artificial Sequence
  Description of Artificial Sequence: Synthetic oligonucleotide
  Sense strand starting at position 1267 of SEQ ID NO: 585912
guguugagucguguugagu

SEQ ID NO: 677473 - RNA, 19 nt, Artificial Sequence
  Description of Artificial Sequence: Synthetic oligonucleotide
  Antisense strand to SEQ ID NO: 677472
acucaacacgacucaacac

SEQ ID NO: 677474 - RNA, 19 nt, Artificial Sequence
  Description of Artificial Sequence: Synthetic oligonucleotide
  Sense strand starting at position 1268 of SEQ ID NO: 585912
uguugagucguguugaguc

SEQ ID NO: 677475 - RNA, 19 nt, Artificial Sequence
  Description of Artificial Sequence: Synthetic oligonucleotide
  Antisense strand to SEQ ID NO: 677474
gacucaacacgacucaaca

SEQ ID NO: 677476 - RNA, 19 nt, Artificial Sequence
  Description of Artificial Sequence: Synthetic oligonucleotide
  Sense strand starting at position 1273 of SEQ ID NO: 585912
agucguguugagucugagu

SEQ ID NO: 677477 - RNA, 19 nt, Artificial Sequence
  Description of Artificial Sequence: Synthetic oligonucleotide
  Antisense strand to SEQ ID NO: 677476
acucagacucaacacgacu

SEQ ID NO: 677478 - RNA, 19 nt, Artificial Sequence
  Description of Artificial Sequence: Synthetic oligonucleotide
  Sense strand starting at position 1291 of SEQ ID NO: 585912
ucuugaaccaucgggauga

SEQ ID NO: 677479 - RNA, 19 nt, Artificial Sequence
  Description of Artificial Sequence: Synthetic oligonucleotide
  Antisense strand to SEQ ID NO: 677478
ucaucccgaugguucaaga

SEQ ID NO: 677480 - RNA, 19 nt, Artificial Sequence
  Description of Artificial Sequence: Synthetic oligonucleotide
  Sense strand starting at position 1295 of SEQ ID NO: 585912
gaaccaucgggaugacauu

SEQ ID NO: 677481 - RNA, 19 nt, Artificial Sequence
  Description of Artificial Sequence: Synthetic oligonucleotide
  Antisense strand to SEQ ID NO: 677480
aaugucaucccgaugguuc

SEQ ID NO: 677482 - RNA, 19 nt, Artificial Sequence
  Description of Artificial Sequence: Synthetic oligonucleotide
  Sense strand starting at position 1313 of SEQ ID NO: 585912
uugugaauucauggugaag

SEQ ID NO: 677483 - RNA, 19 nt, Artificial Sequence
  Description of Artificial Sequence: Synthetic oligonucleotide
  Antisense strand to SEQ ID NO: 677482
cuucaccaugaauucacaa

SEQ ID NO: 677484 - RNA, 19 nt, Artificial Sequence
  Description of Artificial Sequence: Synthetic oligonucleotide
  Sense strand starting at position 1553 of SEQ ID NO: 585912
auacaaaccugagaaugaa

SEQ ID NO: 677485 - RNA, 19 nt, Artificial Sequence
  Description of Artificial Sequence: Synthetic oligonucleotide
  Antisense strand to SEQ ID NO: 677484
uucauucucagguuuguau

SEQ ID NO: 677486 - RNA, 19 nt, Artificial Sequence
  Description of Artificial Sequence: Synthetic oligonucleotide
  Sense strand starting at position 1571 of SEQ ID NO: 585912
acaguuuaaccacagugau

SEQ ID NO: 677487 - RNA, 19 nt, Artificial Sequence
  Description of Artificial Sequence: Synthetic oligonucleotide
  Antisense strand to SEQ ID NO: 677486
aucacugugguuaaacugu

SEQ ID NO: 677488 - RNA, 19 nt, Artificial Sequence
  Description of Artificial Sequence: Synthetic oligonucleotide
  Sense strand starting at position 1697 of SEQ ID NO: 585912
gggacaguuucuguggaag

SEQ ID NO: 677489 - RNA, 19 nt, Artificial Sequence
  Description of Artificial Sequence: Synthetic oligonucleotide
  Antisense strand to SEQ ID NO: 677488
cuuccacagaaacuguccc

SEQ ID NO: 677490 - RNA, 19 nt, Artificial Sequence
  Description of Artificial Sequence: Synthetic oligonucleotide
  Sense strand starting at position 1733 of SEQ ID NO: 585912
uccucacagcccugagaaa

SEQ ID NO: 677491 - RNA, 19 nt, Artificial Sequence
  Description of Artificial Sequence: Synthetic oligonucleotide
  Antisense strand to SEQ ID NO: 677490
uuucucagggcugugagga

SEQ ID NO: 677492 - RNA, 19 nt, Artificial Sequence
  Description of Artificial Sequence: Synthetic oligonucleotide
  Sense strand starting at position 1745 of SEQ ID NO: 585912
ugagaaagcuucuucuuuc

SEQ ID NO: 677493 - RNA, 19 nt, Artificial Sequence
  Description of Artificial Sequence: Synthetic oligonucleotide
  Antisense strand to SEQ ID NO: 677492
gaaagaagaagcuuucuca

SEQ ID NO: 677494 - RNA, 19 nt, Artificial Sequence
  Description of Artificial Sequence: Synthetic oligonucleotide
  Sense strand starting at position 1985 of SEQ ID NO: 585912
aacggacuuucugucuuaa

SEQ ID NO: 677495 - RNA, 19 nt, Artificial Sequence
  Description of Artificial Sequence: Synthetic oligonucleotide
  Antisense strand to SEQ ID NO: 677494
uuaagacagaaaguccguu

SEQ ID NO: 677496 - RNA, 19 nt, Artificial Sequence
  Description of Artificial Sequence: Synthetic oligonucleotide
  Sense strand starting at position 1987 of SEQ ID NO: 585912
cggacuuucugucuuaaag

SEQ ID NO: 677497 - RNA, 19 nt, Artificial Sequence
  Description of Artificial Sequence: Synthetic oligonucleotide
  Antisense strand to SEQ ID NO: 677496
cuuuaagacagaaaguccg

SEQ ID NO: 677498 - RNA, 19 nt, Artificial Sequence
  Description of Artificial Sequence: Synthetic oligonucleotide
  Sense strand starting at position 2209 of SEQ ID NO: 585912
gagcucauuucucugagca

SEQ ID NO: 677499 - RNA, 19 nt, Artificial Sequence
  Description of Artificial Sequence: Synthetic oligonucleotide
  Antisense strand to SEQ ID NO: 677498
ugcucagagaaaugagcuc

SEQ ID NO: 677500 - RNA, 19 nt, Artificial Sequence
  Description of Artificial Sequence: Synthetic oligonucleotide
  Sense strand starting at position 2210 of SEQ ID NO: 585912
agcucauuucucugagcau

SEQ ID NO: 677501 - RNA, 19 nt, Artificial Sequence
  Description of Artificial Sequence: Synthetic oligonucleotide
  Antisense strand to SEQ ID NO: 677500
augcucagagaaaugagcu

SEQ ID NO: 677502 - RNA, 19 nt, Artificial Sequence
  Description of Artificial Sequence: Synthetic oligonucleotide
  Sense strand starting at position 2249 of SEQ ID NO: 585912
acucucuuuggaugucaaa

SEQ ID NO: 677503 - RNA, 19 nt, Artificial Sequence
  Description of Artificial Sequence: Synthetic oligonucleotide
  Antisense strand to SEQ ID NO: 677502
uuugacauccaaagagagu

SEQ ID NO: 677504 - RNA, 19 nt, Artificial Sequence
  Description of Artificial Sequence: Synthetic oligonucleotide
  Sense strand starting at position 2526 of SEQ ID NO: 585912
cggauaguuccucaagcga

SEQ ID NO: 677505 - RNA, 19 nt, Artificial Sequence
  Description of Artificial Sequence: Synthetic oligonucleotide
  Antisense strand to SEQ ID NO: 677504
ucgcuugaggaacuauccg

SEQ ID NO: 677506 - RNA, 19 nt, Artificial Sequence
  Description of Artificial Sequence: Synthetic oligonucleotide
  Sense strand starting at position 2567 of SEQ ID NO: 585912
caccgacgucgugaaugaa

SEQ ID NO: 677507 - RNA, 19 nt, Artificial Sequence
  Description of Artificial Sequence: Synthetic oligonucleotide
  Antisense strand to SEQ ID NO: 677506
uucauucacgacgucggug

SEQ ID NO: 677508 - RNA, 19 nt, Artificial Sequence
  Description of Artificial Sequence: Synthetic oligonucleotide
  Sense strand starting at position 2644 of SEQ ID NO: 585912
cauggauuguggguccuga

SEQ ID NO: 677509 - RNA, 19 nt, Artificial Sequence
  Description of Artificial Sequence: Synthetic oligonucleotide
  Antisense strand to SEQ ID NO: 677508
ucaggacccacaauccaug

SEQ ID NO: 677510 - RNA, 19 nt, Artificial Sequence
  Description of Artificial Sequence: Synthetic oligonucleotide
  Sense strand starting at position 2799 of SEQ ID NO: 585912
ugaguccugagguauguga

SEQ ID NO: 677511 - RNA, 19 nt, Artificial Sequence
  Description of Artificial Sequence: Synthetic oligonucleotide
  Antisense strand to SEQ ID NO: 677510
ucacauaccucaggacuca

SEQ ID NO: 677512 - RNA, 19 nt, Artificial Sequence
  Description of Artificial Sequence: Synthetic oligonucleotide
  Sense strand starting at position 2853 of SEQ ID NO: 585912
guguguauucugaggugca

SEQ ID NO: 677513 - RNA, 19 nt, Artificial Sequence
  Description of Artificial Sequence: Synthetic oligonucleotide
  Antisense strand to SEQ ID NO: 677512
ugcaccucagaauacacac

SEQ ID NO: 677514 - RNA, 19 nt, Artificial Sequence
  Description of Artificial Sequence: Synthetic oligonucleotide
  Sense strand starting at position 2888 of SEQ ID NO: 585912
uccugaggugugugagaug

SEQ ID NO: 677515 - RNA, 19 nt, Artificial Sequence
  Description of Artificial Sequence: Synthetic oligonucleotide
  Antisense strand to SEQ ID NO: 677514
caucucacacaccucagga

SEQ ID NO: 677516 - RNA, 19 nt, Artificial Sequence
  Description of Artificial Sequence: Synthetic oligonucleotide
  Sense strand starting at position 3013 of SEQ ID NO: 585912
gugugagguguuaaguugu

SEQ ID NO: 677517 - RNA, 19 nt, Artificial Sequence
  Description of Artificial Sequence: Synthetic oligonucleotide
  Antisense strand to SEQ ID NO: 677516
acaacuuaacaccucacac

SEQ ID NO: 677518 - RNA, 19 nt, Artificial Sequence
  Description of Artificial Sequence: Synthetic oligonucleotide
  Sense strand starting at position 3254 of SEQ ID NO: 585912
aggguugugcguuucuuga

SEQ ID NO: 677519 - RNA, 19 nt, Artificial Sequence
  Description of Artificial Sequence: Synthetic oligonucleotide
  Antisense strand to SEQ ID NO: 677518
ucaagaaacgcacaacccu

SEQ ID NO: 677520 - RNA, 19 nt, Artificial Sequence
  Description of Artificial Sequence: Synthetic oligonucleotide
  Sense strand starting at position 3316 of SEQ ID NO: 585912
guguguuuccugaggugug

SEQ ID NO: 677521 - RNA, 19 nt, Artificial Sequence
  Description of Artificial Sequence: Synthetic oligonucleotide
  Antisense strand to SEQ ID NO: 677520
cacaccucaggaaacacac

SEQ ID NO: 677522 - RNA, 19 nt, Artificial Sequence
  Description of Artificial Sequence: Synthetic oligonucleotide
  Sense strand starting at position 3334 of SEQ ID NO: 585912
gugaggguuguguguauuu

SEQ ID NO: 677523 - RNA, 19 nt, Artificial Sequence
  Description of Artificial Sequence: Synthetic oligonucleotide
  Antisense strand to SEQ ID NO: 677522
aaauacacacaacccucac

SEQ ID NO: 677524 - RNA, 19 nt, Artificial Sequence
  Description of Artificial Sequence: Synthetic oligonucleotide
  Sense strand starting at position 3339 of SEQ ID NO: 585912
gguuguguguauuuccuga

SEQ ID NO: 677525 - RNA, 19 nt, Artificial Sequence
  Description of Artificial Sequence: Synthetic oligonucleotide
  Antisense strand to SEQ ID NO: 677524
ucaggaaauacacacaacc

SEQ ID NO: 677526 - RNA, 19 nt, Artificial Sequence
  Description of Artificial Sequence: Synthetic oligonucleotide
  Sense strand starting at position 3344 of SEQ ID NO: 585912
uguguauuuccugaggugu

SEQ ID NO: 677527 - RNA, 19 nt, Artificial Sequence
  Description of Artificial Sequence: Synthetic oligonucleotide
  Antisense strand to SEQ ID NO: 677526
acaccucaggaaauacaca

SEQ ID NO: 677528 - RNA, 19 nt, Artificial Sequence
  Description of Artificial Sequence: Synthetic oligonucleotide
  Sense strand starting at position 3365 of SEQ ID NO: 585912
gaggguuauguguguauuu

SEQ ID NO: 677529 - RNA, 19 nt, Artificial Sequence
  Description of Artificial Sequence: Synthetic oligonucleotide
  Antisense strand to SEQ ID NO: 677528
aaauacacacauaacccuc

SEQ ID NO: 677530 - RNA, 19 nt, Artificial Sequence
  Description of Artificial Sequence: Synthetic oligonucleotide
  Sense strand starting at position 3370 of SEQ ID NO: 585912
uuauguguguauuuccuga

SEQ ID NO: 677531 - RNA, 19 nt, Artificial Sequence
  Description of Artificial Sequence: Synthetic oligonucleotide
  Antisense strand to SEQ ID NO: 677530
ucaggaaauacacacauaa

SEQ ID NO: 677532 - RNA, 19 nt, Artificial Sequence
  Description of Artificial Sequence: Synthetic oligonucleotide
  Sense strand starting at position 3759 of SEQ ID NO: 585912
cucagucaucucuacaagu

SEQ ID NO: 677533 - RNA, 19 nt, Artificial Sequence
  Description of Artificial Sequence: Synthetic oligonucleotide
  Antisense strand to SEQ ID NO: 677532
acuuguagagaugacugag

SEQ ID NO: 677534 - RNA, 19 nt, Artificial Sequence
  Description of Artificial Sequence: Synthetic oligonucleotide
  Sense strand starting at position 3836 of SEQ ID NO: 585912
gaggaugugugagcucaga

SEQ ID NO: 677535 - RNA, 19 nt, Artificial Sequence
  Description of Artificial Sequence: Synthetic oligonucleotide
  Antisense strand to SEQ ID NO: 677534
ucugagcucacacauccuc

SEQ ID NO: 677536 - RNA, 19 nt, Artificial Sequence
  Description of Artificial Sequence: Synthetic oligonucleotide
  Sense strand starting at position 5 of SEQ ID NO: 585913
uccacugagucucugcuua

SEQ ID NO: 677537 - RNA, 19 nt, Artificial Sequence
  Description of Artificial Sequence: Synthetic oligonucleotide
  Antisense strand to SEQ ID NO: 677536
uaagcagagacucagugga

SEQ ID NO: 677538 - RNA, 19 nt, Artificial Sequence
  Description of Artificial Sequence: Synthetic oligonucleotide
  Sense strand starting at position 9 of SEQ ID NO: 585913
cugagucucugcuuaggua

SEQ ID NO: 677539 - RNA, 19 nt, Artificial Sequence
  Description of Artificial Sequence: Synthetic oligonucleotide
  Antisense strand to SEQ ID NO: 677538
uaccuaagcagagacucag

SEQ ID NO: 677540 - RNA, 19 nt, Artificial Sequence
  Description of Artificial Sequence: Synthetic oligonucleotide
  Sense strand starting at position 10 of SEQ ID NO: 585913
ugagucucugcuuagguaa

SEQ ID NO: 677541 - RNA, 19 nt, Artificial Sequence
  Description of Artificial Sequence: Synthetic oligonucleotide
  Antisense strand to SEQ ID NO: 677540
uuaccuaagcagagacuca

SEQ ID NO: 677542 - RNA, 19 nt, Artificial Sequence
  Description of Artificial Sequence: Synthetic oligonucleotide
  Sense strand starting at position 13 of SEQ ID NO: 585913
gucucugcuuagguaaaca

SEQ ID NO: 677543 - RNA, 19 nt, Artificial Sequence
  Description of Artificial Sequence: Synthetic oligonucleotide
  Antisense strand to SEQ ID NO: 677542
uguuuaccuaagcagagac

SEQ ID NO: 677544 - RNA, 19 nt, Artificial Sequence
  Description of Artificial Sequence: Synthetic oligonucleotide
  Sense strand starting at position 59 of SEQ ID NO: 585913
gcuugagguucccuuuauu

SEQ ID NO: 677545 - RNA, 19 nt, Artificial Sequence
  Description of Artificial Sequence: Synthetic oligonucleotide
  Antisense strand to SEQ ID NO: 677544
aauaaagggaaccucaagc

SEQ ID NO: 677546 - RNA, 19 nt, Artificial Sequence
  Description of Artificial Sequence: Synthetic oligonucleotide
  Sense strand starting at position 88 of SEQ ID NO: 585913
cucugaagucuuuaguuuc

SEQ ID NO: 677547 - RNA, 19 nt, Artificial Sequence
  Description of Artificial Sequence: Synthetic oligonucleotide
  Antisense strand to SEQ ID NO: 677546
gaaacuaaagacuucagag

SEQ ID NO: 677548 - RNA, 19 nt, Artificial Sequence
  Description of Artificial Sequence: Synthetic oligonucleotide
  Sense strand starting at position 569 of SEQ ID NO: 585913
acuuaaauuguguguacaa

SEQ ID NO: 677549 - RNA, 19 nt, Artificial Sequence
  Description of Artificial Sequence: Synthetic oligonucleotide
  Antisense strand to SEQ ID NO: 677548
uuguacacacaauuuaagu

SEQ ID NO: 677550 - RNA, 19 nt, Artificial Sequence
  Description of Artificial Sequence: Synthetic oligonucleotide
  Sense strand starting at position 570 of SEQ ID NO: 585913
cuuaaauuguguguacaaa

SEQ ID NO: 677551 - RNA, 19 nt, Artificial Sequence
  Description of Artificial Sequence: Synthetic oligonucleotide
  Antisense strand to SEQ ID NO: 677550
uuuguacacacaauuuaag

SEQ ID NO: 677552 - RNA, 19 nt, Artificial Sequence
  Description of Artificial Sequence: Synthetic oligonucleotide
  Sense strand starting at position 713 of SEQ ID NO: 585913
gccgcaaagccucaaucua

SEQ ID NO: 677553 - RNA, 19 nt, Artificial Sequence
  Description of Artificial Sequence: Synthetic oligonucleotide
  Antisense strand to SEQ ID NO: 677552
uagauugaggcuuugcggc

SEQ ID NO: 677554 - RNA, 19 nt, Artificial Sequence
  Description of Artificial Sequence: Synthetic oligonucleotide
  Sense strand starting at position 761 of SEQ ID NO: 585913
uaucuugaguuguugcaca

SEQ ID NO: 677555 - RNA, 19 nt, Artificial Sequence
  Description of Artificial Sequence: Synthetic oligonucleotide
  Antisense strand to SEQ ID NO: 677554
ugugcaacaacucaagaua

SEQ ID NO: 677556 - RNA, 19 nt, Artificial Sequence
  Description of Artificial Sequence: Synthetic oligonucleotide
  Sense strand starting at position 782 of SEQ ID NO: 585913
gacagcuccucaguuugau

SEQ ID NO: 677557 - RNA, 19 nt, Artificial Sequence
  Description of Artificial Sequence: Synthetic oligonucleotide
  Antisense strand to SEQ ID NO: 677556
aucaaacugaggagcuguc

SEQ ID NO: 677558 - RNA, 19 nt, Artificial Sequence
  Description of Artificial Sequence: Synthetic oligonucleotide
  Sense strand starting at position 791 of SEQ ID NO: 585913
ucaguuugaugacuaguua

SEQ ID NO: 677559 - RNA, 19 nt, Artificial Sequence
  Description of Artificial Sequence: Synthetic oligonucleotide
  Antisense strand to SEQ ID NO: 677558
uaacuagucaucaaacuga

SEQ ID NO: 677560 - RNA, 19 nt, Artificial Sequence
  Description of Artificial Sequence: Synthetic oligonucleotide
  Sense strand starting at position 792 of SEQ ID NO: 585913
caguuugaugacuaguuac

SEQ ID NO: 677561 - RNA, 19 nt, Artificial Sequence
  Description of Artificial Sequence: Synthetic oligonucleotide
  Antisense strand to SEQ ID NO: 677560
guaacuagucaucaaacug

SEQ ID NO: 677562 - RNA, 19 nt, Artificial Sequence
  Description of Artificial Sequence: Synthetic oligonucleotide
  Sense strand starting at position 795 of SEQ ID NO: 585913
uuugaugacuaguuacguu

SEQ ID NO: 677563 - RNA, 19 nt, Artificial Sequence
  Description of Artificial Sequence: Synthetic oligonucleotide
  Antisense strand to SEQ ID NO: 677562
aacguaacuagucaucaaa

SEQ ID NO: 677564 - RNA, 19 nt, Artificial Sequence
  Description of Artificial Sequence: Synthetic oligonucleotide
  Sense strand starting at position 804 of SEQ ID NO: 585913
uaguuacguucucuggaga

SEQ ID NO: 677565 - RNA, 19 nt, Artificial Sequence
  Description of Artificial Sequence: Synthetic oligonucleotide
  Antisense strand to SEQ ID NO: 677564
ucuccagagaacguaacua

SEQ ID NO: 677566 - RNA, 19 nt, Artificial Sequence
  Description of Artificial Sequence: Synthetic oligonucleotide
  Sense strand starting at position 805 of SEQ ID NO: 585913
aguuacguucucuggagau

SEQ ID NO: 677567 - RNA, 19 nt, Artificial Sequence
  Description of Artificial Sequence: Synthetic oligonucleotide
  Antisense strand to SEQ ID NO: 677566
aucuccagagaacguaacu

SEQ ID NO: 677568 - RNA, 19 nt, Artificial Sequence
  Description of Artificial Sequence: Synthetic oligonucleotide
  Sense strand starting at position 807 of SEQ ID NO: 585913
uuacguucucuggagauua

SEQ ID NO: 677569 - RNA, 19 nt, Artificial Sequence
  Description of Artificial Sequence: Synthetic oligonucleotide
  Antisense strand to SEQ ID NO: 677568
uaaucuccagagaacguaa

SEQ ID NO: 677570 - RNA, 19 nt, Artificial Sequence
  Description of Artificial Sequence: Synthetic oligonucleotide
  Sense strand starting at position 809 of SEQ ID NO: 585913
acguucucuggagauuaag

SEQ ID NO: 677571 - RNA, 19 nt, Artificial Sequence
  Description of Artificial Sequence: Synthetic oligonucleotide
  Antisense strand to SEQ ID NO: 677570
cuuaaucuccagagaacgu

SEQ ID NO: 677572 - RNA, 19 nt, Artificial Sequence
  Description of Artificial Sequence: Synthetic oligonucleotide
  Sense strand starting at position 815 of SEQ ID NO: 585913
ucuggagauuaagagaaau

SEQ ID NO: 677573 - RNA, 19 nt, Artificial Sequence
  Description of Artificial Sequence: Synthetic oligonucleotide
  Antisense strand to SEQ ID NO: 677572
auuucucuuaaucuccaga

SEQ ID NO: 677574 - RNA, 19 nt, Artificial Sequence
  Description of Artificial Sequence: Synthetic oligonucleotide
  Sense strand starting at position 967 of SEQ ID NO: 585913
uuagcaaagcgcugagaaa

SEQ ID NO: 677575 - RNA, 19 nt, Artificial Sequence
  Description of Artificial Sequence: Synthetic oligonucleotide
  Antisense strand to SEQ ID NO: 677574
uuucucagcgcuuugcuaa

SEQ ID NO: 677576 - RNA, 19 nt, Artificial Sequence
  Description of Artificial Sequence: Synthetic oligonucleotide
  Sense strand starting at position 1133 of SEQ ID NO: 585913
ugggucacuucuuucucua

SEQ ID NO: 677577 - RNA, 19 nt, Artificial Sequence
  Description of Artificial Sequence: Synthetic oligonucleotide
  Antisense strand to SEQ ID NO: 677576
uagagaaagaagugaccca

SEQ ID NO: 677578 - RNA, 19 nt, Artificial Sequence
  Description of Artificial Sequence: Synthetic oligonucleotide
  Sense strand starting at position 1135 of SEQ ID NO: 585913
ggucacuucuuucucuaga

SEQ ID NO: 677579 - RNA, 19 nt, Artificial Sequence
  Description of Artificial Sequence: Synthetic oligonucleotide
  Antisense strand to SEQ ID NO: 677578
ucuagagaaagaagugacc

SEQ ID NO: 677580 - RNA, 19 nt, Artificial Sequence
  Description of Artificial Sequence: Synthetic oligonucleotide
  Sense strand starting at position 1464 of SEQ ID NO: 585913
gcugaugguaucuggguga

SEQ ID NO: 677581 - RNA, 19 nt, Artificial Sequence
  Description of Artificial Sequence: Synthetic oligonucleotide
  Antisense strand to SEQ ID NO: 677580
ucacccagauaccaucagc

SEQ ID NO: 677582 - RNA, 19 nt, Artificial Sequence
  Description of Artificial Sequence: Synthetic oligonucleotide
  Sense strand starting at position 1468 of SEQ ID NO: 585913
augguaucugggugaggga

SEQ ID NO: 677583 - RNA, 19 nt, Artificial Sequence
  Description of Artificial Sequence: Synthetic oligonucleotide
  Antisense strand to SEQ ID NO: 677582
ucccucacccagauaccau

SEQ ID NO: 677584 - RNA, 19 nt, Artificial Sequence
  Description of Artificial Sequence: Synthetic oligonucleotide
  Sense strand starting at position 2176 of SEQ ID NO: 585913
ccaggaggguuguuucaca

SEQ ID NO: 677585 - RNA, 19 nt, Artificial Sequence
  Description of Artificial Sequence: Synthetic oligonucleotide
  Antisense strand to SEQ ID NO: 677584
ugugaaacaacccuccugg

SEQ ID NO: 677586 - RNA, 19 nt, Artificial Sequence
  Description of Artificial Sequence: Synthetic oligonucleotide
  Sense strand starting at position 2446 of SEQ ID NO: 585913
ucuuuauuacugugucaug

SEQ ID NO: 677587 - RNA, 19 nt, Artificial Sequence
  Description of Artificial Sequence: Synthetic oligonucleotide
  Antisense strand to SEQ ID NO: 677586
caugacacaguaauaaaga

SEQ ID NO: 677588 - RNA, 19 nt, Artificial Sequence
  Description of Artificial Sequence: Synthetic oligonucleotide
  Sense strand starting at position 2447 of SEQ ID NO: 585913
cuuuauuacugugucauga

SEQ ID NO: 677589 - RNA, 19 nt, Artificial Sequence
  Description of Artificial Sequence: Synthetic oligonucleotide
  Antisense strand to SEQ ID NO: 677588
ucaugacacaguaauaaag

SEQ ID NO: 677590 - RNA, 19 nt, Artificial Sequence
  Description of Artificial Sequence: Synthetic oligonucleotide
  Sense strand starting at position 2458 of SEQ ID NO: 585913
ugucaugacuucuuaccau

SEQ ID NO: 677591 - RNA, 19 nt, Artificial Sequence
  Description of Artificial Sequence: Synthetic oligonucleotide
  Antisense strand to SEQ ID NO: 677590
augguaagaagucaugaca

SEQ ID NO: 677592 - RNA, 19 nt, Artificial Sequence
  Description of Artificial Sequence: Synthetic oligonucleotide
  Sense strand starting at position 3123 of SEQ ID NO: 585913
uguggauguuucuugcaca

SEQ ID NO: 677593 - RNA, 19 nt, Artificial Sequence
  Description of Artificial Sequence: Synthetic oligonucleotide
  Antisense strand to SEQ ID NO: 677592
ugugcaagaaacauccaca

SEQ ID NO: 677594 - RNA, 19 nt, Artificial Sequence
  Description of Artificial Sequence: Synthetic oligonucleotide
  Sense strand starting at position 3249 of SEQ ID NO: 585913
ccaaguuacuguuuaucca

SEQ ID NO: 677595 - RNA, 19 nt, Artificial Sequence
  Description of Artificial Sequence: Synthetic oligonucleotide
  Antisense strand to SEQ ID NO: 677594
uggauaaacaguaacuugg

SEQ ID NO: 677596 - RNA, 19 nt, Artificial Sequence
  Description of Artificial Sequence: Synthetic oligonucleotide
  Sense strand starting at position 3256 of SEQ ID NO: 585913
acuguuuauccagagcauc

SEQ ID NO: 677597 - RNA, 19 nt, Artificial Sequence
  Description of Artificial Sequence: Synthetic oligonucleotide
  Antisense strand to SEQ ID NO: 677596
gaugcucuggauaaacagu

SEQ ID NO: 677598 - RNA, 19 nt, Artificial Sequence
  Description of Artificial Sequence: Synthetic oligonucleotide
  Sense strand starting at position 3391 of SEQ ID NO: 585913
gaggaaguugcaugaugac

SEQ ID NO: 677599 - RNA, 19 nt, Artificial Sequence
  Description of Artificial Sequence: Synthetic oligonucleotide
  Antisense strand to SEQ ID NO: 677598
gucaucaugcaacuuccuc

SEQ ID NO: 677600 - RNA, 19 nt, Artificial Sequence
  Description of Artificial Sequence: Synthetic oligonucleotide
  Sense strand starting at position 3503 of SEQ ID NO: 585913
ggaauuccauuuggcauuu

SEQ ID NO: 677601 - RNA, 19 nt, Artificial Sequence
  Description of Artificial Sequence: Synthetic oligonucleotide
  Antisense strand to SEQ ID NO: 677600
aaaugccaaauggaauucc

SEQ ID NO: 677602 - RNA, 19 nt, Artificial Sequence
  Description of Artificial Sequence: Synthetic oligonucleotide
  Sense strand starting at position 3528 of SEQ ID NO: 585913
cugggaaaguuuccagaau

SEQ ID NO: 677603 - RNA, 19 nt, Artificial Sequence
  Description of Artificial Sequence: Synthetic oligonucleotide
  Antisense strand to SEQ ID NO: 677602
auucuggaaacuuucccag

SEQ ID NO: 677604 - RNA, 19 nt, Artificial Sequence
  Description of Artificial Sequence: Synthetic oligonucleotide
  Sense strand starting at position 3592 of SEQ ID NO: 585913
cccuacugaugucugaaau

SEQ ID NO: 677605 - RNA, 19 nt, Artificial Sequence
  Description of Artificial Sequence: Synthetic oligonucleotide
  Antisense strand to SEQ ID NO: 677604
auuucagacaucaguaggg

SEQ ID NO: 677606 - RNA, 19 nt, Artificial Sequence
  Description of Artificial Sequence: Synthetic oligonucleotide
  Sense strand starting at position 3593 of SEQ ID NO: 585913
ccuacugaugucugaaauu

SEQ ID NO: 677607 - RNA, 19 nt, Artificial Sequence
  Description of Artificial Sequence: Synthetic oligonucleotide
  Antisense strand to SEQ ID NO: 677606
aauuucagacaucaguagg

SEQ ID NO: 677608 - RNA, 19 nt, Artificial Sequence
  Description of Artificial Sequence: Synthetic oligonucleotide
  Sense strand starting at position 3664 of SEQ ID NO: 585913
auauucgaauugucuggga

SEQ ID NO: 677609 - RNA, 19 nt, Artificial Sequence
  Description of Artificial Sequence: Synthetic oligonucleotide
  Antisense strand to SEQ ID NO: 677608
ucccagacaauucgaauau

SEQ ID NO: 677610 - RNA, 19 nt, Artificial Sequence
  Description of Artificial Sequence: Synthetic oligonucleotide
  Sense strand starting at position 3668 of SEQ ID NO: 585913
ucgaauugucugggagggu

SEQ ID NO: 677611 - RNA, 19 nt, Artificial Sequence
  Description of Artificial Sequence: Synthetic oligonucleotide
  Antisense strand to SEQ ID NO: 677610
acccucccagacaauucga

SEQ ID NO: 677612 - RNA, 19 nt, Artificial Sequence
  Description of Artificial Sequence: Synthetic oligonucleotide
  Sense strand starting at position 3681 of SEQ ID NO: 585913
gagggucagugggaagaaa

SEQ ID NO: 677613 - RNA, 19 nt, Artificial Sequence
  Description of Artificial Sequence: Synthetic oligonucleotide
  Antisense strand to SEQ ID NO: 677612
uuucuucccacugacccuc

SEQ ID NO: 677614 - RNA, 19 nt, Artificial Sequence
  Description of Artificial Sequence: Synthetic oligonucleotide
  Sense strand starting at position 3973 of SEQ ID NO: 585913
uguaaugauuuacagaaug

SEQ ID NO: 677615 - RNA, 19 nt, Artificial Sequence
  Description of Artificial Sequence: Synthetic oligonucleotide
  Antisense strand to SEQ ID NO: 677614
cauucuguaaaucauuaca

SEQ ID NO: 677616 - RNA, 19 nt, Artificial Sequence
  Description of Artificial Sequence: Synthetic oligonucleotide
  Sense strand starting at position 11 of SEQ ID NO: 585914
uggcuaaguacucaggagu

SEQ ID NO: 677617 - RNA, 19 nt, Artificial Sequence
  Description of Artificial Sequence: Synthetic oligonucleotide
  Antisense strand to SEQ ID NO: 677616
acuccugaguacuuagcca

SEQ ID NO: 677618 - RNA, 19 nt, Artificial Sequence
  Description of Artificial Sequence: Synthetic oligonucleotide
  Sense strand starting at position 14 of SEQ ID NO: 585914
cuaaguacucaggaguugu

SEQ ID NO: 677619 - RNA, 19 nt, Artificial Sequence
  Description of Artificial Sequence: Synthetic oligonucleotide
  Antisense strand to SEQ ID NO: 677618
acaacuccugaguacuuag

SEQ ID NO: 677620 - RNA, 19 nt, Artificial Sequence
  Description of Artificial Sequence: Synthetic oligonucleotide
  Sense strand starting at position 225 of SEQ ID NO: 585914
gcacucaagauguguguua

SEQ ID NO: 677621 - RNA, 19 nt, Artificial Sequence
  Description of Artificial Sequence: Synthetic oligonucleotide
  Antisense strand to SEQ ID NO: 677620
uaacacacaucuugagugc

SEQ ID NO: 677622 - RNA, 19 nt, Artificial Sequence
  Description of Artificial Sequence: Synthetic oligonucleotide
  Sense strand starting at position 227 of SEQ ID NO: 585914
acucaagauguguguuaga

SEQ ID NO: 677623 - RNA, 19 nt, Artificial Sequence
  Description of Artificial Sequence: Synthetic oligonucleotide
  Antisense strand to SEQ ID NO: 677622
ucuaacacacaucuugagu

SEQ ID NO: 677624 - RNA, 19 nt, Artificial Sequence
  Description of Artificial Sequence: Synthetic oligonucleotide
  Sense strand starting at position 234 of SEQ ID NO: 585914
auguguguuagauauugua

SEQ ID NO: 677625 - RNA, 19 nt, Artificial Sequence
  Description of Artificial Sequence: Synthetic oligonucleotide
  Antisense strand to SEQ ID NO: 677624
uacaauaucuaacacacau

SEQ ID NO: 677626 - RNA, 19 nt, Artificial Sequence
  Description of Artificial Sequence: Synthetic oligonucleotide
  Sense strand starting at position 246 of SEQ ID NO: 585914
uauuguagugaagaugcua

SEQ ID NO: 677627 - RNA, 19 nt, Artificial Sequence
  Description of Artificial Sequence: Synthetic oligonucleotide
  Antisense strand to SEQ ID NO: 677626
uagcaucuucacuacaaua

SEQ ID NO: 677628 - RNA, 19 nt, Artificial Sequence
  Description of Artificial Sequence: Synthetic oligonucleotide
  Sense strand starting at position 422 of SEQ ID NO: 585914
uuaguuugugucugucuaa

SEQ ID NO: 677629 - RNA, 19 nt, Artificial Sequence
  Description of Artificial Sequence: Synthetic oligonucleotide
  Antisense strand to SEQ ID NO: 677628
uuagacagacacaaacuaa

SEQ ID NO: 677630 - RNA, 19 nt, Artificial Sequence
  Description of Artificial Sequence: Synthetic oligonucleotide
  Sense strand starting at position 423 of SEQ ID NO: 585914
uaguuugugucugucuaau

SEQ ID NO: 677631 - RNA, 19 nt, Artificial Sequence
  Description of Artificial Sequence: Synthetic oligonucleotide
  Antisense strand to SEQ ID NO: 677630
auuagacagacacaaacua

SEQ ID NO: 677632 - RNA, 19 nt, Artificial Sequence
  Description of Artificial Sequence: Synthetic oligonucleotide
  Sense strand starting at position 443 of SEQ ID NO: 585914
cucuuacuuccaugagaug

SEQ ID NO: 677633 - RNA, 19 nt, Artificial Sequence
  Description of Artificial Sequence: Synthetic oligonucleotide
  Antisense strand to SEQ ID NO: 677632
caucucauggaaguaagag

SEQ ID NO: 677634 - RNA, 19 nt, Artificial Sequence
  Description of Artificial Sequence: Synthetic oligonucleotide
  Sense strand starting at position 560 of SEQ ID NO: 585914
uauggagcccaggguuaua

SEQ ID NO: 677635 - RNA, 19 nt, Artificial Sequence
  Description of Artificial Sequence: Synthetic oligonucleotide
  Antisense strand to SEQ ID NO: 677634
uauaacccugggcuccaua

SEQ ID NO: 677636 - RNA, 19 nt, Artificial Sequence
  Description of Artificial Sequence: Synthetic oligonucleotide
  Sense strand starting at position 571 of SEQ ID NO: 585914
ggguuauacccuuggugcu

SEQ ID NO: 677637 - RNA, 19 nt, Artificial Sequence
  Description of Artificial Sequence: Synthetic oligonucleotide
  Antisense strand to SEQ ID NO: 677636
agcaccaaggguauaaccc

SEQ ID NO: 677638 - RNA, 19 nt, Artificial Sequence
  Description of Artificial Sequence: Synthetic oligonucleotide
  Sense strand starting at position 635 of SEQ ID NO: 585914
aggagacuuccgcaaggcu

SEQ ID NO: 677639 - RNA, 19 nt, Artificial Sequence
  Description of Artificial Sequence: Synthetic oligonucleotide
  Antisense strand to SEQ ID NO: 677638
agccuugcggaagucuccu

SEQ ID NO: 677640 - RNA, 19 nt, Artificial Sequence
  Description of Artificial Sequence: Synthetic oligonucleotide
  Sense strand starting at position 729 of SEQ ID NO: 585914
gcauauucccuccacagga

SEQ ID NO: 677641 - RNA, 19 nt, Artificial Sequence
  Description of Artificial Sequence: Synthetic oligonucleotide
  Antisense strand to SEQ ID NO: 677640
uccuguggagggaauaugc

SEQ ID NO: 677642 - RNA, 19 nt, Artificial Sequence
  Description of Artificial Sequence: Synthetic oligonucleotide
  Sense strand starting at position 841 of SEQ ID NO: 585914
ggaagaugcuguagguuug

SEQ ID NO: 677643 - RNA, 19 nt, Artificial Sequence
  Description of Artificial Sequence: Synthetic oligonucleotide
  Antisense strand to SEQ ID NO: 677642
caaaccuacagcaucuucc

SEQ ID NO: 677644 - RNA, 19 nt, Artificial Sequence
  Description of Artificial Sequence: Synthetic oligonucleotide
  Sense strand starting at position 1167 of SEQ ID NO: 585914
gggaauuccacuuguggaa

SEQ ID NO: 677645 - RNA, 19 nt, Artificial Sequence
  Description of Artificial Sequence: Synthetic oligonucleotide
  Antisense strand to SEQ ID NO: 677644
uuccacaaguggaauuccc

SEQ ID NO: 677646 - RNA, 19 nt, Artificial Sequence
  Description of Artificial Sequence: Synthetic oligonucleotide
  Sense strand starting at position 1228 of SEQ ID NO: 585914
ggacuugggcugggugaaa

SEQ ID NO: 677647 - RNA, 19 nt, Artificial Sequence
  Description of Artificial Sequence: Synthetic oligonucleotide
  Antisense strand to SEQ ID NO: 677646
uuucacccagcccaagucc

SEQ ID NO: 677648 - RNA, 19 nt, Artificial Sequence
  Description of Artificial Sequence: Synthetic oligonucleotide
  Sense strand starting at position 1239 of SEQ ID NO: 585914
gggugaaaccgccaguuca

SEQ ID NO: 677649 - RNA, 19 nt, Artificial Sequence
  Description of Artificial Sequence: Synthetic oligonucleotide
  Antisense strand to SEQ ID NO: 677648
ugaacuggcgguuucaccc

SEQ ID NO: 677650 - RNA, 19 nt, Artificial Sequence
  Description of Artificial Sequence: Synthetic oligonucleotide
  Sense strand starting at position 1302 of SEQ ID NO: 585914
ucaggucuguugucucaaa

SEQ ID NO: 677651 - RNA, 19 nt, Artificial Sequence
  Description of Artificial Sequence: Synthetic oligonucleotide
  Antisense strand to SEQ ID NO: 677650
uuugagacaacagaccuga

SEQ ID NO: 677652 - RNA, 19 nt, Artificial Sequence
  Description of Artificial Sequence: Synthetic oligonucleotide
  Sense strand starting at position 1445 of SEQ ID NO: 585914
gcuggcuucuccuugguaa

SEQ ID NO: 677653 - RNA, 19 nt, Artificial Sequence
  Description of Artificial Sequence: Synthetic oligonucleotide
  Antisense strand to SEQ ID NO: 677652
uuaccaaggagaagccagc

SEQ ID NO: 677654 - RNA, 19 nt, Artificial Sequence
  Description of Artificial Sequence: Synthetic oligonucleotide
  Sense strand starting at position 1446 of SEQ ID NO: 585914
cuggcuucuccuugguaac

SEQ ID NO: 677655 - RNA, 19 nt, Artificial Sequence
  Description of Artificial Sequence: Synthetic oligonucleotide
  Antisense strand to SEQ ID NO: 677654
guuaccaaggagaagccag

SEQ ID NO: 677656 - RNA, 19 nt, Artificial Sequence
  Description of Artificial Sequence: Synthetic oligonucleotide
  Sense strand starting at position 2204 of SEQ ID NO: 585914
cgugggacgugucuaggaa

SEQ ID NO: 677657 - RNA, 19 nt, Artificial Sequence
  Description of Artificial Sequence: Synthetic oligonucleotide
  Antisense strand to SEQ ID NO: 677656
uuccuagacacgucccacg

SEQ ID NO: 677658 - RNA, 19 nt, Artificial Sequence
  Description of Artificial Sequence: Synthetic oligonucleotide
  Sense strand starting at position 2381 of SEQ ID NO: 585914
uguagaagucacuggaacu

SEQ ID NO: 677659 - RNA, 19 nt, Artificial Sequence
  Description of Artificial Sequence: Synthetic oligonucleotide
  Antisense strand to SEQ ID NO: 677658
aguuccagugacuucuaca

SEQ ID NO: 677660 - RNA, 19 nt, Artificial Sequence
  Description of Artificial Sequence: Synthetic oligonucleotide
  Sense strand starting at position 2382 of SEQ ID NO: 585914
guagaagucacuggaacuc

SEQ ID NO: 677661 - RNA, 19 nt, Artificial Sequence
  Description of Artificial Sequence: Synthetic oligonucleotide
  Antisense strand to SEQ ID NO: 677660
gaguuccagugacuucuac

SEQ ID NO: 677662 - RNA, 19 nt, Artificial Sequence
  Description of Artificial Sequence: Synthetic oligonucleotide
  Sense strand starting at position 2715 of SEQ ID NO: 585914
gaggacuacuaguugguua

SEQ ID NO: 677663 - RNA, 19 nt, Artificial Sequence
  Description of Artificial Sequence: Synthetic oligonucleotide
  Antisense strand to SEQ ID NO: 677662
uaaccaacuaguaguccuc

SEQ ID NO: 677664 - RNA, 19 nt, Artificial Sequence
  Description of Artificial Sequence: Synthetic oligonucleotide
  Sense strand starting at position 2726 of SEQ ID NO: 585914
guugguuacccuggaugaa

SEQ ID NO: 677665 - RNA, 19 nt, Artificial Sequence
  Description of Artificial Sequence: Synthetic oligonucleotide
  Antisense strand to SEQ ID NO: 677664
uucauccaggguaaccaac

SEQ ID NO: 677666 - RNA, 19 nt, Artificial Sequence
  Description of Artificial Sequence: Synthetic oligonucleotide
  Sense strand starting at position 2747 of SEQ ID NO: 585914
ucucgaagcucuguuaacu

SEQ ID NO: 677667 - RNA, 19 nt, Artificial Sequence
  Description of Artificial Sequence: Synthetic oligonucleotide
  Antisense strand to SEQ ID NO: 677666
aguuaacagagcuucgaga

SEQ ID NO: 677668 - RNA, 19 nt, Artificial Sequence
  Description of Artificial Sequence: Synthetic oligonucleotide
  Sense strand starting at position 2829 of SEQ ID NO: 585914
uguggugagcacugcuaaa

SEQ ID NO: 677669 - RNA, 19 nt, Artificial Sequence
  Description of Artificial Sequence: Synthetic oligonucleotide
  Antisense strand to SEQ ID NO: 677668
uuuagcagugcucaccaca

SEQ ID NO: 677670 - RNA, 19 nt, Artificial Sequence
  Description of Artificial Sequence: Synthetic oligonucleotide
  Sense strand starting at position 2867 of SEQ ID NO: 585914
ccaggaugcugcuuugcaa

SEQ ID NO: 677671 - RNA, 19 nt, Artificial Sequence
  Description of Artificial Sequence: Synthetic oligonucleotide
  Antisense strand to SEQ ID NO: 677670
uugcaaagcagcauccugg

SEQ ID NO: 677672 - RNA, 19 nt, Artificial Sequence
  Description of Artificial Sequence: Synthetic oligonucleotide
  Sense strand starting at position 2874 of SEQ ID NO: 585914
gcugcuuugcaagcaguga

SEQ ID NO: 677673 - RNA, 19 nt, Artificial Sequence
  Description of Artificial Sequence: Synthetic oligonucleotide
  Antisense strand to SEQ ID NO: 677672
ucacugcuugcaaagcagc

SEQ ID NO: 677674 - RNA, 19 nt, Artificial Sequence
  Description of Artificial Sequence: Synthetic oligonucleotide
  Sense strand starting at position 2935 of SEQ ID NO: 585914
gugccuuaccagcaaauca

SEQ ID NO: 677675 - RNA, 19 nt, Artificial Sequence
  Description of Artificial Sequence: Synthetic oligonucleotide
  Antisense strand to SEQ ID NO: 677674
ugauuugcugguaaggcac

SEQ ID NO: 677676 - RNA, 19 nt, Artificial Sequence
  Description of Artificial Sequence: Synthetic oligonucleotide
  Sense strand starting at position 2946 of SEQ ID NO: 585914
gcaaaucaucagugccuua

SEQ ID NO: 677677 - RNA, 19 nt, Artificial Sequence
  Description of Artificial Sequence: Synthetic oligonucleotide
  Antisense strand to SEQ ID NO: 677676
uaaggcacugaugauuugc

SEQ ID NO: 677678 - RNA, 19 nt, Artificial Sequence
  Description of Artificial Sequence: Synthetic oligonucleotide
  Sense strand starting at position 2951 of SEQ ID NO: 585914
ucaucagugccuuaauuag

SEQ ID NO: 677679 - RNA, 19 nt, Artificial Sequence
  Description of Artificial Sequence: Synthetic oligonucleotide
  Antisense strand to SEQ ID NO: 677678
cuaauuaaggcacugauga

SEQ ID NO: 677680 - RNA, 19 nt, Artificial Sequence
  Description of Artificial Sequence: Synthetic oligonucleotide
  Sense strand starting at position 3152 of SEQ ID NO: 585914
gacucauucugguagggaa

SEQ ID NO: 677681 - RNA, 19 nt, Artificial Sequence
  Description of Artificial Sequence: Synthetic oligonucleotide
  Antisense strand to SEQ ID NO: 677680
uucccuaccagaaugaguc

SEQ ID NO: 677682 - RNA, 19 nt, Artificial Sequence
  Description of Artificial Sequence: Synthetic oligonucleotide
  Sense strand starting at position 3268 of SEQ ID NO: 585914
aagcauauuguuugucuga

SEQ ID NO: 677683 - RNA, 19 nt, Artificial Sequence
  Description of Artificial Sequence: Synthetic oligonucleotide
  Antisense strand to SEQ ID NO: 677682
ucagacaaacaauaugcuu

SEQ ID NO: 677684 - RNA, 19 nt, Artificial Sequence
  Description of Artificial Sequence: Synthetic oligonucleotide
  Sense strand starting at position 3449 of SEQ ID NO: 585914
ccucuuggugagggaauau

SEQ ID NO: 677685 - RNA, 19 nt, Artificial Sequence
  Description of Artificial Sequence: Synthetic oligonucleotide
  Antisense strand to SEQ ID NO: 677684
auauucccucaccaagagg

SEQ ID NO: 677686 - RNA, 19 nt, Artificial Sequence
  Description of Artificial Sequence: Synthetic oligonucleotide
  Sense strand starting at position 3610 of SEQ ID NO: 585914
uugaauuccugggcaaagu

SEQ ID NO: 677687 - RNA, 19 nt, Artificial Sequence
  Description of Artificial Sequence: Synthetic oligonucleotide
  Antisense strand to SEQ ID NO: 677686
acuuugcccaggaauucaa

SEQ ID NO: 677688 - RNA, 19 nt, Artificial Sequence
  Description of Artificial Sequence: Synthetic oligonucleotide
  Sense strand starting at position 3864 of SEQ ID NO: 585914
cuguuuccuccacaugaag

SEQ ID NO: 677689 - RNA, 19 nt, Artificial Sequence
  Description of Artificial Sequence: Synthetic oligonucleotide
  Antisense strand to SEQ ID NO: 677688
cuucauguggaggaaacag

SEQ ID NO: 677690 - RNA, 19 nt, Artificial Sequence
  Description of Artificial Sequence: Synthetic oligonucleotide
  Sense strand starting at position 3898 of SEQ ID NO: 585914
aaggaacugucaguuuagu

SEQ ID NO: 677691 - RNA, 19 nt, Artificial Sequence
  Description of Artificial Sequence: Synthetic oligonucleotide
  Antisense strand to SEQ ID NO: 677690
acuaaacugacaguuccuu

SEQ ID NO: 677692 - RNA, 19 nt, Artificial Sequence
  Description of Artificial Sequence: Synthetic oligonucleotide
  Sense strand starting at position 3970 of SEQ ID NO: 585914
uaaauuagaggucauuguu

SEQ ID NO: 677693 - RNA, 19 nt, Artificial Sequence
  Description of Artificial Sequence: Synthetic oligonucleotide
  Antisense strand to SEQ ID NO: 677692
aacaaugaccucuaauuua

SEQ ID NO: 677694 - RNA, 19 nt, Artificial Sequence
  Description of Artificial Sequence: Synthetic oligonucleotide
  Sense strand starting at position 3976 of SEQ ID NO: 585914
agaggucauuguuaaugaa

SEQ ID NO: 677695 - RNA, 19 nt, Artificial Sequence
  Description of Artificial Sequence: Synthetic oligonucleotide
  Antisense strand to SEQ ID NO: 677694
uucauuaacaaugaccucu

SEQ ID NO: 677696 - RNA, 19 nt, Artificial Sequence
  Description of Artificial Sequence: Synthetic oligonucleotide
  Sense strand starting at position 142 of SEQ ID NO: 585915
ugggucucauccuuauuaa

SEQ ID NO: 677697 - RNA, 19 nt, Artificial Sequence
  Description of Artificial Sequence: Synthetic oligonucleotide
  Antisense strand to SEQ ID NO: 677696
uuaauaaggaugagaccca

SEQ ID NO: 677698 - RNA, 19 nt, Artificial Sequence
  Description of Artificial Sequence: Synthetic oligonucleotide
  Sense strand starting at position 143 of SEQ ID NO: 585915
gggucucauccuuauuaaa

SEQ ID NO: 677699 - RNA, 19 nt, Artificial Sequence
  Description of Artificial Sequence: Synthetic oligonucleotide
  Antisense strand to SEQ ID NO: 677698
uuuaauaaggaugagaccc

SEQ ID NO: 677700 - RNA, 19 nt, Artificial Sequence
  Description of Artificial Sequence: Synthetic oligonucleotide
  Sense strand starting at position 199 of SEQ ID NO: 585915
uauacaauugcagaugagu

SEQ ID NO: 677701 - RNA, 19 nt, Artificial Sequence
  Description of Artificial Sequence: Synthetic oligonucleotide
  Antisense strand to SEQ ID NO: 677700
acucaucugcaauuguaua

SEQ ID NO: 677702 - RNA, 19 nt, Artificial Sequence
  Description of Artificial Sequence: Synthetic oligonucleotide
  Sense strand starting at position 204 of SEQ ID NO: 585915
aauugcagaugaguuaauu

SEQ ID NO: 677703 - RNA, 19 nt, Artificial Sequence
  Description of Artificial Sequence: Synthetic oligonucleotide
  Antisense strand to SEQ ID NO: 677702
aauuaacucaucugcaauu

SEQ ID NO: 677704 - RNA, 19 nt, Artificial Sequence
  Description of Artificial Sequence: Synthetic oligonucleotide
  Sense strand starting at position 303 of SEQ ID NO: 585915
gaugaaacaguaugucuua

SEQ ID NO: 677705 - RNA, 19 nt, Artificial Sequence
  Description of Artificial Sequence: Synthetic oligonucleotide
  Antisense strand to SEQ ID NO: 677704
uaagacauacuguuucauc

SEQ ID NO: 677706 - RNA, 19 nt, Artificial Sequence
  Description of Artificial Sequence: Synthetic oligonucleotide
  Sense strand starting at position 304 of SEQ ID NO: 585915
augaaacaguaugucuuaa

SEQ ID NO: 677707 - RNA, 19 nt, Artificial Sequence
  Description of Artificial Sequence: Synthetic oligonucleotide
  Antisense strand to SEQ ID NO: 677706
uuaagacauacuguuucau

SEQ ID NO: 677708 - RNA, 19 nt, Artificial Sequence
  Description of Artificial Sequence: Synthetic oligonucleotide
  Sense strand starting at position 382 of SEQ ID NO: 585915
ugaacaguuuccucaggua

SEQ ID NO: 677709 - RNA, 19 nt, Artificial Sequence
  Description of Artificial Sequence: Synthetic oligonucleotide
  Antisense strand to SEQ ID NO: 677708
uaccugaggaaacuguuca

SEQ ID NO: 677710 - RNA, 19 nt, Artificial Sequence
  Description of Artificial Sequence: Synthetic oligonucleotide
  Sense strand starting at position 405 of SEQ ID NO: 585915
uagugagcauuuguagagu

SEQ ID NO: 677711 - RNA, 19 nt, Artificial Sequence
  Description of Artificial Sequence: Synthetic oligonucleotide
  Antisense strand to SEQ ID NO: 677710
acucuacaaaugcucacua

SEQ ID NO: 677712 - RNA, 19 nt, Artificial Sequence
  Description of Artificial Sequence: Synthetic oligonucleotide
  Sense strand starting at position 645 of SEQ ID NO: 585915
ucagauaggcaguaaguuu

SEQ ID NO: 677713 - RNA, 19 nt, Artificial Sequence
  Description of Artificial Sequence: Synthetic oligonucleotide
  Antisense strand to SEQ ID NO: 677712
aaacuuacugccuaucuga

SEQ ID NO: 677714 - RNA, 19 nt, Artificial Sequence
  Description of Artificial Sequence: Synthetic oligonucleotide
  Sense strand starting at position 716 of SEQ ID NO: 585915
gugaccuguuacucagacu

SEQ ID NO: 677715 - RNA, 19 nt, Artificial Sequence
  Description of Artificial Sequence: Synthetic oligonucleotide
  Antisense strand to SEQ ID NO: 677714
agucugaguaacaggucac

SEQ ID NO: 677716 - RNA, 19 nt, Artificial Sequence
  Description of Artificial Sequence: Synthetic oligonucleotide
  Sense strand starting at position 728 of SEQ ID NO: 585915
ucagacucauugccaagaa

SEQ ID NO: 677717 - RNA, 19 nt, Artificial Sequence
  Description of Artificial Sequence: Synthetic oligonucleotide
  Antisense strand to SEQ ID NO: 677716
uucuuggcaaugagucuga

SEQ ID NO: 677718 - RNA, 19 nt, Artificial Sequence
  Description of Artificial Sequence: Synthetic oligonucleotide
  Sense strand starting at position 743 of SEQ ID NO: 585915
agaaauacagcauaguguu

SEQ ID NO: 677719 - RNA, 19 nt, Artificial Sequence
  Description of Artificial Sequence: Synthetic oligonucleotide
  Antisense strand to SEQ ID NO: 677718
aacacuaugcuguauuucu

SEQ ID NO: 677720 - RNA, 19 nt, Artificial Sequence
  Description of Artificial Sequence: Synthetic oligonucleotide
  Sense strand starting at position 1015 of SEQ ID NO: 585915
cuauuauagguccacgaag

SEQ ID NO: 677721 - RNA, 19 nt, Artificial Sequence
  Description of Artificial Sequence: Synthetic oligonucleotide
  Antisense strand to SEQ ID NO: 677720
cuucguggaccuauaauag

SEQ ID NO: 677722 - RNA, 19 nt, Artificial Sequence
  Description of Artificial Sequence: Synthetic oligonucleotide
  Sense strand starting at position 1017 of SEQ ID NO: 585915
auuauagguccacgaagua

SEQ ID NO: 677723 - RNA, 19 nt, Artificial Sequence
  Description of Artificial Sequence: Synthetic oligonucleotide
  Antisense strand to SEQ ID NO: 677722
uacuucguggaccuauaau

SEQ ID NO: 677724 - RNA, 19 nt, Artificial Sequence
  Description of Artificial Sequence: Synthetic oligonucleotide
  Sense strand starting at position 1059 of SEQ ID NO: 585915
gccaauuggaccgaguacu

SEQ ID NO: 677725 - RNA, 19 nt, Artificial Sequence
  Description of Artificial Sequence: Synthetic oligonucleotide
  Antisense strand to SEQ ID NO: 677724
aguacucgguccaauuggc

SEQ ID NO: 677726 - RNA, 19 nt, Artificial Sequence
  Description of Artificial Sequence: Synthetic oligonucleotide
  Sense strand starting at position 1091 of SEQ ID NO: 585915
uggucccagcucuaucauu

SEQ ID NO: 677727 - RNA, 19 nt, Artificial Sequence
  Description of Artificial Sequence: Synthetic oligonucleotide
  Antisense strand to SEQ ID NO: 677726
aaugauagagcugggacca

SEQ ID NO: 677728 - RNA, 19 nt, Artificial Sequence
  Description of Artificial Sequence: Synthetic oligonucleotide
  Sense strand starting at position 1117 of SEQ ID NO: 585915
uguauccuugggcaaacua

SEQ ID NO: 677729 - RNA, 19 nt, Artificial Sequence
  Description of Artificial Sequence: Synthetic oligonucleotide
  Antisense strand to SEQ ID NO: 677728
uaguuugcccaaggauaca

SEQ ID NO: 677730 - RNA, 19 nt, Artificial Sequence
  Description of Artificial Sequence: Synthetic oligonucleotide
  Sense strand starting at position 1251 of SEQ ID NO: 585915
ccaucaauaucaguaaguu

SEQ ID NO: 677731 - RNA, 19 nt, Artificial Sequence
  Description of Artificial Sequence: Synthetic oligonucleotide
  Antisense strand to SEQ ID NO: 677730
aacuuacugauauugaugg

SEQ ID NO: 677732 - RNA, 19 nt, Artificial Sequence
  Description of Artificial Sequence: Synthetic oligonucleotide
  Sense strand starting at position 1364 of SEQ ID NO: 585915
uucugccugguuuaucaaa

SEQ ID NO: 677733 - RNA, 19 nt, Artificial Sequence
  Description of Artificial Sequence: Synthetic oligonucleotide
  Antisense strand to SEQ ID NO: 677732
uuugauaaaccaggcagaa

SEQ ID NO: 677734 - RNA, 19 nt, Artificial Sequence
  Description of Artificial Sequence: Synthetic oligonucleotide
  Sense strand starting at position 1743 of SEQ ID NO: 585915
cacuuaaacggucggacau

SEQ ID NO: 677735 - RNA, 19 nt, Artificial Sequence
  Description of Artificial Sequence: Synthetic oligonucleotide
  Antisense strand to SEQ ID NO: 677734
auguccgaccguuuaagug

SEQ ID NO: 677736 - RNA, 19 nt, Artificial Sequence
  Description of Artificial Sequence: Synthetic oligonucleotide
  Sense strand starting at position 1744 of SEQ ID NO: 585915
acuuaaacggucggacaua

SEQ ID NO: 677737 - RNA, 19 nt, Artificial Sequence
  Description of Artificial Sequence: Synthetic oligonucleotide
  Antisense strand to SEQ ID NO: 677736
uauguccgaccguuuaagu

SEQ ID NO: 677738 - RNA, 19 nt, Artificial Sequence
  Description of Artificial Sequence: Synthetic oligonucleotide
  Sense strand starting at position 2735 of SEQ ID NO: 585915
guguuaucugauuacugua

SEQ ID NO: 677739 - RNA, 19 nt, Artificial Sequence
  Description of Artificial Sequence: Synthetic oligonucleotide
  Antisense strand to SEQ ID NO: 677738
uacaguaaucagauaacac

SEQ ID NO: 677740 - RNA, 19 nt, Artificial Sequence
  Description of Artificial Sequence: Synthetic oligonucleotide
  Sense strand starting at position 2928 of SEQ ID NO: 585915
ggaggaugcgagugacaau

SEQ ID NO: 677741 - RNA, 19 nt, Artificial Sequence
  Description of Artificial Sequence: Synthetic oligonucleotide
  Antisense strand to SEQ ID NO: 677740
auugucacucgcauccucc

SEQ ID NO: 677742 - RNA, 19 nt, Artificial Sequence
  Description of Artificial Sequence: Synthetic oligonucleotide
  Sense strand starting at position 2937 of SEQ ID NO: 585915
gagugacaaucgccaauca

SEQ ID NO: 677743 - RNA, 19 nt, Artificial Sequence
  Description of Artificial Sequence: Synthetic oligonucleotide
  Antisense strand to SEQ ID NO: 677742
ugauuggcgauugucacuc

SEQ ID NO: 677744 - RNA, 19 nt, Artificial Sequence
  Description of Artificial Sequence: Synthetic oligonucleotide
  Sense strand starting at position 2975 of SEQ ID NO: 585915
uucuuuagugaugacuuaa

SEQ ID NO: 677745 - RNA, 19 nt, Artificial Sequence
  Description of Artificial Sequence: Synthetic oligonucleotide
  Antisense strand to SEQ ID NO: 677744
uuaagucaucacuaaagaa

SEQ ID NO: 677746 - RNA, 19 nt, Artificial Sequence
  Description of Artificial Sequence: Synthetic oligonucleotide
  Sense strand starting at position 3115 of SEQ ID NO: 585915
gcuaauuaugacugucaca

SEQ ID NO: 677747 - RNA, 19 nt, Artificial Sequence
  Description of Artificial Sequence: Synthetic oligonucleotide
  Antisense strand to SEQ ID NO: 677746
ugugacagucauaauuagc

SEQ ID NO: 677748 - RNA, 19 nt, Artificial Sequence
  Description of Artificial Sequence: Synthetic oligonucleotide
  Sense strand starting at position 3174 of SEQ ID NO: 585915
uucgguuccgcuuuagauc

SEQ ID NO: 677749 - RNA, 19 nt, Artificial Sequence
  Description of Artificial Sequence: Synthetic oligonucleotide
  Antisense strand to SEQ ID NO: 677748
gaucuaaagcggaaccgaa

SEQ ID NO: 677750 - RNA, 19 nt, Artificial Sequence
  Description of Artificial Sequence: Synthetic oligonucleotide
  Sense strand starting at position 3254 of SEQ ID NO: 585915
ggauuucgauuguauuuaa

SEQ ID NO: 677751 - RNA, 19 nt, Artificial Sequence
  Description of Artificial Sequence: Synthetic oligonucleotide
  Antisense strand to SEQ ID NO: 677750
uuaaauacaaucgaaaucc

SEQ ID NO: 677752 - RNA, 19 nt, Artificial Sequence
  Description of Artificial Sequence: Synthetic oligonucleotide
  Sense strand starting at position 3372 of SEQ ID NO: 585915
augaaaggauaacaagaaa

SEQ ID NO: 677753 - RNA, 19 nt, Artificial Sequence
  Description of Artificial Sequence: Synthetic oligonucleotide
  Antisense strand to SEQ ID NO: 677752
uuucuuguuauccuuucau

SEQ ID NO: 677754 - RNA, 19 nt, Artificial Sequence
  Description of Artificial Sequence: Synthetic oligonucleotide
  Sense strand starting at position 3392 of SEQ ID NO: 585915
aaguuuauucuuggacaga

SEQ ID NO: 677755 - RNA, 19 nt, Artificial Sequence
  Description of Artificial Sequence: Synthetic oligonucleotide
  Antisense strand to SEQ ID NO: 677754
ucuguccaagaauaaacuu

SEQ ID NO: 677756 - RNA, 19 nt, Artificial Sequence
  Description of Artificial Sequence: Synthetic oligonucleotide
  Sense strand starting at position 3449 of SEQ ID NO: 585915
uugaaaugguggcuuagaa

SEQ ID NO: 677757 - RNA, 19 nt, Artificial Sequence
  Description of Artificial Sequence: Synthetic oligonucleotide
  Antisense strand to SEQ ID NO: 677756
uucuaagccaccauuucaa

SEQ ID NO: 677758 - RNA, 19 nt, Artificial Sequence
  Description of Artificial Sequence: Synthetic oligonucleotide
  Sense strand starting at position 3497 of SEQ ID NO: 585915
acuguagauuugcagagaa

SEQ ID NO: 677759 - RNA, 19 nt, Artificial Sequence
  Description of Artificial Sequence: Synthetic oligonucleotide
  Antisense strand to SEQ ID NO: 677758
uucucugcaaaucuacagu

SEQ ID NO: 677760 - RNA, 19 nt, Artificial Sequence
  Description of Artificial Sequence: Synthetic oligonucleotide
  Sense strand starting at position 3570 of SEQ ID NO: 585915
guagauacauauucggaaa

SEQ ID NO: 677761 - RNA, 19 nt, Artificial Sequence
  Description of Artificial Sequence: Synthetic oligonucleotide
  Antisense strand to SEQ ID NO: 677760
uuuccgaauauguaucuac

SEQ ID NO: 677762 - RNA, 19 nt, Artificial Sequence
  Description of Artificial Sequence: Synthetic oligonucleotide
  Sense strand starting at position 3582 of SEQ ID NO: 585915
ucggaaacuaauggaguaa

SEQ ID NO: 677763 - RNA, 19 nt, Artificial Sequence
  Description of Artificial Sequence: Synthetic oligonucleotide
  Antisense strand to SEQ ID NO: 677762
uuacuccauuaguuuccga

SEQ ID NO: 677764 - RNA, 19 nt, Artificial Sequence
  Description of Artificial Sequence: Synthetic oligonucleotide
  Sense strand starting at position 3595 of SEQ ID NO: 585915
gaguaagaauuguuugcag

SEQ ID NO: 677765 - RNA, 19 nt, Artificial Sequence
  Description of Artificial Sequence: Synthetic oligonucleotide
  Antisense strand to SEQ ID NO: 677764
cugcaaacaauucuuacuc

SEQ ID NO: 677766 - RNA, 19 nt, Artificial Sequence
  Description of Artificial Sequence: Synthetic oligonucleotide
  Sense strand starting at position 3624 of SEQ ID NO: 585915
uaccuuaacuggucuggua

SEQ ID NO: 677767 - RNA, 19 nt, Artificial Sequence
  Description of Artificial Sequence: Synthetic oligonucleotide
  Antisense strand to SEQ ID NO: 677766
uaccagaccaguuaaggua

SEQ ID NO: 677768 - RNA, 19 nt, Artificial Sequence
  Description of Artificial Sequence: Synthetic oligonucleotide
  Sense strand starting at position 3626 of SEQ ID NO: 585915
ccuuaacuggucugguaag

SEQ ID NO: 677769 - RNA, 19 nt, Artificial Sequence
  Description of Artificial Sequence: Synthetic oligonucleotide
  Antisense strand to SEQ ID NO: 677768
cuuaccagaccaguuaagg

SEQ ID NO: 677770 - RNA, 19 nt, Artificial Sequence
  Description of Artificial Sequence: Synthetic oligonucleotide
  Sense strand starting at position 3632 of SEQ ID NO: 585915
cuggucugguaagucuaaa

SEQ ID NO: 677771 - RNA, 19 nt, Artificial Sequence
  Description of Artificial Sequence: Synthetic oligonucleotide
  Antisense strand to SEQ ID NO: 677770
uuuagacuuaccagaccag

SEQ ID NO: 677772 - RNA, 19 nt, Artificial Sequence
  Description of Artificial Sequence: Synthetic oligonucleotide
  Sense strand starting at position 3784 of SEQ ID NO: 585915
uugggaugacauugugguu

SEQ ID NO: 677773 - RNA, 19 nt, Artificial Sequence
  Description of Artificial Sequence: Synthetic oligonucleotide
  Antisense strand to SEQ ID NO: 677772
aaccacaaugucaucccaa

SEQ ID NO: 677774 - RNA, 19 nt, Artificial Sequence
  Description of Artificial Sequence: Synthetic oligonucleotide
  Sense strand starting at position 3911 of SEQ ID NO: 585915
uugauaacucugggauagu

SEQ ID NO: 677775 - RNA, 19 nt, Artificial Sequence
  Description of Artificial Sequence: Synthetic oligonucleotide
  Antisense strand to SEQ ID NO: 677774
acuaucccagaguuaucaa

SEQ ID NO: 677776 - RNA, 19 nt, Artificial Sequence
  Description of Artificial Sequence: Synthetic oligonucleotide
  Sense strand starting at position 58 of SEQ ID NO: 585916
gggccuauuacaggaaauc

SEQ ID NO: 677777 - RNA, 19 nt, Artificial Sequence
  Description of Artificial Sequence: Synthetic oligonucleotide
  Antisense strand to SEQ ID NO: 677776
gauuuccuguaauaggccc

SEQ ID NO: 677778 - RNA, 19 nt, Artificial Sequence
  Description of Artificial Sequence: Synthetic oligonucleotide
  Sense strand starting at position 104 of SEQ ID NO: 585916
acaauauagucuguugcaa

SEQ ID NO: 677779 - RNA, 19 nt, Artificial Sequence
  Description of Artificial Sequence: Synthetic oligonucleotide
  Antisense strand to SEQ ID NO: 677778
uugcaacagacuauauugu

SEQ ID NO: 677780 - RNA, 19 nt, Artificial Sequence
  Description of Artificial Sequence: Synthetic oligonucleotide
  Sense strand starting at position 396 of SEQ ID NO: 585916
ugacucucuugguccuaau

SEQ ID NO: 677781 - RNA, 19 nt, Artificial Sequence
  Description of Artificial Sequence: Synthetic oligonucleotide
  Antisense strand to SEQ ID NO: 677780
auuaggaccaagagaguca

SEQ ID NO: 677782 - RNA, 19 nt, Artificial Sequence
  Description of Artificial Sequence: Synthetic oligonucleotide
  Sense strand starting at position 476 of SEQ ID NO: 585916
acuugcucugguuaguaaa

SEQ ID NO: 677783 - RNA, 19 nt, Artificial Sequence
  Description of Artificial Sequence: Synthetic oligonucleotide
  Antisense strand to SEQ ID NO: 677782
uuuacuaaccagagcaagu

SEQ ID NO: 677784 - RNA, 19 nt, Artificial Sequence
  Description of Artificial Sequence: Synthetic oligonucleotide
  Sense strand starting at position 505 of SEQ ID NO: 585916
gagacaaaucacugugggu

SEQ ID NO: 677785 - RNA, 19 nt, Artificial Sequence
  Description of Artificial Sequence: Synthetic oligonucleotide
  Antisense strand to SEQ ID NO: 677784
acccacagugauuugucuc

SEQ ID NO: 677786 - RNA, 19 nt, Artificial Sequence
  Description of Artificial Sequence: Synthetic oligonucleotide
  Sense strand starting at position 507 of SEQ ID NO: 585916
gacaaaucacuguggguga

SEQ ID NO: 677787 - RNA, 19 nt, Artificial Sequence
  Description of Artificial Sequence: Synthetic oligonucleotide
  Antisense strand to SEQ ID NO: 677786
ucacccacagugauuuguc

SEQ ID NO: 677788 - RNA, 19 nt, Artificial Sequence
  Description of Artificial Sequence: Synthetic oligonucleotide
  Sense strand starting at position 511 of SEQ ID NO: 585916
aaucacugugggugaguaa

SEQ ID NO: 677789 - RNA, 19 nt, Artificial Sequence
  Description of Artificial Sequence: Synthetic oligonucleotide
  Antisense strand to SEQ ID NO: 677788
uuacucacccacagugauu

SEQ ID NO: 677790 - RNA, 19 nt, Artificial Sequence
  Description of Artificial Sequence: Synthetic oligonucleotide
  Sense strand starting at position 512 of SEQ ID NO: 585916
aucacugugggugaguaaa

SEQ ID NO: 677791 - RNA, 19 nt, Artificial Sequence
  Description of Artificial Sequence: Synthetic oligonucleotide
  Antisense strand to SEQ ID NO: 677790
uuuacucacccacagugau

SEQ ID NO: 677792 - RNA, 19 nt, Artificial Sequence
  Description of Artificial Sequence: Synthetic oligonucleotide
  Sense strand starting at position 662 of SEQ ID NO: 585916
uguacauauagcugggaga

SEQ ID NO: 677793 - RNA, 19 nt, Artificial Sequence
  Description of Artificial Sequence: Synthetic oligonucleotide
  Antisense strand to SEQ ID NO: 677792
ucucccagcuauauguaca

SEQ ID NO: 677794 - RNA, 19 nt, Artificial Sequence
  Description of Artificial Sequence: Synthetic oligonucleotide
  Sense strand starting at position 663 of SEQ ID NO: 585916
guacauauagcugggagaa

SEQ ID NO: 677795 - RNA, 19 nt, Artificial Sequence
  Description of Artificial Sequence: Synthetic oligonucleotide
  Antisense strand to SEQ ID NO: 677794
uucucccagcuauauguac

SEQ ID NO: 677796 - RNA, 19 nt, Artificial Sequence
  Description of Artificial Sequence: Synthetic oligonucleotide
  Sense strand starting at position 664 of SEQ ID NO: 585916
uacauauagcugggagaau

SEQ ID NO: 677797 - RNA, 19 nt, Artificial Sequence
  Description of Artificial Sequence: Synthetic oligonucleotide
  Antisense strand to SEQ ID NO: 677796
auucucccagcuauaugua

SEQ ID NO: 677798 - RNA, 19 nt, Artificial Sequence
  Description of Artificial Sequence: Synthetic oligonucleotide
  Sense strand starting at position 709 of SEQ ID NO: 585916
ggagcuuauuaugugucaa

SEQ ID NO: 677799 - RNA, 19 nt, Artificial Sequence
  Description of Artificial Sequence: Synthetic oligonucleotide
  Antisense strand to SEQ ID NO: 677798
uugacacauaauaagcucc

SEQ ID NO: 677800 - RNA, 19 nt, Artificial Sequence
  Description of Artificial Sequence: Synthetic oligonucleotide
  Sense strand starting at position 732 of SEQ ID NO: 585916
ugugucagacuuugggaaa

SEQ ID NO: 677801 - RNA, 19 nt, Artificial Sequence
  Description of Artificial Sequence: Synthetic oligonucleotide
  Antisense strand to SEQ ID NO: 677800
uuucccaaagucugacaca

SEQ ID NO: 677802 - RNA, 19 nt, Artificial Sequence
  Description of Artificial Sequence: Synthetic oligonucleotide
  Sense strand starting at position 777 of SEQ ID NO: 585916
uuacuagaugugcagucua

SEQ ID NO: 677803 - RNA, 19 nt, Artificial Sequence
  Description of Artificial Sequence: Synthetic oligonucleotide
  Antisense strand to SEQ ID NO: 677802
uagacugcacaucuaguaa

SEQ ID NO: 677804 - RNA, 19 nt, Artificial Sequence
  Description of Artificial Sequence: Synthetic oligonucleotide
  Sense strand starting at position 865 of SEQ ID NO: 585916
augcuauaagaguaccuaa

SEQ ID NO: 677805 - RNA, 19 nt, Artificial Sequence
  Description of Artificial Sequence: Synthetic oligonucleotide
  Antisense strand to SEQ ID NO: 677804
uuagguacucuuauagcau

SEQ ID NO: 677806 - RNA, 19 nt, Artificial Sequence
  Description of Artificial Sequence: Synthetic oligonucleotide
  Sense strand starting at position 1189 of SEQ ID NO: 585916
aggaguaggugugcauuaa

SEQ ID NO: 677807 - RNA, 19 nt, Artificial Sequence
  Description of Artificial Sequence: Synthetic oligonucleotide
  Antisense strand to SEQ ID NO: 677806
uuaaugcacaccuacuccu

SEQ ID NO: 677808 - RNA, 19 nt, Artificial Sequence
  Description of Artificial Sequence: Synthetic oligonucleotide
  Sense strand starting at position 1190 of SEQ ID NO: 585916
ggaguaggugugcauuaaa

SEQ ID NO: 677809 - RNA, 19 nt, Artificial Sequence
  Description of Artificial Sequence: Synthetic oligonucleotide
  Antisense strand to SEQ ID NO: 677808
uuuaaugcacaccuacucc

SEQ ID NO: 677810 - RNA, 19 nt, Artificial Sequence
  Description of Artificial Sequence: Synthetic oligonucleotide
  Sense strand starting at position 1249 of SEQ ID NO: 585916
cagccuagggccuagaaua

SEQ ID NO: 677811 - RNA, 19 nt, Artificial Sequence
  Description of Artificial Sequence: Synthetic oligonucleotide
  Antisense strand to SEQ ID NO: 677810
uauucuaggcccuaggcug

SEQ ID NO: 677812 - RNA, 19 nt, Artificial Sequence
  Description of Artificial Sequence: Synthetic oligonucleotide
  Sense strand starting at position 1524 of SEQ ID NO: 585916
ggagaucugccucagcauc

SEQ ID NO: 677813 - RNA, 19 nt, Artificial Sequence
  Description of Artificial Sequence: Synthetic oligonucleotide
  Antisense strand to SEQ ID NO: 677812
gaugcugaggcagaucucc

SEQ ID NO: 677814 - RNA, 19 nt, Artificial Sequence
  Description of Artificial Sequence: Synthetic oligonucleotide
  Sense strand starting at position 2521 of SEQ ID NO: 585916
ugccguugugagcuuugaa

SEQ ID NO: 677815 - RNA, 19 nt, Artificial Sequence
  Description of Artificial Sequence: Synthetic oligonucleotide
  Antisense strand to SEQ ID NO: 677814
uucaaagcucacaacggca

SEQ ID NO: 677816 - RNA, 19 nt, Artificial Sequence
  Description of Artificial Sequence: Synthetic oligonucleotide
  Sense strand starting at position 2522 of SEQ ID NO: 585916
gccguugugagcuuugaau

SEQ ID NO: 677817 - RNA, 19 nt, Artificial Sequence
  Description of Artificial Sequence: Synthetic oligonucleotide
  Antisense strand to SEQ ID NO: 677816
auucaaagcucacaacggc

SEQ ID NO: 677818 - RNA, 19 nt, Artificial Sequence
  Description of Artificial Sequence: Synthetic oligonucleotide
  Sense strand starting at position 2528 of SEQ ID NO: 585916
gugagcuuugaauaauuau

SEQ ID NO: 677819 - RNA, 19 nt, Artificial Sequence
  Description of Artificial Sequence: Synthetic oligonucleotide
  Antisense strand to SEQ ID NO: 677818
auaauuauucaaagcucac

SEQ ID NO: 677820 - RNA, 19 nt, Artificial Sequence
  Description of Artificial Sequence: Synthetic oligonucleotide
  Sense strand starting at position 2561 of SEQ ID NO: 585916
uguucuaguacgccuguaa

SEQ ID NO: 677821 - RNA, 19 nt, Artificial Sequence
  Description of Artificial Sequence: Synthetic oligonucleotide
  Antisense strand to SEQ ID NO: 677820
uuacaggcguacuagaaca

SEQ ID NO: 677822 - RNA, 19 nt, Artificial Sequence
  Description of Artificial Sequence: Synthetic oligonucleotide
  Sense strand starting at position 2620 of SEQ ID NO: 585916
cuaaauaugcugggucgaa

SEQ ID NO: 677823 - RNA, 19 nt, Artificial Sequence
  Description of Artificial Sequence: Synthetic oligonucleotide
  Antisense strand to SEQ ID NO: 677822
uucgacccagcauauuuag

SEQ ID NO: 677824 - RNA, 19 nt, Artificial Sequence
  Description of Artificial Sequence: Synthetic oligonucleotide
  Sense strand starting at position 2621 of SEQ ID NO: 585916
uaaauaugcugggucgaac

SEQ ID NO: 677825 - RNA, 19 nt, Artificial Sequence
  Description of Artificial Sequence: Synthetic oligonucleotide
  Antisense strand to SEQ ID NO: 677824
guucgacccagcauauuua

SEQ ID NO: 677826 - RNA, 19 nt, Artificial Sequence
  Description of Artificial Sequence: Synthetic oligonucleotide
  Sense strand starting at position 2632 of SEQ ID NO: 585916
ggucgaacgcguaaguucu

SEQ ID NO: 677827 - RNA, 19 nt, Artificial Sequence
  Description of Artificial Sequence: Synthetic oligonucleotide
  Antisense strand to SEQ ID NO: 677826
agaacuuacgcguucgacc

SEQ ID NO: 677828 - RNA, 19 nt, Artificial Sequence
  Description of Artificial Sequence: Synthetic oligonucleotide
  Sense strand starting at position 2660 of SEQ ID NO: 585916
cauagauaaguaugguuau

SEQ ID NO: 677829 - RNA, 19 nt, Artificial Sequence
  Description of Artificial Sequence: Synthetic oligonucleotide
  Antisense strand to SEQ ID NO: 677828
auaaccauacuuaucuaug

SEQ ID NO: 677830 - RNA, 19 nt, Artificial Sequence
  Description of Artificial Sequence: Synthetic oligonucleotide
  Sense strand starting at position 2743 of SEQ ID NO: 585916
ucugcauugcuccagagaa

SEQ ID NO: 677831 - RNA, 19 nt, Artificial Sequence
  Description of Artificial Sequence: Synthetic oligonucleotide
  Antisense strand to SEQ ID NO: 677830
uucucuggagcaaugcaga

SEQ ID NO: 677832 - RNA, 19 nt, Artificial Sequence
  Description of Artificial Sequence: Synthetic oligonucleotide
  Sense strand starting at position 2745 of SEQ ID NO: 585916
ugcauugcuccagagaaga

SEQ ID NO: 677833 - RNA, 19 nt, Artificial Sequence
  Description of Artificial Sequence: Synthetic oligonucleotide
  Antisense strand to SEQ ID NO: 677832
ucuucucuggagcaaugca

SEQ ID NO: 677834 - RNA, 19 nt, Artificial Sequence
  Description of Artificial Sequence: Synthetic oligonucleotide
  Sense strand starting at position 2804 of SEQ ID NO: 585916
uucucuaggcucuagaaga

SEQ ID NO: 677835 - RNA, 19 nt, Artificial Sequence
  Description of Artificial Sequence: Synthetic oligonucleotide
  Antisense strand to SEQ ID NO: 677834
ucuucuagagccuagagaa

SEQ ID NO: 677836 - RNA, 19 nt, Artificial Sequence
  Description of Artificial Sequence: Synthetic oligonucleotide
  Sense strand starting at position 2900 of SEQ ID NO: 585916
ucuguagugguuugggaaa

SEQ ID NO: 677837 - RNA, 19 nt, Artificial Sequence
  Description of Artificial Sequence: Synthetic oligonucleotide
  Antisense strand to SEQ ID NO: 677836
uuucccaaaccacuacaga

SEQ ID NO: 677838 - RNA, 19 nt, Artificial Sequence
  Description of Artificial Sequence: Synthetic oligonucleotide
  Sense strand starting at position 2949 of SEQ ID NO: 585916
uaaguuagcccuuggagga

SEQ ID NO: 677839 - RNA, 19 nt, Artificial Sequence
  Description of Artificial Sequence: Synthetic oligonucleotide
  Antisense strand to SEQ ID NO: 677838
uccuccaagggcuaacuua

SEQ ID NO: 677840 - RNA, 19 nt, Artificial Sequence
  Description of Artificial Sequence: Synthetic oligonucleotide
  Sense strand starting at position 2950 of SEQ ID NO: 585916
aaguuagcccuuggaggaa

SEQ ID NO: 677841 - RNA, 19 nt, Artificial Sequence
  Description of Artificial Sequence: Synthetic oligonucleotide
  Antisense strand to SEQ ID NO: 677840
uuccuccaagggcuaacuu

SEQ ID NO: 677842 - RNA, 19 nt, Artificial Sequence
  Description of Artificial Sequence: Synthetic oligonucleotide
  Sense strand starting at position 2963 of SEQ ID NO: 585916
gaggaagacugagugcuuu

SEQ ID NO: 677843 - RNA, 19 nt, Artificial Sequence
  Description of Artificial Sequence: Synthetic oligonucleotide
  Antisense strand to SEQ ID NO: 677842
aaagcacucagucuuccuc

SEQ ID NO: 677844 - RNA, 19 nt, Artificial Sequence
  Description of Artificial Sequence: Synthetic oligonucleotide
  Sense strand starting at position 3768 of SEQ ID NO: 585916
cccacaauuggcugugaaa

SEQ ID NO: 677845 - RNA, 19 nt, Artificial Sequence
  Description of Artificial Sequence: Synthetic oligonucleotide
  Antisense strand to SEQ ID NO: 677844
uuucacagccaauuguggg

SEQ ID NO: 677846 - RNA, 19 nt, Artificial Sequence
  Description of Artificial Sequence: Synthetic oligonucleotide
  Sense strand starting at position 3851 of SEQ ID NO: 585916
gugcaaucagauggugaag

SEQ ID NO: 677847 - RNA, 19 nt, Artificial Sequence
  Description of Artificial Sequence: Synthetic oligonucleotide
  Antisense strand to SEQ ID NO: 677846
cuucaccaucugauugcac

SEQ ID NO: 677848 - RNA, 19 nt, Artificial Sequence
  Description of Artificial Sequence: Synthetic oligonucleotide
  Sense strand starting at position 3863 of SEQ ID NO: 585916
ggugaaguuacauaguuac

SEQ ID NO: 677849 - RNA, 19 nt, Artificial Sequence
  Description of Artificial Sequence: Synthetic oligonucleotide
  Antisense strand to SEQ ID NO: 677848
guaacuauguaacuucacc

SEQ ID NO: 677850 - RNA, 19 nt, Artificial Sequence
  Description of Artificial Sequence: Synthetic oligonucleotide
  Sense strand starting at position 3877 of SEQ ID NO: 585916
guuacacuccuaugggaag

SEQ ID NO: 677851 - RNA, 19 nt, Artificial Sequence
  Description of Artificial Sequence: Synthetic oligonucleotide
  Antisense strand to SEQ ID NO: 677850
cuucccauaggaguguaac

SEQ ID NO: 677852 - RNA, 19 nt, Artificial Sequence
  Description of Artificial Sequence: Synthetic oligonucleotide
  Sense strand starting at position 3894 of SEQ ID NO: 585916
agaucugauugguugcaga

SEQ ID NO: 677853 - RNA, 19 nt, Artificial Sequence
  Description of Artificial Sequence: Synthetic oligonucleotide
  Antisense strand to SEQ ID NO: 677852
ucugcaaccaaucagaucu

SEQ ID NO: 677854 - RNA, 19 nt, Artificial Sequence
  Description of Artificial Sequence: Synthetic oligonucleotide
  Sense strand starting at position 3931 of SEQ ID NO: 585916
gggauaacuuacuucuuag

SEQ ID NO: 677855 - RNA, 19 nt, Artificial Sequence
  Description of Artificial Sequence: Synthetic oligonucleotide
  Antisense strand to SEQ ID NO: 677854
cuaagaaguaaguuauccc

SEQ ID NO: 677856 - RNA, 19 nt, Artificial Sequence
  Description of Artificial Sequence: Synthetic oligonucleotide
  Sense strand starting at position 2453 of SEQ ID NO: 585917
guuccaucaucugaauuga

SEQ ID NO: 677857 - RNA, 19 nt, Artificial Sequence
  Description of Artificial Sequence: Synthetic oligonucleotide
  Antisense strand to SEQ ID NO: 677856
ucaauucagaugauggaac

SEQ ID NO: 677858 - RNA, 19 nt, Artificial Sequence
  Description of Artificial Sequence: Synthetic oligonucleotide
  Sense strand starting at position 2467 of SEQ ID NO: 585917
auugauaagaguuguuaug

SEQ ID NO: 677859 - RNA, 19 nt, Artificial Sequence
  Description of Artificial Sequence: Synthetic oligonucleotide
  Antisense strand to SEQ ID NO: 677858
cauaacaacucuuaucaau

SEQ ID NO: 677860 - RNA, 19 nt, Artificial Sequence
  Description of Artificial Sequence: Synthetic oligonucleotide
  Sense strand starting at position 2469 of SEQ ID NO: 585917
ugauaagaguuguuaugag

SEQ ID NO: 677861 - RNA, 19 nt, Artificial Sequence
  Description of Artificial Sequence: Synthetic oligonucleotide
  Antisense strand to SEQ ID NO: 677860
cucauaacaacucuuauca

SEQ ID NO: 677862 - RNA, 19 nt, Artificial Sequence
  Description of Artificial Sequence: Synthetic oligonucleotide
  Sense strand starting at position 2473 of SEQ ID NO: 585917
aagaguuguuaugagguua

SEQ ID NO: 677863 - RNA, 19 nt, Artificial Sequence
  Description of Artificial Sequence: Synthetic oligonucleotide
  Antisense strand to SEQ ID NO: 677862
uaaccucauaacaacucuu

SEQ ID NO: 677864 - RNA, 19 nt, Artificial Sequence
  Description of Artificial Sequence: Synthetic oligonucleotide
  Sense strand starting at position 2723 of SEQ ID NO: 585917
cuuugaggccucuguuaaa

SEQ ID NO: 677865 - RNA, 19 nt, Artificial Sequence
  Description of Artificial Sequence: Synthetic oligonucleotide
  Antisense strand to SEQ ID NO: 677864
uuuaacagaggccucaaag

SEQ ID NO: 677866 - RNA, 19 nt, Artificial Sequence
  Description of Artificial Sequence: Synthetic oligonucleotide
  Sense strand starting at position 2734 of SEQ ID NO: 585917
cuguuaaauguccaaaccu

SEQ ID NO: 677867 - RNA, 19 nt, Artificial Sequence
  Description of Artificial Sequence: Synthetic oligonucleotide
  Antisense strand to SEQ ID NO: 677866
agguuuggacauuuaacag

SEQ ID NO: 677868 - RNA, 19 nt, Artificial Sequence
  Description of Artificial Sequence: Synthetic oligonucleotide
  Sense strand starting at position 2780 of SEQ ID NO: 585917
acuagaaguuuccaggaua

SEQ ID NO: 677869 - RNA, 19 nt, Artificial Sequence
  Description of Artificial Sequence: Synthetic oligonucleotide
  Antisense strand to SEQ ID NO: 677868
uauccuggaaacuucuagu

SEQ ID NO: 677870 - RNA, 19 nt, Artificial Sequence
  Description of Artificial Sequence: Synthetic oligonucleotide
  Sense strand starting at position 2830 of SEQ ID NO: 585917
guuagacacauccguggaa

SEQ ID NO: 677871 - RNA, 19 nt, Artificial Sequence
  Description of Artificial Sequence: Synthetic oligonucleotide
  Antisense strand to SEQ ID NO: 677870
uuccacggaugugucuaac

SEQ ID NO: 677872 - RNA, 19 nt, Artificial Sequence
  Description of Artificial Sequence: Synthetic oligonucleotide
  Sense strand starting at position 2834 of SEQ ID NO: 585917
gacacauccguggaagcuu

SEQ ID NO: 677873 - RNA, 19 nt, Artificial Sequence
  Description of Artificial Sequence: Synthetic oligonucleotide
  Antisense strand to SEQ ID NO: 677872
aagcuuccacggauguguc

SEQ ID NO: 677874 - RNA, 19 nt, Artificial Sequence
  Description of Artificial Sequence: Synthetic oligonucleotide
  Sense strand starting at position 2842 of SEQ ID NO: 585917
cguggaagcuucuuauagu

SEQ ID NO: 677875 - RNA, 19 nt, Artificial Sequence
  Description of Artificial Sequence: Synthetic oligonucleotide
  Antisense strand to SEQ ID NO: 677874
acuauaagaagcuuccacg

SEQ ID NO: 677876 - RNA, 19 nt, Artificial Sequence
  Description of Artificial Sequence: Synthetic oligonucleotide
  Sense strand starting at position 2851 of SEQ ID NO: 585917
uucuuauagucugccugua

SEQ ID NO: 677877 - RNA, 19 nt, Artificial Sequence
  Description of Artificial Sequence: Synthetic oligonucleotide
  Antisense strand to SEQ ID NO: 677876
uacaggcagacuauaagaa

SEQ ID NO: 677878 - RNA, 19 nt, Artificial Sequence
  Description of Artificial Sequence: Synthetic oligonucleotide
  Sense strand starting at position 2890 of SEQ ID NO: 585917
uucgaaaugucauuacaua

SEQ ID NO: 677879 - RNA, 19 nt, Artificial Sequence
  Description of Artificial Sequence: Synthetic oligonucleotide
  Antisense strand to SEQ ID NO: 677878
uauguaaugacauuucgaa

SEQ ID NO: 677880 - RNA, 19 nt, Artificial Sequence
  Description of Artificial Sequence: Synthetic oligonucleotide
  Sense strand starting at position 2891 of SEQ ID NO: 585917
ucgaaaugucauuacauac

SEQ ID NO: 677881 - RNA, 19 nt, Artificial Sequence
  Description of Artificial Sequence: Synthetic oligonucleotide
  Antisense strand to SEQ ID NO: 677880
guauguaaugacauuucga

SEQ ID NO: 677882 - RNA, 19 nt, Artificial Sequence
  Description of Artificial Sequence: Synthetic oligonucleotide
  Sense strand starting at position 2949 of SEQ ID NO: 585917
cuguaaaucucagugucuu

SEQ ID NO: 677883 - RNA, 19 nt, Artificial Sequence
  Description of Artificial Sequence: Synthetic oligonucleotide
  Antisense strand to SEQ ID NO: 677882
aagacacugagauuuacag

SEQ ID NO: 677884 - RNA, 19 nt, Artificial Sequence
  Description of Artificial Sequence: Synthetic oligonucleotide
  Sense strand starting at position 2967 of SEQ ID NO: 585917
ucagucuguccagauuaga

SEQ ID NO: 677885 - RNA, 19 nt, Artificial Sequence
  Description of Artificial Sequence: Synthetic oligonucleotide
  Antisense strand to SEQ ID NO: 677884
ucuaaucuggacagacuga

SEQ ID NO: 677886 - RNA, 19 nt, Artificial Sequence
  Description of Artificial Sequence: Synthetic oligonucleotide
  Sense strand starting at position 3049 of SEQ ID NO: 585917
gcaacugucugaucucuau

SEQ ID NO: 677887 - RNA, 19 nt, Artificial Sequence
  Description of Artificial Sequence: Synthetic oligonucleotide
  Antisense strand to SEQ ID NO: 677886
auagagaucagacaguugc

SEQ ID NO: 677888 - RNA, 19 nt, Artificial Sequence
  Description of Artificial Sequence: Synthetic oligonucleotide
  Sense strand starting at position 3052 of SEQ ID NO: 585917
acugucugaucucuaucau

SEQ ID NO: 677889 - RNA, 19 nt, Artificial Sequence
  Description of Artificial Sequence: Synthetic oligonucleotide
  Antisense strand to SEQ ID NO: 677888
augauagagaucagacagu

SEQ ID NO: 677890 - RNA, 19 nt, Artificial Sequence
  Description of Artificial Sequence: Synthetic oligonucleotide
  Sense strand starting at position 3053 of SEQ ID NO: 585917
cugucugaucucuaucauc

SEQ ID NO: 677891 - RNA, 19 nt, Artificial Sequence
  Description of Artificial Sequence: Synthetic oligonucleotide
  Antisense strand to SEQ ID NO: 677890
gaugauagagaucagacag

SEQ ID NO: 677892 - RNA, 19 nt, Artificial Sequence
  Description of Artificial Sequence: Synthetic oligonucleotide
  Sense strand starting at position 3096 of SEQ ID NO: 585917
gcaaguaccguuuguugga

SEQ ID NO: 677893 - RNA, 19 nt, Artificial Sequence
  Description of Artificial Sequence: Synthetic oligonucleotide
  Antisense strand to SEQ ID NO: 677892
uccaacaaacgguacuugc

SEQ ID NO: 677894 - RNA, 19 nt, Artificial Sequence
  Description of Artificial Sequence: Synthetic oligonucleotide
  Sense strand starting at position 3106 of SEQ ID NO: 585917
uuuguuggauucucggaau

SEQ ID NO: 677895 - RNA, 19 nt, Artificial Sequence
  Description of Artificial Sequence: Synthetic oligonucleotide
  Antisense strand to SEQ ID NO: 677894
auuccgagaauccaacaaa

SEQ ID NO: 677896 - RNA, 19 nt, Artificial Sequence
  Description of Artificial Sequence: Synthetic oligonucleotide
  Sense strand starting at position 3109 of SEQ ID NO: 585917
guuggauucucggaaucua

SEQ ID NO: 677897 - RNA, 19 nt, Artificial Sequence
  Description of Artificial Sequence: Synthetic oligonucleotide
  Antisense strand to SEQ ID NO: 677896
uagauuccgagaauccaac

SEQ ID NO: 677898 - RNA, 19 nt, Artificial Sequence
  Description of Artificial Sequence: Synthetic oligonucleotide
  Sense strand starting at position 3120 of SEQ ID NO: 585917
ggaaucuagcuuggaguga

SEQ ID NO: 677899 - RNA, 19 nt, Artificial Sequence
  Description of Artificial Sequence: Synthetic oligonucleotide
  Antisense strand to SEQ ID NO: 677898
ucacuccaagcuagauucc

SEQ ID NO: 677900 - RNA, 19 nt, Artificial Sequence
  Description of Artificial Sequence: Synthetic oligonucleotide
  Sense strand starting at position 3121 of SEQ ID NO: 585917
gaaucuagcuuggagugaa

SEQ ID NO: 677901 - RNA, 19 nt, Artificial Sequence
  Description of Artificial Sequence: Synthetic oligonucleotide
  Antisense strand to SEQ ID NO: 677900
uucacuccaagcuagauuc

SEQ ID NO: 677902 - RNA, 19 nt, Artificial Sequence
  Description of Artificial Sequence: Synthetic oligonucleotide
  Sense strand starting at position 3133 of SEQ ID NO: 585917
gagugaaggcaaugaauau

SEQ ID NO: 677903 - RNA, 19 nt, Artificial Sequence
  Description of Artificial Sequence: Synthetic oligonucleotide
  Antisense strand to SEQ ID NO: 677902
auauucauugccuucacuc

SEQ ID NO: 677904 - RNA, 19 nt, Artificial Sequence
  Description of Artificial Sequence: Synthetic oligonucleotide
  Sense strand starting at position 3365 of SEQ ID NO: 585917
ggcagaauugguuauuccu

SEQ ID NO: 677905 - RNA, 19 nt, Artificial Sequence
  Description of Artificial Sequence: Synthetic oligonucleotide
  Antisense strand to SEQ ID NO: 677904
aggaauaaccaauucugcc

SEQ ID NO: 677906 - RNA, 19 nt, Artificial Sequence
  Description of Artificial Sequence: Synthetic oligonucleotide
  Sense strand starting at position 3517 of SEQ ID NO: 585917
guuagcauccaguaaaucu

SEQ ID NO: 677907 - RNA, 19 nt, Artificial Sequence
  Description of Artificial Sequence: Synthetic oligonucleotide
  Antisense strand to SEQ ID NO: 677906
agauuuacuggaugcuaac

SEQ ID NO: 677908 - RNA, 19 nt, Artificial Sequence
  Description of Artificial Sequence: Synthetic oligonucleotide
  Sense strand starting at position 3527 of SEQ ID NO: 585917
aguaaaucuuaacaagagu

SEQ ID NO: 677909 - RNA, 19 nt, Artificial Sequence
  Description of Artificial Sequence: Synthetic oligonucleotide
  Antisense strand to SEQ ID NO: 677908
acucuuguuaagauuuacu

SEQ ID NO: 677910 - RNA, 19 nt, Artificial Sequence
  Description of Artificial Sequence: Synthetic oligonucleotide
  Sense strand starting at position 3563 of SEQ ID NO: 585917
ggccuuuacaguggaaaga

SEQ ID NO: 677911 - RNA, 19 nt, Artificial Sequence
  Description of Artificial Sequence: Synthetic oligonucleotide
  Antisense strand to SEQ ID NO: 677910
ucuuuccacuguaaaggcc

SEQ ID NO: 677912 - RNA, 19 nt, Artificial Sequence
  Description of Artificial Sequence: Synthetic oligonucleotide
  Sense strand starting at position 3599 of SEQ ID NO: 585917
uggucuuaugaucacuuga

SEQ ID NO: 677913 - RNA, 19 nt, Artificial Sequence
  Description of Artificial Sequence: Synthetic oligonucleotide
  Antisense strand to SEQ ID NO: 677912
ucaagugaucauaagacca

SEQ ID NO: 677914 - RNA, 19 nt, Artificial Sequence
  Description of Artificial Sequence: Synthetic oligonucleotide
  Sense strand starting at position 3601 of SEQ ID NO: 585917
gucuuaugaucacuugaaa

SEQ ID NO: 677915 - RNA, 19 nt, Artificial Sequence
  Description of Artificial Sequence: Synthetic oligonucleotide
  Antisense strand to SEQ ID NO: 677914
uuucaagugaucauaagac

SEQ ID NO: 677916 - RNA, 19 nt, Artificial Sequence
  Description of Artificial Sequence: Synthetic oligonucleotide
  Sense strand starting at position 3704 of SEQ ID NO: 585917
accacaggguuguagauau

SEQ ID NO: 677917 - RNA, 19 nt, Artificial Sequence
  Description of Artificial Sequence: Synthetic oligonucleotide
  Antisense strand to SEQ ID NO: 677916
auaucuacaacccuguggu

SEQ ID NO: 677918 - RNA, 19 nt, Artificial Sequence
  Description of Artificial Sequence: Synthetic oligonucleotide
  Sense strand starting at position 3708 of SEQ ID NO: 585917
caggguuguagauauuaug

SEQ ID NO: 677919 - RNA, 19 nt, Artificial Sequence
  Description of Artificial Sequence: Synthetic oligonucleotide
  Antisense strand to SEQ ID NO: 677918
cauaauaucuacaacccug

SEQ ID NO: 677920 - RNA, 19 nt, Artificial Sequence
  Description of Artificial Sequence: Synthetic oligonucleotide
  Sense strand starting at position 3711 of SEQ ID NO: 585917
gguuguagauauuaugacu

SEQ ID NO: 677921 - RNA, 19 nt, Artificial Sequence
  Description of Artificial Sequence: Synthetic oligonucleotide
  Antisense strand to SEQ ID NO: 677920
agucauaauaucuacaacc

SEQ ID NO: 677922 - RNA, 19 nt, Artificial Sequence
  Description of Artificial Sequence: Synthetic oligonucleotide
  Sense strand starting at position 3765 of SEQ ID NO: 585917
ggcucauggccuuaauccu

SEQ ID NO: 677923 - RNA, 19 nt, Artificial Sequence
  Description of Artificial Sequence: Synthetic oligonucleotide
  Antisense strand to SEQ ID NO: 677922
aggauuaaggccaugagcc

SEQ ID NO: 677924 - RNA, 19 nt, Artificial Sequence
  Description of Artificial Sequence: Synthetic oligonucleotide
  Sense strand starting at position 3773 of SEQ ID NO: 585917
gccuuaauccuaggacguc

SEQ ID NO: 677925 - RNA, 19 nt, Artificial Sequence
  Description of Artificial Sequence: Synthetic oligonucleotide
  Antisense strand to SEQ ID NO: 677924
gacguccuaggauuaaggc

SEQ ID NO: 677926 - RNA, 19 nt, Artificial Sequence
  Description of Artificial Sequence: Synthetic oligonucleotide
  Sense strand starting at position 3782 of SEQ ID NO: 585917
cuaggacgucaggguauau

SEQ ID NO: 677927 - RNA, 19 nt, Artificial Sequence
  Description of Artificial Sequence: Synthetic oligonucleotide
  Antisense strand to SEQ ID NO: 677926
auauacccugacguccuag

SEQ ID NO: 677928 - RNA, 19 nt, Artificial Sequence
  Description of Artificial Sequence: Synthetic oligonucleotide
  Sense strand starting at position 3808 of SEQ ID NO: 585917
ccguuaugggcugaucuga

SEQ ID NO: 677929 - RNA, 19 nt, Artificial Sequence
  Description of Artificial Sequence: Synthetic oligonucleotide
  Antisense strand to SEQ ID NO: 677928
ucagaucagcccauaacgg

SEQ ID NO: 677930 - RNA, 19 nt, Artificial Sequence
  Description of Artificial Sequence: Synthetic oligonucleotide
  Sense strand starting at position 3890 of SEQ ID NO: 585917
gcauuaguuuguucuguca

SEQ ID NO: 677931 - RNA, 19 nt, Artificial Sequence
  Description of Artificial Sequence: Synthetic oligonucleotide
  Antisense strand to SEQ ID NO: 677930
ugacagaacaaacuaaugc

SEQ ID NO: 677932 - RNA, 19 nt, Artificial Sequence
  Description of Artificial Sequence: Synthetic oligonucleotide
  Sense strand starting at position 3894 of SEQ ID NO: 585917
uaguuuguucugucaugcu

SEQ ID NO: 677933 - RNA, 19 nt, Artificial Sequence
  Description of Artificial Sequence: Synthetic oligonucleotide
  Antisense strand to SEQ ID NO: 677932
agcaugacagaacaaacua

SEQ ID NO: 677934 - RNA, 19 nt, Artificial Sequence
  Description of Artificial Sequence: Synthetic oligonucleotide
  Sense strand starting at position 3951 of SEQ ID NO: 585917
aggucauugcacuguuaag

SEQ ID NO: 677935 - RNA, 19 nt, Artificial Sequence
  Description of Artificial Sequence: Synthetic oligonucleotide
  Antisense strand to SEQ ID NO: 677934
cuuaacagugcaaugaccu

SEQ ID NO: 677936 - RNA, 19 nt, Artificial Sequence
  Description of Artificial Sequence: Synthetic oligonucleotide
  Sense strand starting at position 86 of SEQ ID NO: 585918
gaccaccucuguugagaua

SEQ ID NO: 677937 - RNA, 19 nt, Artificial Sequence
  Description of Artificial Sequence: Synthetic oligonucleotide
  Antisense strand to SEQ ID NO: 677936
uaucucaacagaggugguc

SEQ ID NO: 677938 - RNA, 19 nt, Artificial Sequence
  Description of Artificial Sequence: Synthetic oligonucleotide
  Sense strand starting at position 87 of SEQ ID NO: 585918
accaccucuguugagauau

SEQ ID NO: 677939 - RNA, 19 nt, Artificial Sequence
  Description of Artificial Sequence: Synthetic oligonucleotide
  Antisense strand to SEQ ID NO: 677938
auaucucaacagagguggu

SEQ ID NO: 677940 - RNA, 19 nt, Artificial Sequence
  Description of Artificial Sequence: Synthetic oligonucleotide
  Sense strand starting at position 98 of SEQ ID NO: 585918
ugagauaucuucuccuuug

SEQ ID NO: 677941 - RNA, 19 nt, Artificial Sequence
  Description of Artificial Sequence: Synthetic oligonucleotide
  Antisense strand to SEQ ID NO: 677940
caaaggagaagauaucuca

SEQ ID NO: 677942 - RNA, 19 nt, Artificial Sequence
  Description of Artificial Sequence: Synthetic oligonucleotide
  Sense strand starting at position 115 of SEQ ID NO: 585918
ugauauuguugagaauauc

SEQ ID NO: 677943 - RNA, 19 nt, Artificial Sequence
  Description of Artificial Sequence: Synthetic oligonucleotide
  Antisense strand to SEQ ID NO: 677942
gauauucucaacaauauca

SEQ ID NO: 677944 - RNA, 19 nt, Artificial Sequence
  Description of Artificial Sequence: Synthetic oligonucleotide
  Sense strand starting at position 182 of SEQ ID NO: 585918
ucuacaaaccuuuggguga

SEQ ID NO: 677945 - RNA, 19 nt, Artificial Sequence
  Description of Artificial Sequence: Synthetic oligonucleotide
  Antisense strand to SEQ ID NO: 677944
ucacccaaagguuuguaga

SEQ ID NO: 677946 - RNA, 19 nt, Artificial Sequence
  Description of Artificial Sequence: Synthetic oligonucleotide
  Sense strand starting at position 186 of SEQ ID NO: 585918
caaaccuuugggugaggau

SEQ ID NO: 677947 - RNA, 19 nt, Artificial Sequence
  Description of Artificial Sequence: Synthetic oligonucleotide
  Antisense strand to SEQ ID NO: 677946
auccucacccaaagguuug

SEQ ID NO: 677948 - RNA, 19 nt, Artificial Sequence
  Description of Artificial Sequence: Synthetic oligonucleotide
  Sense strand starting at position 225 of SEQ ID NO: 585918
augugaugcuucuguacac

SEQ ID NO: 677949 - RNA, 19 nt, Artificial Sequence
  Description of Artificial Sequence: Synthetic oligonucleotide
  Antisense strand to SEQ ID NO: 677948
guguacagaagcaucacau

SEQ ID NO: 677950 - RNA, 19 nt, Artificial Sequence
  Description of Artificial Sequence: Synthetic oligonucleotide
  Sense strand starting at position 226 of SEQ ID NO: 585918
ugugaugcuucuguacacu

SEQ ID NO: 677951 - RNA, 19 nt, Artificial Sequence
  Description of Artificial Sequence: Synthetic oligonucleotide
  Antisense strand to SEQ ID NO: 677950
aguguacagaagcaucaca

SEQ ID NO: 677952 - RNA, 19 nt, Artificial Sequence
  Description of Artificial Sequence: Synthetic oligonucleotide
  Sense strand starting at position 303 of SEQ ID NO: 585918
agaugcgcucauuagcauu

SEQ ID NO: 677953 - RNA, 19 nt, Artificial Sequence
  Description of Artificial Sequence: Synthetic oligonucleotide
  Antisense strand to SEQ ID NO: 677952
aaugcuaaugagcgcaucu

SEQ ID NO: 677954 - RNA, 19 nt, Artificial Sequence
  Description of Artificial Sequence: Synthetic oligonucleotide
  Sense strand starting at position 309 of SEQ ID NO: 585918
gcucauuagcauuaaugac

SEQ ID NO: 677955 - RNA, 19 nt, Artificial Sequence
  Description of Artificial Sequence: Synthetic oligonucleotide
  Antisense strand to SEQ ID NO: 677954
gucauuaaugcuaaugagc

SEQ ID NO: 677956 - RNA, 19 nt, Artificial Sequence
  Description of Artificial Sequence: Synthetic oligonucleotide
  Sense strand starting at position 357 of SEQ ID NO: 585918
ccaagagcuugggacucau

SEQ ID NO: 677957 - RNA, 19 nt, Artificial Sequence
  Description of Artificial Sequence: Synthetic oligonucleotide
  Antisense strand to SEQ ID NO: 677956
augagucccaagcucuugg

SEQ ID NO: 677958 - RNA, 19 nt, Artificial Sequence
  Description of Artificial Sequence: Synthetic oligonucleotide
  Sense strand starting at position 438 of SEQ ID NO: 585918
acagccuuguccuggaaga

SEQ ID NO: 677959 - RNA, 19 nt, Artificial Sequence
  Description of Artificial Sequence: Synthetic oligonucleotide
  Antisense strand to SEQ ID NO: 677958
ucuuccaggacaaggcugu

SEQ ID NO: 677960 - RNA, 19 nt, Artificial Sequence
  Description of Artificial Sequence: Synthetic oligonucleotide
  Sense strand starting at position 439 of SEQ ID NO: 585918
cagccuuguccuggaagau

SEQ ID NO: 677961 - RNA, 19 nt, Artificial Sequence
  Description of Artificial Sequence: Synthetic oligonucleotide
  Antisense strand to SEQ ID NO: 677960
aucuuccaggacaaggcug

SEQ ID NO: 677962 - RNA, 19 nt, Artificial Sequence
  Description of Artificial Sequence: Synthetic oligonucleotide
  Sense strand starting at position 440 of SEQ ID NO: 585918
agccuuguccuggaagauc

SEQ ID NO: 677963 - RNA, 19 nt, Artificial Sequence
  Description of Artificial Sequence: Synthetic oligonucleotide
  Antisense strand to SEQ ID NO: 677962
gaucuuccaggacaaggcu

SEQ ID NO: 677964 - RNA, 19 nt, Artificial Sequence
  Description of Artificial Sequence: Synthetic oligonucleotide
  Sense strand starting at position 448 of SEQ ID NO: 585918
ccuggaagaucugugcacu

SEQ ID NO: 677965 - RNA, 19 nt, Artificial Sequence
  Description of Artificial Sequence: Synthetic oligonucleotide
  Antisense strand to SEQ ID NO: 677964
agugcacagaucuuccagg

SEQ ID NO: 677966 - RNA, 19 nt, Artificial Sequence
  Description of Artificial Sequence: Synthetic oligonucleotide
  Sense strand starting at position 652 of SEQ ID NO: 585918
gguggaacauguguacaga

SEQ ID NO: 677967 - RNA, 19 nt, Artificial Sequence
  Description of Artificial Sequence: Synthetic oligonucleotide
  Antisense strand to SEQ ID NO: 677966
ucuguacacauguuccacc

SEQ ID NO: 677968 - RNA, 19 nt, Artificial Sequence
  Description of Artificial Sequence: Synthetic oligonucleotide
  Sense strand starting at position 753 of SEQ ID NO: 585918
cccuguucuuccggacaac

SEQ ID NO: 677969 - RNA, 19 nt, Artificial Sequence
  Description of Artificial Sequence: Synthetic oligonucleotide
  Antisense strand to SEQ ID NO: 677968
guuguccggaagaacaggg

SEQ ID NO: 677970 - RNA, 19 nt, Artificial Sequence
  Description of Artificial Sequence: Synthetic oligonucleotide
  Sense strand starting at position 754 of SEQ ID NO: 585918
ccuguucuuccggacaaca

SEQ ID NO: 677971 - RNA, 19 nt, Artificial Sequence
  Description of Artificial Sequence: Synthetic oligonucleotide
  Antisense strand to SEQ ID NO: 677970
uguuguccggaagaacagg

SEQ ID NO: 677972 - RNA, 19 nt, Artificial Sequence
  Description of Artificial Sequence: Synthetic oligonucleotide
  Sense strand starting at position 1074 of SEQ ID NO: 585918
ccucaaaccuugucaaguc

SEQ ID NO: 677973 - RNA, 19 nt, Artificial Sequence
  Description of Artificial Sequence: Synthetic oligonucleotide
  Antisense strand to SEQ ID NO: 677972
gacuugacaagguuugagg

SEQ ID NO: 677974 - RNA, 19 nt, Artificial Sequence
  Description of Artificial Sequence: Synthetic oligonucleotide
  Sense strand starting at position 1979 of SEQ ID NO: 585918
gacggaaaguuuguguuga

SEQ ID NO: 677975 - RNA, 19 nt, Artificial Sequence
  Description of Artificial Sequence: Synthetic oligonucleotide
  Antisense strand to SEQ ID NO: 677974
ucaacacaaacuuuccguc

SEQ ID NO: 677976 - RNA, 19 nt, Artificial Sequence
  Description of Artificial Sequence: Synthetic oligonucleotide
  Sense strand starting at position 1980 of SEQ ID NO: 585918
acggaaaguuuguguugag

SEQ ID NO: 677977 - RNA, 19 nt, Artificial Sequence
  Description of Artificial Sequence: Synthetic oligonucleotide
  Antisense strand to SEQ ID NO: 677976
cucaacacaaacuuuccgu

SEQ ID NO: 677978 - RNA, 19 nt, Artificial Sequence
  Description of Artificial Sequence: Synthetic oligonucleotide
  Sense strand starting at position 1983 of SEQ ID NO: 585918
gaaaguuuguguugaggag

SEQ ID NO: 677979 - RNA, 19 nt, Artificial Sequence
  Description of Artificial Sequence: Synthetic oligonucleotide
  Antisense strand to SEQ ID NO: 677978
cuccucaacacaaacuuuc

SEQ ID NO: 677980 - RNA, 19 nt, Artificial Sequence
  Description of Artificial Sequence: Synthetic oligonucleotide
  Sense strand starting at position 2517 of SEQ ID NO: 585918
cguggcuaguuucucgaau

SEQ ID NO: 677981 - RNA, 19 nt, Artificial Sequence
  Description of Artificial Sequence: Synthetic oligonucleotide
  Antisense strand to SEQ ID NO: 677980
auucgagaaacuagccacg

SEQ ID NO: 677982 - RNA, 19 nt, Artificial Sequence
  Description of Artificial Sequence: Synthetic oligonucleotide
  Sense strand starting at position 2518 of SEQ ID NO: 585918
guggcuaguuucucgaauu

SEQ ID NO: 677983 - RNA, 19 nt, Artificial Sequence
  Description of Artificial Sequence: Synthetic oligonucleotide
  Antisense strand to SEQ ID NO: 677982
aauucgagaaacuagccac

SEQ ID NO: 677984 - RNA, 19 nt, Artificial Sequence
  Description of Artificial Sequence: Synthetic oligonucleotide
  Sense strand starting at position 2519 of SEQ ID NO: 585918
uggcuaguuucucgaauuu

SEQ ID NO: 677985 - RNA, 19 nt, Artificial Sequence
  Description of Artificial Sequence: Synthetic oligonucleotide
  Antisense strand to SEQ ID NO: 677984
aaauucgagaaacuagcca

SEQ ID NO: 677986 - RNA, 19 nt, Artificial Sequence
  Description of Artificial Sequence: Synthetic oligonucleotide
  Sense strand starting at position 3154 of SEQ ID NO: 585918
gggagcuuugcuggaggga

SEQ ID NO: 677987 - RNA, 19 nt, Artificial Sequence
  Description of Artificial Sequence: Synthetic oligonucleotide
  Antisense strand to SEQ ID NO: 677986
ucccuccagcaaagcuccc

SEQ ID NO: 677988 - RNA, 19 nt, Artificial Sequence
  Description of Artificial Sequence: Synthetic oligonucleotide
  Sense strand starting at position 3254 of SEQ ID NO: 585918
ccagcuucccgucgaaacu

SEQ ID NO: 677989 - RNA, 19 nt, Artificial Sequence
  Description of Artificial Sequence: Synthetic oligonucleotide
  Antisense strand to SEQ ID NO: 677988
aguuucgacgggaagcugg

SEQ ID NO: 677990 - RNA, 19 nt, Artificial Sequence
  Description of Artificial Sequence: Synthetic oligonucleotide
  Sense strand starting at position 3314 of SEQ ID NO: 585918
accgguagucuagggugaa

SEQ ID NO: 677991 - RNA, 19 nt, Artificial Sequence
  Description of Artificial Sequence: Synthetic oligonucleotide
  Antisense strand to SEQ ID NO: 677990
uucacccuagacuaccggu

SEQ ID NO: 677992 - RNA, 19 nt, Artificial Sequence
  Description of Artificial Sequence: Synthetic oligonucleotide
  Sense strand starting at position 3315 of SEQ ID NO: 585918
ccgguagucuagggugaag

SEQ ID NO: 677993 - RNA, 19 nt, Artificial Sequence
  Description of Artificial Sequence: Synthetic oligonucleotide
  Antisense strand to SEQ ID NO: 677992
cuucacccuagacuaccgg

SEQ ID NO: 677994 - RNA, 19 nt, Artificial Sequence
  Description of Artificial Sequence: Synthetic oligonucleotide
  Sense strand starting at position 3353 of SEQ ID NO: 585918
cgaacugcagcacgauaua

SEQ ID NO: 677995 - RNA, 19 nt, Artificial Sequence
  Description of Artificial Sequence: Synthetic oligonucleotide
  Antisense strand to SEQ ID NO: 677994
uauaucgugcugcaguucg

SEQ ID NO: 677996 - RNA, 19 nt, Artificial Sequence
  Description of Artificial Sequence: Synthetic oligonucleotide
  Sense strand starting at position 3362 of SEQ ID NO: 585918
gcacgauauagucggcuau

SEQ ID NO: 677997 - RNA, 19 nt, Artificial Sequence
  Description of Artificial Sequence: Synthetic oligonucleotide
  Antisense strand to SEQ ID NO: 677996
auagccgacuauaucgugc

SEQ ID NO: 677998 - RNA, 19 nt, Artificial Sequence
  Description of Artificial Sequence: Synthetic oligonucleotide
  Sense strand starting at position 3366 of SEQ ID NO: 585918
gauauagucggcuauggac

SEQ ID NO: 677999 - RNA, 19 nt, Artificial Sequence
  Description of Artificial Sequence: Synthetic oligonucleotide
  Antisense strand to SEQ ID NO: 677998
guccauagccgacuauauc

SEQ ID NO: 678000 - RNA, 19 nt, Artificial Sequence
  Description of Artificial Sequence: Synthetic oligonucleotide
  Sense strand starting at position 3631 of SEQ ID NO: 585918
gcccgcaccugauuaacua

SEQ ID NO: 678001 - RNA, 19 nt, Artificial Sequence
  Description of Artificial Sequence: Synthetic oligonucleotide
  Antisense strand to SEQ ID NO: 678000
uaguuaaucaggugcgggc

SEQ ID NO: 678002 - RNA, 19 nt, Artificial Sequence
  Description of Artificial Sequence: Synthetic oligonucleotide
  Sense strand starting at position 3646 of SEQ ID NO: 585918
acuauaggacccugucaaa

SEQ ID NO: 678003 - RNA, 19 nt, Artificial Sequence
  Description of Artificial Sequence: Synthetic oligonucleotide
  Antisense strand to SEQ ID NO: 678002
uuugacaggguccuauagu

SEQ ID NO: 678004 - RNA, 19 nt, Artificial Sequence
  Description of Artificial Sequence: Synthetic oligonucleotide
  Sense strand starting at position 3649 of SEQ ID NO: 585918
auaggacccugucaaauuu

SEQ ID NO: 678005 - RNA, 19 nt, Artificial Sequence
  Description of Artificial Sequence: Synthetic oligonucleotide
  Antisense strand to SEQ ID NO: 678004
aaauuugacaggguccuau

SEQ ID NO: 678006 - RNA, 19 nt, Artificial Sequence
  Description of Artificial Sequence: Synthetic oligonucleotide
  Sense strand starting at position 3690 of SEQ ID NO: 585918
ucccaaauucucuguuguu

SEQ ID NO: 678007 - RNA, 19 nt, Artificial Sequence
  Description of Artificial Sequence: Synthetic oligonucleotide
  Antisense strand to SEQ ID NO: 678006
aacaacagagaauuuggga

SEQ ID NO: 678008 - RNA, 19 nt, Artificial Sequence
  Description of Artificial Sequence: Synthetic oligonucleotide
  Sense strand starting at position 3691 of SEQ ID NO: 585918
cccaaauucucuguuguuu

SEQ ID NO: 678009 - RNA, 19 nt, Artificial Sequence
  Description of Artificial Sequence: Synthetic oligonucleotide
  Antisense strand to SEQ ID NO: 678008
aaacaacagagaauuuggg

SEQ ID NO: 678010 - RNA, 19 nt, Artificial Sequence
  Description of Artificial Sequence: Synthetic oligonucleotide
  Sense strand starting at position 3702 of SEQ ID NO: 585918
uguuguuucuggccacagu

SEQ ID NO: 678011 - RNA, 19 nt, Artificial Sequence
  Description of Artificial Sequence: Synthetic oligonucleotide
  Antisense strand to SEQ ID NO: 678010
acuguggccagaaacaaca

SEQ ID NO: 678012 - RNA, 19 nt, Artificial Sequence
  Description of Artificial Sequence: Synthetic oligonucleotide
  Sense strand starting at position 3930 of SEQ ID NO: 585918
aaacgugaucuggagagca

SEQ ID NO: 678013 - RNA, 19 nt, Artificial Sequence
  Description of Artificial Sequence: Synthetic oligonucleotide
  Antisense strand to SEQ ID NO: 678012
ugcucuccagaucacguuu

SEQ ID NO: 678014 - RNA, 19 nt, Artificial Sequence
  Description of Artificial Sequence: Synthetic oligonucleotide
  Sense strand starting at position 3932 of SEQ ID NO: 585918
acgugaucuggagagcagu

SEQ ID NO: 678015 - RNA, 19 nt, Artificial Sequence
  Description of Artificial Sequence: Synthetic oligonucleotide
  Antisense strand to SEQ ID NO: 678014
acugcucuccagaucacgu

SEQ ID NO: 678016 - RNA, 19 nt, Artificial Sequence
  Description of Artificial Sequence: Synthetic oligonucleotide
  Sense strand starting at position 36 of SEQ ID NO: 585919
uugacaagucugcguggga

SEQ ID NO: 678017 - RNA, 19 nt, Artificial Sequence
  Description of Artificial Sequence: Synthetic oligonucleotide
  Antisense strand to SEQ ID NO: 678016
ucccacgcagacuugucaa

SEQ ID NO: 678018 - RNA, 19 nt, Artificial Sequence
  Description of Artificial Sequence: Synthetic oligonucleotide
  Sense strand starting at position 37 of SEQ ID NO: 585919
ugacaagucugcgugggaa

SEQ ID NO: 678019 - RNA, 19 nt, Artificial Sequence
  Description of Artificial Sequence: Synthetic oligonucleotide
  Antisense strand to SEQ ID NO: 678018
uucccacgcagacuuguca

SEQ ID NO: 678020 - RNA, 19 nt, Artificial Sequence
  Description of Artificial Sequence: Synthetic oligonucleotide
  Sense strand starting at position 39 of SEQ ID NO: 585919
acaagucugcgugggaaau

SEQ ID NO: 678021 - RNA, 19 nt, Artificial Sequence
  Description of Artificial Sequence: Synthetic oligonucleotide
  Antisense strand to SEQ ID NO: 678020
auuucccacgcagacuugu

SEQ ID NO: 678022 - RNA, 19 nt, Artificial Sequence
  Description of Artificial Sequence: Synthetic oligonucleotide
  Sense strand starting at position 40 of SEQ ID NO: 585919
caagucugcgugggaaauc

SEQ ID NO: 678023 - RNA, 19 nt, Artificial Sequence
  Description of Artificial Sequence: Synthetic oligonucleotide
  Antisense strand to SEQ ID NO: 678022
gauuucccacgcagacuug

SEQ ID NO: 678024 - RNA, 19 nt, Artificial Sequence
  Description of Artificial Sequence: Synthetic oligonucleotide
  Sense strand starting at position 241 of SEQ ID NO: 585919
auuaaacugcagcgugaaa

SEQ ID NO: 678025 - RNA, 19 nt, Artificial Sequence
  Description of Artificial Sequence: Synthetic oligonucleotide
  Antisense strand to SEQ ID NO: 678024
uuucacgcugcaguuuaau

SEQ ID NO: 678026 - RNA, 19 nt, Artificial Sequence
  Description of Artificial Sequence: Synthetic oligonucleotide
  Sense strand starting at position 243 of SEQ ID NO: 585919
uaaacugcagcgugaaauc

SEQ ID NO: 678027 - RNA, 19 nt, Artificial Sequence
  Description of Artificial Sequence: Synthetic oligonucleotide
  Antisense strand to SEQ ID NO: 678026
gauuucacgcugcaguuua

SEQ ID NO: 678028 - RNA, 19 nt, Artificial Sequence
  Description of Artificial Sequence: Synthetic oligonucleotide
  Sense strand starting at position 253 of SEQ ID NO: 585919
cgugaaaucucucuuaagc

SEQ ID NO: 678029 - RNA, 19 nt, Artificial Sequence
  Description of Artificial Sequence: Synthetic oligonucleotide
  Antisense strand to SEQ ID NO: 678028
gcuuaagagagauuucacg

SEQ ID NO: 678030 - RNA, 19 nt, Artificial Sequence
  Description of Artificial Sequence: Synthetic oligonucleotide
  Sense strand starting at position 565 of SEQ ID NO: 585919
gucgauuuaugguuuggau

SEQ ID NO: 678031 - RNA, 19 nt, Artificial Sequence
  Description of Artificial Sequence: Synthetic oligonucleotide
  Antisense strand to SEQ ID NO: 678030
auccaaaccauaaaucgac

SEQ ID NO: 678032 - RNA, 19 nt, Artificial Sequence
  Description of Artificial Sequence: Synthetic oligonucleotide
  Sense strand starting at position 596 of SEQ ID NO: 585919
acgucaagucaagguuuaa

SEQ ID NO: 678033 - RNA, 19 nt, Artificial Sequence
  Description of Artificial Sequence: Synthetic oligonucleotide
  Antisense strand to SEQ ID NO: 678032
uuaaaccuugacuugacgu

SEQ ID NO: 678034 - RNA, 19 nt, Artificial Sequence
  Description of Artificial Sequence: Synthetic oligonucleotide
  Sense strand starting at position 627 of SEQ ID NO: 585919
cagccuuauuggguuuaaa

SEQ ID NO: 678035 - RNA, 19 nt, Artificial Sequence
  Description of Artificial Sequence: Synthetic oligonucleotide
  Antisense strand to SEQ ID NO: 678034
uuuaaacccaauaaggcug

SEQ ID NO: 678036 - RNA, 19 nt, Artificial Sequence
  Description of Artificial Sequence: Synthetic oligonucleotide
  Sense strand starting at position 712 of SEQ ID NO: 585919
agaagaaacgccugacuuu

SEQ ID NO: 678037 - RNA, 19 nt, Artificial Sequence
  Description of Artificial Sequence: Synthetic oligonucleotide
  Antisense strand to SEQ ID NO: 678036
aaagucaggcguuucuucu

SEQ ID NO: 678038 - RNA, 19 nt, Artificial Sequence
  Description of Artificial Sequence: Synthetic oligonucleotide
  Sense strand starting at position 713 of SEQ ID NO: 585919
gaagaaacgccugacuuua

SEQ ID NO: 678039 - RNA, 19 nt, Artificial Sequence
  Description of Artificial Sequence: Synthetic oligonucleotide
  Antisense strand to SEQ ID NO: 678038
uaaagucaggcguuucuuc

SEQ ID NO: 678040 - RNA, 19 nt, Artificial Sequence
  Description of Artificial Sequence: Synthetic oligonucleotide
  Sense strand starting at position 769 of SEQ ID NO: 585919
gagaguugauuccagagac

SEQ ID NO: 678041 - RNA, 19 nt, Artificial Sequence
  Description of Artificial Sequence: Synthetic oligonucleotide
  Antisense strand to SEQ ID NO: 678040
gucucuggaaucaacucuc

SEQ ID NO: 678042 - RNA, 19 nt, Artificial Sequence
  Description of Artificial Sequence: Synthetic oligonucleotide
  Sense strand starting at position 869 of SEQ ID NO: 585919
aucaaauguugagaacauc

SEQ ID NO: 678043 - RNA, 19 nt, Artificial Sequence
  Description of Artificial Sequence: Synthetic oligonucleotide
  Antisense strand to SEQ ID NO: 678042
gauguucucaacauuugau

SEQ ID NO: 678044 - RNA, 19 nt, Artificial Sequence
  Description of Artificial Sequence: Synthetic oligonucleotide
  Sense strand starting at position 1091 of SEQ ID NO: 585919
aggaaagcugggcgugaaa

SEQ ID NO: 678045 - RNA, 19 nt, Artificial Sequence
  Description of Artificial Sequence: Synthetic oligonucleotide
  Antisense strand to SEQ ID NO: 678044
uuucacgcccagcuuuccu

SEQ ID NO: 678046 - RNA, 19 nt, Artificial Sequence
  Description of Artificial Sequence: Synthetic oligonucleotide
  Sense strand starting at position 1101 of SEQ ID NO: 585919
ggcgugaaacccgagguuu

SEQ ID NO: 678047 - RNA, 19 nt, Artificial Sequence
  Description of Artificial Sequence: Synthetic oligonucleotide
  Antisense strand to SEQ ID NO: 678046
aaaccucggguuucacgcc

SEQ ID NO: 678048 - RNA, 19 nt, Artificial Sequence
  Description of Artificial Sequence: Synthetic oligonucleotide
  Sense strand starting at position 1102 of SEQ ID NO: 585919
gcgugaaacccgagguuuc

SEQ ID NO: 678049 - RNA, 19 nt, Artificial Sequence
  Description of Artificial Sequence: Synthetic oligonucleotide
  Antisense strand to SEQ ID NO: 678048
gaaaccucggguuucacgc

SEQ ID NO: 678050 - RNA, 19 nt, Artificial Sequence
  Description of Artificial Sequence: Synthetic oligonucleotide
  Sense strand starting at position 1133 of SEQ ID NO: 585919
ggcaccagguuuccagaau

SEQ ID NO: 678051 - RNA, 19 nt, Artificial Sequence
  Description of Artificial Sequence: Synthetic oligonucleotide
  Antisense strand to SEQ ID NO: 678050
auucuggaaaccuggugcc

SEQ ID NO: 678052 - RNA, 19 nt, Artificial Sequence
  Description of Artificial Sequence: Synthetic oligonucleotide
  Sense strand starting at position 1213 of SEQ ID NO: 585919
gaacuaacaucugcgaaga

SEQ ID NO: 678053 - RNA, 19 nt, Artificial Sequence
  Description of Artificial Sequence: Synthetic oligonucleotide
  Antisense strand to SEQ ID NO: 678052
ucuucgcagauguuaguuc

SEQ ID NO: 678054 - RNA, 19 nt, Artificial Sequence
  Description of Artificial Sequence: Synthetic oligonucleotide
  Sense strand starting at position 1389 of SEQ ID NO: 585919
cucggauccauccgaacuu

SEQ ID NO: 678055 - RNA, 19 nt, Artificial Sequence
  Description of Artificial Sequence: Synthetic oligonucleotide
  Antisense strand to SEQ ID NO: 678054
aaguucggauggauccgag

SEQ ID NO: 678056 - RNA, 19 nt, Artificial Sequence
  Description of Artificial Sequence: Synthetic oligonucleotide
  Sense strand starting at position 1678 of SEQ ID NO: 585919
acgaauacuuaauaaggga

SEQ ID NO: 678057 - RNA, 19 nt, Artificial Sequence
  Description of Artificial Sequence: Synthetic oligonucleotide
  Antisense strand to SEQ ID NO: 678056
ucccuuauuaaguauucgu

SEQ ID NO: 678058 - RNA, 19 nt, Artificial Sequence
  Description of Artificial Sequence: Synthetic oligonucleotide
  Sense strand starting at position 1704 of SEQ ID NO: 585919
cuggaaaucgagcgugaag

SEQ ID NO: 678059 - RNA, 19 nt, Artificial Sequence
  Description of Artificial Sequence: Synthetic oligonucleotide
  Antisense strand to SEQ ID NO: 678058
cuucacgcucgauuuccag

SEQ ID NO: 678060 - RNA, 19 nt, Artificial Sequence
  Description of Artificial Sequence: Synthetic oligonucleotide
  Sense strand starting at position 1739 of SEQ ID NO: 585919
gccggagccggcucucaau

SEQ ID NO: 678061 - RNA, 19 nt, Artificial Sequence
  Description of Artificial Sequence: Synthetic oligonucleotide
  Antisense strand to SEQ ID NO: 678060
auugagagccggcuccggc

SEQ ID NO: 678062 - RNA, 19 nt, Artificial Sequence
  Description of Artificial Sequence: Synthetic oligonucleotide
  Sense strand starting at position 1772 of SEQ ID NO: 585919
ggagucucaguguagcaaa

SEQ ID NO: 678063 - RNA, 19 nt, Artificial Sequence
  Description of Artificial Sequence: Synthetic oligonucleotide
  Antisense strand to SEQ ID NO: 678062
uuugcuacacugagacucc

SEQ ID NO: 678064 - RNA, 19 nt, Artificial Sequence
  Description of Artificial Sequence: Synthetic oligonucleotide
  Sense strand starting at position 1869 of SEQ ID NO: 585919
cggcgucuggcgaaucaca

SEQ ID NO: 678065 - RNA, 19 nt, Artificial Sequence
  Description of Artificial Sequence: Synthetic oligonucleotide
  Antisense strand to SEQ ID NO: 678064
ugugauucgccagacgccg

SEQ ID NO: 678066 - RNA, 19 nt, Artificial Sequence
  Description of Artificial Sequence: Synthetic oligonucleotide
  Sense strand starting at position 2194 of SEQ ID NO: 585919
cgaggacaaucagaccuaa

SEQ ID NO: 678067 - RNA, 19 nt, Artificial Sequence
  Description of Artificial Sequence: Synthetic oligonucleotide
  Antisense strand to SEQ ID NO: 678066
uuaggucugauuguccucg

SEQ ID NO: 678068 - RNA, 19 nt, Artificial Sequence
  Description of Artificial Sequence: Synthetic oligonucleotide
  Sense strand starting at position 2866 of SEQ ID NO: 585919
uggaaacagcuuugacuuu

SEQ ID NO: 678069 - RNA, 19 nt, Artificial Sequence
  Description of Artificial Sequence: Synthetic oligonucleotide
  Antisense strand to SEQ ID NO: 678068
aaagucaaagcuguuucca

SEQ ID NO: 678070 - RNA, 19 nt, Artificial Sequence
  Description of Artificial Sequence: Synthetic oligonucleotide
  Sense strand starting at position 3065 of SEQ ID NO: 585919
ggguuucggccucugcgaa

SEQ ID NO: 678071 - RNA, 19 nt, Artificial Sequence
  Description of Artificial Sequence: Synthetic oligonucleotide
  Antisense strand to SEQ ID NO: 678070
uucgcagaggccgaaaccc

SEQ ID NO: 678072 - RNA, 19 nt, Artificial Sequence
  Description of Artificial Sequence: Synthetic oligonucleotide
  Sense strand starting at position 3124 of SEQ ID NO: 585919
caguaugaauuguccuaug

SEQ ID NO: 678073 - RNA, 19 nt, Artificial Sequence
  Description of Artificial Sequence: Synthetic oligonucleotide
  Antisense strand to SEQ ID NO: 678072
cauaggacaauucauacug

SEQ ID NO: 678074 - RNA, 19 nt, Artificial Sequence
  Description of Artificial Sequence: Synthetic oligonucleotide
  Sense strand starting at position 3127 of SEQ ID NO: 585919
uaugaauuguccuaugaga

SEQ ID NO: 678075 - RNA, 19 nt, Artificial Sequence
  Description of Artificial Sequence: Synthetic oligonucleotide
  Antisense strand to SEQ ID NO: 678074
ucucauaggacaauucaua

SEQ ID NO: 678076 - RNA, 19 nt, Artificial Sequence
  Description of Artificial Sequence: Synthetic oligonucleotide
  Sense strand starting at position 3129 of SEQ ID NO: 585919
ugaauuguccuaugagacu

SEQ ID NO: 678077 - RNA, 19 nt, Artificial Sequence
  Description of Artificial Sequence: Synthetic oligonucleotide
  Antisense strand to SEQ ID NO: 678076
agucucauaggacaauuca

SEQ ID NO: 678078 - RNA, 19 nt, Artificial Sequence
  Description of Artificial Sequence: Synthetic oligonucleotide
  Sense strand starting at position 3402 of SEQ ID NO: 585919
auuucugguuucgagugaa

SEQ ID NO: 678079 - RNA, 19 nt, Artificial Sequence
  Description of Artificial Sequence: Synthetic oligonucleotide
  Antisense strand to SEQ ID NO: 678078
uucacucgaaaccagaaau

SEQ ID NO: 678080 - RNA, 19 nt, Artificial Sequence
  Description of Artificial Sequence: Synthetic oligonucleotide
  Sense strand starting at position 3405 of SEQ ID NO: 585919
ucugguuucgagugaaguc

SEQ ID NO: 678081 - RNA, 19 nt, Artificial Sequence
  Description of Artificial Sequence: Synthetic oligonucleotide
  Antisense strand to SEQ ID NO: 678080
gacuucacucgaaaccaga

SEQ ID NO: 678082 - RNA, 19 nt, Artificial Sequence
  Description of Artificial Sequence: Synthetic oligonucleotide
  Sense strand starting at position 3406 of SEQ ID NO: 585919
cugguuucgagugaaguca

SEQ ID NO: 678083 - RNA, 19 nt, Artificial Sequence
  Description of Artificial Sequence: Synthetic oligonucleotide
  Antisense strand to SEQ ID NO: 678082
ugacuucacucgaaaccag

SEQ ID NO: 678084 - RNA, 19 nt, Artificial Sequence
  Description of Artificial Sequence: Synthetic oligonucleotide
  Sense strand starting at position 3575 of SEQ ID NO: 585919
ucggacucauugcucauua

SEQ ID NO: 678085 - RNA, 19 nt, Artificial Sequence
  Description of Artificial Sequence: Synthetic oligonucleotide
  Antisense strand to SEQ ID NO: 678084
uaaugagcaaugaguccga

SEQ ID NO: 678086 - RNA, 19 nt, Artificial Sequence
  Description of Artificial Sequence: Synthetic oligonucleotide
  Sense strand starting at position 3577 of SEQ ID NO: 585919
ggacucauugcucauuaca

SEQ ID NO: 678087 - RNA, 19 nt, Artificial Sequence
  Description of Artificial Sequence: Synthetic oligonucleotide
  Antisense strand to SEQ ID NO: 678086
uguaaugagcaaugagucc

SEQ ID NO: 678088 - RNA, 19 nt, Artificial Sequence
  Description of Artificial Sequence: Synthetic oligonucleotide
  Sense strand starting at position 3579 of SEQ ID NO: 585919
acucauugcucauuacagu

SEQ ID NO: 678089 - RNA, 19 nt, Artificial Sequence
  Description of Artificial Sequence: Synthetic oligonucleotide
  Antisense strand to SEQ ID NO: 678088
acuguaaugagcaaugagu

SEQ ID NO: 678090 - RNA, 19 nt, Artificial Sequence
  Description of Artificial Sequence: Synthetic oligonucleotide
  Sense strand starting at position 3590 of SEQ ID NO: 585919
auuacaguguugguuguaa

SEQ ID NO: 678091 - RNA, 19 nt, Artificial Sequence
  Description of Artificial Sequence: Synthetic oligonucleotide
  Antisense strand to SEQ ID NO: 678090
uuacaaccaacacuguaau

SEQ ID NO: 678092 - RNA, 19 nt, Artificial Sequence
  Description of Artificial Sequence: Synthetic oligonucleotide
  Sense strand starting at position 3916 of SEQ ID NO: 585919
uacuuagaacuucgugaag

SEQ ID NO: 678093 - RNA, 19 nt, Artificial Sequence
  Description of Artificial Sequence: Synthetic oligonucleotide
  Antisense strand to SEQ ID NO: 678092
cuucacgaaguucuaagua

SEQ ID NO: 678094 - RNA, 19 nt, Artificial Sequence
  Description of Artificial Sequence: Synthetic oligonucleotide
  Sense strand starting at position 3964 of SEQ ID NO: 585919
ugggaucaguggucuuaag

SEQ ID NO: 678095 - RNA, 19 nt, Artificial Sequence
  Description of Artificial Sequence: Synthetic oligonucleotide
  Antisense strand to SEQ ID NO: 678094
cuuaagaccacugauccca

SEQ ID NO: 678096 - RNA, 19 nt, Artificial Sequence
  Description of Artificial Sequence: Synthetic oligonucleotide
  Sense strand starting at position 297 of SEQ ID NO: 585920
gcagucucgcggcuuucaa

SEQ ID NO: 678097 - RNA, 19 nt, Artificial Sequence
  Description of Artificial Sequence: Synthetic oligonucleotide
  Antisense strand to SEQ ID NO: 678096
uugaaagccgcgagacugc

SEQ ID NO: 678098 - RNA, 19 nt, Artificial Sequence
  Description of Artificial Sequence: Synthetic oligonucleotide
  Sense strand starting at position 383 of SEQ ID NO: 585920
cuaggaauucugcagcgaa

SEQ ID NO: 678099 - RNA, 19 nt, Artificial Sequence
  Description of Artificial Sequence: Synthetic oligonucleotide
  Antisense strand to SEQ ID NO: 678098
uucgcugcagaauuccuag

SEQ ID NO: 678100 - RNA, 19 nt, Artificial Sequence
  Description of Artificial Sequence: Synthetic oligonucleotide
  Sense strand starting at position 386 of SEQ ID NO: 585920
ggaauucugcagcgaaauu

SEQ ID NO: 678101 - RNA, 19 nt, Artificial Sequence
  Description of Artificial Sequence: Synthetic oligonucleotide
  Antisense strand to SEQ ID NO: 678100
aauuucgcugcagaauucc

SEQ ID NO: 678102 - RNA, 19 nt, Artificial Sequence
  Description of Artificial Sequence: Synthetic oligonucleotide
  Sense strand starting at position 406 of SEQ ID NO: 585920
acuggaauuugaggagaaa

SEQ ID NO: 678103 - RNA, 19 nt, Artificial Sequence
  Description of Artificial Sequence: Synthetic oligonucleotide
  Antisense strand to SEQ ID NO: 678102
uuucuccucaaauuccagu

SEQ ID NO: 678104 - RNA, 19 nt, Artificial Sequence
  Description of Artificial Sequence: Synthetic oligonucleotide
  Sense strand starting at position 426 of SEQ ID NO: 585920
cccaaagacugcuccgaaa

SEQ ID NO: 678105 - RNA, 19 nt, Artificial Sequence
  Description of Artificial Sequence: Synthetic oligonucleotide
  Antisense strand to SEQ ID NO: 678104
uuucggagcagucuuuggg

SEQ ID NO: 678106 - RNA, 19 nt, Artificial Sequence
  Description of Artificial Sequence: Synthetic oligonucleotide
  Sense strand starting at position 531 of SEQ ID NO: 585920
cgggauuugucucugguau

SEQ ID NO: 678107 - RNA, 19 nt, Artificial Sequence
  Description of Artificial Sequence: Synthetic oligonucleotide
  Antisense strand to SEQ ID NO: 678106
auaccagagacaaaucccg

SEQ ID NO: 678108 - RNA, 19 nt, Artificial Sequence
  Description of Artificial Sequence: Synthetic oligonucleotide
  Sense strand starting at position 537 of SEQ ID NO: 585920
uugucucugguaugggauu

SEQ ID NO: 678109 - RNA, 19 nt, Artificial Sequence
  Description of Artificial Sequence: Synthetic oligonucleotide
  Antisense strand to SEQ ID NO: 678108
aaucccauaccagagacaa

SEQ ID NO: 678110 - RNA, 19 nt, Artificial Sequence
  Description of Artificial Sequence: Synthetic oligonucleotide
  Sense strand starting at position 560 of SEQ ID NO: 585920
uccuuaaaccacgagguuu

SEQ ID NO: 678111 - RNA, 19 nt, Artificial Sequence
  Description of Artificial Sequence: Synthetic oligonucleotide
  Antisense strand to SEQ ID NO: 678110
aaaccucgugguuuaagga

SEQ ID NO: 678112 - RNA, 19 nt, Artificial Sequence
  Description of Artificial Sequence: Synthetic oligonucleotide
  Sense strand starting at position 568 of SEQ ID NO: 585920
ccacgagguuugucuaaac

SEQ ID NO: 678113 - RNA, 19 nt, Artificial Sequence
  Description of Artificial Sequence: Synthetic oligonucleotide
  Antisense strand to SEQ ID NO: 678112
guuuagacaaaccucgugg

SEQ ID NO: 678114 - RNA, 19 nt, Artificial Sequence
  Description of Artificial Sequence: Synthetic oligonucleotide
  Sense strand starting at position 580 of SEQ ID NO: 585920
ucuaaacuugcggaugaaa

SEQ ID NO: 678115 - RNA, 19 nt, Artificial Sequence
  Description of Artificial Sequence: Synthetic oligonucleotide
  Antisense strand to SEQ ID NO: 678114
uuucauccgcaaguuuaga

SEQ ID NO: 678116 - RNA, 19 nt, Artificial Sequence
  Description of Artificial Sequence: Synthetic oligonucleotide
  Sense strand starting at position 582 of SEQ ID NO: 585920
uaaacuugcggaugaaaua

SEQ ID NO: 678117 - RNA, 19 nt, Artificial Sequence
  Description of Artificial Sequence: Synthetic oligonucleotide
  Antisense strand to SEQ ID NO: 678116
uauuucauccgcaaguuua

SEQ ID NO: 678118 - RNA, 19 nt, Artificial Sequence
  Description of Artificial Sequence: Synthetic oligonucleotide
  Sense strand starting at position 604 of SEQ ID NO: 585920
uuuagugaggcuuaacuag

SEQ ID NO: 678119 - RNA, 19 nt, Artificial Sequence
  Description of Artificial Sequence: Synthetic oligonucleotide
  Antisense strand to SEQ ID NO: 678118
cuaguuaagccucacuaaa

SEQ ID NO: 678120 - RNA, 19 nt, Artificial Sequence
  Description of Artificial Sequence: Synthetic oligonucleotide
  Sense strand starting at position 714 of SEQ ID NO: 585920
ccagguagcuuagugaaga

SEQ ID NO: 678121 - RNA, 19 nt, Artificial Sequence
  Description of Artificial Sequence: Synthetic oligonucleotide
  Antisense strand to SEQ ID NO: 678120
ucuucacuaagcuaccugg

SEQ ID NO: 678122 - RNA, 19 nt, Artificial Sequence
  Description of Artificial Sequence: Synthetic oligonucleotide
  Sense strand starting at position 833 of SEQ ID NO: 585920
gggcauuagauucgaauug

SEQ ID NO: 678123 - RNA, 19 nt, Artificial Sequence
  Description of Artificial Sequence: Synthetic oligonucleotide
  Antisense strand to SEQ ID NO: 678122
caauucgaaucuaaugccc

SEQ ID NO: 678124 - RNA, 19 nt, Artificial Sequence
  Description of Artificial Sequence: Synthetic oligonucleotide
  Sense strand starting at position 922 of SEQ ID NO: 585920
cgcgguucugaugaugaaa

SEQ ID NO: 678125 - RNA, 19 nt, Artificial Sequence
  Description of Artificial Sequence: Synthetic oligonucleotide
  Antisense strand to SEQ ID NO: 678124
uuucaucaucagaaccgcg

SEQ ID NO: 678126 - RNA, 19 nt, Artificial Sequence
  Description of Artificial Sequence: Synthetic oligonucleotide
  Sense strand starting at position 1001 of SEQ ID NO: 585920
agggaaagugucuggaagu

SEQ ID NO: 678127 - RNA, 19 nt, Artificial Sequence
  Description of Artificial Sequence: Synthetic oligonucleotide
  Antisense strand to SEQ ID NO: 678126
acuuccagacacuuucccu

SEQ ID NO: 678128 - RNA, 19 nt, Artificial Sequence
  Description of Artificial Sequence: Synthetic oligonucleotide
  Sense strand starting at position 1258 of SEQ ID NO: 585920
cuaaacuucgggcaaacuu

SEQ ID NO: 678129 - RNA, 19 nt, Artificial Sequence
  Description of Artificial Sequence: Synthetic oligonucleotide
  Antisense strand to SEQ ID NO: 678128
aaguuugcccgaaguuuag

SEQ ID NO: 678130 - RNA, 19 nt, Artificial Sequence
  Description of Artificial Sequence: Synthetic oligonucleotide
  Sense strand starting at position 1346 of SEQ ID NO: 585920
ccuagaucucccgaaaucu

SEQ ID NO: 678131 - RNA, 19 nt, Artificial Sequence
  Description of Artificial Sequence: Synthetic oligonucleotide
  Antisense strand to SEQ ID NO: 678130
agauuucgggagaucuagg

SEQ ID NO: 678132 - RNA, 19 nt, Artificial Sequence
  Description of Artificial Sequence: Synthetic oligonucleotide
  Sense strand starting at position 1519 of SEQ ID NO: 585920
ccaaguuucuacuugaggu

SEQ ID NO: 678133 - RNA, 19 nt, Artificial Sequence
  Description of Artificial Sequence: Synthetic oligonucleotide
  Antisense strand to SEQ ID NO: 678132
accucaaguagaaacuugg

SEQ ID NO: 678134 - RNA, 19 nt, Artificial Sequence
  Description of Artificial Sequence: Synthetic oligonucleotide
  Sense strand starting at position 1955 of SEQ ID NO: 585920
ccuggaaucgcuuaggcaa

SEQ ID NO: 678135 - RNA, 19 nt, Artificial Sequence
  Description of Artificial Sequence: Synthetic oligonucleotide
  Antisense strand to SEQ ID NO: 678134
uugccuaagcgauuccagg

SEQ ID NO: 678136 - RNA, 19 nt, Artificial Sequence
  Description of Artificial Sequence: Synthetic oligonucleotide
  Sense strand starting at position 2118 of SEQ ID NO: 585920
gauuuauagccgcggcaau

SEQ ID NO: 678137 - RNA, 19 nt, Artificial Sequence
  Description of Artificial Sequence: Synthetic oligonucleotide
  Antisense strand to SEQ ID NO: 678136
auugccgcggcuauaaauc

SEQ ID NO: 678138 - RNA, 19 nt, Artificial Sequence
  Description of Artificial Sequence: Synthetic oligonucleotide
  Sense strand starting at position 2538 of SEQ ID NO: 585920
augaaacuguugcucaaua

SEQ ID NO: 678139 - RNA, 19 nt, Artificial Sequence
  Description of Artificial Sequence: Synthetic oligonucleotide
  Antisense strand to SEQ ID NO: 678138
uauugagcaacaguuucau

SEQ ID NO: 678140 - RNA, 19 nt, Artificial Sequence
  Description of Artificial Sequence: Synthetic oligonucleotide
  Sense strand starting at position 2539 of SEQ ID NO: 585920
ugaaacuguugcucaauag

SEQ ID NO: 678141 - RNA, 19 nt, Artificial Sequence
  Description of Artificial Sequence: Synthetic oligonucleotide
  Antisense strand to SEQ ID NO: 678140
cuauugagcaacaguuuca

SEQ ID NO: 678142 - RNA, 19 nt, Artificial Sequence
  Description of Artificial Sequence: Synthetic oligonucleotide
  Sense strand starting at position 2543 of SEQ ID NO: 585920
acuguugcucaauagguga

SEQ ID NO: 678143 - RNA, 19 nt, Artificial Sequence
  Description of Artificial Sequence: Synthetic oligonucleotide
  Antisense strand to SEQ ID NO: 678142
ucaccuauugagcaacagu

SEQ ID NO: 678144 - RNA, 19 nt, Artificial Sequence
  Description of Artificial Sequence: Synthetic oligonucleotide
  Sense strand starting at position 2546 of SEQ ID NO: 585920
guugcucaauaggugaaga

SEQ ID NO: 678145 - RNA, 19 nt, Artificial Sequence
  Description of Artificial Sequence: Synthetic oligonucleotide
  Antisense strand to SEQ ID NO: 678144
ucuucaccuauugagcaac

SEQ ID NO: 678146 - RNA, 19 nt, Artificial Sequence
  Description of Artificial Sequence: Synthetic oligonucleotide
  Sense strand starting at position 2687 of SEQ ID NO: 585920
uuagcacuucuguacaaag

SEQ ID NO: 678147 - RNA, 19 nt, Artificial Sequence
  Description of Artificial Sequence: Synthetic oligonucleotide
  Antisense strand to SEQ ID NO: 678146
cuuuguacagaagugcuaa

SEQ ID NO: 678148 - RNA, 19 nt, Artificial Sequence
  Description of Artificial Sequence: Synthetic oligonucleotide
  Sense strand starting at position 2762 of SEQ ID NO: 585920
gcuuccagcgcuuuaucuu

SEQ ID NO: 678149 - RNA, 19 nt, Artificial Sequence
  Description of Artificial Sequence: Synthetic oligonucleotide
  Antisense strand to SEQ ID NO: 678148
aagauaaagcgcuggaagc

SEQ ID NO: 678150 - RNA, 19 nt, Artificial Sequence
  Description of Artificial Sequence: Synthetic oligonucleotide
  Sense strand starting at position 2840 of SEQ ID NO: 585920
ugagguuugguuuaggguu

SEQ ID NO: 678151 - RNA, 19 nt, Artificial Sequence
  Description of Artificial Sequence: Synthetic oligonucleotide
  Antisense strand to SEQ ID NO: 678150
aacccuaaaccaaaccuca

SEQ ID NO: 678152 - RNA, 19 nt, Artificial Sequence
  Description of Artificial Sequence: Synthetic oligonucleotide
  Sense strand starting at position 2857 of SEQ ID NO: 585920
uuugcuuucccaugacaga

SEQ ID NO: 678153 - RNA, 19 nt, Artificial Sequence
  Description of Artificial Sequence: Synthetic oligonucleotide
  Antisense strand to SEQ ID NO: 678152
ucugucaugggaaagcaaa

SEQ ID NO: 678154 - RNA, 19 nt, Artificial Sequence
  Description of Artificial Sequence: Synthetic oligonucleotide
  Sense strand starting at position 2858 of SEQ ID NO: 585920
uugcuuucccaugacagau

SEQ ID NO: 678155 - RNA, 19 nt, Artificial Sequence
  Description of Artificial Sequence: Synthetic oligonucleotide
  Antisense strand to SEQ ID NO: 678154
aucugucaugggaaagcaa

SEQ ID NO: 678156 - RNA, 19 nt, Artificial Sequence
  Description of Artificial Sequence: Synthetic oligonucleotide
  Sense strand starting at position 3041 of SEQ ID NO: 585920
cggcuaugagaucgaauug

SEQ ID NO: 678157 - RNA, 19 nt, Artificial Sequence
  Description of Artificial Sequence: Synthetic oligonucleotide
  Antisense strand to SEQ ID NO: 678156
caauucgaucucauagccg

SEQ ID NO: 678158 - RNA, 19 nt, Artificial Sequence
  Description of Artificial Sequence: Synthetic oligonucleotide
  Sense strand starting at position 3042 of SEQ ID NO: 585920
ggcuaugagaucgaauugu

SEQ ID NO: 678159 - RNA, 19 nt, Artificial Sequence
  Description of Artificial Sequence: Synthetic oligonucleotide
  Antisense strand to SEQ ID NO: 678158
acaauucgaucucauagcc

SEQ ID NO: 678160 - RNA, 19 nt, Artificial Sequence
  Description of Artificial Sequence: Synthetic oligonucleotide
  Sense strand starting at position 3154 of SEQ ID NO: 585920
aaucgucuucucugacaug

SEQ ID NO: 678161 - RNA, 19 nt, Artificial Sequence
  Description of Artificial Sequence: Synthetic oligonucleotide
  Antisense strand to SEQ ID NO: 678160
caugucagagaagacgauu

SEQ ID NO: 678162 - RNA, 19 nt, Artificial Sequence
  Description of Artificial Sequence: Synthetic oligonucleotide
  Sense strand starting at position 3173 of SEQ ID NO: 585920
ucaggcaaauauguguaaa

SEQ ID NO: 678163 - RNA, 19 nt, Artificial Sequence
  Description of Artificial Sequence: Synthetic oligonucleotide
  Antisense strand to SEQ ID NO: 678162
uuuacacauauuugccuga

SEQ ID NO: 678164 - RNA, 19 nt, Artificial Sequence
  Description of Artificial Sequence: Synthetic oligonucleotide
  Sense strand starting at position 3352 of SEQ ID NO: 585920
cccuuaucgguuccgcauu

SEQ ID NO: 678165 - RNA, 19 nt, Artificial Sequence
  Description of Artificial Sequence: Synthetic oligonucleotide
  Antisense strand to SEQ ID NO: 678164
aaugcggaaccgauaaggg

SEQ ID NO: 678166 - RNA, 19 nt, Artificial Sequence
  Description of Artificial Sequence: Synthetic oligonucleotide
  Sense strand starting at position 3567 of SEQ ID NO: 585920
uuuccagacgguggaaaua

SEQ ID NO: 678167 - RNA, 19 nt, Artificial Sequence
  Description of Artificial Sequence: Synthetic oligonucleotide
  Antisense strand to SEQ ID NO: 678166
uauuuccaccgucuggaaa

SEQ ID NO: 678168 - RNA, 19 nt, Artificial Sequence
  Description of Artificial Sequence: Synthetic oligonucleotide
  Sense strand starting at position 3580 of SEQ ID NO: 585920
gaaauagggcggugacuaa

SEQ ID NO: 678169 - RNA, 19 nt, Artificial Sequence
  Description of Artificial Sequence: Synthetic oligonucleotide
  Antisense strand to SEQ ID NO: 678168
uuagucaccgcccuauuuc

SEQ ID NO: 678170 - RNA, 19 nt, Artificial Sequence
  Description of Artificial Sequence: Synthetic oligonucleotide
  Sense strand starting at position 3660 of SEQ ID NO: 585920
ggucgcugugcucucuuaa

SEQ ID NO: 678171 - RNA, 19 nt, Artificial Sequence
  Description of Artificial Sequence: Synthetic oligonucleotide
  Antisense strand to SEQ ID NO: 678170
uuaagagagcacagcgacc

SEQ ID NO: 678172 - RNA, 19 nt, Artificial Sequence
  Description of Artificial Sequence: Synthetic oligonucleotide
  Sense strand starting at position 3661 of SEQ ID NO: 585920
gucgcugugcucucuuaaa

SEQ ID NO: 678173 - RNA, 19 nt, Artificial Sequence
  Description of Artificial Sequence: Synthetic oligonucleotide
  Antisense strand to SEQ ID NO: 678172
uuuaagagagcacagcgac

SEQ ID NO: 678174 - RNA, 19 nt, Artificial Sequence
  Description of Artificial Sequence: Synthetic oligonucleotide
  Sense strand starting at position 3905 of SEQ ID NO: 585920
ggguuaagcgcgaagcuaa

SEQ ID NO: 678175 - RNA, 19 nt, Artificial Sequence
  Description of Artificial Sequence: Synthetic oligonucleotide
  Antisense strand to SEQ ID NO: 678174
uuagcuucgcgcuuaaccc

SEQ ID NO: 678176 - RNA, 19 nt, Artificial Sequence
  Description of Artificial Sequence: Synthetic oligonucleotide
  Sense strand starting at position 3 of SEQ ID NO: 585921
uggaaacagcuuugacuuu

SEQ ID NO: 678177 - RNA, 19 nt, Artificial Sequence
  Description of Artificial Sequence: Synthetic oligonucleotide
  Antisense strand to SEQ ID NO: 678176
aaagucaaagcuguuucca

SEQ ID NO: 678178 - RNA, 19 nt, Artificial Sequence
  Description of Artificial Sequence: Synthetic oligonucleotide
  Sense strand starting at position 4 of SEQ ID NO: 585921
ggaaacagcuuugacuuua

SEQ ID NO: 678179 - RNA, 19 nt, Artificial Sequence
  Description of Artificial Sequence: Synthetic oligonucleotide
  Antisense strand to SEQ ID NO: 678178
uaaagucaaagcuguuucc

SEQ ID NO: 678180 - RNA, 19 nt, Artificial Sequence
  Description of Artificial Sequence: Synthetic oligonucleotide
  Sense strand starting at position 202 of SEQ ID NO: 585921
ggguuucggccucugcgaa

SEQ ID NO: 678181 - RNA, 19 nt, Artificial Sequence
  Description of Artificial Sequence: Synthetic oligonucleotide
  Antisense strand to SEQ ID NO: 678180
uucgcagaggccgaaaccc

SEQ ID NO: 678182 - RNA, 19 nt, Artificial Sequence
  Description of Artificial Sequence: Synthetic oligonucleotide
  Sense strand starting at position 203 of SEQ ID NO: 585921
gguuucggccucugcgaaa

SEQ ID NO: 678183 - RNA, 19 nt, Artificial Sequence
  Description of Artificial Sequence: Synthetic oligonucleotide
  Antisense strand to SEQ ID NO: 678182
uuucgcagaggccgaaacc

SEQ ID NO: 678184 - RNA, 19 nt, Artificial Sequence
  Description of Artificial Sequence: Synthetic oligonucleotide
  Sense strand starting at position 261 of SEQ ID NO: 585921
caguaugaauuguccuaug

SEQ ID NO: 678185 - RNA, 19 nt, Artificial Sequence
  Description of Artificial Sequence: Synthetic oligonucleotide
  Antisense strand to SEQ ID NO: 678184
cauaggacaauucauacug

SEQ ID NO: 678186 - RNA, 19 nt, Artificial Sequence
  Description of Artificial Sequence: Synthetic oligonucleotide
  Sense strand starting at position 264 of SEQ ID NO: 585921
uaugaauuguccuaugaga

SEQ ID NO: 678187 - RNA, 19 nt, Artificial Sequence
  Description of Artificial Sequence: Synthetic oligonucleotide
  Antisense strand to SEQ ID NO: 678186
ucucauaggacaauucaua

SEQ ID NO: 678188 - RNA, 19 nt, Artificial Sequence
  Description of Artificial Sequence: Synthetic oligonucleotide
  Sense strand starting at position 266 of SEQ ID NO: 585921
ugaauuguccuaugagacu

SEQ ID NO: 678189 - RNA, 19 nt, Artificial Sequence
  Description of Artificial Sequence: Synthetic oligonucleotide
  Antisense strand to SEQ ID NO: 678188
agucucauaggacaauuca

SEQ ID NO: 678190 - RNA, 19 nt, Artificial Sequence
  Description of Artificial Sequence: Synthetic oligonucleotide
  Sense strand starting at position 538 of SEQ ID NO: 585921
aauuucugguuucgaguga

SEQ ID NO: 678191 - RNA, 19 nt, Artificial Sequence
  Description of Artificial Sequence: Synthetic oligonucleotide
  Antisense strand to SEQ ID NO: 678190
ucacucgaaaccagaaauu

SEQ ID NO: 678192 - RNA, 19 nt, Artificial Sequence
  Description of Artificial Sequence: Synthetic oligonucleotide
  Sense strand starting at position 539 of SEQ ID NO: 585921
auuucugguuucgagugaa

SEQ ID NO: 678193 - RNA, 19 nt, Artificial Sequence
  Description of Artificial Sequence: Synthetic oligonucleotide
  Antisense strand to SEQ ID NO: 678192
uucacucgaaaccagaaau

SEQ ID NO: 678194 - RNA, 19 nt, Artificial Sequence
  Description of Artificial Sequence: Synthetic oligonucleotide
  Sense strand starting at position 542 of SEQ ID NO: 585921
ucugguuucgagugaaguc

SEQ ID NO: 678195 - RNA, 19 nt, Artificial Sequence
  Description of Artificial Sequence: Synthetic oligonucleotide
  Antisense strand to SEQ ID NO: 678194
gacuucacucgaaaccaga

SEQ ID NO: 678196 - RNA, 19 nt, Artificial Sequence
  Description of Artificial Sequence: Synthetic oligonucleotide
  Sense strand starting at position 543 of SEQ ID NO: 585921
cugguuucgagugaaguca

SEQ ID NO: 678197 - RNA, 19 nt, Artificial Sequence
  Description of Artificial Sequence: Synthetic oligonucleotide
  Antisense strand to SEQ ID NO: 678196
ugacuucacucgaaaccag

SEQ ID NO: 678198 - RNA, 19 nt, Artificial Sequence
  Description of Artificial Sequence: Synthetic oligonucleotide
  Sense strand starting at position 712 of SEQ ID NO: 585921
ucggacucauugcucauua

SEQ ID NO: 678199 - RNA, 19 nt, Artificial Sequence
  Description of Artificial Sequence: Synthetic oligonucleotide
  Antisense strand to SEQ ID NO: 678198
uaaugagcaaugaguccga

SEQ ID NO: 678200 - RNA, 19 nt, Artificial Sequence
  Description of Artificial Sequence: Synthetic oligonucleotide
  Sense strand starting at position 714 of SEQ ID NO: 585921
ggacucauugcucauuaca

SEQ ID NO: 678201 - RNA, 19 nt, Artificial Sequence
  Description of Artificial Sequence: Synthetic oligonucleotide
  Antisense strand to SEQ ID NO: 678200
uguaaugagcaaugagucc

SEQ ID NO: 678202 - RNA, 19 nt, Artificial Sequence
  Description of Artificial Sequence: Synthetic oligonucleotide
  Sense strand starting at position 716 of SEQ ID NO: 585921
acucauugcucauuacagu

SEQ ID NO: 678203 - RNA, 19 nt, Artificial Sequence
  Description of Artificial Sequence: Synthetic oligonucleotide
  Antisense strand to SEQ ID NO: 678202
acuguaaugagcaaugagu

SEQ ID NO: 678204 - RNA, 19 nt, Artificial Sequence
  Description of Artificial Sequence: Synthetic oligonucleotide
  Sense strand starting at position 727 of SEQ ID NO: 585921
auuacaguguugguuguaa

SEQ ID NO: 678205 - RNA, 19 nt, Artificial Sequence
  Description of Artificial Sequence: Synthetic oligonucleotide
  Antisense strand to SEQ ID NO: 678204
uuacaaccaacacuguaau

SEQ ID NO: 678206 - RNA, 19 nt, Artificial Sequence
  Description of Artificial Sequence: Synthetic oligonucleotide
  Sense strand starting at position 1053 of SEQ ID NO: 585921
uacuuagaacuucgugaag

SEQ ID NO: 678207 - RNA, 19 nt, Artificial Sequence
  Description of Artificial Sequence: Synthetic oligonucleotide
  Antisense strand to SEQ ID NO: 678206
cuucacgaaguucuaagua

SEQ ID NO: 678208 - RNA, 19 nt, Artificial Sequence
  Description of Artificial Sequence: Synthetic oligonucleotide
  Sense strand starting at position 1055 of SEQ ID NO: 585921
cuuagaacuucgugaagca

SEQ ID NO: 678209 - RNA, 19 nt, Artificial Sequence
  Description of Artificial Sequence: Synthetic oligonucleotide
  Antisense strand to SEQ ID NO: 678208
ugcuucacgaaguucuaag

SEQ ID NO: 678210 - RNA, 19 nt, Artificial Sequence
  Description of Artificial Sequence: Synthetic oligonucleotide
  Sense strand starting at position 1101 of SEQ ID NO: 585921
ugggaucaguggucuuaag

SEQ ID NO: 678211 - RNA, 19 nt, Artificial Sequence
  Description of Artificial Sequence: Synthetic oligonucleotide
  Antisense strand to SEQ ID NO: 678210
cuuaagaccacugauccca

SEQ ID NO: 678212 - RNA, 19 nt, Artificial Sequence
  Description of Artificial Sequence: Synthetic oligonucleotide
  Sense strand starting at position 1191 of SEQ ID NO: 585921
agggaaccgcuuuagaagu

SEQ ID NO: 678213 - RNA, 19 nt, Artificial Sequence
  Description of Artificial Sequence: Synthetic oligonucleotide
  Antisense strand to SEQ ID NO: 678212
acuucuaaagcgguucccu

SEQ ID NO: 678214 - RNA, 19 nt, Artificial Sequence
  Description of Artificial Sequence: Synthetic oligonucleotide
  Sense strand starting at position 1271 of SEQ ID NO: 585921
uauuaaagaucggagagga

SEQ ID NO: 678215 - RNA, 19 nt, Artificial Sequence
  Description of Artificial Sequence: Synthetic oligonucleotide
  Antisense strand to SEQ ID NO: 678214
uccucuccgaucuuuaaua

SEQ ID NO: 678216 - RNA, 19 nt, Artificial Sequence
  Description of Artificial Sequence: Synthetic oligonucleotide
  Sense strand starting at position 1341 of SEQ ID NO: 585921
ggcccucaaucucgaugaa

SEQ ID NO: 678217 - RNA, 19 nt, Artificial Sequence
  Description of Artificial Sequence: Synthetic oligonucleotide
  Antisense strand to SEQ ID NO: 678216
uucaucgagauugagggcc

SEQ ID NO: 678218 - RNA, 19 nt, Artificial Sequence
  Description of Artificial Sequence: Synthetic oligonucleotide
  Sense strand starting at position 1344 of SEQ ID NO: 585921
ccucaaucucgaugaagau

SEQ ID NO: 678219 - RNA, 19 nt, Artificial Sequence
  Description of Artificial Sequence: Synthetic oligonucleotide
  Antisense strand to SEQ ID NO: 678218
aucuucaucgagauugagg

SEQ ID NO: 678220 - RNA, 19 nt, Artificial Sequence
  Description of Artificial Sequence: Synthetic oligonucleotide
  Sense strand starting at position 1800 of SEQ ID NO: 585921
ggagcuacucucuggguga

SEQ ID NO: 678221 - RNA, 19 nt, Artificial Sequence
  Description of Artificial Sequence: Synthetic oligonucleotide
  Antisense strand to SEQ ID NO: 678220
ucacccagagaguagcucc

SEQ ID NO: 678222 - RNA, 19 nt, Artificial Sequence
  Description of Artificial Sequence: Synthetic oligonucleotide
  Sense strand starting at position 2010 of SEQ ID NO: 585921
gagaucucccucuaauggu

SEQ ID NO: 678223 - RNA, 19 nt, Artificial Sequence
  Description of Artificial Sequence: Synthetic oligonucleotide
  Antisense strand to SEQ ID NO: 678222
accauuagagggagaucuc

SEQ ID NO: 678224 - RNA, 19 nt, Artificial Sequence
  Description of Artificial Sequence: Synthetic oligonucleotide
  Sense strand starting at position 2942 of SEQ ID NO: 585921
guguuaaucugcucuaguu

SEQ ID NO: 678225 - RNA, 19 nt, Artificial Sequence
  Description of Artificial Sequence: Synthetic oligonucleotide
  Antisense strand to SEQ ID NO: 678224
aacuagagcagauuaacac

SEQ ID NO: 678226 - RNA, 19 nt, Artificial Sequence
  Description of Artificial Sequence: Synthetic oligonucleotide
  Sense strand starting at position 2980 of SEQ ID NO: 585921
uaauuaaagcagggagagu

SEQ ID NO: 678227 - RNA, 19 nt, Artificial Sequence
  Description of Artificial Sequence: Synthetic oligonucleotide
  Antisense strand to SEQ ID NO: 678226
acucucccugcuuuaauua

SEQ ID NO: 678228 - RNA, 19 nt, Artificial Sequence
  Description of Artificial Sequence: Synthetic oligonucleotide
  Sense strand starting at position 3005 of SEQ ID NO: 585921
augauuuggugaugcuacu

SEQ ID NO: 678229 - RNA, 19 nt, Artificial Sequence
  Description of Artificial Sequence: Synthetic oligonucleotide
  Antisense strand to SEQ ID NO: 678228
aguagcaucaccaaaucau

SEQ ID NO: 678230 - RNA, 19 nt, Artificial Sequence
  Description of Artificial Sequence: Synthetic oligonucleotide
  Sense strand starting at position 3345 of SEQ ID NO: 585921
gccucagaguugcucuagu

SEQ ID NO: 678231 - RNA, 19 nt, Artificial Sequence
  Description of Artificial Sequence: Synthetic oligonucleotide
  Antisense strand to SEQ ID NO: 678230
acuagagcaacucugaggc

SEQ ID NO: 678232 - RNA, 19 nt, Artificial Sequence
  Description of Artificial Sequence: Synthetic oligonucleotide
  Sense strand starting at position 3381 of SEQ ID NO: 585921
cugggcuuguuucucgaaa

SEQ ID NO: 678233 - RNA, 19 nt, Artificial Sequence
  Description of Artificial Sequence: Synthetic oligonucleotide
  Antisense strand to SEQ ID NO: 678232
uuucgagaaacaagcccag

SEQ ID NO: 678234 - RNA, 19 nt, Artificial Sequence
  Description of Artificial Sequence: Synthetic oligonucleotide
  Sense strand starting at position 3463 of SEQ ID NO: 585921
ggagcauucccucacaggu

SEQ ID NO: 678235 - RNA, 19 nt, Artificial Sequence
  Description of Artificial Sequence: Synthetic oligonucleotide
  Antisense strand to SEQ ID NO: 678234
accugugagggaaugcucc

SEQ ID NO: 678236 - RNA, 19 nt, Artificial Sequence
  Description of Artificial Sequence: Synthetic oligonucleotide
  Sense strand starting at position 3692 of SEQ ID NO: 585921
agcacaauuccucggcuga

SEQ ID NO: 678237 - RNA, 19 nt, Artificial Sequence
  Description of Artificial Sequence: Synthetic oligonucleotide
  Antisense strand to SEQ ID NO: 678236
ucagccgaggaauugugcu

SEQ ID NO: 678238 - RNA, 19 nt, Artificial Sequence
  Description of Artificial Sequence: Synthetic oligonucleotide
  Sense strand starting at position 3693 of SEQ ID NO: 585921
gcacaauuccucggcugaa

SEQ ID NO: 678239 - RNA, 19 nt, Artificial Sequence
  Description of Artificial Sequence: Synthetic oligonucleotide
  Antisense strand to SEQ ID NO: 678238
uucagccgaggaauugugc

SEQ ID NO: 678240 - RNA, 19 nt, Artificial Sequence
  Description of Artificial Sequence: Synthetic oligonucleotide
  Sense strand starting at position 3753 of SEQ ID NO: 585921
ucgacuuuccagggcuaga

SEQ ID NO: 678241 - RNA, 19 nt, Artificial Sequence
  Description of Artificial Sequence: Synthetic oligonucleotide
  Antisense strand to SEQ ID NO: 678240
ucuagcccuggaaagucga

SEQ ID NO: 678242 - RNA, 19 nt, Artificial Sequence
  Description of Artificial Sequence: Synthetic oligonucleotide
  Sense strand starting at position 3926 of SEQ ID NO: 585921
ccgcggugugcuuaaggga

SEQ ID NO: 678243 - RNA, 19 nt, Artificial Sequence
  Description of Artificial Sequence: Synthetic oligonucleotide
  Antisense strand to SEQ ID NO: 678242
ucccuuaagcacaccgcgg

SEQ ID NO: 678244 - RNA, 19 nt, Artificial Sequence
  Description of Artificial Sequence: Synthetic oligonucleotide
  Sense strand starting at position 3927 of SEQ ID NO: 585921
cgcggugugcuuaagggaa

SEQ ID NO: 678245 - RNA, 19 nt, Artificial Sequence
  Description of Artificial Sequence: Synthetic oligonucleotide
  Antisense strand to SEQ ID NO: 678244
uucccuuaagcacaccgcg

SEQ ID NO: 678246 - RNA, 19 nt, Artificial Sequence
  Description of Artificial Sequence: Synthetic oligonucleotide
  Sense strand starting at position 16 of SEQ ID NO: 585922
cacuuugggcgcuaauauu

SEQ ID NO: 678247 - RNA, 19 nt, Artificial Sequence
  Description of Artificial Sequence: Synthetic oligonucleotide
  Antisense strand to SEQ ID NO: 678246
aauauuagcgcccaaagug

SEQ ID NO: 678248 - RNA, 19 nt, Artificial Sequence
  Description of Artificial Sequence: Synthetic oligonucleotide
  Sense strand starting at position 24 of SEQ ID NO: 585922
gcgcuaauauucuuuagga

SEQ ID NO: 678249 - RNA, 19 nt, Artificial Sequence
  Description of Artificial Sequence: Synthetic oligonucleotide
  Antisense strand to SEQ ID NO: 678248
uccuaaagaauauuagcgc

SEQ ID NO: 678250 - RNA, 19 nt, Artificial Sequence
  Description of Artificial Sequence: Synthetic oligonucleotide
  Sense strand starting at position 25 of SEQ ID NO: 585922
cgcuaauauucuuuaggac

SEQ ID NO: 678251 - RNA, 19 nt, Artificial Sequence
  Description of Artificial Sequence: Synthetic oligonucleotide
  Antisense strand to SEQ ID NO: 678250
guccuaaagaauauuagcg

SEQ ID NO: 678252 - RNA, 19 nt, Artificial Sequence
  Description of Artificial Sequence: Synthetic oligonucleotide
  Sense strand starting at position 26 of SEQ ID NO: 585922
gcuaauauucuuuaggaca

SEQ ID NO: 678253 - RNA, 19 nt, Artificial Sequence
  Description of Artificial Sequence: Synthetic oligonucleotide
  Antisense strand to SEQ ID NO: 678252
uguccuaaagaauauuagc

SEQ ID NO: 678254 - RNA, 19 nt, Artificial Sequence
  Description of Artificial Sequence: Synthetic oligonucleotide
  Sense strand starting at position 74 of SEQ ID NO: 585922
ccgccuguuaaggaaagaa

SEQ ID NO: 678255 - RNA, 19 nt, Artificial Sequence
  Description of Artificial Sequence: Synthetic oligonucleotide
  Antisense strand to SEQ ID NO: 678254
uucuuuccuuaacaggcgg

SEQ ID NO: 678256 - RNA, 19 nt, Artificial Sequence
  Description of Artificial Sequence: Synthetic oligonucleotide
  Sense strand starting at position 143 of SEQ ID NO: 585922
cguuacagucgauacacaa

SEQ ID NO: 678257 - RNA, 19 nt, Artificial Sequence
  Description of Artificial Sequence: Synthetic oligonucleotide
  Antisense strand to SEQ ID NO: 678256
uuguguaucgacuguaacg

SEQ ID NO: 678258 - RNA, 19 nt, Artificial Sequence
  Description of Artificial Sequence: Synthetic oligonucleotide
  Sense strand starting at position 530 of SEQ ID NO: 585922
ccaccuuucgucugaccua

SEQ ID NO: 678259 - RNA, 19 nt, Artificial Sequence
  Description of Artificial Sequence: Synthetic oligonucleotide
  Antisense strand to SEQ ID NO: 678258
uaggucagacgaaaggugg

SEQ ID NO: 678260 - RNA, 19 nt, Artificial Sequence
  Description of Artificial Sequence: Synthetic oligonucleotide
  Sense strand starting at position 760 of SEQ ID NO: 585922
ccagaccauuccgcuuaaa

SEQ ID NO: 678261 - RNA, 19 nt, Artificial Sequence
  Description of Artificial Sequence: Synthetic oligonucleotide
  Antisense strand to SEQ ID NO: 678260
uuuaagcggaauggucugg

SEQ ID NO: 678262 - RNA, 19 nt, Artificial Sequence
  Description of Artificial Sequence: Synthetic oligonucleotide
  Sense strand starting at position 1068 of SEQ ID NO: 585922
gcuagagacccguacgcau

SEQ ID NO: 678263 - RNA, 19 nt, Artificial Sequence
  Description of Artificial Sequence: Synthetic oligonucleotide
  Antisense strand to SEQ ID NO: 678262
augcguacgggucucuagc

SEQ ID NO: 678264 - RNA, 19 nt, Artificial Sequence
  Description of Artificial Sequence: Synthetic oligonucleotide
  Sense strand starting at position 1085 of SEQ ID NO: 585922
auugaacgugggcagaaau

SEQ ID NO: 678265 - RNA, 19 nt, Artificial Sequence
  Description of Artificial Sequence: Synthetic oligonucleotide
  Antisense strand to SEQ ID NO: 678264
auuucugcccacguucaau

SEQ ID NO: 678266 - RNA, 19 nt, Artificial Sequence
  Description of Artificial Sequence: Synthetic oligonucleotide
  Sense strand starting at position 1152 of SEQ ID NO: 585922
cgcagugacccucaaggaa

SEQ ID NO: 678267 - RNA, 19 nt, Artificial Sequence
  Description of Artificial Sequence: Synthetic oligonucleotide
  Antisense strand to SEQ ID NO: 678266
uuccuugagggucacugcg

SEQ ID NO: 678268 - RNA, 19 nt, Artificial Sequence
  Description of Artificial Sequence: Synthetic oligonucleotide
  Sense strand starting at position 1282 of SEQ ID NO: 585922
ggaaccauuuguuaucaau

SEQ ID NO: 678269 - RNA, 19 nt, Artificial Sequence
  Description of Artificial Sequence: Synthetic oligonucleotide
  Antisense strand to SEQ ID NO: 678268
auugauaacaaaugguucc

SEQ ID NO: 678270 - RNA, 19 nt, Artificial Sequence
  Description of Artificial Sequence: Synthetic oligonucleotide
  Sense strand starting at position 1645 of SEQ ID NO: 585922
accggaaaucuacgaguaa

SEQ ID NO: 678271 - RNA, 19 nt, Artificial Sequence
  Description of Artificial Sequence: Synthetic oligonucleotide
  Antisense strand to SEQ ID NO: 678270
uuacucguagauuuccggu

SEQ ID NO: 678272 - RNA, 19 nt, Artificial Sequence
  Description of Artificial Sequence: Synthetic oligonucleotide
  Sense strand starting at position 1742 of SEQ ID NO: 585922
ggugucgacucaccucaua

SEQ ID NO: 678273 - RNA, 19 nt, Artificial Sequence
  Description of Artificial Sequence: Synthetic oligonucleotide
  Antisense strand to SEQ ID NO: 678272
uaugaggugagucgacacc

SEQ ID NO: 678274 - RNA, 19 nt, Artificial Sequence
  Description of Artificial Sequence: Synthetic oligonucleotide
  Sense strand starting at position 1745 of SEQ ID NO: 585922
gucgacucaccucauagau

SEQ ID NO: 678275 - RNA, 19 nt, Artificial Sequence
  Description of Artificial Sequence: Synthetic oligonucleotide
  Antisense strand to SEQ ID NO: 678274
aucuaugaggugagucgac

SEQ ID NO: 678276 - RNA, 19 nt, Artificial Sequence
  Description of Artificial Sequence: Synthetic oligonucleotide
  Sense strand starting at position 2155 of SEQ ID NO: 585922
agaguuguucagggugauu

SEQ ID NO: 678277 - RNA, 19 nt, Artificial Sequence
  Description of Artificial Sequence: Synthetic oligonucleotide
  Antisense strand to SEQ ID NO: 678276
aaucacccugaacaacucu

SEQ ID NO: 678278 - RNA, 19 nt, Artificial Sequence
  Description of Artificial Sequence: Synthetic oligonucleotide
  Sense strand starting at position 2157 of SEQ ID NO: 585922
aguuguucagggugauuaa

SEQ ID NO: 678279 - RNA, 19 nt, Artificial Sequence
  Description of Artificial Sequence: Synthetic oligonucleotide
  Antisense strand to SEQ ID NO: 678278
uuaaucacccugaacaacu

SEQ ID NO: 678280 - RNA, 19 nt, Artificial Sequence
  Description of Artificial Sequence: Synthetic oligonucleotide
  Sense strand starting at position 2158 of SEQ ID NO: 585922
guuguucagggugauuaau

SEQ ID NO: 678281 - RNA, 19 nt, Artificial Sequence
  Description of Artificial Sequence: Synthetic oligonucleotide
  Antisense strand to SEQ ID NO: 678280
auuaaucacccugaacaac

SEQ ID NO: 678282 - RNA, 19 nt, Artificial Sequence
  Description of Artificial Sequence: Synthetic oligonucleotide
  Sense strand starting at position 2164 of SEQ ID NO: 585922
cagggugauuaauauaaua

SEQ ID NO: 678283 - RNA, 19 nt, Artificial Sequence
  Description of Artificial Sequence: Synthetic oligonucleotide
  Antisense strand to SEQ ID NO: 678282
uauuauauuaaucacccug

SEQ ID NO: 678284 - RNA, 19 nt, Artificial Sequence
  Description of Artificial Sequence: Synthetic oligonucleotide
  Sense strand starting at position 2234 of SEQ ID NO: 585922
acugaagucuuugcaauuc

SEQ ID NO: 678285 - RNA, 19 nt, Artificial Sequence
  Description of Artificial Sequence: Synthetic oligonucleotide
  Antisense strand to SEQ ID NO: 678284
gaauugcaaagacuucagu

SEQ ID NO: 678286 - RNA, 19 nt, Artificial Sequence
  Description of Artificial Sequence: Synthetic oligonucleotide
  Sense strand starting at position 2352 of SEQ ID NO: 585922
auguauguuccggaagaga

SEQ ID NO: 678287 - RNA, 19 nt, Artificial Sequence
  Description of Artificial Sequence: Synthetic oligonucleotide
  Antisense strand to SEQ ID NO: 678286
ucucuuccggaacauacau

SEQ ID NO: 678288 - RNA, 19 nt, Artificial Sequence
  Description of Artificial Sequence: Synthetic oligonucleotide
  Sense strand starting at position 2355 of SEQ ID NO: 585922
uauguuccggaagagagua

SEQ ID NO: 678289 - RNA, 19 nt, Artificial Sequence
  Description of Artificial Sequence: Synthetic oligonucleotide
  Antisense strand to SEQ ID NO: 678288
uacucucuuccggaacaua

SEQ ID NO: 678290 - RNA, 19 nt, Artificial Sequence
  Description of Artificial Sequence: Synthetic oligonucleotide
  Sense strand starting at position 2401 of SEQ ID NO: 585922
uaaggacuaucucuguguu

SEQ ID NO: 678291 - RNA, 19 nt, Artificial Sequence
  Description of Artificial Sequence: Synthetic oligonucleotide
  Antisense strand to SEQ ID NO: 678290
aacacagagauaguccuua

SEQ ID NO: 678292 - RNA, 19 nt, Artificial Sequence
  Description of Artificial Sequence: Synthetic oligonucleotide
  Sense strand starting at position 2403 of SEQ ID NO: 585922
aggacuaucucuguguuga

SEQ ID NO: 678293 - RNA, 19 nt, Artificial Sequence
  Description of Artificial Sequence: Synthetic oligonucleotide
  Antisense strand to SEQ ID NO: 678292
ucaacacagagauaguccu

SEQ ID NO: 678294 - RNA, 19 nt, Artificial Sequence
  Description of Artificial Sequence: Synthetic oligonucleotide
  Sense strand starting at position 2404 of SEQ ID NO: 585922
ggacuaucucuguguugau

SEQ ID NO: 678295 - RNA, 19 nt, Artificial Sequence
  Description of Artificial Sequence: Synthetic oligonucleotide
  Antisense strand to SEQ ID NO: 678294
aucaacacagagauagucc

SEQ ID NO: 678296 - RNA, 19 nt, Artificial Sequence
  Description of Artificial Sequence: Synthetic oligonucleotide
  Sense strand starting at position 2405 of SEQ ID NO: 585922
gacuaucucuguguugaug

SEQ ID NO: 678297 - RNA, 19 nt, Artificial Sequence
  Description of Artificial Sequence: Synthetic oligonucleotide
  Antisense strand to SEQ ID NO: 678296
caucaacacagagauaguc

SEQ ID NO: 678298 - RNA, 19 nt, Artificial Sequence
  Description of Artificial Sequence: Synthetic oligonucleotide
  Sense strand starting at position 2414 of SEQ ID NO: 585922
uguguugauggcuacacaa

SEQ ID NO: 678299 - RNA, 19 nt, Artificial Sequence
  Description of Artificial Sequence: Synthetic oligonucleotide
  Antisense strand to SEQ ID NO: 678298
uuguguagccaucaacaca

SEQ ID NO: 678300 - RNA, 19 nt, Artificial Sequence
  Description of Artificial Sequence: Synthetic oligonucleotide
  Sense strand starting at position 2416 of SEQ ID NO: 585922
uguugauggcuacacaacu

SEQ ID NO: 678301 - RNA, 19 nt, Artificial Sequence
  Description of Artificial Sequence: Synthetic oligonucleotide
  Antisense strand to SEQ ID NO: 678300
aguuguguagccaucaaca

SEQ ID NO: 678302 - RNA, 19 nt, Artificial Sequence
  Description of Artificial Sequence: Synthetic oligonucleotide
  Sense strand starting at position 2450 of SEQ ID NO: 585922
uuaucucugucaccauaga

SEQ ID NO: 678303 - RNA, 19 nt, Artificial Sequence
  Description of Artificial Sequence: Synthetic oligonucleotide
  Antisense strand to SEQ ID NO: 678302
ucuauggugacagagauaa

SEQ ID NO: 678304 - RNA, 19 nt, Artificial Sequence
  Description of Artificial Sequence: Synthetic oligonucleotide
  Sense strand starting at position 2553 of SEQ ID NO: 585922
caguuugugcugcuuguua

SEQ ID NO: 678305 - RNA, 19 nt, Artificial Sequence
  Description of Artificial Sequence: Synthetic oligonucleotide
  Antisense strand to SEQ ID NO: 678304
uaacaagcagcacaaacug

SEQ ID NO: 678306 - RNA, 19 nt, Artificial Sequence
  Description of Artificial Sequence: Synthetic oligonucleotide
  Sense strand starting at position 2740 of SEQ ID NO: 585922
gcaucuguuguguaugacu

SEQ ID NO: 678307 - RNA, 19 nt, Artificial Sequence
  Description of Artificial Sequence: Synthetic oligonucleotide
  Antisense strand to SEQ ID NO: 678306
agucauacacaacagaugc

SEQ ID NO: 678308 - RNA, 19 nt, Artificial Sequence
  Description of Artificial Sequence: Synthetic oligonucleotide
  Sense strand starting at position 3095 of SEQ ID NO: 585922
uucucauagccggaacaga

SEQ ID NO: 678309 - RNA, 19 nt, Artificial Sequence
  Description of Artificial Sequence: Synthetic oligonucleotide
  Antisense strand to SEQ ID NO: 678308
ucuguuccggcuaugagaa

SEQ ID NO: 678310 - RNA, 19 nt, Artificial Sequence
  Description of Artificial Sequence: Synthetic oligonucleotide
  Sense strand starting at position 3227 of SEQ ID NO: 585922
aagggugauugucuuuaaa

SEQ ID NO: 678311 - RNA, 19 nt, Artificial Sequence
  Description of Artificial Sequence: Synthetic oligonucleotide
  Antisense strand to SEQ ID NO: 678310
uuuaaagacaaucacccuu

SEQ ID NO: 678312 - RNA, 19 nt, Artificial Sequence
  Description of Artificial Sequence: Synthetic oligonucleotide
  Sense strand starting at position 3229 of SEQ ID NO: 585922
gggugauugucuuuaaauc

SEQ ID NO: 678313 - RNA, 19 nt, Artificial Sequence
  Description of Artificial Sequence: Synthetic oligonucleotide
  Antisense strand to SEQ ID NO: 678312
gauuuaaagacaaucaccc

SEQ ID NO: 678314 - RNA, 19 nt, Artificial Sequence
  Description of Artificial Sequence: Synthetic oligonucleotide
  Sense strand starting at position 3230 of SEQ ID NO: 585922
ggugauugucuuuaaaucc

SEQ ID NO: 678315 - RNA, 19 nt, Artificial Sequence
  Description of Artificial Sequence: Synthetic oligonucleotide
  Antisense strand to SEQ ID NO: 678314
ggauuuaaagacaaucacc

SEQ ID NO: 678316 - RNA, 19 nt, Artificial Sequence
  Description of Artificial Sequence: Synthetic oligonucleotide
  Sense strand starting at position 3281 of SEQ ID NO: 585922
gauggacgcuguuugagua

SEQ ID NO: 678317 - RNA, 19 nt, Artificial Sequence
  Description of Artificial Sequence: Synthetic oligonucleotide
  Antisense strand to SEQ ID NO: 678316
uacucaaacagcguccauc

SEQ ID NO: 678318 - RNA, 19 nt, Artificial Sequence
  Description of Artificial Sequence: Synthetic oligonucleotide
  Sense strand starting at position 3775 of SEQ ID NO: 585922
gugccagaucaauaaucug

SEQ ID NO: 678319 - RNA, 19 nt, Artificial Sequence
  Description of Artificial Sequence: Synthetic oligonucleotide
  Antisense strand to SEQ ID NO: 678318
cagauuauugaucuggcac

SEQ ID NO: 678320 - RNA, 19 nt, Artificial Sequence
  Description of Artificial Sequence: Synthetic oligonucleotide
  Sense strand starting at position 3803 of SEQ ID NO: 585922
uauuauagacuuggaaguu

SEQ ID NO: 678321 - RNA, 19 nt, Artificial Sequence
  Description of Artificial Sequence: Synthetic oligonucleotide
  Antisense strand to SEQ ID NO: 678320
aacuuccaagucuauaaua

SEQ ID NO: 678322 - RNA, 19 nt, Artificial Sequence
  Description of Artificial Sequence: Synthetic oligonucleotide
  Sense strand starting at position 3821 of SEQ ID NO: 585922
ucagauucuccaggcacaa

SEQ ID NO: 678323 - RNA, 19 nt, Artificial Sequence
  Description of Artificial Sequence: Synthetic oligonucleotide
  Antisense strand to SEQ ID NO: 678322
uugugccuggagaaucuga

SEQ ID NO: 678324 - RNA, 19 nt, Artificial Sequence
  Description of Artificial Sequence: Synthetic oligonucleotide
  Sense strand starting at position 3890 of SEQ ID NO: 585922
cugucauuguuauuaccua

SEQ ID NO: 678325 - RNA, 19 nt, Artificial Sequence
  Description of Artificial Sequence: Synthetic oligonucleotide
  Antisense strand to SEQ ID NO: 678324
uagguaauaacaaugacag

SEQ ID NO: 678326 - RNA, 19 nt, Artificial Sequence
  Description of Artificial Sequence: Synthetic oligonucleotide
  Sense strand starting at position 463 of SEQ ID NO: 585923
aaacuugagguuugucauu

SEQ ID NO: 678327 - RNA, 19 nt, Artificial Sequence
  Description of Artificial Sequence: Synthetic oligonucleotide
  Antisense strand to SEQ ID NO: 678326
aaugacaaaccucaaguuu

SEQ ID NO: 678328 - RNA, 19 nt, Artificial Sequence
  Description of Artificial Sequence: Synthetic oligonucleotide
  Sense strand starting at position 512 of SEQ ID NO: 585923
aggagcuuucucuggcacu

SEQ ID NO: 678329 - RNA, 19 nt, Artificial Sequence
  Description of Artificial Sequence: Synthetic oligonucleotide
  Antisense strand to SEQ ID NO: 678328
agugccagagaaagcuccu

SEQ ID NO: 678330 - RNA, 19 nt, Artificial Sequence
  Description of Artificial Sequence: Synthetic oligonucleotide
  Sense strand starting at position 885 of SEQ ID NO: 585923
cgaaauucugcgccugucu

SEQ ID NO: 678331 - RNA, 19 nt, Artificial Sequence
  Description of Artificial Sequence: Synthetic oligonucleotide
  Antisense strand to SEQ ID NO: 678330
agacaggcgcagaauuucg

SEQ ID NO: 678332 - RNA, 19 nt, Artificial Sequence
  Description of Artificial Sequence: Synthetic oligonucleotide
  Sense strand starting at position 897 of SEQ ID NO: 585923
ccugucuaugccgagaugu

SEQ ID NO: 678333 - RNA, 19 nt, Artificial Sequence
  Description of Artificial Sequence: Synthetic oligonucleotide
  Antisense strand to SEQ ID NO: 678332
acaucucggcauagacagg

SEQ ID NO: 678334 - RNA, 19 nt, Artificial Sequence
  Description of Artificial Sequence: Synthetic oligonucleotide
  Sense strand starting at position 899 of SEQ ID NO: 585923
ugucuaugccgagauguuc

SEQ ID NO: 678335 - RNA, 19 nt, Artificial Sequence
  Description of Artificial Sequence: Synthetic oligonucleotide
  Antisense strand to SEQ ID NO: 678334
gaacaucucggcauagaca

SEQ ID NO: 678336 - RNA, 19 nt, Artificial Sequence
  Description of Artificial Sequence: Synthetic oligonucleotide
  Sense strand starting at position 993 of SEQ ID NO: 585923
uccuuagucauucgaggga

SEQ ID NO: 678337 - RNA, 19 nt, Artificial Sequence
  Description of Artificial Sequence: Synthetic oligonucleotide
  Antisense strand to SEQ ID NO: 678336
ucccucgaaugacuaagga

SEQ ID NO: 678338 - RNA, 19 nt, Artificial Sequence
  Description of Artificial Sequence: Synthetic oligonucleotide
  Sense strand starting at position 997 of SEQ ID NO: 585923
uagucauucgagggaggga

SEQ ID NO: 678339 - RNA, 19 nt, Artificial Sequence
  Description of Artificial Sequence: Synthetic oligonucleotide
  Antisense strand to SEQ ID NO: 678338
ucccucccucgaaugacua

SEQ ID NO: 678340 - RNA, 19 nt, Artificial Sequence
  Description of Artificial Sequence: Synthetic oligonucleotide
  Sense strand starting at position 1136 of SEQ ID NO: 585923
ugagaaucuuucuuuccgu

SEQ ID NO: 678341 - RNA, 19 nt, Artificial Sequence
  Description of Artificial Sequence: Synthetic oligonucleotide
  Antisense strand to SEQ ID NO: 678340
acggaaagaaagauucuca

SEQ ID NO: 678342 - RNA, 19 nt, Artificial Sequence
  Description of Artificial Sequence: Synthetic oligonucleotide
  Sense strand starting at position 1217 of SEQ ID NO: 585923
ggcaaauguuucuuaacgu

SEQ ID NO: 678343 - RNA, 19 nt, Artificial Sequence
  Description of Artificial Sequence: Synthetic oligonucleotide
  Antisense strand to SEQ ID NO: 678342
acguuaagaaacauuugcc

SEQ ID NO: 678344 - RNA, 19 nt, Artificial Sequence
  Description of Artificial Sequence: Synthetic oligonucleotide
  Sense strand starting at position 1253 of SEQ ID NO: 585923
ccuggcgacagaugucaua

SEQ ID NO: 678345 - RNA, 19 nt, Artificial Sequence
  Description of Artificial Sequence: Synthetic oligonucleotide
  Antisense strand to SEQ ID NO: 678344
uaugacaucugucgccagg

SEQ ID NO: 678346 - RNA, 19 nt, Artificial Sequence
  Description of Artificial Sequence: Synthetic oligonucleotide
  Sense strand starting at position 1327 of SEQ ID NO: 585923
aacguaacgguccaauaua

SEQ ID NO: 678347 - RNA, 19 nt, Artificial Sequence
  Description of Artificial Sequence: Synthetic oligonucleotide
  Antisense strand to SEQ ID NO: 678346
uauauuggaccguuacguu

SEQ ID NO: 678348 - RNA, 19 nt, Artificial Sequence
  Description of Artificial Sequence: Synthetic oligonucleotide
  Sense strand starting at position 1441 of SEQ ID NO: 585923
guaauaauaccucggcauc

SEQ ID NO: 678349 - RNA, 19 nt, Artificial Sequence
  Description of Artificial Sequence: Synthetic oligonucleotide
  Antisense strand to SEQ ID NO: 678348
gaugccgagguauuauuac

SEQ ID NO: 678350 - RNA, 19 nt, Artificial Sequence
  Description of Artificial Sequence: Synthetic oligonucleotide
  Sense strand starting at position 2187 of SEQ ID NO: 585923
ggaaacaaugcuggucuuu

SEQ ID NO: 678351 - RNA, 19 nt, Artificial Sequence
  Description of Artificial Sequence: Synthetic oligonucleotide
  Antisense strand to SEQ ID NO: 678350
aaagaccagcauuguuucc

SEQ ID NO: 678352 - RNA, 19 nt, Artificial Sequence
  Description of Artificial Sequence: Synthetic oligonucleotide
  Sense strand starting at position 2557 of SEQ ID NO: 585923
cccuuaaaugcuuggaagu

SEQ ID NO: 678353 - RNA, 19 nt, Artificial Sequence
  Description of Artificial Sequence: Synthetic oligonucleotide
  Antisense strand to SEQ ID NO: 678352
acuuccaagcauuuaaggg

SEQ ID NO: 678354 - RNA, 19 nt, Artificial Sequence
  Description of Artificial Sequence: Synthetic oligonucleotide
  Sense strand starting at position 2558 of SEQ ID NO: 585923
ccuuaaaugcuuggaaguu

SEQ ID NO: 678355 - RNA, 19 nt, Artificial Sequence
  Description of Artificial Sequence: Synthetic oligonucleotide
  Antisense strand to SEQ ID NO: 678354
aacuuccaagcauuuaagg

SEQ ID NO: 678356 - RNA, 19 nt, Artificial Sequence
  Description of Artificial Sequence: Synthetic oligonucleotide
  Sense strand starting at position 2759 of SEQ ID NO: 585923
cuccucagugucuacauua

SEQ ID NO: 678357 - RNA, 19 nt, Artificial Sequence
  Description of Artificial Sequence: Synthetic oligonucleotide
  Antisense strand to SEQ ID NO: 678356
uaauguagacacugaggag

SEQ ID NO: 678358 - RNA, 19 nt, Artificial Sequence
  Description of Artificial Sequence: Synthetic oligonucleotide
  Sense strand starting at position 2864 of SEQ ID NO: 585923
uuaaguguuuaagcugaga

SEQ ID NO: 678359 - RNA, 19 nt, Artificial Sequence
  Description of Artificial Sequence: Synthetic oligonucleotide
  Antisense strand to SEQ ID NO: 678358
ucucagcuuaaacacuuaa

SEQ ID NO: 678360 - RNA, 19 nt, Artificial Sequence
  Description of Artificial Sequence: Synthetic oligonucleotide
  Sense strand starting at position 2877 of SEQ ID NO: 585923
cugagaaggugucuuaaua

SEQ ID NO: 678361 - RNA, 19 nt, Artificial Sequence
  Description of Artificial Sequence: Synthetic oligonucleotide
  Antisense strand to SEQ ID NO: 678360
uauuaagacaccuucucag

SEQ ID NO: 678362 - RNA, 19 nt, Artificial Sequence
  Description of Artificial Sequence: Synthetic oligonucleotide
  Sense strand starting at position 2996 of SEQ ID NO: 585923
cucagagcucuuugcuuua

SEQ ID NO: 678363 - RNA, 19 nt, Artificial Sequence
  Description of Artificial Sequence: Synthetic oligonucleotide
  Antisense strand to SEQ ID NO: 678362
uaaagcaaagagcucugag

SEQ ID NO: 678364 - RNA, 19 nt, Artificial Sequence
  Description of Artificial Sequence: Synthetic oligonucleotide
  Sense strand starting at position 2999 of SEQ ID NO: 585923
agagcucuuugcuuuauac

SEQ ID NO: 678365 - RNA, 19 nt, Artificial Sequence
  Description of Artificial Sequence: Synthetic oligonucleotide
  Antisense strand to SEQ ID NO: 678364
guauaaagcaaagagcucu

SEQ ID NO: 678366 - RNA, 19 nt, Artificial Sequence
  Description of Artificial Sequence: Synthetic oligonucleotide
  Sense strand starting at position 3043 of SEQ ID NO: 585923
auugaaaugcauugucuga

SEQ ID NO: 678367 - RNA, 19 nt, Artificial Sequence
  Description of Artificial Sequence: Synthetic oligonucleotide
  Antisense strand to SEQ ID NO: 678366
ucagacaaugcauuucaau

SEQ ID NO: 678368 - RNA, 19 nt, Artificial Sequence
  Description of Artificial Sequence: Synthetic oligonucleotide
  Sense strand starting at position 3045 of SEQ ID NO: 585923
ugaaaugcauugucugaaa

SEQ ID NO: 678369 - RNA, 19 nt, Artificial Sequence
  Description of Artificial Sequence: Synthetic oligonucleotide
  Antisense strand to SEQ ID NO: 678368
uuucagacaaugcauuuca

SEQ ID NO: 678370 - RNA, 19 nt, Artificial Sequence
  Description of Artificial Sequence: Synthetic oligonucleotide
  Sense strand starting at position 3047 of SEQ ID NO: 585923
aaaugcauugucugaaaug

SEQ ID NO: 678371 - RNA, 19 nt, Artificial Sequence
  Description of Artificial Sequence: Synthetic oligonucleotide
  Antisense strand to SEQ ID NO: 678370
cauuucagacaaugcauuu

SEQ ID NO: 678372 - RNA, 19 nt, Artificial Sequence
  Description of Artificial Sequence: Synthetic oligonucleotide
  Sense strand starting at position 3200 of SEQ ID NO: 585923
agagaccaaugaugacaaa

SEQ ID NO: 678373 - RNA, 19 nt, Artificial Sequence
  Description of Artificial Sequence: Synthetic oligonucleotide
  Antisense strand to SEQ ID NO: 678372
uuugucaucauuggucucu

SEQ ID NO: 678374 - RNA, 19 nt, Artificial Sequence
  Description of Artificial Sequence: Synthetic oligonucleotide
  Sense strand starting at position 3313 of SEQ ID NO: 585923
cuuuguuuaccaggucuga

SEQ ID NO: 678375 - RNA, 19 nt, Artificial Sequence
  Description of Artificial Sequence: Synthetic oligonucleotide
  Antisense strand to SEQ ID NO: 678374
ucagaccugguaaacaaag

SEQ ID NO: 678376 - RNA, 19 nt, Artificial Sequence
  Description of Artificial Sequence: Synthetic oligonucleotide
  Sense strand starting at position 3343 of SEQ ID NO: 585923
auagcuuacccacggagaa

SEQ ID NO: 678377 - RNA, 19 nt, Artificial Sequence
  Description of Artificial Sequence: Synthetic oligonucleotide
  Antisense strand to SEQ ID NO: 678376
uucuccguggguaagcuau

SEQ ID NO: 678378 - RNA, 19 nt, Artificial Sequence
  Description of Artificial Sequence: Synthetic oligonucleotide
  Sense strand starting at position 3344 of SEQ ID NO: 585923
uagcuuacccacggagaaa

SEQ ID NO: 678379 - RNA, 19 nt, Artificial Sequence
  Description of Artificial Sequence: Synthetic oligonucleotide
  Antisense strand to SEQ ID NO: 678378
uuucuccguggguaagcua

SEQ ID NO: 678380 - RNA, 19 nt, Artificial Sequence
  Description of Artificial Sequence: Synthetic oligonucleotide
  Sense strand starting at position 3501 of SEQ ID NO: 585923
uuuccugguggaugauauu

SEQ ID NO: 678381 - RNA, 19 nt, Artificial Sequence
  Description of Artificial Sequence: Synthetic oligonucleotide
  Antisense strand to SEQ ID NO: 678380
aauaucauccaccaggaaa

SEQ ID NO: 678382 - RNA, 19 nt, Artificial Sequence
  Description of Artificial Sequence: Synthetic oligonucleotide
  Sense strand starting at position 3510 of SEQ ID NO: 585923
ggaugauauuggcuuccca

SEQ ID NO: 678383 - RNA, 19 nt, Artificial Sequence
  Description of Artificial Sequence: Synthetic oligonucleotide
  Antisense strand to SEQ ID NO: 678382
ugggaagccaauaucaucc

SEQ ID NO: 678384 - RNA, 19 nt, Artificial Sequence
  Description of Artificial Sequence: Synthetic oligonucleotide
  Sense strand starting at position 3514 of SEQ ID NO: 585923
gauauuggcuucccaguua

SEQ ID NO: 678385 - RNA, 19 nt, Artificial Sequence
  Description of Artificial Sequence: Synthetic oligonucleotide
  Antisense strand to SEQ ID NO: 678384
uaacugggaagccaauauc

SEQ ID NO: 678386 - RNA, 19 nt, Artificial Sequence
  Description of Artificial Sequence: Synthetic oligonucleotide
  Sense strand starting at position 3526 of SEQ ID NO: 585923
ccaguuagucccggucaaa

SEQ ID NO: 678387 - RNA, 19 nt, Artificial Sequence
  Description of Artificial Sequence: Synthetic oligonucleotide
  Antisense strand to SEQ ID NO: 678386
uuugaccgggacuaacugg

SEQ ID NO: 678388 - RNA, 19 nt, Artificial Sequence
  Description of Artificial Sequence: Synthetic oligonucleotide
  Sense strand starting at position 3739 of SEQ ID NO: 585923
cagaguguuuguuccacau

SEQ ID NO: 678389 - RNA, 19 nt, Artificial Sequence
  Description of Artificial Sequence: Synthetic oligonucleotide
  Antisense strand to SEQ ID NO: 678388
auguggaacaaacacucug

SEQ ID NO: 678390 - RNA, 19 nt, Artificial Sequence
  Description of Artificial Sequence: Synthetic oligonucleotide
  Sense strand starting at position 3743 of SEQ ID NO: 585923
guguuuguuccacauguuu

SEQ ID NO: 678391 - RNA, 19 nt, Artificial Sequence
  Description of Artificial Sequence: Synthetic oligonucleotide
  Antisense strand to SEQ ID NO: 678390
aaacauguggaacaaacac

SEQ ID NO: 678392 - RNA, 19 nt, Artificial Sequence
  Description of Artificial Sequence: Synthetic oligonucleotide
  Sense strand starting at position 3758 of SEQ ID NO: 585923
guuugucccugucuggaau

SEQ ID NO: 678393 - RNA, 19 nt, Artificial Sequence
  Description of Artificial Sequence: Synthetic oligonucleotide
  Antisense strand to SEQ ID NO: 678392
auuccagacagggacaaac

SEQ ID NO: 678394 - RNA, 19 nt, Artificial Sequence
  Description of Artificial Sequence: Synthetic oligonucleotide
  Sense strand starting at position 3759 of SEQ ID NO: 585923
uuugucccugucuggaaua

SEQ ID NO: 678395 - RNA, 19 nt, Artificial Sequence
  Description of Artificial Sequence: Synthetic oligonucleotide
  Antisense strand to SEQ ID NO: 678394
uauuccagacagggacaaa

SEQ ID NO: 678396 - RNA, 19 nt, Artificial Sequence
  Description of Artificial Sequence: Synthetic oligonucleotide
  Sense strand starting at position 3832 of SEQ ID NO: 585923
uaugauacucucgguaaug

SEQ ID NO: 678397 - RNA, 19 nt, Artificial Sequence
  Description of Artificial Sequence: Synthetic oligonucleotide
  Antisense strand to SEQ ID NO: 678396
cauuaccgagaguaucaua

SEQ ID NO: 678398 - RNA, 19 nt, Artificial Sequence
  Description of Artificial Sequence: Synthetic oligonucleotide
  Sense strand starting at position 3833 of SEQ ID NO: 585923
augauacucucgguaauga

SEQ ID NO: 678399 - RNA, 19 nt, Artificial Sequence
  Description of Artificial Sequence: Synthetic oligonucleotide
  Antisense strand to SEQ ID NO: 678398
ucauuaccgagaguaucau

SEQ ID NO: 678400 - RNA, 19 nt, Artificial Sequence
  Description of Artificial Sequence: Synthetic oligonucleotide
  Sense strand starting at position 3834 of SEQ ID NO: 585923
ugauacucucgguaaugag

SEQ ID NO: 678401 - RNA, 19 nt, Artificial Sequence
  Description of Artificial Sequence: Synthetic oligonucleotide
  Antisense strand to SEQ ID NO: 678400
cucauuaccgagaguauca

SEQ ID NO: 678402 - RNA, 19 nt, Artificial Sequence
  Description of Artificial Sequence: Synthetic oligonucleotide
  Sense strand starting at position 3844 of SEQ ID NO: 585923
gguaaugagcucuggccuu

SEQ ID NO: 678403 - RNA, 19 nt, Artificial Sequence
  Description of Artificial Sequence: Synthetic oligonucleotide
  Antisense strand to SEQ ID NO: 678402
aaggccagagcucauuacc

SEQ ID NO: 678404 - RNA, 19 nt, Artificial Sequence
  Description of Artificial Sequence: Synthetic oligonucleotide
  Sense strand starting at position 3977 of SEQ ID NO: 585923
ucacuuuccugagugacuu

SEQ ID NO: 678405 - RNA, 19 nt, Artificial Sequence
  Description of Artificial Sequence: Synthetic oligonucleotide
  Antisense strand to SEQ ID NO: 678404
aagucacucaggaaaguga

SEQ ID NO: 678406 - RNA, 19 nt, Artificial Sequence
  Description of Artificial Sequence: Synthetic oligonucleotide
  Sense strand starting at position 360 of SEQ ID NO: 585924
uuuagaauguggcuaauaa

SEQ ID NO: 678407 - RNA, 19 nt, Artificial Sequence
  Description of Artificial Sequence: Synthetic oligonucleotide
  Antisense strand to SEQ ID NO: 678406
uuauuagccacauucuaaa

SEQ ID NO: 678408 - RNA, 19 nt, Artificial Sequence
  Description of Artificial Sequence: Synthetic oligonucleotide
  Sense strand starting at position 361 of SEQ ID NO: 585924
uuagaauguggcuaauaac

SEQ ID NO: 678409 - RNA, 19 nt, Artificial Sequence
  Description of Artificial Sequence: Synthetic oligonucleotide
  Antisense strand to SEQ ID NO: 678408
guuauuagccacauucuaa

SEQ ID NO: 678410 - RNA, 19 nt, Artificial Sequence
  Description of Artificial Sequence: Synthetic oligonucleotide
  Sense strand starting at position 1011 of SEQ ID NO: 585924
guagacguauuuguaauau

SEQ ID NO: 678411 - RNA, 19 nt, Artificial Sequence
  Description of Artificial Sequence: Synthetic oligonucleotide
  Antisense strand to SEQ ID NO: 678410
auauuacaaauacgucuac

SEQ ID NO: 678412 - RNA, 19 nt, Artificial Sequence
  Description of Artificial Sequence: Synthetic oligonucleotide
  Sense strand starting at position 1066 of SEQ ID NO: 585924
aauggugauggugguuaaa

SEQ ID NO: 678413 - RNA, 19 nt, Artificial Sequence
  Description of Artificial Sequence: Synthetic oligonucleotide
  Antisense strand to SEQ ID NO: 678412
uuuaaccaccaucaccauu

SEQ ID NO: 678414 - RNA, 19 nt, Artificial Sequence
  Description of Artificial Sequence: Synthetic oligonucleotide
  Sense strand starting at position 1183 of SEQ ID NO: 585924
aacaauuaggugugggaau

SEQ ID NO: 678415 - RNA, 19 nt, Artificial Sequence
  Description of Artificial Sequence: Synthetic oligonucleotide
  Antisense strand to SEQ ID NO: 678414
auucccacaccuaauuguu

SEQ ID NO: 678416 - RNA, 19 nt, Artificial Sequence
  Description of Artificial Sequence: Synthetic oligonucleotide
  Sense strand starting at position 1185 of SEQ ID NO: 585924
caauuaggugugggaaugu

SEQ ID NO: 678417 - RNA, 19 nt, Artificial Sequence
  Description of Artificial Sequence: Synthetic oligonucleotide
  Antisense strand to SEQ ID NO: 678416
acauucccacaccuaauug

SEQ ID NO: 678418 - RNA, 19 nt, Artificial Sequence
  Description of Artificial Sequence: Synthetic oligonucleotide
  Sense strand starting at position 1214 of SEQ ID NO: 585924
aaaguaagcuccucgagga

SEQ ID NO: 678419 - RNA, 19 nt, Artificial Sequence
  Description of Artificial Sequence: Synthetic oligonucleotide
  Antisense strand to SEQ ID NO: 678418
uccucgaggagcuuacuuu

SEQ ID NO: 678420 - RNA, 19 nt, Artificial Sequence
  Description of Artificial Sequence: Synthetic oligonucleotide
  Sense strand starting at position 1215 of SEQ ID NO: 585924
aaguaagcuccucgaggaa

SEQ ID NO: 678421 - RNA, 19 nt, Artificial Sequence
  Description of Artificial Sequence: Synthetic oligonucleotide
  Antisense strand to SEQ ID NO: 678420
uuccucgaggagcuuacuu

SEQ ID NO: 678422 - RNA, 19 nt, Artificial Sequence
  Description of Artificial Sequence: Synthetic oligonucleotide
  Sense strand starting at position 1430 of SEQ ID NO: 585924
cuuuaaacugcauguaaag

SEQ ID NO: 678423 - RNA, 19 nt, Artificial Sequence
  Description of Artificial Sequence: Synthetic oligonucleotide
  Antisense strand to SEQ ID NO: 678422
cuuuacaugcaguuuaaag

SEQ ID NO: 678424 - RNA, 19 nt, Artificial Sequence
  Description of Artificial Sequence: Synthetic oligonucleotide
  Sense strand starting at position 1832 of SEQ ID NO: 585924
gaggaaauucugugauagc

SEQ ID NO: 678425 - RNA, 19 nt, Artificial Sequence
  Description of Artificial Sequence: Synthetic oligonucleotide
  Antisense strand to SEQ ID NO: 678424
gcuaucacagaauuuccuc

SEQ ID NO: 678426 - RNA, 19 nt, Artificial Sequence
  Description of Artificial Sequence: Synthetic oligonucleotide
  Sense strand starting at position 2367 of SEQ ID NO: 585924
cuaaauaccugucugugaa

SEQ ID NO: 678427 - RNA, 19 nt, Artificial Sequence
  Description of Artificial Sequence: Synthetic oligonucleotide
  Antisense strand to SEQ ID NO: 678426
uucacagacagguauuuag

SEQ ID NO: 678428 - RNA, 19 nt, Artificial Sequence
  Description of Artificial Sequence: Synthetic oligonucleotide
  Sense strand starting at position 2374 of SEQ ID NO: 585924
ccugucugugaauauuaga

SEQ ID NO: 678429 - RNA, 19 nt, Artificial Sequence
  Description of Artificial Sequence: Synthetic oligonucleotide
  Antisense strand to SEQ ID NO: 678428
ucuaauauucacagacagg

SEQ ID NO: 678430 - RNA, 19 nt, Artificial Sequence
  Description of Artificial Sequence: Synthetic oligonucleotide
  Sense strand starting at position 2535 of SEQ ID NO: 585924
ggagcuaaugucuaccuca

SEQ ID NO: 678431 - RNA, 19 nt, Artificial Sequence
  Description of Artificial Sequence: Synthetic oligonucleotide
  Antisense strand to SEQ ID NO: 678430
ugagguagacauuagcucc

SEQ ID NO: 678432 - RNA, 19 nt, Artificial Sequence
  Description of Artificial Sequence: Synthetic oligonucleotide
  Sense strand starting at position 2559 of SEQ ID NO: 585924
gugagcacuaaaugagaga

SEQ ID NO: 678433 - RNA, 19 nt, Artificial Sequence
  Description of Artificial Sequence: Synthetic oligonucleotide
  Antisense strand to SEQ ID NO: 678432
ucucucauuuagugcucac

SEQ ID NO: 678434 - RNA, 19 nt, Artificial Sequence
  Description of Artificial Sequence: Synthetic oligonucleotide
  Sense strand starting at position 2650 of SEQ ID NO: 585924
gcuguuauuauuuggcaga

SEQ ID NO: 678435 - RNA, 19 nt, Artificial Sequence
  Description of Artificial Sequence: Synthetic oligonucleotide
  Antisense strand to SEQ ID NO: 678434
ucugccaaauaauaacagc

SEQ ID NO: 678436 - RNA, 19 nt, Artificial Sequence
  Description of Artificial Sequence: Synthetic oligonucleotide
  Sense strand starting at position 2666 of SEQ ID NO: 585924
agaugaauaauuggccagu

SEQ ID NO: 678437 - RNA, 19 nt, Artificial Sequence
  Description of Artificial Sequence: Synthetic oligonucleotide
  Antisense strand to SEQ ID NO: 678436
acuggccaauuauucaucu

SEQ ID NO: 678438 - RNA, 19 nt, Artificial Sequence
  Description of Artificial Sequence: Synthetic oligonucleotide
  Sense strand starting at position 2669 of SEQ ID NO: 585924
ugaauaauuggccagugua

SEQ ID NO: 678439 - RNA, 19 nt, Artificial Sequence
  Description of Artificial Sequence: Synthetic oligonucleotide
  Antisense strand to SEQ ID NO: 678438
uacacuggccaauuauuca

SEQ ID NO: 678440 - RNA, 19 nt, Artificial Sequence
  Description of Artificial Sequence: Synthetic oligonucleotide
  Sense strand starting at position 2672 of SEQ ID NO: 585924
auaauuggccaguguaaag

SEQ ID NO: 678441 - RNA, 19 nt, Artificial Sequence
  Description of Artificial Sequence: Synthetic oligonucleotide
  Antisense strand to SEQ ID NO: 678440
cuuuacacuggccaauuau

SEQ ID NO: 678442 - RNA, 19 nt, Artificial Sequence
  Description of Artificial Sequence: Synthetic oligonucleotide
  Sense strand starting at position 2683 of SEQ ID NO: 585924
guguaaagaggucauucga

SEQ ID NO: 678443 - RNA, 19 nt, Artificial Sequence
  Description of Artificial Sequence: Synthetic oligonucleotide
  Antisense strand to SEQ ID NO: 678442
ucgaaugaccucuuuacac

SEQ ID NO: 678444 - RNA, 19 nt, Artificial Sequence
  Description of Artificial Sequence: Synthetic oligonucleotide
  Sense strand starting at position 2735 of SEQ ID NO: 585924
acugaaauaugaguucugu

SEQ ID NO: 678445 - RNA, 19 nt, Artificial Sequence
  Description of Artificial Sequence: Synthetic oligonucleotide
  Antisense strand to SEQ ID NO: 678444
acagaacucauauuucagu

SEQ ID NO: 678446 - RNA, 19 nt, Artificial Sequence
  Description of Artificial Sequence: Synthetic oligonucleotide
  Sense strand starting at position 2800 of SEQ ID NO: 585924
auuaaaguuucucugauag

SEQ ID NO: 678447 - RNA, 19 nt, Artificial Sequence
  Description of Artificial Sequence: Synthetic oligonucleotide
  Antisense strand to SEQ ID NO: 678446
cuaucagagaaacuuuaau

SEQ ID NO: 678448 - RNA, 19 nt, Artificial Sequence
  Description of Artificial Sequence: Synthetic oligonucleotide
  Sense strand starting at position 2808 of SEQ ID NO: 585924
uucucugauaggugggaga

SEQ ID NO: 678449 - RNA, 19 nt, Artificial Sequence
  Description of Artificial Sequence: Synthetic oligonucleotide
  Antisense strand to SEQ ID NO: 678448
ucucccaccuaucagagaa

SEQ ID NO: 678450 - RNA, 19 nt, Artificial Sequence
  Description of Artificial Sequence: Synthetic oligonucleotide
  Sense strand starting at position 2810 of SEQ ID NO: 585924
cucugauaggugggagaau

SEQ ID NO: 678451 - RNA, 19 nt, Artificial Sequence
  Description of Artificial Sequence: Synthetic oligonucleotide
  Antisense strand to SEQ ID NO: 678450
auucucccaccuaucagag

SEQ ID NO: 678452 - RNA, 19 nt, Artificial Sequence
  Description of Artificial Sequence: Synthetic oligonucleotide
  Sense strand starting at position 2891 of SEQ ID NO: 585924
guuucuguuccucaauuag

SEQ ID NO: 678453 - RNA, 19 nt, Artificial Sequence
  Description of Artificial Sequence: Synthetic oligonucleotide
  Antisense strand to SEQ ID NO: 678452
cuaauugaggaacagaaac

SEQ ID NO: 678454 - RNA, 19 nt, Artificial Sequence
  Description of Artificial Sequence: Synthetic oligonucleotide
  Sense strand starting at position 2936 of SEQ ID NO: 585924
acgaaacaacuauggguau

SEQ ID NO: 678455 - RNA, 19 nt, Artificial Sequence
  Description of Artificial Sequence: Synthetic oligonucleotide
  Antisense strand to SEQ ID NO: 678454
auacccauaguuguuucgu

SEQ ID NO: 678456 - RNA, 19 nt, Artificial Sequence
  Description of Artificial Sequence: Synthetic oligonucleotide
  Sense strand starting at position 2942 of SEQ ID NO: 585924
caacuauggguauggauau

SEQ ID NO: 678457 - RNA, 19 nt, Artificial Sequence
  Description of Artificial Sequence: Synthetic oligonucleotide
  Antisense strand to SEQ ID NO: 678456
auauccauacccauaguug

SEQ ID NO: 678458 - RNA, 19 nt, Artificial Sequence
  Description of Artificial Sequence: Synthetic oligonucleotide
  Sense strand starting at position 2966 of SEQ ID NO: 585924
ugaggaguacuuugaaauu

SEQ ID NO: 678459 - RNA, 19 nt, Artificial Sequence
  Description of Artificial Sequence: Synthetic oligonucleotide
  Antisense strand to SEQ ID NO: 678458
aauuucaaaguacuccuca

SEQ ID NO: 678460 - RNA, 19 nt, Artificial Sequence
  Description of Artificial Sequence: Synthetic oligonucleotide
  Sense strand starting at position 3032 of SEQ ID NO: 585924
cugagauaaucuccuagcu

SEQ ID NO: 678461 - RNA, 19 nt, Artificial Sequence
  Description of Artificial Sequence: Synthetic oligonucleotide
  Antisense strand to SEQ ID NO: 678460
agcuaggagauuaucucag

SEQ ID NO: 678462 - RNA, 19 nt, Artificial Sequence
  Description of Artificial Sequence: Synthetic oligonucleotide
  Sense strand starting at position 3224 of SEQ ID NO: 585924
gucccaugugaaugagauu

SEQ ID NO: 678463 - RNA, 19 nt, Artificial Sequence
  Description of Artificial Sequence: Synthetic oligonucleotide
  Antisense strand to SEQ ID NO: 678462
aaucucauucacaugggac

SEQ ID NO: 678464 - RNA, 19 nt, Artificial Sequence
  Description of Artificial Sequence: Synthetic oligonucleotide
  Sense strand starting at position 3440 of SEQ ID NO: 585924
auacgaaucuagguguaaa

SEQ ID NO: 678465 - RNA, 19 nt, Artificial Sequence
  Description of Artificial Sequence: Synthetic oligonucleotide
  Antisense strand to SEQ ID NO: 678464
uuuacaccuagauucguau

SEQ ID NO: 678466 - RNA, 19 nt, Artificial Sequence
  Description of Artificial Sequence: Synthetic oligonucleotide
  Sense strand starting at position 3443 of SEQ ID NO: 585924
cgaaucuagguguaaacau

SEQ ID NO: 678467 - RNA, 19 nt, Artificial Sequence
  Description of Artificial Sequence: Synthetic oligonucleotide
  Antisense strand to SEQ ID NO: 678466
auguuuacaccuagauucg

SEQ ID NO: 678468 - RNA, 19 nt, Artificial Sequence
  Description of Artificial Sequence: Synthetic oligonucleotide
  Sense strand starting at position 3452 of SEQ ID NO: 585924
guguaaacauaagcuuaca

SEQ ID NO: 678469 - RNA, 19 nt, Artificial Sequence
  Description of Artificial Sequence: Synthetic oligonucleotide
  Antisense strand to SEQ ID NO: 678468
uguaagcuuauguuuacac

SEQ ID NO: 678470 - RNA, 19 nt, Artificial Sequence
  Description of Artificial Sequence: Synthetic oligonucleotide
  Sense strand starting at position 3527 of SEQ ID NO: 585924
uggucuuauuaauugacaa

SEQ ID NO: 678471 - RNA, 19 nt, Artificial Sequence
  Description of Artificial Sequence: Synthetic oligonucleotide
  Antisense strand to SEQ ID NO: 678470
uugucaauuaauaagacca

SEQ ID NO: 678472 - RNA, 19 nt, Artificial Sequence
  Description of Artificial Sequence: Synthetic oligonucleotide
  Sense strand starting at position 3555 of SEQ ID NO: 585924
cuguuaaaucacgacacuu

SEQ ID NO: 678473 - RNA, 19 nt, Artificial Sequence
  Description of Artificial Sequence: Synthetic oligonucleotide
  Antisense strand to SEQ ID NO: 678472
aagugucgugauuuaacag

SEQ ID NO: 678474 - RNA, 19 nt, Artificial Sequence
  Description of Artificial Sequence: Synthetic oligonucleotide
  Sense strand starting at position 3637 of SEQ ID NO: 585924
gugccauguaaugacugaa

SEQ ID NO: 678475 - RNA, 19 nt, Artificial Sequence
  Description of Artificial Sequence: Synthetic oligonucleotide
  Antisense strand to SEQ ID NO: 678474
uucagucauuacauggcac

SEQ ID NO: 678476 - RNA, 19 nt, Artificial Sequence
  Description of Artificial Sequence: Synthetic oligonucleotide
  Sense strand starting at position 3640 of SEQ ID NO: 585924
ccauguaaugacugaaugu

SEQ ID NO: 678477 - RNA, 19 nt, Artificial Sequence
  Description of Artificial Sequence: Synthetic oligonucleotide
  Antisense strand to SEQ ID NO: 678476
acauucagucauuacaugg

SEQ ID NO: 678478 - RNA, 19 nt, Artificial Sequence
  Description of Artificial Sequence: Synthetic oligonucleotide
  Sense strand starting at position 3647 of SEQ ID NO: 585924
augacugaauguucucauu

SEQ ID NO: 678479 - RNA, 19 nt, Artificial Sequence
  Description of Artificial Sequence: Synthetic oligonucleotide
  Antisense strand to SEQ ID NO: 678478
aaugagaacauucagucau

SEQ ID NO: 678480 - RNA, 19 nt, Artificial Sequence
  Description of Artificial Sequence: Synthetic oligonucleotide
  Sense strand starting at position 3649 of SEQ ID NO: 585924
gacugaauguucucauuag

SEQ ID NO: 678481 - RNA, 19 nt, Artificial Sequence
  Description of Artificial Sequence: Synthetic oligonucleotide
  Antisense strand to SEQ ID NO: 678480
cuaaugagaacauucaguc

SEQ ID NO: 678482 - RNA, 19 nt, Artificial Sequence
  Description of Artificial Sequence: Synthetic oligonucleotide
  Sense strand starting at position 3843 of SEQ ID NO: 585924
uuguguaacagguauaaag

SEQ ID NO: 678483 - RNA, 19 nt, Artificial Sequence
  Description of Artificial Sequence: Synthetic oligonucleotide
  Antisense strand to SEQ ID NO: 678482
cuuuauaccuguuacacaa

SEQ ID NO: 678484 - RNA, 19 nt, Artificial Sequence
  Description of Artificial Sequence: Synthetic oligonucleotide
  Sense strand starting at position 3973 of SEQ ID NO: 585924
guagauuccugauaauuug

SEQ ID NO: 678485 - RNA, 19 nt, Artificial Sequence
  Description of Artificial Sequence: Synthetic oligonucleotide
  Antisense strand to SEQ ID NO: 678484
caaauuaucaggaaucuac

SEQ ID NO: 678486 - RNA, 19 nt, Artificial Sequence
  Description of Artificial Sequence: Synthetic oligonucleotide
  Sense strand starting at position 1136 of SEQ ID NO: 585925
cggcaacuugucgcaaguu

SEQ ID NO: 678487 - RNA, 19 nt, Artificial Sequence
  Description of Artificial Sequence: Synthetic oligonucleotide
  Antisense strand to SEQ ID NO: 678486
aacuugcgacaaguugccg

SEQ ID NO: 678488 - RNA, 19 nt, Artificial Sequence
  Description of Artificial Sequence: Synthetic oligonucleotide
  Sense strand starting at position 1557 of SEQ ID NO: 585925
uuucuccucucaguaaagu

SEQ ID NO: 678489 - RNA, 19 nt, Artificial Sequence
  Description of Artificial Sequence: Synthetic oligonucleotide
  Antisense strand to SEQ ID NO: 678488
acuuuacugagaggagaaa

SEQ ID NO: 678490 - RNA, 19 nt, Artificial Sequence
  Description of Artificial Sequence: Synthetic oligonucleotide
  Sense strand starting at position 1891 of SEQ ID NO: 585925
cugagcuugcugucauguu

SEQ ID NO: 678491 - RNA, 19 nt, Artificial Sequence
  Description of Artificial Sequence: Synthetic oligonucleotide
  Antisense strand to SEQ ID NO: 678490
aacaugacagcaagcucag

SEQ ID NO: 678492 - RNA, 19 nt, Artificial Sequence
  Description of Artificial Sequence: Synthetic oligonucleotide
  Sense strand starting at position 1901 of SEQ ID NO: 585925
ugucauguugcuggacaga

SEQ ID NO: 678493 - RNA, 19 nt, Artificial Sequence
  Description of Artificial Sequence: Synthetic oligonucleotide
  Antisense strand to SEQ ID NO: 678492
ucuguccagcaacaugaca

SEQ ID NO: 678494 - RNA, 19 nt, Artificial Sequence
  Description of Artificial Sequence: Synthetic oligonucleotide
  Sense strand starting at position 1904 of SEQ ID NO: 585925
cauguugcuggacagaaau

SEQ ID NO: 678495 - RNA, 19 nt, Artificial Sequence
  Description of Artificial Sequence: Synthetic oligonucleotide
  Antisense strand to SEQ ID NO: 678494
auuucuguccagcaacaug

SEQ ID NO: 678496 - RNA, 19 nt, Artificial Sequence
  Description of Artificial Sequence: Synthetic oligonucleotide
  Sense strand starting at position 1914 of SEQ ID NO: 585925
gacagaaauugucugagcu

SEQ ID NO: 678497 - RNA, 19 nt, Artificial Sequence
  Description of Artificial Sequence: Synthetic oligonucleotide
  Antisense strand to SEQ ID NO: 678496
agcucagacaauuucuguc

SEQ ID NO: 678498 - RNA, 19 nt, Artificial Sequence
  Description of Artificial Sequence: Synthetic oligonucleotide
  Sense strand starting at position 1915 of SEQ ID NO: 585925
acagaaauugucugagcuc

SEQ ID NO: 678499 - RNA, 19 nt, Artificial Sequence
  Description of Artificial Sequence: Synthetic oligonucleotide
  Antisense strand to SEQ ID NO: 678498
gagcucagacaauuucugu

SEQ ID NO: 678500 - RNA, 19 nt, Artificial Sequence
  Description of Artificial Sequence: Synthetic oligonucleotide
  Sense strand starting at position 1918 of SEQ ID NO: 585925
gaaauugucugagcuccuu

SEQ ID NO: 678501 - RNA, 19 nt, Artificial Sequence
  Description of Artificial Sequence: Synthetic oligonucleotide
  Antisense strand to SEQ ID NO: 678500
aaggagcucagacaauuuc

SEQ ID NO: 678502 - RNA, 19 nt, Artificial Sequence
  Description of Artificial Sequence: Synthetic oligonucleotide
  Sense strand starting at position 2174 of SEQ ID NO: 585925
caagaucccuugcugaguu

SEQ ID NO: 678503 - RNA, 19 nt, Artificial Sequence
  Description of Artificial Sequence: Synthetic oligonucleotide
  Antisense strand to SEQ ID NO: 678502
aacucagcaagggaucuug

SEQ ID NO: 678504 - RNA, 19 nt, Artificial Sequence
  Description of Artificial Sequence: Synthetic oligonucleotide
  Sense strand starting at position 2206 of SEQ ID NO: 585925
aggcucgauuucucuguga

SEQ ID NO: 678505 - RNA, 19 nt, Artificial Sequence
  Description of Artificial Sequence: Synthetic oligonucleotide
  Antisense strand to SEQ ID NO: 678504
ucacagagaaaucgagccu

SEQ ID NO: 678506 - RNA, 19 nt, Artificial Sequence
  Description of Artificial Sequence: Synthetic oligonucleotide
  Sense strand starting at position 2208 of SEQ ID NO: 585925
gcucgauuucucugugacu

SEQ ID NO: 678507 - RNA, 19 nt, Artificial Sequence
  Description of Artificial Sequence: Synthetic oligonucleotide
  Antisense strand to SEQ ID NO: 678506
agucacagagaaaucgagc

SEQ ID NO: 678508 - RNA, 19 nt, Artificial Sequence
  Description of Artificial Sequence: Synthetic oligonucleotide
  Sense strand starting at position 2209 of SEQ ID NO: 585925
cucgauuucucugugacuc

SEQ ID NO: 678509 - RNA, 19 nt, Artificial Sequence
  Description of Artificial Sequence: Synthetic oligonucleotide
  Antisense strand to SEQ ID NO: 678508
gagucacagagaaaucgag

SEQ ID NO: 678510 - RNA, 19 nt, Artificial Sequence
  Description of Artificial Sequence: Synthetic oligonucleotide
  Sense strand starting at position 2210 of SEQ ID NO: 585925
ucgauuucucugugacuca

SEQ ID NO: 678511 - RNA, 19 nt, Artificial Sequence
  Description of Artificial Sequence: Synthetic oligonucleotide
  Antisense strand to SEQ ID NO: 678510
ugagucacagagaaaucga

SEQ ID NO: 678512 - RNA, 19 nt, Artificial Sequence
  Description of Artificial Sequence: Synthetic oligonucleotide
  Sense strand starting at position 2211 of SEQ ID NO: 585925
cgauuucucugugacucaa

SEQ ID NO: 678513 - RNA, 19 nt, Artificial Sequence
  Description of Artificial Sequence: Synthetic oligonucleotide
  Antisense strand to SEQ ID NO: 678512
uugagucacagagaaaucg

SEQ ID NO: 678514 - RNA, 19 nt, Artificial Sequence
  Description of Artificial Sequence: Synthetic oligonucleotide
  Sense strand starting at position 2312 of SEQ ID NO: 585925
aacuuuaagcucugagggu

SEQ ID NO: 678515 - RNA, 19 nt, Artificial Sequence
  Description of Artificial Sequence: Synthetic oligonucleotide
  Antisense strand to SEQ ID NO: 678514
acccucagagcuuaaaguu

SEQ ID NO: 678516 - RNA, 19 nt, Artificial Sequence
  Description of Artificial Sequence: Synthetic oligonucleotide
  Sense strand starting at position 2316 of SEQ ID NO: 585925
uuaagcucugaggguuaca

SEQ ID NO: 678517 - RNA, 19 nt, Artificial Sequence
  Description of Artificial Sequence: Synthetic oligonucleotide
  Antisense strand to SEQ ID NO: 678516
uguaacccucagagcuuaa

SEQ ID NO: 678518 - RNA, 19 nt, Artificial Sequence
  Description of Artificial Sequence: Synthetic oligonucleotide
  Sense strand starting at position 2628 of SEQ ID NO: 585925
ccaagucguagacggaaua

SEQ ID NO: 678519 - RNA, 19 nt, Artificial Sequence
  Description of Artificial Sequence: Synthetic oligonucleotide
  Antisense strand to SEQ ID NO: 678518
uauuccgucuacgacuugg

SEQ ID NO: 678520 - RNA, 19 nt, Artificial Sequence
  Description of Artificial Sequence: Synthetic oligonucleotide
  Sense strand starting at position 2737 of SEQ ID NO: 585925
gccguuguucugcucaaca

SEQ ID NO: 678521 - RNA, 19 nt, Artificial Sequence
  Description of Artificial Sequence: Synthetic oligonucleotide
  Antisense strand to SEQ ID NO: 678520
uguugagcagaacaacggc

SEQ ID NO: 678522 - RNA, 19 nt, Artificial Sequence
  Description of Artificial Sequence: Synthetic oligonucleotide
  Sense strand starting at position 2739 of SEQ ID NO: 585925
cguuguucugcucaacaaa

SEQ ID NO: 678523 - RNA, 19 nt, Artificial Sequence
  Description of Artificial Sequence: Synthetic oligonucleotide
  Antisense strand to SEQ ID NO: 678522
uuuguugagcagaacaacg

SEQ ID NO: 678524 - RNA, 19 nt, Artificial Sequence
  Description of Artificial Sequence: Synthetic oligonucleotide
  Sense strand starting at position 2742 of SEQ ID NO: 585925
uguucugcucaacaaagaa

SEQ ID NO: 678525 - RNA, 19 nt, Artificial Sequence
  Description of Artificial Sequence: Synthetic oligonucleotide
  Antisense strand to SEQ ID NO: 678524
uucuuuguugagcagaaca

SEQ ID NO: 678526 - RNA, 19 nt, Artificial Sequence
  Description of Artificial Sequence: Synthetic oligonucleotide
  Sense strand starting at position 2975 of SEQ ID NO: 585925
ugggaaacuucucuuccca

SEQ ID NO: 678527 - RNA, 19 nt, Artificial Sequence
  Description of Artificial Sequence: Synthetic oligonucleotide
  Antisense strand to SEQ ID NO: 678526
ugggaagagaaguuuccca

SEQ ID NO: 678528 - RNA, 19 nt, Artificial Sequence
  Description of Artificial Sequence: Synthetic oligonucleotide
  Sense strand starting at position 3082 of SEQ ID NO: 585925
ugucgccuugagucaguua

SEQ ID NO: 678529 - RNA, 19 nt, Artificial Sequence
  Description of Artificial Sequence: Synthetic oligonucleotide
  Antisense strand to SEQ ID NO: 678528
uaacugacucaaggcgaca

SEQ ID NO: 678530 - RNA, 19 nt, Artificial Sequence
  Description of Artificial Sequence: Synthetic oligonucleotide
  Sense strand starting at position 3144 of SEQ ID NO: 585925
augaguaucucccucauua

SEQ ID NO: 678531 - RNA, 19 nt, Artificial Sequence
  Description of Artificial Sequence: Synthetic oligonucleotide
  Antisense strand to SEQ ID NO: 678530
uaaugagggagauacucau

SEQ ID NO: 678532 - RNA, 19 nt, Artificial Sequence
  Description of Artificial Sequence: Synthetic oligonucleotide
  Sense strand starting at position 3209 of SEQ ID NO: 585925
aguggucugcccuaguaag

SEQ ID NO: 678533 - RNA, 19 nt, Artificial Sequence
  Description of Artificial Sequence: Synthetic oligonucleotide
  Antisense strand to SEQ ID NO: 678532
cuuacuagggcagaccacu

SEQ ID NO: 678534 - RNA, 19 nt, Artificial Sequence
  Description of Artificial Sequence: Synthetic oligonucleotide
  Sense strand starting at position 3223 of SEQ ID NO: 585925
guaagugcucaacaaagag

SEQ ID NO: 678535 - RNA, 19 nt, Artificial Sequence
  Description of Artificial Sequence: Synthetic oligonucleotide
  Antisense strand to SEQ ID NO: 678534
cucuuuguugagcacuuac

SEQ ID NO: 678536 - RNA, 19 nt, Artificial Sequence
  Description of Artificial Sequence: Synthetic oligonucleotide
  Sense strand starting at position 3303 of SEQ ID NO: 585925
agccuuguuccagagaagg

SEQ ID NO: 678537 - RNA, 19 nt, Artificial Sequence
  Description of Artificial Sequence: Synthetic oligonucleotide
  Antisense strand to SEQ ID NO: 678536
ccuucucuggaacaaggcu

SEQ ID NO: 678538 - RNA, 19 nt, Artificial Sequence
  Description of Artificial Sequence: Synthetic oligonucleotide
  Sense strand starting at position 3464 of SEQ ID NO: 585925
gacuuacacugaggauaua

SEQ ID NO: 678539 - RNA, 19 nt, Artificial Sequence
  Description of Artificial Sequence: Synthetic oligonucleotide
  Antisense strand to SEQ ID NO: 678538
uauauccucaguguaaguc

SEQ ID NO: 678540 - RNA, 19 nt, Artificial Sequence
  Description of Artificial Sequence: Synthetic oligonucleotide
  Sense strand starting at position 3536 of SEQ ID NO: 585925
gcagauucugaaugcuguu

SEQ ID NO: 678541 - RNA, 19 nt, Artificial Sequence
  Description of Artificial Sequence: Synthetic oligonucleotide
  Antisense strand to SEQ ID NO: 678540
aacagcauucagaaucugc

SEQ ID NO: 678542 - RNA, 19 nt, Artificial Sequence
  Description of Artificial Sequence: Synthetic oligonucleotide
  Sense strand starting at position 3549 of SEQ ID NO: 585925
gcuguuacaguucacgaga

SEQ ID NO: 678543 - RNA, 19 nt, Artificial Sequence
  Description of Artificial Sequence: Synthetic oligonucleotide
  Antisense strand to SEQ ID NO: 678542
ucucgugaacuguaacagc

SEQ ID NO: 678544 - RNA, 19 nt, Artificial Sequence
  Description of Artificial Sequence: Synthetic oligonucleotide
  Sense strand starting at position 3577 of SEQ ID NO: 585925
aggaauaggucccugguua

SEQ ID NO: 678545 - RNA, 19 nt, Artificial Sequence
  Description of Artificial Sequence: Synthetic oligonucleotide
  Antisense strand to SEQ ID NO: 678544
uaaccagggaccuauuccu

SEQ ID NO: 678546 - RNA, 19 nt, Artificial Sequence
  Description of Artificial Sequence: Synthetic oligonucleotide
  Sense strand starting at position 3578 of SEQ ID NO: 585925
ggaauaggucccugguuaa

SEQ ID NO: 678547 - RNA, 19 nt, Artificial Sequence
  Description of Artificial Sequence: Synthetic oligonucleotide
  Antisense strand to SEQ ID NO: 678546
uuaaccagggaccuauucc

SEQ ID NO: 678548 - RNA, 19 nt, Artificial Sequence
  Description of Artificial Sequence: Synthetic oligonucleotide
  Sense strand starting at position 3712 of SEQ ID NO: 585925
gggaaaguccuguguaggu

SEQ ID NO: 678549 - RNA, 19 nt, Artificial Sequence
  Description of Artificial Sequence: Synthetic oligonucleotide
  Antisense strand to SEQ ID NO: 678548
accuacacaggacuuuccc

SEQ ID NO: 678550 - RNA, 19 nt, Artificial Sequence
  Description of Artificial Sequence: Synthetic oligonucleotide
  Sense strand starting at position 3714 of SEQ ID NO: 585925
gaaaguccuguguagguaa

SEQ ID NO: 678551 - RNA, 19 nt, Artificial Sequence
  Description of Artificial Sequence: Synthetic oligonucleotide
  Antisense strand to SEQ ID NO: 678550
uuaccuacacaggacuuuc

SEQ ID NO: 678552 - RNA, 19 nt, Artificial Sequence
  Description of Artificial Sequence: Synthetic oligonucleotide
  Sense strand starting at position 3725 of SEQ ID NO: 585925
guagguaaugcuggcauua

SEQ ID NO: 678553 - RNA, 19 nt, Artificial Sequence
  Description of Artificial Sequence: Synthetic oligonucleotide
  Antisense strand to SEQ ID NO: 678552
uaaugccagcauuaccuac

SEQ ID NO: 678554 - RNA, 19 nt, Artificial Sequence
  Description of Artificial Sequence: Synthetic oligonucleotide
  Sense strand starting at position 3737 of SEQ ID NO: 585925
ggcauuaucccauggacuc

SEQ ID NO: 678555 - RNA, 19 nt, Artificial Sequence
  Description of Artificial Sequence: Synthetic oligonucleotide
  Antisense strand to SEQ ID NO: 678554
gaguccaugggauaaugcc

SEQ ID NO: 678556 - RNA, 19 nt, Artificial Sequence
  Description of Artificial Sequence: Synthetic oligonucleotide
  Sense strand starting at position 3738 of SEQ ID NO: 585925
gcauuaucccauggacuca

SEQ ID NO: 678557 - RNA, 19 nt, Artificial Sequence
  Description of Artificial Sequence: Synthetic oligonucleotide
  Antisense strand to SEQ ID NO: 678556
ugaguccaugggauaaugc

SEQ ID NO: 678558 - RNA, 19 nt, Artificial Sequence
  Description of Artificial Sequence: Synthetic oligonucleotide
  Sense strand starting at position 3753 of SEQ ID NO: 585925
cucauagaaugggugugau

SEQ ID NO: 678559 - RNA, 19 nt, Artificial Sequence
  Description of Artificial Sequence: Synthetic oligonucleotide
  Antisense strand to SEQ ID NO: 678558
aucacacccauucuaugag

SEQ ID NO: 678560 - RNA, 19 nt, Artificial Sequence
  Description of Artificial Sequence: Synthetic oligonucleotide
  Sense strand starting at position 3762 of SEQ ID NO: 585925
ugggugugauuuggaguga

SEQ ID NO: 678561 - RNA, 19 nt, Artificial Sequence
  Description of Artificial Sequence: Synthetic oligonucleotide
  Antisense strand to SEQ ID NO: 678560
ucacuccaaaucacaccca

SEQ ID NO: 678562 - RNA, 19 nt, Artificial Sequence
  Description of Artificial Sequence: Synthetic oligonucleotide
  Sense strand starting at position 3804 of SEQ ID NO: 585925
ugccucgauuucccauauu

SEQ ID NO: 678563 - RNA, 19 nt, Artificial Sequence
  Description of Artificial Sequence: Synthetic oligonucleotide
  Antisense strand to SEQ ID NO: 678562
aauaugggaaaucgaggca

SEQ ID NO: 678564 - RNA, 19 nt, Artificial Sequence
  Description of Artificial Sequence: Synthetic oligonucleotide
  Sense strand starting at position 3845 of SEQ ID NO: 585925
cucugcaagugccuauaua

SEQ ID NO: 678565 - RNA, 19 nt, Artificial Sequence
  Description of Artificial Sequence: Synthetic oligonucleotide
  Antisense strand to SEQ ID NO: 678564
uauauaggcacuugcagag

SEQ ID NO: 678566 - RNA, 19 nt, Artificial Sequence
  Description of Artificial Sequence: Synthetic oligonucleotide
  Sense strand starting at position 128 of SEQ ID NO: 585926
aaagcauaccgucagguua

SEQ ID NO: 678567 - RNA, 19 nt, Artificial Sequence
  Description of Artificial Sequence: Synthetic oligonucleotide
  Antisense strand to SEQ ID NO: 678566
uaaccugacgguaugcuuu

SEQ ID NO: 678568 - RNA, 19 nt, Artificial Sequence
  Description of Artificial Sequence: Synthetic oligonucleotide
  Sense strand starting at position 289 of SEQ ID NO: 585926
caccaagaacugcguucua

SEQ ID NO: 678569 - RNA, 19 nt, Artificial Sequence
  Description of Artificial Sequence: Synthetic oligonucleotide
  Antisense strand to SEQ ID NO: 678568
uagaacgcaguucuuggug

SEQ ID NO: 678570 - RNA, 19 nt, Artificial Sequence
  Description of Artificial Sequence: Synthetic oligonucleotide
  Sense strand starting at position 300 of SEQ ID NO: 585926
gcguucuaaccgagcgcau

SEQ ID NO: 678571 - RNA, 19 nt, Artificial Sequence
  Description of Artificial Sequence: Synthetic oligonucleotide
  Antisense strand to SEQ ID NO: 678570
augcgcucgguuagaacgc

SEQ ID NO: 678572 - RNA, 19 nt, Artificial Sequence
  Description of Artificial Sequence: Synthetic oligonucleotide
  Sense strand starting at position 477 of SEQ ID NO: 585926
ugucccuuucccugaggga

SEQ ID NO: 678573 - RNA, 19 nt, Artificial Sequence
  Description of Artificial Sequence: Synthetic oligonucleotide
  Antisense strand to SEQ ID NO: 678572
ucccucagggaaagggaca

SEQ ID NO: 678574 - RNA, 19 nt, Artificial Sequence
  Description of Artificial Sequence: Synthetic oligonucleotide
  Sense strand starting at position 478 of SEQ ID NO: 585926
gucccuuucccugagggau

SEQ ID NO: 678575 - RNA, 19 nt, Artificial Sequence
  Description of Artificial Sequence: Synthetic oligonucleotide
  Antisense strand to SEQ ID NO: 678574
aucccucagggaaagggac

SEQ ID NO: 678576 - RNA, 19 nt, Artificial Sequence
  Description of Artificial Sequence: Synthetic oligonucleotide
  Sense strand starting at position 480 of SEQ ID NO: 585926
cccuuucccugagggauga

SEQ ID NO: 678577 - RNA, 19 nt, Artificial Sequence
  Description of Artificial Sequence: Synthetic oligonucleotide
  Antisense strand to SEQ ID NO: 678576
ucaucccucagggaaaggg

SEQ ID NO: 678578 - RNA, 19 nt, Artificial Sequence
  Description of Artificial Sequence: Synthetic oligonucleotide
  Sense strand starting at position 538 of SEQ ID NO: 585926
ggagcugggcaguaauuaa

SEQ ID NO: 678579 - RNA, 19 nt, Artificial Sequence
  Description of Artificial Sequence: Synthetic oligonucleotide
  Antisense strand to SEQ ID NO: 678578
uuaauuacugcccagcucc

SEQ ID NO: 678580 - RNA, 19 nt, Artificial Sequence
  Description of Artificial Sequence: Synthetic oligonucleotide
  Sense strand starting at position 594 of SEQ ID NO: 585926
gcucaaguugagugcagaa

SEQ ID NO: 678581 - RNA, 19 nt, Artificial Sequence
  Description of Artificial Sequence: Synthetic oligonucleotide
  Antisense strand to SEQ ID NO: 678580
uucugcacucaacuugagc

SEQ ID NO: 678582 - RNA, 19 nt, Artificial Sequence
  Description of Artificial Sequence: Synthetic oligonucleotide
  Sense strand starting at position 1868 of SEQ ID NO: 585926
cggcaacuugucgcaaguu

SEQ ID NO: 678583 - RNA, 19 nt, Artificial Sequence
  Description of Artificial Sequence: Synthetic oligonucleotide
  Antisense strand to SEQ ID NO: 678582
aacuugcgacaaguugccg

SEQ ID NO: 678584 - RNA, 19 nt, Artificial Sequence
  Description of Artificial Sequence: Synthetic oligonucleotide
  Sense strand starting at position 2233 of SEQ ID NO: 585926
gaaagaggcucuugacuug

SEQ ID NO: 678585 - RNA, 19 nt, Artificial Sequence
  Description of Artificial Sequence: Synthetic oligonucleotide
  Antisense strand to SEQ ID NO: 678584
caagucaagagccucuuuc

SEQ ID NO: 678586 - RNA, 19 nt, Artificial Sequence
  Description of Artificial Sequence: Synthetic oligonucleotide
  Sense strand starting at position 2289 of SEQ ID NO: 585926
uuucuccucucaguaaagu

SEQ ID NO: 678587 - RNA, 19 nt, Artificial Sequence
  Description of Artificial Sequence: Synthetic oligonucleotide
  Antisense strand to SEQ ID NO: 678586
acuuuacugagaggagaaa

SEQ ID NO: 678588 - RNA, 19 nt, Artificial Sequence
  Description of Artificial Sequence: Synthetic oligonucleotide
  Sense strand starting at position 2298 of SEQ ID NO: 585926
ucaguaaagucccaaacca

SEQ ID NO: 678589 - RNA, 19 nt, Artificial Sequence
  Description of Artificial Sequence: Synthetic oligonucleotide
  Antisense strand to SEQ ID NO: 678588
ugguuugggacuuuacuga

SEQ ID NO: 678590 - RNA, 19 nt, Artificial Sequence
  Description of Artificial Sequence: Synthetic oligonucleotide
  Sense strand starting at position 2316 of SEQ ID NO: 585926
agggcucacuaagauacau

SEQ ID NO: 678591 - RNA, 19 nt, Artificial Sequence
  Description of Artificial Sequence: Synthetic oligonucleotide
  Antisense strand to SEQ ID NO: 678590
auguaucuuagugagcccu

SEQ ID NO: 678592 - RNA, 19 nt, Artificial Sequence
  Description of Artificial Sequence: Synthetic oligonucleotide
  Sense strand starting at position 2623 of SEQ ID NO: 585926
cugagcuugcugucauguu

SEQ ID NO: 678593 - RNA, 19 nt, Artificial Sequence
  Description of Artificial Sequence: Synthetic oligonucleotide
  Antisense strand to SEQ ID NO: 678592
aacaugacagcaagcucag

SEQ ID NO: 678594 - RNA, 19 nt, Artificial Sequence
  Description of Artificial Sequence: Synthetic oligonucleotide
  Sense strand starting at position 2631 of SEQ ID NO: 585926
gcugucauguugcuggaca

SEQ ID NO: 678595 - RNA, 19 nt, Artificial Sequence
  Description of Artificial Sequence: Synthetic oligonucleotide
  Antisense strand to SEQ ID NO: 678594
uguccagcaacaugacagc

SEQ ID NO: 678596 - RNA, 19 nt, Artificial Sequence
  Description of Artificial Sequence: Synthetic oligonucleotide
  Sense strand starting at position 2633 of SEQ ID NO: 585926
ugucauguugcuggacaga

SEQ ID NO: 678597 - RNA, 19 nt, Artificial Sequence
  Description of Artificial Sequence: Synthetic oligonucleotide
  Antisense strand to SEQ ID NO: 678596
ucuguccagcaacaugaca

SEQ ID NO: 678598 - RNA, 19 nt, Artificial Sequence
  Description of Artificial Sequence: Synthetic oligonucleotide
  Sense strand starting at position 2636 of SEQ ID NO: 585926
cauguugcuggacagaaau

SEQ ID NO: 678599 - RNA, 19 nt, Artificial Sequence
  Description of Artificial Sequence: Synthetic oligonucleotide
  Antisense strand to SEQ ID NO: 678598
auuucuguccagcaacaug

SEQ ID NO: 678600 - RNA, 19 nt, Artificial Sequence
  Description of Artificial Sequence: Synthetic oligonucleotide
  Sense strand starting at position 2646 of SEQ ID NO: 585926
gacagaaauugucugagcu

SEQ ID NO: 678601 - RNA, 19 nt, Artificial Sequence
  Description of Artificial Sequence: Synthetic oligonucleotide
  Antisense strand to SEQ ID NO: 678600
agcucagacaauuucuguc

SEQ ID NO: 678602 - RNA, 19 nt, Artificial Sequence
  Description of Artificial Sequence: Synthetic oligonucleotide
  Sense strand starting at position 2647 of SEQ ID NO: 585926
acagaaauugucugagcuc

SEQ ID NO: 678603 - RNA, 19 nt, Artificial Sequence
  Description of Artificial Sequence: Synthetic oligonucleotide
  Antisense strand to SEQ ID NO: 678602
gagcucagacaauuucugu

SEQ ID NO: 678604 - RNA, 19 nt, Artificial Sequence
  Description of Artificial Sequence: Synthetic oligonucleotide
  Sense strand starting at position 2650 of SEQ ID NO: 585926
gaaauugucugagcuccuu

SEQ ID NO: 678605 - RNA, 19 nt, Artificial Sequence
  Description of Artificial Sequence: Synthetic oligonucleotide
  Antisense strand to SEQ ID NO: 678604
aaggagcucagacaauuuc

SEQ ID NO: 678606 - RNA, 19 nt, Artificial Sequence
  Description of Artificial Sequence: Synthetic oligonucleotide
  Sense strand starting at position 2906 of SEQ ID NO: 585926
caagaucccuugcugaguu

SEQ ID NO: 678607 - RNA, 19 nt, Artificial Sequence
  Description of Artificial Sequence: Synthetic oligonucleotide
  Antisense strand to SEQ ID NO: 678606
aacucagcaagggaucuug

SEQ ID NO: 678608 - RNA, 19 nt, Artificial Sequence
  Description of Artificial Sequence: Synthetic oligonucleotide
  Sense strand starting at position 2918 of SEQ ID NO: 585926
cugaguugguuccagcaaa

SEQ ID NO: 678609 - RNA, 19 nt, Artificial Sequence
  Description of Artificial Sequence: Synthetic oligonucleotide
  Antisense strand to SEQ ID NO: 678608
uuugcuggaaccaacucag

SEQ ID NO: 678610 - RNA, 19 nt, Artificial Sequence
  Description of Artificial Sequence: Synthetic oligonucleotide
  Sense strand starting at position 2938 of SEQ ID NO: 585926
aggcucgauuucucuguga

SEQ ID NO: 678611 - RNA, 19 nt, Artificial Sequence
  Description of Artificial Sequence: Synthetic oligonucleotide
  Antisense strand to SEQ ID NO: 678610
ucacagagaaaucgagccu

SEQ ID NO: 678612 - RNA, 19 nt, Artificial Sequence
  Description of Artificial Sequence: Synthetic oligonucleotide
  Sense strand starting at position 2940 of SEQ ID NO: 585926
gcucgauuucucugugacu

SEQ ID NO: 678613 - RNA, 19 nt, Artificial Sequence
  Description of Artificial Sequence: Synthetic oligonucleotide
  Antisense strand to SEQ ID NO: 678612
agucacagagaaaucgagc

SEQ ID NO: 678614 - RNA, 19 nt, Artificial Sequence
  Description of Artificial Sequence: Synthetic oligonucleotide
  Sense strand starting at position 2941 of SEQ ID NO: 585926
cucgauuucucugugacuc

SEQ ID NO: 678615 - RNA, 19 nt, Artificial Sequence
  Description of Artificial Sequence: Synthetic oligonucleotide
  Antisense strand to SEQ ID NO: 678614
gagucacagagaaaucgag

SEQ ID NO: 678616 - RNA, 19 nt, Artificial Sequence
  Description of Artificial Sequence: Synthetic oligonucleotide
  Sense strand starting at position 2942 of SEQ ID NO: 585926
ucgauuucucugugacuca

SEQ ID NO: 678617 - RNA, 19 nt, Artificial Sequence
  Description of Artificial Sequence: Synthetic oligonucleotide
  Antisense strand to SEQ ID NO: 678616
ugagucacagagaaaucga

SEQ ID NO: 678618 - RNA, 19 nt, Artificial Sequence
  Description of Artificial Sequence: Synthetic oligonucleotide
  Sense strand starting at position 2943 of SEQ ID NO: 585926
cgauuucucugugacucaa

SEQ ID NO: 678619 - RNA, 19 nt, Artificial Sequence
  Description of Artificial Sequence: Synthetic oligonucleotide
  Antisense strand to SEQ ID NO: 678618
uugagucacagagaaaucg

SEQ ID NO: 678620 - RNA, 19 nt, Artificial Sequence
  Description of Artificial Sequence: Synthetic oligonucleotide
  Sense strand starting at position 3044 of SEQ ID NO: 585926
aacuuuaagcucugagggu

SEQ ID NO: 678621 - RNA, 19 nt, Artificial Sequence
  Description of Artificial Sequence: Synthetic oligonucleotide
  Antisense strand to SEQ ID NO: 678620
acccucagagcuuaaaguu

SEQ ID NO: 678622 - RNA, 19 nt, Artificial Sequence
  Description of Artificial Sequence: Synthetic oligonucleotide
  Sense strand starting at position 3045 of SEQ ID NO: 585926
acuuuaagcucugaggguu

SEQ ID NO: 678623 - RNA, 19 nt, Artificial Sequence
  Description of Artificial Sequence: Synthetic oligonucleotide
  Antisense strand to SEQ ID NO: 678622
aacccucagagcuuaaagu

SEQ ID NO: 678624 - RNA, 19 nt, Artificial Sequence
  Description of Artificial Sequence: Synthetic oligonucleotide
  Sense strand starting at position 3048 of SEQ ID NO: 585926
uuaagcucugaggguuaca

SEQ ID NO: 678625 - RNA, 19 nt, Artificial Sequence
  Description of Artificial Sequence: Synthetic oligonucleotide
  Antisense strand to SEQ ID NO: 678624
uguaacccucagagcuuaa

SEQ ID NO: 678626 - RNA, 19 nt, Artificial Sequence
  Description of Artificial Sequence: Synthetic oligonucleotide
  Sense strand starting at position 3360 of SEQ ID NO: 585926
ccaagucguagacggaaua

SEQ ID NO: 678627 - RNA, 19 nt, Artificial Sequence
  Description of Artificial Sequence: Synthetic oligonucleotide
  Antisense strand to SEQ ID NO: 678626
uauuccgucuacgacuugg

SEQ ID NO: 678628 - RNA, 19 nt, Artificial Sequence
  Description of Artificial Sequence: Synthetic oligonucleotide
  Sense strand starting at position 3469 of SEQ ID NO: 585926
gccguuguucugcucaaca

SEQ ID NO: 678629 - RNA, 19 nt, Artificial Sequence
  Description of Artificial Sequence: Synthetic oligonucleotide
  Antisense strand to SEQ ID NO: 678628
uguugagcagaacaacggc

SEQ ID NO: 678630 - RNA, 19 nt, Artificial Sequence
  Description of Artificial Sequence: Synthetic oligonucleotide
  Sense strand starting at position 3471 of SEQ ID NO: 585926
cguuguucugcucaacaaa

SEQ ID NO: 678631 - RNA, 19 nt, Artificial Sequence
  Description of Artificial Sequence: Synthetic oligonucleotide
  Antisense strand to SEQ ID NO: 678630
uuuguugagcagaacaacg

SEQ ID NO: 678632 - RNA, 19 nt, Artificial Sequence
  Description of Artificial Sequence: Synthetic oligonucleotide
  Sense strand starting at position 3474 of SEQ ID NO: 585926
uguucugcucaacaaagaa

SEQ ID NO: 678633 - RNA, 19 nt, Artificial Sequence
  Description of Artificial Sequence: Synthetic oligonucleotide
  Antisense strand to SEQ ID NO: 678632
uucuuuguugagcagaaca

SEQ ID NO: 678634 - RNA, 19 nt, Artificial Sequence
  Description of Artificial Sequence: Synthetic oligonucleotide
  Sense strand starting at position 3707 of SEQ ID NO: 585926
ugggaaacuucucuuccca

SEQ ID NO: 678635 - RNA, 19 nt, Artificial Sequence
  Description of Artificial Sequence: Synthetic oligonucleotide
  Antisense strand to SEQ ID NO: 678634
ugggaagagaaguuuccca

SEQ ID NO: 678636 - RNA, 19 nt, Artificial Sequence
  Description of Artificial Sequence: Synthetic oligonucleotide
  Sense strand starting at position 3769 of SEQ ID NO: 585926
gguuaaaccuuggagccaa

SEQ ID NO: 678637 - RNA, 19 nt, Artificial Sequence
  Description of Artificial Sequence: Synthetic oligonucleotide
  Antisense strand to SEQ ID NO: 678636
uuggcuccaagguuuaacc

SEQ ID NO: 678638 - RNA, 19 nt, Artificial Sequence
  Description of Artificial Sequence: Synthetic oligonucleotide
  Sense strand starting at position 3814 of SEQ ID NO: 585926
ugucgccuugagucaguua

SEQ ID NO: 678639 - RNA, 19 nt, Artificial Sequence
  Description of Artificial Sequence: Synthetic oligonucleotide
  Antisense strand to SEQ ID NO: 678638
uaacugacucaaggcgaca

SEQ ID NO: 678640 - RNA, 19 nt, Artificial Sequence
  Description of Artificial Sequence: Synthetic oligonucleotide
  Sense strand starting at position 3876 of SEQ ID NO: 585926
augaguaucucccucauua

SEQ ID NO: 678641 - RNA, 19 nt, Artificial Sequence
  Description of Artificial Sequence: Synthetic oligonucleotide
  Antisense strand to SEQ ID NO: 678640
uaaugagggagauacucau

SEQ ID NO: 678642 - RNA, 19 nt, Artificial Sequence
  Description of Artificial Sequence: Synthetic oligonucleotide
  Sense strand starting at position 3941 of SEQ ID NO: 585926
aguggucugcccuaguaag

SEQ ID NO: 678643 - RNA, 19 nt, Artificial Sequence
  Description of Artificial Sequence: Synthetic oligonucleotide
  Antisense strand to SEQ ID NO: 678642
cuuacuagggcagaccacu

SEQ ID NO: 678644 - RNA, 19 nt, Artificial Sequence
  Description of Artificial Sequence: Synthetic oligonucleotide
  Sense strand starting at position 3955 of SEQ ID NO: 585926
guaagugcucaacaaagag

SEQ ID NO: 678645 - RNA, 19 nt, Artificial Sequence
  Description of Artificial Sequence: Synthetic oligonucleotide
  Antisense strand to SEQ ID NO: 678644
cucuuuguugagcacuuac

SEQ ID NO: 678646 - RNA, 19 nt, Artificial Sequence
  Description of Artificial Sequence: Synthetic oligonucleotide
  Sense strand starting at position 13 of SEQ ID NO: 585927
acaauaaauguuggcaacu

SEQ ID NO: 678647 - RNA, 19 nt, Artificial Sequence
  Description of Artificial Sequence: Synthetic oligonucleotide
  Antisense strand to SEQ ID NO: 678646
aguugccaacauuuauugu

SEQ ID NO: 678648 - RNA, 19 nt, Artificial Sequence
  Description of Artificial Sequence: Synthetic oligonucleotide
  Sense strand starting at position 22 of SEQ ID NO: 585927
guuggcaacuauuguauaa

SEQ ID NO: 678649 - RNA, 19 nt, Artificial Sequence
  Description of Artificial Sequence: Synthetic oligonucleotide
  Antisense strand to SEQ ID NO: 678648
uuauacaauaguugccaac

SEQ ID NO: 678650 - RNA, 19 nt, Artificial Sequence
  Description of Artificial Sequence: Synthetic oligonucleotide
  Sense strand starting at position 24 of SEQ ID NO: 585927
uggcaacuauuguauaauc

SEQ ID NO: 678651 - RNA, 19 nt, Artificial Sequence
  Description of Artificial Sequence: Synthetic oligonucleotide
  Antisense strand to SEQ ID NO: 678650
gauuauacaauaguugcca

SEQ ID NO: 678652 - RNA, 19 nt, Artificial Sequence
  Description of Artificial Sequence: Synthetic oligonucleotide
  Sense strand starting at position 57 of SEQ ID NO: 585927
auuguucuaguauagcaua

SEQ ID NO: 678653 - RNA, 19 nt, Artificial Sequence
  Description of Artificial Sequence: Synthetic oligonucleotide
  Antisense strand to SEQ ID NO: 678652
uaugcuauacuagaacaau

SEQ ID NO: 678654 - RNA, 19 nt, Artificial Sequence
  Description of Artificial Sequence: Synthetic oligonucleotide
  Sense strand starting at position 328 of SEQ ID NO: 585927
gaggauccacacuguacau

SEQ ID NO: 678655 - RNA, 19 nt, Artificial Sequence
  Description of Artificial Sequence: Synthetic oligonucleotide
  Antisense strand to SEQ ID NO: 678654
auguacaguguggauccuc

SEQ ID NO: 678656 - RNA, 19 nt, Artificial Sequence
  Description of Artificial Sequence: Synthetic oligonucleotide
  Sense strand starting at position 363 of SEQ ID NO: 585927
cguccugggacgugaacau

SEQ ID NO: 678657 - RNA, 19 nt, Artificial Sequence
  Description of Artificial Sequence: Synthetic oligonucleotide
  Antisense strand to SEQ ID NO: 678656
auguucacgucccaggacg

SEQ ID NO: 678658 - RNA, 19 nt, Artificial Sequence
  Description of Artificial Sequence: Synthetic oligonucleotide
  Sense strand starting at position 636 of SEQ ID NO: 585927
ggugcuaaguaacucuauu

SEQ ID NO: 678659 - RNA, 19 nt, Artificial Sequence
  Description of Artificial Sequence: Synthetic oligonucleotide
  Antisense strand to SEQ ID NO: 678658
aauagaguuacuuagcacc

SEQ ID NO: 678660 - RNA, 19 nt, Artificial Sequence
  Description of Artificial Sequence: Synthetic oligonucleotide
  Sense strand starting at position 652 of SEQ ID NO: 585927
auuaacucuggcuaaugau

SEQ ID NO: 678661 - RNA, 19 nt, Artificial Sequence
  Description of Artificial Sequence: Synthetic oligonucleotide
  Antisense strand to SEQ ID NO: 678660
aucauuagccagaguuaau

SEQ ID NO: 678662 - RNA, 19 nt, Artificial Sequence
  Description of Artificial Sequence: Synthetic oligonucleotide
  Sense strand starting at position 1056 of SEQ ID NO: 585927
uguaacaagccuuguaaau

SEQ ID NO: 678663 - RNA, 19 nt, Artificial Sequence
  Description of Artificial Sequence: Synthetic oligonucleotide
  Antisense strand to SEQ ID NO: 678662
auuuacaaggcuuguuaca

SEQ ID NO: 678664 - RNA, 19 nt, Artificial Sequence
  Description of Artificial Sequence: Synthetic oligonucleotide
  Sense strand starting at position 1254 of SEQ ID NO: 585927
aaagcauaccgucagguua

SEQ ID NO: 678665 - RNA, 19 nt, Artificial Sequence
  Description of Artificial Sequence: Synthetic oligonucleotide
  Antisense strand to SEQ ID NO: 678664
uaaccugacgguaugcuuu

SEQ ID NO: 678666 - RNA, 19 nt, Artificial Sequence
  Description of Artificial Sequence: Synthetic oligonucleotide
  Sense strand starting at position 1415 of SEQ ID NO: 585927
caccaagaacugcguucua

SEQ ID NO: 678667 - RNA, 19 nt, Artificial Sequence
  Description of Artificial Sequence: Synthetic oligonucleotide
  Antisense strand to SEQ ID NO: 678666
uagaacgcaguucuuggug

SEQ ID NO: 678668 - RNA, 19 nt, Artificial Sequence
  Description of Artificial Sequence: Synthetic oligonucleotide
  Sense strand starting at position 1426 of SEQ ID NO: 585927
gcguucuaaccgagcgcau

SEQ ID NO: 678669 - RNA, 19 nt, Artificial Sequence
  Description of Artificial Sequence: Synthetic oligonucleotide
  Antisense strand to SEQ ID NO: 678668
augcgcucgguuagaacgc

SEQ ID NO: 678670 - RNA, 19 nt, Artificial Sequence
  Description of Artificial Sequence: Synthetic oligonucleotide
  Sense strand starting at position 1603 of SEQ ID NO: 585927
ugucccuuucccugaggga

SEQ ID NO: 678671 - RNA, 19 nt, Artificial Sequence
  Description of Artificial Sequence: Synthetic oligonucleotide
  Antisense strand to SEQ ID NO: 678670
ucccucagggaaagggaca

SEQ ID NO: 678672 - RNA, 19 nt, Artificial Sequence
  Description of Artificial Sequence: Synthetic oligonucleotide
  Sense strand starting at position 1604 of SEQ ID NO: 585927
gucccuuucccugagggau

SEQ ID NO: 678673 - RNA, 19 nt, Artificial Sequence
  Description of Artificial Sequence: Synthetic oligonucleotide
  Antisense strand to SEQ ID NO: 678672
aucccucagggaaagggac

SEQ ID NO: 678674 - RNA, 19 nt, Artificial Sequence
  Description of Artificial Sequence: Synthetic oligonucleotide
  Sense strand starting at position 1606 of SEQ ID NO: 585927
cccuuucccugagggauga

SEQ ID NO: 678675 - RNA, 19 nt, Artificial Sequence
  Description of Artificial Sequence: Synthetic oligonucleotide
  Antisense strand to SEQ ID NO: 678674
ucaucccucagggaaaggg

SEQ ID NO: 678676 - RNA, 19 nt, Artificial Sequence
  Description of Artificial Sequence: Synthetic oligonucleotide
  Sense strand starting at position 1664 of SEQ ID NO: 585927
ggagcugggcaguaauuaa

SEQ ID NO: 678677 - RNA, 19 nt, Artificial Sequence
  Description of Artificial Sequence: Synthetic oligonucleotide
  Antisense strand to SEQ ID NO: 678676
uuaauuacugcccagcucc

SEQ ID NO: 678678 - RNA, 19 nt, Artificial Sequence
  Description of Artificial Sequence: Synthetic oligonucleotide
  Sense strand starting at position 1720 of SEQ ID NO: 585927
gcucaaguugagugcagaa

SEQ ID NO: 678679 - RNA, 19 nt, Artificial Sequence
  Description of Artificial Sequence: Synthetic oligonucleotide
  Antisense strand to SEQ ID NO: 678678
uucugcacucaacuugagc

SEQ ID NO: 678680 - RNA, 19 nt, Artificial Sequence
  Description of Artificial Sequence: Synthetic oligonucleotide
  Sense strand starting at position 2574 of SEQ ID NO: 585927
ccucaaacuucuugcgagu

SEQ ID NO: 678681 - RNA, 19 nt, Artificial Sequence
  Description of Artificial Sequence: Synthetic oligonucleotide
  Antisense strand to SEQ ID NO: 678680
acucgcaagaaguuugagg

SEQ ID NO: 678682 - RNA, 19 nt, Artificial Sequence
  Description of Artificial Sequence: Synthetic oligonucleotide
  Sense strand starting at position 2673 of SEQ ID NO: 585927
uacauaaggucgcggagaa

SEQ ID NO: 678683 - RNA, 19 nt, Artificial Sequence
  Description of Artificial Sequence: Synthetic oligonucleotide
  Antisense strand to SEQ ID NO: 678682
uucuccgcgaccuuaugua

SEQ ID NO: 678684 - RNA, 19 nt, Artificial Sequence
  Description of Artificial Sequence: Synthetic oligonucleotide
  Sense strand starting at position 2994 of SEQ ID NO: 585927
cggcaacuugucgcaaguu

SEQ ID NO: 678685 - RNA, 19 nt, Artificial Sequence
  Description of Artificial Sequence: Synthetic oligonucleotide
  Antisense strand to SEQ ID NO: 678684
aacuugcgacaaguugccg

SEQ ID NO: 678686 - RNA, 19 nt, Artificial Sequence
  Description of Artificial Sequence: Synthetic oligonucleotide
  Sense strand starting at position 3359 of SEQ ID NO: 585927
gaaagaggcucuugacuug

SEQ ID NO: 678687 - RNA, 19 nt, Artificial Sequence
  Description of Artificial Sequence: Synthetic oligonucleotide
  Antisense strand to SEQ ID NO: 678686
caagucaagagccucuuuc

SEQ ID NO: 678688 - RNA, 19 nt, Artificial Sequence
  Description of Artificial Sequence: Synthetic oligonucleotide
  Sense strand starting at position 3415 of SEQ ID NO: 585927
uuucuccucucaguaaagu

SEQ ID NO: 678689 - RNA, 19 nt, Artificial Sequence
  Description of Artificial Sequence: Synthetic oligonucleotide
  Antisense strand to SEQ ID NO: 678688
acuuuacugagaggagaaa

SEQ ID NO: 678690 - RNA, 19 nt, Artificial Sequence
  Description of Artificial Sequence: Synthetic oligonucleotide
  Sense strand starting at position 3424 of SEQ ID NO: 585927
ucaguaaagucccaaacca

SEQ ID NO: 678691 - RNA, 19 nt, Artificial Sequence
  Description of Artificial Sequence: Synthetic oligonucleotide
  Antisense strand to SEQ ID NO: 678690
ugguuugggacuuuacuga

SEQ ID NO: 678692 - RNA, 19 nt, Artificial Sequence
  Description of Artificial Sequence: Synthetic oligonucleotide
  Sense strand starting at position 3442 of SEQ ID NO: 585927
agggcucacuaagauacau

SEQ ID NO: 678693 - RNA, 19 nt, Artificial Sequence
  Description of Artificial Sequence: Synthetic oligonucleotide
  Antisense strand to SEQ ID NO: 678692
auguaucuuagugagcccu

SEQ ID NO: 678694 - RNA, 19 nt, Artificial Sequence
  Description of Artificial Sequence: Synthetic oligonucleotide
  Sense strand starting at position 3541 of SEQ ID NO: 585927
gugugcuguugccauagaa

SEQ ID NO: 678695 - RNA, 19 nt, Artificial Sequence
  Description of Artificial Sequence: Synthetic oligonucleotide
  Antisense strand to SEQ ID NO: 678694
uucuauggcaacagcacac

SEQ ID NO: 678696 - RNA, 19 nt, Artificial Sequence
  Description of Artificial Sequence: Synthetic oligonucleotide
  Sense strand starting at position 3747 of SEQ ID NO: 585927
gccugagcuugcugucaug

SEQ ID NO: 678697 - RNA, 19 nt, Artificial Sequence
  Description of Artificial Sequence: Synthetic oligonucleotide
  Antisense strand to SEQ ID NO: 678696
caugacagcaagcucaggc

SEQ ID NO: 678698 - RNA, 19 nt, Artificial Sequence
  Description of Artificial Sequence: Synthetic oligonucleotide
  Sense strand starting at position 3749 of SEQ ID NO: 585927
cugagcuugcugucauguu

SEQ ID NO: 678699 - RNA, 19 nt, Artificial Sequence
  Description of Artificial Sequence: Synthetic oligonucleotide
  Antisense strand to SEQ ID NO: 678698
aacaugacagcaagcucag

SEQ ID NO: 678700 - RNA, 19 nt, Artificial Sequence
  Description of Artificial Sequence: Synthetic oligonucleotide
  Sense strand starting at position 3757 of SEQ ID NO: 585927
gcugucauguugcuggaca

SEQ ID NO: 678701 - RNA, 19 nt, Artificial Sequence
  Description of Artificial Sequence: Synthetic oligonucleotide
  Antisense strand to SEQ ID NO: 678700
uguccagcaacaugacagc

SEQ ID NO: 678702 - RNA, 19 nt, Artificial Sequence
  Description of Artificial Sequence: Synthetic oligonucleotide
  Sense strand starting at position 3759 of SEQ ID NO: 585927
ugucauguugcuggacaga

SEQ ID NO: 678703 - RNA, 19 nt, Artificial Sequence
  Description of Artificial Sequence: Synthetic oligonucleotide
  Antisense strand to SEQ ID NO: 678702
ucuguccagcaacaugaca

SEQ ID NO: 678704 - RNA, 19 nt, Artificial Sequence
  Description of Artificial Sequence: Synthetic oligonucleotide
  Sense strand starting at position 3762 of SEQ ID NO: 585927
cauguugcuggacagaaau

SEQ ID NO: 678705 - RNA, 19 nt, Artificial Sequence
  Description of Artificial Sequence: Synthetic oligonucleotide
  Antisense strand to SEQ ID NO: 678704
auuucuguccagcaacaug

SEQ ID NO: 678706 - RNA, 19 nt, Artificial Sequence
  Description of Artificial Sequence: Synthetic oligonucleotide
  Sense strand starting at position 3772 of SEQ ID NO: 585927
gacagaaauugucugagcu

SEQ ID NO: 678707 - RNA, 19 nt, Artificial Sequence
  Description of Artificial Sequence: Synthetic oligonucleotide
  Antisense strand to SEQ ID NO: 678706
agcucagacaauuucuguc

SEQ ID NO: 678708 - RNA, 19 nt, Artificial Sequence
  Description of Artificial Sequence: Synthetic oligonucleotide
  Sense strand starting at position 3773 of SEQ ID NO: 585927
acagaaauugucugagcuc

SEQ ID NO: 678709 - RNA, 19 nt, Artificial Sequence
  Description of Artificial Sequence: Synthetic oligonucleotide
  Antisense strand to SEQ ID NO: 678708
gagcucagacaauuucugu

SEQ ID NO: 678710 - RNA, 19 nt, Artificial Sequence
  Description of Artificial Sequence: Synthetic oligonucleotide
  Sense strand starting at position 3776 of SEQ ID NO: 585927
gaaauugucugagcuccuu

SEQ ID NO: 678711 - RNA, 19 nt, Artificial Sequence
  Description of Artificial Sequence: Synthetic oligonucleotide
  Antisense strand to SEQ ID NO: 678710
aaggagcucagacaauuuc

SEQ ID NO: 678712 - RNA, 19 nt, Artificial Sequence
  Description of Artificial Sequence: Synthetic oligonucleotide
  Sense strand starting at position 397 of SEQ ID NO: 585928
uguaacaagccuuguaaau

SEQ ID NO: 678713 - RNA, 19 nt, Artificial Sequence
  Description of Artificial Sequence: Synthetic oligonucleotide
  Antisense strand to SEQ ID NO: 678712
auuuacaaggcuuguuaca

SEQ ID NO: 678714 - RNA, 19 nt, Artificial Sequence
  Description of Artificial Sequence: Synthetic oligonucleotide
  Sense strand starting at position 595 of SEQ ID NO: 585928
aaagcauaccgucagguua

SEQ ID NO: 678715 - RNA, 19 nt, Artificial Sequence
  Description of Artificial Sequence: Synthetic oligonucleotide
  Antisense strand to SEQ ID NO: 678714
uaaccugacgguaugcuuu

SEQ ID NO: 678716 - RNA, 19 nt, Artificial Sequence
  Description of Artificial Sequence: Synthetic oligonucleotide
  Sense strand starting at position 756 of SEQ ID NO: 585928
caccaagaacugcguucua

SEQ ID NO: 678717 - RNA, 19 nt, Artificial Sequence
  Description of Artificial Sequence: Synthetic oligonucleotide
  Antisense strand to SEQ ID NO: 678716
uagaacgcaguucuuggug

SEQ ID NO: 678718 - RNA, 19 nt, Artificial Sequence
  Description of Artificial Sequence: Synthetic oligonucleotide
  Sense strand starting at position 767 of SEQ ID NO: 585928
gcguucuaaccgagcgcau

SEQ ID NO: 678719 - RNA, 19 nt, Artificial Sequence
  Description of Artificial Sequence: Synthetic oligonucleotide
  Antisense strand to SEQ ID NO: 678718
augcgcucgguuagaacgc

SEQ ID NO: 678720 - RNA, 19 nt, Artificial Sequence
  Description of Artificial Sequence: Synthetic oligonucleotide
  Sense strand starting at position 944 of SEQ ID NO: 585928
ugucccuuucccugaggga

SEQ ID NO: 678721 - RNA, 19 nt, Artificial Sequence
  Description of Artificial Sequence: Synthetic oligonucleotide
  Antisense strand to SEQ ID NO: 678720
ucccucagggaaagggaca

SEQ ID NO: 678722 - RNA, 19 nt, Artificial Sequence
  Description of Artificial Sequence: Synthetic oligonucleotide
  Sense strand starting at position 945 of SEQ ID NO: 585928
gucccuuucccugagggau

SEQ ID NO: 678723 - RNA, 19 nt, Artificial Sequence
  Description of Artificial Sequence: Synthetic oligonucleotide
  Antisense strand to SEQ ID NO: 678722
aucccucagggaaagggac

SEQ ID NO: 678724 - RNA, 19 nt, Artificial Sequence
  Description of Artificial Sequence: Synthetic oligonucleotide
  Sense strand starting at position 947 of SEQ ID NO: 585928
cccuuucccugagggauga

SEQ ID NO: 678725 - RNA, 19 nt, Artificial Sequence
  Description of Artificial Sequence: Synthetic oligonucleotide
  Antisense strand to SEQ ID NO: 678724
ucaucccucagggaaaggg

SEQ ID NO: 678726 - RNA, 19 nt, Artificial Sequence
  Description of Artificial Sequence: Synthetic oligonucleotide
  Sense strand starting at position 1005 of SEQ ID NO: 585928
ggagcugggcaguaauuaa

SEQ ID NO: 678727 - RNA, 19 nt, Artificial Sequence
  Description of Artificial Sequence: Synthetic oligonucleotide
  Antisense strand to SEQ ID NO: 678726
uuaauuacugcccagcucc

SEQ ID NO: 678728 - RNA, 19 nt, Artificial Sequence
  Description of Artificial Sequence: Synthetic oligonucleotide
  Sense strand starting at position 1061 of SEQ ID NO: 585928
gcucaaguugagugcagaa

SEQ ID NO: 678729 - RNA, 19 nt, Artificial Sequence
  Description of Artificial Sequence: Synthetic oligonucleotide
  Antisense strand to SEQ ID NO: 678728
uucugcacucaacuugagc

SEQ ID NO: 678730 - RNA, 19 nt, Artificial Sequence
  Description of Artificial Sequence: Synthetic oligonucleotide
  Sense strand starting at position 1915 of SEQ ID NO: 585928
ccucaaacuucuugcgagu

SEQ ID NO: 678731 - RNA, 19 nt, Artificial Sequence
  Description of Artificial Sequence: Synthetic oligonucleotide
  Antisense strand to SEQ ID NO: 678730
acucgcaagaaguuugagg

SEQ ID NO: 678732 - RNA, 19 nt, Artificial Sequence
  Description of Artificial Sequence: Synthetic oligonucleotide
  Sense strand starting at position 2014 of SEQ ID NO: 585928
uacauaaggucgcggagaa

SEQ ID NO: 678733 - RNA, 19 nt, Artificial Sequence
  Description of Artificial Sequence: Synthetic oligonucleotide
  Antisense strand to SEQ ID NO: 678732
uucuccgcgaccuuaugua

SEQ ID NO: 678734 - RNA, 19 nt, Artificial Sequence
  Description of Artificial Sequence: Synthetic oligonucleotide
  Sense strand starting at position 2335 of SEQ ID NO: 585928
cggcaacuugucgcaaguu

SEQ ID NO: 678735 - RNA, 19 nt, Artificial Sequence
  Description of Artificial Sequence: Synthetic oligonucleotide
  Antisense strand to SEQ ID NO: 678734
aacuugcgacaaguugccg

SEQ ID NO: 678736 - RNA, 19 nt, Artificial Sequence
  Description of Artificial Sequence: Synthetic oligonucleotide
  Sense strand starting at position 2700 of SEQ ID NO: 585928
gaaagaggcucuugacuug

SEQ ID NO: 678737 - RNA, 19 nt, Artificial Sequence
  Description of Artificial Sequence: Synthetic oligonucleotide
  Antisense strand to SEQ ID NO: 678736
caagucaagagccucuuuc

SEQ ID NO: 678738 - RNA, 19 nt, Artificial Sequence
  Description of Artificial Sequence: Synthetic oligonucleotide
  Sense strand starting at position 2756 of SEQ ID NO: 585928
uuucuccucucaguaaagu

SEQ ID NO: 678739 - RNA, 19 nt, Artificial Sequence
  Description of Artificial Sequence: Synthetic oligonucleotide
  Antisense strand to SEQ ID NO: 678738
acuuuacugagaggagaaa

SEQ ID NO: 678740 - RNA, 19 nt, Artificial Sequence
  Description of Artificial Sequence: Synthetic oligonucleotide
  Sense strand starting at position 2765 of SEQ ID NO: 585928
ucaguaaagucccaaacca

SEQ ID NO: 678741 - RNA, 19 nt, Artificial Sequence
  Description of Artificial Sequence: Synthetic oligonucleotide
  Antisense strand to SEQ ID NO: 678740
ugguuugggacuuuacuga

SEQ ID NO: 678742 - RNA, 19 nt, Artificial Sequence
  Description of Artificial Sequence: Synthetic oligonucleotide
  Sense strand starting at position 2783 of SEQ ID NO: 585928
agggcucacuaagauacau

SEQ ID NO: 678743 - RNA, 19 nt, Artificial Sequence
  Description of Artificial Sequence: Synthetic oligonucleotide
  Antisense strand to SEQ ID NO: 678742
auguaucuuagugagcccu

SEQ ID NO: 678744 - RNA, 19 nt, Artificial Sequence
  Description of Artificial Sequence: Synthetic oligonucleotide
  Sense strand starting at position 2882 of SEQ ID NO: 585928
gugugcuguugccauagaa

SEQ ID NO: 678745 - RNA, 19 nt, Artificial Sequence
  Description of Artificial Sequence: Synthetic oligonucleotide
  Antisense strand to SEQ ID NO: 678744
uucuauggcaacagcacac

SEQ ID NO: 678746 - RNA, 19 nt, Artificial Sequence
  Description of Artificial Sequence: Synthetic oligonucleotide
  Sense strand starting at position 3088 of SEQ ID NO: 585928
gccugagcuugcugucaug

SEQ ID NO: 678747 - RNA, 19 nt, Artificial Sequence
  Description of Artificial Sequence: Synthetic oligonucleotide
  Antisense strand to SEQ ID NO: 678746
caugacagcaagcucaggc

SEQ ID NO: 678748 - RNA, 19 nt, Artificial Sequence
  Description of Artificial Sequence: Synthetic oligonucleotide
  Sense strand starting at position 3090 of SEQ ID NO: 585928
cugagcuugcugucauguu

SEQ ID NO: 678749 - RNA, 19 nt, Artificial Sequence
  Description of Artificial Sequence: Synthetic oligonucleotide
  Antisense strand to SEQ ID NO: 678748
aacaugacagcaagcucag

SEQ ID NO: 678750 - RNA, 19 nt, Artificial Sequence
  Description of Artificial Sequence: Synthetic oligonucleotide
  Sense strand starting at position 3098 of SEQ ID NO: 585928
gcugucauguugcuggaca

SEQ ID NO: 678751 - RNA, 19 nt, Artificial Sequence
  Description of Artificial Sequence: Synthetic oligonucleotide
  Antisense strand to SEQ ID NO: 678750
uguccagcaacaugacagc

SEQ ID NO: 678752 - RNA, 19 nt, Artificial Sequence
  Description of Artificial Sequence: Synthetic oligonucleotide
  Sense strand starting at position 3100 of SEQ ID NO: 585928
ugucauguugcuggacaga

SEQ ID NO: 678753 - RNA, 19 nt, Artificial Sequence
  Description of Artificial Sequence: Synthetic oligonucleotide
  Antisense strand to SEQ ID NO: 678752
ucuguccagcaacaugaca

SEQ ID NO: 678754 - RNA, 19 nt, Artificial Sequence
  Description of Artificial Sequence: Synthetic oligonucleotide
  Sense strand starting at position 3103 of SEQ ID NO: 585928
cauguugcuggacagaaau

SEQ ID NO: 678755 - RNA, 19 nt, Artificial Sequence
  Description of Artificial Sequence: Synthetic oligonucleotide
  Antisense strand to SEQ ID NO: 678754
auuucuguccagcaacaug

SEQ ID NO: 678756 - RNA, 19 nt, Artificial Sequence
  Description of Artificial Sequence: Synthetic oligonucleotide
  Sense strand starting at position 3113 of SEQ ID NO: 585928
gacagaaauugucugagcu

SEQ ID NO: 678757 - RNA, 19 nt, Artificial Sequence
  Description of Artificial Sequence: Synthetic oligonucleotide
  Antisense strand to SEQ ID NO: 678756
agcucagacaauuucuguc

SEQ ID NO: 678758 - RNA, 19 nt, Artificial Sequence
  Description of Artificial Sequence: Synthetic oligonucleotide
  Sense strand starting at position 3114 of SEQ ID NO: 585928
acagaaauugucugagcuc

SEQ ID NO: 678759 - RNA, 19 nt, Artificial Sequence
  Description of Artificial Sequence: Synthetic oligonucleotide
  Antisense strand to SEQ ID NO: 678758
gagcucagacaauuucugu

SEQ ID NO: 678760 - RNA, 19 nt, Artificial Sequence
  Description of Artificial Sequence: Synthetic oligonucleotide
  Sense strand starting at position 3117 of SEQ ID NO: 585928
gaaauugucugagcuccuu

SEQ ID NO: 678761 - RNA, 19 nt, Artificial Sequence
  Description of Artificial Sequence: Synthetic oligonucleotide
  Antisense strand to SEQ ID NO: 678760
aaggagcucagacaauuuc

SEQ ID NO: 678762 - RNA, 19 nt, Artificial Sequence
  Description of Artificial Sequence: Synthetic oligonucleotide
  Sense strand starting at position 3373 of SEQ ID NO: 585928
caagaucccuugcugaguu

SEQ ID NO: 678763 - RNA, 19 nt, Artificial Sequence
  Description of Artificial Sequence: Synthetic oligonucleotide
  Antisense strand to SEQ ID NO: 678762
aacucagcaagggaucuug

SEQ ID NO: 678764 - RNA, 19 nt, Artificial Sequence
  Description of Artificial Sequence: Synthetic oligonucleotide
  Sense strand starting at position 3385 of SEQ ID NO: 585928
cugaguugguuccagcaaa

SEQ ID NO: 678765 - RNA, 19 nt, Artificial Sequence
  Description of Artificial Sequence: Synthetic oligonucleotide
  Antisense strand to SEQ ID NO: 678764
uuugcuggaaccaacucag

SEQ ID NO: 678766 - RNA, 19 nt, Artificial Sequence
  Description of Artificial Sequence: Synthetic oligonucleotide
  Sense strand starting at position 3405 of SEQ ID NO: 585928
aggcucgauuucucuguga

SEQ ID NO: 678767 - RNA, 19 nt, Artificial Sequence
  Description of Artificial Sequence: Synthetic oligonucleotide
  Antisense strand to SEQ ID NO: 678766
ucacagagaaaucgagccu

SEQ ID NO: 678768 - RNA, 19 nt, Artificial Sequence
  Description of Artificial Sequence: Synthetic oligonucleotide
  Sense strand starting at position 3407 of SEQ ID NO: 585928
gcucgauuucucugugacu

SEQ ID NO: 678769 - RNA, 19 nt, Artificial Sequence
  Description of Artificial Sequence: Synthetic oligonucleotide
  Antisense strand to SEQ ID NO: 678768
agucacagagaaaucgagc

SEQ ID NO: 678770 - RNA, 19 nt, Artificial Sequence
  Description of Artificial Sequence: Synthetic oligonucleotide
  Sense strand starting at position 3408 of SEQ ID NO: 585928
cucgauuucucugugacuc

SEQ ID NO: 678771 - RNA, 19 nt, Artificial Sequence
  Description of Artificial Sequence: Synthetic oligonucleotide
  Antisense strand to SEQ ID NO: 678770
gagucacagagaaaucgag

SEQ ID NO: 678772 - RNA, 19 nt, Artificial Sequence
  Description of Artificial Sequence: Synthetic oligonucleotide
  Sense strand starting at position 3409 of SEQ ID NO: 585928
ucgauuucucugugacuca

SEQ ID NO: 678773 - RNA, 19 nt, Artificial Sequence
  Description of Artificial Sequence: Synthetic oligonucleotide
  Antisense strand to SEQ ID NO: 678772
ugagucacagagaaaucga

SEQ ID NO: 678774 - RNA, 19 nt, Artificial Sequence
  Description of Artificial Sequence: Synthetic oligonucleotide
  Sense strand starting at position 3410 of SEQ ID NO: 585928
cgauuucucugugacucaa

SEQ ID NO: 678775 - RNA, 19 nt, Artificial Sequence
  Description of Artificial Sequence: Synthetic oligonucleotide
  Antisense strand to SEQ ID NO: 678774
uugagucacagagaaaucg

SEQ ID NO: 678776 - RNA, 19 nt, Artificial Sequence
  Description of Artificial Sequence: Synthetic oligonucleotide
  Sense strand starting at position 3511 of SEQ ID NO: 585928
aacuuuaagcucugagggu

SEQ ID NO: 678777 - RNA, 19 nt, Artificial Sequence
  Description of Artificial Sequence: Synthetic oligonucleotide
  Antisense strand to SEQ ID NO: 678776
acccucagagcuuaaaguu

SEQ ID NO: 678778 - RNA, 19 nt, Artificial Sequence
  Description of Artificial Sequence: Synthetic oligonucleotide
  Sense strand starting at position 3512 of SEQ ID NO: 585928
acuuuaagcucugaggguu

SEQ ID NO: 678779 - RNA, 19 nt, Artificial Sequence
  Description of Artificial Sequence: Synthetic oligonucleotide
  Antisense strand to SEQ ID NO: 678778
aacccucagagcuuaaagu

SEQ ID NO: 678780 - RNA, 19 nt, Artificial Sequence
  Description of Artificial Sequence: Synthetic oligonucleotide
  Sense strand starting at position 3515 of SEQ ID NO: 585928
uuaagcucugaggguuaca

SEQ ID NO: 678781 - RNA, 19 nt, Artificial Sequence
  Description of Artificial Sequence: Synthetic oligonucleotide
  Antisense strand to SEQ ID NO: 678780
uguaacccucagagcuuaa

SEQ ID NO: 678782 - RNA, 19 nt, Artificial Sequence
  Description of Artificial Sequence: Synthetic oligonucleotide
  Sense strand starting at position 3827 of SEQ ID NO: 585928
ccaagucguagacggaaua

SEQ ID NO: 678783 - RNA, 19 nt, Artificial Sequence
  Description of Artificial Sequence: Synthetic oligonucleotide
  Antisense strand to SEQ ID NO: 678782
uauuccgucuacgacuugg

SEQ ID NO: 678784 - RNA, 19 nt, Artificial Sequence
  Description of Artificial Sequence: Synthetic oligonucleotide
  Sense strand starting at position 3936 of SEQ ID NO: 585928
gccguuguucugcucaaca

SEQ ID NO: 678785 - RNA, 19 nt, Artificial Sequence
  Description of Artificial Sequence: Synthetic oligonucleotide
  Antisense strand to SEQ ID NO: 678784
uguugagcagaacaacggc

SEQ ID NO: 678786 - RNA, 19 nt, Artificial Sequence
  Description of Artificial Sequence: Synthetic oligonucleotide
  Sense strand starting at position 3938 of SEQ ID NO: 585928
cguuguucugcucaacaaa

SEQ ID NO: 678787 - RNA, 19 nt, Artificial Sequence
  Description of Artificial Sequence: Synthetic oligonucleotide
  Antisense strand to SEQ ID NO: 678786
uuuguugagcagaacaacg

SEQ ID NO: 678788 - RNA, 19 nt, Artificial Sequence
  Description of Artificial Sequence: Synthetic oligonucleotide
  Sense strand starting at position 3941 of SEQ ID NO: 585928
uguucugcucaacaaagaa

SEQ ID NO: 678789 - RNA, 19 nt, Artificial Sequence
  Description of Artificial Sequence: Synthetic oligonucleotide
  Antisense strand to SEQ ID NO: 678788
uucuuuguugagcagaaca

SEQ ID NO: 678790 - RNA, 19 nt, Artificial Sequence
  Description of Artificial Sequence: Synthetic oligonucleotide
  Sense strand starting at position 122 of SEQ ID NO: 585929
agcucuuaagaggguuuaa

SEQ ID NO: 678791 - RNA, 19 nt, Artificial Sequence
  Description of Artificial Sequence: Synthetic oligonucleotide
  Antisense strand to SEQ ID NO: 678790
uuaaacccucuuaagagcu

SEQ ID NO: 678792 - RNA, 19 nt, Artificial Sequence
  Description of Artificial Sequence: Synthetic oligonucleotide
  Sense strand starting at position 134 of SEQ ID NO: 585929
gguuuaaugacaggagcga

SEQ ID NO: 678793 - RNA, 19 nt, Artificial Sequence
  Description of Artificial Sequence: Synthetic oligonucleotide
  Antisense strand to SEQ ID NO: 678792
ucgcuccugucauuaaacc

SEQ ID NO: 678794 - RNA, 19 nt, Artificial Sequence
  Description of Artificial Sequence: Synthetic oligonucleotide
  Sense strand starting at position 135 of SEQ ID NO: 585929
guuuaaugacaggagcgaa

SEQ ID NO: 678795 - RNA, 19 nt, Artificial Sequence
  Description of Artificial Sequence: Synthetic oligonucleotide
  Antisense strand to SEQ ID NO: 678794
uucgcuccugucauuaaac

SEQ ID NO: 678796 - RNA, 19 nt, Artificial Sequence
  Description of Artificial Sequence: Synthetic oligonucleotide
  Sense strand starting at position 158 of SEQ ID NO: 585929
uggccaugagcuuagaaca

SEQ ID NO: 678797 - RNA, 19 nt, Artificial Sequence
  Description of Artificial Sequence: Synthetic oligonucleotide
  Antisense strand to SEQ ID NO: 678796
uguucuaagcucauggcca

SEQ ID NO: 678798 - RNA, 19 nt, Artificial Sequence
  Description of Artificial Sequence: Synthetic oligonucleotide
  Sense strand starting at position 196 of SEQ ID NO: 585929
accacagaacgguguuaga

SEQ ID NO: 678799 - RNA, 19 nt, Artificial Sequence
  Description of Artificial Sequence: Synthetic oligonucleotide
  Antisense strand to SEQ ID NO: 678798
ucuaacaccguucuguggu

SEQ ID NO: 678800 - RNA, 19 nt, Artificial Sequence
  Description of Artificial Sequence: Synthetic oligonucleotide
  Sense strand starting at position 344 of SEQ ID NO: 585929
caggaugguaaaugcgaaa

SEQ ID NO: 678801 - RNA, 19 nt, Artificial Sequence
  Description of Artificial Sequence: Synthetic oligonucleotide
  Antisense strand to SEQ ID NO: 678800
uuucgcauuuaccauccug

SEQ ID NO: 678802 - RNA, 19 nt, Artificial Sequence
  Description of Artificial Sequence: Synthetic oligonucleotide
  Sense strand starting at position 406 of SEQ ID NO: 585929
aucaaacuccuuugacgaa

SEQ ID NO: 678803 - RNA, 19 nt, Artificial Sequence
  Description of Artificial Sequence: Synthetic oligonucleotide
  Antisense strand to SEQ ID NO: 678802
uucgucaaaggaguuugau

SEQ ID NO: 678804 - RNA, 19 nt, Artificial Sequence
  Description of Artificial Sequence: Synthetic oligonucleotide
  Sense strand starting at position 448 of SEQ ID NO: 585929
ugagguagauucuuacaag

SEQ ID NO: 678805 - RNA, 19 nt, Artificial Sequence
  Description of Artificial Sequence: Synthetic oligonucleotide
  Antisense strand to SEQ ID NO: 678804
cuuguaagaaucuaccuca

SEQ ID NO: 678806 - RNA, 19 nt, Artificial Sequence
  Description of Artificial Sequence: Synthetic oligonucleotide
  Sense strand starting at position 497 of SEQ ID NO: 585929
cggauugucaaaggacagu

SEQ ID NO: 678807 - RNA, 19 nt, Artificial Sequence
  Description of Artificial Sequence: Synthetic oligonucleotide
  Antisense strand to SEQ ID NO: 678806
acuguccuuugacaauccg

SEQ ID NO: 678808 - RNA, 19 nt, Artificial Sequence
  Description of Artificial Sequence: Synthetic oligonucleotide
  Sense strand starting at position 681 of SEQ ID NO: 585929
gaaagauuucggugccugu

SEQ ID NO: 678809 - RNA, 19 nt, Artificial Sequence
  Description of Artificial Sequence: Synthetic oligonucleotide
  Antisense strand to SEQ ID NO: 678808
acaggcaccgaaaucuuuc

SEQ ID NO: 678810 - RNA, 19 nt, Artificial Sequence
  Description of Artificial Sequence: Synthetic oligonucleotide
  Sense strand starting at position 704 of SEQ ID NO: 585929
agcagaauguaguuugaau

SEQ ID NO: 678811 - RNA, 19 nt, Artificial Sequence
  Description of Artificial Sequence: Synthetic oligonucleotide
  Antisense strand to SEQ ID NO: 678810
auucaaacuacauucugcu

SEQ ID NO: 678812 - RNA, 19 nt, Artificial Sequence
  Description of Artificial Sequence: Synthetic oligonucleotide
  Sense strand starting at position 768 of SEQ ID NO: 585929
aaagauagcuuugcagaga

SEQ ID NO: 678813 - RNA, 19 nt, Artificial Sequence
  Description of Artificial Sequence: Synthetic oligonucleotide
  Antisense strand to SEQ ID NO: 678812
ucucugcaaagcuaucuuu

SEQ ID NO: 678814 - RNA, 19 nt, Artificial Sequence
  Description of Artificial Sequence: Synthetic oligonucleotide
  Sense strand starting at position 813 of SEQ ID NO: 585929
ccaacagcagucugauuaa

SEQ ID NO: 678815 - RNA, 19 nt, Artificial Sequence
  Description of Artificial Sequence: Synthetic oligonucleotide
  Antisense strand to SEQ ID NO: 678814
uuaaucagacugcuguugg

SEQ ID NO: 678816 - RNA, 19 nt, Artificial Sequence
  Description of Artificial Sequence: Synthetic oligonucleotide
  Sense strand starting at position 816 of SEQ ID NO: 585929
acagcagucugauuaaaca

SEQ ID NO: 678817 - RNA, 19 nt, Artificial Sequence
  Description of Artificial Sequence: Synthetic oligonucleotide
  Antisense strand to SEQ ID NO: 678816
uguuuaaucagacugcugu

SEQ ID NO: 678818 - RNA, 19 nt, Artificial Sequence
  Description of Artificial Sequence: Synthetic oligonucleotide
  Sense strand starting at position 1118 of SEQ ID NO: 585929
aauguuaacgaucagaguc

SEQ ID NO: 678819 - RNA, 19 nt, Artificial Sequence
  Description of Artificial Sequence: Synthetic oligonucleotide
  Antisense strand to SEQ ID NO: 678818
gacucugaucguuaacauu

SEQ ID NO: 678820 - RNA, 19 nt, Artificial Sequence
  Description of Artificial Sequence: Synthetic oligonucleotide
  Sense strand starting at position 1200 of SEQ ID NO: 585929
ucagauauuccgggaguug

SEQ ID NO: 678821 - RNA, 19 nt, Artificial Sequence
  Description of Artificial Sequence: Synthetic oligonucleotide
  Antisense strand to SEQ ID NO: 678820
caacucccggaauaucuga

SEQ ID NO: 678822 - RNA, 19 nt, Artificial Sequence
  Description of Artificial Sequence: Synthetic oligonucleotide
  Sense strand starting at position 1201 of SEQ ID NO: 585929
cagauauuccgggaguugu

SEQ ID NO: 678823 - RNA, 19 nt, Artificial Sequence
  Description of Artificial Sequence: Synthetic oligonucleotide
  Antisense strand to SEQ ID NO: 678822
acaacucccggaauaucug

SEQ ID NO: 678824 - RNA, 19 nt, Artificial Sequence
  Description of Artificial Sequence: Synthetic oligonucleotide
  Sense strand starting at position 1254 of SEQ ID NO: 585929
ggaaucuucuucuucggaa

SEQ ID NO: 678825 - RNA, 19 nt, Artificial Sequence
  Description of Artificial Sequence: Synthetic oligonucleotide
  Antisense strand to SEQ ID NO: 678824
uuccgaagaagaagauucc

SEQ ID NO: 678826 - RNA, 19 nt, Artificial Sequence
  Description of Artificial Sequence: Synthetic oligonucleotide
  Sense strand starting at position 1530 of SEQ ID NO: 585929
cuucuuagaguucgagaac

SEQ ID NO: 678827 - RNA, 19 nt, Artificial Sequence
  Description of Artificial Sequence: Synthetic oligonucleotide
  Antisense strand to SEQ ID NO: 678826
guucucgaacucuaagaag

SEQ ID NO: 678828 - RNA, 19 nt, Artificial Sequence
  Description of Artificial Sequence: Synthetic oligonucleotide
  Sense strand starting at position 1533 of SEQ ID NO: 585929
cuuagaguucgagaacucu

SEQ ID NO: 678829 - RNA, 19 nt, Artificial Sequence
  Description of Artificial Sequence: Synthetic oligonucleotide
  Antisense strand to SEQ ID NO: 678828
agaguucucgaacucuaag

SEQ ID NO: 678830 - RNA, 19 nt, Artificial Sequence
  Description of Artificial Sequence: Synthetic oligonucleotide
  Sense strand starting at position 1818 of SEQ ID NO: 585929
cauuccuucgaaggaauga

SEQ ID NO: 678831 - RNA, 19 nt, Artificial Sequence
  Description of Artificial Sequence: Synthetic oligonucleotide
  Antisense strand to SEQ ID NO: 678830
ucauuccuucgaaggaaug

SEQ ID NO: 678832 - RNA, 19 nt, Artificial Sequence
  Description of Artificial Sequence: Synthetic oligonucleotide
  Sense strand starting at position 2039 of SEQ ID NO: 585929
cuagcaagauuggcuagaa

SEQ ID NO: 678833 - RNA, 19 nt, Artificial Sequence
  Description of Artificial Sequence: Synthetic oligonucleotide
  Antisense strand to SEQ ID NO: 678832
uucuagccaaucuugcuag

SEQ ID NO: 678834 - RNA, 19 nt, Artificial Sequence
  Description of Artificial Sequence: Synthetic oligonucleotide
  Sense strand starting at position 2098 of SEQ ID NO: 585929
ccuuaaauauguuucgaau

SEQ ID NO: 678835 - RNA, 19 nt, Artificial Sequence
  Description of Artificial Sequence: Synthetic oligonucleotide
  Antisense strand to SEQ ID NO: 678834
auucgaaacauauuuaagg

SEQ ID NO: 678836 - RNA, 19 nt, Artificial Sequence
  Description of Artificial Sequence: Synthetic oligonucleotide
  Sense strand starting at position 2112 of SEQ ID NO: 585929
cgaauuacucaaugugaua

SEQ ID NO: 678837 - RNA, 19 nt, Artificial Sequence
  Description of Artificial Sequence: Synthetic oligonucleotide
  Antisense strand to SEQ ID NO: 678836
uaucacauugaguaauucg

SEQ ID NO: 678838 - RNA, 19 nt, Artificial Sequence
  Description of Artificial Sequence: Synthetic oligonucleotide
  Sense strand starting at position 2126 of SEQ ID NO: 585929
ugauauuggucuuucuaaa

SEQ ID NO: 678839 - RNA, 19 nt, Artificial Sequence
  Description of Artificial Sequence: Synthetic oligonucleotide
  Antisense strand to SEQ ID NO: 678838
uuuagaaagaccaauauca

SEQ ID NO: 678840 - RNA, 19 nt, Artificial Sequence
  Description of Artificial Sequence: Synthetic oligonucleotide
  Sense strand starting at position 2145 of SEQ ID NO: 585929
ccaaaugagugacucucaa

SEQ ID NO: 678841 - RNA, 19 nt, Artificial Sequence
  Description of Artificial Sequence: Synthetic oligonucleotide
  Antisense strand to SEQ ID NO: 678840
uugagagucacucauuugg

SEQ ID NO: 678842 - RNA, 19 nt, Artificial Sequence
  Description of Artificial Sequence: Synthetic oligonucleotide
  Sense strand starting at position 2170 of SEQ ID NO: 585929
augaaauacaucggugagu

SEQ ID NO: 678843 - RNA, 19 nt, Artificial Sequence
  Description of Artificial Sequence: Synthetic oligonucleotide
  Antisense strand to SEQ ID NO: 678842
acucaccgauguauuucau

SEQ ID NO: 678844 - RNA, 19 nt, Artificial Sequence
  Description of Artificial Sequence: Synthetic oligonucleotide
  Sense strand starting at position 2171 of SEQ ID NO: 585929
ugaaauacaucggugagua

SEQ ID NO: 678845 - RNA, 19 nt, Artificial Sequence
  Description of Artificial Sequence: Synthetic oligonucleotide
  Antisense strand to SEQ ID NO: 678844
uacucaccgauguauuuca

SEQ ID NO: 678846 - RNA, 19 nt, Artificial Sequence
  Description of Artificial Sequence: Synthetic oligonucleotide
  Sense strand starting at position 2172 of SEQ ID NO: 585929
gaaauacaucggugaguau

SEQ ID NO: 678847 - RNA, 19 nt, Artificial Sequence
  Description of Artificial Sequence: Synthetic oligonucleotide
  Antisense strand to SEQ ID NO: 678846
auacucaccgauguauuuc

SEQ ID NO: 678848 - RNA, 19 nt, Artificial Sequence
  Description of Artificial Sequence: Synthetic oligonucleotide
  Sense strand starting at position 2175 of SEQ ID NO: 585929
auacaucggugaguaucaa

SEQ ID NO: 678849 - RNA, 19 nt, Artificial Sequence
  Description of Artificial Sequence: Synthetic oligonucleotide
  Antisense strand to SEQ ID NO: 678848
uugauacucaccgauguau

SEQ ID NO: 678850 - RNA, 19 nt, Artificial Sequence
  Description of Artificial Sequence: Synthetic oligonucleotide
  Sense strand starting at position 2176 of SEQ ID NO: 585929
uacaucggugaguaucaau

SEQ ID NO: 678851 - RNA, 19 nt, Artificial Sequence
  Description of Artificial Sequence: Synthetic oligonucleotide
  Antisense strand to SEQ ID NO: 678850
auugauacucaccgaugua

SEQ ID NO: 678852 - RNA, 19 nt, Artificial Sequence
  Description of Artificial Sequence: Synthetic oligonucleotide
  Sense strand starting at position 3065 of SEQ ID NO: 585929
cguuuguguggaguuguca

SEQ ID NO: 678853 - RNA, 19 nt, Artificial Sequence
  Description of Artificial Sequence: Synthetic oligonucleotide
  Antisense strand to SEQ ID NO: 678852
ugacaacuccacacaaacg

SEQ ID NO: 678854 - RNA, 19 nt, Artificial Sequence
  Description of Artificial Sequence: Synthetic oligonucleotide
  Sense strand starting at position 3262 of SEQ ID NO: 585929
cucugucuucagggaggau

SEQ ID NO: 678855 - RNA, 19 nt, Artificial Sequence
  Description of Artificial Sequence: Synthetic oligonucleotide
  Antisense strand to SEQ ID NO: 678854
auccucccugaagacagag

SEQ ID NO: 678856 - RNA, 19 nt, Artificial Sequence
  Description of Artificial Sequence: Synthetic oligonucleotide
  Sense strand starting at position 3343 of SEQ ID NO: 585929
ggcaccuguuuauuuauca

SEQ ID NO: 678857 - RNA, 19 nt, Artificial Sequence
  Description of Artificial Sequence: Synthetic oligonucleotide
  Antisense strand to SEQ ID NO: 678856
ugauaaauaaacaggugcc

SEQ ID NO: 678858 - RNA, 19 nt, Artificial Sequence
  Description of Artificial Sequence: Synthetic oligonucleotide
  Sense strand starting at position 3350 of SEQ ID NO: 585929
guuuauuuaucacuuggca

SEQ ID NO: 678859 - RNA, 19 nt, Artificial Sequence
  Description of Artificial Sequence: Synthetic oligonucleotide
  Antisense strand to SEQ ID NO: 678858
ugccaagugauaaauaaac

SEQ ID NO: 678860 - RNA, 19 nt, Artificial Sequence
  Description of Artificial Sequence: Synthetic oligonucleotide
  Sense strand starting at position 3423 of SEQ ID NO: 585929
uguuuaagguacguuauuu

SEQ ID NO: 678861 - RNA, 19 nt, Artificial Sequence
  Description of Artificial Sequence: Synthetic oligonucleotide
  Antisense strand to SEQ ID NO: 678860
aaauaacguaccuuaaaca

SEQ ID NO: 678862 - RNA, 19 nt, Artificial Sequence
  Description of Artificial Sequence: Synthetic oligonucleotide
  Sense strand starting at position 3774 of SEQ ID NO: 585929
ggagcaggaagguauguau

SEQ ID NO: 678863 - RNA, 19 nt, Artificial Sequence
  Description of Artificial Sequence: Synthetic oligonucleotide
  Antisense strand to SEQ ID NO: 678862
auacauaccuuccugcucc

SEQ ID NO: 678864 - RNA, 19 nt, Artificial Sequence
  Description of Artificial Sequence: Synthetic oligonucleotide
  Sense strand starting at position 3777 of SEQ ID NO: 585929
gcaggaagguauguauuca

SEQ ID NO: 678865 - RNA, 19 nt, Artificial Sequence
  Description of Artificial Sequence: Synthetic oligonucleotide
  Antisense strand to SEQ ID NO: 678864
ugaauacauaccuuccugc

SEQ ID NO: 678866 - RNA, 19 nt, Artificial Sequence
  Description of Artificial Sequence: Synthetic oligonucleotide
  Sense strand starting at position 3867 of SEQ ID NO: 585929
agggaagucuguuuagagg

SEQ ID NO: 678867 - RNA, 19 nt, Artificial Sequence
  Description of Artificial Sequence: Synthetic oligonucleotide
  Antisense strand to SEQ ID NO: 678866
ccucuaaacagacuucccu

SEQ ID NO: 678868 - RNA, 19 nt, Artificial Sequence
  Description of Artificial Sequence: Synthetic oligonucleotide
  Sense strand starting at position 3971 of SEQ ID NO: 585929
guguucauggugcaaagaa

SEQ ID NO: 678869 - RNA, 19 nt, Artificial Sequence
  Description of Artificial Sequence: Synthetic oligonucleotide
  Antisense strand to SEQ ID NO: 678868
uucuuugcaccaugaacac

SEQ ID NO: 678870 - RNA, 19 nt, Artificial Sequence
  Description of Artificial Sequence: Synthetic oligonucleotide
  Sense strand starting at position 268 of SEQ ID NO: 585930
cauguauugcaaggccaua

SEQ ID NO: 678871 - RNA, 19 nt, Artificial Sequence
  Description of Artificial Sequence: Synthetic oligonucleotide
  Antisense strand to SEQ ID NO: 678870
uauggccuugcaauacaug

SEQ ID NO: 678872 - RNA, 19 nt, Artificial Sequence
  Description of Artificial Sequence: Synthetic oligonucleotide
  Sense strand starting at position 422 of SEQ ID NO: 585930
gaaagauugucagcuuagc

SEQ ID NO: 678873 - RNA, 19 nt, Artificial Sequence
  Description of Artificial Sequence: Synthetic oligonucleotide
  Antisense strand to SEQ ID NO: 678872
gcuaagcugacaaucuuuc

SEQ ID NO: 678874 - RNA, 19 nt, Artificial Sequence
  Description of Artificial Sequence: Synthetic oligonucleotide
  Sense strand starting at position 438 of SEQ ID NO: 585930
agcaaaugguaccuggaaa

SEQ ID NO: 678875 - RNA, 19 nt, Artificial Sequence
  Description of Artificial Sequence: Synthetic oligonucleotide
  Antisense strand to SEQ ID NO: 678874
uuuccagguaccauuugcu

SEQ ID NO: 678876 - RNA, 19 nt, Artificial Sequence
  Description of Artificial Sequence: Synthetic oligonucleotide
  Sense strand starting at position 439 of SEQ ID NO: 585930
gcaaaugguaccuggaaau

SEQ ID NO: 678877 - RNA, 19 nt, Artificial Sequence
  Description of Artificial Sequence: Synthetic oligonucleotide
  Antisense strand to SEQ ID NO: 678876
auuuccagguaccauuugc

SEQ ID NO: 678878 - RNA, 19 nt, Artificial Sequence
  Description of Artificial Sequence: Synthetic oligonucleotide
  Sense strand starting at position 485 of SEQ ID NO: 585930
auuggaucccuguacaauu

SEQ ID NO: 678879 - RNA, 19 nt, Artificial Sequence
  Description of Artificial Sequence: Synthetic oligonucleotide
  Antisense strand to SEQ ID NO: 678878
aauuguacagggauccaau

SEQ ID NO: 678880 - RNA, 19 nt, Artificial Sequence
  Description of Artificial Sequence: Synthetic oligonucleotide
  Sense strand starting at position 761 of SEQ ID NO: 585930
guacacuaagcugauaaca

SEQ ID NO: 678881 - RNA, 19 nt, Artificial Sequence
  Description of Artificial Sequence: Synthetic oligonucleotide
  Antisense strand to SEQ ID NO: 678880
uguuaucagcuuaguguac

SEQ ID NO: 678882 - RNA, 19 nt, Artificial Sequence
  Description of Artificial Sequence: Synthetic oligonucleotide
  Sense strand starting at position 973 of SEQ ID NO: 585930
uugucuugaucuguuucua

SEQ ID NO: 678883 - RNA, 19 nt, Artificial Sequence
  Description of Artificial Sequence: Synthetic oligonucleotide
  Antisense strand to SEQ ID NO: 678882
uagaaacagaucaagacaa

SEQ ID NO: 678884 - RNA, 19 nt, Artificial Sequence
  Description of Artificial Sequence: Synthetic oligonucleotide
  Sense strand starting at position 1077 of SEQ ID NO: 585930
uaaagauucuagguuguau

SEQ ID NO: 678885 - RNA, 19 nt, Artificial Sequence
  Description of Artificial Sequence: Synthetic oligonucleotide
  Antisense strand to SEQ ID NO: 678884
auacaaccuagaaucuuua

SEQ ID NO: 678886 - RNA, 19 nt, Artificial Sequence
  Description of Artificial Sequence: Synthetic oligonucleotide
  Sense strand starting at position 1079 of SEQ ID NO: 585930
aagauucuagguuguauau

SEQ ID NO: 678887 - RNA, 19 nt, Artificial Sequence
  Description of Artificial Sequence: Synthetic oligonucleotide
  Antisense strand to SEQ ID NO: 678886
auauacaaccuagaaucuu

SEQ ID NO: 678888 - RNA, 19 nt, Artificial Sequence
  Description of Artificial Sequence: Synthetic oligonucleotide
  Sense strand starting at position 1090 of SEQ ID NO: 585930
uuguauauuggagguuaua

SEQ ID NO: 678889 - RNA, 19 nt, Artificial Sequence
  Description of Artificial Sequence: Synthetic oligonucleotide
  Antisense strand to SEQ ID NO: 678888
uauaaccuccaauauacaa

SEQ ID NO: 678890 - RNA, 19 nt, Artificial Sequence
  Description of Artificial Sequence: Synthetic oligonucleotide
  Sense strand starting at position 1281 of SEQ ID NO: 585930
gccacuacagagugagaaa

SEQ ID NO: 678891 - RNA, 19 nt, Artificial Sequence
  Description of Artificial Sequence: Synthetic oligonucleotide
  Antisense strand to SEQ ID NO: 678890
uuucucacucuguaguggc

SEQ ID NO: 678892 - RNA, 19 nt, Artificial Sequence
  Description of Artificial Sequence: Synthetic oligonucleotide
  Sense strand starting at position 1336 of SEQ ID NO: 585930
ugggaaauauuuggaaaua

SEQ ID NO: 678893 - RNA, 19 nt, Artificial Sequence
  Description of Artificial Sequence: Synthetic oligonucleotide
  Antisense strand to SEQ ID NO: 678892
uauuuccaaauauuuccca

SEQ ID NO: 678894 - RNA, 19 nt, Artificial Sequence
  Description of Artificial Sequence: Synthetic oligonucleotide
  Sense strand starting at position 1638 of SEQ ID NO: 585930
uugugaucgccuuuccuuu

SEQ ID NO: 678895 - RNA, 19 nt, Artificial Sequence
  Description of Artificial Sequence: Synthetic oligonucleotide
  Antisense strand to SEQ ID NO: 678894
aaaggaaaggcgaucacaa

SEQ ID NO: 678896 - RNA, 19 nt, Artificial Sequence
  Description of Artificial Sequence: Synthetic oligonucleotide
  Sense strand starting at position 1644 of SEQ ID NO: 585930
ucgccuuuccuuuaccaga

SEQ ID NO: 678897 - RNA, 19 nt, Artificial Sequence
  Description of Artificial Sequence: Synthetic oligonucleotide
  Antisense strand to SEQ ID NO: 678896
ucugguaaaggaaaggcga

SEQ ID NO: 678898 - RNA, 19 nt, Artificial Sequence
  Description of Artificial Sequence: Synthetic oligonucleotide
  Sense strand starting at position 1726 of SEQ ID NO: 585930
uguucuagccaguaaaggu

SEQ ID NO: 678899 - RNA, 19 nt, Artificial Sequence
  Description of Artificial Sequence: Synthetic oligonucleotide
  Antisense strand to SEQ ID NO: 678898
accuuuacuggcuagaaca

SEQ ID NO: 678900 - RNA, 19 nt, Artificial Sequence
  Description of Artificial Sequence: Synthetic oligonucleotide
  Sense strand starting at position 1736 of SEQ ID NO: 585930
aguaaagguauuggagagu

SEQ ID NO: 678901 - RNA, 19 nt, Artificial Sequence
  Description of Artificial Sequence: Synthetic oligonucleotide
  Antisense strand to SEQ ID NO: 678900
acucuccaauaccuuuacu

SEQ ID NO: 678902 - RNA, 19 nt, Artificial Sequence
  Description of Artificial Sequence: Synthetic oligonucleotide
  Sense strand starting at position 1745 of SEQ ID NO: 585930
auuggagagugcuuaccuu

SEQ ID NO: 678903 - RNA, 19 nt, Artificial Sequence
  Description of Artificial Sequence: Synthetic oligonucleotide
  Antisense strand to SEQ ID NO: 678902
aagguaagcacucuccaau

SEQ ID NO: 678904 - RNA, 19 nt, Artificial Sequence
  Description of Artificial Sequence: Synthetic oligonucleotide
  Sense strand starting at position 1768 of SEQ ID NO: 585930
auagaugccugccuggauu

SEQ ID NO: 678905 - RNA, 19 nt, Artificial Sequence
  Description of Artificial Sequence: Synthetic oligonucleotide
  Antisense strand to SEQ ID NO: 678904
aauccaggcaggcaucuau

SEQ ID NO: 678906 - RNA, 19 nt, Artificial Sequence
  Description of Artificial Sequence: Synthetic oligonucleotide
  Sense strand starting at position 1840 of SEQ ID NO: 585930
ugauaaugccauugcuaug

SEQ ID NO: 678907 - RNA, 19 nt, Artificial Sequence
  Description of Artificial Sequence: Synthetic oligonucleotide
  Antisense strand to SEQ ID NO: 678906
cauagcaauggcauuauca

SEQ ID NO: 678908 - RNA, 19 nt, Artificial Sequence
  Description of Artificial Sequence: Synthetic oligonucleotide
  Sense strand starting at position 1874 of SEQ ID NO: 585930
agaccuggugcucacagaa

SEQ ID NO: 678909 - RNA, 19 nt, Artificial Sequence
  Description of Artificial Sequence: Synthetic oligonucleotide
  Antisense strand to SEQ ID NO: 678908
uucugugagcaccaggucu

SEQ ID NO: 678910 - RNA, 19 nt, Artificial Sequence
  Description of Artificial Sequence: Synthetic oligonucleotide
  Sense strand starting at position 1906 of SEQ ID NO: 585930
gggugacacuugucugcaa

SEQ ID NO: 678911 - RNA, 19 nt, Artificial Sequence
  Description of Artificial Sequence: Synthetic oligonucleotide
  Antisense strand to SEQ ID NO: 678910
uugcagacaagugucaccc

SEQ ID NO: 678912 - RNA, 19 nt, Artificial Sequence
  Description of Artificial Sequence: Synthetic oligonucleotide
  Sense strand starting at position 1907 of SEQ ID NO: 585930
ggugacacuugucugcaau

SEQ ID NO: 678913 - RNA, 19 nt, Artificial Sequence
  Description of Artificial Sequence: Synthetic oligonucleotide
  Antisense strand to SEQ ID NO: 678912
auugcagacaagugucacc

SEQ ID NO: 678914 - RNA, 19 nt, Artificial Sequence
  Description of Artificial Sequence: Synthetic oligonucleotide
  Sense strand starting at position 2254 of SEQ ID NO: 585930
acaggaauauaggacuaaa

SEQ ID NO: 678915 - RNA, 19 nt, Artificial Sequence
  Description of Artificial Sequence: Synthetic oligonucleotide
  Antisense strand to SEQ ID NO: 678914
uuuaguccuauauuccugu

SEQ ID NO: 678916 - RNA, 19 nt, Artificial Sequence
  Description of Artificial Sequence: Synthetic oligonucleotide
  Sense strand starting at position 2332 of SEQ ID NO: 585930
uuggcuuugugccuuauuu

SEQ ID NO: 678917 - RNA, 19 nt, Artificial Sequence
  Description of Artificial Sequence: Synthetic oligonucleotide
  Antisense strand to SEQ ID NO: 678916
aaauaaggcacaaagccaa

SEQ ID NO: 678918 - RNA, 19 nt, Artificial Sequence
  Description of Artificial Sequence: Synthetic oligonucleotide
  Sense strand starting at position 2765 of SEQ ID NO: 585930
cugaucuuauuguugaaau

SEQ ID NO: 678919 - RNA, 19 nt, Artificial Sequence
  Description of Artificial Sequence: Synthetic oligonucleotide
  Antisense strand to SEQ ID NO: 678918
auuucaacaauaagaucag

SEQ ID NO: 678920 - RNA, 19 nt, Artificial Sequence
  Description of Artificial Sequence: Synthetic oligonucleotide
  Sense strand starting at position 2903 of SEQ ID NO: 585930
acaauuaaaggugguaguu

SEQ ID NO: 678921 - RNA, 19 nt, Artificial Sequence
  Description of Artificial Sequence: Synthetic oligonucleotide
  Antisense strand to SEQ ID NO: 678920
aacuaccaccuuuaauugu

SEQ ID NO: 678922 - RNA, 19 nt, Artificial Sequence
  Description of Artificial Sequence: Synthetic oligonucleotide
  Sense strand starting at position 2919 of SEQ ID NO: 585930
guuccuaagucucuuuaag

SEQ ID NO: 678923 - RNA, 19 nt, Artificial Sequence
  Description of Artificial Sequence: Synthetic oligonucleotide
  Antisense strand to SEQ ID NO: 678922
cuuaaagagacuuaggaac

SEQ ID NO: 678924 - RNA, 19 nt, Artificial Sequence
  Description of Artificial Sequence: Synthetic oligonucleotide
  Sense strand starting at position 2921 of SEQ ID NO: 585930
uccuaagucucuuuaaggu

SEQ ID NO: 678925 - RNA, 19 nt, Artificial Sequence
  Description of Artificial Sequence: Synthetic oligonucleotide
  Antisense strand to SEQ ID NO: 678924
accuuaaagagacuuagga

SEQ ID NO: 678926 - RNA, 19 nt, Artificial Sequence
  Description of Artificial Sequence: Synthetic oligonucleotide
  Sense strand starting at position 2947 of SEQ ID NO: 585930
aagaauauugguugaggcu

SEQ ID NO: 678927 - RNA, 19 nt, Artificial Sequence
  Description of Artificial Sequence: Synthetic oligonucleotide
  Antisense strand to SEQ ID NO: 678926
agccucaaccaauauucuu

SEQ ID NO: 678928 - RNA, 19 nt, Artificial Sequence
  Description of Artificial Sequence: Synthetic oligonucleotide
  Sense strand starting at position 3266 of SEQ ID NO: 585930
aaagaauacugguugguau

SEQ ID NO: 678929 - RNA, 19 nt, Artificial Sequence
  Description of Artificial Sequence: Synthetic oligonucleotide
  Antisense strand to SEQ ID NO: 678928
auaccaaccaguauucuuu

SEQ ID NO: 678930 - RNA, 19 nt, Artificial Sequence
  Description of Artificial Sequence: Synthetic oligonucleotide
  Sense strand starting at position 3269 of SEQ ID NO: 585930
gaauacugguugguaugua

SEQ ID NO: 678931 - RNA, 19 nt, Artificial Sequence
  Description of Artificial Sequence: Synthetic oligonucleotide
  Antisense strand to SEQ ID NO: 678930
uacauaccaaccaguauuc

SEQ ID NO: 678932 - RNA, 19 nt, Artificial Sequence
  Description of Artificial Sequence: Synthetic oligonucleotide
  Sense strand starting at position 3273 of SEQ ID NO: 585930
acugguugguauguauaca

SEQ ID NO: 678933 - RNA, 19 nt, Artificial Sequence
  Description of Artificial Sequence: Synthetic oligonucleotide
  Antisense strand to SEQ ID NO: 678932
uguauacauaccaaccagu

SEQ ID NO: 678934 - RNA, 19 nt, Artificial Sequence
  Description of Artificial Sequence: Synthetic oligonucleotide
  Sense strand starting at position 3292 of SEQ ID NO: 585930
cuugaaagaugacaggaau

SEQ ID NO: 678935 - RNA, 19 nt, Artificial Sequence
  Description of Artificial Sequence: Synthetic oligonucleotide
  Antisense strand to SEQ ID NO: 678934
auuccugucaucuuucaag

SEQ ID NO: 678936 - RNA, 19 nt, Artificial Sequence
  Description of Artificial Sequence: Synthetic oligonucleotide
  Sense strand starting at position 3413 of SEQ ID NO: 585930
ucaguucuaccauggccau

SEQ ID NO: 678937 - RNA, 19 nt, Artificial Sequence
  Description of Artificial Sequence: Synthetic oligonucleotide
  Antisense strand to SEQ ID NO: 678936
auggccaugguagaacuga

SEQ ID NO: 678938 - RNA, 19 nt, Artificial Sequence
  Description of Artificial Sequence: Synthetic oligonucleotide
  Sense strand starting at position 3560 of SEQ ID NO: 585930
aguagaauuuacgauugac

SEQ ID NO: 678939 - RNA, 19 nt, Artificial Sequence
  Description of Artificial Sequence: Synthetic oligonucleotide
  Antisense strand to SEQ ID NO: 678938
gucaaucguaaauucuacu

SEQ ID NO: 678940 - RNA, 19 nt, Artificial Sequence
  Description of Artificial Sequence: Synthetic oligonucleotide
  Sense strand starting at position 3589 of SEQ ID NO: 585930
gguuuacuaucauuagauu

SEQ ID NO: 678941 - RNA, 19 nt, Artificial Sequence
  Description of Artificial Sequence: Synthetic oligonucleotide
  Antisense strand to SEQ ID NO: 678940
aaucuaaugauaguaaacc

SEQ ID NO: 678942 - RNA, 19 nt, Artificial Sequence
  Description of Artificial Sequence: Synthetic oligonucleotide
  Sense strand starting at position 3757 of SEQ ID NO: 585930
uuaugaauccguuagaacu

SEQ ID NO: 678943 - RNA, 19 nt, Artificial Sequence
  Description of Artificial Sequence: Synthetic oligonucleotide
  Antisense strand to SEQ ID NO: 678942
aguucuaacggauucauaa

SEQ ID NO: 678944 - RNA, 19 nt, Artificial Sequence
  Description of Artificial Sequence: Synthetic oligonucleotide
  Sense strand starting at position 3922 of SEQ ID NO: 585930
cugcucucgcgacagauga

SEQ ID NO: 678945 - RNA, 19 nt, Artificial Sequence
  Description of Artificial Sequence: Synthetic oligonucleotide
  Antisense strand to SEQ ID NO: 678944
ucaucugucgcgagagcag

SEQ ID NO: 678946 - RNA, 19 nt, Artificial Sequence
  Description of Artificial Sequence: Synthetic oligonucleotide
  Sense strand starting at position 3949 of SEQ ID NO: 585930
cugugauaaucaucuucgu

SEQ ID NO: 678947 - RNA, 19 nt, Artificial Sequence
  Description of Artificial Sequence: Synthetic oligonucleotide
  Antisense strand to SEQ ID NO: 678946
acgaagaugauuaucacag

SEQ ID NO: 678948 - RNA, 19 nt, Artificial Sequence
  Description of Artificial Sequence: Synthetic oligonucleotide
  Sense strand starting at position 3952 of SEQ ID NO: 585930
ugauaaucaucuucguauu

SEQ ID NO: 678949 - RNA, 19 nt, Artificial Sequence
  Description of Artificial Sequence: Synthetic oligonucleotide
  Antisense strand to SEQ ID NO: 678948
aauacgaagaugauuauca

SEQ ID NO: 678950 - RNA, 19 nt, Artificial Sequence
  Description of Artificial Sequence: Synthetic oligonucleotide
  Sense strand starting at position 2 of SEQ ID NO: 585931
gcugacaaugcucagacaa

SEQ ID NO: 678951 - RNA, 19 nt, Artificial Sequence
  Description of Artificial Sequence: Synthetic oligonucleotide
  Antisense strand to SEQ ID NO: 678950
uugucugagcauugucagc

SEQ ID NO: 678952 - RNA, 19 nt, Artificial Sequence
  Description of Artificial Sequence: Synthetic oligonucleotide
  Sense strand starting at position 35 of SEQ ID NO: 585931
gcuugcugugcuguuagau

SEQ ID NO: 678953 - RNA, 19 nt, Artificial Sequence
  Description of Artificial Sequence: Synthetic oligonucleotide
  Antisense strand to SEQ ID NO: 678952
aucuaacagcacagcaagc

SEQ ID NO: 678954 - RNA, 19 nt, Artificial Sequence
  Description of Artificial Sequence: Synthetic oligonucleotide
  Sense strand starting at position 36 of SEQ ID NO: 585931
cuugcugugcuguuagauu

SEQ ID NO: 678955 - RNA, 19 nt, Artificial Sequence
  Description of Artificial Sequence: Synthetic oligonucleotide
  Antisense strand to SEQ ID NO: 678954
aaucuaacagcacagcaag

SEQ ID NO: 678956 - RNA, 19 nt, Artificial Sequence
  Description of Artificial Sequence: Synthetic oligonucleotide
  Sense strand starting at position 133 of SEQ ID NO: 585931
gccagagucgguuucuguu

SEQ ID NO: 678957 - RNA, 19 nt, Artificial Sequence
  Description of Artificial Sequence: Synthetic oligonucleotide
  Antisense strand to SEQ ID NO: 678956
aacagaaaccgacucuggc

SEQ ID NO: 678958 - RNA, 19 nt, Artificial Sequence
  Description of Artificial Sequence: Synthetic oligonucleotide
  Sense strand starting at position 175 of SEQ ID NO: 585931
aauguacuaccagggaauu

SEQ ID NO: 678959 - RNA, 19 nt, Artificial Sequence
  Description of Artificial Sequence: Synthetic oligonucleotide
  Antisense strand to SEQ ID NO: 678958
aauucccugguaguacauu

SEQ ID NO: 678960 - RNA, 19 nt, Artificial Sequence
  Description of Artificial Sequence: Synthetic oligonucleotide
  Sense strand starting at position 176 of SEQ ID NO: 585931
auguacuaccagggaauua

SEQ ID NO: 678961 - RNA, 19 nt, Artificial Sequence
  Description of Artificial Sequence: Synthetic oligonucleotide
  Antisense strand to SEQ ID NO: 678960
uaauucccugguaguacau

SEQ ID NO: 678962 - RNA, 19 nt, Artificial Sequence
  Description of Artificial Sequence: Synthetic oligonucleotide
  Sense strand starting at position 201 of SEQ ID NO: 585931
auugcuuugagucagagga

SEQ ID NO: 678963 - RNA, 19 nt, Artificial Sequence
  Description of Artificial Sequence: Synthetic oligonucleotide
  Antisense strand to SEQ ID NO: 678962
uccucugacucaaagcaau

SEQ ID NO: 678964 - RNA, 19 nt, Artificial Sequence
  Description of Artificial Sequence: Synthetic oligonucleotide
  Sense strand starting at position 570 of SEQ ID NO: 585931
uggguugguccucaacaca

SEQ ID NO: 678965 - RNA, 19 nt, Artificial Sequence
  Description of Artificial Sequence: Synthetic oligonucleotide
  Antisense strand to SEQ ID NO: 678964
uguguugaggaccaaccca

SEQ ID NO: 678966 - RNA, 19 nt, Artificial Sequence
  Description of Artificial Sequence: Synthetic oligonucleotide
  Sense strand starting at position 589 of SEQ ID NO: 585931
accugagauguagguggaa

SEQ ID NO: 678967 - RNA, 19 nt, Artificial Sequence
  Description of Artificial Sequence: Synthetic oligonucleotide
  Antisense strand to SEQ ID NO: 678966
uuccaccuacaucucaggu

SEQ ID NO: 678968 - RNA, 19 nt, Artificial Sequence
  Description of Artificial Sequence: Synthetic oligonucleotide
  Sense strand starting at position 591 of SEQ ID NO: 585931
cugagauguagguggaagu

SEQ ID NO: 678969 - RNA, 19 nt, Artificial Sequence
  Description of Artificial Sequence: Synthetic oligonucleotide
  Antisense strand to SEQ ID NO: 678968
acuuccaccuacaucucag

SEQ ID NO: 678970 - RNA, 19 nt, Artificial Sequence
  Description of Artificial Sequence: Synthetic oligonucleotide
  Sense strand starting at position 696 of SEQ ID NO: 585931
caauuaggauccuuugguu

SEQ ID NO: 678971 - RNA, 19 nt, Artificial Sequence
  Description of Artificial Sequence: Synthetic oligonucleotide
  Antisense strand to SEQ ID NO: 678970
aaccaaaggauccuaauug

SEQ ID NO: 678972 - RNA, 19 nt, Artificial Sequence
  Description of Artificial Sequence: Synthetic oligonucleotide
  Sense strand starting at position 711 of SEQ ID NO: 585931
gguugcaagcuacauaaau

SEQ ID NO: 678973 - RNA, 19 nt, Artificial Sequence
  Description of Artificial Sequence: Synthetic oligonucleotide
  Antisense strand to SEQ ID NO: 678972
auuuauguagcuugcaacc

SEQ ID NO: 678974 - RNA, 19 nt, Artificial Sequence
  Description of Artificial Sequence: Synthetic oligonucleotide
  Sense strand starting at position 752 of SEQ ID NO: 585931
gggaauuuauuggaugaau

SEQ ID NO: 678975 - RNA, 19 nt, Artificial Sequence
  Description of Artificial Sequence: Synthetic oligonucleotide
  Antisense strand to SEQ ID NO: 678974
auucauccaauaaauuccc

SEQ ID NO: 678976 - RNA, 19 nt, Artificial Sequence
  Description of Artificial Sequence: Synthetic oligonucleotide
  Sense strand starting at position 829 of SEQ ID NO: 585931
uggaaugugugauuacuga

SEQ ID NO: 678977 - RNA, 19 nt, Artificial Sequence
  Description of Artificial Sequence: Synthetic oligonucleotide
  Antisense strand to SEQ ID NO: 678976
ucaguaaucacacauucca

SEQ ID NO: 678978 - RNA, 19 nt, Artificial Sequence
  Description of Artificial Sequence: Synthetic oligonucleotide
  Sense strand starting at position 954 of SEQ ID NO: 585931
gcuccuagucaugagaauu

SEQ ID NO: 678979 - RNA, 19 nt, Artificial Sequence
  Description of Artificial Sequence: Synthetic oligonucleotide
  Antisense strand to SEQ ID NO: 678978
aauucucaugacuaggagc

SEQ ID NO: 678980 - RNA, 19 nt, Artificial Sequence
  Description of Artificial Sequence: Synthetic oligonucleotide
  Sense strand starting at position 1015 of SEQ ID NO: 585931
acaguuauaucaucugauc

SEQ ID NO: 678981 - RNA, 19 nt, Artificial Sequence
  Description of Artificial Sequence: Synthetic oligonucleotide
  Antisense strand to SEQ ID NO: 678980
gaucagaugauauaacugu

SEQ ID NO: 678982 - RNA, 19 nt, Artificial Sequence
  Description of Artificial Sequence: Synthetic oligonucleotide
  Sense strand starting at position 1042 of SEQ ID NO: 585931
gaccaugguuaguugaaga

SEQ ID NO: 678983 - RNA, 19 nt, Artificial Sequence
  Description of Artificial Sequence: Synthetic oligonucleotide
  Antisense strand to SEQ ID NO: 678982
ucuucaacuaaccaugguc

SEQ ID NO: 678984 - RNA, 19 nt, Artificial Sequence
  Description of Artificial Sequence: Synthetic oligonucleotide
  Sense strand starting at position 1143 of SEQ ID NO: 585931
aucagaaauugugucauua

SEQ ID NO: 678985 - RNA, 19 nt, Artificial Sequence
  Description of Artificial Sequence: Synthetic oligonucleotide
  Antisense strand to SEQ ID NO: 678984
uaaugacacaauuucugau

SEQ ID NO: 678986 - RNA, 19 nt, Artificial Sequence
  Description of Artificial Sequence: Synthetic oligonucleotide
  Sense strand starting at position 1147 of SEQ ID NO: 585931
gaaauugugucauuaaaga

SEQ ID NO: 678987 - RNA, 19 nt, Artificial Sequence
  Description of Artificial Sequence: Synthetic oligonucleotide
  Antisense strand to SEQ ID NO: 678986
ucuuuaaugacacaauuuc

SEQ ID NO: 678988 - RNA, 19 nt, Artificial Sequence
  Description of Artificial Sequence: Synthetic oligonucleotide
  Sense strand starting at position 1275 of SEQ ID NO: 585931
gagauauaauagguuucua

SEQ ID NO: 678989 - RNA, 19 nt, Artificial Sequence
  Description of Artificial Sequence: Synthetic oligonucleotide
  Antisense strand to SEQ ID NO: 678988
uagaaaccuauuauaucuc

SEQ ID NO: 678990 - RNA, 19 nt, Artificial Sequence
  Description of Artificial Sequence: Synthetic oligonucleotide
  Sense strand starting at position 1383 of SEQ ID NO: 585931
uccucauugcaaggauaag

SEQ ID NO: 678991 - RNA, 19 nt, Artificial Sequence
  Description of Artificial Sequence: Synthetic oligonucleotide
  Antisense strand to SEQ ID NO: 678990
cuuauccuugcaaugagga

SEQ ID NO: 678992 - RNA, 19 nt, Artificial Sequence
  Description of Artificial Sequence: Synthetic oligonucleotide
  Sense strand starting at position 1430 of SEQ ID NO: 585931
agaguaaauuuggaaguca

SEQ ID NO: 678993 - RNA, 19 nt, Artificial Sequence
  Description of Artificial Sequence: Synthetic oligonucleotide
  Antisense strand to SEQ ID NO: 678992
ugacuuccaaauuuacucu

SEQ ID NO: 678994 - RNA, 19 nt, Artificial Sequence
  Description of Artificial Sequence: Synthetic oligonucleotide
  Sense strand starting at position 1441 of SEQ ID NO: 585931
ggaagucauucuucuuuag

SEQ ID NO: 678995 - RNA, 19 nt, Artificial Sequence
  Description of Artificial Sequence: Synthetic oligonucleotide
  Antisense strand to SEQ ID NO: 678994
cuaaagaagaaugacuucc

SEQ ID NO: 678996 - RNA, 19 nt, Artificial Sequence
  Description of Artificial Sequence: Synthetic oligonucleotide
  Sense strand starting at position 1491 of SEQ ID NO: 585931
uagagaguggcccauuaau

SEQ ID NO: 678997 - RNA, 19 nt, Artificial Sequence
  Description of Artificial Sequence: Synthetic oligonucleotide
  Antisense strand to SEQ ID NO: 678996
auuaaugggccacucucua

SEQ ID NO: 678998 - RNA, 19 nt, Artificial Sequence
  Description of Artificial Sequence: Synthetic oligonucleotide
  Sense strand starting at position 1569 of SEQ ID NO: 585931
gcauaaugcgugccugcaa

SEQ ID NO: 678999 - RNA, 19 nt, Artificial Sequence
  Description of Artificial Sequence: Synthetic oligonucleotide
  Antisense strand to SEQ ID NO: 678998
uugcaggcacgcauuaugc

SEQ ID NO: 679000 - RNA, 19 nt, Artificial Sequence
  Description of Artificial Sequence: Synthetic oligonucleotide
  Sense strand starting at position 1572 of SEQ ID NO: 585931
uaaugcgugccugcaauua

SEQ ID NO: 679001 - RNA, 19 nt, Artificial Sequence
  Description of Artificial Sequence: Synthetic oligonucleotide
  Antisense strand to SEQ ID NO: 679000
uaauugcaggcacgcauua

SEQ ID NO: 679002 - RNA, 19 nt, Artificial Sequence
  Description of Artificial Sequence: Synthetic oligonucleotide
  Sense strand starting at position 1676 of SEQ ID NO: 585931
aggcuaagucuuuauaacu

SEQ ID NO: 679003 - RNA, 19 nt, Artificial Sequence
  Description of Artificial Sequence: Synthetic oligonucleotide
  Antisense strand to SEQ ID NO: 679002
aguuauaaagacuuagccu

SEQ ID NO: 679004 - RNA, 19 nt, Artificial Sequence
  Description of Artificial Sequence: Synthetic oligonucleotide
  Sense strand starting at position 1791 of SEQ ID NO: 585931
cuguaccuuugaucagaga

SEQ ID NO: 679005 - RNA, 19 nt, Artificial Sequence
  Description of Artificial Sequence: Synthetic oligonucleotide
  Antisense strand to SEQ ID NO: 679004
ucucugaucaaagguacag

SEQ ID NO: 679006 - RNA, 19 nt, Artificial Sequence
  Description of Artificial Sequence: Synthetic oligonucleotide
  Sense strand starting at position 1816 of SEQ ID NO: 585931
uguuaaugaucauuaucug

SEQ ID NO: 679007 - RNA, 19 nt, Artificial Sequence
  Description of Artificial Sequence: Synthetic oligonucleotide
  Antisense strand to SEQ ID NO: 679006
cagauaaugaucauuaaca

SEQ ID NO: 679008 - RNA, 19 nt, Artificial Sequence
  Description of Artificial Sequence: Synthetic oligonucleotide
  Sense strand starting at position 1967 of SEQ ID NO: 585931
aaaccuugagucugcagaa

SEQ ID NO: 679009 - RNA, 19 nt, Artificial Sequence
  Description of Artificial Sequence: Synthetic oligonucleotide
  Antisense strand to SEQ ID NO: 679008
uucugcagacucaagguuu

SEQ ID NO: 679010 - RNA, 19 nt, Artificial Sequence
  Description of Artificial Sequence: Synthetic oligonucleotide
  Sense strand starting at position 1979 of SEQ ID NO: 585931
ugcagaacacuuuaucugu

SEQ ID NO: 679011 - RNA, 19 nt, Artificial Sequence
  Description of Artificial Sequence: Synthetic oligonucleotide
  Antisense strand to SEQ ID NO: 679010
acagauaaaguguucugca

SEQ ID NO: 679012 - RNA, 19 nt, Artificial Sequence
  Description of Artificial Sequence: Synthetic oligonucleotide
  Sense strand starting at position 1982 of SEQ ID NO: 585931
agaacacuuuaucugugaa

SEQ ID NO: 679013 - RNA, 19 nt, Artificial Sequence
  Description of Artificial Sequence: Synthetic oligonucleotide
  Antisense strand to SEQ ID NO: 679012
uucacagauaaaguguucu

SEQ ID NO: 679014 - RNA, 19 nt, Artificial Sequence
  Description of Artificial Sequence: Synthetic oligonucleotide
  Sense strand starting at position 2455 of SEQ ID NO: 585931
augguaaauugcucuaaau

SEQ ID NO: 679015 - RNA, 19 nt, Artificial Sequence
  Description of Artificial Sequence: Synthetic oligonucleotide
  Antisense strand to SEQ ID NO: 679014
auuuagagcaauuuaccau

SEQ ID NO: 679016 - RNA, 19 nt, Artificial Sequence
  Description of Artificial Sequence: Synthetic oligonucleotide
  Sense strand starting at position 2457 of SEQ ID NO: 585931
gguaaauugcucuaaauaa

SEQ ID NO: 679017 - RNA, 19 nt, Artificial Sequence
  Description of Artificial Sequence: Synthetic oligonucleotide
  Antisense strand to SEQ ID NO: 679016
uuauuuagagcaauuuacc

SEQ ID NO: 679018 - RNA, 19 nt, Artificial Sequence
  Description of Artificial Sequence: Synthetic oligonucleotide
  Sense strand starting at position 2573 of SEQ ID NO: 585931
gguagaguccuagacgaug

SEQ ID NO: 679019 - RNA, 19 nt, Artificial Sequence
  Description of Artificial Sequence: Synthetic oligonucleotide
  Antisense strand to SEQ ID NO: 679018
caucgucuaggacucuacc

SEQ ID NO: 679020 - RNA, 19 nt, Artificial Sequence
  Description of Artificial Sequence: Synthetic oligonucleotide
  Sense strand starting at position 2659 of SEQ ID NO: 585931
ucagaacauugugcuaaca

SEQ ID NO: 679021 - RNA, 19 nt, Artificial Sequence
  Description of Artificial Sequence: Synthetic oligonucleotide
  Antisense strand to SEQ ID NO: 679020
uguuagcacaauguucuga

SEQ ID NO: 679022 - RNA, 19 nt, Artificial Sequence
  Description of Artificial Sequence: Synthetic oligonucleotide
  Sense strand starting at position 3082 of SEQ ID NO: 585931
uuuacaagugcuuaugaau

SEQ ID NO: 679023 - RNA, 19 nt, Artificial Sequence
  Description of Artificial Sequence: Synthetic oligonucleotide
  Antisense strand to SEQ ID NO: 679022
auucauaagcacuuguaaa

SEQ ID NO: 679024 - RNA, 19 nt, Artificial Sequence
  Description of Artificial Sequence: Synthetic oligonucleotide
  Sense strand starting at position 3193 of SEQ ID NO: 585931
auguuaguccucuaaacaa

SEQ ID NO: 679025 - RNA, 19 nt, Artificial Sequence
  Description of Artificial Sequence: Synthetic oligonucleotide
  Antisense strand to SEQ ID NO: 679024
uuguuuagaggacuaacau

SEQ ID NO: 679026 - RNA, 19 nt, Artificial Sequence
  Description of Artificial Sequence: Synthetic oligonucleotide
  Sense strand starting at position 3611 of SEQ ID NO: 585931
augcuuugagugcacagaa

SEQ ID NO: 679027 - RNA, 19 nt, Artificial Sequence
  Description of Artificial Sequence: Synthetic oligonucleotide
  Antisense strand to SEQ ID NO: 679026
uucugugcacucaaagcau

SEQ ID NO: 679028 - RNA, 19 nt, Artificial Sequence
  Description of Artificial Sequence: Synthetic oligonucleotide
  Sense strand starting at position 3646 of SEQ ID NO: 585931
cagggaauguuccugagac

SEQ ID NO: 679029 - RNA, 19 nt, Artificial Sequence
  Description of Artificial Sequence: Synthetic oligonucleotide
  Antisense strand to SEQ ID NO: 679028
gucucaggaacauucccug

SEQ ID NO: 679030 - RNA, 19 nt, Artificial Sequence
  Description of Artificial Sequence: Synthetic oligonucleotide
  Sense strand starting at position 101 of SEQ ID NO: 585932
ggcugagauggucgagaac

SEQ ID NO: 679031 - RNA, 19 nt, Artificial Sequence
  Description of Artificial Sequence: Synthetic oligonucleotide
  Antisense strand to SEQ ID NO: 679030
guucucgaccaucucagcc

SEQ ID NO: 679032 - RNA, 19 nt, Artificial Sequence
  Description of Artificial Sequence: Synthetic oligonucleotide
  Sense strand starting at position 156 of SEQ ID NO: 585932
ggcagcugagauggucaaa

SEQ ID NO: 679033 - RNA, 19 nt, Artificial Sequence
  Description of Artificial Sequence: Synthetic oligonucleotide
  Antisense strand to SEQ ID NO: 679032
uuugaccaucucagcugcc

SEQ ID NO: 679034 - RNA, 19 nt, Artificial Sequence
  Description of Artificial Sequence: Synthetic oligonucleotide
  Sense strand starting at position 159 of SEQ ID NO: 585932
agcugagauggucaaagca

SEQ ID NO: 679035 - RNA, 19 nt, Artificial Sequence
  Description of Artificial Sequence: Synthetic oligonucleotide
  Antisense strand to SEQ ID NO: 679034
ugcuuugaccaucucagcu

SEQ ID NO: 679036 - RNA, 19 nt, Artificial Sequence
  Description of Artificial Sequence: Synthetic oligonucleotide
  Sense strand starting at position 204 of SEQ ID NO: 585932
uauugaggugcucaucuau

SEQ ID NO: 679037 - RNA, 19 nt, Artificial Sequence
  Description of Artificial Sequence: Synthetic oligonucleotide
  Antisense strand to SEQ ID NO: 679036
auagaugagcaccucaaua

SEQ ID NO: 679038 - RNA, 19 nt, Artificial Sequence
  Description of Artificial Sequence: Synthetic oligonucleotide
  Sense strand starting at position 227 of SEQ ID NO: 585932
ucaguuuccuaccugacau

SEQ ID NO: 679039 - RNA, 19 nt, Artificial Sequence
  Description of Artificial Sequence: Synthetic oligonucleotide
  Antisense strand to SEQ ID NO: 679038
augucagguaggaaacuga

SEQ ID NO: 679040 - RNA, 19 nt, Artificial Sequence
  Description of Artificial Sequence: Synthetic oligonucleotide
  Sense strand starting at position 392 of SEQ ID NO: 585932
acgugauuccuuugacaac

SEQ ID NO: 679041 - RNA, 19 nt, Artificial Sequence
  Description of Artificial Sequence: Synthetic oligonucleotide
  Antisense strand to SEQ ID NO: 679040
guugucaaaggaaucacgu

SEQ ID NO: 679042 - RNA, 19 nt, Artificial Sequence
  Description of Artificial Sequence: Synthetic oligonucleotide
  Sense strand starting at position 496 of SEQ ID NO: 585932
augauaaggcaugguggau

SEQ ID NO: 679043 - RNA, 19 nt, Artificial Sequence
  Description of Artificial Sequence: Synthetic oligonucleotide
  Antisense strand to SEQ ID NO: 679042
auccaccaugccuuaucau

SEQ ID NO: 679044 - RNA, 19 nt, Artificial Sequence
  Description of Artificial Sequence: Synthetic oligonucleotide
  Sense strand starting at position 590 of SEQ ID NO: 585932
ggaauuaggucuuugugac

SEQ ID NO: 679045 - RNA, 19 nt, Artificial Sequence
  Description of Artificial Sequence: Synthetic oligonucleotide
  Antisense strand to SEQ ID NO: 679044
gucacaaagaccuaauucc

SEQ ID NO: 679046 - RNA, 19 nt, Artificial Sequence
  Description of Artificial Sequence: Synthetic oligonucleotide
  Sense strand starting at position 591 of SEQ ID NO: 585932
gaauuaggucuuugugaca

SEQ ID NO: 679047 - RNA, 19 nt, Artificial Sequence
  Description of Artificial Sequence: Synthetic oligonucleotide
  Antisense strand to SEQ ID NO: 679046
ugucacaaagaccuaauuc

SEQ ID NO: 679048 - RNA, 19 nt, Artificial Sequence
  Description of Artificial Sequence: Synthetic oligonucleotide
  Sense strand starting at position 707 of SEQ ID NO: 585932
ggaauuuagucacauaacu

SEQ ID NO: 679049 - RNA, 19 nt, Artificial Sequence
  Description of Artificial Sequence: Synthetic oligonucleotide
  Antisense strand to SEQ ID NO: 679048
aguuaugugacuaaauucc

SEQ ID NO: 679050 - RNA, 19 nt, Artificial Sequence
  Description of Artificial Sequence: Synthetic oligonucleotide
  Sense strand starting at position 799 of SEQ ID NO: 585932
ggagaaagacuacgguuua

SEQ ID NO: 679051 - RNA, 19 nt, Artificial Sequence
  Description of Artificial Sequence: Synthetic oligonucleotide
  Antisense strand to SEQ ID NO: 679050
uaaaccguagucuuucucc

SEQ ID NO: 679052 - RNA, 19 nt, Artificial Sequence
  Description of Artificial Sequence: Synthetic oligonucleotide
  Sense strand starting at position 1202 of SEQ ID NO: 585932
acaguugucacgcugugua

SEQ ID NO: 679053 - RNA, 19 nt, Artificial Sequence
  Description of Artificial Sequence: Synthetic oligonucleotide
  Antisense strand to SEQ ID NO: 679052
uacacagcgugacaacugu

SEQ ID NO: 679054 - RNA, 19 nt, Artificial Sequence
  Description of Artificial Sequence: Synthetic oligonucleotide
  Sense strand starting at position 1294 of SEQ ID NO: 585932
gacacuaggugauuacaua

SEQ ID NO: 679055 - RNA, 19 nt, Artificial Sequence
  Description of Artificial Sequence: Synthetic oligonucleotide
  Antisense strand to SEQ ID NO: 679054
uauguaaucaccuaguguc

SEQ ID NO: 679056 - RNA, 19 nt, Artificial Sequence
  Description of Artificial Sequence: Synthetic oligonucleotide
  Sense strand starting at position 1446 of SEQ ID NO: 585932
ugugcuauacuccaaggaa

SEQ ID NO: 679057 - RNA, 19 nt, Artificial Sequence
  Description of Artificial Sequence: Synthetic oligonucleotide
  Antisense strand to SEQ ID NO: 679056
uuccuuggaguauagcaca

SEQ ID NO: 679058 - RNA, 19 nt, Artificial Sequence
  Description of Artificial Sequence: Synthetic oligonucleotide
  Sense strand starting at position 1449 of SEQ ID NO: 585932
gcuauacuccaaggaaauu

SEQ ID NO: 679059 - RNA, 19 nt, Artificial Sequence
  Description of Artificial Sequence: Synthetic oligonucleotide
  Antisense strand to SEQ ID NO: 679058
aauuuccuuggaguauagc

SEQ ID NO: 679060 - RNA, 19 nt, Artificial Sequence
  Description of Artificial Sequence: Synthetic oligonucleotide
  Sense strand starting at position 1582 of SEQ ID NO: 585932
aaagaacuauuucggagau

SEQ ID NO: 679061 - RNA, 19 nt, Artificial Sequence
  Description of Artificial Sequence: Synthetic oligonucleotide
  Antisense strand to SEQ ID NO: 679060
aucuccgaaauaguucuuu

SEQ ID NO: 679062 - RNA, 19 nt, Artificial Sequence
  Description of Artificial Sequence: Synthetic oligonucleotide
  Sense strand starting at position 1583 of SEQ ID NO: 585932
aagaacuauuucggagaug

SEQ ID NO: 679063 - RNA, 19 nt, Artificial Sequence
  Description of Artificial Sequence: Synthetic oligonucleotide
  Antisense strand to SEQ ID NO: 679062
caucuccgaaauaguucuu

SEQ ID NO: 679064 - RNA, 19 nt, Artificial Sequence
  Description of Artificial Sequence: Synthetic oligonucleotide
  Sense strand starting at position 1584 of SEQ ID NO: 585932
agaacuauuucggagauga

SEQ ID NO: 679065 - RNA, 19 nt, Artificial Sequence
  Description of Artificial Sequence: Synthetic oligonucleotide
  Antisense strand to SEQ ID NO: 679064
ucaucuccgaaauaguucu

SEQ ID NO: 679066 - RNA, 19 nt, Artificial Sequence
  Description of Artificial Sequence: Synthetic oligonucleotide
  Sense strand starting at position 1694 of SEQ ID NO: 585932
uguaaagaucacugucaga

SEQ ID NO: 679067 - RNA, 19 nt, Artificial Sequence
  Description of Artificial Sequence: Synthetic oligonucleotide
  Antisense strand to SEQ ID NO: 679066
ucugacagugaucuuuaca

SEQ ID NO: 679068 - RNA, 19 nt, Artificial Sequence
  Description of Artificial Sequence: Synthetic oligonucleotide
  Sense strand starting at position 1739 of SEQ ID NO: 585932
uucucaucugcauaucagu

SEQ ID NO: 679069 - RNA, 19 nt, Artificial Sequence
  Description of Artificial Sequence: Synthetic oligonucleotide
  Antisense strand to SEQ ID NO: 679068
acugauaugcagaugagaa

SEQ ID NO: 679070 - RNA, 19 nt, Artificial Sequence
  Description of Artificial Sequence: Synthetic oligonucleotide
  Sense strand starting at position 1748 of SEQ ID NO: 585932
gcauaucagucuuuagaca

SEQ ID NO: 679071 - RNA, 19 nt, Artificial Sequence
  Description of Artificial Sequence: Synthetic oligonucleotide
  Antisense strand to SEQ ID NO: 679070
ugucuaaagacugauaugc

SEQ ID NO: 679072 - RNA, 19 nt, Artificial Sequence
  Description of Artificial Sequence: Synthetic oligonucleotide
  Sense strand starting at position 1817 of SEQ ID NO: 585932
ugccuacauuuggaucaaa

SEQ ID NO: 679073 - RNA, 19 nt, Artificial Sequence
  Description of Artificial Sequence: Synthetic oligonucleotide
  Antisense strand to SEQ ID NO: 679072
uuugauccaaauguaggca

SEQ ID NO: 679074 - RNA, 19 nt, Artificial Sequence
  Description of Artificial Sequence: Synthetic oligonucleotide
  Sense strand starting at position 2427 of SEQ ID NO: 585932
cacaaagagcuaugacagu

SEQ ID NO: 679075 - RNA, 19 nt, Artificial Sequence
  Description of Artificial Sequence: Synthetic oligonucleotide
  Antisense strand to SEQ ID NO: 679074
acugucauagcucuuugug

SEQ ID NO: 679076 - RNA, 19 nt, Artificial Sequence
  Description of Artificial Sequence: Synthetic oligonucleotide
  Sense strand starting at position 2481 of SEQ ID NO: 585932
aggaaccauuugcagaaau

SEQ ID NO: 679077 - RNA, 19 nt, Artificial Sequence
  Description of Artificial Sequence: Synthetic oligonucleotide
  Antisense strand to SEQ ID NO: 679076
auuucugcaaaugguuccu

SEQ ID NO: 679078 - RNA, 19 nt, Artificial Sequence
  Description of Artificial Sequence: Synthetic oligonucleotide
  Sense strand starting at position 2566 of SEQ ID NO: 585932
gggaaauuauucuuuauuc

SEQ ID NO: 679079 - RNA, 19 nt, Artificial Sequence
  Description of Artificial Sequence: Synthetic oligonucleotide
  Antisense strand to SEQ ID NO: 679078
gaauaaagaauaauuuccc

SEQ ID NO: 679080 - RNA, 19 nt, Artificial Sequence
  Description of Artificial Sequence: Synthetic oligonucleotide
  Sense strand starting at position 2582 of SEQ ID NO: 585932
uucuaaugucuagaauagu

SEQ ID NO: 679081 - RNA, 19 nt, Artificial Sequence
  Description of Artificial Sequence: Synthetic oligonucleotide
  Antisense strand to SEQ ID NO: 679080
acuauucuagacauuagaa

SEQ ID NO: 679082 - RNA, 19 nt, Artificial Sequence
  Description of Artificial Sequence: Synthetic oligonucleotide
  Sense strand starting at position 2591 of SEQ ID NO: 585932
cuagaauaguuguuaguaa

SEQ ID NO: 679083 - RNA, 19 nt, Artificial Sequence
  Description of Artificial Sequence: Synthetic oligonucleotide
  Antisense strand to SEQ ID NO: 679082
uuacuaacaacuauucuag

SEQ ID NO: 679084 - RNA, 19 nt, Artificial Sequence
  Description of Artificial Sequence: Synthetic oligonucleotide
  Sense strand starting at position 2715 of SEQ ID NO: 585932
agaucuucucccugagaag

SEQ ID NO: 679085 - RNA, 19 nt, Artificial Sequence
  Description of Artificial Sequence: Synthetic oligonucleotide
  Antisense strand to SEQ ID NO: 679084
cuucucagggagaagaucu

SEQ ID NO: 679086 - RNA, 19 nt, Artificial Sequence
  Description of Artificial Sequence: Synthetic oligonucleotide
  Sense strand starting at position 2910 of SEQ ID NO: 585932
ggaguauugcuccagccca

SEQ ID NO: 679087 - RNA, 19 nt, Artificial Sequence
  Description of Artificial Sequence: Synthetic oligonucleotide
  Antisense strand to SEQ ID NO: 679086
ugggcuggagcaauacucc

SEQ ID NO: 679088 - RNA, 19 nt, Artificial Sequence
  Description of Artificial Sequence: Synthetic oligonucleotide
  Sense strand starting at position 3183 of SEQ ID NO: 585932
ccagaagaggauugcuuua

SEQ ID NO: 679089 - RNA, 19 nt, Artificial Sequence
  Description of Artificial Sequence: Synthetic oligonucleotide
  Antisense strand to SEQ ID NO: 679088
uaaagcaauccucuucugg

SEQ ID NO: 679090 - RNA, 19 nt, Artificial Sequence
  Description of Artificial Sequence: Synthetic oligonucleotide
  Sense strand starting at position 3200 of SEQ ID NO: 585932
uagauauaacacgauguuu

SEQ ID NO: 679091 - RNA, 19 nt, Artificial Sequence
  Description of Artificial Sequence: Synthetic oligonucleotide
  Antisense strand to SEQ ID NO: 679090
aaacaucguguuauaucua

SEQ ID NO: 679092 - RNA, 19 nt, Artificial Sequence
  Description of Artificial Sequence: Synthetic oligonucleotide
  Sense strand starting at position 3205 of SEQ ID NO: 585932
auaacacgauguuuccaaa

SEQ ID NO: 679093 - RNA, 19 nt, Artificial Sequence
  Description of Artificial Sequence: Synthetic oligonucleotide
  Antisense strand to SEQ ID NO: 679092
uuuggaaacaucguguuau

SEQ ID NO: 679094 - RNA, 19 nt, Artificial Sequence
  Description of Artificial Sequence: Synthetic oligonucleotide
  Sense strand starting at position 3479 of SEQ ID NO: 585932
aggugauaacuacguuaga

SEQ ID NO: 679095 - RNA, 19 nt, Artificial Sequence
  Description of Artificial Sequence: Synthetic oligonucleotide
  Antisense strand to SEQ ID NO: 679094
ucuaacguaguuaucaccu

SEQ ID NO: 679096 - RNA, 19 nt, Artificial Sequence
  Description of Artificial Sequence: Synthetic oligonucleotide
  Sense strand starting at position 3480 of SEQ ID NO: 585932
ggugauaacuacguuagac

SEQ ID NO: 679097 - RNA, 19 nt, Artificial Sequence
  Description of Artificial Sequence: Synthetic oligonucleotide
  Antisense strand to SEQ ID NO: 679096
gucuaacguaguuaucacc

SEQ ID NO: 679098 - RNA, 19 nt, Artificial Sequence
  Description of Artificial Sequence: Synthetic oligonucleotide
  Sense strand starting at position 3482 of SEQ ID NO: 585932
ugauaacuacguuagacuu

SEQ ID NO: 679099 - RNA, 19 nt, Artificial Sequence
  Description of Artificial Sequence: Synthetic oligonucleotide
  Antisense strand to SEQ ID NO: 679098
aagucuaacguaguuauca

SEQ ID NO: 679100 - RNA, 19 nt, Artificial Sequence
  Description of Artificial Sequence: Synthetic oligonucleotide
  Sense strand starting at position 3490 of SEQ ID NO: 585932
acguuagacuugagaggga

SEQ ID NO: 679101 - RNA, 19 nt, Artificial Sequence
  Description of Artificial Sequence: Synthetic oligonucleotide
  Antisense strand to SEQ ID NO: 679100
ucccucucaagucuaacgu

SEQ ID NO: 679102 - RNA, 19 nt, Artificial Sequence
  Description of Artificial Sequence: Synthetic oligonucleotide
  Sense strand starting at position 3830 of SEQ ID NO: 585932
ucuuaagagcucugaugug

SEQ ID NO: 679103 - RNA, 19 nt, Artificial Sequence
  Description of Artificial Sequence: Synthetic oligonucleotide
  Antisense strand to SEQ ID NO: 679102
cacaucagagcucuuaaga

SEQ ID NO: 679104 - RNA, 19 nt, Artificial Sequence
  Description of Artificial Sequence: Synthetic oligonucleotide
  Sense strand starting at position 3837 of SEQ ID NO: 585932
agcucugauguguaacuca

SEQ ID NO: 679105 - RNA, 19 nt, Artificial Sequence
  Description of Artificial Sequence: Synthetic oligonucleotide
  Antisense strand to SEQ ID NO: 679104
ugaguuacacaucagagcu

SEQ ID NO: 679106 - RNA, 19 nt, Artificial Sequence
  Description of Artificial Sequence: Synthetic oligonucleotide
  Sense strand starting at position 3848 of SEQ ID NO: 585932
guaacucaagcagaucaua

SEQ ID NO: 679107 - RNA, 19 nt, Artificial Sequence
  Description of Artificial Sequence: Synthetic oligonucleotide
  Antisense strand to SEQ ID NO: 679106
uaugaucugcuugaguuac

SEQ ID NO: 679108 - RNA, 19 nt, Artificial Sequence
  Description of Artificial Sequence: Synthetic oligonucleotide
  Sense strand starting at position 3877 of SEQ ID NO: 585932
agucguuaucccucacggu

SEQ ID NO: 679109 - RNA, 19 nt, Artificial Sequence
  Description of Artificial Sequence: Synthetic oligonucleotide
  Antisense strand to SEQ ID NO: 679108
accgugagggauaacgacu

SEQ ID NO: 679110 - RNA, 19 nt, Artificial Sequence
  Description of Artificial Sequence: Synthetic oligonucleotide
  Sense strand starting at position 91 of SEQ ID NO: 585933
cuugauccugggugggauu

SEQ ID NO: 679111 - RNA, 19 nt, Artificial Sequence
  Description of Artificial Sequence: Synthetic oligonucleotide
  Antisense strand to SEQ ID NO: 679110
aaucccacccaggaucaag

SEQ ID NO: 679112 - RNA, 19 nt, Artificial Sequence
  Description of Artificial Sequence: Synthetic oligonucleotide
  Sense strand starting at position 445 of SEQ ID NO: 585933
caggcagucugacucuaaa

SEQ ID NO: 679113 - RNA, 19 nt, Artificial Sequence
  Description of Artificial Sequence: Synthetic oligonucleotide
  Antisense strand to SEQ ID NO: 679112
uuuagagucagacugccug

SEQ ID NO: 679114 - RNA, 19 nt, Artificial Sequence
  Description of Artificial Sequence: Synthetic oligonucleotide
  Sense strand starting at position 448 of SEQ ID NO: 585933
gcagucugacucuaaauaa

SEQ ID NO: 679115 - RNA, 19 nt, Artificial Sequence
  Description of Artificial Sequence: Synthetic oligonucleotide
  Antisense strand to SEQ ID NO: 679114
uuauuuagagucagacugc

SEQ ID NO: 679116 - RNA, 19 nt, Artificial Sequence
  Description of Artificial Sequence: Synthetic oligonucleotide
  Sense strand starting at position 491 of SEQ ID NO: 585933
aguguauuucagcaguagu

SEQ ID NO: 679117 - RNA, 19 nt, Artificial Sequence
  Description of Artificial Sequence: Synthetic oligonucleotide
  Antisense strand to SEQ ID NO: 679116
acuacugcugaaauacacu

SEQ ID NO: 679118 - RNA, 19 nt, Artificial Sequence
  Description of Artificial Sequence: Synthetic oligonucleotide
  Sense strand starting at position 510 of SEQ ID NO: 585933
uuugaacaucguuaaagca

SEQ ID NO: 679119 - RNA, 19 nt, Artificial Sequence
  Description of Artificial Sequence: Synthetic oligonucleotide
  Antisense strand to SEQ ID NO: 679118
ugcuuuaacgauguucaaa

SEQ ID NO: 679120 - RNA, 19 nt, Artificial Sequence
  Description of Artificial Sequence: Synthetic oligonucleotide
  Sense strand starting at position 538 of SEQ ID NO: 585933
cuccaaggcuaauuagaua

SEQ ID NO: 679121 - RNA, 19 nt, Artificial Sequence
  Description of Artificial Sequence: Synthetic oligonucleotide
  Antisense strand to SEQ ID NO: 679120
uaucuaauuagccuuggag

SEQ ID NO: 679122 - RNA, 19 nt, Artificial Sequence
  Description of Artificial Sequence: Synthetic oligonucleotide
  Sense strand starting at position 564 of SEQ ID NO: 585933
uggauauuccaauguagau

SEQ ID NO: 679123 - RNA, 19 nt, Artificial Sequence
  Description of Artificial Sequence: Synthetic oligonucleotide
  Antisense strand to SEQ ID NO: 679122
aucuacauuggaauaucca

SEQ ID NO: 679124 - RNA, 19 nt, Artificial Sequence
  Description of Artificial Sequence: Synthetic oligonucleotide
  Sense strand starting at position 800 of SEQ ID NO: 585933
gugaauaaguaucucacca

SEQ ID NO: 679125 - RNA, 19 nt, Artificial Sequence
  Description of Artificial Sequence: Synthetic oligonucleotide
  Antisense strand to SEQ ID NO: 679124
uggugagauacuuauucac

SEQ ID NO: 679126 - RNA, 19 nt, Artificial Sequence
  Description of Artificial Sequence: Synthetic oligonucleotide
  Sense strand starting at position 807 of SEQ ID NO: 585933
aguaucucaccaugugaca

SEQ ID NO: 679127 - RNA, 19 nt, Artificial Sequence
  Description of Artificial Sequence: Synthetic oligonucleotide
  Antisense strand to SEQ ID NO: 679126
ugucacauggugagauacu

SEQ ID NO: 679128 - RNA, 19 nt, Artificial Sequence
  Description of Artificial Sequence: Synthetic oligonucleotide
  Sense strand starting at position 964 of SEQ ID NO: 585933
gagcuucugcucuaaggaa

SEQ ID NO: 679129 - RNA, 19 nt, Artificial Sequence
  Description of Artificial Sequence: Synthetic oligonucleotide
  Antisense strand to SEQ ID NO: 679128
uuccuuagagcagaagcuc

SEQ ID NO: 679130 - RNA, 19 nt, Artificial Sequence
  Description of Artificial Sequence: Synthetic oligonucleotide
  Sense strand starting at position 1129 of SEQ ID NO: 585933
ggaguacuuugagcugaaa

SEQ ID NO: 679131 - RNA, 19 nt, Artificial Sequence
  Description of Artificial Sequence: Synthetic oligonucleotide
  Antisense strand to SEQ ID NO: 679130
uuucagcucaaaguacucc

SEQ ID NO: 679132 - RNA, 19 nt, Artificial Sequence
  Description of Artificial Sequence: Synthetic oligonucleotide
  Sense strand starting at position 1206 of SEQ ID NO: 585933
gaagguuaugccugggaag

SEQ ID NO: 679133 - RNA, 19 nt, Artificial Sequence
  Description of Artificial Sequence: Synthetic oligonucleotide
  Antisense strand to SEQ ID NO: 679132
cuucccaggcauaaccuuc

SEQ ID NO: 679134 - RNA, 19 nt, Artificial Sequence
  Description of Artificial Sequence: Synthetic oligonucleotide
  Sense strand starting at position 1468 of SEQ ID NO: 585933
cugagcuuaccugaucuua

SEQ ID NO: 679135 - RNA, 19 nt, Artificial Sequence
  Description of Artificial Sequence: Synthetic oligonucleotide
  Antisense strand to SEQ ID NO: 679134
uaagaucagguaagcucag

SEQ ID NO: 679136 - RNA, 19 nt, Artificial Sequence
  Description of Artificial Sequence: Synthetic oligonucleotide
  Sense strand starting at position 1507 of SEQ ID NO: 585933
augcucucugcguucucaa

SEQ ID NO: 679137 - RNA, 19 nt, Artificial Sequence
  Description of Artificial Sequence: Synthetic oligonucleotide
  Antisense strand to SEQ ID NO: 679136
uugagaacgcagagagcau

SEQ ID NO: 679138 - RNA, 19 nt, Artificial Sequence
  Description of Artificial Sequence: Synthetic oligonucleotide
  Sense strand starting at position 1534 of SEQ ID NO: 585933
uccuauuuggucuggaguu

SEQ ID NO: 679139 - RNA, 19 nt, Artificial Sequence
  Description of Artificial Sequence: Synthetic oligonucleotide
  Antisense strand to SEQ ID NO: 679138
aacuccagaccaaauagga

SEQ ID NO: 679140 - RNA, 19 nt, Artificial Sequence
  Description of Artificial Sequence: Synthetic oligonucleotide
  Sense strand starting at position 1556 of SEQ ID NO: 585933
gugugugcucuaucaguau

SEQ ID NO: 679141 - RNA, 19 nt, Artificial Sequence
  Description of Artificial Sequence: Synthetic oligonucleotide
  Antisense strand to SEQ ID NO: 679140
auacugauagagcacacac

SEQ ID NO: 679142 - RNA, 19 nt, Artificial Sequence
  Description of Artificial Sequence: Synthetic oligonucleotide
  Sense strand starting at position 1831 of SEQ ID NO: 585933
gaauguggugauuaagcaa

SEQ ID NO: 679143 - RNA, 19 nt, Artificial Sequence
  Description of Artificial Sequence: Synthetic oligonucleotide
  Antisense strand to SEQ ID NO: 679142
uugcuuaaucaccacauuc

SEQ ID NO: 679144 - RNA, 19 nt, Artificial Sequence
  Description of Artificial Sequence: Synthetic oligonucleotide
  Sense strand starting at position 1834 of SEQ ID NO: 585933
uguggugauuaagcaaaga

SEQ ID NO: 679145 - RNA, 19 nt, Artificial Sequence
  Description of Artificial Sequence: Synthetic oligonucleotide
  Antisense strand to SEQ ID NO: 679144
ucuuugcuuaaucaccaca

SEQ ID NO: 679146 - RNA, 19 nt, Artificial Sequence
  Description of Artificial Sequence: Synthetic oligonucleotide
  Sense strand starting at position 2141 of SEQ ID NO: 585933
agaguuaagugauuaacua

SEQ ID NO: 679147 - RNA, 19 nt, Artificial Sequence
  Description of Artificial Sequence: Synthetic oligonucleotide
  Antisense strand to SEQ ID NO: 679146
uaguuaaucacuuaacucu

SEQ ID NO: 679148 - RNA, 19 nt, Artificial Sequence
  Description of Artificial Sequence: Synthetic oligonucleotide
  Sense strand starting at position 2404 of SEQ ID NO: 585933
gccacuacuccagaugcua

SEQ ID NO: 679149 - RNA, 19 nt, Artificial Sequence
  Description of Artificial Sequence: Synthetic oligonucleotide
  Antisense strand to SEQ ID NO: 679148
uagcaucuggaguaguggc

SEQ ID NO: 679150 - RNA, 19 nt, Artificial Sequence
  Description of Artificial Sequence: Synthetic oligonucleotide
  Sense strand starting at position 2420 of SEQ ID NO: 585933
cuagaaauaaagcggugaa

SEQ ID NO: 679151 - RNA, 19 nt, Artificial Sequence
  Description of Artificial Sequence: Synthetic oligonucleotide
  Antisense strand to SEQ ID NO: 679150
uucaccgcuuuauuucuag

SEQ ID NO: 679152 - RNA, 19 nt, Artificial Sequence
  Description of Artificial Sequence: Synthetic oligonucleotide
  Sense strand starting at position 2423 of SEQ ID NO: 585933
gaaauaaagcggugaauga

SEQ ID NO: 679153 - RNA, 19 nt, Artificial Sequence
  Description of Artificial Sequence: Synthetic oligonucleotide
  Antisense strand to SEQ ID NO: 679152
ucauucaccgcuuuauuuc

SEQ ID NO: 679154 - RNA, 19 nt, Artificial Sequence
  Description of Artificial Sequence: Synthetic oligonucleotide
  Sense strand starting at position 2565 of SEQ ID NO: 585933
gugacaaguggcuaaauua

SEQ ID NO: 679155 - RNA, 19 nt, Artificial Sequence
  Description of Artificial Sequence: Synthetic oligonucleotide
  Antisense strand to SEQ ID NO: 679154
uaauuuagccacuugucac

SEQ ID NO: 679156 - RNA, 19 nt, Artificial Sequence
  Description of Artificial Sequence: Synthetic oligonucleotide
  Sense strand starting at position 2597 of SEQ ID NO: 585933
ggaauuggcucucugaaau

SEQ ID NO: 679157 - RNA, 19 nt, Artificial Sequence
  Description of Artificial Sequence: Synthetic oligonucleotide
  Antisense strand to SEQ ID NO: 679156
auuucagagagccaauucc

SEQ ID NO: 679158 - RNA, 19 nt, Artificial Sequence
  Description of Artificial Sequence: Synthetic oligonucleotide
  Sense strand starting at position 2615 of SEQ ID NO: 585933
ugacaacuagccugaaauc

SEQ ID NO: 679159 - RNA, 19 nt, Artificial Sequence
  Description of Artificial Sequence: Synthetic oligonucleotide
  Antisense strand to SEQ ID NO: 679158
gauuucaggcuaguuguca

SEQ ID NO: 679160 - RNA, 19 nt, Artificial Sequence
  Description of Artificial Sequence: Synthetic oligonucleotide
  Sense strand starting at position 2626 of SEQ ID NO: 585933
cugaaaucugaaugguauu

SEQ ID NO: 679161 - RNA, 19 nt, Artificial Sequence
  Description of Artificial Sequence: Synthetic oligonucleotide
  Antisense strand to SEQ ID NO: 679160
aauaccauucagauuucag

SEQ ID NO: 679162 - RNA, 19 nt, Artificial Sequence
  Description of Artificial Sequence: Synthetic oligonucleotide
  Sense strand starting at position 2629 of SEQ ID NO: 585933
aaaucugaaugguauuuga

SEQ ID NO: 679163 - RNA, 19 nt, Artificial Sequence
  Description of Artificial Sequence: Synthetic oligonucleotide
  Antisense strand to SEQ ID NO: 679162
ucaaauaccauucagauuu

SEQ ID NO: 679164 - RNA, 19 nt, Artificial Sequence
  Description of Artificial Sequence: Synthetic oligonucleotide
  Sense strand starting at position 2684 of SEQ ID NO: 585933
gaagaaacaccaugucuug

SEQ ID NO: 679165 - RNA, 19 nt, Artificial Sequence
  Description of Artificial Sequence: Synthetic oligonucleotide
  Antisense strand to SEQ ID NO: 679164
caagacaugguguuucuuc

SEQ ID NO: 679166 - RNA, 19 nt, Artificial Sequence
  Description of Artificial Sequence: Synthetic oligonucleotide
  Sense strand starting at position 2690 of SEQ ID NO: 585933
acaccaugucuugagccau

SEQ ID NO: 679167 - RNA, 19 nt, Artificial Sequence
  Description of Artificial Sequence: Synthetic oligonucleotide
  Antisense strand to SEQ ID NO: 679166
auggcucaagacauggugu

SEQ ID NO: 679168 - RNA, 19 nt, Artificial Sequence
  Description of Artificial Sequence: Synthetic oligonucleotide
  Sense strand starting at position 2714 of SEQ ID NO: 585933
cggauucuggagcagaacu

SEQ ID NO: 679169 - RNA, 19 nt, Artificial Sequence
  Description of Artificial Sequence: Synthetic oligonucleotide
  Antisense strand to SEQ ID NO: 679168
aguucugcuccagaauccg

SEQ ID NO: 679170 - RNA, 19 nt, Artificial Sequence
  Description of Artificial Sequence: Synthetic oligonucleotide
  Sense strand starting at position 3143 of SEQ ID NO: 585933
cuaccaccugguuauauau

SEQ ID NO: 679171 - RNA, 19 nt, Artificial Sequence
  Description of Artificial Sequence: Synthetic oligonucleotide
  Antisense strand to SEQ ID NO: 679170
auauauaaccaggugguag

SEQ ID NO: 679172 - RNA, 19 nt, Artificial Sequence
  Description of Artificial Sequence: Synthetic oligonucleotide
  Sense strand starting at position 3271 of SEQ ID NO: 585933
ugauauuaacucugugaug

SEQ ID NO: 679173 - RNA, 19 nt, Artificial Sequence
  Description of Artificial Sequence: Synthetic oligonucleotide
  Antisense strand to SEQ ID NO: 679172
caucacagaguuaauauca

SEQ ID NO: 679174 - RNA, 19 nt, Artificial Sequence
  Description of Artificial Sequence: Synthetic oligonucleotide
  Sense strand starting at position 3273 of SEQ ID NO: 585933
auauuaacucugugaugua

SEQ ID NO: 679175 - RNA, 19 nt, Artificial Sequence
  Description of Artificial Sequence: Synthetic oligonucleotide
  Antisense strand to SEQ ID NO: 679174
uacaucacagaguuaauau

SEQ ID NO: 679176 - RNA, 19 nt, Artificial Sequence
  Description of Artificial Sequence: Synthetic oligonucleotide
  Sense strand starting at position 3320 of SEQ ID NO: 585933
auguguccuuaacccagaa

SEQ ID NO: 679177 - RNA, 19 nt, Artificial Sequence
  Description of Artificial Sequence: Synthetic oligonucleotide
  Antisense strand to SEQ ID NO: 679176
uucuggguuaaggacacau

SEQ ID NO: 679178 - RNA, 19 nt, Artificial Sequence
  Description of Artificial Sequence: Synthetic oligonucleotide
  Sense strand starting at position 3324 of SEQ ID NO: 585933
guccuuaacccagaaugca

SEQ ID NO: 679179 - RNA, 19 nt, Artificial Sequence
  Description of Artificial Sequence: Synthetic oligonucleotide
  Antisense strand to SEQ ID NO: 679178
ugcauucuggguuaaggac

SEQ ID NO: 679180 - RNA, 19 nt, Artificial Sequence
  Description of Artificial Sequence: Synthetic oligonucleotide
  Sense strand starting at position 3336 of SEQ ID NO: 585933
gaaugcaguccuugauaaa

SEQ ID NO: 679181 - RNA, 19 nt, Artificial Sequence
  Description of Artificial Sequence: Synthetic oligonucleotide
  Antisense strand to SEQ ID NO: 679180
uuuaucaaggacugcauuc

SEQ ID NO: 679182 - RNA, 19 nt, Artificial Sequence
  Description of Artificial Sequence: Synthetic oligonucleotide
  Sense strand starting at position 3337 of SEQ ID NO: 585933
aaugcaguccuugauaaag

SEQ ID NO: 679183 - RNA, 19 nt, Artificial Sequence
  Description of Artificial Sequence: Synthetic oligonucleotide
  Antisense strand to SEQ ID NO: 679182
cuuuaucaaggacugcauu

SEQ ID NO: 679184 - RNA, 19 nt, Artificial Sequence
  Description of Artificial Sequence: Synthetic oligonucleotide
  Sense strand starting at position 3837 of SEQ ID NO: 585933
aguguaaauggucacuauu

SEQ ID NO: 679185 - RNA, 19 nt, Artificial Sequence
  Description of Artificial Sequence: Synthetic oligonucleotide
  Antisense strand to SEQ ID NO: 679184
aauagugaccauuuacacu

SEQ ID NO: 679186 - RNA, 19 nt, Artificial Sequence
  Description of Artificial Sequence: Synthetic oligonucleotide
  Sense strand starting at position 3839 of SEQ ID NO: 585933
uguaaauggucacuauuga

SEQ ID NO: 679187 - RNA, 19 nt, Artificial Sequence
  Description of Artificial Sequence: Synthetic oligonucleotide
  Antisense strand to SEQ ID NO: 679186
ucaauagugaccauuuaca

SEQ ID NO: 679188 - RNA, 19 nt, Artificial Sequence
  Description of Artificial Sequence: Synthetic oligonucleotide
  Sense strand starting at position 3854 of SEQ ID NO: 585933
uugagaaagguuugacuau

SEQ ID NO: 679189 - RNA, 19 nt, Artificial Sequence
  Description of Artificial Sequence: Synthetic oligonucleotide
  Antisense strand to SEQ ID NO: 679188
auagucaaaccuuucucaa

SEQ ID NO: 679190 - RNA, 19 nt, Artificial Sequence
  Description of Artificial Sequence: Synthetic oligonucleotide
  Sense strand starting at position 392 of SEQ ID NO: 585934
gggaaagcuguuuauuggu

SEQ ID NO: 679191 - RNA, 19 nt, Artificial Sequence
  Description of Artificial Sequence: Synthetic oligonucleotide
  Antisense strand to SEQ ID NO: 679190
accaauaaacagcuuuccc

SEQ ID NO: 679192 - RNA, 19 nt, Artificial Sequence
  Description of Artificial Sequence: Synthetic oligonucleotide
  Sense strand starting at position 456 of SEQ ID NO: 585934
aaauaauacguauguagac

SEQ ID NO: 679193 - RNA, 19 nt, Artificial Sequence
  Description of Artificial Sequence: Synthetic oligonucleotide
  Antisense strand to SEQ ID NO: 679192
gucuacauacguauuauuu

SEQ ID NO: 679194 - RNA, 19 nt, Artificial Sequence
  Description of Artificial Sequence: Synthetic oligonucleotide
  Sense strand starting at position 457 of SEQ ID NO: 585934
aauaauacguauguagaca

SEQ ID NO: 679195 - RNA, 19 nt, Artificial Sequence
  Description of Artificial Sequence: Synthetic oligonucleotide
  Antisense strand to SEQ ID NO: 679194
ugucuacauacguauuauu

SEQ ID NO: 679196 - RNA, 19 nt, Artificial Sequence
  Description of Artificial Sequence: Synthetic oligonucleotide
  Sense strand starting at position 521 of SEQ ID NO: 585934
gagaaugauggcuauggca

SEQ ID NO: 679197 - RNA, 19 nt, Artificial Sequence
  Description of Artificial Sequence: Synthetic oligonucleotide
  Antisense strand to SEQ ID NO: 679196
ugccauagccaucauucuc

SEQ ID NO: 679198 - RNA, 19 nt, Artificial Sequence
  Description of Artificial Sequence: Synthetic oligonucleotide
  Sense strand starting at position 523 of SEQ ID NO: 585934
gaaugauggcuauggcauc

SEQ ID NO: 679199 - RNA, 19 nt, Artificial Sequence
  Description of Artificial Sequence: Synthetic oligonucleotide
  Antisense strand to SEQ ID NO: 679198
gaugccauagccaucauuc

SEQ ID NO: 679200 - RNA, 19 nt, Artificial Sequence
  Description of Artificial Sequence: Synthetic oligonucleotide
  Sense strand starting at position 530 of SEQ ID NO: 585934
ggcuauggcaucuggauuu

SEQ ID NO: 679201 - RNA, 19 nt, Artificial Sequence
  Description of Artificial Sequence: Synthetic oligonucleotide
  Antisense strand to SEQ ID NO: 679200
aaauccagaugccauagcc

SEQ ID NO: 679202 - RNA, 19 nt, Artificial Sequence
  Description of Artificial Sequence: Synthetic oligonucleotide
  Sense strand starting at position 572 of SEQ ID NO: 585934
ugcucugacucuuuaaaug

SEQ ID NO: 679203 - RNA, 19 nt, Artificial Sequence
  Description of Artificial Sequence: Synthetic oligonucleotide
  Antisense strand to SEQ ID NO: 679202
cauuuaaagagucagagca

SEQ ID NO: 679204 - RNA, 19 nt, Artificial Sequence
  Description of Artificial Sequence: Synthetic oligonucleotide
  Sense strand starting at position 638 of SEQ ID NO: 585934
aaugucuucuaacugggau

SEQ ID NO: 679205 - RNA, 19 nt, Artificial Sequence
  Description of Artificial Sequence: Synthetic oligonucleotide
  Antisense strand to SEQ ID NO: 679204
aucccaguuagaagacauu

SEQ ID NO: 679206 - RNA, 19 nt, Artificial Sequence
  Description of Artificial Sequence: Synthetic oligonucleotide
  Sense strand starting at position 681 of SEQ ID NO: 585934
gguagugugacagagaagu

SEQ ID NO: 679207 - RNA, 19 nt, Artificial Sequence
  Description of Artificial Sequence: Synthetic oligonucleotide
  Antisense strand to SEQ ID NO: 679206
acuucucugucacacuacc

SEQ ID NO: 679208 - RNA, 19 nt, Artificial Sequence
  Description of Artificial Sequence: Synthetic oligonucleotide
  Sense strand starting at position 692 of SEQ ID NO: 585934
agagaagucugauuaaccc

SEQ ID NO: 679209 - RNA, 19 nt, Artificial Sequence
  Description of Artificial Sequence: Synthetic oligonucleotide
  Antisense strand to SEQ ID NO: 679208
ggguuaaucagacuucucu

SEQ ID NO: 679210 - RNA, 19 nt, Artificial Sequence
  Description of Artificial Sequence: Synthetic oligonucleotide
  Sense strand starting at position 699 of SEQ ID NO: 585934
ucugauuaacccugaaguu

SEQ ID NO: 679211 - RNA, 19 nt, Artificial Sequence
  Description of Artificial Sequence: Synthetic oligonucleotide
  Antisense strand to SEQ ID NO: 679210
aacuucaggguuaaucaga

SEQ ID NO: 679212 - RNA, 19 nt, Artificial Sequence
  Description of Artificial Sequence: Synthetic oligonucleotide
  Sense strand starting at position 700 of SEQ ID NO: 585934
cugauuaacccugaaguuc

SEQ ID NO: 679213 - RNA, 19 nt, Artificial Sequence
  Description of Artificial Sequence: Synthetic oligonucleotide
  Antisense strand to SEQ ID NO: 679212
gaacuucaggguuaaucag

SEQ ID NO: 679214 - RNA, 19 nt, Artificial Sequence
  Description of Artificial Sequence: Synthetic oligonucleotide
  Sense strand starting at position 990 of SEQ ID NO: 585934
ggugacugacuuuaucuua

SEQ ID NO: 679215 - RNA, 19 nt, Artificial Sequence
  Description of Artificial Sequence: Synthetic oligonucleotide
  Antisense strand to SEQ ID NO: 679214
uaagauaaagucagucacc

SEQ ID NO: 679216 - RNA, 19 nt, Artificial Sequence
  Description of Artificial Sequence: Synthetic oligonucleotide
  Sense strand starting at position 1119 of SEQ ID NO: 585934
ucuugagacucucuaagag

SEQ ID NO: 679217 - RNA, 19 nt, Artificial Sequence
  Description of Artificial Sequence: Synthetic oligonucleotide
  Antisense strand to SEQ ID NO: 679216
cucuuagagagucucaaga

SEQ ID NO: 679218 - RNA, 19 nt, Artificial Sequence
  Description of Artificial Sequence: Synthetic oligonucleotide
  Sense strand starting at position 1153 of SEQ ID NO: 585934
gcuugagaaaccugauguc

SEQ ID NO: 679219 - RNA, 19 nt, Artificial Sequence
  Description of Artificial Sequence: Synthetic oligonucleotide
  Antisense strand to SEQ ID NO: 679218
gacaucagguuucucaagc

SEQ ID NO: 679220 - RNA, 19 nt, Artificial Sequence
  Description of Artificial Sequence: Synthetic oligonucleotide
  Sense strand starting at position 1433 of SEQ ID NO: 585934
gagagaacguuugucagau

SEQ ID NO: 679221 - RNA, 19 nt, Artificial Sequence
  Description of Artificial Sequence: Synthetic oligonucleotide
  Antisense strand to SEQ ID NO: 679220
aucugacaaacguucucuc

SEQ ID NO: 679222 - RNA, 19 nt, Artificial Sequence
  Description of Artificial Sequence: Synthetic oligonucleotide
  Sense strand starting at position 1434 of SEQ ID NO: 585934
agagaacguuugucagauc

SEQ ID NO: 679223 - RNA, 19 nt, Artificial Sequence
  Description of Artificial Sequence: Synthetic oligonucleotide
  Antisense strand to SEQ ID NO: 679222
gaucugacaaacguucucu

SEQ ID NO: 679224 - RNA, 19 nt, Artificial Sequence
  Description of Artificial Sequence: Synthetic oligonucleotide
  Sense strand starting at position 1455 of SEQ ID NO: 585934
guuguuaugaacgaggaug

SEQ ID NO: 679225 - RNA, 19 nt, Artificial Sequence
  Description of Artificial Sequence: Synthetic oligonucleotide
  Antisense strand to SEQ ID NO: 679224
cauccucguucauaacaac

SEQ ID NO: 679226 - RNA, 19 nt, Artificial Sequence
  Description of Artificial Sequence: Synthetic oligonucleotide
  Sense strand starting at position 1457 of SEQ ID NO: 585934
uguuaugaacgaggaugau

SEQ ID NO: 679227 - RNA, 19 nt, Artificial Sequence
  Description of Artificial Sequence: Synthetic oligonucleotide
  Antisense strand to SEQ ID NO: 679226
aucauccucguucauaaca

SEQ ID NO: 679228 - RNA, 19 nt, Artificial Sequence
  Description of Artificial Sequence: Synthetic oligonucleotide
  Sense strand starting at position 1990 of SEQ ID NO: 585934
ugaguauacuucucauagu

SEQ ID NO: 679229 - RNA, 19 nt, Artificial Sequence
  Description of Artificial Sequence: Synthetic oligonucleotide
  Antisense strand to SEQ ID NO: 679228
acuaugagaaguauacuca

SEQ ID NO: 679230 - RNA, 19 nt, Artificial Sequence
  Description of Artificial Sequence: Synthetic oligonucleotide
  Sense strand starting at position 2040 of SEQ ID NO: 585934
caagauaauguauguuaga

SEQ ID NO: 679231 - RNA, 19 nt, Artificial Sequence
  Description of Artificial Sequence: Synthetic oligonucleotide
  Antisense strand to SEQ ID NO: 679230
ucuaacauacauuaucuug

SEQ ID NO: 679232 - RNA, 19 nt, Artificial Sequence
  Description of Artificial Sequence: Synthetic oligonucleotide
  Sense strand starting at position 2109 of SEQ ID NO: 585934
uguagaaauuaugcaucau

SEQ ID NO: 679233 - RNA, 19 nt, Artificial Sequence
  Description of Artificial Sequence: Synthetic oligonucleotide
  Antisense strand to SEQ ID NO: 679232
augaugcauaauuucuaca

SEQ ID NO: 679234 - RNA, 19 nt, Artificial Sequence
  Description of Artificial Sequence: Synthetic oligonucleotide
  Sense strand starting at position 2205 of SEQ ID NO: 585934
ucgaaagccuccuuagaau

SEQ ID NO: 679235 - RNA, 19 nt, Artificial Sequence
  Description of Artificial Sequence: Synthetic oligonucleotide
  Antisense strand to SEQ ID NO: 679234
auucuaaggaggcuuucga

SEQ ID NO: 679236 - RNA, 19 nt, Artificial Sequence
  Description of Artificial Sequence: Synthetic oligonucleotide
  Sense strand starting at position 2232 of SEQ ID NO: 585934
cccagauuauggcuguaau

SEQ ID NO: 679237 - RNA, 19 nt, Artificial Sequence
  Description of Artificial Sequence: Synthetic oligonucleotide
  Antisense strand to SEQ ID NO: 679236
auuacagccauaaucuggg

SEQ ID NO: 679238 - RNA, 19 nt, Artificial Sequence
  Description of Artificial Sequence: Synthetic oligonucleotide
  Sense strand starting at position 2233 of SEQ ID NO: 585934
ccagauuauggcuguaaua

SEQ ID NO: 679239 - RNA, 19 nt, Artificial Sequence
  Description of Artificial Sequence: Synthetic oligonucleotide
  Antisense strand to SEQ ID NO: 679238
uauuacagccauaaucugg

SEQ ID NO: 679240 - RNA, 19 nt, Artificial Sequence
  Description of Artificial Sequence: Synthetic oligonucleotide
  Sense strand starting at position 2235 of SEQ ID NO: 585934
agauuauggcuguaauaac

SEQ ID NO: 679241 - RNA, 19 nt, Artificial Sequence
  Description of Artificial Sequence: Synthetic oligonucleotide
  Antisense strand to SEQ ID NO: 679240
guuauuacagccauaaucu

SEQ ID NO: 679242 - RNA, 19 nt, Artificial Sequence
  Description of Artificial Sequence: Synthetic oligonucleotide
  Sense strand starting at position 2359 of SEQ ID NO: 585934
cugucauaucaauaacagu

SEQ ID NO: 679243 - RNA, 19 nt, Artificial Sequence
  Description of Artificial Sequence: Synthetic oligonucleotide
  Antisense strand to SEQ ID NO: 679242
acuguuauugauaugacag

SEQ ID NO: 679244 - RNA, 19 nt, Artificial Sequence
  Description of Artificial Sequence: Synthetic oligonucleotide
  Sense strand starting at position 2482 of SEQ ID NO: 585934
caagaaauucccugagggu

SEQ ID NO: 679245 - RNA, 19 nt, Artificial Sequence
  Description of Artificial Sequence: Synthetic oligonucleotide
  Antisense strand to SEQ ID NO: 679244
acccucagggaauuucuug

SEQ ID NO: 679246 - RNA, 19 nt, Artificial Sequence
  Description of Artificial Sequence: Synthetic oligonucleotide
  Sense strand starting at position 2504 of SEQ ID NO: 585934
cuuaguucucuccaccuga

SEQ ID NO: 679247 - RNA, 19 nt, Artificial Sequence
  Description of Artificial Sequence: Synthetic oligonucleotide
  Antisense strand to SEQ ID NO: 679246
ucagguggagagaacuaag

SEQ ID NO: 679248 - RNA, 19 nt, Artificial Sequence
  Description of Artificial Sequence: Synthetic oligonucleotide
  Sense strand starting at position 2594 of SEQ ID NO: 585934
cucggugugaaugaacuau

SEQ ID NO: 679249 - RNA, 19 nt, Artificial Sequence
  Description of Artificial Sequence: Synthetic oligonucleotide
  Antisense strand to SEQ ID NO: 679248
auaguucauucacaccgag

SEQ ID NO: 679250 - RNA, 19 nt, Artificial Sequence
  Description of Artificial Sequence: Synthetic oligonucleotide
  Sense strand starting at position 2620 of SEQ ID NO: 585934
ggguguugugaaggaaacu

SEQ ID NO: 679251 - RNA, 19 nt, Artificial Sequence
  Description of Artificial Sequence: Synthetic oligonucleotide
  Antisense strand to SEQ ID NO: 679250
aguuuccuucacaacaccc

SEQ ID NO: 679252 - RNA, 19 nt, Artificial Sequence
  Description of Artificial Sequence: Synthetic oligonucleotide
  Sense strand starting at position 2892 of SEQ ID NO: 585934
guccucaguuauuugucua

SEQ ID NO: 679253 - RNA, 19 nt, Artificial Sequence
  Description of Artificial Sequence: Synthetic oligonucleotide
  Antisense strand to SEQ ID NO: 679252
uagacaaauaacugaggac

SEQ ID NO: 679254 - RNA, 19 nt, Artificial Sequence
  Description of Artificial Sequence: Synthetic oligonucleotide
  Sense strand starting at position 2900 of SEQ ID NO: 585934
uuauuugucuaugaaaugg

SEQ ID NO: 679255 - RNA, 19 nt, Artificial Sequence
  Description of Artificial Sequence: Synthetic oligonucleotide
  Antisense strand to SEQ ID NO: 679254
ccauuucauagacaaauaa

SEQ ID NO: 679256 - RNA, 19 nt, Artificial Sequence
  Description of Artificial Sequence: Synthetic oligonucleotide
  Sense strand starting at position 2918 of SEQ ID NO: 585934
ggguauuccuuucccagac

SEQ ID NO: 679257 - RNA, 19 nt, Artificial Sequence
  Description of Artificial Sequence: Synthetic oligonucleotide
  Antisense strand to SEQ ID NO: 679256
gucugggaaaggaauaccc

SEQ ID NO: 679258 - RNA, 19 nt, Artificial Sequence
  Description of Artificial Sequence: Synthetic oligonucleotide
  Sense strand starting at position 2919 of SEQ ID NO: 585934
gguauuccuuucccagacu

SEQ ID NO: 679259 - RNA, 19 nt, Artificial Sequence
  Description of Artificial Sequence: Synthetic oligonucleotide
  Antisense strand to SEQ ID NO: 679258
agucugggaaaggaauacc

SEQ ID NO: 679260 - RNA, 19 nt, Artificial Sequence
  Description of Artificial Sequence: Synthetic oligonucleotide
  Sense strand starting at position 3103 of SEQ ID NO: 585934
ucuugaugucacuauccau

SEQ ID NO: 679261 - RNA, 19 nt, Artificial Sequence
  Description of Artificial Sequence: Synthetic oligonucleotide
  Antisense strand to SEQ ID NO: 679260
auggauagugacaucaaga

SEQ ID NO: 679262 - RNA, 19 nt, Artificial Sequence
  Description of Artificial Sequence: Synthetic oligonucleotide
  Sense strand starting at position 3261 of SEQ ID NO: 585934
cugcauuuauccuugucau

SEQ ID NO: 679263 - RNA, 19 nt, Artificial Sequence
  Description of Artificial Sequence: Synthetic oligonucleotide
  Antisense strand to SEQ ID NO: 679262
augacaaggauaaaugcag

SEQ ID NO: 679264 - RNA, 19 nt, Artificial Sequence
  Description of Artificial Sequence: Synthetic oligonucleotide
  Sense strand starting at position 3262 of SEQ ID NO: 585934
ugcauuuauccuugucaua

SEQ ID NO: 679265 - RNA, 19 nt, Artificial Sequence
  Description of Artificial Sequence: Synthetic oligonucleotide
  Antisense strand to SEQ ID NO: 679264
uaugacaaggauaaaugca

SEQ ID NO: 679266 - RNA, 19 nt, Artificial Sequence
  Description of Artificial Sequence: Synthetic oligonucleotide
  Sense strand starting at position 3418 of SEQ ID NO: 585934
uggagaugcccaugagcua

SEQ ID NO: 679267 - RNA, 19 nt, Artificial Sequence
  Description of Artificial Sequence: Synthetic oligonucleotide
  Antisense strand to SEQ ID NO: 679266
uagcucaugggcaucucca

SEQ ID NO: 679268 - RNA, 19 nt, Artificial Sequence
  Description of Artificial Sequence: Synthetic oligonucleotide
  Sense strand starting at position 3693 of SEQ ID NO: 585934
ucagaugggugggaaauuu

SEQ ID NO: 679269 - RNA, 19 nt, Artificial Sequence
  Description of Artificial Sequence: Synthetic oligonucleotide
  Antisense strand to SEQ ID NO: 679268
aaauuucccacccaucuga

SEQ ID NO: 679270 - RNA, 19 nt, Artificial Sequence
  Description of Artificial Sequence: Synthetic oligonucleotide
  Sense strand starting at position 56 of SEQ ID NO: 585935
acccuugggugauuacaau

SEQ ID NO: 679271 - RNA, 19 nt, Artificial Sequence
  Description of Artificial Sequence: Synthetic oligonucleotide
  Antisense strand to SEQ ID NO: 679270
auuguaaucacccaagggu

SEQ ID NO: 679272 - RNA, 19 nt, Artificial Sequence
  Description of Artificial Sequence: Synthetic oligonucleotide
  Sense strand starting at position 92 of SEQ ID NO: 585935
cacgaauuguccucagaaa

SEQ ID NO: 679273 - RNA, 19 nt, Artificial Sequence
  Description of Artificial Sequence: Synthetic oligonucleotide
  Antisense strand to SEQ ID NO: 679272
uuucugaggacaauucgug

SEQ ID NO: 679274 - RNA, 19 nt, Artificial Sequence
  Description of Artificial Sequence: Synthetic oligonucleotide
  Sense strand starting at position 145 of SEQ ID NO: 585935
gcuacauaucaucaguucu

SEQ ID NO: 679275 - RNA, 19 nt, Artificial Sequence
  Description of Artificial Sequence: Synthetic oligonucleotide
  Antisense strand to SEQ ID NO: 679274
agaacugaugauauguagc

SEQ ID NO: 679276 - RNA, 19 nt, Artificial Sequence
  Description of Artificial Sequence: Synthetic oligonucleotide
  Sense strand starting at position 214 of SEQ ID NO: 585935
uucuguuuggaguaagccu

SEQ ID NO: 679277 - RNA, 19 nt, Artificial Sequence
  Description of Artificial Sequence: Synthetic oligonucleotide
  Antisense strand to SEQ ID NO: 679276
aggcuuacuccaaacagaa

SEQ ID NO: 679278 - RNA, 19 nt, Artificial Sequence
  Description of Artificial Sequence: Synthetic oligonucleotide
  Sense strand starting at position 222 of SEQ ID NO: 585935
ggaguaagccuuugauugg

SEQ ID NO: 679279 - RNA, 19 nt, Artificial Sequence
  Description of Artificial Sequence: Synthetic oligonucleotide
  Antisense strand to SEQ ID NO: 679278
ccaaucaaaggcuuacucc

SEQ ID NO: 679280 - RNA, 19 nt, Artificial Sequence
  Description of Artificial Sequence: Synthetic oligonucleotide
  Sense strand starting at position 305 of SEQ ID NO: 585935
aagcgaugcugauccugaa

SEQ ID NO: 679281 - RNA, 19 nt, Artificial Sequence
  Description of Artificial Sequence: Synthetic oligonucleotide
  Antisense strand to SEQ ID NO: 679280
uucaggaucagcaucgcuu

SEQ ID NO: 679282 - RNA, 19 nt, Artificial Sequence
  Description of Artificial Sequence: Synthetic oligonucleotide
  Sense strand starting at position 476 of SEQ ID NO: 585935
ggcuacugagacugauauu

SEQ ID NO: 679283 - RNA, 19 nt, Artificial Sequence
  Description of Artificial Sequence: Synthetic oligonucleotide
  Antisense strand to SEQ ID NO: 679282
aauaucagucucaguagcc

SEQ ID NO: 679284 - RNA, 19 nt, Artificial Sequence
  Description of Artificial Sequence: Synthetic oligonucleotide
  Sense strand starting at position 502 of SEQ ID NO: 585935
agugguuugaugggaagau

SEQ ID NO: 679285 - RNA, 19 nt, Artificial Sequence
  Description of Artificial Sequence: Synthetic oligonucleotide
  Antisense strand to SEQ ID NO: 679284
aucuucccaucaaaccacu

SEQ ID NO: 679286 - RNA, 19 nt, Artificial Sequence
  Description of Artificial Sequence: Synthetic oligonucleotide
  Sense strand starting at position 556 of SEQ ID NO: 585935
gagcaaguuccaugauccu

SEQ ID NO: 679287 - RNA, 19 nt, Artificial Sequence
  Description of Artificial Sequence: Synthetic oligonucleotide
  Antisense strand to SEQ ID NO: 679286
aggaucauggaacuugcuc

SEQ ID NO: 679288 - RNA, 19 nt, Artificial Sequence
  Description of Artificial Sequence: Synthetic oligonucleotide
  Sense strand starting at position 592 of SEQ ID NO: 585935
cuuguccaacuguaaagua

SEQ ID NO: 679289 - RNA, 19 nt, Artificial Sequence
  Description of Artificial Sequence: Synthetic oligonucleotide
  Antisense strand to SEQ ID NO: 679288
uacuuuacaguuggacaag

SEQ ID NO: 679290 - RNA, 19 nt, Artificial Sequence
  Description of Artificial Sequence: Synthetic oligonucleotide
  Sense strand starting at position 600 of SEQ ID NO: 585935
acuguaaaguagcucucaa

SEQ ID NO: 679291 - RNA, 19 nt, Artificial Sequence
  Description of Artificial Sequence: Synthetic oligonucleotide
  Antisense strand to SEQ ID NO: 679290
uugagagcuacuuuacagu

SEQ ID NO: 679292 - RNA, 19 nt, Artificial Sequence
  Description of Artificial Sequence: Synthetic oligonucleotide
  Sense strand starting at position 862 of SEQ ID NO: 585935
guaccuaaauggucaguga

SEQ ID NO: 679293 - RNA, 19 nt, Artificial Sequence
  Description of Artificial Sequence: Synthetic oligonucleotide
  Antisense strand to SEQ ID NO: 679292
ucacugaccauuuagguac

SEQ ID NO: 679294 - RNA, 19 nt, Artificial Sequence
  Description of Artificial Sequence: Synthetic oligonucleotide
  Sense strand starting at position 865 of SEQ ID NO: 585935
ccuaaauggucagugaaca

SEQ ID NO: 679295 - RNA, 19 nt, Artificial Sequence
  Description of Artificial Sequence: Synthetic oligonucleotide
  Antisense strand to SEQ ID NO: 679294
uguucacugaccauuuagg

SEQ ID NO: 679296 - RNA, 19 nt, Artificial Sequence
  Description of Artificial Sequence: Synthetic oligonucleotide
  Sense strand starting at position 866 of SEQ ID NO: 585935
cuaaauggucagugaacac

SEQ ID NO: 679297 - RNA, 19 nt, Artificial Sequence
  Description of Artificial Sequence: Synthetic oligonucleotide
  Antisense strand to SEQ ID NO: 679296
guguucacugaccauuuag

SEQ ID NO: 679298 - RNA, 19 nt, Artificial Sequence
  Description of Artificial Sequence: Synthetic oligonucleotide
  Sense strand starting at position 873 of SEQ ID NO: 585935
gucagugaacacgaucaga

SEQ ID NO: 679299 - RNA, 19 nt, Artificial Sequence
  Description of Artificial Sequence: Synthetic oligonucleotide
  Antisense strand to SEQ ID NO: 679298
ucugaucguguucacugac

SEQ ID NO: 679300 - RNA, 19 nt, Artificial Sequence
  Description of Artificial Sequence: Synthetic oligonucleotide
  Sense strand starting at position 1002 of SEQ ID NO: 585935
uaggaaacugcuugugaca

SEQ ID NO: 679301 - RNA, 19 nt, Artificial Sequence
  Description of Artificial Sequence: Synthetic oligonucleotide
  Antisense strand to SEQ ID NO: 679300
ugucacaagcaguuuccua

SEQ ID NO: 679302 - RNA, 19 nt, Artificial Sequence
  Description of Artificial Sequence: Synthetic oligonucleotide
  Sense strand starting at position 1013 of SEQ ID NO: 585935
uugugacagggauguguua

SEQ ID NO: 679303 - RNA, 19 nt, Artificial Sequence
  Description of Artificial Sequence: Synthetic oligonucleotide
  Antisense strand to SEQ ID NO: 679302
uaacacaucccugucacaa

SEQ ID NO: 679304 - RNA, 19 nt, Artificial Sequence
  Description of Artificial Sequence: Synthetic oligonucleotide
  Sense strand starting at position 1015 of SEQ ID NO: 585935
gugacagggauguguuaac

SEQ ID NO: 679305 - RNA, 19 nt, Artificial Sequence
  Description of Artificial Sequence: Synthetic oligonucleotide
  Antisense strand to SEQ ID NO: 679304
guuaacacaucccugucac

SEQ ID NO: 679306 - RNA, 19 nt, Artificial Sequence
  Description of Artificial Sequence: Synthetic oligonucleotide
  Sense strand starting at position 1066 of SEQ ID NO: 585935
gguuuacuugcauagguga

SEQ ID NO: 679307 - RNA, 19 nt, Artificial Sequence
  Description of Artificial Sequence: Synthetic oligonucleotide
  Antisense strand to SEQ ID NO: 679306
ucaccuaugcaaguaaacc

SEQ ID NO: 679308 - RNA, 19 nt, Artificial Sequence
  Description of Artificial Sequence: Synthetic oligonucleotide
  Sense strand starting at position 1201 of SEQ ID NO: 585935
gaccaaauguuucuuggca

SEQ ID NO: 679309 - RNA, 19 nt, Artificial Sequence
  Description of Artificial Sequence: Synthetic oligonucleotide
  Antisense strand to SEQ ID NO: 679308
ugccaagaaacauuugguc

SEQ ID NO: 679310 - RNA, 19 nt, Artificial Sequence
  Description of Artificial Sequence: Synthetic oligonucleotide
  Sense strand starting at position 1202 of SEQ ID NO: 585935
accaaauguuucuuggcau

SEQ ID NO: 679311 - RNA, 19 nt, Artificial Sequence
  Description of Artificial Sequence: Synthetic oligonucleotide
  Antisense strand to SEQ ID NO: 679310
augccaagaaacauuuggu

SEQ ID NO: 679312 - RNA, 19 nt, Artificial Sequence
  Description of Artificial Sequence: Synthetic oligonucleotide
  Sense strand starting at position 1209 of SEQ ID NO: 585935
guuucuuggcaucacucua

SEQ ID NO: 679313 - RNA, 19 nt, Artificial Sequence
  Description of Artificial Sequence: Synthetic oligonucleotide
  Antisense strand to SEQ ID NO: 679312
uagagugaugccaagaaac

SEQ ID NO: 679314 - RNA, 19 nt, Artificial Sequence
  Description of Artificial Sequence: Synthetic oligonucleotide
  Sense strand starting at position 1449 of SEQ ID NO: 585935
ucauuugacuggcuuuagu

SEQ ID NO: 679315 - RNA, 19 nt, Artificial Sequence
  Description of Artificial Sequence: Synthetic oligonucleotide
  Antisense strand to SEQ ID NO: 679314
acuaaagccagucaaauga

SEQ ID NO: 679316 - RNA, 19 nt, Artificial Sequence
  Description of Artificial Sequence: Synthetic oligonucleotide
  Sense strand starting at position 2393 of SEQ ID NO: 585935
gccuuaagaugucuaaucu

SEQ ID NO: 679317 - RNA, 19 nt, Artificial Sequence
  Description of Artificial Sequence: Synthetic oligonucleotide
  Antisense strand to SEQ ID NO: 679316
agauuagacaucuuaaggc

SEQ ID NO: 679318 - RNA, 19 nt, Artificial Sequence
  Description of Artificial Sequence: Synthetic oligonucleotide
  Sense strand starting at position 2530 of SEQ ID NO: 585935
uguacauagcuuuacugua

SEQ ID NO: 679319 - RNA, 19 nt, Artificial Sequence
  Description of Artificial Sequence: Synthetic oligonucleotide
  Antisense strand to SEQ ID NO: 679318
uacaguaaagcuauguaca

SEQ ID NO: 679320 - RNA, 19 nt, Artificial Sequence
  Description of Artificial Sequence: Synthetic oligonucleotide
  Sense strand starting at position 2556 of SEQ ID NO: 585935
cgugcaguguaauuauuua

SEQ ID NO: 679321 - RNA, 19 nt, Artificial Sequence
  Description of Artificial Sequence: Synthetic oligonucleotide
  Antisense strand to SEQ ID NO: 679320
uaaauaauuacacugcacg

SEQ ID NO: 679322 - RNA, 19 nt, Artificial Sequence
  Description of Artificial Sequence: Synthetic oligonucleotide
  Sense strand starting at position 2654 of SEQ ID NO: 585935
aggugcuuggcacacaaua

SEQ ID NO: 679323 - RNA, 19 nt, Artificial Sequence
  Description of Artificial Sequence: Synthetic oligonucleotide
  Antisense strand to SEQ ID NO: 679322
uauugugugccaagcaccu

SEQ ID NO: 679324 - RNA, 19 nt, Artificial Sequence
  Description of Artificial Sequence: Synthetic oligonucleotide
  Sense strand starting at position 2726 of SEQ ID NO: 585935
gccucagggucucuaaauu

SEQ ID NO: 679325 - RNA, 19 nt, Artificial Sequence
  Description of Artificial Sequence: Synthetic oligonucleotide
  Antisense strand to SEQ ID NO: 679324
aauuuagagacccugaggc

SEQ ID NO: 679326 - RNA, 19 nt, Artificial Sequence
  Description of Artificial Sequence: Synthetic oligonucleotide
  Sense strand starting at position 2790 of SEQ ID NO: 585935
ucauuugugucuuugcuca

SEQ ID NO: 679327 - RNA, 19 nt, Artificial Sequence
  Description of Artificial Sequence: Synthetic oligonucleotide
  Antisense strand to SEQ ID NO: 679326
ugagcaaagacacaaauga

SEQ ID NO: 679328 - RNA, 19 nt, Artificial Sequence
  Description of Artificial Sequence: Synthetic oligonucleotide
  Sense strand starting at position 2792 of SEQ ID NO: 585935
auuugugucuuugcucaag

SEQ ID NO: 679329 - RNA, 19 nt, Artificial Sequence
  Description of Artificial Sequence: Synthetic oligonucleotide
  Antisense strand to SEQ ID NO: 679328
cuugagcaaagacacaaau

SEQ ID NO: 679330 - RNA, 19 nt, Artificial Sequence
  Description of Artificial Sequence: Synthetic oligonucleotide
  Sense strand starting at position 2810 of SEQ ID NO: 585935
gugucaucacuuuagagaa

SEQ ID NO: 679331 - RNA, 19 nt, Artificial Sequence
  Description of Artificial Sequence: Synthetic oligonucleotide
  Antisense strand to SEQ ID NO: 679330
uucucuaaagugaugacac

SEQ ID NO: 679332 - RNA, 19 nt, Artificial Sequence
  Description of Artificial Sequence: Synthetic oligonucleotide
  Sense strand starting at position 2972 of SEQ ID NO: 585935
uccagaggucugggauguu

SEQ ID NO: 679333 - RNA, 19 nt, Artificial Sequence
  Description of Artificial Sequence: Synthetic oligonucleotide
  Antisense strand to SEQ ID NO: 679332
aacaucccagaccucugga

SEQ ID NO: 679334 - RNA, 19 nt, Artificial Sequence
  Description of Artificial Sequence: Synthetic oligonucleotide
  Sense strand starting at position 3395 of SEQ ID NO: 585935
gaauaaaugguauggaggu

SEQ ID NO: 679335 - RNA, 19 nt, Artificial Sequence
  Description of Artificial Sequence: Synthetic oligonucleotide
  Antisense strand to SEQ ID NO: 679334
accuccauaccauuuauuc

SEQ ID NO: 679336 - RNA, 19 nt, Artificial Sequence
  Description of Artificial Sequence: Synthetic oligonucleotide
  Sense strand starting at position 3409 of SEQ ID NO: 585935
gagguuggugauugacaga

SEQ ID NO: 679337 - RNA, 19 nt, Artificial Sequence
  Description of Artificial Sequence: Synthetic oligonucleotide
  Antisense strand to SEQ ID NO: 679336
ucugucaaucaccaaccuc

SEQ ID NO: 679338 - RNA, 19 nt, Artificial Sequence
  Description of Artificial Sequence: Synthetic oligonucleotide
  Sense strand starting at position 3747 of SEQ ID NO: 585935
gaugguuccggagaagcau

SEQ ID NO: 679339 - RNA, 19 nt, Artificial Sequence
  Description of Artificial Sequence: Synthetic oligonucleotide
  Antisense strand to SEQ ID NO: 679338
augcuucuccggaaccauc

SEQ ID NO: 679340 - RNA, 19 nt, Artificial Sequence
  Description of Artificial Sequence: Synthetic oligonucleotide
  Sense strand starting at position 3812 of SEQ ID NO: 585935
uggugacagccggaacaau

SEQ ID NO: 679341 - RNA, 19 nt, Artificial Sequence
  Description of Artificial Sequence: Synthetic oligonucleotide
  Antisense strand to SEQ ID NO: 679340
auuguuccggcugucacca

SEQ ID NO: 679342 - RNA, 19 nt, Artificial Sequence
  Description of Artificial Sequence: Synthetic oligonucleotide
  Sense strand starting at position 3822 of SEQ ID NO: 585935
cggaacaauuguccaggaa

SEQ ID NO: 679343 - RNA, 19 nt, Artificial Sequence
  Description of Artificial Sequence: Synthetic oligonucleotide
  Antisense strand to SEQ ID NO: 679342
uuccuggacaauuguuccg

SEQ ID NO: 679344 - RNA, 19 nt, Artificial Sequence
  Description of Artificial Sequence: Synthetic oligonucleotide
  Sense strand starting at position 3893 of SEQ ID NO: 585935
gcagcaagguaucccauuu

SEQ ID NO: 679345 - RNA, 19 nt, Artificial Sequence
  Description of Artificial Sequence: Synthetic oligonucleotide
  Antisense strand to SEQ ID NO: 679344
aaaugggauaccuugcugc

SEQ ID NO: 679346 - RNA, 19 nt, Artificial Sequence
  Description of Artificial Sequence: Synthetic oligonucleotide
  Sense strand starting at position 3909 of SEQ ID NO: 585935
uuucccugggccuagagau

SEQ ID NO: 679347 - RNA, 19 nt, Artificial Sequence
  Description of Artificial Sequence: Synthetic oligonucleotide
  Antisense strand to SEQ ID NO: 679346
aucucuaggcccagggaaa

SEQ ID NO: 679348 - RNA, 19 nt, Artificial Sequence
  Description of Artificial Sequence: Synthetic oligonucleotide
  Sense strand starting at position 3945 of SEQ ID NO: 585935
uggugaagcugaucucaug

SEQ ID NO: 679349 - RNA, 19 nt, Artificial Sequence
  Description of Artificial Sequence: Synthetic oligonucleotide
  Antisense strand to SEQ ID NO: 679348
caugagaucagcuucacca

SEQ ID NO: 679350 - RNA, 19 nt, Artificial Sequence
  Description of Artificial Sequence: Synthetic oligonucleotide
  Sense strand starting at position 299 of SEQ ID NO: 585936
acagauauuucuggucaac

SEQ ID NO: 679351 - RNA, 19 nt, Artificial Sequence
  Description of Artificial Sequence: Synthetic oligonucleotide
  Antisense strand to SEQ ID NO: 679350
guugaccagaaauaucugu

SEQ ID NO: 679352 - RNA, 19 nt, Artificial Sequence
  Description of Artificial Sequence: Synthetic oligonucleotide
  Sense strand starting at position 350 of SEQ ID NO: 585936
ucuaucaaccuccgagaaa

SEQ ID NO: 679353 - RNA, 19 nt, Artificial Sequence
  Description of Artificial Sequence: Synthetic oligonucleotide
  Antisense strand to SEQ ID NO: 679352
uuucucggagguugauaga

SEQ ID NO: 679354 - RNA, 19 nt, Artificial Sequence
  Description of Artificial Sequence: Synthetic oligonucleotide
  Sense strand starting at position 351 of SEQ ID NO: 585936
cuaucaaccuccgagaaau

SEQ ID NO: 679355 - RNA, 19 nt, Artificial Sequence
  Description of Artificial Sequence: Synthetic oligonucleotide
  Antisense strand to SEQ ID NO: 679354
auuucucggagguugauag

SEQ ID NO: 679356 - RNA, 19 nt, Artificial Sequence
  Description of Artificial Sequence: Synthetic oligonucleotide
  Sense strand starting at position 572 of SEQ ID NO: 585936
gccacagucuaucuagagu

SEQ ID NO: 679357 - RNA, 19 nt, Artificial Sequence
  Description of Artificial Sequence: Synthetic oligonucleotide
  Antisense strand to SEQ ID NO: 679356
acucuagauagacuguggc

SEQ ID NO: 679358 - RNA, 19 nt, Artificial Sequence
  Description of Artificial Sequence: Synthetic oligonucleotide
  Sense strand starting at position 585 of SEQ ID NO: 585936
uagagugaccuguguggaa

SEQ ID NO: 679359 - RNA, 19 nt, Artificial Sequence
  Description of Artificial Sequence: Synthetic oligonucleotide
  Antisense strand to SEQ ID NO: 679358
uuccacacaggucacucua

SEQ ID NO: 679360 - RNA, 19 nt, Artificial Sequence
  Description of Artificial Sequence: Synthetic oligonucleotide
  Sense strand starting at position 587 of SEQ ID NO: 585936
gagugaccuguguggaaca

SEQ ID NO: 679361 - RNA, 19 nt, Artificial Sequence
  Description of Artificial Sequence: Synthetic oligonucleotide
  Antisense strand to SEQ ID NO: 679360
uguuccacacaggucacuc

SEQ ID NO: 679362 - RNA, 19 nt, Artificial Sequence
  Description of Artificial Sequence: Synthetic oligonucleotide
  Sense strand starting at position 834 of SEQ ID NO: 585936
agaaacuccggaugugaaa

SEQ ID NO: 679363 - RNA, 19 nt, Artificial Sequence
  Description of Artificial Sequence: Synthetic oligonucleotide
  Antisense strand to SEQ ID NO: 679362
uuucacauccggaguuucu

SEQ ID NO: 679364 - RNA, 19 nt, Artificial Sequence
  Description of Artificial Sequence: Synthetic oligonucleotide
  Sense strand starting at position 1050 of SEQ ID NO: 585936
uucuuauccuagggugaga

SEQ ID NO: 679365 - RNA, 19 nt, Artificial Sequence
  Description of Artificial Sequence: Synthetic oligonucleotide
  Antisense strand to SEQ ID NO: 679364
ucucacccuaggauaagaa

SEQ ID NO: 679366 - RNA, 19 nt, Artificial Sequence
  Description of Artificial Sequence: Synthetic oligonucleotide
  Sense strand starting at position 1110 of SEQ ID NO: 585936
aggaaaugaucugaucuag

SEQ ID NO: 679367 - RNA, 19 nt, Artificial Sequence
  Description of Artificial Sequence: Synthetic oligonucleotide
  Antisense strand to SEQ ID NO: 679366
cuagaucagaucauuuccu

SEQ ID NO: 679368 - RNA, 19 nt, Artificial Sequence
  Description of Artificial Sequence: Synthetic oligonucleotide
  Sense strand starting at position 1158 of SEQ ID NO: 585936
cugucucugaggcaugaga

SEQ ID NO: 679369 - RNA, 19 nt, Artificial Sequence
  Description of Artificial Sequence: Synthetic oligonucleotide
  Antisense strand to SEQ ID NO: 679368
ucucaugccucagagacag

SEQ ID NO: 679370 - RNA, 19 nt, Artificial Sequence
  Description of Artificial Sequence: Synthetic oligonucleotide
  Sense strand starting at position 1188 of SEQ ID NO: 585936
caugguaauugagggaucu

SEQ ID NO: 679371 - RNA, 19 nt, Artificial Sequence
  Description of Artificial Sequence: Synthetic oligonucleotide
  Antisense strand to SEQ ID NO: 679370
agaucccucaauuaccaug

SEQ ID NO: 679372 - RNA, 19 nt, Artificial Sequence
  Description of Artificial Sequence: Synthetic oligonucleotide
  Sense strand starting at position 1189 of SEQ ID NO: 585936
augguaauugagggaucuu

SEQ ID NO: 679373 - RNA, 19 nt, Artificial Sequence
  Description of Artificial Sequence: Synthetic oligonucleotide
  Antisense strand to SEQ ID NO: 679372
aagaucccucaauuaccau

SEQ ID NO: 679374 - RNA, 19 nt, Artificial Sequence
  Description of Artificial Sequence: Synthetic oligonucleotide
  Sense strand starting at position 1247 of SEQ ID NO: 585936
cgaaccaauucuguaugaa

SEQ ID NO: 679375 - RNA, 19 nt, Artificial Sequence
  Description of Artificial Sequence: Synthetic oligonucleotide
  Antisense strand to SEQ ID NO: 679374
uucauacagaauugguucg

SEQ ID NO: 679376 - RNA, 19 nt, Artificial Sequence
  Description of Artificial Sequence: Synthetic oligonucleotide
  Sense strand starting at position 1251 of SEQ ID NO: 585936
ccaauucuguaugaaggga

SEQ ID NO: 679377 - RNA, 19 nt, Artificial Sequence
  Description of Artificial Sequence: Synthetic oligonucleotide
  Antisense strand to SEQ ID NO: 679376
ucccuucauacagaauugg

SEQ ID NO: 679378 - RNA, 19 nt, Artificial Sequence
  Description of Artificial Sequence: Synthetic oligonucleotide
  Sense strand starting at position 1440 of SEQ ID NO: 585936
aggagauggcgugauauaa

SEQ ID NO: 679379 - RNA, 19 nt, Artificial Sequence
  Description of Artificial Sequence: Synthetic oligonucleotide
  Antisense strand to SEQ ID NO: 679378
uuauaucacgccaucuccu

SEQ ID NO: 679380 - RNA, 19 nt, Artificial Sequence
  Description of Artificial Sequence: Synthetic oligonucleotide
  Sense strand starting at position 1444 of SEQ ID NO: 585936
gauggcgugauauaagcua

SEQ ID NO: 679381 - RNA, 19 nt, Artificial Sequence
  Description of Artificial Sequence: Synthetic oligonucleotide
  Antisense strand to SEQ ID NO: 679380
uagcuuauaucacgccauc

SEQ ID NO: 679382 - RNA, 19 nt, Artificial Sequence
  Description of Artificial Sequence: Synthetic oligonucleotide
  Sense strand starting at position 1582 of SEQ ID NO: 585936
gccagcucuccugguuagu

SEQ ID NO: 679383 - RNA, 19 nt, Artificial Sequence
  Description of Artificial Sequence: Synthetic oligonucleotide
  Antisense strand to SEQ ID NO: 679382
acuaaccaggagagcuggc

SEQ ID NO: 679384 - RNA, 19 nt, Artificial Sequence
  Description of Artificial Sequence: Synthetic oligonucleotide
  Sense strand starting at position 1651 of SEQ ID NO: 585936
cagacagcuugguuuguga

SEQ ID NO: 679385 - RNA, 19 nt, Artificial Sequence
  Description of Artificial Sequence: Synthetic oligonucleotide
  Antisense strand to SEQ ID NO: 679384
ucacaaaccaagcugucug

SEQ ID NO: 679386 - RNA, 19 nt, Artificial Sequence
  Description of Artificial Sequence: Synthetic oligonucleotide
  Sense strand starting at position 1749 of SEQ ID NO: 585936
gcacucuccugaugggaag

SEQ ID NO: 679387 - RNA, 19 nt, Artificial Sequence
  Description of Artificial Sequence: Synthetic oligonucleotide
  Antisense strand to SEQ ID NO: 679386
cuucccaucaggagagugc

SEQ ID NO: 679388 - RNA, 19 nt, Artificial Sequence
  Description of Artificial Sequence: Synthetic oligonucleotide
  Sense strand starting at position 1761 of SEQ ID NO: 585936
ugggaagcaucgcagacuu

SEQ ID NO: 679389 - RNA, 19 nt, Artificial Sequence
  Description of Artificial Sequence: Synthetic oligonucleotide
  Antisense strand to SEQ ID NO: 679388
aagucugcgaugcuuccca

SEQ ID NO: 679390 - RNA, 19 nt, Artificial Sequence
  Description of Artificial Sequence: Synthetic oligonucleotide
  Sense strand starting at position 1991 of SEQ ID NO: 585936
cucugaaagcuaggcugua

SEQ ID NO: 679391 - RNA, 19 nt, Artificial Sequence
  Description of Artificial Sequence: Synthetic oligonucleotide
  Antisense strand to SEQ ID NO: 679390
uacagccuagcuuucagag

SEQ ID NO: 679392 - RNA, 19 nt, Artificial Sequence
  Description of Artificial Sequence: Synthetic oligonucleotide
  Sense strand starting at position 1992 of SEQ ID NO: 585936
ucugaaagcuaggcuguaa

SEQ ID NO: 679393 - RNA, 19 nt, Artificial Sequence
  Description of Artificial Sequence: Synthetic oligonucleotide
  Antisense strand to SEQ ID NO: 679392
uuacagccuagcuuucaga

SEQ ID NO: 679394 - RNA, 19 nt, Artificial Sequence
  Description of Artificial Sequence: Synthetic oligonucleotide
  Sense strand starting at position 2318 of SEQ ID NO: 585936
gcaagaagcucucccauca

SEQ ID NO: 679395 - RNA, 19 nt, Artificial Sequence
  Description of Artificial Sequence: Synthetic oligonucleotide
  Antisense strand to SEQ ID NO: 679394
ugaugggagagcuucuugc

SEQ ID NO: 679396 - RNA, 19 nt, Artificial Sequence
  Description of Artificial Sequence: Synthetic oligonucleotide
  Sense strand starting at position 2503 of SEQ ID NO: 585936
cccacugaugcuuagcaga

SEQ ID NO: 679397 - RNA, 19 nt, Artificial Sequence
  Description of Artificial Sequence: Synthetic oligonucleotide
  Antisense strand to SEQ ID NO: 679396
ucugcuaagcaucaguggg

SEQ ID NO: 679398 - RNA, 19 nt, Artificial Sequence
  Description of Artificial Sequence: Synthetic oligonucleotide
  Sense strand starting at position 2524 of SEQ ID NO: 585936
guaagauguuggcagggaa

SEQ ID NO: 679399 - RNA, 19 nt, Artificial Sequence
  Description of Artificial Sequence: Synthetic oligonucleotide
  Antisense strand to SEQ ID NO: 679398
uucccugccaacaucuuac

SEQ ID NO: 679400 - RNA, 19 nt, Artificial Sequence
  Description of Artificial Sequence: Synthetic oligonucleotide
  Sense strand starting at position 2592 of SEQ ID NO: 585936
ucugaugacucagggcaaa

SEQ ID NO: 679401 - RNA, 19 nt, Artificial Sequence
  Description of Artificial Sequence: Synthetic oligonucleotide
  Antisense strand to SEQ ID NO: 679400
uuugcccugagucaucaga

SEQ ID NO: 679402 - RNA, 19 nt, Artificial Sequence
  Description of Artificial Sequence: Synthetic oligonucleotide
  Sense strand starting at position 2765 of SEQ ID NO: 585936
aaggccugacuaugaagau

SEQ ID NO: 679403 - RNA, 19 nt, Artificial Sequence
  Description of Artificial Sequence: Synthetic oligonucleotide
  Antisense strand to SEQ ID NO: 679402
aucuucauagucaggccuu

SEQ ID NO: 679404 - RNA, 19 nt, Artificial Sequence
  Description of Artificial Sequence: Synthetic oligonucleotide
  Sense strand starting at position 2975 of SEQ ID NO: 585936
ggacucucacugcacuaau

SEQ ID NO: 679405 - RNA, 19 nt, Artificial Sequence
  Description of Artificial Sequence: Synthetic oligonucleotide
  Antisense strand to SEQ ID NO: 679404
auuagugcagugagagucc

SEQ ID NO: 679406 - RNA, 19 nt, Artificial Sequence
  Description of Artificial Sequence: Synthetic oligonucleotide
  Sense strand starting at position 2986 of SEQ ID NO: 585936
gcacuaauauaggauuuga

SEQ ID NO: 679407 - RNA, 19 nt, Artificial Sequence
  Description of Artificial Sequence: Synthetic oligonucleotide
  Antisense strand to SEQ ID NO: 679406
ucaaauccuauauuagugc

SEQ ID NO: 679408 - RNA, 19 nt, Artificial Sequence
  Description of Artificial Sequence: Synthetic oligonucleotide
  Sense strand starting at position 3068 of SEQ ID NO: 585936
gugagaugggagugccaau

SEQ ID NO: 679409 - RNA, 19 nt, Artificial Sequence
  Description of Artificial Sequence: Synthetic oligonucleotide
  Antisense strand to SEQ ID NO: 679408
auuggcacucccaucucac

SEQ ID NO: 679410 - RNA, 19 nt, Artificial Sequence
  Description of Artificial Sequence: Synthetic oligonucleotide
  Sense strand starting at position 3086 of SEQ ID NO: 585936
ugcccacaucgcuguuaua

SEQ ID NO: 679411 - RNA, 19 nt, Artificial Sequence
  Description of Artificial Sequence: Synthetic oligonucleotide
  Antisense strand to SEQ ID NO: 679410
uauaacagcgaugugggca

SEQ ID NO: 679412 - RNA, 19 nt, Artificial Sequence
  Description of Artificial Sequence: Synthetic oligonucleotide
  Sense strand starting at position 3313 of SEQ ID NO: 585936
acuccuuggucacuuaagu

SEQ ID NO: 679413 - RNA, 19 nt, Artificial Sequence
  Description of Artificial Sequence: Synthetic oligonucleotide
  Antisense strand to SEQ ID NO: 679412
acuuaagugaccaaggagu

SEQ ID NO: 679414 - RNA, 19 nt, Artificial Sequence
  Description of Artificial Sequence: Synthetic oligonucleotide
  Sense strand starting at position 3345 of SEQ ID NO: 585936
ugaagaagagucuguauua

SEQ ID NO: 679415 - RNA, 19 nt, Artificial Sequence
  Description of Artificial Sequence: Synthetic oligonucleotide
  Antisense strand to SEQ ID NO: 679414
uaauacagacucuucuuca

SEQ ID NO: 679416 - RNA, 19 nt, Artificial Sequence
  Description of Artificial Sequence: Synthetic oligonucleotide
  Sense strand starting at position 3346 of SEQ ID NO: 585936
gaagaagagucuguauuaa

SEQ ID NO: 679417 - RNA, 19 nt, Artificial Sequence
  Description of Artificial Sequence: Synthetic oligonucleotide
  Antisense strand to SEQ ID NO: 679416
uuaauacagacucuucuuc

SEQ ID NO: 679418 - RNA, 19 nt, Artificial Sequence
  Description of Artificial Sequence: Synthetic oligonucleotide
  Sense strand starting at position 3379 of SEQ ID NO: 585936
gaggaaugucuagacguau

SEQ ID NO: 679419 - RNA, 19 nt, Artificial Sequence
  Description of Artificial Sequence: Synthetic oligonucleotide
  Antisense strand to SEQ ID NO: 679418
auacgucuagacauuccuc

SEQ ID NO: 679420 - RNA, 19 nt, Artificial Sequence
  Description of Artificial Sequence: Synthetic oligonucleotide
  Sense strand starting at position 3726 of SEQ ID NO: 585936
guacaagauaaauggcgaa

SEQ ID NO: 679421 - RNA, 19 nt, Artificial Sequence
  Description of Artificial Sequence: Synthetic oligonucleotide
  Antisense strand to SEQ ID NO: 679420
uucgccauuuaucuuguac

SEQ ID NO: 679422 - RNA, 19 nt, Artificial Sequence
  Description of Artificial Sequence: Synthetic oligonucleotide
  Sense strand starting at position 3866 of SEQ ID NO: 585936
uauguuuauggugaaacca

SEQ ID NO: 679423 - RNA, 19 nt, Artificial Sequence
  Description of Artificial Sequence: Synthetic oligonucleotide
  Antisense strand to SEQ ID NO: 679422
ugguuucaccauaaacaua

SEQ ID NO: 679424 - RNA, 19 nt, Artificial Sequence
  Description of Artificial Sequence: Synthetic oligonucleotide
  Sense strand starting at position 3915 of SEQ ID NO: 585936
gcaucuacacugugcuuua

SEQ ID NO: 679425 - RNA, 19 nt, Artificial Sequence
  Description of Artificial Sequence: Synthetic oligonucleotide
  Antisense strand to SEQ ID NO: 679424
uaaagcacaguguagaugc

SEQ ID NO: 679426 - RNA, 19 nt, Artificial Sequence
  Description of Artificial Sequence: Synthetic oligonucleotide
  Sense strand starting at position 3925 of SEQ ID NO: 585936
ugugcuuuaucaucccaga

SEQ ID NO: 679427 - RNA, 19 nt, Artificial Sequence
  Description of Artificial Sequence: Synthetic oligonucleotide
  Antisense strand to SEQ ID NO: 679426
ucugggaugauaaagcaca

SEQ ID NO: 679428 - RNA, 19 nt, Artificial Sequence
  Description of Artificial Sequence: Synthetic oligonucleotide
  Sense strand starting at position 3928 of SEQ ID NO: 585936
gcuuuaucaucccagaagc

SEQ ID NO: 679429 - RNA, 19 nt, Artificial Sequence
  Description of Artificial Sequence: Synthetic oligonucleotide
  Antisense strand to SEQ ID NO: 679428
gcuucugggaugauaaagc

SEQ ID NO: 679430 - RNA, 19 nt, Artificial Sequence
  Description of Artificial Sequence: Synthetic oligonucleotide
  Sense strand starting at position 19 of SEQ ID NO: 585937
gcccuaauggcacaagaaa

SEQ ID NO: 679431 - RNA, 19 nt, Artificial Sequence
  Description of Artificial Sequence: Synthetic oligonucleotide
  Antisense strand to SEQ ID NO: 679430
uuucuugugccauuagggc

SEQ ID NO: 679432 - RNA, 19 nt, Artificial Sequence
  Description of Artificial Sequence: Synthetic oligonucleotide
  Sense strand starting at position 223 of SEQ ID NO: 585937
uagugaagauggguuguga

SEQ ID NO: 679433 - RNA, 19 nt, Artificial Sequence
  Description of Artificial Sequence: Synthetic oligonucleotide
  Antisense strand to SEQ ID NO: 679432
ucacaacccaucuucacua

SEQ ID NO: 679434 - RNA, 19 nt, Artificial Sequence
  Description of Artificial Sequence: Synthetic oligonucleotide
  Sense strand starting at position 225 of SEQ ID NO: 585937
gugaagauggguugugaag

SEQ ID NO: 679435 - RNA, 19 nt, Artificial Sequence
  Description of Artificial Sequence: Synthetic oligonucleotide
  Antisense strand to SEQ ID NO: 679434
cuucacaacccaucuucac

SEQ ID NO: 679436 - RNA, 19 nt, Artificial Sequence
  Description of Artificial Sequence: Synthetic oligonucleotide
  Sense strand starting at position 283 of SEQ ID NO: 585937
uaagcaagagcuuaguuga

SEQ ID NO: 679437 - RNA, 19 nt, Artificial Sequence
  Description of Artificial Sequence: Synthetic oligonucleotide
  Antisense strand to SEQ ID NO: 679436
ucaacuaagcucuugcuua

SEQ ID NO: 679438 - RNA, 19 nt, Artificial Sequence
  Description of Artificial Sequence: Synthetic oligonucleotide
  Sense strand starting at position 348 of SEQ ID NO: 585937
guggacagauuucagaagu

SEQ ID NO: 679439 - RNA, 19 nt, Artificial Sequence
  Description of Artificial Sequence: Synthetic oligonucleotide
  Antisense strand to SEQ ID NO: 679438
acuucugaaaucuguccac

SEQ ID NO: 679440 - RNA, 19 nt, Artificial Sequence
  Description of Artificial Sequence: Synthetic oligonucleotide
  Sense strand starting at position 441 of SEQ ID NO: 585937
agguaucuggcuuagacca

SEQ ID NO: 679441 - RNA, 19 nt, Artificial Sequence
  Description of Artificial Sequence: Synthetic oligonucleotide
  Antisense strand to SEQ ID NO: 679440
uggucuaagccagauaccu

SEQ ID NO: 679442 - RNA, 19 nt, Artificial Sequence
  Description of Artificial Sequence: Synthetic oligonucleotide
  Sense strand starting at position 670 of SEQ ID NO: 585937
guguaacuucuagaccuaa

SEQ ID NO: 679443 - RNA, 19 nt, Artificial Sequence
  Description of Artificial Sequence: Synthetic oligonucleotide
  Antisense strand to SEQ ID NO: 679442
uuaggucuagaaguuacac

SEQ ID NO: 679444 - RNA, 19 nt, Artificial Sequence
  Description of Artificial Sequence: Synthetic oligonucleotide
  Sense strand starting at position 709 of SEQ ID NO: 585937
gcuguugugaaagauuaau

SEQ ID NO: 679445 - RNA, 19 nt, Artificial Sequence
  Description of Artificial Sequence: Synthetic oligonucleotide
  Antisense strand to SEQ ID NO: 679444
auuaaucuuucacaacagc

SEQ ID NO: 679446 - RNA, 19 nt, Artificial Sequence
  Description of Artificial Sequence: Synthetic oligonucleotide
  Sense strand starting at position 715 of SEQ ID NO: 585937
gugaaagauuaauuccacu

SEQ ID NO: 679447 - RNA, 19 nt, Artificial Sequence
  Description of Artificial Sequence: Synthetic oligonucleotide
  Antisense strand to SEQ ID NO: 679446
aguggaauuaaucuuucac

SEQ ID NO: 679448 - RNA, 19 nt, Artificial Sequence
  Description of Artificial Sequence: Synthetic oligonucleotide
  Sense strand starting at position 966 of SEQ ID NO: 585937
ugaagacauucuguaacug

SEQ ID NO: 679449 - RNA, 19 nt, Artificial Sequence
  Description of Artificial Sequence: Synthetic oligonucleotide
  Antisense strand to SEQ ID NO: 679448
caguuacagaaugucuuca

SEQ ID NO: 679450 - RNA, 19 nt, Artificial Sequence
  Description of Artificial Sequence: Synthetic oligonucleotide
  Sense strand starting at position 1025 of SEQ ID NO: 585937
ccuuaaucuccuuagcgaa

SEQ ID NO: 679451 - RNA, 19 nt, Artificial Sequence
  Description of Artificial Sequence: Synthetic oligonucleotide
  Antisense strand to SEQ ID NO: 679450
uucgcuaaggagauuaagg

SEQ ID NO: 679452 - RNA, 19 nt, Artificial Sequence
  Description of Artificial Sequence: Synthetic oligonucleotide
  Sense strand starting at position 1049 of SEQ ID NO: 585937
uguuguucuaaagaggcaa

SEQ ID NO: 679453 - RNA, 19 nt, Artificial Sequence
  Description of Artificial Sequence: Synthetic oligonucleotide
  Antisense strand to SEQ ID NO: 679452
uugccucuuuagaacaaca

SEQ ID NO: 679454 - RNA, 19 nt, Artificial Sequence
  Description of Artificial Sequence: Synthetic oligonucleotide
  Sense strand starting at position 1093 of SEQ ID NO: 585937
agaagauucuguucucaca

SEQ ID NO: 679455 - RNA, 19 nt, Artificial Sequence
  Description of Artificial Sequence: Synthetic oligonucleotide
  Antisense strand to SEQ ID NO: 679454
ugugagaacagaaucuucu

SEQ ID NO: 679456 - RNA, 19 nt, Artificial Sequence
  Description of Artificial Sequence: Synthetic oligonucleotide
  Sense strand starting at position 1133 of SEQ ID NO: 585937
ucaccuauuccaugacgga

SEQ ID NO: 679457 - RNA, 19 nt, Artificial Sequence
  Description of Artificial Sequence: Synthetic oligonucleotide
  Antisense strand to SEQ ID NO: 679456
uccgucauggaauagguga

SEQ ID NO: 679458 - RNA, 19 nt, Artificial Sequence
  Description of Artificial Sequence: Synthetic oligonucleotide
  Sense strand starting at position 1257 of SEQ ID NO: 585937
aaaugugaugcucaagccu

SEQ ID NO: 679459 - RNA, 19 nt, Artificial Sequence
  Description of Artificial Sequence: Synthetic oligonucleotide
  Antisense strand to SEQ ID NO: 679458
aggcuugagcaucacauuu

SEQ ID NO: 679460 - RNA, 19 nt, Artificial Sequence
  Description of Artificial Sequence: Synthetic oligonucleotide
  Sense strand starting at position 1601 of SEQ ID NO: 585937
gcaggauaggugggauauu

SEQ ID NO: 679461 - RNA, 19 nt, Artificial Sequence
  Description of Artificial Sequence: Synthetic oligonucleotide
  Antisense strand to SEQ ID NO: 679460
aauaucccaccuauccugc

SEQ ID NO: 679462 - RNA, 19 nt, Artificial Sequence
  Description of Artificial Sequence: Synthetic oligonucleotide
  Sense strand starting at position 1602 of SEQ ID NO: 585937
caggauaggugggauauuu

SEQ ID NO: 679463 - RNA, 19 nt, Artificial Sequence
  Description of Artificial Sequence: Synthetic oligonucleotide
  Antisense strand to SEQ ID NO: 679462
aaauaucccaccuauccug

SEQ ID NO: 679464 - RNA, 19 nt, Artificial Sequence
  Description of Artificial Sequence: Synthetic oligonucleotide
  Sense strand starting at position 1659 of SEQ ID NO: 585937
aaugauaccgcggagguaa

SEQ ID NO: 679465 - RNA, 19 nt, Artificial Sequence
  Description of Artificial Sequence: Synthetic oligonucleotide
  Antisense strand to SEQ ID NO: 679464
uuaccuccgcgguaucauu

SEQ ID NO: 679466 - RNA, 19 nt, Artificial Sequence
  Description of Artificial Sequence: Synthetic oligonucleotide
  Sense strand starting at position 1772 of SEQ ID NO: 585937
ccuuauauuucugcaguuu

SEQ ID NO: 679467 - RNA, 19 nt, Artificial Sequence
  Description of Artificial Sequence: Synthetic oligonucleotide
  Antisense strand to SEQ ID NO: 679466
aaacugcagaaauauaagg

SEQ ID NO: 679468 - RNA, 19 nt, Artificial Sequence
  Description of Artificial Sequence: Synthetic oligonucleotide
  Sense strand starting at position 2229 of SEQ ID NO: 585937
gcaggaagcguguuugcaa

SEQ ID NO: 679469 - RNA, 19 nt, Artificial Sequence
  Description of Artificial Sequence: Synthetic oligonucleotide
  Antisense strand to SEQ ID NO: 679468
uugcaaacacgcuuccugc

SEQ ID NO: 679470 - RNA, 19 nt, Artificial Sequence
  Description of Artificial Sequence: Synthetic oligonucleotide
  Sense strand starting at position 2399 of SEQ ID NO: 585937
gaggucaagugacuuaguu

SEQ ID NO: 679471 - RNA, 19 nt, Artificial Sequence
  Description of Artificial Sequence: Synthetic oligonucleotide
  Antisense strand to SEQ ID NO: 679470
aacuaagucacuugaccuc

SEQ ID NO: 679472 - RNA, 19 nt, Artificial Sequence
  Description of Artificial Sequence: Synthetic oligonucleotide
  Sense strand starting at position 2480 of SEQ ID NO: 585937
ggaucaucuagaugugguu

SEQ ID NO: 679473 - RNA, 19 nt, Artificial Sequence
  Description of Artificial Sequence: Synthetic oligonucleotide
  Antisense strand to SEQ ID NO: 679472
aaccacaucuagaugaucc

SEQ ID NO: 679474 - RNA, 19 nt, Artificial Sequence
  Description of Artificial Sequence: Synthetic oligonucleotide
  Sense strand starting at position 2486 of SEQ ID NO: 585937
ucuagaugugguugggaga

SEQ ID NO: 679475 - RNA, 19 nt, Artificial Sequence
  Description of Artificial Sequence: Synthetic oligonucleotide
  Antisense strand to SEQ ID NO: 679474
ucucccaaccacaucuaga

SEQ ID NO: 679476 - RNA, 19 nt, Artificial Sequence
  Description of Artificial Sequence: Synthetic oligonucleotide
  Sense strand starting at position 2624 of SEQ ID NO: 585937
gcucaaucccaggaacgaa

SEQ ID NO: 679477 - RNA, 19 nt, Artificial Sequence
  Description of Artificial Sequence: Synthetic oligonucleotide
  Antisense strand to SEQ ID NO: 679476
uucguuccugggauugagc

SEQ ID NO: 679478 - RNA, 19 nt, Artificial Sequence
  Description of Artificial Sequence: Synthetic oligonucleotide
  Sense strand starting at position 2984 of SEQ ID NO: 585937
uucugccuucuugauugaa

SEQ ID NO: 679479 - RNA, 19 nt, Artificial Sequence
  Description of Artificial Sequence: Synthetic oligonucleotide
  Antisense strand to SEQ ID NO: 679478
uucaaucaagaaggcagaa

SEQ ID NO: 679480 - RNA, 19 nt, Artificial Sequence
  Description of Artificial Sequence: Synthetic oligonucleotide
  Sense strand starting at position 2986 of SEQ ID NO: 585937
cugccuucuugauugaaua

SEQ ID NO: 679481 - RNA, 19 nt, Artificial Sequence
  Description of Artificial Sequence: Synthetic oligonucleotide
  Antisense strand to SEQ ID NO: 679480
uauucaaucaagaaggcag

SEQ ID NO: 679482 - RNA, 19 nt, Artificial Sequence
  Description of Artificial Sequence: Synthetic oligonucleotide
  Sense strand starting at position 3029 of SEQ ID NO: 585937
guaacagcccuuuggagau

SEQ ID NO: 679483 - RNA, 19 nt, Artificial Sequence
  Description of Artificial Sequence: Synthetic oligonucleotide
  Antisense strand to SEQ ID NO: 679482
aucuccaaagggcuguuac

SEQ ID NO: 679484 - RNA, 19 nt, Artificial Sequence
  Description of Artificial Sequence: Synthetic oligonucleotide
  Sense strand starting at position 3047 of SEQ ID NO: 585937
uuugaagaagguugucaua

SEQ ID NO: 679485 - RNA, 19 nt, Artificial Sequence
  Description of Artificial Sequence: Synthetic oligonucleotide
  Antisense strand to SEQ ID NO: 679484
uaugacaaccuucuucaaa

SEQ ID NO: 679486 - RNA, 19 nt, Artificial Sequence
  Description of Artificial Sequence: Synthetic oligonucleotide
  Sense strand starting at position 3049 of SEQ ID NO: 585937
ugaagaagguugucauagu

SEQ ID NO: 679487 - RNA, 19 nt, Artificial Sequence
  Description of Artificial Sequence: Synthetic oligonucleotide
  Antisense strand to SEQ ID NO: 679486
acuaugacaaccuucuuca

SEQ ID NO: 679488 - RNA, 19 nt, Artificial Sequence
  Description of Artificial Sequence: Synthetic oligonucleotide
  Sense strand starting at position 3056 of SEQ ID NO: 585937
gguugucauagugaaguag

SEQ ID NO: 679489 - RNA, 19 nt, Artificial Sequence
  Description of Artificial Sequence: Synthetic oligonucleotide
  Antisense strand to SEQ ID NO: 679488
cuacuucacuaugacaacc

SEQ ID NO: 679490 - RNA, 19 nt, Artificial Sequence
  Description of Artificial Sequence: Synthetic oligonucleotide
  Sense strand starting at position 3095 of SEQ ID NO: 585937
ugagaauuacagcggaauu

SEQ ID NO: 679491 - RNA, 19 nt, Artificial Sequence
  Description of Artificial Sequence: Synthetic oligonucleotide
  Antisense strand to SEQ ID NO: 679490
aauuccgcuguaauucuca

SEQ ID NO: 679492 - RNA, 19 nt, Artificial Sequence
  Description of Artificial Sequence: Synthetic oligonucleotide
  Sense strand starting at position 3105 of SEQ ID NO: 585937
agcggaauuccucagaaua

SEQ ID NO: 679493 - RNA, 19 nt, Artificial Sequence
  Description of Artificial Sequence: Synthetic oligonucleotide
  Antisense strand to SEQ ID NO: 679492
uauucugaggaauuccgcu

SEQ ID NO: 679494 - RNA, 19 nt, Artificial Sequence
  Description of Artificial Sequence: Synthetic oligonucleotide
  Sense strand starting at position 3299 of SEQ ID NO: 585937
ggaauguggcguggagaaa

SEQ ID NO: 679495 - RNA, 19 nt, Artificial Sequence
  Description of Artificial Sequence: Synthetic oligonucleotide
  Antisense strand to SEQ ID NO: 679494
uuucuccacgccacauucc

SEQ ID NO: 679496 - RNA, 19 nt, Artificial Sequence
  Description of Artificial Sequence: Synthetic oligonucleotide
  Sense strand starting at position 3481 of SEQ ID NO: 585937
ucugaugugaccuggguaa

SEQ ID NO: 679497 - RNA, 19 nt, Artificial Sequence
  Description of Artificial Sequence: Synthetic oligonucleotide
  Antisense strand to SEQ ID NO: 679496
uuacccaggucacaucaga

SEQ ID NO: 679498 - RNA, 19 nt, Artificial Sequence
  Description of Artificial Sequence: Synthetic oligonucleotide
  Sense strand starting at position 3483 of SEQ ID NO: 585937
ugaugugaccuggguaaau

SEQ ID NO: 679499 - RNA, 19 nt, Artificial Sequence
  Description of Artificial Sequence: Synthetic oligonucleotide
  Antisense strand to SEQ ID NO: 679498
auuuacccaggucacauca

SEQ ID NO: 679500 - RNA, 19 nt, Artificial Sequence
  Description of Artificial Sequence: Synthetic oligonucleotide
  Sense strand starting at position 3528 of SEQ ID NO: 585937
gauuuaagauauggacaag

SEQ ID NO: 679501 - RNA, 19 nt, Artificial Sequence
  Description of Artificial Sequence: Synthetic oligonucleotide
  Antisense strand to SEQ ID NO: 679500
cuuguccauaucuuaaauc

SEQ ID NO: 679502 - RNA, 19 nt, Artificial Sequence
  Description of Artificial Sequence: Synthetic oligonucleotide
  Sense strand starting at position 3544 of SEQ ID NO: 585937
aagacuagaugcucugaga

SEQ ID NO: 679503 - RNA, 19 nt, Artificial Sequence
  Description of Artificial Sequence: Synthetic oligonucleotide
  Antisense strand to SEQ ID NO: 679502
ucucagagcaucuagucuu

SEQ ID NO: 679504 - RNA, 19 nt, Artificial Sequence
  Description of Artificial Sequence: Synthetic oligonucleotide
  Sense strand starting at position 3697 of SEQ ID NO: 585937
acaggaugguucuuaggca

SEQ ID NO: 679505 - RNA, 19 nt, Artificial Sequence
  Description of Artificial Sequence: Synthetic oligonucleotide
  Antisense strand to SEQ ID NO: 679504
ugccuaagaaccauccugu

SEQ ID NO: 679506 - RNA, 19 nt, Artificial Sequence
  Description of Artificial Sequence: Synthetic oligonucleotide
  Sense strand starting at position 3841 of SEQ ID NO: 585937
augcaugauccacagcaga

SEQ ID NO: 679507 - RNA, 19 nt, Artificial Sequence
  Description of Artificial Sequence: Synthetic oligonucleotide
  Antisense strand to SEQ ID NO: 679506
ucugcuguggaucaugcau

SEQ ID NO: 679508 - RNA, 19 nt, Artificial Sequence
  Description of Artificial Sequence: Synthetic oligonucleotide
  Sense strand starting at position 3891 of SEQ ID NO: 585937
uuuggcagucuggagaaau

SEQ ID NO: 679509 - RNA, 19 nt, Artificial Sequence
  Description of Artificial Sequence: Synthetic oligonucleotide
  Antisense strand to SEQ ID NO: 679508
auuucuccagacugccaaa

SEQ ID NO: 679510 - RNA, 19 nt, Artificial Sequence
  Description of Artificial Sequence: Synthetic oligonucleotide
  Sense strand starting at position 12 of SEQ ID NO: 585938
acuggaacaacgugaagau

SEQ ID NO: 679511 - RNA, 19 nt, Artificial Sequence
  Description of Artificial Sequence: Synthetic oligonucleotide
  Antisense strand to SEQ ID NO: 679510
aucuucacguuguuccagu

SEQ ID NO: 679512 - RNA, 19 nt, Artificial Sequence
  Description of Artificial Sequence: Synthetic oligonucleotide
  Sense strand starting at position 160 of SEQ ID NO: 585938
gugagaagucagugcuaac

SEQ ID NO: 679513 - RNA, 19 nt, Artificial Sequence
  Description of Artificial Sequence: Synthetic oligonucleotide
  Antisense strand to SEQ ID NO: 679512
guuagcacugacuucucac

SEQ ID NO: 679514 - RNA, 19 nt, Artificial Sequence
  Description of Artificial Sequence: Synthetic oligonucleotide
  Sense strand starting at position 573 of SEQ ID NO: 585938
ccggaucagcagugguuaa

SEQ ID NO: 679515 - RNA, 19 nt, Artificial Sequence
  Description of Artificial Sequence: Synthetic oligonucleotide
  Antisense strand to SEQ ID NO: 679514
uuaaccacugcugauccgg

SEQ ID NO: 679516 - RNA, 19 nt, Artificial Sequence
  Description of Artificial Sequence: Synthetic oligonucleotide
  Sense strand starting at position 574 of SEQ ID NO: 585938
cggaucagcagugguuaaa

SEQ ID NO: 679517 - RNA, 19 nt, Artificial Sequence
  Description of Artificial Sequence: Synthetic oligonucleotide
  Antisense strand to SEQ ID NO: 679516
uuuaaccacugcugauccg

SEQ ID NO: 679518 - RNA, 19 nt, Artificial Sequence
  Description of Artificial Sequence: Synthetic oligonucleotide
  Sense strand starting at position 764 of SEQ ID NO: 585938
ugaacagaugccgaucauu

SEQ ID NO: 679519 - RNA, 19 nt, Artificial Sequence
  Description of Artificial Sequence: Synthetic oligonucleotide
  Antisense strand to SEQ ID NO: 679518
aaugaucggcaucuguuca

SEQ ID NO: 679520 - RNA, 19 nt, Artificial Sequence
  Description of Artificial Sequence: Synthetic oligonucleotide
  Sense strand starting at position 825 of SEQ ID NO: 585938
cucuauaaucagggaaugu

SEQ ID NO: 679521 - RNA, 19 nt, Artificial Sequence
  Description of Artificial Sequence: Synthetic oligonucleotide
  Antisense strand to SEQ ID NO: 679520
acauucccugauuauagag

SEQ ID NO: 679522 - RNA, 19 nt, Artificial Sequence
  Description of Artificial Sequence: Synthetic oligonucleotide
  Sense strand starting at position 1137 of SEQ ID NO: 585938
guauucuguaugcagugaa

SEQ ID NO: 679523 - RNA, 19 nt, Artificial Sequence
  Description of Artificial Sequence: Synthetic oligonucleotide
  Antisense strand to SEQ ID NO: 679522
uucacugcauacagaauac

SEQ ID NO: 679524 - RNA, 19 nt, Artificial Sequence
  Description of Artificial Sequence: Synthetic oligonucleotide
  Sense strand starting at position 1174 of SEQ ID NO: 585938
aaugcauacgccguuuauu

SEQ ID NO: 679525 - RNA, 19 nt, Artificial Sequence
  Description of Artificial Sequence: Synthetic oligonucleotide
  Antisense strand to SEQ ID NO: 679524
aauaaacggcguaugcauu

SEQ ID NO: 679526 - RNA, 19 nt, Artificial Sequence
  Description of Artificial Sequence: Synthetic oligonucleotide
  Sense strand starting at position 2020 of SEQ ID NO: 585938
cgcaguguccuuggagaga

SEQ ID NO: 679527 - RNA, 19 nt, Artificial Sequence
  Description of Artificial Sequence: Synthetic oligonucleotide
  Antisense strand to SEQ ID NO: 679526
ucucuccaaggacacugcg

SEQ ID NO: 679528 - RNA, 19 nt, Artificial Sequence
  Description of Artificial Sequence: Synthetic oligonucleotide
  Sense strand starting at position 2435 of SEQ ID NO: 585938
guuuguuuacaccaggaag

SEQ ID NO: 679529 - RNA, 19 nt, Artificial Sequence
  Description of Artificial Sequence: Synthetic oligonucleotide
  Antisense strand to SEQ ID NO: 679528
cuuccugguguaaacaaac

SEQ ID NO: 679530 - RNA, 19 nt, Artificial Sequence
  Description of Artificial Sequence: Synthetic oligonucleotide
  Sense strand starting at position 2459 of SEQ ID NO: 585938
gccuuccaccugcaagaaa

SEQ ID NO: 679531 - RNA, 19 nt, Artificial Sequence
  Description of Artificial Sequence: Synthetic oligonucleotide
  Antisense strand to SEQ ID NO: 679530
uuucuugcagguggaaggc

SEQ ID NO: 679532 - RNA, 19 nt, Artificial Sequence
  Description of Artificial Sequence: Synthetic oligonucleotide
  Sense strand starting at position 2480 of SEQ ID NO: 585938
auggcagcugcagaauaau

SEQ ID NO: 679533 - RNA, 19 nt, Artificial Sequence
  Description of Artificial Sequence: Synthetic oligonucleotide
  Antisense strand to SEQ ID NO: 679532
auuauucugcagcugccau

SEQ ID NO: 679534 - RNA, 19 nt, Artificial Sequence
  Description of Artificial Sequence: Synthetic oligonucleotide
  Sense strand starting at position 2532 of SEQ ID NO: 585938
gagugaggcuacuugagaa

SEQ ID NO: 679535 - RNA, 19 nt, Artificial Sequence
  Description of Artificial Sequence: Synthetic oligonucleotide
  Antisense strand to SEQ ID NO: 679534
uucucaaguagccucacuc

SEQ ID NO: 679536 - RNA, 19 nt, Artificial Sequence
  Description of Artificial Sequence: Synthetic oligonucleotide
  Sense strand starting at position 2582 of SEQ ID NO: 585938
aucugauuuccacgcagcu

SEQ ID NO: 679537 - RNA, 19 nt, Artificial Sequence
  Description of Artificial Sequence: Synthetic oligonucleotide
  Antisense strand to SEQ ID NO: 679536
agcugcguggaaaucagau

SEQ ID NO: 679538 - RNA, 19 nt, Artificial Sequence
  Description of Artificial Sequence: Synthetic oligonucleotide
  Sense strand starting at position 2623 of SEQ ID NO: 585938
guaugauguuaucuccauu

SEQ ID NO: 679539 - RNA, 19 nt, Artificial Sequence
  Description of Artificial Sequence: Synthetic oligonucleotide
  Antisense strand to SEQ ID NO: 679538
aauggagauaacaucauac

SEQ ID NO: 679540 - RNA, 19 nt, Artificial Sequence
  Description of Artificial Sequence: Synthetic oligonucleotide
  Sense strand starting at position 2800 of SEQ ID NO: 585938
gcaaauugcagcgcauauu

SEQ ID NO: 679541 - RNA, 19 nt, Artificial Sequence
  Description of Artificial Sequence: Synthetic oligonucleotide
  Antisense strand to SEQ ID NO: 679540
aauaugcgcugcaauuugc

SEQ ID NO: 679542 - RNA, 19 nt, Artificial Sequence
  Description of Artificial Sequence: Synthetic oligonucleotide
  Sense strand starting at position 2873 of SEQ ID NO: 585938
gaagcccguguuuaucaua

SEQ ID NO: 679543 - RNA, 19 nt, Artificial Sequence
  Description of Artificial Sequence: Synthetic oligonucleotide
  Antisense strand to SEQ ID NO: 679542
uaugauaaacacgggcuuc

SEQ ID NO: 679544 - RNA, 19 nt, Artificial Sequence
  Description of Artificial Sequence: Synthetic oligonucleotide
  Sense strand starting at position 2903 of SEQ ID NO: 585938
ccagccagagcugauaaua

SEQ ID NO: 679545 - RNA, 19 nt, Artificial Sequence
  Description of Artificial Sequence: Synthetic oligonucleotide
  Antisense strand to SEQ ID NO: 679544
uauuaucagcucuggcugg

SEQ ID NO: 679546 - RNA, 19 nt, Artificial Sequence
  Description of Artificial Sequence: Synthetic oligonucleotide
  Sense strand starting at position 2998 of SEQ ID NO: 585938
ugucuuaaccagcagggaa

SEQ ID NO: 679547 - RNA, 19 nt, Artificial Sequence
  Description of Artificial Sequence: Synthetic oligonucleotide
  Antisense strand to SEQ ID NO: 679546
uucccugcugguuaagaca

SEQ ID NO: 679548 - RNA, 19 nt, Artificial Sequence
  Description of Artificial Sequence: Synthetic oligonucleotide
  Sense strand starting at position 3025 of SEQ ID NO: 585938
gggacucauucuucccuau

SEQ ID NO: 679549 - RNA, 19 nt, Artificial Sequence
  Description of Artificial Sequence: Synthetic oligonucleotide
  Antisense strand to SEQ ID NO: 679548
auagggaagaaugaguccc

SEQ ID NO: 679550 - RNA, 19 nt, Artificial Sequence
  Description of Artificial Sequence: Synthetic oligonucleotide
  Sense strand starting at position 3150 of SEQ ID NO: 585938
aguccuggucacugguaga

SEQ ID NO: 679551 - RNA, 19 nt, Artificial Sequence
  Description of Artificial Sequence: Synthetic oligonucleotide
  Antisense strand to SEQ ID NO: 679550
ucuaccagugaccaggacu

SEQ ID NO: 679552 - RNA, 19 nt, Artificial Sequence
  Description of Artificial Sequence: Synthetic oligonucleotide
  Sense strand starting at position 3263 of SEQ ID NO: 585938
agcucuucuguguagguaa

SEQ ID NO: 679553 - RNA, 19 nt, Artificial Sequence
  Description of Artificial Sequence: Synthetic oligonucleotide
  Antisense strand to SEQ ID NO: 679552
uuaccuacacagaagagcu

SEQ ID NO: 679554 - RNA, 19 nt, Artificial Sequence
  Description of Artificial Sequence: Synthetic oligonucleotide
  Sense strand starting at position 3274 of SEQ ID NO: 585938
guagguaaaguccaucaaa

SEQ ID NO: 679555 - RNA, 19 nt, Artificial Sequence
  Description of Artificial Sequence: Synthetic oligonucleotide
  Antisense strand to SEQ ID NO: 679554
uuugauggacuuuaccuac

SEQ ID NO: 679556 - RNA, 19 nt, Artificial Sequence
  Description of Artificial Sequence: Synthetic oligonucleotide
  Sense strand starting at position 3385 of SEQ ID NO: 585938
ucuaguuggcauuaacguu

SEQ ID NO: 679557 - RNA, 19 nt, Artificial Sequence
  Description of Artificial Sequence: Synthetic oligonucleotide
  Antisense strand to SEQ ID NO: 679556
aacguuaaugccaacuaga

SEQ ID NO: 679558 - RNA, 19 nt, Artificial Sequence
  Description of Artificial Sequence: Synthetic oligonucleotide
  Sense strand starting at position 3393 of SEQ ID NO: 585938
gcauuaacguuguuaggag

SEQ ID NO: 679559 - RNA, 19 nt, Artificial Sequence
  Description of Artificial Sequence: Synthetic oligonucleotide
  Antisense strand to SEQ ID NO: 679558
cuccuaacaacguuaaugc

SEQ ID NO: 679560 - RNA, 19 nt, Artificial Sequence
  Description of Artificial Sequence: Synthetic oligonucleotide
  Sense strand starting at position 3401 of SEQ ID NO: 585938
guuguuaggagauagcuua

SEQ ID NO: 679561 - RNA, 19 nt, Artificial Sequence
  Description of Artificial Sequence: Synthetic oligonucleotide
  Antisense strand to SEQ ID NO: 679560
uaagcuaucuccuaacaac

SEQ ID NO: 679562 - RNA, 19 nt, Artificial Sequence
  Description of Artificial Sequence: Synthetic oligonucleotide
  Sense strand starting at position 3488 of SEQ ID NO: 585938
aaauuaugucagggaaugu

SEQ ID NO: 679563 - RNA, 19 nt, Artificial Sequence
  Description of Artificial Sequence: Synthetic oligonucleotide
  Antisense strand to SEQ ID NO: 679562
acauucccugacauaauuu

SEQ ID NO: 679564 - RNA, 19 nt, Artificial Sequence
  Description of Artificial Sequence: Synthetic oligonucleotide
  Sense strand starting at position 3498 of SEQ ID NO: 585938
agggaauguuaaguuucua

SEQ ID NO: 679565 - RNA, 19 nt, Artificial Sequence
  Description of Artificial Sequence: Synthetic oligonucleotide
  Antisense strand to SEQ ID NO: 679564
uagaaacuuaacauucccu

SEQ ID NO: 679566 - RNA, 19 nt, Artificial Sequence
  Description of Artificial Sequence: Synthetic oligonucleotide
  Sense strand starting at position 3513 of SEQ ID NO: 585938
ucuagucuuuggucacuga

SEQ ID NO: 679567 - RNA, 19 nt, Artificial Sequence
  Description of Artificial Sequence: Synthetic oligonucleotide
  Antisense strand to SEQ ID NO: 679566
ucagugaccaaagacuaga

SEQ ID NO: 679568 - RNA, 19 nt, Artificial Sequence
  Description of Artificial Sequence: Synthetic oligonucleotide
  Sense strand starting at position 3524 of SEQ ID NO: 585938
gucacugaggccuaucagu

SEQ ID NO: 679569 - RNA, 19 nt, Artificial Sequence
  Description of Artificial Sequence: Synthetic oligonucleotide
  Antisense strand to SEQ ID NO: 679568
acugauaggccucagugac

SEQ ID NO: 679570 - RNA, 19 nt, Artificial Sequence
  Description of Artificial Sequence: Synthetic oligonucleotide
  Sense strand starting at position 3530 of SEQ ID NO: 585938
gaggccuaucaguagguuu

SEQ ID NO: 679571 - RNA, 19 nt, Artificial Sequence
  Description of Artificial Sequence: Synthetic oligonucleotide
  Antisense strand to SEQ ID NO: 679570
aaaccuacugauaggccuc

SEQ ID NO: 679572 - RNA, 19 nt, Artificial Sequence
  Description of Artificial Sequence: Synthetic oligonucleotide
  Sense strand starting at position 3588 of SEQ ID NO: 585938
uaagaauugugucugguag

SEQ ID NO: 679573 - RNA, 19 nt, Artificial Sequence
  Description of Artificial Sequence: Synthetic oligonucleotide
  Antisense strand to SEQ ID NO: 679572
cuaccagacacaauucuua

SEQ ID NO: 679574 - RNA, 19 nt, Artificial Sequence
  Description of Artificial Sequence: Synthetic oligonucleotide
  Sense strand starting at position 3589 of SEQ ID NO: 585938
aagaauugugucugguaga

SEQ ID NO: 679575 - RNA, 19 nt, Artificial Sequence
  Description of Artificial Sequence: Synthetic oligonucleotide
  Antisense strand to SEQ ID NO: 679574
ucuaccagacacaauucuu

SEQ ID NO: 679576 - RNA, 19 nt, Artificial Sequence
  Description of Artificial Sequence: Synthetic oligonucleotide
  Sense strand starting at position 3625 of SEQ ID NO: 585938
acagguguguacucacaca

SEQ ID NO: 679577 - RNA, 19 nt, Artificial Sequence
  Description of Artificial Sequence: Synthetic oligonucleotide
  Antisense strand to SEQ ID NO: 679576
ugugugaguacacaccugu

SEQ ID NO: 679578 - RNA, 19 nt, Artificial Sequence
  Description of Artificial Sequence: Synthetic oligonucleotide
  Sense strand starting at position 3642 of SEQ ID NO: 585938
cagcaagagcaguagagau

SEQ ID NO: 679579 - RNA, 19 nt, Artificial Sequence
  Description of Artificial Sequence: Synthetic oligonucleotide
  Antisense strand to SEQ ID NO: 679578
aucucuacugcucuugcug

SEQ ID NO: 679580 - RNA, 19 nt, Artificial Sequence
  Description of Artificial Sequence: Synthetic oligonucleotide
  Sense strand starting at position 3737 of SEQ ID NO: 585938
ccugaauguguugacuuua

SEQ ID NO: 679581 - RNA, 19 nt, Artificial Sequence
  Description of Artificial Sequence: Synthetic oligonucleotide
  Antisense strand to SEQ ID NO: 679580
uaaagucaacacauucagg

SEQ ID NO: 679582 - RNA, 19 nt, Artificial Sequence
  Description of Artificial Sequence: Synthetic oligonucleotide
  Sense strand starting at position 3742 of SEQ ID NO: 585938
auguguugacuuuacaaau

SEQ ID NO: 679583 - RNA, 19 nt, Artificial Sequence
  Description of Artificial Sequence: Synthetic oligonucleotide
  Antisense strand to SEQ ID NO: 679582
auuuguaaagucaacacau

SEQ ID NO: 679584 - RNA, 19 nt, Artificial Sequence
  Description of Artificial Sequence: Synthetic oligonucleotide
  Sense strand starting at position 3827 of SEQ ID NO: 585938
ucuaucaagugucuacaau

SEQ ID NO: 679585 - RNA, 19 nt, Artificial Sequence
  Description of Artificial Sequence: Synthetic oligonucleotide
  Antisense strand to SEQ ID NO: 679584
auuguagacacuugauaga

SEQ ID NO: 679586 - RNA, 19 nt, Artificial Sequence
  Description of Artificial Sequence: Synthetic oligonucleotide
  Sense strand starting at position 3828 of SEQ ID NO: 585938
cuaucaagugucuacaaua

SEQ ID NO: 679587 - RNA, 19 nt, Artificial Sequence
  Description of Artificial Sequence: Synthetic oligonucleotide
  Antisense strand to SEQ ID NO: 679586
uauuguagacacuugauag

SEQ ID NO: 679588 - RNA, 19 nt, Artificial Sequence
  Description of Artificial Sequence: Synthetic oligonucleotide
  Sense strand starting at position 3872 of SEQ ID NO: 585938
uuuauagguuuguuugaag

SEQ ID NO: 679589 - RNA, 19 nt, Artificial Sequence
  Description of Artificial Sequence: Synthetic oligonucleotide
  Antisense strand to SEQ ID NO: 679588
cuucaaacaaaccuauaaa

SEQ ID NO: 679590 - RNA, 19 nt, Artificial Sequence
  Description of Artificial Sequence: Synthetic oligonucleotide
  Sense strand starting at position 5 of SEQ ID NO: 585939
accauacugucauaggaug

SEQ ID NO: 679591 - RNA, 19 nt, Artificial Sequence
  Description of Artificial Sequence: Synthetic oligonucleotide
  Antisense strand to SEQ ID NO: 679590
cauccuaugacaguauggu

SEQ ID NO: 679592 - RNA, 19 nt, Artificial Sequence
  Description of Artificial Sequence: Synthetic oligonucleotide
  Sense strand starting at position 13 of SEQ ID NO: 585939
gucauaggaugggacuaaa

SEQ ID NO: 679593 - RNA, 19 nt, Artificial Sequence
  Description of Artificial Sequence: Synthetic oligonucleotide
  Antisense strand to SEQ ID NO: 679592
uuuagucccauccuaugac

SEQ ID NO: 679594 - RNA, 19 nt, Artificial Sequence
  Description of Artificial Sequence: Synthetic oligonucleotide
  Sense strand starting at position 434 of SEQ ID NO: 585939
accuaagucucaguauucu

SEQ ID NO: 679595 - RNA, 19 nt, Artificial Sequence
  Description of Artificial Sequence: Synthetic oligonucleotide
  Antisense strand to SEQ ID NO: 679594
agaauacugagacuuaggu

SEQ ID NO: 679596 - RNA, 19 nt, Artificial Sequence
  Description of Artificial Sequence: Synthetic oligonucleotide
  Sense strand starting at position 493 of SEQ ID NO: 585939
ggcuguagugagcauucaa

SEQ ID NO: 679597 - RNA, 19 nt, Artificial Sequence
  Description of Artificial Sequence: Synthetic oligonucleotide
  Antisense strand to SEQ ID NO: 679596
uugaaugcucacuacagcc

SEQ ID NO: 679598 - RNA, 19 nt, Artificial Sequence
  Description of Artificial Sequence: Synthetic oligonucleotide
  Sense strand starting at position 560 of SEQ ID NO: 585939
ugcugaccauugucaugaa

SEQ ID NO: 679599 - RNA, 19 nt, Artificial Sequence
  Description of Artificial Sequence: Synthetic oligonucleotide
  Antisense strand to SEQ ID NO: 679598
uucaugacaauggucagca

SEQ ID NO: 679600 - RNA, 19 nt, Artificial Sequence
  Description of Artificial Sequence: Synthetic oligonucleotide
  Sense strand starting at position 605 of SEQ ID NO: 585939
acgggaaacucagcaagau

SEQ ID NO: 679601 - RNA, 19 nt, Artificial Sequence
  Description of Artificial Sequence: Synthetic oligonucleotide
  Antisense strand to SEQ ID NO: 679600
aucuugcugaguuucccgu

SEQ ID NO: 679602 - RNA, 19 nt, Artificial Sequence
  Description of Artificial Sequence: Synthetic oligonucleotide
  Sense strand starting at position 809 of SEQ ID NO: 585939
uagaaacuucugcguccaa

SEQ ID NO: 679603 - RNA, 19 nt, Artificial Sequence
  Description of Artificial Sequence: Synthetic oligonucleotide
  Antisense strand to SEQ ID NO: 679602
uuggacgcagaaguuucua

SEQ ID NO: 679604 - RNA, 19 nt, Artificial Sequence
  Description of Artificial Sequence: Synthetic oligonucleotide
  Sense strand starting at position 873 of SEQ ID NO: 585939
uacggaaacaguggucaua

SEQ ID NO: 679605 - RNA, 19 nt, Artificial Sequence
  Description of Artificial Sequence: Synthetic oligonucleotide
  Antisense strand to SEQ ID NO: 679604
uaugaccacuguuuccgua

SEQ ID NO: 679606 - RNA, 19 nt, Artificial Sequence
  Description of Artificial Sequence: Synthetic oligonucleotide
  Sense strand starting at position 875 of SEQ ID NO: 585939
cggaaacaguggucauauu

SEQ ID NO: 679607 - RNA, 19 nt, Artificial Sequence
  Description of Artificial Sequence: Synthetic oligonucleotide
  Antisense strand to SEQ ID NO: 679606
aauaugaccacuguuuccg

SEQ ID NO: 679608 - RNA, 19 nt, Artificial Sequence
  Description of Artificial Sequence: Synthetic oligonucleotide
  Sense strand starting at position 937 of SEQ ID NO: 585939
uacagaaaguauccugugu

SEQ ID NO: 679609 - RNA, 19 nt, Artificial Sequence
  Description of Artificial Sequence: Synthetic oligonucleotide
  Antisense strand to SEQ ID NO: 679608
acacaggauacuuucugua

SEQ ID NO: 679610 - RNA, 19 nt, Artificial Sequence
  Description of Artificial Sequence: Synthetic oligonucleotide
  Sense strand starting at position 941 of SEQ ID NO: 585939
gaaaguauccuguguccag

SEQ ID NO: 679611 - RNA, 19 nt, Artificial Sequence
  Description of Artificial Sequence: Synthetic oligonucleotide
  Antisense strand to SEQ ID NO: 679610
cuggacacaggauacuuuc

SEQ ID NO: 679612 - RNA, 19 nt, Artificial Sequence
  Description of Artificial Sequence: Synthetic oligonucleotide
  Sense strand starting at position 942 of SEQ ID NO: 585939
aaaguauccuguguccagu

SEQ ID NO: 679613 - RNA, 19 nt, Artificial Sequence
  Description of Artificial Sequence: Synthetic oligonucleotide
  Antisense strand to SEQ ID NO: 679612
acuggacacaggauacuuu

SEQ ID NO: 679614 - RNA, 19 nt, Artificial Sequence
  Description of Artificial Sequence: Synthetic oligonucleotide
  Sense strand starting at position 1113 of SEQ ID NO: 585939
agugaaacccauugucuac

SEQ ID NO: 679615 - RNA, 19 nt, Artificial Sequence
  Description of Artificial Sequence: Synthetic oligonucleotide
  Antisense strand to SEQ ID NO: 679614
guagacaauggguuucacu

SEQ ID NO: 679616 - RNA, 19 nt, Artificial Sequence
  Description of Artificial Sequence: Synthetic oligonucleotide
  Sense strand starting at position 1148 of SEQ ID NO: 585939
auuaaucgcgcauggugau

SEQ ID NO: 679617 - RNA, 19 nt, Artificial Sequence
  Description of Artificial Sequence: Synthetic oligonucleotide
  Antisense strand to SEQ ID NO: 679616
aucaccaugcgcgauuaau

SEQ ID NO: 679618 - RNA, 19 nt, Artificial Sequence
  Description of Artificial Sequence: Synthetic oligonucleotide
  Sense strand starting at position 1162 of SEQ ID NO: 585939
gugauaugcgacuguaaau

SEQ ID NO: 679619 - RNA, 19 nt, Artificial Sequence
  Description of Artificial Sequence: Synthetic oligonucleotide
  Antisense strand to SEQ ID NO: 679618
auuuacagucgcauaucac

SEQ ID NO: 679620 - RNA, 19 nt, Artificial Sequence
  Description of Artificial Sequence: Synthetic oligonucleotide
  Sense strand starting at position 1372 of SEQ ID NO: 585939
cacaguucuuaacucgaga

SEQ ID NO: 679621 - RNA, 19 nt, Artificial Sequence
  Description of Artificial Sequence: Synthetic oligonucleotide
  Antisense strand to SEQ ID NO: 679620
ucucgaguuaagaacugug

SEQ ID NO: 679622 - RNA, 19 nt, Artificial Sequence
  Description of Artificial Sequence: Synthetic oligonucleotide
  Sense strand starting at position 2008 of SEQ ID NO: 585939
guaucagucccagguccaa

SEQ ID NO: 679623 - RNA, 19 nt, Artificial Sequence
  Description of Artificial Sequence: Synthetic oligonucleotide
  Antisense strand to SEQ ID NO: 679622
uuggaccugggacugauac

SEQ ID NO: 679624 - RNA, 19 nt, Artificial Sequence
  Description of Artificial Sequence: Synthetic oligonucleotide
  Sense strand starting at position 2282 of SEQ ID NO: 585939
ugcagaauaauguggcuca

SEQ ID NO: 679625 - RNA, 19 nt, Artificial Sequence
  Description of Artificial Sequence: Synthetic oligonucleotide
  Antisense strand to SEQ ID NO: 679624
ugagccacauuauucugca

SEQ ID NO: 679626 - RNA, 19 nt, Artificial Sequence
  Description of Artificial Sequence: Synthetic oligonucleotide
  Sense strand starting at position 2285 of SEQ ID NO: 585939
agaauaauguggcucaaag

SEQ ID NO: 679627 - RNA, 19 nt, Artificial Sequence
  Description of Artificial Sequence: Synthetic oligonucleotide
  Antisense strand to SEQ ID NO: 679626
cuuugagccacauuauucu

SEQ ID NO: 679628 - RNA, 19 nt, Artificial Sequence
  Description of Artificial Sequence: Synthetic oligonucleotide
  Sense strand starting at position 2302 of SEQ ID NO: 585939
agccaaauauccguuuguu

SEQ ID NO: 679629 - RNA, 19 nt, Artificial Sequence
  Description of Artificial Sequence: Synthetic oligonucleotide
  Antisense strand to SEQ ID NO: 679628
aacaaacggauauuuggcu

SEQ ID NO: 679630 - RNA, 19 nt, Artificial Sequence
  Description of Artificial Sequence: Synthetic oligonucleotide
  Sense strand starting at position 2326 of SEQ ID NO: 585939
gagugaggcugcuugagaa

SEQ ID NO: 679631 - RNA, 19 nt, Artificial Sequence
  Description of Artificial Sequence: Synthetic oligonucleotide
  Antisense strand to SEQ ID NO: 679630
uucucaagcagccucacuc

SEQ ID NO: 679632 - RNA, 19 nt, Artificial Sequence
  Description of Artificial Sequence: Synthetic oligonucleotide
  Sense strand starting at position 2561 of SEQ ID NO: 585939
ccaauauaauugucaguga

SEQ ID NO: 679633 - RNA, 19 nt, Artificial Sequence
  Description of Artificial Sequence: Synthetic oligonucleotide
  Antisense strand to SEQ ID NO: 679632
ucacugacaauuauauugg

SEQ ID NO: 679634 - RNA, 19 nt, Artificial Sequence
  Description of Artificial Sequence: Synthetic oligonucleotide
  Sense strand starting at position 2585 of SEQ ID NO: 585939
gcgaauuccagccaaguuu

SEQ ID NO: 679635 - RNA, 19 nt, Artificial Sequence
  Description of Artificial Sequence: Synthetic oligonucleotide
  Antisense strand to SEQ ID NO: 679634
aaacuuggcuggaauucgc

SEQ ID NO: 679636 - RNA, 19 nt, Artificial Sequence
  Description of Artificial Sequence: Synthetic oligonucleotide
  Sense strand starting at position 2616 of SEQ ID NO: 585939
uguggagucucacucuauu

SEQ ID NO: 679637 - RNA, 19 nt, Artificial Sequence
  Description of Artificial Sequence: Synthetic oligonucleotide
  Antisense strand to SEQ ID NO: 679636
aauagagugagacuccaca

SEQ ID NO: 679638 - RNA, 19 nt, Artificial Sequence
  Description of Artificial Sequence: Synthetic oligonucleotide
  Sense strand starting at position 2654 of SEQ ID NO: 585939
guaugaucuugucucacca

SEQ ID NO: 679639 - RNA, 19 nt, Artificial Sequence
  Description of Artificial Sequence: Synthetic oligonucleotide
  Antisense strand to SEQ ID NO: 679638
uggugagacaagaucauac

SEQ ID NO: 679640 - RNA, 19 nt, Artificial Sequence
  Description of Artificial Sequence: Synthetic oligonucleotide
  Sense strand starting at position 2786 of SEQ ID NO: 585939
uggagauagugagagauca

SEQ ID NO: 679641 - RNA, 19 nt, Artificial Sequence
  Description of Artificial Sequence: Synthetic oligonucleotide
  Antisense strand to SEQ ID NO: 679640
ugaucucucacuaucucca

SEQ ID NO: 679642 - RNA, 19 nt, Artificial Sequence
  Description of Artificial Sequence: Synthetic oligonucleotide
  Sense strand starting at position 2837 of SEQ ID NO: 585939
cuuggucugacuugagaaa

SEQ ID NO: 679643 - RNA, 19 nt, Artificial Sequence
  Description of Artificial Sequence: Synthetic oligonucleotide
  Antisense strand to SEQ ID NO: 679642
uuucucaagucagaccaag

SEQ ID NO: 679644 - RNA, 19 nt, Artificial Sequence
  Description of Artificial Sequence: Synthetic oligonucleotide
  Sense strand starting at position 2867 of SEQ ID NO: 585939
ucgcgaugaguguuaguuc

SEQ ID NO: 679645 - RNA, 19 nt, Artificial Sequence
  Description of Artificial Sequence: Synthetic oligonucleotide
  Antisense strand to SEQ ID NO: 679644
gaacuaacacucaucgcga

SEQ ID NO: 679646 - RNA, 19 nt, Artificial Sequence
  Description of Artificial Sequence: Synthetic oligonucleotide
  Sense strand starting at position 2870 of SEQ ID NO: 585939
cgaugaguguuaguucuua

SEQ ID NO: 679647 - RNA, 19 nt, Artificial Sequence
  Description of Artificial Sequence: Synthetic oligonucleotide
  Antisense strand to SEQ ID NO: 679646
uaagaacuaacacucaucg

SEQ ID NO: 679648 - RNA, 19 nt, Artificial Sequence
  Description of Artificial Sequence: Synthetic oligonucleotide
  Sense strand starting at position 2889 of SEQ ID NO: 585939
aaagcagugucucuagagu

SEQ ID NO: 679649 - RNA, 19 nt, Artificial Sequence
  Description of Artificial Sequence: Synthetic oligonucleotide
  Antisense strand to SEQ ID NO: 679648
acucuagagacacugcuuu

SEQ ID NO: 679650 - RNA, 19 nt, Artificial Sequence
  Description of Artificial Sequence: Synthetic oligonucleotide
  Sense strand starting at position 2924 of SEQ ID NO: 585939
agaaguauucagggaguuu

SEQ ID NO: 679651 - RNA, 19 nt, Artificial Sequence
  Description of Artificial Sequence: Synthetic oligonucleotide
  Antisense strand to SEQ ID NO: 679650
aaacucccugaauacuucu

SEQ ID NO: 679652 - RNA, 19 nt, Artificial Sequence
  Description of Artificial Sequence: Synthetic oligonucleotide
  Sense strand starting at position 2994 of SEQ ID NO: 585939
cucugugguggauguuaaa

SEQ ID NO: 679653 - RNA, 19 nt, Artificial Sequence
  Description of Artificial Sequence: Synthetic oligonucleotide
  Antisense strand to SEQ ID NO: 679652
uuuaacauccaccacagag

SEQ ID NO: 679654 - RNA, 19 nt, Artificial Sequence
  Description of Artificial Sequence: Synthetic oligonucleotide
  Sense strand starting at position 3138 of SEQ ID NO: 585939
gugcgucuggaauauguuu

SEQ ID NO: 679655 - RNA, 19 nt, Artificial Sequence
  Description of Artificial Sequence: Synthetic oligonucleotide
  Antisense strand to SEQ ID NO: 679654
aaacauauuccagacgcac

SEQ ID NO: 679656 - RNA, 19 nt, Artificial Sequence
  Description of Artificial Sequence: Synthetic oligonucleotide
  Sense strand starting at position 3143 of SEQ ID NO: 585939
ucuggaauauguuuguucu

SEQ ID NO: 679657 - RNA, 19 nt, Artificial Sequence
  Description of Artificial Sequence: Synthetic oligonucleotide
  Antisense strand to SEQ ID NO: 679656
agaacaaacauauuccaga

SEQ ID NO: 679658 - RNA, 19 nt, Artificial Sequence
  Description of Artificial Sequence: Synthetic oligonucleotide
  Sense strand starting at position 3144 of SEQ ID NO: 585939
cuggaauauguuuguucuu

SEQ ID NO: 679659 - RNA, 19 nt, Artificial Sequence
  Description of Artificial Sequence: Synthetic oligonucleotide
  Antisense strand to SEQ ID NO: 679658
aagaacaaacauauuccag

SEQ ID NO: 679660 - RNA, 19 nt, Artificial Sequence
  Description of Artificial Sequence: Synthetic oligonucleotide
  Sense strand starting at position 3145 of SEQ ID NO: 585939
uggaauauguuuguucuuu

SEQ ID NO: 679661 - RNA, 19 nt, Artificial Sequence
  Description of Artificial Sequence: Synthetic oligonucleotide
  Antisense strand to SEQ ID NO: 679660
aaagaacaaacauauucca

SEQ ID NO: 679662 - RNA, 19 nt, Artificial Sequence
  Description of Artificial Sequence: Synthetic oligonucleotide
  Sense strand starting at position 3146 of SEQ ID NO: 585939
ggaauauguuuguucuuuc

SEQ ID NO: 679663 - RNA, 19 nt, Artificial Sequence
  Description of Artificial Sequence: Synthetic oligonucleotide
  Antisense strand to SEQ ID NO: 679662
gaaagaacaaacauauucc

SEQ ID NO: 679664 - RNA, 19 nt, Artificial Sequence
  Description of Artificial Sequence: Synthetic oligonucleotide
  Sense strand starting at position 3156 of SEQ ID NO: 585939
uguucuuuccggugggauc

SEQ ID NO: 679665 - RNA, 19 nt, Artificial Sequence
  Description of Artificial Sequence: Synthetic oligonucleotide
  Antisense strand to SEQ ID NO: 679664
gaucccaccggaaagaaca

SEQ ID NO: 679666 - RNA, 19 nt, Artificial Sequence
  Description of Artificial Sequence: Synthetic oligonucleotide
  Sense strand starting at position 3220 of SEQ ID NO: 585939
agcguuaccacuuguaaag

SEQ ID NO: 679667 - RNA, 19 nt, Artificial Sequence
  Description of Artificial Sequence: Synthetic oligonucleotide
  Antisense strand to SEQ ID NO: 679666
cuuuacaagugguaacgcu

SEQ ID NO: 679668 - RNA, 19 nt, Artificial Sequence
  Description of Artificial Sequence: Synthetic oligonucleotide
  Sense strand starting at position 3327 of SEQ ID NO: 585939
acccaagugcguuacaacu

SEQ ID NO: 679669 - RNA, 19 nt, Artificial Sequence
  Description of Artificial Sequence: Synthetic oligonucleotide
  Antisense strand to SEQ ID NO: 679668
aguuguaacgcacuugggu

SEQ ID NO: 679670 - RNA, 19 nt, Artificial Sequence
  Description of Artificial Sequence: Synthetic oligonucleotide
  Sense strand starting at position 128 of SEQ ID NO: 585940
ccuuccagguccucuagaa

SEQ ID NO: 679671 - RNA, 19 nt, Artificial Sequence
  Description of Artificial Sequence: Synthetic oligonucleotide
  Antisense strand to SEQ ID NO: 679670
uucuagaggaccuggaagg

SEQ ID NO: 679672 - RNA, 19 nt, Artificial Sequence
  Description of Artificial Sequence: Synthetic oligonucleotide
  Sense strand starting at position 220 of SEQ ID NO: 585940
cuagguucuagaggagcua

SEQ ID NO: 679673 - RNA, 19 nt, Artificial Sequence
  Description of Artificial Sequence: Synthetic oligonucleotide
  Antisense strand to SEQ ID NO: 679672
uagcuccucuagaaccuag

SEQ ID NO: 679674 - RNA, 19 nt, Artificial Sequence
  Description of Artificial Sequence: Synthetic oligonucleotide
  Sense strand starting at position 282 of SEQ ID NO: 585940
uaacacguccuuuggauaa

SEQ ID NO: 679675 - RNA, 19 nt, Artificial Sequence
  Description of Artificial Sequence: Synthetic oligonucleotide
  Antisense strand to SEQ ID NO: 679674
uuauccaaaggacguguua

SEQ ID NO: 679676 - RNA, 19 nt, Artificial Sequence
  Description of Artificial Sequence: Synthetic oligonucleotide
  Sense strand starting at position 531 of SEQ ID NO: 585940
acguuugaagcccagcaau

SEQ ID NO: 679677 - RNA, 19 nt, Artificial Sequence
  Description of Artificial Sequence: Synthetic oligonucleotide
  Antisense strand to SEQ ID NO: 679676
auugcugggcuucaaacgu

SEQ ID NO: 679678 - RNA, 19 nt, Artificial Sequence
  Description of Artificial Sequence: Synthetic oligonucleotide
  Sense strand starting at position 542 of SEQ ID NO: 585940
ccagcaauuuaucaagaga

SEQ ID NO: 679679 - RNA, 19 nt, Artificial Sequence
  Description of Artificial Sequence: Synthetic oligonucleotide
  Antisense strand to SEQ ID NO: 679678
ucucuugauaaauugcugg

SEQ ID NO: 679680 - RNA, 19 nt, Artificial Sequence
  Description of Artificial Sequence: Synthetic oligonucleotide
  Sense strand starting at position 580 of SEQ ID NO: 585940
ccuggagccugucuguuaa

SEQ ID NO: 679681 - RNA, 19 nt, Artificial Sequence
  Description of Artificial Sequence: Synthetic oligonucleotide
  Antisense strand to SEQ ID NO: 679680
uuaacagacaggcuccagg

SEQ ID NO: 679682 - RNA, 19 nt, Artificial Sequence
  Description of Artificial Sequence: Synthetic oligonucleotide
  Sense strand starting at position 594 of SEQ ID NO: 585940
guuaaagcuccuggcacau

SEQ ID NO: 679683 - RNA, 19 nt, Artificial Sequence
  Description of Artificial Sequence: Synthetic oligonucleotide
  Antisense strand to SEQ ID NO: 679682
augugccaggagcuuuaac

SEQ ID NO: 679684 - RNA, 19 nt, Artificial Sequence
  Description of Artificial Sequence: Synthetic oligonucleotide
  Sense strand starting at position 630 of SEQ ID NO: 585940
ccaggaguuguuuacaugu

SEQ ID NO: 679685 - RNA, 19 nt, Artificial Sequence
  Description of Artificial Sequence: Synthetic oligonucleotide
  Antisense strand to SEQ ID NO: 679684
acauguaaacaacuccugg

SEQ ID NO: 679686 - RNA, 19 nt, Artificial Sequence
  Description of Artificial Sequence: Synthetic oligonucleotide
  Sense strand starting at position 742 of SEQ ID NO: 585940
cauccuaauugaguguuga

SEQ ID NO: 679687 - RNA, 19 nt, Artificial Sequence
  Description of Artificial Sequence: Synthetic oligonucleotide
  Antisense strand to SEQ ID NO: 679686
ucaacacucaauuaggaug

SEQ ID NO: 679688 - RNA, 19 nt, Artificial Sequence
  Description of Artificial Sequence: Synthetic oligonucleotide
  Sense strand starting at position 743 of SEQ ID NO: 585940
auccuaauugaguguugag

SEQ ID NO: 679689 - RNA, 19 nt, Artificial Sequence
  Description of Artificial Sequence: Synthetic oligonucleotide
  Antisense strand to SEQ ID NO: 679688
cucaacacucaauuaggau

SEQ ID NO: 679690 - RNA, 19 nt, Artificial Sequence
  Description of Artificial Sequence: Synthetic oligonucleotide
  Sense strand starting at position 759 of SEQ ID NO: 585940
gaguuuaauuucuuguagu

SEQ ID NO: 679691 - RNA, 19 nt, Artificial Sequence
  Description of Artificial Sequence: Synthetic oligonucleotide
  Antisense strand to SEQ ID NO: 679690
acuacaagaaauuaaacuc

SEQ ID NO: 679692 - RNA, 19 nt, Artificial Sequence
  Description of Artificial Sequence: Synthetic oligonucleotide
  Sense strand starting at position 973 of SEQ ID NO: 585940
ggucccuggaucuagaagu

SEQ ID NO: 679693 - RNA, 19 nt, Artificial Sequence
  Description of Artificial Sequence: Synthetic oligonucleotide
  Antisense strand to SEQ ID NO: 679692
acuucuagauccagggacc

SEQ ID NO: 679694 - RNA, 19 nt, Artificial Sequence
  Description of Artificial Sequence: Synthetic oligonucleotide
  Sense strand starting at position 993 of SEQ ID NO: 585940
uggauaguuaggcgagcua

SEQ ID NO: 679695 - RNA, 19 nt, Artificial Sequence
  Description of Artificial Sequence: Synthetic oligonucleotide
  Antisense strand to SEQ ID NO: 679694
uagcucgccuaacuaucca

SEQ ID NO: 679696 - RNA, 19 nt, Artificial Sequence
  Description of Artificial Sequence: Synthetic oligonucleotide
  Sense strand starting at position 1037 of SEQ ID NO: 585940
caaggagauuaggguacau

SEQ ID NO: 679697 - RNA, 19 nt, Artificial Sequence
  Description of Artificial Sequence: Synthetic oligonucleotide
  Antisense strand to SEQ ID NO: 679696
auguacccuaaucuccuug

SEQ ID NO: 679698 - RNA, 19 nt, Artificial Sequence
  Description of Artificial Sequence: Synthetic oligonucleotide
  Sense strand starting at position 1075 of SEQ ID NO: 585940
guccuuaggagguaugaac

SEQ ID NO: 679699 - RNA, 19 nt, Artificial Sequence
  Description of Artificial Sequence: Synthetic oligonucleotide
  Antisense strand to SEQ ID NO: 679698
guucauaccuccuaaggac

SEQ ID NO: 679700 - RNA, 19 nt, Artificial Sequence
  Description of Artificial Sequence: Synthetic oligonucleotide
  Sense strand starting at position 2475 of SEQ ID NO: 585940
cgcuccuauccugggagaa

SEQ ID NO: 679701 - RNA, 19 nt, Artificial Sequence
  Description of Artificial Sequence: Synthetic oligonucleotide
  Antisense strand to SEQ ID NO: 679700
uucucccaggauaggagcg

SEQ ID NO: 679702 - RNA, 19 nt, Artificial Sequence
  Description of Artificial Sequence: Synthetic oligonucleotide
  Sense strand starting at position 2476 of SEQ ID NO: 585940
gcuccuauccugggagaau

SEQ ID NO: 679703 - RNA, 19 nt, Artificial Sequence
  Description of Artificial Sequence: Synthetic oligonucleotide
  Antisense strand to SEQ ID NO: 679702
auucucccaggauaggagc

SEQ ID NO: 679704 - RNA, 19 nt, Artificial Sequence
  Description of Artificial Sequence: Synthetic oligonucleotide
  Sense strand starting at position 2477 of SEQ ID NO: 585940
cuccuauccugggagaauc

SEQ ID NO: 679705 - RNA, 19 nt, Artificial Sequence
  Description of Artificial Sequence: Synthetic oligonucleotide
  Antisense strand to SEQ ID NO: 679704
gauucucccaggauaggag

SEQ ID NO: 679706 - RNA, 19 nt, Artificial Sequence
  Description of Artificial Sequence: Synthetic oligonucleotide
  Sense strand starting at position 2487 of SEQ ID NO: 585940
gggagaaucugugccgcaa

SEQ ID NO: 679707 - RNA, 19 nt, Artificial Sequence
  Description of Artificial Sequence: Synthetic oligonucleotide
  Antisense strand to SEQ ID NO: 679706
uugcggcacagauucuccc

SEQ ID NO: 679708 - RNA, 19 nt, Artificial Sequence
  Description of Artificial Sequence: Synthetic oligonucleotide
  Sense strand starting at position 2664 of SEQ ID NO: 585940
uuucguggugaaggguuaa

SEQ ID NO: 679709 - RNA, 19 nt, Artificial Sequence
  Description of Artificial Sequence: Synthetic oligonucleotide
  Antisense strand to SEQ ID NO: 679708
uuaacccuucaccacgaaa

SEQ ID NO: 679710 - RNA, 19 nt, Artificial Sequence
  Description of Artificial Sequence: Synthetic oligonucleotide
  Sense strand starting at position 2733 of SEQ ID NO: 585940
ugaagcuagaugugggaaa

SEQ ID NO: 679711 - RNA, 19 nt, Artificial Sequence
  Description of Artificial Sequence: Synthetic oligonucleotide
  Antisense strand to SEQ ID NO: 679710
uuucccacaucuagcuuca

SEQ ID NO: 679712 - RNA, 19 nt, Artificial Sequence
  Description of Artificial Sequence: Synthetic oligonucleotide
  Sense strand starting at position 2837 of SEQ ID NO: 585940
cagugaagugugugcaaua

SEQ ID NO: 679713 - RNA, 19 nt, Artificial Sequence
  Description of Artificial Sequence: Synthetic oligonucleotide
  Antisense strand to SEQ ID NO: 679712
uauugcacacacuucacug

SEQ ID NO: 679714 - RNA, 19 nt, Artificial Sequence
  Description of Artificial Sequence: Synthetic oligonucleotide
  Sense strand starting at position 2899 of SEQ ID NO: 585940
cuguaucugucauuaagga

SEQ ID NO: 679715 - RNA, 19 nt, Artificial Sequence
  Description of Artificial Sequence: Synthetic oligonucleotide
  Antisense strand to SEQ ID NO: 679714
uccuuaaugacagauacag

SEQ ID NO: 679716 - RNA, 19 nt, Artificial Sequence
  Description of Artificial Sequence: Synthetic oligonucleotide
  Sense strand starting at position 2943 of SEQ ID NO: 585940
uccugucucugagccuuaa

SEQ ID NO: 679717 - RNA, 19 nt, Artificial Sequence
  Description of Artificial Sequence: Synthetic oligonucleotide
  Antisense strand to SEQ ID NO: 679716
uuaaggcucagagacagga

SEQ ID NO: 679718 - RNA, 19 nt, Artificial Sequence
  Description of Artificial Sequence: Synthetic oligonucleotide
  Sense strand starting at position 2967 of SEQ ID NO: 585940
ucaucugugcagugaggaa

SEQ ID NO: 679719 - RNA, 19 nt, Artificial Sequence
  Description of Artificial Sequence: Synthetic oligonucleotide
  Antisense strand to SEQ ID NO: 679718
uuccucacugcacagauga

SEQ ID NO: 679720 - RNA, 19 nt, Artificial Sequence
  Description of Artificial Sequence: Synthetic oligonucleotide
  Sense strand starting at position 3010 of SEQ ID NO: 585940
cugacuuguagguguagga

SEQ ID NO: 679721 - RNA, 19 nt, Artificial Sequence
  Description of Artificial Sequence: Synthetic oligonucleotide
  Antisense strand to SEQ ID NO: 679720
uccuacaccuacaagucag

SEQ ID NO: 679722 - RNA, 19 nt, Artificial Sequence
  Description of Artificial Sequence: Synthetic oligonucleotide
  Sense strand starting at position 3171 of SEQ ID NO: 585940
acagguguuggguaccuau

SEQ ID NO: 679723 - RNA, 19 nt, Artificial Sequence
  Description of Artificial Sequence: Synthetic oligonucleotide
  Antisense strand to SEQ ID NO: 679722
auagguacccaacaccugu

SEQ ID NO: 679724 - RNA, 19 nt, Artificial Sequence
  Description of Artificial Sequence: Synthetic oligonucleotide
  Sense strand starting at position 3189 of SEQ ID NO: 585940
uugugugcccaguacagaa

SEQ ID NO: 679725 - RNA, 19 nt, Artificial Sequence
  Description of Artificial Sequence: Synthetic oligonucleotide
  Antisense strand to SEQ ID NO: 679724
uucuguacugggcacacaa

SEQ ID NO: 679726 - RNA, 19 nt, Artificial Sequence
  Description of Artificial Sequence: Synthetic oligonucleotide
  Sense strand starting at position 3336 of SEQ ID NO: 585940
ggaauccuacuauguguca

SEQ ID NO: 679727 - RNA, 19 nt, Artificial Sequence
  Description of Artificial Sequence: Synthetic oligonucleotide
  Antisense strand to SEQ ID NO: 679726
ugacacauaguaggauucc

SEQ ID NO: 679728 - RNA, 19 nt, Artificial Sequence
  Description of Artificial Sequence: Synthetic oligonucleotide
  Sense strand starting at position 3339 of SEQ ID NO: 585940
auccuacuaugugucauua

SEQ ID NO: 679729 - RNA, 19 nt, Artificial Sequence
  Description of Artificial Sequence: Synthetic oligonucleotide
  Antisense strand to SEQ ID NO: 679728
uaaugacacauaguaggau

SEQ ID NO: 679730 - RNA, 19 nt, Artificial Sequence
  Description of Artificial Sequence: Synthetic oligonucleotide
  Sense strand starting at position 3343 of SEQ ID NO: 585940
uacuaugugucauuagagu

SEQ ID NO: 679731 - RNA, 19 nt, Artificial Sequence
  Description of Artificial Sequence: Synthetic oligonucleotide
  Antisense strand to SEQ ID NO: 679730
acucuaaugacacauagua

SEQ ID NO: 679732 - RNA, 19 nt, Artificial Sequence
  Description of Artificial Sequence: Synthetic oligonucleotide
  Sense strand starting at position 3352 of SEQ ID NO: 585940
ucauuagagucuuugacau

SEQ ID NO: 679733 - RNA, 19 nt, Artificial Sequence
  Description of Artificial Sequence: Synthetic oligonucleotide
  Antisense strand to SEQ ID NO: 679732
augucaaagacucuaauga

SEQ ID NO: 679734 - RNA, 19 nt, Artificial Sequence
  Description of Artificial Sequence: Synthetic oligonucleotide
  Sense strand starting at position 3354 of SEQ ID NO: 585940
auuagagucuuugacauac

SEQ ID NO: 679735 - RNA, 19 nt, Artificial Sequence
  Description of Artificial Sequence: Synthetic oligonucleotide
  Antisense strand to SEQ ID NO: 679734
guaugucaaagacucuaau

SEQ ID NO: 679736 - RNA, 19 nt, Artificial Sequence
  Description of Artificial Sequence: Synthetic oligonucleotide
  Sense strand starting at position 3356 of SEQ ID NO: 585940
uagagucuuugacauacag

SEQ ID NO: 679737 - RNA, 19 nt, Artificial Sequence
  Description of Artificial Sequence: Synthetic oligonucleotide
  Antisense strand to SEQ ID NO: 679736
cuguaugucaaagacucua

SEQ ID NO: 679738 - RNA, 19 nt, Artificial Sequence
  Description of Artificial Sequence: Synthetic oligonucleotide
  Sense strand starting at position 3386 of SEQ ID NO: 585940
cccaauuacucacagggaa

SEQ ID NO: 679739 - RNA, 19 nt, Artificial Sequence
  Description of Artificial Sequence: Synthetic oligonucleotide
  Antisense strand to SEQ ID NO: 679738
uucccugugaguaauuggg

SEQ ID NO: 679740 - RNA, 19 nt, Artificial Sequence
  Description of Artificial Sequence: Synthetic oligonucleotide
  Sense strand starting at position 3419 of SEQ ID NO: 585940
gagugaauggcuuacucaa

SEQ ID NO: 679741 - RNA, 19 nt, Artificial Sequence
  Description of Artificial Sequence: Synthetic oligonucleotide
  Antisense strand to SEQ ID NO: 679740
uugaguaagccauucacuc

SEQ ID NO: 679742 - RNA, 19 nt, Artificial Sequence
  Description of Artificial Sequence: Synthetic oligonucleotide
  Sense strand starting at position 3532 of SEQ ID NO: 585940
gggcaaagccucgaugucu

SEQ ID NO: 679743 - RNA, 19 nt, Artificial Sequence
  Description of Artificial Sequence: Synthetic oligonucleotide
  Antisense strand to SEQ ID NO: 679742
agacaucgaggcuuugccc

SEQ ID NO: 679744 - RNA, 19 nt, Artificial Sequence
  Description of Artificial Sequence: Synthetic oligonucleotide
  Sense strand starting at position 3713 of SEQ ID NO: 585940
ccaccuauugcuuagagcu

SEQ ID NO: 679745 - RNA, 19 nt, Artificial Sequence
  Description of Artificial Sequence: Synthetic oligonucleotide
  Antisense strand to SEQ ID NO: 679744
agcucuaagcaauaggugg

SEQ ID NO: 679746 - RNA, 19 nt, Artificial Sequence
  Description of Artificial Sequence: Synthetic oligonucleotide
  Sense strand starting at position 3744 of SEQ ID NO: 585940
ugguccucuccagguugau

SEQ ID NO: 679747 - RNA, 19 nt, Artificial Sequence
  Description of Artificial Sequence: Synthetic oligonucleotide
  Antisense strand to SEQ ID NO: 679746
aucaaccuggagaggacca

SEQ ID NO: 679748 - RNA, 19 nt, Artificial Sequence
  Description of Artificial Sequence: Synthetic oligonucleotide
  Sense strand starting at position 3836 of SEQ ID NO: 585940
ggcagaaucucacuuggug

SEQ ID NO: 679749 - RNA, 19 nt, Artificial Sequence
  Description of Artificial Sequence: Synthetic oligonucleotide
  Antisense strand to SEQ ID NO: 679748
caccaagugagauucugcc

SEQ ID NO: 679750 - RNA, 19 nt, Artificial Sequence
  Description of Artificial Sequence: Synthetic oligonucleotide
  Sense strand starting at position 130 of SEQ ID NO: 585941
aagauaacguccuugcuga

SEQ ID NO: 679751 - RNA, 19 nt, Artificial Sequence
  Description of Artificial Sequence: Synthetic oligonucleotide
  Antisense strand to SEQ ID NO: 679750
ucagcaaggacguuaucuu

SEQ ID NO: 679752 - RNA, 19 nt, Artificial Sequence
  Description of Artificial Sequence: Synthetic oligonucleotide
  Sense strand starting at position 362 of SEQ ID NO: 585941
aagguaugccugcacaaau

SEQ ID NO: 679753 - RNA, 19 nt, Artificial Sequence
  Description of Artificial Sequence: Synthetic oligonucleotide
  Antisense strand to SEQ ID NO: 679752
auuugugcaggcauaccuu

SEQ ID NO: 679754 - RNA, 19 nt, Artificial Sequence
  Description of Artificial Sequence: Synthetic oligonucleotide
  Sense strand starting at position 373 of SEQ ID NO: 585941
gcacaaauauauguuaagu

SEQ ID NO: 679755 - RNA, 19 nt, Artificial Sequence
  Description of Artificial Sequence: Synthetic oligonucleotide
  Antisense strand to SEQ ID NO: 679754
acuuaacauauauuugugc

SEQ ID NO: 679756 - RNA, 19 nt, Artificial Sequence
  Description of Artificial Sequence: Synthetic oligonucleotide
  Sense strand starting at position 503 of SEQ ID NO: 585941
ugaaucaugagauggucuu

SEQ ID NO: 679757 - RNA, 19 nt, Artificial Sequence
  Description of Artificial Sequence: Synthetic oligonucleotide
  Antisense strand to SEQ ID NO: 679756
aagaccaucucaugauuca

SEQ ID NO: 679758 - RNA, 19 nt, Artificial Sequence
  Description of Artificial Sequence: Synthetic oligonucleotide
  Sense strand starting at position 504 of SEQ ID NO: 585941
gaaucaugagauggucuuu

SEQ ID NO: 679759 - RNA, 19 nt, Artificial Sequence
  Description of Artificial Sequence: Synthetic oligonucleotide
  Antisense strand to SEQ ID NO: 679758
aaagaccaucucaugauuc

SEQ ID NO: 679760 - RNA, 19 nt, Artificial Sequence
  Description of Artificial Sequence: Synthetic oligonucleotide
  Sense strand starting at position 509 of SEQ ID NO: 585941
augagauggucuuuauguc

SEQ ID NO: 679761 - RNA, 19 nt, Artificial Sequence
  Description of Artificial Sequence: Synthetic oligonucleotide
  Antisense strand to SEQ ID NO: 679760
gacauaaagaccaucucau

SEQ ID NO: 679762 - RNA, 19 nt, Artificial Sequence
  Description of Artificial Sequence: Synthetic oligonucleotide
  Sense strand starting at position 515 of SEQ ID NO: 585941
uggucuuuauguccauuua

SEQ ID NO: 679763 - RNA, 19 nt, Artificial Sequence
  Description of Artificial Sequence: Synthetic oligonucleotide
  Antisense strand to SEQ ID NO: 679762
uaaauggacauaaagacca

SEQ ID NO: 679764 - RNA, 19 nt, Artificial Sequence
  Description of Artificial Sequence: Synthetic oligonucleotide
  Sense strand starting at position 553 of SEQ ID NO: 585941
auauauuccuuaccggcaa

SEQ ID NO: 679765 - RNA, 19 nt, Artificial Sequence
  Description of Artificial Sequence: Synthetic oligonucleotide
  Antisense strand to SEQ ID NO: 679764
uugccgguaaggaauauau

SEQ ID NO: 679766 - RNA, 19 nt, Artificial Sequence
  Description of Artificial Sequence: Synthetic oligonucleotide
  Sense strand starting at position 557 of SEQ ID NO: 585941
auuccuuaccggcaaucau

SEQ ID NO: 679767 - RNA, 19 nt, Artificial Sequence
  Description of Artificial Sequence: Synthetic oligonucleotide
  Antisense strand to SEQ ID NO: 679766
augauugccgguaaggaau

SEQ ID NO: 679768 - RNA, 19 nt, Artificial Sequence
  Description of Artificial Sequence: Synthetic oligonucleotide
  Sense strand starting at position 564 of SEQ ID NO: 585941
accggcaaucaucauguaa

SEQ ID NO: 679769 - RNA, 19 nt, Artificial Sequence
  Description of Artificial Sequence: Synthetic oligonucleotide
  Antisense strand to SEQ ID NO: 679768
uuacaugaugauugccggu

SEQ ID NO: 679770 - RNA, 19 nt, Artificial Sequence
  Description of Artificial Sequence: Synthetic oligonucleotide
  Sense strand starting at position 649 of SEQ ID NO: 585941
cuacuuuaacuguauaguu

SEQ ID NO: 679771 - RNA, 19 nt, Artificial Sequence
  Description of Artificial Sequence: Synthetic oligonucleotide
  Antisense strand to SEQ ID NO: 679770
aacuauacaguuaaaguag

SEQ ID NO: 679772 - RNA, 19 nt, Artificial Sequence
  Description of Artificial Sequence: Synthetic oligonucleotide
  Sense strand starting at position 674 of SEQ ID NO: 585941
cgaagaaaccaguguccuu

SEQ ID NO: 679773 - RNA, 19 nt, Artificial Sequence
  Description of Artificial Sequence: Synthetic oligonucleotide
  Antisense strand to SEQ ID NO: 679772
aaggacacugguuucuucg

SEQ ID NO: 679774 - RNA, 19 nt, Artificial Sequence
  Description of Artificial Sequence: Synthetic oligonucleotide
  Sense strand starting at position 677 of SEQ ID NO: 585941
agaaaccaguguccuuaaa

SEQ ID NO: 679775 - RNA, 19 nt, Artificial Sequence
  Description of Artificial Sequence: Synthetic oligonucleotide
  Antisense strand to SEQ ID NO: 679774
uuuaaggacacugguuucu

SEQ ID NO: 679776 - RNA, 19 nt, Artificial Sequence
  Description of Artificial Sequence: Synthetic oligonucleotide
  Sense strand starting at position 705 of SEQ ID NO: 585941
ugugguauauaauuccaua

SEQ ID NO: 679777 - RNA, 19 nt, Artificial Sequence
  Description of Artificial Sequence: Synthetic oligonucleotide
  Antisense strand to SEQ ID NO: 679776
uauggaauuauauaccaca

SEQ ID NO: 679778 - RNA, 19 nt, Artificial Sequence
  Description of Artificial Sequence: Synthetic oligonucleotide
  Sense strand starting at position 734 of SEQ ID NO: 585941
cuaugaauguuuguauucu

SEQ ID NO: 679779 - RNA, 19 nt, Artificial Sequence
  Description of Artificial Sequence: Synthetic oligonucleotide
  Antisense strand to SEQ ID NO: 679778
agaauacaaacauucauag

SEQ ID NO: 679780 - RNA, 19 nt, Artificial Sequence
  Description of Artificial Sequence: Synthetic oligonucleotide
  Sense strand starting at position 742 of SEQ ID NO: 585941
guuuguauucuauaccaug

SEQ ID NO: 679781 - RNA, 19 nt, Artificial Sequence
  Description of Artificial Sequence: Synthetic oligonucleotide
  Antisense strand to SEQ ID NO: 679780
caugguauagaauacaaac

SEQ ID NO: 679782 - RNA, 19 nt, Artificial Sequence
  Description of Artificial Sequence: Synthetic oligonucleotide
  Sense strand starting at position 972 of SEQ ID NO: 585941
ugaaucucuuucucguaaa

SEQ ID NO: 679783 - RNA, 19 nt, Artificial Sequence
  Description of Artificial Sequence: Synthetic oligonucleotide
  Antisense strand to SEQ ID NO: 679782
uuuacgagaaagagauuca

SEQ ID NO: 679784 - RNA, 19 nt, Artificial Sequence
  Description of Artificial Sequence: Synthetic oligonucleotide
  Sense strand starting at position 1390 of SEQ ID NO: 585941
cgaccauugugggcaauga

SEQ ID NO: 679785 - RNA, 19 nt, Artificial Sequence
  Description of Artificial Sequence: Synthetic oligonucleotide
  Antisense strand to SEQ ID NO: 679784
ucauugcccacaauggucg

SEQ ID NO: 679786 - RNA, 19 nt, Artificial Sequence
  Description of Artificial Sequence: Synthetic oligonucleotide
  Sense strand starting at position 1391 of SEQ ID NO: 585941
gaccauugugggcaaugau

SEQ ID NO: 679787 - RNA, 19 nt, Artificial Sequence
  Description of Artificial Sequence: Synthetic oligonucleotide
  Antisense strand to SEQ ID NO: 679786
aucauugcccacaaugguc

SEQ ID NO: 679788 - RNA, 19 nt, Artificial Sequence
  Description of Artificial Sequence: Synthetic oligonucleotide
  Sense strand starting at position 1529 of SEQ ID NO: 585941
aagcgaaaugcgcucaagu

SEQ ID NO: 679789 - RNA, 19 nt, Artificial Sequence
  Description of Artificial Sequence: Synthetic oligonucleotide
  Antisense strand to SEQ ID NO: 679788
acuugagcgcauuucgcuu

SEQ ID NO: 679790 - RNA, 19 nt, Artificial Sequence
  Description of Artificial Sequence: Synthetic oligonucleotide
  Sense strand starting at position 1530 of SEQ ID NO: 585941
agcgaaaugcgcucaaguc

SEQ ID NO: 679791 - RNA, 19 nt, Artificial Sequence
  Description of Artificial Sequence: Synthetic oligonucleotide
  Antisense strand to SEQ ID NO: 679790
gacuugagcgcauuucgcu

SEQ ID NO: 679792 - RNA, 19 nt, Artificial Sequence
  Description of Artificial Sequence: Synthetic oligonucleotide
  Sense strand starting at position 1834 of SEQ ID NO: 585941
agcccaggcgcgucaauua

SEQ ID NO: 679793 - RNA, 19 nt, Artificial Sequence
  Description of Artificial Sequence: Synthetic oligonucleotide
  Antisense strand to SEQ ID NO: 679792
uaauugacgcgccugggcu

SEQ ID NO: 679794 - RNA, 19 nt, Artificial Sequence
  Description of Artificial Sequence: Synthetic oligonucleotide
  Sense strand starting at position 1846 of SEQ ID NO: 585941
ucaauuacccgugagguuc

SEQ ID NO: 679795 - RNA, 19 nt, Artificial Sequence
  Description of Artificial Sequence: Synthetic oligonucleotide
  Antisense strand to SEQ ID NO: 679794
gaaccucacggguaauuga

SEQ ID NO: 679796 - RNA, 19 nt, Artificial Sequence
  Description of Artificial Sequence: Synthetic oligonucleotide
  Sense strand starting at position 3019 of SEQ ID NO: 585941
ugauaaagaugcuuaugua

SEQ ID NO: 679797 - RNA, 19 nt, Artificial Sequence
  Description of Artificial Sequence: Synthetic oligonucleotide
  Antisense strand to SEQ ID NO: 679796
uacauaagcaucuuuauca

SEQ ID NO: 679798 - RNA, 19 nt, Artificial Sequence
  Description of Artificial Sequence: Synthetic oligonucleotide
  Sense strand starting at position 3020 of SEQ ID NO: 585941
gauaaagaugcuuauguau

SEQ ID NO: 679799 - RNA, 19 nt, Artificial Sequence
  Description of Artificial Sequence: Synthetic oligonucleotide
  Antisense strand to SEQ ID NO: 679798
auacauaagcaucuuuauc

SEQ ID NO: 679800 - RNA, 19 nt, Artificial Sequence
  Description of Artificial Sequence: Synthetic oligonucleotide
  Sense strand starting at position 3113 of SEQ ID NO: 585941
ucgaaugaccuggauaggu

SEQ ID NO: 679801 - RNA, 19 nt, Artificial Sequence
  Description of Artificial Sequence: Synthetic oligonucleotide
  Antisense strand to SEQ ID NO: 679800
accuauccaggucauucga

SEQ ID NO: 679802 - RNA, 19 nt, Artificial Sequence
  Description of Artificial Sequence: Synthetic oligonucleotide
  Sense strand starting at position 3122 of SEQ ID NO: 585941
cuggauaggucacuuacuu

SEQ ID NO: 679803 - RNA, 19 nt, Artificial Sequence
  Description of Artificial Sequence: Synthetic oligonucleotide
  Antisense strand to SEQ ID NO: 679802
aaguaagugaccuauccag

SEQ ID NO: 679804 - RNA, 19 nt, Artificial Sequence
  Description of Artificial Sequence: Synthetic oligonucleotide
  Sense strand starting at position 3173 of SEQ ID NO: 585941
acagaccugcguuaucauu

SEQ ID NO: 679805 - RNA, 19 nt, Artificial Sequence
  Description of Artificial Sequence: Synthetic oligonucleotide
  Antisense strand to SEQ ID NO: 679804
aaugauaacgcaggucugu

SEQ ID NO: 679806 - RNA, 19 nt, Artificial Sequence
  Description of Artificial Sequence: Synthetic oligonucleotide
  Sense strand starting at position 3179 of SEQ ID NO: 585941
cugcguuaucauucugcua

SEQ ID NO: 679807 - RNA, 19 nt, Artificial Sequence
  Description of Artificial Sequence: Synthetic oligonucleotide
  Antisense strand to SEQ ID NO: 679806
uagcagaaugauaacgcag

SEQ ID NO: 679808 - RNA, 19 nt, Artificial Sequence
  Description of Artificial Sequence: Synthetic oligonucleotide
  Sense strand starting at position 3238 of SEQ ID NO: 585941
ccaggaccugccugacauu

SEQ ID NO: 679809 - RNA, 19 nt, Artificial Sequence
  Description of Artificial Sequence: Synthetic oligonucleotide
  Antisense strand to SEQ ID NO: 679808
aaugucaggcagguccugg

SEQ ID NO: 679810 - RNA, 19 nt, Artificial Sequence
  Description of Artificial Sequence: Synthetic oligonucleotide
  Sense strand starting at position 3345 of SEQ ID NO: 585941
aucuaaguugcgucuguua

SEQ ID NO: 679811 - RNA, 19 nt, Artificial Sequence
  Description of Artificial Sequence: Synthetic oligonucleotide
  Antisense strand to SEQ ID NO: 679810
uaacagacgcaacuuagau

SEQ ID NO: 679812 - RNA, 19 nt, Artificial Sequence
  Description of Artificial Sequence: Synthetic oligonucleotide
  Sense strand starting at position 3463 of SEQ ID NO: 585941
aguuaaacuccucgaaauu

SEQ ID NO: 679813 - RNA, 19 nt, Artificial Sequence
  Description of Artificial Sequence: Synthetic oligonucleotide
  Antisense strand to SEQ ID NO: 679812
aauuucgaggaguuuaacu

SEQ ID NO: 679814 - RNA, 19 nt, Artificial Sequence
  Description of Artificial Sequence: Synthetic oligonucleotide
  Sense strand starting at position 3464 of SEQ ID NO: 585941
guuaaacuccucgaaauug

SEQ ID NO: 679815 - RNA, 19 nt, Artificial Sequence
  Description of Artificial Sequence: Synthetic oligonucleotide
  Antisense strand to SEQ ID NO: 679814
caauuucgaggaguuuaac

SEQ ID NO: 679816 - RNA, 19 nt, Artificial Sequence
  Description of Artificial Sequence: Synthetic oligonucleotide
  Sense strand starting at position 3667 of SEQ ID NO: 585941
gggucaaauuaccugucaa

SEQ ID NO: 679817 - RNA, 19 nt, Artificial Sequence
  Description of Artificial Sequence: Synthetic oligonucleotide
  Antisense strand to SEQ ID NO: 679816
uugacagguaauuugaccc

SEQ ID NO: 679818 - RNA, 19 nt, Artificial Sequence
  Description of Artificial Sequence: Synthetic oligonucleotide
  Sense strand starting at position 3691 of SEQ ID NO: 585941
gcucuuggugaccacuuua

SEQ ID NO: 679819 - RNA, 19 nt, Artificial Sequence
  Description of Artificial Sequence: Synthetic oligonucleotide
  Antisense strand to SEQ ID NO: 679818
uaaaguggucaccaagagc

SEQ ID NO: 679820 - RNA, 19 nt, Artificial Sequence
  Description of Artificial Sequence: Synthetic oligonucleotide
  Sense strand starting at position 3814 of SEQ ID NO: 585941
acucuuaauguagaguuua

SEQ ID NO: 679821 - RNA, 19 nt, Artificial Sequence
  Description of Artificial Sequence: Synthetic oligonucleotide
  Antisense strand to SEQ ID NO: 679820
uaaacucuacauuaagagu

SEQ ID NO: 679822 - RNA, 19 nt, Artificial Sequence
  Description of Artificial Sequence: Synthetic oligonucleotide
  Sense strand starting at position 3827 of SEQ ID NO: 585941
aguuuaucuuccuccuaga

SEQ ID NO: 679823 - RNA, 19 nt, Artificial Sequence
  Description of Artificial Sequence: Synthetic oligonucleotide
  Antisense strand to SEQ ID NO: 679822
ucuaggaggaagauaaacu

SEQ ID NO: 679824 - RNA, 19 nt, Artificial Sequence
  Description of Artificial Sequence: Synthetic oligonucleotide
  Sense strand starting at position 3938 of SEQ ID NO: 585941
gaaacagauucugugaauu

SEQ ID NO: 679825 - RNA, 19 nt, Artificial Sequence
  Description of Artificial Sequence: Synthetic oligonucleotide
  Antisense strand to SEQ ID NO: 679824
aauucacagaaucuguuuc

SEQ ID NO: 679826 - RNA, 19 nt, Artificial Sequence
  Description of Artificial Sequence: Synthetic oligonucleotide
  Sense strand starting at position 3948 of SEQ ID NO: 585941
cugugaauuaagugacuug

SEQ ID NO: 679827 - RNA, 19 nt, Artificial Sequence
  Description of Artificial Sequence: Synthetic oligonucleotide
  Antisense strand to SEQ ID NO: 679826
caagucacuuaauucacag

SEQ ID NO: 679828 - RNA, 19 nt, Artificial Sequence
  Description of Artificial Sequence: Synthetic oligonucleotide
  Sense strand starting at position 3951 of SEQ ID NO: 585941
ugaauuaagugacuugaca

SEQ ID NO: 679829 - RNA, 19 nt, Artificial Sequence
  Description of Artificial Sequence: Synthetic oligonucleotide
  Antisense strand to SEQ ID NO: 679828
ugucaagucacuuaauuca

SEQ ID NO: 679830 - RNA, 19 nt, Artificial Sequence
  Description of Artificial Sequence: Synthetic oligonucleotide
  Sense strand starting at position 165 of SEQ ID NO: 585942
guagaaggauugcuugguu

SEQ ID NO: 679831 - RNA, 19 nt, Artificial Sequence
  Description of Artificial Sequence: Synthetic oligonucleotide
  Antisense strand to SEQ ID NO: 679830
aaccaagcaauccuucuac

SEQ ID NO: 679832 - RNA, 19 nt, Artificial Sequence
  Description of Artificial Sequence: Synthetic oligonucleotide
  Sense strand starting at position 168 of SEQ ID NO: 585942
gaaggauugcuugguugag

SEQ ID NO: 679833 - RNA, 19 nt, Artificial Sequence
  Description of Artificial Sequence: Synthetic oligonucleotide
  Antisense strand to SEQ ID NO: 679832
cucaaccaagcaauccuuc

SEQ ID NO: 679834 - RNA, 19 nt, Artificial Sequence
  Description of Artificial Sequence: Synthetic oligonucleotide
  Sense strand starting at position 364 of SEQ ID NO: 585942
auaugaaacuguggauucu

SEQ ID NO: 679835 - RNA, 19 nt, Artificial Sequence
  Description of Artificial Sequence: Synthetic oligonucleotide
  Antisense strand to SEQ ID NO: 679834
agaauccacaguuucauau

SEQ ID NO: 679836 - RNA, 19 nt, Artificial Sequence
  Description of Artificial Sequence: Synthetic oligonucleotide
  Sense strand starting at position 522 of SEQ ID NO: 585942
ugcugauuagcccguggga

SEQ ID NO: 679837 - RNA, 19 nt, Artificial Sequence
  Description of Artificial Sequence: Synthetic oligonucleotide
  Antisense strand to SEQ ID NO: 679836
ucccacgggcuaaucagca

SEQ ID NO: 679838 - RNA, 19 nt, Artificial Sequence
  Description of Artificial Sequence: Synthetic oligonucleotide
  Sense strand starting at position 524 of SEQ ID NO: 585942
cugauuagcccgugggaag

SEQ ID NO: 679839 - RNA, 19 nt, Artificial Sequence
  Description of Artificial Sequence: Synthetic oligonucleotide
  Antisense strand to SEQ ID NO: 679838
cuucccacgggcuaaucag

SEQ ID NO: 679840 - RNA, 19 nt, Artificial Sequence
  Description of Artificial Sequence: Synthetic oligonucleotide
  Sense strand starting at position 535 of SEQ ID NO: 585942
gugggaaggcauuagguuu

SEQ ID NO: 679841 - RNA, 19 nt, Artificial Sequence
  Description of Artificial Sequence: Synthetic oligonucleotide
  Antisense strand to SEQ ID NO: 679840
aaaccuaaugccuucccac

SEQ ID NO: 679842 - RNA, 19 nt, Artificial Sequence
  Description of Artificial Sequence: Synthetic oligonucleotide
  Sense strand starting at position 554 of SEQ ID NO: 585942
uuuaacagaugugaggaua

SEQ ID NO: 679843 - RNA, 19 nt, Artificial Sequence
  Description of Artificial Sequence: Synthetic oligonucleotide
  Antisense strand to SEQ ID NO: 679842
uauccucacaucuguuaaa

SEQ ID NO: 679844 - RNA, 19 nt, Artificial Sequence
  Description of Artificial Sequence: Synthetic oligonucleotide
  Sense strand starting at position 595 of SEQ ID NO: 585942
gcagguaccuaugaugagu

SEQ ID NO: 679845 - RNA, 19 nt, Artificial Sequence
  Description of Artificial Sequence: Synthetic oligonucleotide
  Antisense strand to SEQ ID NO: 679844
acucaucauagguaccugc

SEQ ID NO: 679846 - RNA, 19 nt, Artificial Sequence
  Description of Artificial Sequence: Synthetic oligonucleotide
  Sense strand starting at position 610 of SEQ ID NO: 585942
gaguacaggauaggucuua

SEQ ID NO: 679847 - RNA, 19 nt, Artificial Sequence
  Description of Artificial Sequence: Synthetic oligonucleotide
  Antisense strand to SEQ ID NO: 679846
uaagaccuauccuguacuc

SEQ ID NO: 679848 - RNA, 19 nt, Artificial Sequence
  Description of Artificial Sequence: Synthetic oligonucleotide
  Sense strand starting at position 668 of SEQ ID NO: 585942
ucgccauccuuagcacaga

SEQ ID NO: 679849 - RNA, 19 nt, Artificial Sequence
  Description of Artificial Sequence: Synthetic oligonucleotide
  Antisense strand to SEQ ID NO: 679848
ucugugcuaaggauggcga

SEQ ID NO: 679850 - RNA, 19 nt, Artificial Sequence
  Description of Artificial Sequence: Synthetic oligonucleotide
  Sense strand starting at position 687 of SEQ ID NO: 585942
gugaguaaaucaugauuaa

SEQ ID NO: 679851 - RNA, 19 nt, Artificial Sequence
  Description of Artificial Sequence: Synthetic oligonucleotide
  Antisense strand to SEQ ID NO: 679850
uuaaucaugauuuacucac

SEQ ID NO: 679852 - RNA, 19 nt, Artificial Sequence
  Description of Artificial Sequence: Synthetic oligonucleotide
  Sense strand starting at position 820 of SEQ ID NO: 585942
ccgccaagccuuuggguaa

SEQ ID NO: 679853 - RNA, 19 nt, Artificial Sequence
  Description of Artificial Sequence: Synthetic oligonucleotide
  Antisense strand to SEQ ID NO: 679852
uuacccaaaggcuuggcgg

SEQ ID NO: 679854 - RNA, 19 nt, Artificial Sequence
  Description of Artificial Sequence: Synthetic oligonucleotide
  Sense strand starting at position 2302 of SEQ ID NO: 585942
gcccauuaggguuauaguc

SEQ ID NO: 679855 - RNA, 19 nt, Artificial Sequence
  Description of Artificial Sequence: Synthetic oligonucleotide
  Antisense strand to SEQ ID NO: 679854
gacuauaacccuaaugggc

SEQ ID NO: 679856 - RNA, 19 nt, Artificial Sequence
  Description of Artificial Sequence: Synthetic oligonucleotide
  Sense strand starting at position 2304 of SEQ ID NO: 585942
ccauuaggguuauagucau

SEQ ID NO: 679857 - RNA, 19 nt, Artificial Sequence
  Description of Artificial Sequence: Synthetic oligonucleotide
  Antisense strand to SEQ ID NO: 679856
augacuauaacccuaaugg

SEQ ID NO: 679858 - RNA, 19 nt, Artificial Sequence
  Description of Artificial Sequence: Synthetic oligonucleotide
  Sense strand starting at position 2310 of SEQ ID NO: 585942
ggguuauagucauaauaaa

SEQ ID NO: 679859 - RNA, 19 nt, Artificial Sequence
  Description of Artificial Sequence: Synthetic oligonucleotide
  Antisense strand to SEQ ID NO: 679858
uuuauuaugacuauaaccc

SEQ ID NO: 679860 - RNA, 19 nt, Artificial Sequence
  Description of Artificial Sequence: Synthetic oligonucleotide
  Sense strand starting at position 2337 of SEQ ID NO: 585942
uuaaaugaaguguguccaa

SEQ ID NO: 679861 - RNA, 19 nt, Artificial Sequence
  Description of Artificial Sequence: Synthetic oligonucleotide
  Antisense strand to SEQ ID NO: 679860
uuggacacacuucauuuaa

SEQ ID NO: 679862 - RNA, 19 nt, Artificial Sequence
  Description of Artificial Sequence: Synthetic oligonucleotide
  Sense strand starting at position 2397 of SEQ ID NO: 585942
agucuaggcagaggaguuu

SEQ ID NO: 679863 - RNA, 19 nt, Artificial Sequence
  Description of Artificial Sequence: Synthetic oligonucleotide
  Antisense strand to SEQ ID NO: 679862
aaacuccucugccuagacu

SEQ ID NO: 679864 - RNA, 19 nt, Artificial Sequence
  Description of Artificial Sequence: Synthetic oligonucleotide
  Sense strand starting at position 2406 of SEQ ID NO: 585942
agaggaguuucucaccuuc

SEQ ID NO: 679865 - RNA, 19 nt, Artificial Sequence
  Description of Artificial Sequence: Synthetic oligonucleotide
  Antisense strand to SEQ ID NO: 679864
gaaggugagaaacuccucu

SEQ ID NO: 679866 - RNA, 19 nt, Artificial Sequence
  Description of Artificial Sequence: Synthetic oligonucleotide
  Sense strand starting at position 2408 of SEQ ID NO: 585942
aggaguuucucaccuucua

SEQ ID NO: 679867 - RNA, 19 nt, Artificial Sequence
  Description of Artificial Sequence: Synthetic oligonucleotide
  Antisense strand to SEQ ID NO: 679866
uagaaggugagaaacuccu

SEQ ID NO: 679868 - RNA, 19 nt, Artificial Sequence
  Description of Artificial Sequence: Synthetic oligonucleotide
  Sense strand starting at position 2441 of SEQ ID NO: 585942
gugugcaaacuauaguuaa

SEQ ID NO: 679869 - RNA, 19 nt, Artificial Sequence
  Description of Artificial Sequence: Synthetic oligonucleotide
  Antisense strand to SEQ ID NO: 679868
uuaacuauaguuugcacac

SEQ ID NO: 679870 - RNA, 19 nt, Artificial Sequence
  Description of Artificial Sequence: Synthetic oligonucleotide
  Sense strand starting at position 2479 of SEQ ID NO: 585942
cggaauggcuucuccaaag

SEQ ID NO: 679871 - RNA, 19 nt, Artificial Sequence
  Description of Artificial Sequence: Synthetic oligonucleotide
  Antisense strand to SEQ ID NO: 679870
cuuuggagaagccauuccg

SEQ ID NO: 679872 - RNA, 19 nt, Artificial Sequence
  Description of Artificial Sequence: Synthetic oligonucleotide
  Sense strand starting at position 2545 of SEQ ID NO: 585942
acagucuuuccagacgaug

SEQ ID NO: 679873 - RNA, 19 nt, Artificial Sequence
  Description of Artificial Sequence: Synthetic oligonucleotide
  Antisense strand to SEQ ID NO: 679872
caucgucuggaaagacugu

SEQ ID NO: 679874 - RNA, 19 nt, Artificial Sequence
  Description of Artificial Sequence: Synthetic oligonucleotide
  Sense strand starting at position 2547 of SEQ ID NO: 585942
agucuuuccagacgauguu

SEQ ID NO: 679875 - RNA, 19 nt, Artificial Sequence
  Description of Artificial Sequence: Synthetic oligonucleotide
  Antisense strand to SEQ ID NO: 679874
aacaucgucuggaaagacu

SEQ ID NO: 679876 - RNA, 19 nt, Artificial Sequence
  Description of Artificial Sequence: Synthetic oligonucleotide
  Sense strand starting at position 2548 of SEQ ID NO: 585942
gucuuuccagacgauguua

SEQ ID NO: 679877 - RNA, 19 nt, Artificial Sequence
  Description of Artificial Sequence: Synthetic oligonucleotide
  Antisense strand to SEQ ID NO: 679876
uaacaucgucuggaaagac

SEQ ID NO: 679878 - RNA, 19 nt, Artificial Sequence
  Description of Artificial Sequence: Synthetic oligonucleotide
  Sense strand starting at position 2556 of SEQ ID NO: 585942
agacgauguuagugcauuu

SEQ ID NO: 679879 - RNA, 19 nt, Artificial Sequence
  Description of Artificial Sequence: Synthetic oligonucleotide
  Antisense strand to SEQ ID NO: 679878
aaaugcacuaacaucgucu

SEQ ID NO: 679880 - RNA, 19 nt, Artificial Sequence
  Description of Artificial Sequence: Synthetic oligonucleotide
  Sense strand starting at position 2591 of SEQ ID NO: 585942
cagguuuccacgcaagguu

SEQ ID NO: 679881 - RNA, 19 nt, Artificial Sequence
  Description of Artificial Sequence: Synthetic oligonucleotide
  Antisense strand to SEQ ID NO: 679880
aaccuugcguggaaaccug

SEQ ID NO: 679882 - RNA, 19 nt, Artificial Sequence
  Description of Artificial Sequence: Synthetic oligonucleotide
  Sense strand starting at position 2606 of SEQ ID NO: 585942
gguugauccugccugcacu

SEQ ID NO: 679883 - RNA, 19 nt, Artificial Sequence
  Description of Artificial Sequence: Synthetic oligonucleotide
  Antisense strand to SEQ ID NO: 679882
agugcaggcaggaucaacc

SEQ ID NO: 679884 - RNA, 19 nt, Artificial Sequence
  Description of Artificial Sequence: Synthetic oligonucleotide
  Sense strand starting at position 2669 of SEQ ID NO: 585942
ccuaaauaauuguggaaua

SEQ ID NO: 679885 - RNA, 19 nt, Artificial Sequence
  Description of Artificial Sequence: Synthetic oligonucleotide
  Antisense strand to SEQ ID NO: 679884
uauuccacaauuauuuagg

SEQ ID NO: 679886 - RNA, 19 nt, Artificial Sequence
  Description of Artificial Sequence: Synthetic oligonucleotide
  Sense strand starting at position 2683 of SEQ ID NO: 585942
gaauaucgaucccaggaau

SEQ ID NO: 679887 - RNA, 19 nt, Artificial Sequence
  Description of Artificial Sequence: Synthetic oligonucleotide
  Antisense strand to SEQ ID NO: 679886
auuccugggaucgauauuc

SEQ ID NO: 679888 - RNA, 19 nt, Artificial Sequence
  Description of Artificial Sequence: Synthetic oligonucleotide
  Sense strand starting at position 2746 of SEQ ID NO: 585942
gugccaguggucucagcau

SEQ ID NO: 679889 - RNA, 19 nt, Artificial Sequence
  Description of Artificial Sequence: Synthetic oligonucleotide
  Antisense strand to SEQ ID NO: 679888
augcugagaccacuggcac

SEQ ID NO: 679890 - RNA, 19 nt, Artificial Sequence
  Description of Artificial Sequence: Synthetic oligonucleotide
  Sense strand starting at position 2960 of SEQ ID NO: 585942
acaugagcauuuguguuua

SEQ ID NO: 679891 - RNA, 19 nt, Artificial Sequence
  Description of Artificial Sequence: Synthetic oligonucleotide
  Antisense strand to SEQ ID NO: 679890
uaaacacaaaugcucaugu

SEQ ID NO: 679892 - RNA, 19 nt, Artificial Sequence
  Description of Artificial Sequence: Synthetic oligonucleotide
  Sense strand starting at position 2962 of SEQ ID NO: 585942
augagcauuuguguuuaau

SEQ ID NO: 679893 - RNA, 19 nt, Artificial Sequence
  Description of Artificial Sequence: Synthetic oligonucleotide
  Antisense strand to SEQ ID NO: 679892
auuaaacacaaaugcucau

SEQ ID NO: 679894 - RNA, 19 nt, Artificial Sequence
  Description of Artificial Sequence: Synthetic oligonucleotide
  Sense strand starting at position 2964 of SEQ ID NO: 585942
gagcauuuguguuuaauca

SEQ ID NO: 679895 - RNA, 19 nt, Artificial Sequence
  Description of Artificial Sequence: Synthetic oligonucleotide
  Antisense strand to SEQ ID NO: 679894
ugauuaaacacaaaugcuc

SEQ ID NO: 679896 - RNA, 19 nt, Artificial Sequence
  Description of Artificial Sequence: Synthetic oligonucleotide
  Sense strand starting at position 2971 of SEQ ID NO: 585942
uguguuuaaucaucucagu

SEQ ID NO: 679897 - RNA, 19 nt, Artificial Sequence
  Description of Artificial Sequence: Synthetic oligonucleotide
  Antisense strand to SEQ ID NO: 679896
acugagaugauuaaacaca

SEQ ID NO: 679898 - RNA, 19 nt, Artificial Sequence
  Description of Artificial Sequence: Synthetic oligonucleotide
  Sense strand starting at position 2974 of SEQ ID NO: 585942
guuuaaucaucucaguauu

SEQ ID NO: 679899 - RNA, 19 nt, Artificial Sequence
  Description of Artificial Sequence: Synthetic oligonucleotide
  Antisense strand to SEQ ID NO: 679898
aauacugagaugauuaaac

SEQ ID NO: 679900 - RNA, 19 nt, Artificial Sequence
  Description of Artificial Sequence: Synthetic oligonucleotide
  Sense strand starting at position 3309 of SEQ ID NO: 585942
agagcucagguuugguaau

SEQ ID NO: 679901 - RNA, 19 nt, Artificial Sequence
  Description of Artificial Sequence: Synthetic oligonucleotide
  Antisense strand to SEQ ID NO: 679900
auuaccaaaccugagcucu

SEQ ID NO: 679902 - RNA, 19 nt, Artificial Sequence
  Description of Artificial Sequence: Synthetic oligonucleotide
  Sense strand starting at position 3311 of SEQ ID NO: 585942
agcucagguuugguaauau

SEQ ID NO: 679903 - RNA, 19 nt, Artificial Sequence
  Description of Artificial Sequence: Synthetic oligonucleotide
  Antisense strand to SEQ ID NO: 679902
auauuaccaaaccugagcu

SEQ ID NO: 679904 - RNA, 19 nt, Artificial Sequence
  Description of Artificial Sequence: Synthetic oligonucleotide
  Sense strand starting at position 3414 of SEQ ID NO: 585942
gugaguucagcaugugcca

SEQ ID NO: 679905 - RNA, 19 nt, Artificial Sequence
  Description of Artificial Sequence: Synthetic oligonucleotide
  Antisense strand to SEQ ID NO: 679904
uggcacaugcugaacucac

SEQ ID NO: 679906 - RNA, 19 nt, Artificial Sequence
  Description of Artificial Sequence: Synthetic oligonucleotide
  Sense strand starting at position 3444 of SEQ ID NO: 585942
uuguaucauuggcuacaga

SEQ ID NO: 679907 - RNA, 19 nt, Artificial Sequence
  Description of Artificial Sequence: Synthetic oligonucleotide
  Antisense strand to SEQ ID NO: 679906
ucuguagccaaugauacaa

SEQ ID NO: 679908 - RNA, 19 nt, Artificial Sequence
  Description of Artificial Sequence: Synthetic oligonucleotide
  Sense strand starting at position 3618 of SEQ ID NO: 585942
agcacugugagguacuaau

SEQ ID NO: 679909 - RNA, 19 nt, Artificial Sequence
  Description of Artificial Sequence: Synthetic oligonucleotide
  Antisense strand to SEQ ID NO: 679908
auuaguaccucacagugcu

SEQ ID NO: 679910 - RNA, 19 nt, Artificial Sequence
  Description of Artificial Sequence: Synthetic oligonucleotide
  Sense strand starting at position 1 of SEQ ID NO: 585943
ucaugagaaguacagcauu

SEQ ID NO: 679911 - RNA, 19 nt, Artificial Sequence
  Description of Artificial Sequence: Synthetic oligonucleotide
  Antisense strand to SEQ ID NO: 679910
aaugcuguacuucucauga

SEQ ID NO: 679912 - RNA, 19 nt, Artificial Sequence
  Description of Artificial Sequence: Synthetic oligonucleotide
  Sense strand starting at position 46 of SEQ ID NO: 585943
ucuauaugucaguaguuau

SEQ ID NO: 679913 - RNA, 19 nt, Artificial Sequence
  Description of Artificial Sequence: Synthetic oligonucleotide
  Antisense strand to SEQ ID NO: 679912
auaacuacugacauauaga

SEQ ID NO: 679914 - RNA, 19 nt, Artificial Sequence
  Description of Artificial Sequence: Synthetic oligonucleotide
  Sense strand starting at position 125 of SEQ ID NO: 585943
aucuaacuccuguaguauu

SEQ ID NO: 679915 - RNA, 19 nt, Artificial Sequence
  Description of Artificial Sequence: Synthetic oligonucleotide
  Antisense strand to SEQ ID NO: 679914
aauacuacaggaguuagau

SEQ ID NO: 679916 - RNA, 19 nt, Artificial Sequence
  Description of Artificial Sequence: Synthetic oligonucleotide
  Sense strand starting at position 214 of SEQ ID NO: 585943
ccugaagaaucccuucuga

SEQ ID NO: 679917 - RNA, 19 nt, Artificial Sequence
  Description of Artificial Sequence: Synthetic oligonucleotide
  Antisense strand to SEQ ID NO: 679916
ucagaagggauucuucagg

SEQ ID NO: 679918 - RNA, 19 nt, Artificial Sequence
  Description of Artificial Sequence: Synthetic oligonucleotide
  Sense strand starting at position 303 of SEQ ID NO: 585943
ugcuaacugccuggaauuu

SEQ ID NO: 679919 - RNA, 19 nt, Artificial Sequence
  Description of Artificial Sequence: Synthetic oligonucleotide
  Antisense strand to SEQ ID NO: 679918
aaauuccaggcaguuagca

SEQ ID NO: 679920 - RNA, 19 nt, Artificial Sequence
  Description of Artificial Sequence: Synthetic oligonucleotide
  Sense strand starting at position 434 of SEQ ID NO: 585943
ucuaguaggacuugguuaa

SEQ ID NO: 679921 - RNA, 19 nt, Artificial Sequence
  Description of Artificial Sequence: Synthetic oligonucleotide
  Antisense strand to SEQ ID NO: 679920
uuaaccaaguccuacuaga

SEQ ID NO: 679922 - RNA, 19 nt, Artificial Sequence
  Description of Artificial Sequence: Synthetic oligonucleotide
  Sense strand starting at position 435 of SEQ ID NO: 585943
cuaguaggacuugguuaaa

SEQ ID NO: 679923 - RNA, 19 nt, Artificial Sequence
  Description of Artificial Sequence: Synthetic oligonucleotide
  Antisense strand to SEQ ID NO: 679922
uuuaaccaaguccuacuag

SEQ ID NO: 679924 - RNA, 19 nt, Artificial Sequence
  Description of Artificial Sequence: Synthetic oligonucleotide
  Sense strand starting at position 620 of SEQ ID NO: 585943
cauacuucuguguagguaa

SEQ ID NO: 679925 - RNA, 19 nt, Artificial Sequence
  Description of Artificial Sequence: Synthetic oligonucleotide
  Antisense strand to SEQ ID NO: 679924
uuaccuacacagaaguaug

SEQ ID NO: 679926 - RNA, 19 nt, Artificial Sequence
  Description of Artificial Sequence: Synthetic oligonucleotide
  Sense strand starting at position 623 of SEQ ID NO: 585943
acuucuguguagguaaaca

SEQ ID NO: 679927 - RNA, 19 nt, Artificial Sequence
  Description of Artificial Sequence: Synthetic oligonucleotide
  Antisense strand to SEQ ID NO: 679926
uguuuaccuacacagaagu

SEQ ID NO: 679928 - RNA, 19 nt, Artificial Sequence
  Description of Artificial Sequence: Synthetic oligonucleotide
  Sense strand starting at position 631 of SEQ ID NO: 585943
guagguaaacagugggaaa

SEQ ID NO: 679929 - RNA, 19 nt, Artificial Sequence
  Description of Artificial Sequence: Synthetic oligonucleotide
  Antisense strand to SEQ ID NO: 679928
uuucccacuguuuaccuac

SEQ ID NO: 679930 - RNA, 19 nt, Artificial Sequence
  Description of Artificial Sequence: Synthetic oligonucleotide
  Sense strand starting at position 814 of SEQ ID NO: 585943
ugcauacagcacuauagaa

SEQ ID NO: 679931 - RNA, 19 nt, Artificial Sequence
  Description of Artificial Sequence: Synthetic oligonucleotide
  Antisense strand to SEQ ID NO: 679930
uucuauagugcuguaugca

SEQ ID NO: 679932 - RNA, 19 nt, Artificial Sequence
  Description of Artificial Sequence: Synthetic oligonucleotide
  Sense strand starting at position 826 of SEQ ID NO: 585943
uauagaaagugugccucaa

SEQ ID NO: 679933 - RNA, 19 nt, Artificial Sequence
  Description of Artificial Sequence: Synthetic oligonucleotide
  Antisense strand to SEQ ID NO: 679932
uugaggcacacuuucuaua

SEQ ID NO: 679934 - RNA, 19 nt, Artificial Sequence
  Description of Artificial Sequence: Synthetic oligonucleotide
  Sense strand starting at position 828 of SEQ ID NO: 585943
uagaaagugugccucaaac

SEQ ID NO: 679935 - RNA, 19 nt, Artificial Sequence
  Description of Artificial Sequence: Synthetic oligonucleotide
  Antisense strand to SEQ ID NO: 679934
guuugaggcacacuuucua

SEQ ID NO: 679936 - RNA, 19 nt, Artificial Sequence
  Description of Artificial Sequence: Synthetic oligonucleotide
  Sense strand starting at position 830 of SEQ ID NO: 585943
gaaagugugccucaaacuu

SEQ ID NO: 679937 - RNA, 19 nt, Artificial Sequence
  Description of Artificial Sequence: Synthetic oligonucleotide
  Antisense strand to SEQ ID NO: 679936
aaguuugaggcacacuuuc

SEQ ID NO: 679938 - RNA, 19 nt, Artificial Sequence
  Description of Artificial Sequence: Synthetic oligonucleotide
  Sense strand starting at position 839 of SEQ ID NO: 585943
ccucaaacuugguuugauu

SEQ ID NO: 679939 - RNA, 19 nt, Artificial Sequence
  Description of Artificial Sequence: Synthetic oligonucleotide
  Antisense strand to SEQ ID NO: 679938
aaucaaaccaaguuugagg

SEQ ID NO: 679940 - RNA, 19 nt, Artificial Sequence
  Description of Artificial Sequence: Synthetic oligonucleotide
  Sense strand starting at position 1214 of SEQ ID NO: 585943
aaguguuggcuggaacaau

SEQ ID NO: 679941 - RNA, 19 nt, Artificial Sequence
  Description of Artificial Sequence: Synthetic oligonucleotide
  Antisense strand to SEQ ID NO: 679940
auuguuccagccaacacuu

SEQ ID NO: 679942 - RNA, 19 nt, Artificial Sequence
  Description of Artificial Sequence: Synthetic oligonucleotide
  Sense strand starting at position 1224 of SEQ ID NO: 585943
uggaacaauuuauagcaaa

SEQ ID NO: 679943 - RNA, 19 nt, Artificial Sequence
  Description of Artificial Sequence: Synthetic oligonucleotide
  Antisense strand to SEQ ID NO: 679942
uuugcuauaaauuguucca

SEQ ID NO: 679944 - RNA, 19 nt, Artificial Sequence
  Description of Artificial Sequence: Synthetic oligonucleotide
  Sense strand starting at position 1478 of SEQ ID NO: 585943
ggaggguguugcuuggaga

SEQ ID NO: 679945 - RNA, 19 nt, Artificial Sequence
  Description of Artificial Sequence: Synthetic oligonucleotide
  Antisense strand to SEQ ID NO: 679944
ucuccaagcaacacccucc

SEQ ID NO: 679946 - RNA, 19 nt, Artificial Sequence
  Description of Artificial Sequence: Synthetic oligonucleotide
  Sense strand starting at position 1479 of SEQ ID NO: 585943
gaggguguugcuuggagaa

SEQ ID NO: 679947 - RNA, 19 nt, Artificial Sequence
  Description of Artificial Sequence: Synthetic oligonucleotide
  Antisense strand to SEQ ID NO: 679946
uucuccaagcaacacccuc

SEQ ID NO: 679948 - RNA, 19 nt, Artificial Sequence
  Description of Artificial Sequence: Synthetic oligonucleotide
  Sense strand starting at position 1620 of SEQ ID NO: 585943
agagacagcguuuaccuaa

SEQ ID NO: 679949 - RNA, 19 nt, Artificial Sequence
  Description of Artificial Sequence: Synthetic oligonucleotide
  Antisense strand to SEQ ID NO: 679948
uuagguaaacgcugucucu

SEQ ID NO: 679950 - RNA, 19 nt, Artificial Sequence
  Description of Artificial Sequence: Synthetic oligonucleotide
  Sense strand starting at position 3005 of SEQ ID NO: 585943
gauguucgacuccaaacau

SEQ ID NO: 679951 - RNA, 19 nt, Artificial Sequence
  Description of Artificial Sequence: Synthetic oligonucleotide
  Antisense strand to SEQ ID NO: 679950
auguuuggagucgaacauc

SEQ ID NO: 679952 - RNA, 19 nt, Artificial Sequence
  Description of Artificial Sequence: Synthetic oligonucleotide
  Sense strand starting at position 3041 of SEQ ID NO: 585943
ucagguuacuccuccuuga

SEQ ID NO: 679953 - RNA, 19 nt, Artificial Sequence
  Description of Artificial Sequence: Synthetic oligonucleotide
  Antisense strand to SEQ ID NO: 679952
ucaaggaggaguaaccuga

SEQ ID NO: 679954 - RNA, 19 nt, Artificial Sequence
  Description of Artificial Sequence: Synthetic oligonucleotide
  Sense strand starting at position 3113 of SEQ ID NO: 585943
ucucuaauucggcaaagac

SEQ ID NO: 679955 - RNA, 19 nt, Artificial Sequence
  Description of Artificial Sequence: Synthetic oligonucleotide
  Antisense strand to SEQ ID NO: 679954
gucuuugccgaauuagaga

SEQ ID NO: 679956 - RNA, 19 nt, Artificial Sequence
  Description of Artificial Sequence: Synthetic oligonucleotide
  Sense strand starting at position 3129 of SEQ ID NO: 585943
gacggugaugacuguauau

SEQ ID NO: 679957 - RNA, 19 nt, Artificial Sequence
  Description of Artificial Sequence: Synthetic oligonucleotide
  Antisense strand to SEQ ID NO: 679956
auauacagucaucaccguc

SEQ ID NO: 679958 - RNA, 19 nt, Artificial Sequence
  Description of Artificial Sequence: Synthetic oligonucleotide
  Sense strand starting at position 3131 of SEQ ID NO: 585943
cggugaugacuguauauau

SEQ ID NO: 679959 - RNA, 19 nt, Artificial Sequence
  Description of Artificial Sequence: Synthetic oligonucleotide
  Antisense strand to SEQ ID NO: 679958
auauauacagucaucaccg

SEQ ID NO: 679960 - RNA, 19 nt, Artificial Sequence
  Description of Artificial Sequence: Synthetic oligonucleotide
  Sense strand starting at position 3152 of SEQ ID NO: 585943
aggccaauuccguaaguaa

SEQ ID NO: 679961 - RNA, 19 nt, Artificial Sequence
  Description of Artificial Sequence: Synthetic oligonucleotide
  Antisense strand to SEQ ID NO: 679960
uuacuuacggaauuggccu

SEQ ID NO: 679962 - RNA, 19 nt, Artificial Sequence
  Description of Artificial Sequence: Synthetic oligonucleotide
  Sense strand starting at position 3301 of SEQ ID NO: 585943
ggugcaguguauuuguuua

SEQ ID NO: 679963 - RNA, 19 nt, Artificial Sequence
  Description of Artificial Sequence: Synthetic oligonucleotide
  Antisense strand to SEQ ID NO: 679962
uaaacaaauacacugcacc

SEQ ID NO: 679964 - RNA, 19 nt, Artificial Sequence
  Description of Artificial Sequence: Synthetic oligonucleotide
  Sense strand starting at position 3303 of SEQ ID NO: 585943
ugcaguguauuuguuuauu

SEQ ID NO: 679965 - RNA, 19 nt, Artificial Sequence
  Description of Artificial Sequence: Synthetic oligonucleotide
  Antisense strand to SEQ ID NO: 679964
aauaaacaaauacacugca

SEQ ID NO: 679966 - RNA, 19 nt, Artificial Sequence
  Description of Artificial Sequence: Synthetic oligonucleotide
  Sense strand starting at position 3325 of SEQ ID NO: 585943
gcgugugaucuguuuaucu

SEQ ID NO: 679967 - RNA, 19 nt, Artificial Sequence
  Description of Artificial Sequence: Synthetic oligonucleotide
  Antisense strand to SEQ ID NO: 679966
agauaaacagaucacacgc

SEQ ID NO: 679968 - RNA, 19 nt, Artificial Sequence
  Description of Artificial Sequence: Synthetic oligonucleotide
  Sense strand starting at position 3499 of SEQ ID NO: 585943
ccuucuugccuugacuaga

SEQ ID NO: 679969 - RNA, 19 nt, Artificial Sequence
  Description of Artificial Sequence: Synthetic oligonucleotide
  Antisense strand to SEQ ID NO: 679968
ucuagucaaggcaagaagg

SEQ ID NO: 679970 - RNA, 19 nt, Artificial Sequence
  Description of Artificial Sequence: Synthetic oligonucleotide
  Sense strand starting at position 3502 of SEQ ID NO: 585943
ucuugccuugacuagaaga

SEQ ID NO: 679971 - RNA, 19 nt, Artificial Sequence
  Description of Artificial Sequence: Synthetic oligonucleotide
  Antisense strand to SEQ ID NO: 679970
ucuucuagucaaggcaaga

SEQ ID NO: 679972 - RNA, 19 nt, Artificial Sequence
  Description of Artificial Sequence: Synthetic oligonucleotide
  Sense strand starting at position 3522 of SEQ ID NO: 585943
uuuagagauugggcacuuu

SEQ ID NO: 679973 - RNA, 19 nt, Artificial Sequence
  Description of Artificial Sequence: Synthetic oligonucleotide
  Antisense strand to SEQ ID NO: 679972
aaagugcccaaucucuaaa

SEQ ID NO: 679974 - RNA, 19 nt, Artificial Sequence
  Description of Artificial Sequence: Synthetic oligonucleotide
  Sense strand starting at position 3612 of SEQ ID NO: 585943
aaggaugagucaccuuuau

SEQ ID NO: 679975 - RNA, 19 nt, Artificial Sequence
  Description of Artificial Sequence: Synthetic oligonucleotide
  Antisense strand to SEQ ID NO: 679974
auaaaggugacucauccuu

SEQ ID NO: 679976 - RNA, 19 nt, Artificial Sequence
  Description of Artificial Sequence: Synthetic oligonucleotide
  Sense strand starting at position 3858 of SEQ ID NO: 585943
cuaucuaaggagugaguaa

SEQ ID NO: 679977 - RNA, 19 nt, Artificial Sequence
  Description of Artificial Sequence: Synthetic oligonucleotide
  Antisense strand to SEQ ID NO: 679976
uuacucacuccuuagauag

SEQ ID NO: 679978 - RNA, 19 nt, Artificial Sequence
  Description of Artificial Sequence: Synthetic oligonucleotide
  Sense strand starting at position 3884 of SEQ ID NO: 585943
aggcucauaguccauagau

SEQ ID NO: 679979 - RNA, 19 nt, Artificial Sequence
  Description of Artificial Sequence: Synthetic oligonucleotide
  Antisense strand to SEQ ID NO: 679978
aucuauggacuaugagccu

SEQ ID NO: 679980 - RNA, 19 nt, Artificial Sequence
  Description of Artificial Sequence: Synthetic oligonucleotide
  Sense strand starting at position 3886 of SEQ ID NO: 585943
gcucauaguccauagauca

SEQ ID NO: 679981 - RNA, 19 nt, Artificial Sequence
  Description of Artificial Sequence: Synthetic oligonucleotide
  Antisense strand to SEQ ID NO: 679980
ugaucuauggacuaugagc

SEQ ID NO: 679982 - RNA, 19 nt, Artificial Sequence
  Description of Artificial Sequence: Synthetic oligonucleotide
  Sense strand starting at position 3896 of SEQ ID NO: 585943
cauagaucauuugagguga

SEQ ID NO: 679983 - RNA, 19 nt, Artificial Sequence
  Description of Artificial Sequence: Synthetic oligonucleotide
  Antisense strand to SEQ ID NO: 679982
ucaccucaaaugaucuaug

SEQ ID NO: 679984 - RNA, 19 nt, Artificial Sequence
  Description of Artificial Sequence: Synthetic oligonucleotide
  Sense strand starting at position 3911 of SEQ ID NO: 585943
gugacauccucucuaagac

SEQ ID NO: 679985 - RNA, 19 nt, Artificial Sequence
  Description of Artificial Sequence: Synthetic oligonucleotide
  Antisense strand to SEQ ID NO: 679984
gucuuagagaggaugucac

SEQ ID NO: 679986 - RNA, 19 nt, Artificial Sequence
  Description of Artificial Sequence: Synthetic oligonucleotide
  Sense strand starting at position 3921 of SEQ ID NO: 585943
cucuaagacccaugguaaa

SEQ ID NO: 679987 - RNA, 19 nt, Artificial Sequence
  Description of Artificial Sequence: Synthetic oligonucleotide
  Antisense strand to SEQ ID NO: 679986
uuuaccaugggucuuagag

SEQ ID NO: 679988 - RNA, 19 nt, Artificial Sequence
  Description of Artificial Sequence: Synthetic oligonucleotide
  Sense strand starting at position 3966 of SEQ ID NO: 585943
uuaagcauugagugacuga

SEQ ID NO: 679989 - RNA, 19 nt, Artificial Sequence
  Description of Artificial Sequence: Synthetic oligonucleotide
  Antisense strand to SEQ ID NO: 679988
ucagucacucaaugcuuaa

SEQ ID NO: 679990 - RNA, 19 nt, Artificial Sequence
  Description of Artificial Sequence: Synthetic oligonucleotide
  Sense strand starting at position 278 of SEQ ID NO: 585944
uuaaauaguugguugaaag

SEQ ID NO: 679991 - RNA, 19 nt, Artificial Sequence
  Description of Artificial Sequence: Synthetic oligonucleotide
  Antisense strand to SEQ ID NO: 679990
cuuucaaccaacuauuuaa

SEQ ID NO: 679992 - RNA, 19 nt, Artificial Sequence
  Description of Artificial Sequence: Synthetic oligonucleotide
  Sense strand starting at position 337 of SEQ ID NO: 585944
auuaaaugcugagugggaa

SEQ ID NO: 679993 - RNA, 19 nt, Artificial Sequence
  Description of Artificial Sequence: Synthetic oligonucleotide
  Antisense strand to SEQ ID NO: 679992
uucccacucagcauuuaau

SEQ ID NO: 679994 - RNA, 19 nt, Artificial Sequence
  Description of Artificial Sequence: Synthetic oligonucleotide
  Sense strand starting at position 338 of SEQ ID NO: 585944
uuaaaugcugagugggaaa

SEQ ID NO: 679995 - RNA, 19 nt, Artificial Sequence
  Description of Artificial Sequence: Synthetic oligonucleotide
  Antisense strand to SEQ ID NO: 679994
uuucccacucagcauuuaa

SEQ ID NO: 679996 - RNA, 19 nt, Artificial Sequence
  Description of Artificial Sequence: Synthetic oligonucleotide
  Sense strand starting at position 400 of SEQ ID NO: 585944
gaauuugcaguccguaaca

SEQ ID NO: 679997 - RNA, 19 nt, Artificial Sequence
  Description of Artificial Sequence: Synthetic oligonucleotide
  Antisense strand to SEQ ID NO: 679996
uguuacggacugcaaauuc

SEQ ID NO: 679998 - RNA, 19 nt, Artificial Sequence
  Description of Artificial Sequence: Synthetic oligonucleotide
  Sense strand starting at position 1014 of SEQ ID NO: 585944
aucucucuucuguguauuu

SEQ ID NO: 679999 - RNA, 19 nt, Artificial Sequence
  Description of Artificial Sequence: Synthetic oligonucleotide
  Antisense strand to SEQ ID NO: 679998
aaauacacagaagagagau

SEQ ID NO: 680000 - RNA, 19 nt, Artificial Sequence
  Description of Artificial Sequence: Synthetic oligonucleotide
  Sense strand starting at position 1127 of SEQ ID NO: 585944
cuaaauguccagugacaca

SEQ ID NO: 680001 - RNA, 19 nt, Artificial Sequence
  Description of Artificial Sequence: Synthetic oligonucleotide
  Antisense strand to SEQ ID NO: 680000
ugugucacuggacauuuag

SEQ ID NO: 680002 - RNA, 19 nt, Artificial Sequence
  Description of Artificial Sequence: Synthetic oligonucleotide
  Sense strand starting at position 1436 of SEQ ID NO: 585944
cguuaagaugaguaaguuc

SEQ ID NO: 680003 - RNA, 19 nt, Artificial Sequence
  Description of Artificial Sequence: Synthetic oligonucleotide
  Antisense strand to SEQ ID NO: 680002
gaacuuacucaucuuaacg

SEQ ID NO: 680004 - RNA, 19 nt, Artificial Sequence
  Description of Artificial Sequence: Synthetic oligonucleotide
  Sense strand starting at position 1445 of SEQ ID NO: 585944
gaguaaguucuagagaugu

SEQ ID NO: 680005 - RNA, 19 nt, Artificial Sequence
  Description of Artificial Sequence: Synthetic oligonucleotide
  Antisense strand to SEQ ID NO: 680004
acaucucuagaacuuacuc

SEQ ID NO: 680006 - RNA, 19 nt, Artificial Sequence
  Description of Artificial Sequence: Synthetic oligonucleotide
  Sense strand starting at position 1447 of SEQ ID NO: 585944
guaaguucuagagauguaa

SEQ ID NO: 680007 - RNA, 19 nt, Artificial Sequence
  Description of Artificial Sequence: Synthetic oligonucleotide
  Antisense strand to SEQ ID NO: 680006
uuacaucucuagaacuuac

SEQ ID NO: 680008 - RNA, 19 nt, Artificial Sequence
  Description of Artificial Sequence: Synthetic oligonucleotide
  Sense strand starting at position 1600 of SEQ ID NO: 585944
aggaauggauguguuaauu

SEQ ID NO: 680009 - RNA, 19 nt, Artificial Sequence
  Description of Artificial Sequence: Synthetic oligonucleotide
  Antisense strand to SEQ ID NO: 680008
aauuaacacauccauuccu

SEQ ID NO: 680010 - RNA, 19 nt, Artificial Sequence
  Description of Artificial Sequence: Synthetic oligonucleotide
  Sense strand starting at position 1623 of SEQ ID NO: 585944
ugacuauaguaaucaguuu

SEQ ID NO: 680011 - RNA, 19 nt, Artificial Sequence
  Description of Artificial Sequence: Synthetic oligonucleotide
  Antisense strand to SEQ ID NO: 680010
aaacugauuacuauaguca

SEQ ID NO: 680012 - RNA, 19 nt, Artificial Sequence
  Description of Artificial Sequence: Synthetic oligonucleotide
  Sense strand starting at position 2152 of SEQ ID NO: 585944
cagcauguccucuaggauc

SEQ ID NO: 680013 - RNA, 19 nt, Artificial Sequence
  Description of Artificial Sequence: Synthetic oligonucleotide
  Antisense strand to SEQ ID NO: 680012
gauccuagaggacaugcug

SEQ ID NO: 680014 - RNA, 19 nt, Artificial Sequence
  Description of Artificial Sequence: Synthetic oligonucleotide
  Sense strand starting at position 2248 of SEQ ID NO: 585944
agacaacaagcgugggauu

SEQ ID NO: 680015 - RNA, 19 nt, Artificial Sequence
  Description of Artificial Sequence: Synthetic oligonucleotide
  Antisense strand to SEQ ID NO: 680014
aaucccacgcuuguugucu

SEQ ID NO: 680016 - RNA, 19 nt, Artificial Sequence
  Description of Artificial Sequence: Synthetic oligonucleotide
  Sense strand starting at position 2370 of SEQ ID NO: 585944
acucacuguuacuugaaga

SEQ ID NO: 680017 - RNA, 19 nt, Artificial Sequence
  Description of Artificial Sequence: Synthetic oligonucleotide
  Antisense strand to SEQ ID NO: 680016
ucuucaaguaacagugagu

SEQ ID NO: 680018 - RNA, 19 nt, Artificial Sequence
  Description of Artificial Sequence: Synthetic oligonucleotide
  Sense strand starting at position 2385 of SEQ ID NO: 585944
aagacauugcugggagcua

SEQ ID NO: 680019 - RNA, 19 nt, Artificial Sequence
  Description of Artificial Sequence: Synthetic oligonucleotide
  Antisense strand to SEQ ID NO: 680018
uagcucccagcaaugucuu

SEQ ID NO: 680020 - RNA, 19 nt, Artificial Sequence
  Description of Artificial Sequence: Synthetic oligonucleotide
  Sense strand starting at position 2411 of SEQ ID NO: 585944
gaggcugaagaaugucaga

SEQ ID NO: 680021 - RNA, 19 nt, Artificial Sequence
  Description of Artificial Sequence: Synthetic oligonucleotide
  Antisense strand to SEQ ID NO: 680020
ucugacauucuucagccuc

SEQ ID NO: 680022 - RNA, 19 nt, Artificial Sequence
  Description of Artificial Sequence: Synthetic oligonucleotide
  Sense strand starting at position 2447 of SEQ ID NO: 585944
gcucacaggccagaauaau

SEQ ID NO: 680023 - RNA, 19 nt, Artificial Sequence
  Description of Artificial Sequence: Synthetic oligonucleotide
  Antisense strand to SEQ ID NO: 680022
auuauucuggccugugagc

SEQ ID NO: 680024 - RNA, 19 nt, Artificial Sequence
  Description of Artificial Sequence: Synthetic oligonucleotide
  Sense strand starting at position 2453 of SEQ ID NO: 585944
aggccagaauaauauauuu

SEQ ID NO: 680025 - RNA, 19 nt, Artificial Sequence
  Description of Artificial Sequence: Synthetic oligonucleotide
  Antisense strand to SEQ ID NO: 680024
aaauauauuauucuggccu

SEQ ID NO: 680026 - RNA, 19 nt, Artificial Sequence
  Description of Artificial Sequence: Synthetic oligonucleotide
  Sense strand starting at position 2506 of SEQ ID NO: 585944
ggagguccauuguuuaauu

SEQ ID NO: 680027 - RNA, 19 nt, Artificial Sequence
  Description of Artificial Sequence: Synthetic oligonucleotide
  Antisense strand to SEQ ID NO: 680026
aauuaaacaauggaccucc

SEQ ID NO: 680028 - RNA, 19 nt, Artificial Sequence
  Description of Artificial Sequence: Synthetic oligonucleotide
  Sense strand starting at position 2539 of SEQ ID NO: 585944
ccaugaaguuaggcauaga

SEQ ID NO: 680029 - RNA, 19 nt, Artificial Sequence
  Description of Artificial Sequence: Synthetic oligonucleotide
  Antisense strand to SEQ ID NO: 680028
ucuaugccuaacuucaugg

SEQ ID NO: 680030 - RNA, 19 nt, Artificial Sequence
  Description of Artificial Sequence: Synthetic oligonucleotide
  Sense strand starting at position 2550 of SEQ ID NO: 585944
ggcauagagaggugacuua

SEQ ID NO: 680031 - RNA, 19 nt, Artificial Sequence
  Description of Artificial Sequence: Synthetic oligonucleotide
  Antisense strand to SEQ ID NO: 680030
uaagucaccucucuaugcc

SEQ ID NO: 680032 - RNA, 19 nt, Artificial Sequence
  Description of Artificial Sequence: Synthetic oligonucleotide
  Sense strand starting at position 2562 of SEQ ID NO: 585944
ugacuuacuuuggucagaa

SEQ ID NO: 680033 - RNA, 19 nt, Artificial Sequence
  Description of Artificial Sequence: Synthetic oligonucleotide
  Antisense strand to SEQ ID NO: 680032
uucugaccaaaguaaguca

SEQ ID NO: 680034 - RNA, 19 nt, Artificial Sequence
  Description of Artificial Sequence: Synthetic oligonucleotide
  Sense strand starting at position 2563 of SEQ ID NO: 585944
gacuuacuuuggucagaaa

SEQ ID NO: 680035 - RNA, 19 nt, Artificial Sequence
  Description of Artificial Sequence: Synthetic oligonucleotide
  Antisense strand to SEQ ID NO: 680034
uuucugaccaaaguaaguc

SEQ ID NO: 680036 - RNA, 19 nt, Artificial Sequence
  Description of Artificial Sequence: Synthetic oligonucleotide
  Sense strand starting at position 2592 of SEQ ID NO: 585944
gagagauguuccucucuuc

SEQ ID NO: 680037 - RNA, 19 nt, Artificial Sequence
  Description of Artificial Sequence: Synthetic oligonucleotide
  Antisense strand to SEQ ID NO: 680036
gaagagaggaacaucucuc

SEQ ID NO: 680038 - RNA, 19 nt, Artificial Sequence
  Description of Artificial Sequence: Synthetic oligonucleotide
  Sense strand starting at position 2601 of SEQ ID NO: 585944
uccucucuuccuggugaaa

SEQ ID NO: 680039 - RNA, 19 nt, Artificial Sequence
  Description of Artificial Sequence: Synthetic oligonucleotide
  Antisense strand to SEQ ID NO: 680038
uuucaccaggaagagagga

SEQ ID NO: 680040 - RNA, 19 nt, Artificial Sequence
  Description of Artificial Sequence: Synthetic oligonucleotide
  Sense strand starting at position 2632 of SEQ ID NO: 585944
uagugugugacaugacaug

SEQ ID NO: 680041 - RNA, 19 nt, Artificial Sequence
  Description of Artificial Sequence: Synthetic oligonucleotide
  Antisense strand to SEQ ID NO: 680040
caugucaugucacacacua

SEQ ID NO: 680042 - RNA, 19 nt, Artificial Sequence
  Description of Artificial Sequence: Synthetic oligonucleotide
  Sense strand starting at position 2684 of SEQ ID NO: 585944
uccagauagcaauggguca

SEQ ID NO: 680043 - RNA, 19 nt, Artificial Sequence
  Description of Artificial Sequence: Synthetic oligonucleotide
  Antisense strand to SEQ ID NO: 680042
ugacccauugcuaucugga

SEQ ID NO: 680044 - RNA, 19 nt, Artificial Sequence
  Description of Artificial Sequence: Synthetic oligonucleotide
  Sense strand starting at position 2685 of SEQ ID NO: 585944
ccagauagcaaugggucaa

SEQ ID NO: 680045 - RNA, 19 nt, Artificial Sequence
  Description of Artificial Sequence: Synthetic oligonucleotide
  Antisense strand to SEQ ID NO: 680044
uugacccauugcuaucugg

SEQ ID NO: 680046 - RNA, 19 nt, Artificial Sequence
  Description of Artificial Sequence: Synthetic oligonucleotide
  Sense strand starting at position 2747 of SEQ ID NO: 585944
gccaaaucacaauggacau

SEQ ID NO: 680047 - RNA, 19 nt, Artificial Sequence
  Description of Artificial Sequence: Synthetic oligonucleotide
  Antisense strand to SEQ ID NO: 680046
auguccauugugauuuggc

SEQ ID NO: 680048 - RNA, 19 nt, Artificial Sequence
  Description of Artificial Sequence: Synthetic oligonucleotide
  Sense strand starting at position 2845 of SEQ ID NO: 585944
cugauacaaguagguauua

SEQ ID NO: 680049 - RNA, 19 nt, Artificial Sequence
  Description of Artificial Sequence: Synthetic oligonucleotide
  Antisense strand to SEQ ID NO: 680048
uaauaccuacuuguaucag

SEQ ID NO: 680050 - RNA, 19 nt, Artificial Sequence
  Description of Artificial Sequence: Synthetic oligonucleotide
  Sense strand starting at position 2985 of SEQ ID NO: 585944
gaaaguuaaugaccaaugu

SEQ ID NO: 680051 - RNA, 19 nt, Artificial Sequence
  Description of Artificial Sequence: Synthetic oligonucleotide
  Antisense strand to SEQ ID NO: 680050
acauuggucauuaacuuuc

SEQ ID NO: 680052 - RNA, 19 nt, Artificial Sequence
  Description of Artificial Sequence: Synthetic oligonucleotide
  Sense strand starting at position 2989 of SEQ ID NO: 585944
guuaaugaccaaugugaua

SEQ ID NO: 680053 - RNA, 19 nt, Artificial Sequence
  Description of Artificial Sequence: Synthetic oligonucleotide
  Antisense strand to SEQ ID NO: 680052
uaucacauuggucauuaac

SEQ ID NO: 680054 - RNA, 19 nt, Artificial Sequence
  Description of Artificial Sequence: Synthetic oligonucleotide
  Sense strand starting at position 3067 of SEQ ID NO: 585944
gaggauuaauguccuuaua

SEQ ID NO: 680055 - RNA, 19 nt, Artificial Sequence
  Description of Artificial Sequence: Synthetic oligonucleotide
  Antisense strand to SEQ ID NO: 680054
uauaaggacauuaauccuc

SEQ ID NO: 680056 - RNA, 19 nt, Artificial Sequence
  Description of Artificial Sequence: Synthetic oligonucleotide
  Sense strand starting at position 3322 of SEQ ID NO: 585944
aguggugucacugaguaaa

SEQ ID NO: 680057 - RNA, 19 nt, Artificial Sequence
  Description of Artificial Sequence: Synthetic oligonucleotide
  Antisense strand to SEQ ID NO: 680056
uuuacucagugacaccacu

SEQ ID NO: 680058 - RNA, 19 nt, Artificial Sequence
  Description of Artificial Sequence: Synthetic oligonucleotide
  Sense strand starting at position 3324 of SEQ ID NO: 585944
uggugucacugaguaaaug

SEQ ID NO: 680059 - RNA, 19 nt, Artificial Sequence
  Description of Artificial Sequence: Synthetic oligonucleotide
  Antisense strand to SEQ ID NO: 680058
cauuuacucagugacacca

SEQ ID NO: 680060 - RNA, 19 nt, Artificial Sequence
  Description of Artificial Sequence: Synthetic oligonucleotide
  Sense strand starting at position 3325 of SEQ ID NO: 585944
ggugucacugaguaaaugu

SEQ ID NO: 680061 - RNA, 19 nt, Artificial Sequence
  Description of Artificial Sequence: Synthetic oligonucleotide
  Antisense strand to SEQ ID NO: 680060
acauuuacucagugacacc

SEQ ID NO: 680062 - RNA, 19 nt, Artificial Sequence
  Description of Artificial Sequence: Synthetic oligonucleotide
  Sense strand starting at position 3348 of SEQ ID NO: 585944
gguuuaauuccugaugcuc

SEQ ID NO: 680063 - RNA, 19 nt, Artificial Sequence
  Description of Artificial Sequence: Synthetic oligonucleotide
  Antisense strand to SEQ ID NO: 680062
gagcaucaggaauuaaacc

SEQ ID NO: 680064 - RNA, 19 nt, Artificial Sequence
  Description of Artificial Sequence: Synthetic oligonucleotide
  Sense strand starting at position 3652 of SEQ ID NO: 585944
ucccacuacugguuauuga

SEQ ID NO: 680065 - RNA, 19 nt, Artificial Sequence
  Description of Artificial Sequence: Synthetic oligonucleotide
  Antisense strand to SEQ ID NO: 680064
ucaauaaccaguaguggga

SEQ ID NO: 680066 - RNA, 19 nt, Artificial Sequence
  Description of Artificial Sequence: Synthetic oligonucleotide
  Sense strand starting at position 3653 of SEQ ID NO: 585944
cccacuacugguuauugau

SEQ ID NO: 680067 - RNA, 19 nt, Artificial Sequence
  Description of Artificial Sequence: Synthetic oligonucleotide
  Antisense strand to SEQ ID NO: 680066
aucaauaaccaguaguggg

SEQ ID NO: 680068 - RNA, 19 nt, Artificial Sequence
  Description of Artificial Sequence: Synthetic oligonucleotide
  Sense strand starting at position 3659 of SEQ ID NO: 585944
acugguuauugauccaaag

SEQ ID NO: 680069 - RNA, 19 nt, Artificial Sequence
  Description of Artificial Sequence: Synthetic oligonucleotide
  Antisense strand to SEQ ID NO: 680068
cuuuggaucaauaaccagu

SEQ ID NO: 680070 - RNA, 19 nt, Artificial Sequence
  Description of Artificial Sequence: Synthetic oligonucleotide
  Sense strand starting at position 2009 of SEQ ID NO: 585945
acacaucugccauggaguu

SEQ ID NO: 680071 - RNA, 19 nt, Artificial Sequence
  Description of Artificial Sequence: Synthetic oligonucleotide
  Antisense strand to SEQ ID NO: 680070
aacuccauggcagaugugu

SEQ ID NO: 680072 - RNA, 19 nt, Artificial Sequence
  Description of Artificial Sequence: Synthetic oligonucleotide
  Sense strand starting at position 2188 of SEQ ID NO: 585945
ccuguaacuccagagcuuu

SEQ ID NO: 680073 - RNA, 19 nt, Artificial Sequence
  Description of Artificial Sequence: Synthetic oligonucleotide
  Antisense strand to SEQ ID NO: 680072
aaagcucuggaguuacagg

SEQ ID NO: 680074 - RNA, 19 nt, Artificial Sequence
  Description of Artificial Sequence: Synthetic oligonucleotide
  Sense strand starting at position 2498 of SEQ ID NO: 585945
aacgaagccuagugaaacu

SEQ ID NO: 680075 - RNA, 19 nt, Artificial Sequence
  Description of Artificial Sequence: Synthetic oligonucleotide
  Antisense strand to SEQ ID NO: 680074
aguuucacuaggcuucguu

SEQ ID NO: 680076 - RNA, 19 nt, Artificial Sequence
  Description of Artificial Sequence: Synthetic oligonucleotide
  Sense strand starting at position 2575 of SEQ ID NO: 585945
gguacaaaguguucaguau

SEQ ID NO: 680077 - RNA, 19 nt, Artificial Sequence
  Description of Artificial Sequence: Synthetic oligonucleotide
  Antisense strand to SEQ ID NO: 680076
auacugaacacuuuguacc

SEQ ID NO: 680078 - RNA, 19 nt, Artificial Sequence
  Description of Artificial Sequence: Synthetic oligonucleotide
  Sense strand starting at position 2708 of SEQ ID NO: 585945
uuucuaaggcaugggaaau

SEQ ID NO: 680079 - RNA, 19 nt, Artificial Sequence
  Description of Artificial Sequence: Synthetic oligonucleotide
  Antisense strand to SEQ ID NO: 680078
auuucccaugccuuagaaa

SEQ ID NO: 680080 - RNA, 19 nt, Artificial Sequence
  Description of Artificial Sequence: Synthetic oligonucleotide
  Sense strand starting at position 2725 of SEQ ID NO: 585945
auguaagaauccuguuaac

SEQ ID NO: 680081 - RNA, 19 nt, Artificial Sequence
  Description of Artificial Sequence: Synthetic oligonucleotide
  Antisense strand to SEQ ID NO: 680080
guuaacaggauucuuacau

SEQ ID NO: 680082 - RNA, 19 nt, Artificial Sequence
  Description of Artificial Sequence: Synthetic oligonucleotide
  Sense strand starting at position 2738 of SEQ ID NO: 585945
guuaacuagucuccucacu

SEQ ID NO: 680083 - RNA, 19 nt, Artificial Sequence
  Description of Artificial Sequence: Synthetic oligonucleotide
  Antisense strand to SEQ ID NO: 680082
agugaggagacuaguuaac

SEQ ID NO: 680084 - RNA, 19 nt, Artificial Sequence
  Description of Artificial Sequence: Synthetic oligonucleotide
  Sense strand starting at position 2828 of SEQ ID NO: 585945
uguucuaagugcuuuagua

SEQ ID NO: 680085 - RNA, 19 nt, Artificial Sequence
  Description of Artificial Sequence: Synthetic oligonucleotide
  Antisense strand to SEQ ID NO: 680084
uacuaaagcacuuagaaca

SEQ ID NO: 680086 - RNA, 19 nt, Artificial Sequence
  Description of Artificial Sequence: Synthetic oligonucleotide
  Sense strand starting at position 2830 of SEQ ID NO: 585945
uucuaagugcuuuaguaca

SEQ ID NO: 680087 - RNA, 19 nt, Artificial Sequence
  Description of Artificial Sequence: Synthetic oligonucleotide
  Antisense strand to SEQ ID NO: 680086
uguacuaaagcacuuagaa

SEQ ID NO: 680088 - RNA, 19 nt, Artificial Sequence
  Description of Artificial Sequence: Synthetic oligonucleotide
  Sense strand starting at position 2832 of SEQ ID NO: 585945
cuaagugcuuuaguacaaa

SEQ ID NO: 680089 - RNA, 19 nt, Artificial Sequence
  Description of Artificial Sequence: Synthetic oligonucleotide
  Antisense strand to SEQ ID NO: 680088
uuuguacuaaagcacuuag

SEQ ID NO: 680090 - RNA, 19 nt, Artificial Sequence
  Description of Artificial Sequence: Synthetic oligonucleotide
  Sense strand starting at position 2920 of SEQ ID NO: 585945
aagagagcuuagguaacuu

SEQ ID NO: 680091 - RNA, 19 nt, Artificial Sequence
  Description of Artificial Sequence: Synthetic oligonucleotide
  Antisense strand to SEQ ID NO: 680090
aaguuaccuaagcucucuu

SEQ ID NO: 680092 - RNA, 19 nt, Artificial Sequence
  Description of Artificial Sequence: Synthetic oligonucleotide
  Sense strand starting at position 2929 of SEQ ID NO: 585945
uagguaacuugccuagagu

SEQ ID NO: 680093 - RNA, 19 nt, Artificial Sequence
  Description of Artificial Sequence: Synthetic oligonucleotide
  Antisense strand to SEQ ID NO: 680092
acucuaggcaaguuaccua

SEQ ID NO: 680094 - RNA, 19 nt, Artificial Sequence
  Description of Artificial Sequence: Synthetic oligonucleotide
  Sense strand starting at position 3032 of SEQ ID NO: 585945
uucuuauucugauuccugu

SEQ ID NO: 680095 - RNA, 19 nt, Artificial Sequence
  Description of Artificial Sequence: Synthetic oligonucleotide
  Antisense strand to SEQ ID NO: 680094
acaggaaucagaauaagaa

SEQ ID NO: 680096 - RNA, 19 nt, Artificial Sequence
  Description of Artificial Sequence: Synthetic oligonucleotide
  Sense strand starting at position 3039 of SEQ ID NO: 585945
ucugauuccuguuuccaua

SEQ ID NO: 680097 - RNA, 19 nt, Artificial Sequence
  Description of Artificial Sequence: Synthetic oligonucleotide
  Antisense strand to SEQ ID NO: 680096
uauggaaacaggaaucaga

SEQ ID NO: 680098 - RNA, 19 nt, Artificial Sequence
  Description of Artificial Sequence: Synthetic oligonucleotide
  Sense strand starting at position 3131 of SEQ ID NO: 585945
ucucaaugauuaccuguga

SEQ ID NO: 680099 - RNA, 19 nt, Artificial Sequence
  Description of Artificial Sequence: Synthetic oligonucleotide
  Antisense strand to SEQ ID NO: 680098
ucacagguaaucauugaga

SEQ ID NO: 680100 - RNA, 19 nt, Artificial Sequence
  Description of Artificial Sequence: Synthetic oligonucleotide
  Sense strand starting at position 3132 of SEQ ID NO: 585945
cucaaugauuaccugugaa

SEQ ID NO: 680101 - RNA, 19 nt, Artificial Sequence
  Description of Artificial Sequence: Synthetic oligonucleotide
  Antisense strand to SEQ ID NO: 680100
uucacagguaaucauugag

SEQ ID NO: 680102 - RNA, 19 nt, Artificial Sequence
  Description of Artificial Sequence: Synthetic oligonucleotide
  Sense strand starting at position 3159 of SEQ ID NO: 585945
gggaguacauaaguuugaa

SEQ ID NO: 680103 - RNA, 19 nt, Artificial Sequence
  Description of Artificial Sequence: Synthetic oligonucleotide
  Antisense strand to SEQ ID NO: 680102
uucaaacuuauguacuccc

SEQ ID NO: 680104 - RNA, 19 nt, Artificial Sequence
  Description of Artificial Sequence: Synthetic oligonucleotide
  Sense strand starting at position 3317 of SEQ ID NO: 585945
cgugacuuauucccucaaa

SEQ ID NO: 680105 - RNA, 19 nt, Artificial Sequence
  Description of Artificial Sequence: Synthetic oligonucleotide
  Antisense strand to SEQ ID NO: 680104
uuugagggaauaagucacg

SEQ ID NO: 680106 - RNA, 19 nt, Artificial Sequence
  Description of Artificial Sequence: Synthetic oligonucleotide
  Sense strand starting at position 3318 of SEQ ID NO: 585945
gugacuuauucccucaaag

SEQ ID NO: 680107 - RNA, 19 nt, Artificial Sequence
  Description of Artificial Sequence: Synthetic oligonucleotide
  Antisense strand to SEQ ID NO: 680106
cuuugagggaauaagucac

SEQ ID NO: 680108 - RNA, 19 nt, Artificial Sequence
  Description of Artificial Sequence: Synthetic oligonucleotide
  Sense strand starting at position 3372 of SEQ ID NO: 585945
uuuguuaacuugggaacaa

SEQ ID NO: 680109 - RNA, 19 nt, Artificial Sequence
  Description of Artificial Sequence: Synthetic oligonucleotide
  Antisense strand to SEQ ID NO: 680108
uuguucccaaguuaacaaa

SEQ ID NO: 680110 - RNA, 19 nt, Artificial Sequence
  Description of Artificial Sequence: Synthetic oligonucleotide
  Sense strand starting at position 3373 of SEQ ID NO: 585945
uuguuaacuugggaacaaa

SEQ ID NO: 680111 - RNA, 19 nt, Artificial Sequence
  Description of Artificial Sequence: Synthetic oligonucleotide
  Antisense strand to SEQ ID NO: 680110
uuuguucccaaguuaacaa

SEQ ID NO: 680112 - RNA, 19 nt, Artificial Sequence
  Description of Artificial Sequence: Synthetic oligonucleotide
  Sense strand starting at position 3398 of SEQ ID NO: 585945
gcuuaucagucucuuugga

SEQ ID NO: 680113 - RNA, 19 nt, Artificial Sequence
  Description of Artificial Sequence: Synthetic oligonucleotide
  Antisense strand to SEQ ID NO: 680112
uccaaagagacugauaagc

SEQ ID NO: 680114 - RNA, 19 nt, Artificial Sequence
  Description of Artificial Sequence: Synthetic oligonucleotide
  Sense strand starting at position 3400 of SEQ ID NO: 585945
uuaucagucucuuuggauc

SEQ ID NO: 680115 - RNA, 19 nt, Artificial Sequence
  Description of Artificial Sequence: Synthetic oligonucleotide
  Antisense strand to SEQ ID NO: 680114
gauccaaagagacugauaa

SEQ ID NO: 680116 - RNA, 19 nt, Artificial Sequence
  Description of Artificial Sequence: Synthetic oligonucleotide
  Sense strand starting at position 3441 of SEQ ID NO: 585945
uguugucccucucaguuua

SEQ ID NO: 680117 - RNA, 19 nt, Artificial Sequence
  Description of Artificial Sequence: Synthetic oligonucleotide
  Antisense strand to SEQ ID NO: 680116
uaaacugagagggacaaca

SEQ ID NO: 680118 - RNA, 19 nt, Artificial Sequence
  Description of Artificial Sequence: Synthetic oligonucleotide
  Sense strand starting at position 3499 of SEQ ID NO: 585945
ucacccaaguguuuggaaa

SEQ ID NO: 680119 - RNA, 19 nt, Artificial Sequence
  Description of Artificial Sequence: Synthetic oligonucleotide
  Antisense strand to SEQ ID NO: 680118
uuuccaaacacuuggguga

SEQ ID NO: 680120 - RNA, 19 nt, Artificial Sequence
  Description of Artificial Sequence: Synthetic oligonucleotide
  Sense strand starting at position 3500 of SEQ ID NO: 585945
cacccaaguguuuggaaau

SEQ ID NO: 680121 - RNA, 19 nt, Artificial Sequence
  Description of Artificial Sequence: Synthetic oligonucleotide
  Antisense strand to SEQ ID NO: 680120
auuuccaaacacuugggug

SEQ ID NO: 680122 - RNA, 19 nt, Artificial Sequence
  Description of Artificial Sequence: Synthetic oligonucleotide
  Sense strand starting at position 3501 of SEQ ID NO: 585945
acccaaguguuuggaaauc

SEQ ID NO: 680123 - RNA, 19 nt, Artificial Sequence
  Description of Artificial Sequence: Synthetic oligonucleotide
  Antisense strand to SEQ ID NO: 680122
gauuuccaaacacuugggu

SEQ ID NO: 680124 - RNA, 19 nt, Artificial Sequence
  Description of Artificial Sequence: Synthetic oligonucleotide
  Sense strand starting at position 3507 of SEQ ID NO: 585945
guguuuggaaaucguaauu

SEQ ID NO: 680125 - RNA, 19 nt, Artificial Sequence
  Description of Artificial Sequence: Synthetic oligonucleotide
  Antisense strand to SEQ ID NO: 680124
aauuacgauuuccaaacac

SEQ ID NO: 680126 - RNA, 19 nt, Artificial Sequence
  Description of Artificial Sequence: Synthetic oligonucleotide
  Sense strand starting at position 3512 of SEQ ID NO: 585945
uggaaaucguaauugaaga

SEQ ID NO: 680127 - RNA, 19 nt, Artificial Sequence
  Description of Artificial Sequence: Synthetic oligonucleotide
  Antisense strand to SEQ ID NO: 680126
ucuucaauuacgauuucca

SEQ ID NO: 680128 - RNA, 19 nt, Artificial Sequence
  Description of Artificial Sequence: Synthetic oligonucleotide
  Sense strand starting at position 3541 of SEQ ID NO: 585945
caaagaaagcucugugaua

SEQ ID NO: 680129 - RNA, 19 nt, Artificial Sequence
  Description of Artificial Sequence: Synthetic oligonucleotide
  Antisense strand to SEQ ID NO: 680128
uaucacagagcuuucuuug

SEQ ID NO: 680130 - RNA, 19 nt, Artificial Sequence
  Description of Artificial Sequence: Synthetic oligonucleotide
  Sense strand starting at position 3567 of SEQ ID NO: 585945
acagaccucuuucuaggua

SEQ ID NO: 680131 - RNA, 19 nt, Artificial Sequence
  Description of Artificial Sequence: Synthetic oligonucleotide
  Antisense strand to SEQ ID NO: 680130
uaccuagaaagaggucugu

SEQ ID NO: 680132 - RNA, 19 nt, Artificial Sequence
  Description of Artificial Sequence: Synthetic oligonucleotide
  Sense strand starting at position 3571 of SEQ ID NO: 585945
accucuuucuagguacaca

SEQ ID NO: 680133 - RNA, 19 nt, Artificial Sequence
  Description of Artificial Sequence: Synthetic oligonucleotide
  Antisense strand to SEQ ID NO: 680132
uguguaccuagaaagaggu

SEQ ID NO: 680134 - RNA, 19 nt, Artificial Sequence
  Description of Artificial Sequence: Synthetic oligonucleotide
  Sense strand starting at position 3579 of SEQ ID NO: 585945
cuagguacacauuguuaau

SEQ ID NO: 680135 - RNA, 19 nt, Artificial Sequence
  Description of Artificial Sequence: Synthetic oligonucleotide
  Antisense strand to SEQ ID NO: 680134
auuaacaauguguaccuag

SEQ ID NO: 680136 - RNA, 19 nt, Artificial Sequence
  Description of Artificial Sequence: Synthetic oligonucleotide
  Sense strand starting at position 3632 of SEQ ID NO: 585945
gacaccuggcauugaagua

SEQ ID NO: 680137 - RNA, 19 nt, Artificial Sequence
  Description of Artificial Sequence: Synthetic oligonucleotide
  Antisense strand to SEQ ID NO: 680136
uacuucaaugccagguguc

SEQ ID NO: 680138 - RNA, 19 nt, Artificial Sequence
  Description of Artificial Sequence: Synthetic oligonucleotide
  Sense strand starting at position 3667 of SEQ ID NO: 585945
uauguuuccuggccugaga

SEQ ID NO: 680139 - RNA, 19 nt, Artificial Sequence
  Description of Artificial Sequence: Synthetic oligonucleotide
  Antisense strand to SEQ ID NO: 680138
ucucaggccaggaaacaua

SEQ ID NO: 680140 - RNA, 19 nt, Artificial Sequence
  Description of Artificial Sequence: Synthetic oligonucleotide
  Sense strand starting at position 3670 of SEQ ID NO: 585945
guuuccuggccugagacua

SEQ ID NO: 680141 - RNA, 19 nt, Artificial Sequence
  Description of Artificial Sequence: Synthetic oligonucleotide
  Antisense strand to SEQ ID NO: 680140
uagucucaggccaggaaac

SEQ ID NO: 680142 - RNA, 19 nt, Artificial Sequence
  Description of Artificial Sequence: Synthetic oligonucleotide
  Sense strand starting at position 3683 of SEQ ID NO: 585945
agacuauauugaucagcaa

SEQ ID NO: 680143 - RNA, 19 nt, Artificial Sequence
  Description of Artificial Sequence: Synthetic oligonucleotide
  Antisense strand to SEQ ID NO: 680142
uugcugaucaauauagucu

SEQ ID NO: 680144 - RNA, 19 nt, Artificial Sequence
  Description of Artificial Sequence: Synthetic oligonucleotide
  Sense strand starting at position 3945 of SEQ ID NO: 585945
gucucuuaauuugaagaaa

SEQ ID NO: 680145 - RNA, 19 nt, Artificial Sequence
  Description of Artificial Sequence: Synthetic oligonucleotide
  Antisense strand to SEQ ID NO: 680144
uuucuucaaauuaagagac

SEQ ID NO: 680146 - RNA, 19 nt, Artificial Sequence
  Description of Artificial Sequence: Synthetic oligonucleotide
  Sense strand starting at position 3977 of SEQ ID NO: 585945
auauguauauaccugcaga

SEQ ID NO: 680147 - RNA, 19 nt, Artificial Sequence
  Description of Artificial Sequence: Synthetic oligonucleotide
  Antisense strand to SEQ ID NO: 680146
ucugcagguauauacauau

SEQ ID NO: 680148 - RNA, 19 nt, Artificial Sequence
  Description of Artificial Sequence: Synthetic oligonucleotide
  Sense strand starting at position 3980 of SEQ ID NO: 585945
uguauauaccugcagacaa

SEQ ID NO: 680149 - RNA, 19 nt, Artificial Sequence
  Description of Artificial Sequence: Synthetic oligonucleotide
  Antisense strand to SEQ ID NO: 680148
uugucugcagguauauaca

SEQ ID NO: 680150 - RNA, 19 nt, Artificial Sequence
  Description of Artificial Sequence: Synthetic oligonucleotide
  Sense strand starting at position 2 of SEQ ID NO: 585946
ucuugucacauggaugagu

SEQ ID NO: 680151 - RNA, 19 nt, Artificial Sequence
  Description of Artificial Sequence: Synthetic oligonucleotide
  Antisense strand to SEQ ID NO: 680150
acucauccaugugacaaga

SEQ ID NO: 680152 - RNA, 19 nt, Artificial Sequence
  Description of Artificial Sequence: Synthetic oligonucleotide
  Sense strand starting at position 178 of SEQ ID NO: 585946
ucuggcuguccagaauaaa

SEQ ID NO: 680153 - RNA, 19 nt, Artificial Sequence
  Description of Artificial Sequence: Synthetic oligonucleotide
  Antisense strand to SEQ ID NO: 680152
uuuauucuggacagccaga

SEQ ID NO: 680154 - RNA, 19 nt, Artificial Sequence
  Description of Artificial Sequence: Synthetic oligonucleotide
  Sense strand starting at position 338 of SEQ ID NO: 585946
uggguuaaaugcccauaaa

SEQ ID NO: 680155 - RNA, 19 nt, Artificial Sequence
  Description of Artificial Sequence: Synthetic oligonucleotide
  Antisense strand to SEQ ID NO: 680154
uuuaugggcauuuaaccca

SEQ ID NO: 680156 - RNA, 19 nt, Artificial Sequence
  Description of Artificial Sequence: Synthetic oligonucleotide
  Sense strand starting at position 481 of SEQ ID NO: 585946
gucguuggaggacauauaa

SEQ ID NO: 680157 - RNA, 19 nt, Artificial Sequence
  Description of Artificial Sequence: Synthetic oligonucleotide
  Antisense strand to SEQ ID NO: 680156
uuauauguccuccaacgac

SEQ ID NO: 680158 - RNA, 19 nt, Artificial Sequence
  Description of Artificial Sequence: Synthetic oligonucleotide
  Sense strand starting at position 528 of SEQ ID NO: 585946
gggucaggucuuuaaguau

SEQ ID NO: 680159 - RNA, 19 nt, Artificial Sequence
  Description of Artificial Sequence: Synthetic oligonucleotide
  Antisense strand to SEQ ID NO: 680158
auacuuaaagaccugaccc

SEQ ID NO: 680160 - RNA, 19 nt, Artificial Sequence
  Description of Artificial Sequence: Synthetic oligonucleotide
  Sense strand starting at position 627 of SEQ ID NO: 585946
aguccuucgaagggacaaa

SEQ ID NO: 680161 - RNA, 19 nt, Artificial Sequence
  Description of Artificial Sequence: Synthetic oligonucleotide
  Antisense strand to SEQ ID NO: 680160
uuugucccuucgaaggacu

SEQ ID NO: 680162 - RNA, 19 nt, Artificial Sequence
  Description of Artificial Sequence: Synthetic oligonucleotide
  Sense strand starting at position 681 of SEQ ID NO: 585946
cccaaaucaccacggaaua

SEQ ID NO: 680163 - RNA, 19 nt, Artificial Sequence
  Description of Artificial Sequence: Synthetic oligonucleotide
  Antisense strand to SEQ ID NO: 680162
uauuccguggugauuuggg

SEQ ID NO: 680164 - RNA, 19 nt, Artificial Sequence
  Description of Artificial Sequence: Synthetic oligonucleotide
  Sense strand starting at position 768 of SEQ ID NO: 585946
uaaaucucauugucuggga

SEQ ID NO: 680165 - RNA, 19 nt, Artificial Sequence
  Description of Artificial Sequence: Synthetic oligonucleotide
  Antisense strand to SEQ ID NO: 680164
ucccagacaaugagauuua

SEQ ID NO: 680166 - RNA, 19 nt, Artificial Sequence
  Description of Artificial Sequence: Synthetic oligonucleotide
  Sense strand starting at position 769 of SEQ ID NO: 585946
aaaucucauugucugggaa

SEQ ID NO: 680167 - RNA, 19 nt, Artificial Sequence
  Description of Artificial Sequence: Synthetic oligonucleotide
  Antisense strand to SEQ ID NO: 680166
uucccagacaaugagauuu

SEQ ID NO: 680168 - RNA, 19 nt, Artificial Sequence
  Description of Artificial Sequence: Synthetic oligonucleotide
  Sense strand starting at position 770 of SEQ ID NO: 585946
aaucucauugucugggaaa

SEQ ID NO: 680169 - RNA, 19 nt, Artificial Sequence
  Description of Artificial Sequence: Synthetic oligonucleotide
  Antisense strand to SEQ ID NO: 680168
uuucccagacaaugagauu

SEQ ID NO: 680170 - RNA, 19 nt, Artificial Sequence
  Description of Artificial Sequence: Synthetic oligonucleotide
  Sense strand starting at position 813 of SEQ ID NO: 585946
gugcaagauuuauaauaga

SEQ ID NO: 680171 - RNA, 19 nt, Artificial Sequence
  Description of Artificial Sequence: Synthetic oligonucleotide
  Antisense strand to SEQ ID NO: 680170
ucuauuauaaaucuugcac

SEQ ID NO: 680172 - RNA, 19 nt, Artificial Sequence
  Description of Artificial Sequence: Synthetic oligonucleotide
  Sense strand starting at position 840 of SEQ ID NO: 585946
ggaaauuaaggauguuggu

SEQ ID NO: 680173 - RNA, 19 nt, Artificial Sequence
  Description of Artificial Sequence: Synthetic oligonucleotide
  Antisense strand to SEQ ID NO: 680172
accaacauccuuaauuucc

SEQ ID NO: 680174 - RNA, 19 nt, Artificial Sequence
  Description of Artificial Sequence: Synthetic oligonucleotide
  Sense strand starting at position 936 of SEQ ID NO: 585946
uugguaaucugaguuggac

SEQ ID NO: 680175 - RNA, 19 nt, Artificial Sequence
  Description of Artificial Sequence: Synthetic oligonucleotide
  Antisense strand to SEQ ID NO: 680174
guccaacucagauuaccaa

SEQ ID NO: 680176 - RNA, 19 nt, Artificial Sequence
  Description of Artificial Sequence: Synthetic oligonucleotide
  Sense strand starting at position 938 of SEQ ID NO: 585946
gguaaucugaguuggacag

SEQ ID NO: 680177 - RNA, 19 nt, Artificial Sequence
  Description of Artificial Sequence: Synthetic oligonucleotide
  Antisense strand to SEQ ID NO: 680176
cuguccaacucagauuacc

SEQ ID NO: 680178 - RNA, 19 nt, Artificial Sequence
  Description of Artificial Sequence: Synthetic oligonucleotide
  Sense strand starting at position 942 of SEQ ID NO: 585946
aucugaguuggacagcuau

SEQ ID NO: 680179 - RNA, 19 nt, Artificial Sequence
  Description of Artificial Sequence: Synthetic oligonucleotide
  Antisense strand to SEQ ID NO: 680178
auagcuguccaacucagau

SEQ ID NO: 680180 - RNA, 19 nt, Artificial Sequence
  Description of Artificial Sequence: Synthetic oligonucleotide
  Sense strand starting at position 1212 of SEQ ID NO: 585946
ggguaauaaccagaguguc

SEQ ID NO: 680181 - RNA, 19 nt, Artificial Sequence
  Description of Artificial Sequence: Synthetic oligonucleotide
  Antisense strand to SEQ ID NO: 680180
gacacucugguuauuaccc

SEQ ID NO: 680182 - RNA, 19 nt, Artificial Sequence
  Description of Artificial Sequence: Synthetic oligonucleotide
  Sense strand starting at position 1220 of SEQ ID NO: 585946
accagagugucauugaauu

SEQ ID NO: 680183 - RNA, 19 nt, Artificial Sequence
  Description of Artificial Sequence: Synthetic oligonucleotide
  Antisense strand to SEQ ID NO: 680182
aauucaaugacacucuggu

SEQ ID NO: 680184 - RNA, 19 nt, Artificial Sequence
  Description of Artificial Sequence: Synthetic oligonucleotide
  Sense strand starting at position 1226 of SEQ ID NO: 585946
gugucauugaauugagaga

SEQ ID NO: 680185 - RNA, 19 nt, Artificial Sequence
  Description of Artificial Sequence: Synthetic oligonucleotide
  Antisense strand to SEQ ID NO: 680184
ucucucaauucaaugacac

SEQ ID NO: 680186 - RNA, 19 nt, Artificial Sequence
  Description of Artificial Sequence: Synthetic oligonucleotide
  Sense strand starting at position 1288 of SEQ ID NO: 585946
ggugaaagauuccuauaua

SEQ ID NO: 680187 - RNA, 19 nt, Artificial Sequence
  Description of Artificial Sequence: Synthetic oligonucleotide
  Antisense strand to SEQ ID NO: 680186
uauauaggaaucuuucacc

SEQ ID NO: 680188 - RNA, 19 nt, Artificial Sequence
  Description of Artificial Sequence: Synthetic oligonucleotide
  Sense strand starting at position 2059 of SEQ ID NO: 585946
gggaagguggccgaagauu

SEQ ID NO: 680189 - RNA, 19 nt, Artificial Sequence
  Description of Artificial Sequence: Synthetic oligonucleotide
  Antisense strand to SEQ ID NO: 680188
aaucuucggccaccuuccc

SEQ ID NO: 680190 - RNA, 19 nt, Artificial Sequence
  Description of Artificial Sequence: Synthetic oligonucleotide
  Sense strand starting at position 2091 of SEQ ID NO: 585946
aguggaguugggugaauag

SEQ ID NO: 680191 - RNA, 19 nt, Artificial Sequence
  Description of Artificial Sequence: Synthetic oligonucleotide
  Antisense strand to SEQ ID NO: 680190
cuauucacccaacuccacu

SEQ ID NO: 680192 - RNA, 19 nt, Artificial Sequence
  Description of Artificial Sequence: Synthetic oligonucleotide
  Sense strand starting at position 2092 of SEQ ID NO: 585946
guggaguugggugaauagu

SEQ ID NO: 680193 - RNA, 19 nt, Artificial Sequence
  Description of Artificial Sequence: Synthetic oligonucleotide
  Antisense strand to SEQ ID NO: 680192
acuauucacccaacuccac

SEQ ID NO: 680194 - RNA, 19 nt, Artificial Sequence
  Description of Artificial Sequence: Synthetic oligonucleotide
  Sense strand starting at position 2200 of SEQ ID NO: 585946
gugguuggucgcucgagga

SEQ ID NO: 680195 - RNA, 19 nt, Artificial Sequence
  Description of Artificial Sequence: Synthetic oligonucleotide
  Antisense strand to SEQ ID NO: 680194
uccucgagcgaccaaccac

SEQ ID NO: 680196 - RNA, 19 nt, Artificial Sequence
  Description of Artificial Sequence: Synthetic oligonucleotide
  Sense strand starting at position 2245 of SEQ ID NO: 585946
cggcacuuacccgaaggau

SEQ ID NO: 680197 - RNA, 19 nt, Artificial Sequence
  Description of Artificial Sequence: Synthetic oligonucleotide
  Antisense strand to SEQ ID NO: 680196
auccuucggguaagugccg

SEQ ID NO: 680198 - RNA, 19 nt, Artificial Sequence
  Description of Artificial Sequence: Synthetic oligonucleotide
  Sense strand starting at position 2257 of SEQ ID NO: 585946
gaaggauuccggugggagu

SEQ ID NO: 680199 - RNA, 19 nt, Artificial Sequence
  Description of Artificial Sequence: Synthetic oligonucleotide
  Antisense strand to SEQ ID NO: 680198
acucccaccggaauccuuc

SEQ ID NO: 680200 - RNA, 19 nt, Artificial Sequence
  Description of Artificial Sequence: Synthetic oligonucleotide
  Sense strand starting at position 2333 of SEQ ID NO: 585946
accuuacuuuaucuugagu

SEQ ID NO: 680201 - RNA, 19 nt, Artificial Sequence
  Description of Artificial Sequence: Synthetic oligonucleotide
  Antisense strand to SEQ ID NO: 680200
acucaagauaaaguaaggu

SEQ ID NO: 680202 - RNA, 19 nt, Artificial Sequence
  Description of Artificial Sequence: Synthetic oligonucleotide
  Sense strand starting at position 2354 of SEQ ID NO: 585946
gcccuuucccacuaggaau

SEQ ID NO: 680203 - RNA, 19 nt, Artificial Sequence
  Description of Artificial Sequence: Synthetic oligonucleotide
  Antisense strand to SEQ ID NO: 680202
auuccuagugggaaagggc

SEQ ID NO: 680204 - RNA, 19 nt, Artificial Sequence
  Description of Artificial Sequence: Synthetic oligonucleotide
  Sense strand starting at position 2391 of SEQ ID NO: 585946
gaaucaggguuauuccuuu

SEQ ID NO: 680205 - RNA, 19 nt, Artificial Sequence
  Description of Artificial Sequence: Synthetic oligonucleotide
  Antisense strand to SEQ ID NO: 680204
aaaggaauaacccugauuc

SEQ ID NO: 680206 - RNA, 19 nt, Artificial Sequence
  Description of Artificial Sequence: Synthetic oligonucleotide
  Sense strand starting at position 2477 of SEQ ID NO: 585946
gugcaaaugcacuaaauuc

SEQ ID NO: 680207 - RNA, 19 nt, Artificial Sequence
  Description of Artificial Sequence: Synthetic oligonucleotide
  Antisense strand to SEQ ID NO: 680206
gaauuuagugcauuugcac

SEQ ID NO: 680208 - RNA, 19 nt, Artificial Sequence
  Description of Artificial Sequence: Synthetic oligonucleotide
  Sense strand starting at position 2505 of SEQ ID NO: 585946
ucaguuguuuaacuggaga

SEQ ID NO: 680209 - RNA, 19 nt, Artificial Sequence
  Description of Artificial Sequence: Synthetic oligonucleotide
  Antisense strand to SEQ ID NO: 680208
ucuccaguuaaacaacuga

SEQ ID NO: 680210 - RNA, 19 nt, Artificial Sequence
  Description of Artificial Sequence: Synthetic oligonucleotide
  Sense strand starting at position 2508 of SEQ ID NO: 585946
guuguuuaacuggagagca

SEQ ID NO: 680211 - RNA, 19 nt, Artificial Sequence
  Description of Artificial Sequence: Synthetic oligonucleotide
  Antisense strand to SEQ ID NO: 680210
ugcucuccaguuaaacaac

SEQ ID NO: 680212 - RNA, 19 nt, Artificial Sequence
  Description of Artificial Sequence: Synthetic oligonucleotide
  Sense strand starting at position 2630 of SEQ ID NO: 585946
gggcaaaguccugagaagu

SEQ ID NO: 680213 - RNA, 19 nt, Artificial Sequence
  Description of Artificial Sequence: Synthetic oligonucleotide
  Antisense strand to SEQ ID NO: 680212
acuucucaggacuuugccc

SEQ ID NO: 680214 - RNA, 19 nt, Artificial Sequence
  Description of Artificial Sequence: Synthetic oligonucleotide
  Sense strand starting at position 2698 of SEQ ID NO: 585946
acagucuacuuggugauga

SEQ ID NO: 680215 - RNA, 19 nt, Artificial Sequence
  Description of Artificial Sequence: Synthetic oligonucleotide
  Antisense strand to SEQ ID NO: 680214
ucaucaccaaguagacugu

SEQ ID NO: 680216 - RNA, 19 nt, Artificial Sequence
  Description of Artificial Sequence: Synthetic oligonucleotide
  Sense strand starting at position 2771 of SEQ ID NO: 585946
uuccuucugggauaaucuu

SEQ ID NO: 680217 - RNA, 19 nt, Artificial Sequence
  Description of Artificial Sequence: Synthetic oligonucleotide
  Antisense strand to SEQ ID NO: 680216
aagauuaucccagaaggaa

SEQ ID NO: 680218 - RNA, 19 nt, Artificial Sequence
  Description of Artificial Sequence: Synthetic oligonucleotide
  Sense strand starting at position 3125 of SEQ ID NO: 585946
uggacucaacaguguuaau

SEQ ID NO: 680219 - RNA, 19 nt, Artificial Sequence
  Description of Artificial Sequence: Synthetic oligonucleotide
  Antisense strand to SEQ ID NO: 680218
auuaacacuguugagucca

SEQ ID NO: 680220 - RNA, 19 nt, Artificial Sequence
  Description of Artificial Sequence: Synthetic oligonucleotide
  Sense strand starting at position 3365 of SEQ ID NO: 585946
gcuucugugccuucugacu

SEQ ID NO: 680221 - RNA, 19 nt, Artificial Sequence
  Description of Artificial Sequence: Synthetic oligonucleotide
  Antisense strand to SEQ ID NO: 680220
agucagaaggcacagaagc

SEQ ID NO: 680222 - RNA, 19 nt, Artificial Sequence
  Description of Artificial Sequence: Synthetic oligonucleotide
  Sense strand starting at position 3596 of SEQ ID NO: 585946
gugugugaccaagacaaau

SEQ ID NO: 680223 - RNA, 19 nt, Artificial Sequence
  Description of Artificial Sequence: Synthetic oligonucleotide
  Antisense strand to SEQ ID NO: 680222
auuugucuuggucacacac

SEQ ID NO: 680224 - RNA, 19 nt, Artificial Sequence
  Description of Artificial Sequence: Synthetic oligonucleotide
  Sense strand starting at position 3722 of SEQ ID NO: 585946
gacaguguuuauuuagcac

SEQ ID NO: 680225 - RNA, 19 nt, Artificial Sequence
  Description of Artificial Sequence: Synthetic oligonucleotide
  Antisense strand to SEQ ID NO: 680224
gugcuaaauaaacacuguc

SEQ ID NO: 680226 - RNA, 19 nt, Artificial Sequence
  Description of Artificial Sequence: Synthetic oligonucleotide
  Sense strand starting at position 3725 of SEQ ID NO: 585946
aguguuuauuuagcacauu

SEQ ID NO: 680227 - RNA, 19 nt, Artificial Sequence
  Description of Artificial Sequence: Synthetic oligonucleotide
  Antisense strand to SEQ ID NO: 680226
aaugugcuaaauaaacacu

SEQ ID NO: 680228 - RNA, 19 nt, Artificial Sequence
  Description of Artificial Sequence: Synthetic oligonucleotide
  Sense strand starting at position 3895 of SEQ ID NO: 585946
guaccuuacuugguaaaga

SEQ ID NO: 680229 - RNA, 19 nt, Artificial Sequence
  Description of Artificial Sequence: Synthetic oligonucleotide
  Antisense strand to SEQ ID NO: 680228
ucuuuaccaaguaagguac

SEQ ID NO: 680230 - RNA, 19 nt, Artificial Sequence
  Description of Artificial Sequence: Synthetic oligonucleotide
  Sense strand starting at position 297 of SEQ ID NO: 585947
guagaaauaacagggcuuu

SEQ ID NO: 680231 - RNA, 19 nt, Artificial Sequence
  Description of Artificial Sequence: Synthetic oligonucleotide
  Antisense strand to SEQ ID NO: 680230
aaagcccuguuauuucuac

SEQ ID NO: 680232 - RNA, 19 nt, Artificial Sequence
  Description of Artificial Sequence: Synthetic oligonucleotide
  Sense strand starting at position 427 of SEQ ID NO: 585947
cuuugcuuuccacauagua

SEQ ID NO: 680233 - RNA, 19 nt, Artificial Sequence
  Description of Artificial Sequence: Synthetic oligonucleotide
  Antisense strand to SEQ ID NO: 680232
uacuauguggaaagcaaag

SEQ ID NO: 680234 - RNA, 19 nt, Artificial Sequence
  Description of Artificial Sequence: Synthetic oligonucleotide
  Sense strand starting at position 520 of SEQ ID NO: 585947
ucuugucacauggaugagu

SEQ ID NO: 680235 - RNA, 19 nt, Artificial Sequence
  Description of Artificial Sequence: Synthetic oligonucleotide
  Antisense strand to SEQ ID NO: 680234
acucauccaugugacaaga

SEQ ID NO: 680236 - RNA, 19 nt, Artificial Sequence
  Description of Artificial Sequence: Synthetic oligonucleotide
  Sense strand starting at position 696 of SEQ ID NO: 585947
ucuggcuguccagaauaaa

SEQ ID NO: 680237 - RNA, 19 nt, Artificial Sequence
  Description of Artificial Sequence: Synthetic oligonucleotide
  Antisense strand to SEQ ID NO: 680236
uuuauucuggacagccaga

SEQ ID NO: 680238 - RNA, 19 nt, Artificial Sequence
  Description of Artificial Sequence: Synthetic oligonucleotide
  Sense strand starting at position 856 of SEQ ID NO: 585947
uggguuaaaugcccauaaa

SEQ ID NO: 680239 - RNA, 19 nt, Artificial Sequence
  Description of Artificial Sequence: Synthetic oligonucleotide
  Antisense strand to SEQ ID NO: 680238
uuuaugggcauuuaaccca

SEQ ID NO: 680240 - RNA, 19 nt, Artificial Sequence
  Description of Artificial Sequence: Synthetic oligonucleotide
  Sense strand starting at position 999 of SEQ ID NO: 585947
gucguuggaggacauauaa

SEQ ID NO: 680241 - RNA, 19 nt, Artificial Sequence
  Description of Artificial Sequence: Synthetic oligonucleotide
  Antisense strand to SEQ ID NO: 680240
uuauauguccuccaacgac

SEQ ID NO: 680242 - RNA, 19 nt, Artificial Sequence
  Description of Artificial Sequence: Synthetic oligonucleotide
  Sense strand starting at position 1046 of SEQ ID NO: 585947
gggucaggucuuuaaguau

SEQ ID NO: 680243 - RNA, 19 nt, Artificial Sequence
  Description of Artificial Sequence: Synthetic oligonucleotide
  Antisense strand to SEQ ID NO: 680242
auacuuaaagaccugaccc

SEQ ID NO: 680244 - RNA, 19 nt, Artificial Sequence
  Description of Artificial Sequence: Synthetic oligonucleotide
  Sense strand starting at position 1145 of SEQ ID NO: 585947
aguccuucgaagggacaaa

SEQ ID NO: 680245 - RNA, 19 nt, Artificial Sequence
  Description of Artificial Sequence: Synthetic oligonucleotide
  Antisense strand to SEQ ID NO: 680244
uuugucccuucgaaggacu

SEQ ID NO: 680246 - RNA, 19 nt, Artificial Sequence
  Description of Artificial Sequence: Synthetic oligonucleotide
  Sense strand starting at position 1199 of SEQ ID NO: 585947
cccaaaucaccacggaaua

SEQ ID NO: 680247 - RNA, 19 nt, Artificial Sequence
  Description of Artificial Sequence: Synthetic oligonucleotide
  Antisense strand to SEQ ID NO: 680246
uauuccguggugauuuggg

SEQ ID NO: 680248 - RNA, 19 nt, Artificial Sequence
  Description of Artificial Sequence: Synthetic oligonucleotide
  Sense strand starting at position 1286 of SEQ ID NO: 585947
uaaaucucauugucuggga

SEQ ID NO: 680249 - RNA, 19 nt, Artificial Sequence
  Description of Artificial Sequence: Synthetic oligonucleotide
  Antisense strand to SEQ ID NO: 680248
ucccagacaaugagauuua

SEQ ID NO: 680250 - RNA, 19 nt, Artificial Sequence
  Description of Artificial Sequence: Synthetic oligonucleotide
  Sense strand starting at position 1287 of SEQ ID NO: 585947
aaaucucauugucugggaa

SEQ ID NO: 680251 - RNA, 19 nt, Artificial Sequence
  Description of Artificial Sequence: Synthetic oligonucleotide
  Antisense strand to SEQ ID NO: 680250
uucccagacaaugagauuu

SEQ ID NO: 680252 - RNA, 19 nt, Artificial Sequence
  Description of Artificial Sequence: Synthetic oligonucleotide
  Sense strand starting at position 1288 of SEQ ID NO: 585947
aaucucauugucugggaaa

SEQ ID NO: 680253 - RNA, 19 nt, Artificial Sequence
  Description of Artificial Sequence: Synthetic oligonucleotide
  Antisense strand to SEQ ID NO: 680252
uuucccagacaaugagauu

SEQ ID NO: 680254 - RNA, 19 nt, Artificial Sequence
  Description of Artificial Sequence: Synthetic oligonucleotide
  Sense strand starting at position 1331 of SEQ ID NO: 585947
gugcaagauuuauaauaga

SEQ ID NO: 680255 - RNA, 19 nt, Artificial Sequence
  Description of Artificial Sequence: Synthetic oligonucleotide
  Antisense strand to SEQ ID NO: 680254
ucuauuauaaaucuugcac

SEQ ID NO: 680256 - RNA, 19 nt, Artificial Sequence
  Description of Artificial Sequence: Synthetic oligonucleotide
  Sense strand starting at position 1358 of SEQ ID NO: 585947
ggaaauuaaggauguuggu

SEQ ID NO: 680257 - RNA, 19 nt, Artificial Sequence
  Description of Artificial Sequence: Synthetic oligonucleotide
  Antisense strand to SEQ ID NO: 680256
accaacauccuuaauuucc

SEQ ID NO: 680258 - RNA, 19 nt, Artificial Sequence
  Description of Artificial Sequence: Synthetic oligonucleotide
  Sense strand starting at position 1454 of SEQ ID NO: 585947
uugguaaucugaguuggac

SEQ ID NO: 680259 - RNA, 19 nt, Artificial Sequence
  Description of Artificial Sequence: Synthetic oligonucleotide
  Antisense strand to SEQ ID NO: 680258
guccaacucagauuaccaa

SEQ ID NO: 680260 - RNA, 19 nt, Artificial Sequence
  Description of Artificial Sequence: Synthetic oligonucleotide
  Sense strand starting at position 1456 of SEQ ID NO: 585947
gguaaucugaguuggacag

SEQ ID NO: 680261 - RNA, 19 nt, Artificial Sequence
  Description of Artificial Sequence: Synthetic oligonucleotide
  Antisense strand to SEQ ID NO: 680260
cuguccaacucagauuacc

SEQ ID NO: 680262 - RNA, 19 nt, Artificial Sequence
  Description of Artificial Sequence: Synthetic oligonucleotide
  Sense strand starting at position 1460 of SEQ ID NO: 585947
aucugaguuggacagcuau

SEQ ID NO: 680263 - RNA, 19 nt, Artificial Sequence
  Description of Artificial Sequence: Synthetic oligonucleotide
  Antisense strand to SEQ ID NO: 680262
auagcuguccaacucagau

SEQ ID NO: 680264 - RNA, 19 nt, Artificial Sequence
  Description of Artificial Sequence: Synthetic oligonucleotide
  Sense strand starting at position 1501 of SEQ ID NO: 585947
cuguuagcauagucagaaa

SEQ ID NO: 680265 - RNA, 19 nt, Artificial Sequence
  Description of Artificial Sequence: Synthetic oligonucleotide
  Antisense strand to SEQ ID NO: 680264
uuucugacuaugcuaacag

SEQ ID NO: 680266 - RNA, 19 nt, Artificial Sequence
  Description of Artificial Sequence: Synthetic oligonucleotide
  Sense strand starting at position 1730 of SEQ ID NO: 585947
ggguaauaaccagaguguc

SEQ ID NO: 680267 - RNA, 19 nt, Artificial Sequence
  Description of Artificial Sequence: Synthetic oligonucleotide
  Antisense strand to SEQ ID NO: 680266
gacacucugguuauuaccc

SEQ ID NO: 680268 - RNA, 19 nt, Artificial Sequence
  Description of Artificial Sequence: Synthetic oligonucleotide
  Sense strand starting at position 1738 of SEQ ID NO: 585947
accagagugucauugaauu

SEQ ID NO: 680269 - RNA, 19 nt, Artificial Sequence
  Description of Artificial Sequence: Synthetic oligonucleotide
  Antisense strand to SEQ ID NO: 680268
aauucaaugacacucuggu

SEQ ID NO: 680270 - RNA, 19 nt, Artificial Sequence
  Description of Artificial Sequence: Synthetic oligonucleotide
  Sense strand starting at position 1744 of SEQ ID NO: 585947
gugucauugaauugagaga

SEQ ID NO: 680271 - RNA, 19 nt, Artificial Sequence
  Description of Artificial Sequence: Synthetic oligonucleotide
  Antisense strand to SEQ ID NO: 680270
ucucucaauucaaugacac

SEQ ID NO: 680272 - RNA, 19 nt, Artificial Sequence
  Description of Artificial Sequence: Synthetic oligonucleotide
  Sense strand starting at position 1806 of SEQ ID NO: 585947
ggugaaagauuccuauaua

SEQ ID NO: 680273 - RNA, 19 nt, Artificial Sequence
  Description of Artificial Sequence: Synthetic oligonucleotide
  Antisense strand to SEQ ID NO: 680272
uauauaggaaucuuucacc

SEQ ID NO: 680274 - RNA, 19 nt, Artificial Sequence
  Description of Artificial Sequence: Synthetic oligonucleotide
  Sense strand starting at position 2577 of SEQ ID NO: 585947
gggaagguggccgaagauu

SEQ ID NO: 680275 - RNA, 19 nt, Artificial Sequence
  Description of Artificial Sequence: Synthetic oligonucleotide
  Antisense strand to SEQ ID NO: 680274
aaucuucggccaccuuccc

SEQ ID NO: 680276 - RNA, 19 nt, Artificial Sequence
  Description of Artificial Sequence: Synthetic oligonucleotide
  Sense strand starting at position 2609 of SEQ ID NO: 585947
aguggaguugggugaauag

SEQ ID NO: 680277 - RNA, 19 nt, Artificial Sequence
  Description of Artificial Sequence: Synthetic oligonucleotide
  Antisense strand to SEQ ID NO: 680276
cuauucacccaacuccacu

SEQ ID NO: 680278 - RNA, 19 nt, Artificial Sequence
  Description of Artificial Sequence: Synthetic oligonucleotide
  Sense strand starting at position 2610 of SEQ ID NO: 585947
guggaguugggugaauagu

SEQ ID NO: 680279 - RNA, 19 nt, Artificial Sequence
  Description of Artificial Sequence: Synthetic oligonucleotide
  Antisense strand to SEQ ID NO: 680278
acuauucacccaacuccac

SEQ ID NO: 680280 - RNA, 19 nt, Artificial Sequence
  Description of Artificial Sequence: Synthetic oligonucleotide
  Sense strand starting at position 2718 of SEQ ID NO: 585947
gugguuggucgcucgagga

SEQ ID NO: 680281 - RNA, 19 nt, Artificial Sequence
  Description of Artificial Sequence: Synthetic oligonucleotide
  Antisense strand to SEQ ID NO: 680280
uccucgagcgaccaaccac

SEQ ID NO: 680282 - RNA, 19 nt, Artificial Sequence
  Description of Artificial Sequence: Synthetic oligonucleotide
  Sense strand starting at position 2763 of SEQ ID NO: 585947
cggcacuuacccgaaggau

SEQ ID NO: 680283 - RNA, 19 nt, Artificial Sequence
  Description of Artificial Sequence: Synthetic oligonucleotide
  Antisense strand to SEQ ID NO: 680282
auccuucggguaagugccg

SEQ ID NO: 680284 - RNA, 19 nt, Artificial Sequence
  Description of Artificial Sequence: Synthetic oligonucleotide
  Sense strand starting at position 2775 of SEQ ID NO: 585947
gaaggauuccggugggagu

SEQ ID NO: 680285 - RNA, 19 nt, Artificial Sequence
  Description of Artificial Sequence: Synthetic oligonucleotide
  Antisense strand to SEQ ID NO: 680284
acucccaccggaauccuuc

SEQ ID NO: 680286 - RNA, 19 nt, Artificial Sequence
  Description of Artificial Sequence: Synthetic oligonucleotide
  Sense strand starting at position 2776 of SEQ ID NO: 585947
aaggauuccggugggaguu

SEQ ID NO: 680287 - RNA, 19 nt, Artificial Sequence
  Description of Artificial Sequence: Synthetic oligonucleotide
  Antisense strand to SEQ ID NO: 680286
aacucccaccggaauccuu

SEQ ID NO: 680288 - RNA, 19 nt, Artificial Sequence
  Description of Artificial Sequence: Synthetic oligonucleotide
  Sense strand starting at position 2851 of SEQ ID NO: 585947
accuuacuuuaucuugagu

SEQ ID NO: 680289 - RNA, 19 nt, Artificial Sequence
  Description of Artificial Sequence: Synthetic oligonucleotide
  Antisense strand to SEQ ID NO: 680288
acucaagauaaaguaaggu

SEQ ID NO: 680290 - RNA, 19 nt, Artificial Sequence
  Description of Artificial Sequence: Synthetic oligonucleotide
  Sense strand starting at position 2872 of SEQ ID NO: 585947
gcccuuucccacuaggaau

SEQ ID NO: 680291 - RNA, 19 nt, Artificial Sequence
  Description of Artificial Sequence: Synthetic oligonucleotide
  Antisense strand to SEQ ID NO: 680290
auuccuagugggaaagggc

SEQ ID NO: 680292 - RNA, 19 nt, Artificial Sequence
  Description of Artificial Sequence: Synthetic oligonucleotide
  Sense strand starting at position 2909 of SEQ ID NO: 585947
gaaucaggguuauuccuuu

SEQ ID NO: 680293 - RNA, 19 nt, Artificial Sequence
  Description of Artificial Sequence: Synthetic oligonucleotide
  Antisense strand to SEQ ID NO: 680292
aaaggaauaacccugauuc

SEQ ID NO: 680294 - RNA, 19 nt, Artificial Sequence
  Description of Artificial Sequence: Synthetic oligonucleotide
  Sense strand starting at position 2995 of SEQ ID NO: 585947
gugcaaaugcacuaaauuc

SEQ ID NO: 680295 - RNA, 19 nt, Artificial Sequence
  Description of Artificial Sequence: Synthetic oligonucleotide
  Antisense strand to SEQ ID NO: 680294
gaauuuagugcauuugcac

SEQ ID NO: 680296 - RNA, 19 nt, Artificial Sequence
  Description of Artificial Sequence: Synthetic oligonucleotide
  Sense strand starting at position 3023 of SEQ ID NO: 585947
ucaguuguuuaacuggaga

SEQ ID NO: 680297 - RNA, 19 nt, Artificial Sequence
  Description of Artificial Sequence: Synthetic oligonucleotide
  Antisense strand to SEQ ID NO: 680296
ucuccaguuaaacaacuga

SEQ ID NO: 680298 - RNA, 19 nt, Artificial Sequence
  Description of Artificial Sequence: Synthetic oligonucleotide
  Sense strand starting at position 3026 of SEQ ID NO: 585947
guuguuuaacuggagagca

SEQ ID NO: 680299 - RNA, 19 nt, Artificial Sequence
  Description of Artificial Sequence: Synthetic oligonucleotide
  Antisense strand to SEQ ID NO: 680298
ugcucuccaguuaaacaac

SEQ ID NO: 680300 - RNA, 19 nt, Artificial Sequence
  Description of Artificial Sequence: Synthetic oligonucleotide
  Sense strand starting at position 3148 of SEQ ID NO: 585947
gggcaaaguccugagaagu

SEQ ID NO: 680301 - RNA, 19 nt, Artificial Sequence
  Description of Artificial Sequence: Synthetic oligonucleotide
  Antisense strand to SEQ ID NO: 680300
acuucucaggacuuugccc

SEQ ID NO: 680302 - RNA, 19 nt, Artificial Sequence
  Description of Artificial Sequence: Synthetic oligonucleotide
  Sense strand starting at position 3216 of SEQ ID NO: 585947
acagucuacuuggugauga

SEQ ID NO: 680303 - RNA, 19 nt, Artificial Sequence
  Description of Artificial Sequence: Synthetic oligonucleotide
  Antisense strand to SEQ ID NO: 680302
ucaucaccaaguagacugu

SEQ ID NO: 680304 - RNA, 19 nt, Artificial Sequence
  Description of Artificial Sequence: Synthetic oligonucleotide
  Sense strand starting at position 3289 of SEQ ID NO: 585947
uuccuucugggauaaucuu

SEQ ID NO: 680305 - RNA, 19 nt, Artificial Sequence
  Description of Artificial Sequence: Synthetic oligonucleotide
  Antisense strand to SEQ ID NO: 680304
aagauuaucccagaaggaa

SEQ ID NO: 680306 - RNA, 19 nt, Artificial Sequence
  Description of Artificial Sequence: Synthetic oligonucleotide
  Sense strand starting at position 3643 of SEQ ID NO: 585947
uggacucaacaguguuaau

SEQ ID NO: 680307 - RNA, 19 nt, Artificial Sequence
  Description of Artificial Sequence: Synthetic oligonucleotide
  Antisense strand to SEQ ID NO: 680306
auuaacacuguugagucca

SEQ ID NO: 680308 - RNA, 19 nt, Artificial Sequence
  Description of Artificial Sequence: Synthetic oligonucleotide
  Sense strand starting at position 3883 of SEQ ID NO: 585947
gcuucugugccuucugacu

SEQ ID NO: 680309 - RNA, 19 nt, Artificial Sequence
  Description of Artificial Sequence: Synthetic oligonucleotide
  Antisense strand to SEQ ID NO: 680308
agucagaaggcacagaagc

SEQ ID NO: 680310 - RNA, 19 nt, Artificial Sequence
  Description of Artificial Sequence: Synthetic oligonucleotide
  Sense strand starting at position 196 of SEQ ID NO: 585948
gugaauaggaaauguacca

SEQ ID NO: 680311 - RNA, 19 nt, Artificial Sequence
  Description of Artificial Sequence: Synthetic oligonucleotide
  Antisense strand to SEQ ID NO: 680310
ugguacauuuccuauucac

SEQ ID NO: 680312 - RNA, 19 nt, Artificial Sequence
  Description of Artificial Sequence: Synthetic oligonucleotide
  Sense strand starting at position 309 of SEQ ID NO: 585948
ucuagaauccaugagcgua

SEQ ID NO: 680313 - RNA, 19 nt, Artificial Sequence
  Description of Artificial Sequence: Synthetic oligonucleotide
  Antisense strand to SEQ ID NO: 680312
uacgcucauggauucuaga

SEQ ID NO: 680314 - RNA, 19 nt, Artificial Sequence
  Description of Artificial Sequence: Synthetic oligonucleotide
  Sense strand starting at position 311 of SEQ ID NO: 585948
uagaauccaugagcguaua

SEQ ID NO: 680315 - RNA, 19 nt, Artificial Sequence
  Description of Artificial Sequence: Synthetic oligonucleotide
  Antisense strand to SEQ ID NO: 680314
uauacgcucauggauucua

SEQ ID NO: 680316 - RNA, 19 nt, Artificial Sequence
  Description of Artificial Sequence: Synthetic oligonucleotide
  Sense strand starting at position 312 of SEQ ID NO: 585948
agaauccaugagcguauau

SEQ ID NO: 680317 - RNA, 19 nt, Artificial Sequence
  Description of Artificial Sequence: Synthetic oligonucleotide
  Antisense strand to SEQ ID NO: 680316
auauacgcucauggauucu

SEQ ID NO: 680318 - RNA, 19 nt, Artificial Sequence
  Description of Artificial Sequence: Synthetic oligonucleotide
  Sense strand starting at position 314 of SEQ ID NO: 585948
aauccaugagcguauauaa

SEQ ID NO: 680319 - RNA, 19 nt, Artificial Sequence
  Description of Artificial Sequence: Synthetic oligonucleotide
  Antisense strand to SEQ ID NO: 680318
uuauauacgcucauggauu

SEQ ID NO: 680320 - RNA, 19 nt, Artificial Sequence
  Description of Artificial Sequence: Synthetic oligonucleotide
  Sense strand starting at position 339 of SEQ ID NO: 585948
aucuuaaagcaaugugaaa

SEQ ID NO: 680321 - RNA, 19 nt, Artificial Sequence
  Description of Artificial Sequence: Synthetic oligonucleotide
  Antisense strand to SEQ ID NO: 680320
uuucacauugcuuuaagau

SEQ ID NO: 680322 - RNA, 19 nt, Artificial Sequence
  Description of Artificial Sequence: Synthetic oligonucleotide
  Sense strand starting at position 627 of SEQ ID NO: 585948
uuaagauacuauucgaguu

SEQ ID NO: 680323 - RNA, 19 nt, Artificial Sequence
  Description of Artificial Sequence: Synthetic oligonucleotide
  Antisense strand to SEQ ID NO: 680322
aacucgaauaguaucuuaa

SEQ ID NO: 680324 - RNA, 19 nt, Artificial Sequence
  Description of Artificial Sequence: Synthetic oligonucleotide
  Sense strand starting at position 692 of SEQ ID NO: 585948
ucuugcuaacaguaaauga

SEQ ID NO: 680325 - RNA, 19 nt, Artificial Sequence
  Description of Artificial Sequence: Synthetic oligonucleotide
  Antisense strand to SEQ ID NO: 680324
ucauuuacuguuagcaaga

SEQ ID NO: 680326 - RNA, 19 nt, Artificial Sequence
  Description of Artificial Sequence: Synthetic oligonucleotide
  Sense strand starting at position 749 of SEQ ID NO: 585948
uuccuugggucauuccgaa

SEQ ID NO: 680327 - RNA, 19 nt, Artificial Sequence
  Description of Artificial Sequence: Synthetic oligonucleotide
  Antisense strand to SEQ ID NO: 680326
uucggaaugacccaaggaa

SEQ ID NO: 680328 - RNA, 19 nt, Artificial Sequence
  Description of Artificial Sequence: Synthetic oligonucleotide
  Sense strand starting at position 762 of SEQ ID NO: 585948
uccgaauuauuauucccga

SEQ ID NO: 680329 - RNA, 19 nt, Artificial Sequence
  Description of Artificial Sequence: Synthetic oligonucleotide
  Antisense strand to SEQ ID NO: 680328
ucgggaauaauaauucgga

SEQ ID NO: 680330 - RNA, 19 nt, Artificial Sequence
  Description of Artificial Sequence: Synthetic oligonucleotide
  Sense strand starting at position 821 of SEQ ID NO: 585948
ggaccacagcgugaaguuu

SEQ ID NO: 680331 - RNA, 19 nt, Artificial Sequence
  Description of Artificial Sequence: Synthetic oligonucleotide
  Antisense strand to SEQ ID NO: 680330
aaacuucacgcuguggucc

SEQ ID NO: 680332 - RNA, 19 nt, Artificial Sequence
  Description of Artificial Sequence: Synthetic oligonucleotide
  Sense strand starting at position 1334 of SEQ ID NO: 585948
gugcaaucugaagaagggu

SEQ ID NO: 680333 - RNA, 19 nt, Artificial Sequence
  Description of Artificial Sequence: Synthetic oligonucleotide
  Antisense strand to SEQ ID NO: 680332
acccuucuucagauugcac

SEQ ID NO: 680334 - RNA, 19 nt, Artificial Sequence
  Description of Artificial Sequence: Synthetic oligonucleotide
  Sense strand starting at position 1475 of SEQ ID NO: 585948
caaggagaucauugcugga

SEQ ID NO: 680335 - RNA, 19 nt, Artificial Sequence
  Description of Artificial Sequence: Synthetic oligonucleotide
  Antisense strand to SEQ ID NO: 680334
uccagcaaugaucuccuug

SEQ ID NO: 680336 - RNA, 19 nt, Artificial Sequence
  Description of Artificial Sequence: Synthetic oligonucleotide
  Sense strand starting at position 1477 of SEQ ID NO: 585948
aggagaucauugcuggacu

SEQ ID NO: 680337 - RNA, 19 nt, Artificial Sequence
  Description of Artificial Sequence: Synthetic oligonucleotide
  Antisense strand to SEQ ID NO: 680336
aguccagcaaugaucuccu

SEQ ID NO: 680338 - RNA, 19 nt, Artificial Sequence
  Description of Artificial Sequence: Synthetic oligonucleotide
  Sense strand starting at position 1479 of SEQ ID NO: 585948
gagaucauugcuggacuua

SEQ ID NO: 680339 - RNA, 19 nt, Artificial Sequence
  Description of Artificial Sequence: Synthetic oligonucleotide
  Antisense strand to SEQ ID NO: 680338
uaaguccagcaaugaucuc

SEQ ID NO: 680340 - RNA, 19 nt, Artificial Sequence
  Description of Artificial Sequence: Synthetic oligonucleotide
  Sense strand starting at position 1488 of SEQ ID NO: 585948
gcuggacuuaagugauuac

SEQ ID NO: 680341 - RNA, 19 nt, Artificial Sequence
  Description of Artificial Sequence: Synthetic oligonucleotide
  Antisense strand to SEQ ID NO: 680340
guaaucacuuaaguccagc

SEQ ID NO: 680342 - RNA, 19 nt, Artificial Sequence
  Description of Artificial Sequence: Synthetic oligonucleotide
  Sense strand starting at position 1491 of SEQ ID NO: 585948
ggacuuaagugauuacuuu

SEQ ID NO: 680343 - RNA, 19 nt, Artificial Sequence
  Description of Artificial Sequence: Synthetic oligonucleotide
  Antisense strand to SEQ ID NO: 680342
aaaguaaucacuuaagucc

SEQ ID NO: 680344 - RNA, 19 nt, Artificial Sequence
  Description of Artificial Sequence: Synthetic oligonucleotide
  Sense strand starting at position 1504 of SEQ ID NO: 585948
uacuuuggcuguuugaaag

SEQ ID NO: 680345 - RNA, 19 nt, Artificial Sequence
  Description of Artificial Sequence: Synthetic oligonucleotide
  Antisense strand to SEQ ID NO: 680344
cuuucaaacagccaaagua

SEQ ID NO: 680346 - RNA, 19 nt, Artificial Sequence
  Description of Artificial Sequence: Synthetic oligonucleotide
  Sense strand starting at position 1623 of SEQ ID NO: 585948
uuacauuguguccaacgau

SEQ ID NO: 680347 - RNA, 19 nt, Artificial Sequence
  Description of Artificial Sequence: Synthetic oligonucleotide
  Antisense strand to SEQ ID NO: 680346
aucguuggacacaauguaa

SEQ ID NO: 680348 - RNA, 19 nt, Artificial Sequence
  Description of Artificial Sequence: Synthetic oligonucleotide
  Sense strand starting at position 1626 of SEQ ID NO: 585948
cauuguguccaacgauuug

SEQ ID NO: 680349 - RNA, 19 nt, Artificial Sequence
  Description of Artificial Sequence: Synthetic oligonucleotide
  Antisense strand to SEQ ID NO: 680348
caaaucguuggacacaaug

SEQ ID NO: 680350 - RNA, 19 nt, Artificial Sequence
  Description of Artificial Sequence: Synthetic oligonucleotide
  Sense strand starting at position 1708 of SEQ ID NO: 585948
guaacuucccaacaguguu

SEQ ID NO: 680351 - RNA, 19 nt, Artificial Sequence
  Description of Artificial Sequence: Synthetic oligonucleotide
  Antisense strand to SEQ ID NO: 680350
aacacuguugggaaguuac

SEQ ID NO: 680352 - RNA, 19 nt, Artificial Sequence
  Description of Artificial Sequence: Synthetic oligonucleotide
  Sense strand starting at position 1741 of SEQ ID NO: 585948
aggcuuucucccuggagga

SEQ ID NO: 680353 - RNA, 19 nt, Artificial Sequence
  Description of Artificial Sequence: Synthetic oligonucleotide
  Antisense strand to SEQ ID NO: 680352
uccuccagggagaaagccu

SEQ ID NO: 680354 - RNA, 19 nt, Artificial Sequence
  Description of Artificial Sequence: Synthetic oligonucleotide
  Sense strand starting at position 1743 of SEQ ID NO: 585948
gcuuucucccuggaggaga

SEQ ID NO: 680355 - RNA, 19 nt, Artificial Sequence
  Description of Artificial Sequence: Synthetic oligonucleotide
  Antisense strand to SEQ ID NO: 680354
ucuccuccagggagaaagc

SEQ ID NO: 680356 - RNA, 19 nt, Artificial Sequence
  Description of Artificial Sequence: Synthetic oligonucleotide
  Sense strand starting at position 1992 of SEQ ID NO: 585948
gaggcuaguggugauagaa

SEQ ID NO: 680357 - RNA, 19 nt, Artificial Sequence
  Description of Artificial Sequence: Synthetic oligonucleotide
  Antisense strand to SEQ ID NO: 680356
uucuaucaccacuagccuc

SEQ ID NO: 680358 - RNA, 19 nt, Artificial Sequence
  Description of Artificial Sequence: Synthetic oligonucleotide
  Sense strand starting at position 2055 of SEQ ID NO: 585948
ggcggucucucugcuauuu

SEQ ID NO: 680359 - RNA, 19 nt, Artificial Sequence
  Description of Artificial Sequence: Synthetic oligonucleotide
  Antisense strand to SEQ ID NO: 680358
aaauagcagagagaccgcc

SEQ ID NO: 680360 - RNA, 19 nt, Artificial Sequence
  Description of Artificial Sequence: Synthetic oligonucleotide
  Sense strand starting at position 2176 of SEQ ID NO: 585948
acaucaaaugcauguugga

SEQ ID NO: 680361 - RNA, 19 nt, Artificial Sequence
  Description of Artificial Sequence: Synthetic oligonucleotide
  Antisense strand to SEQ ID NO: 680360
uccaacaugcauuugaugu

SEQ ID NO: 680362 - RNA, 19 nt, Artificial Sequence
  Description of Artificial Sequence: Synthetic oligonucleotide
  Sense strand starting at position 2226 of SEQ ID NO: 585948
gucagugaagugcaguuaa

SEQ ID NO: 680363 - RNA, 19 nt, Artificial Sequence
  Description of Artificial Sequence: Synthetic oligonucleotide
  Antisense strand to SEQ ID NO: 680362
uuaacugcacuucacugac

SEQ ID NO: 680364 - RNA, 19 nt, Artificial Sequence
  Description of Artificial Sequence: Synthetic oligonucleotide
  Sense strand starting at position 2482 of SEQ ID NO: 585948
auuagcggagucuaaugau

SEQ ID NO: 680365 - RNA, 19 nt, Artificial Sequence
  Description of Artificial Sequence: Synthetic oligonucleotide
  Antisense strand to SEQ ID NO: 680364
aucauuagacuccgcuaau

SEQ ID NO: 680366 - RNA, 19 nt, Artificial Sequence
  Description of Artificial Sequence: Synthetic oligonucleotide
  Sense strand starting at position 2490 of SEQ ID NO: 585948
agucuaaugaugcgggacu

SEQ ID NO: 680367 - RNA, 19 nt, Artificial Sequence
  Description of Artificial Sequence: Synthetic oligonucleotide
  Antisense strand to SEQ ID NO: 680366
agucccgcaucauuagacu

SEQ ID NO: 680368 - RNA, 19 nt, Artificial Sequence
  Description of Artificial Sequence: Synthetic oligonucleotide
  Sense strand starting at position 2786 of SEQ ID NO: 585948
cuuugauuccaguagcuau

SEQ ID NO: 680369 - RNA, 19 nt, Artificial Sequence
  Description of Artificial Sequence: Synthetic oligonucleotide
  Antisense strand to SEQ ID NO: 680368
auagcuacuggaaucaaag

SEQ ID NO: 680370 - RNA, 19 nt, Artificial Sequence
  Description of Artificial Sequence: Synthetic oligonucleotide
  Sense strand starting at position 2839 of SEQ ID NO: 585948
auggauuaucaaggucuau

SEQ ID NO: 680371 - RNA, 19 nt, Artificial Sequence
  Description of Artificial Sequence: Synthetic oligonucleotide
  Antisense strand to SEQ ID NO: 680370
auagaccuugauaauccau

SEQ ID NO: 680372 - RNA, 19 nt, Artificial Sequence
  Description of Artificial Sequence: Synthetic oligonucleotide
  Sense strand starting at position 2852 of SEQ ID NO: 585948
gucuaucuaccacgggaga

SEQ ID NO: 680373 - RNA, 19 nt, Artificial Sequence
  Description of Artificial Sequence: Synthetic oligonucleotide
  Antisense strand to SEQ ID NO: 680372
ucucccgugguagauagac

SEQ ID NO: 680374 - RNA, 19 nt, Artificial Sequence
  Description of Artificial Sequence: Synthetic oligonucleotide
  Sense strand starting at position 2854 of SEQ ID NO: 585948
cuaucuaccacgggagauu

SEQ ID NO: 680375 - RNA, 19 nt, Artificial Sequence
  Description of Artificial Sequence: Synthetic oligonucleotide
  Antisense strand to SEQ ID NO: 680374
aaucucccgugguagauag

SEQ ID NO: 680376 - RNA, 19 nt, Artificial Sequence
  Description of Artificial Sequence: Synthetic oligonucleotide
  Sense strand starting at position 3010 of SEQ ID NO: 585948
gaaacacgucaguaucuga

SEQ ID NO: 680377 - RNA, 19 nt, Artificial Sequence
  Description of Artificial Sequence: Synthetic oligonucleotide
  Antisense strand to SEQ ID NO: 680376
ucagauacugacguguuuc

SEQ ID NO: 680378 - RNA, 19 nt, Artificial Sequence
  Description of Artificial Sequence: Synthetic oligonucleotide
  Sense strand starting at position 3209 of SEQ ID NO: 585948
agacuaacuugcucaagcu

SEQ ID NO: 680379 - RNA, 19 nt, Artificial Sequence
  Description of Artificial Sequence: Synthetic oligonucleotide
  Antisense strand to SEQ ID NO: 680378
agcuugagcaaguuagucu

SEQ ID NO: 680380 - RNA, 19 nt, Artificial Sequence
  Description of Artificial Sequence: Synthetic oligonucleotide
  Sense strand starting at position 3285 of SEQ ID NO: 585948
gugccagucguccucaagu

SEQ ID NO: 680381 - RNA, 19 nt, Artificial Sequence
  Description of Artificial Sequence: Synthetic oligonucleotide
  Antisense strand to SEQ ID NO: 680380
acuugaggacgacuggcac

SEQ ID NO: 680382 - RNA, 19 nt, Artificial Sequence
  Description of Artificial Sequence: Synthetic oligonucleotide
  Sense strand starting at position 3433 of SEQ ID NO: 585948
cggauuccacuucgagaac

SEQ ID NO: 680383 - RNA, 19 nt, Artificial Sequence
  Description of Artificial Sequence: Synthetic oligonucleotide
  Antisense strand to SEQ ID NO: 680382
guucucgaaguggaauccg

SEQ ID NO: 680384 - RNA, 19 nt, Artificial Sequence
  Description of Artificial Sequence: Synthetic oligonucleotide
  Sense strand starting at position 3506 of SEQ ID NO: 585948
acuuuagcacuuggaaauc

SEQ ID NO: 680385 - RNA, 19 nt, Artificial Sequence
  Description of Artificial Sequence: Synthetic oligonucleotide
  Antisense strand to SEQ ID NO: 680384
gauuuccaagugcuaaagu

SEQ ID NO: 680386 - RNA, 19 nt, Artificial Sequence
  Description of Artificial Sequence: Synthetic oligonucleotide
  Sense strand starting at position 3615 of SEQ ID NO: 585948
ggauuaagcugggcacagu

SEQ ID NO: 680387 - RNA, 19 nt, Artificial Sequence
  Description of Artificial Sequence: Synthetic oligonucleotide
  Antisense strand to SEQ ID NO: 680386
acugugcccagcuuaaucc

SEQ ID NO: 680388 - RNA, 19 nt, Artificial Sequence
  Description of Artificial Sequence: Synthetic oligonucleotide
  Sense strand starting at position 3946 of SEQ ID NO: 585948
agguuuauaucacugcuua

SEQ ID NO: 680389 - RNA, 19 nt, Artificial Sequence
  Description of Artificial Sequence: Synthetic oligonucleotide
  Antisense strand to SEQ ID NO: 680388
uaagcagugauauaaaccu

SEQ ID NO: 680390 - RNA, 19 nt, Artificial Sequence
  Description of Artificial Sequence: Synthetic oligonucleotide
  Sense strand starting at position 13 of SEQ ID NO: 585949
guauguucccaauagauaa

SEQ ID NO: 680391 - RNA, 19 nt, Artificial Sequence
  Description of Artificial Sequence: Synthetic oligonucleotide
  Antisense strand to SEQ ID NO: 680390
uuaucuauugggaacauac

SEQ ID NO: 680392 - RNA, 19 nt, Artificial Sequence
  Description of Artificial Sequence: Synthetic oligonucleotide
  Sense strand starting at position 167 of SEQ ID NO: 585949
cucugaaauugccugaaug

SEQ ID NO: 680393 - RNA, 19 nt, Artificial Sequence
  Description of Artificial Sequence: Synthetic oligonucleotide
  Antisense strand to SEQ ID NO: 680392
cauucaggcaauuucagag

SEQ ID NO: 680394 - RNA, 19 nt, Artificial Sequence
  Description of Artificial Sequence: Synthetic oligonucleotide
  Sense strand starting at position 168 of SEQ ID NO: 585949
ucugaaauugccugaauga

SEQ ID NO: 680395 - RNA, 19 nt, Artificial Sequence
  Description of Artificial Sequence: Synthetic oligonucleotide
  Antisense strand to SEQ ID NO: 680394
ucauucaggcaauuucaga

SEQ ID NO: 680396 - RNA, 19 nt, Artificial Sequence
  Description of Artificial Sequence: Synthetic oligonucleotide
  Sense strand starting at position 217 of SEQ ID NO: 585949
ugaggauaugcaggaaugu

SEQ ID NO: 680397 - RNA, 19 nt, Artificial Sequence
  Description of Artificial Sequence: Synthetic oligonucleotide
  Antisense strand to SEQ ID NO: 680396
acauuccugcauauccuca

SEQ ID NO: 680398 - RNA, 19 nt, Artificial Sequence
  Description of Artificial Sequence: Synthetic oligonucleotide
  Sense strand starting at position 289 of SEQ ID NO: 585949
aguuuaacauaguuaggaa

SEQ ID NO: 680399 - RNA, 19 nt, Artificial Sequence
  Description of Artificial Sequence: Synthetic oligonucleotide
  Antisense strand to SEQ ID NO: 680398
uuccuaacuauguuaaacu

SEQ ID NO: 680400 - RNA, 19 nt, Artificial Sequence
  Description of Artificial Sequence: Synthetic oligonucleotide
  Sense strand starting at position 314 of SEQ ID NO: 585949
cgucuacuggaguagaaua

SEQ ID NO: 680401 - RNA, 19 nt, Artificial Sequence
  Description of Artificial Sequence: Synthetic oligonucleotide
  Antisense strand to SEQ ID NO: 680400
uauucuacuccaguagacg

SEQ ID NO: 680402 - RNA, 19 nt, Artificial Sequence
  Description of Artificial Sequence: Synthetic oligonucleotide
  Sense strand starting at position 324 of SEQ ID NO: 585949
aguagaauacauuguauuc

SEQ ID NO: 680403 - RNA, 19 nt, Artificial Sequence
  Description of Artificial Sequence: Synthetic oligonucleotide
  Antisense strand to SEQ ID NO: 680402
gaauacaauguauucuacu

SEQ ID NO: 680404 - RNA, 19 nt, Artificial Sequence
  Description of Artificial Sequence: Synthetic oligonucleotide
  Sense strand starting at position 335 of SEQ ID NO: 585949
uuguauucugaacaguuua

SEQ ID NO: 680405 - RNA, 19 nt, Artificial Sequence
  Description of Artificial Sequence: Synthetic oligonucleotide
  Antisense strand to SEQ ID NO: 680404
uaaacuguucagaauacaa

SEQ ID NO: 680406 - RNA, 19 nt, Artificial Sequence
  Description of Artificial Sequence: Synthetic oligonucleotide
  Sense strand starting at position 379 of SEQ ID NO: 585949
cccaguucuugugcuauuu

SEQ ID NO: 680407 - RNA, 19 nt, Artificial Sequence
  Description of Artificial Sequence: Synthetic oligonucleotide
  Antisense strand to SEQ ID NO: 680406
aaauagcacaagaacuggg

SEQ ID NO: 680408 - RNA, 19 nt, Artificial Sequence
  Description of Artificial Sequence: Synthetic oligonucleotide
  Sense strand starting at position 517 of SEQ ID NO: 585949
gcaugcacucaauaaaugu

SEQ ID NO: 680409 - RNA, 19 nt, Artificial Sequence
  Description of Artificial Sequence: Synthetic oligonucleotide
  Antisense strand to SEQ ID NO: 680408
acauuuauugagugcaugc

SEQ ID NO: 680410 - RNA, 19 nt, Artificial Sequence
  Description of Artificial Sequence: Synthetic oligonucleotide
  Sense strand starting at position 547 of SEQ ID NO: 585949
ucgaguuaucucuagauga

SEQ ID NO: 680411 - RNA, 19 nt, Artificial Sequence
  Description of Artificial Sequence: Synthetic oligonucleotide
  Antisense strand to SEQ ID NO: 680410
ucaucuagagauaacucga

SEQ ID NO: 680412 - RNA, 19 nt, Artificial Sequence
  Description of Artificial Sequence: Synthetic oligonucleotide
  Sense strand starting at position 551 of SEQ ID NO: 585949
guuaucucuagaugaaggu

SEQ ID NO: 680413 - RNA, 19 nt, Artificial Sequence
  Description of Artificial Sequence: Synthetic oligonucleotide
  Antisense strand to SEQ ID NO: 680412
accuucaucuagagauaac

SEQ ID NO: 680414 - RNA, 19 nt, Artificial Sequence
  Description of Artificial Sequence: Synthetic oligonucleotide
  Sense strand starting at position 666 of SEQ ID NO: 585949
aacuuauagggauguauca

SEQ ID NO: 680415 - RNA, 19 nt, Artificial Sequence
  Description of Artificial Sequence: Synthetic oligonucleotide
  Antisense strand to SEQ ID NO: 680414
ugauacaucccuauaaguu

SEQ ID NO: 680416 - RNA, 19 nt, Artificial Sequence
  Description of Artificial Sequence: Synthetic oligonucleotide
  Sense strand starting at position 743 of SEQ ID NO: 585949
guucuaaggcucuaauucu

SEQ ID NO: 680417 - RNA, 19 nt, Artificial Sequence
  Description of Artificial Sequence: Synthetic oligonucleotide
  Antisense strand to SEQ ID NO: 680416
agaauuagagccuuagaac

SEQ ID NO: 680418 - RNA, 19 nt, Artificial Sequence
  Description of Artificial Sequence: Synthetic oligonucleotide
  Sense strand starting at position 930 of SEQ ID NO: 585949
guguaagcuacuuaagaga

SEQ ID NO: 680419 - RNA, 19 nt, Artificial Sequence
  Description of Artificial Sequence: Synthetic oligonucleotide
  Antisense strand to SEQ ID NO: 680418
ucucuuaaguagcuuacac

SEQ ID NO: 680420 - RNA, 19 nt, Artificial Sequence
  Description of Artificial Sequence: Synthetic oligonucleotide
  Sense strand starting at position 1140 of SEQ ID NO: 585949
ugaugacauauguggugau

SEQ ID NO: 680421 - RNA, 19 nt, Artificial Sequence
  Description of Artificial Sequence: Synthetic oligonucleotide
  Antisense strand to SEQ ID NO: 680420
aucaccacauaugucauca

SEQ ID NO: 680422 - RNA, 19 nt, Artificial Sequence
  Description of Artificial Sequence: Synthetic oligonucleotide
  Sense strand starting at position 1288 of SEQ ID NO: 585949
uuaagucuggcucauuaua

SEQ ID NO: 680423 - RNA, 19 nt, Artificial Sequence
  Description of Artificial Sequence: Synthetic oligonucleotide
  Antisense strand to SEQ ID NO: 680422
uauaaugagccagacuuaa

SEQ ID NO: 680424 - RNA, 19 nt, Artificial Sequence
  Description of Artificial Sequence: Synthetic oligonucleotide
  Sense strand starting at position 1308 of SEQ ID NO: 585949
gccuaaagccuguaugaau

SEQ ID NO: 680425 - RNA, 19 nt, Artificial Sequence
  Description of Artificial Sequence: Synthetic oligonucleotide
  Antisense strand to SEQ ID NO: 680424
auucauacaggcuuuaggc

SEQ ID NO: 680426 - RNA, 19 nt, Artificial Sequence
  Description of Artificial Sequence: Synthetic oligonucleotide
  Sense strand starting at position 1612 of SEQ ID NO: 585949
gugcuaauaccagagagcu

SEQ ID NO: 680427 - RNA, 19 nt, Artificial Sequence
  Description of Artificial Sequence: Synthetic oligonucleotide
  Antisense strand to SEQ ID NO: 680426
agcucucugguauuagcac

SEQ ID NO: 680428 - RNA, 19 nt, Artificial Sequence
  Description of Artificial Sequence: Synthetic oligonucleotide
  Sense strand starting at position 1625 of SEQ ID NO: 585949
agagcuuaccuccgaauaa

SEQ ID NO: 680429 - RNA, 19 nt, Artificial Sequence
  Description of Artificial Sequence: Synthetic oligonucleotide
  Antisense strand to SEQ ID NO: 680428
uuauucggagguaagcucu

SEQ ID NO: 680430 - RNA, 19 nt, Artificial Sequence
  Description of Artificial Sequence: Synthetic oligonucleotide
  Sense strand starting at position 1715 of SEQ ID NO: 585949
gcccuauuaccacaagaug

SEQ ID NO: 680431 - RNA, 19 nt, Artificial Sequence
  Description of Artificial Sequence: Synthetic oligonucleotide
  Antisense strand to SEQ ID NO: 680430
caucuugugguaauagggc

SEQ ID NO: 680432 - RNA, 19 nt, Artificial Sequence
  Description of Artificial Sequence: Synthetic oligonucleotide
  Sense strand starting at position 1784 of SEQ ID NO: 585949
caaguugcccacugacaga

SEQ ID NO: 680433 - RNA, 19 nt, Artificial Sequence
  Description of Artificial Sequence: Synthetic oligonucleotide
  Antisense strand to SEQ ID NO: 680432
ucugucagugggcaacuug

SEQ ID NO: 680434 - RNA, 19 nt, Artificial Sequence
  Description of Artificial Sequence: Synthetic oligonucleotide
  Sense strand starting at position 1907 of SEQ ID NO: 585949
uggagagccauguacacau

SEQ ID NO: 680435 - RNA, 19 nt, Artificial Sequence
  Description of Artificial Sequence: Synthetic oligonucleotide
  Antisense strand to SEQ ID NO: 680434
auguguacauggcucucca

SEQ ID NO: 680436 - RNA, 19 nt, Artificial Sequence
  Description of Artificial Sequence: Synthetic oligonucleotide
  Sense strand starting at position 2007 of SEQ ID NO: 585949
ucaauuacuccuggagacu

SEQ ID NO: 680437 - RNA, 19 nt, Artificial Sequence
  Description of Artificial Sequence: Synthetic oligonucleotide
  Antisense strand to SEQ ID NO: 680436
agucuccaggaguaauuga

SEQ ID NO: 680438 - RNA, 19 nt, Artificial Sequence
  Description of Artificial Sequence: Synthetic oligonucleotide
  Sense strand starting at position 2126 of SEQ ID NO: 585949
cuuauuaaacgauggaguu

SEQ ID NO: 680439 - RNA, 19 nt, Artificial Sequence
  Description of Artificial Sequence: Synthetic oligonucleotide
  Antisense strand to SEQ ID NO: 680438
aacuccaucguuuaauaag

SEQ ID NO: 680440 - RNA, 19 nt, Artificial Sequence
  Description of Artificial Sequence: Synthetic oligonucleotide
  Sense strand starting at position 2127 of SEQ ID NO: 585949
uuauuaaacgauggaguuc

SEQ ID NO: 680441 - RNA, 19 nt, Artificial Sequence
  Description of Artificial Sequence: Synthetic oligonucleotide
  Antisense strand to SEQ ID NO: 680440
gaacuccaucguuuaauaa

SEQ ID NO: 680442 - RNA, 19 nt, Artificial Sequence
  Description of Artificial Sequence: Synthetic oligonucleotide
  Sense strand starting at position 2162 of SEQ ID NO: 585949
uuggucagauuugaaagau

SEQ ID NO: 680443 - RNA, 19 nt, Artificial Sequence
  Description of Artificial Sequence: Synthetic oligonucleotide
  Antisense strand to SEQ ID NO: 680442
aucuuucaaaucugaccaa

SEQ ID NO: 680444 - RNA, 19 nt, Artificial Sequence
  Description of Artificial Sequence: Synthetic oligonucleotide
  Sense strand starting at position 2171 of SEQ ID NO: 585949
uuugaaagaugaguugauu

SEQ ID NO: 680445 - RNA, 19 nt, Artificial Sequence
  Description of Artificial Sequence: Synthetic oligonucleotide
  Antisense strand to SEQ ID NO: 680444
aaucaacucaucuuucaaa

SEQ ID NO: 680446 - RNA, 19 nt, Artificial Sequence
  Description of Artificial Sequence: Synthetic oligonucleotide
  Sense strand starting at position 2286 of SEQ ID NO: 585949
caguuaggucuugagauug

SEQ ID NO: 680447 - RNA, 19 nt, Artificial Sequence
  Description of Artificial Sequence: Synthetic oligonucleotide
  Antisense strand to SEQ ID NO: 680446
caaucucaagaccuaacug

SEQ ID NO: 680448 - RNA, 19 nt, Artificial Sequence
  Description of Artificial Sequence: Synthetic oligonucleotide
  Sense strand starting at position 2294 of SEQ ID NO: 585949
ucuugagauuguuuccaaa

SEQ ID NO: 680449 - RNA, 19 nt, Artificial Sequence
  Description of Artificial Sequence: Synthetic oligonucleotide
  Antisense strand to SEQ ID NO: 680448
uuuggaaacaaucucaaga

SEQ ID NO: 680450 - RNA, 19 nt, Artificial Sequence
  Description of Artificial Sequence: Synthetic oligonucleotide
  Sense strand starting at position 2296 of SEQ ID NO: 585949
uugagauuguuuccaaagg

SEQ ID NO: 680451 - RNA, 19 nt, Artificial Sequence
  Description of Artificial Sequence: Synthetic oligonucleotide
  Antisense strand to SEQ ID NO: 680450
ccuuuggaaacaaucucaa

SEQ ID NO: 680452 - RNA, 19 nt, Artificial Sequence
  Description of Artificial Sequence: Synthetic oligonucleotide
  Sense strand starting at position 2485 of SEQ ID NO: 585949
cacaauauuguggguagaa

SEQ ID NO: 680453 - RNA, 19 nt, Artificial Sequence
  Description of Artificial Sequence: Synthetic oligonucleotide
  Antisense strand to SEQ ID NO: 680452
uucuacccacaauauugug

SEQ ID NO: 680454 - RNA, 19 nt, Artificial Sequence
  Description of Artificial Sequence: Synthetic oligonucleotide
  Sense strand starting at position 2486 of SEQ ID NO: 585949
acaauauuguggguagaau

SEQ ID NO: 680455 - RNA, 19 nt, Artificial Sequence
  Description of Artificial Sequence: Synthetic oligonucleotide
  Antisense strand to SEQ ID NO: 680454
auucuacccacaauauugu

SEQ ID NO: 680456 - RNA, 19 nt, Artificial Sequence
  Description of Artificial Sequence: Synthetic oligonucleotide
  Sense strand starting at position 2719 of SEQ ID NO: 585949
ggcaucuaauauguaauga

SEQ ID NO: 680457 - RNA, 19 nt, Artificial Sequence
  Description of Artificial Sequence: Synthetic oligonucleotide
  Antisense strand to SEQ ID NO: 680456
ucauuacauauuagaugcc

SEQ ID NO: 680458 - RNA, 19 nt, Artificial Sequence
  Description of Artificial Sequence: Synthetic oligonucleotide
  Sense strand starting at position 2735 of SEQ ID NO: 585949
ugaucacaucaagguaagu

SEQ ID NO: 680459 - RNA, 19 nt, Artificial Sequence
  Description of Artificial Sequence: Synthetic oligonucleotide
  Antisense strand to SEQ ID NO: 680458
acuuaccuugaugugauca

SEQ ID NO: 680460 - RNA, 19 nt, Artificial Sequence
  Description of Artificial Sequence: Synthetic oligonucleotide
  Sense strand starting at position 3231 of SEQ ID NO: 585949
ugaaacaugcugcaauaua

SEQ ID NO: 680461 - RNA, 19 nt, Artificial Sequence
  Description of Artificial Sequence: Synthetic oligonucleotide
  Antisense strand to SEQ ID NO: 680460
uauauugcagcauguuuca

SEQ ID NO: 680462 - RNA, 19 nt, Artificial Sequence
  Description of Artificial Sequence: Synthetic oligonucleotide
  Sense strand starting at position 3260 of SEQ ID NO: 585949
cagauaccucuccgauaga

SEQ ID NO: 680463 - RNA, 19 nt, Artificial Sequence
  Description of Artificial Sequence: Synthetic oligonucleotide
  Antisense strand to SEQ ID NO: 680462
ucuaucggagagguaucug

SEQ ID NO: 680464 - RNA, 19 nt, Artificial Sequence
  Description of Artificial Sequence: Synthetic oligonucleotide
  Sense strand starting at position 3524 of SEQ ID NO: 585949
ccuuucucugaugaucgau

SEQ ID NO: 680465 - RNA, 19 nt, Artificial Sequence
  Description of Artificial Sequence: Synthetic oligonucleotide
  Antisense strand to SEQ ID NO: 680464
aucgaucaucagagaaagg

SEQ ID NO: 680466 - RNA, 19 nt, Artificial Sequence
  Description of Artificial Sequence: Synthetic oligonucleotide
  Sense strand starting at position 3799 of SEQ ID NO: 585949
cuuagcugugcccuguaau

SEQ ID NO: 680467 - RNA, 19 nt, Artificial Sequence
  Description of Artificial Sequence: Synthetic oligonucleotide
  Antisense strand to SEQ ID NO: 680466
auuacagggcacagcuaag

SEQ ID NO: 680468 - RNA, 19 nt, Artificial Sequence
  Description of Artificial Sequence: Synthetic oligonucleotide
  Sense strand starting at position 3837 of SEQ ID NO: 585949
cuuguuaaccgcuauaaag

SEQ ID NO: 680469 - RNA, 19 nt, Artificial Sequence
  Description of Artificial Sequence: Synthetic oligonucleotide
  Antisense strand to SEQ ID NO: 680468
cuuuauagcgguuaacaag

SEQ ID NO: 680470 - RNA, 19 nt, Artificial Sequence
  Description of Artificial Sequence: Synthetic oligonucleotide
  Sense strand starting at position 47 of SEQ ID NO: 585950
gugggaucccaguaugguu

SEQ ID NO: 680471 - RNA, 19 nt, Artificial Sequence
  Description of Artificial Sequence: Synthetic oligonucleotide
  Antisense strand to SEQ ID NO: 680470
aaccauacugggaucccac

SEQ ID NO: 680472 - RNA, 19 nt, Artificial Sequence
  Description of Artificial Sequence: Synthetic oligonucleotide
  Sense strand starting at position 52 of SEQ ID NO: 585950
aucccaguaugguuagaac

SEQ ID NO: 680473 - RNA, 19 nt, Artificial Sequence
  Description of Artificial Sequence: Synthetic oligonucleotide
  Antisense strand to SEQ ID NO: 680472
guucuaaccauacugggau

SEQ ID NO: 680474 - RNA, 19 nt, Artificial Sequence
  Description of Artificial Sequence: Synthetic oligonucleotide
  Sense strand starting at position 144 of SEQ ID NO: 585950
acuguaacucucuaguuau

SEQ ID NO: 680475 - RNA, 19 nt, Artificial Sequence
  Description of Artificial Sequence: Synthetic oligonucleotide
  Antisense strand to SEQ ID NO: 680474
auaacuagagaguuacagu

SEQ ID NO: 680476 - RNA, 19 nt, Artificial Sequence
  Description of Artificial Sequence: Synthetic oligonucleotide
  Sense strand starting at position 147 of SEQ ID NO: 585950
guaacucucuaguuauuaa

SEQ ID NO: 680477 - RNA, 19 nt, Artificial Sequence
  Description of Artificial Sequence: Synthetic oligonucleotide
  Antisense strand to SEQ ID NO: 680476
uuaauaacuagagaguuac

SEQ ID NO: 680478 - RNA, 19 nt, Artificial Sequence
  Description of Artificial Sequence: Synthetic oligonucleotide
  Sense strand starting at position 231 of SEQ ID NO: 585950
ugucaucaacacugaagua

SEQ ID NO: 680479 - RNA, 19 nt, Artificial Sequence
  Description of Artificial Sequence: Synthetic oligonucleotide
  Antisense strand to SEQ ID NO: 680478
uacuucaguguugaugaca

SEQ ID NO: 680480 - RNA, 19 nt, Artificial Sequence
  Description of Artificial Sequence: Synthetic oligonucleotide
  Sense strand starting at position 245 of SEQ ID NO: 585950
aaguaagcacuguagaauu

SEQ ID NO: 680481 - RNA, 19 nt, Artificial Sequence
  Description of Artificial Sequence: Synthetic oligonucleotide
  Antisense strand to SEQ ID NO: 680480
aauucuacagugcuuacuu

SEQ ID NO: 680482 - RNA, 19 nt, Artificial Sequence
  Description of Artificial Sequence: Synthetic oligonucleotide
  Sense strand starting at position 440 of SEQ ID NO: 585950
ucaagagaacuugguacua

SEQ ID NO: 680483 - RNA, 19 nt, Artificial Sequence
  Description of Artificial Sequence: Synthetic oligonucleotide
  Antisense strand to SEQ ID NO: 680482
uaguaccaaguucucuuga

SEQ ID NO: 680484 - RNA, 19 nt, Artificial Sequence
  Description of Artificial Sequence: Synthetic oligonucleotide
  Sense strand starting at position 495 of SEQ ID NO: 585950
auucucagauaugcaagaa

SEQ ID NO: 680485 - RNA, 19 nt, Artificial Sequence
  Description of Artificial Sequence: Synthetic oligonucleotide
  Antisense strand to SEQ ID NO: 680484
uucuugcauaucugagaau

SEQ ID NO: 680486 - RNA, 19 nt, Artificial Sequence
  Description of Artificial Sequence: Synthetic oligonucleotide
  Sense strand starting at position 603 of SEQ ID NO: 585950
cugugcuuucgacaaagaa

SEQ ID NO: 680487 - RNA, 19 nt, Artificial Sequence
  Description of Artificial Sequence: Synthetic oligonucleotide
  Antisense strand to SEQ ID NO: 680486
uucuuugucgaaagcacag

SEQ ID NO: 680488 - RNA, 19 nt, Artificial Sequence
  Description of Artificial Sequence: Synthetic oligonucleotide
  Sense strand starting at position 607 of SEQ ID NO: 585950
gcuuucgacaaagaaaugu

SEQ ID NO: 680489 - RNA, 19 nt, Artificial Sequence
  Description of Artificial Sequence: Synthetic oligonucleotide
  Antisense strand to SEQ ID NO: 680488
acauuucuuugucgaaagc

SEQ ID NO: 680490 - RNA, 19 nt, Artificial Sequence
  Description of Artificial Sequence: Synthetic oligonucleotide
  Sense strand starting at position 916 of SEQ ID NO: 585950
gucauaaguccucauaugu

SEQ ID NO: 680491 - RNA, 19 nt, Artificial Sequence
  Description of Artificial Sequence: Synthetic oligonucleotide
  Antisense strand to SEQ ID NO: 680490
acauaugaggacuuaugac

SEQ ID NO: 680492 - RNA, 19 nt, Artificial Sequence
  Description of Artificial Sequence: Synthetic oligonucleotide
  Sense strand starting at position 925 of SEQ ID NO: 585950
ccucauaugugaccugaua

SEQ ID NO: 680493 - RNA, 19 nt, Artificial Sequence
  Description of Artificial Sequence: Synthetic oligonucleotide
  Antisense strand to SEQ ID NO: 680492
uaucaggucacauaugagg

SEQ ID NO: 680494 - RNA, 19 nt, Artificial Sequence
  Description of Artificial Sequence: Synthetic oligonucleotide
  Sense strand starting at position 962 of SEQ ID NO: 585950
acauuagaaucgucaauac

SEQ ID NO: 680495 - RNA, 19 nt, Artificial Sequence
  Description of Artificial Sequence: Synthetic oligonucleotide
  Antisense strand to SEQ ID NO: 680494
guauugacgauucuaaugu

SEQ ID NO: 680496 - RNA, 19 nt, Artificial Sequence
  Description of Artificial Sequence: Synthetic oligonucleotide
  Sense strand starting at position 1244 of SEQ ID NO: 585950
cagcucauuccguggauuu

SEQ ID NO: 680497 - RNA, 19 nt, Artificial Sequence
  Description of Artificial Sequence: Synthetic oligonucleotide
  Antisense strand to SEQ ID NO: 680496
aaauccacggaaugagcug

SEQ ID NO: 680498 - RNA, 19 nt, Artificial Sequence
  Description of Artificial Sequence: Synthetic oligonucleotide
  Sense strand starting at position 1256 of SEQ ID NO: 585950
uggauuugcucuuucguaa

SEQ ID NO: 680499 - RNA, 19 nt, Artificial Sequence
  Description of Artificial Sequence: Synthetic oligonucleotide
  Antisense strand to SEQ ID NO: 680498
uuacgaaagagcaaaucca

SEQ ID NO: 680500 - RNA, 19 nt, Artificial Sequence
  Description of Artificial Sequence: Synthetic oligonucleotide
  Sense strand starting at position 1271 of SEQ ID NO: 585950
guaaaucucgagcaagaca

SEQ ID NO: 680501 - RNA, 19 nt, Artificial Sequence
  Description of Artificial Sequence: Synthetic oligonucleotide
  Antisense strand to SEQ ID NO: 680500
ugucuugcucgagauuuac

SEQ ID NO: 680502 - RNA, 19 nt, Artificial Sequence
  Description of Artificial Sequence: Synthetic oligonucleotide
  Sense strand starting at position 1498 of SEQ ID NO: 585950
gauguuguuggaggugaca

SEQ ID NO: 680503 - RNA, 19 nt, Artificial Sequence
  Description of Artificial Sequence: Synthetic oligonucleotide
  Antisense strand to SEQ ID NO: 680502
ugucaccuccaacaacauc

SEQ ID NO: 680504 - RNA, 19 nt, Artificial Sequence
  Description of Artificial Sequence: Synthetic oligonucleotide
  Sense strand starting at position 1500 of SEQ ID NO: 585950
uguuguuggaggugacaaa

SEQ ID NO: 680505 - RNA, 19 nt, Artificial Sequence
  Description of Artificial Sequence: Synthetic oligonucleotide
  Antisense strand to SEQ ID NO: 680504
uuugucaccuccaacaaca

SEQ ID NO: 680506 - RNA, 19 nt, Artificial Sequence
  Description of Artificial Sequence: Synthetic oligonucleotide
  Sense strand starting at position 1527 of SEQ ID NO: 585950
ugccgaugggaaugaagau

SEQ ID NO: 680507 - RNA, 19 nt, Artificial Sequence
  Description of Artificial Sequence: Synthetic oligonucleotide
  Antisense strand to SEQ ID NO: 680506
aucuucauucccaucggca

SEQ ID NO: 680508 - RNA, 19 nt, Artificial Sequence
  Description of Artificial Sequence: Synthetic oligonucleotide
  Sense strand starting at position 1630 of SEQ ID NO: 585950
cguguuauccggucuccga

SEQ ID NO: 680509 - RNA, 19 nt, Artificial Sequence
  Description of Artificial Sequence: Synthetic oligonucleotide
  Antisense strand to SEQ ID NO: 680508
ucggagaccggauaacacg

SEQ ID NO: 680510 - RNA, 19 nt, Artificial Sequence
  Description of Artificial Sequence: Synthetic oligonucleotide
  Sense strand starting at position 1694 of SEQ ID NO: 585950
ucauccuucgcguuauagu

SEQ ID NO: 680511 - RNA, 19 nt, Artificial Sequence
  Description of Artificial Sequence: Synthetic oligonucleotide
  Antisense strand to SEQ ID NO: 680510
acuauaacgcgaaggauga

SEQ ID NO: 680512 - RNA, 19 nt, Artificial Sequence
  Description of Artificial Sequence: Synthetic oligonucleotide
  Sense strand starting at position 2440 of SEQ ID NO: 585950
gugacuuagcccuauuauc

SEQ ID NO: 680513 - RNA, 19 nt, Artificial Sequence
  Description of Artificial Sequence: Synthetic oligonucleotide
  Antisense strand to SEQ ID NO: 680512
gauaauagggcuaagucac

SEQ ID NO: 680514 - RNA, 19 nt, Artificial Sequence
  Description of Artificial Sequence: Synthetic oligonucleotide
  Sense strand starting at position 2549 of SEQ ID NO: 585950
ugcgcauugauauaggaag

SEQ ID NO: 680515 - RNA, 19 nt, Artificial Sequence
  Description of Artificial Sequence: Synthetic oligonucleotide
  Antisense strand to SEQ ID NO: 680514
cuuccuauaucaaugcgca

SEQ ID NO: 680516 - RNA, 19 nt, Artificial Sequence
  Description of Artificial Sequence: Synthetic oligonucleotide
  Sense strand starting at position 2637 of SEQ ID NO: 585950
augagauacuccguaaaca

SEQ ID NO: 680517 - RNA, 19 nt, Artificial Sequence
  Description of Artificial Sequence: Synthetic oligonucleotide
  Antisense strand to SEQ ID NO: 680516
uguuuacggaguaucucau

SEQ ID NO: 680518 - RNA, 19 nt, Artificial Sequence
  Description of Artificial Sequence: Synthetic oligonucleotide
  Sense strand starting at position 2638 of SEQ ID NO: 585950
ugagauacuccguaaacac

SEQ ID NO: 680519 - RNA, 19 nt, Artificial Sequence
  Description of Artificial Sequence: Synthetic oligonucleotide
  Antisense strand to SEQ ID NO: 680518
guguuuacggaguaucuca

SEQ ID NO: 680520 - RNA, 19 nt, Artificial Sequence
  Description of Artificial Sequence: Synthetic oligonucleotide
  Sense strand starting at position 2663 of SEQ ID NO: 585950
agugccagcuauuuaauga

SEQ ID NO: 680521 - RNA, 19 nt, Artificial Sequence
  Description of Artificial Sequence: Synthetic oligonucleotide
  Antisense strand to SEQ ID NO: 680520
ucauuaaauagcuggcacu

SEQ ID NO: 680522 - RNA, 19 nt, Artificial Sequence
  Description of Artificial Sequence: Synthetic oligonucleotide
  Sense strand starting at position 2720 of SEQ ID NO: 585950
aggauauuagaguagugua

SEQ ID NO: 680523 - RNA, 19 nt, Artificial Sequence
  Description of Artificial Sequence: Synthetic oligonucleotide
  Antisense strand to SEQ ID NO: 680522
uacacuacucuaauauccu

SEQ ID NO: 680524 - RNA, 19 nt, Artificial Sequence
  Description of Artificial Sequence: Synthetic oligonucleotide
  Sense strand starting at position 2732 of SEQ ID NO: 585950
uaguguagcgacuauagaa

SEQ ID NO: 680525 - RNA, 19 nt, Artificial Sequence
  Description of Artificial Sequence: Synthetic oligonucleotide
  Antisense strand to SEQ ID NO: 680524
uucuauagucgcuacacua

SEQ ID NO: 680526 - RNA, 19 nt, Artificial Sequence
  Description of Artificial Sequence: Synthetic oligonucleotide
  Sense strand starting at position 2863 of SEQ ID NO: 585950
ggcguuauguuauuuguaa

SEQ ID NO: 680527 - RNA, 19 nt, Artificial Sequence
  Description of Artificial Sequence: Synthetic oligonucleotide
  Antisense strand to SEQ ID NO: 680526
uuacaaauaacauaacgcc

SEQ ID NO: 680528 - RNA, 19 nt, Artificial Sequence
  Description of Artificial Sequence: Synthetic oligonucleotide
  Sense strand starting at position 2864 of SEQ ID NO: 585950
gcguuauguuauuuguaaa

SEQ ID NO: 680529 - RNA, 19 nt, Artificial Sequence
  Description of Artificial Sequence: Synthetic oligonucleotide
  Antisense strand to SEQ ID NO: 680528
uuuacaaauaacauaacgc

SEQ ID NO: 680530 - RNA, 19 nt, Artificial Sequence
  Description of Artificial Sequence: Synthetic oligonucleotide
  Sense strand starting at position 2920 of SEQ ID NO: 585950
cuuugaaauccaggccaga

SEQ ID NO: 680531 - RNA, 19 nt, Artificial Sequence
  Description of Artificial Sequence: Synthetic oligonucleotide
  Antisense strand to SEQ ID NO: 680530
ucuggccuggauuucaaag

SEQ ID NO: 680532 - RNA, 19 nt, Artificial Sequence
  Description of Artificial Sequence: Synthetic oligonucleotide
  Sense strand starting at position 2989 of SEQ ID NO: 585950
gcaguaaugccuuaaagaa

SEQ ID NO: 680533 - RNA, 19 nt, Artificial Sequence
  Description of Artificial Sequence: Synthetic oligonucleotide
  Antisense strand to SEQ ID NO: 680532
uucuuuaaggcauuacugc

SEQ ID NO: 680534 - RNA, 19 nt, Artificial Sequence
  Description of Artificial Sequence: Synthetic oligonucleotide
  Sense strand starting at position 3421 of SEQ ID NO: 585950
auguuuacuaggcagaguu

SEQ ID NO: 680535 - RNA, 19 nt, Artificial Sequence
  Description of Artificial Sequence: Synthetic oligonucleotide
  Antisense strand to SEQ ID NO: 680534
aacucugccuaguaaacau

SEQ ID NO: 680536 - RNA, 19 nt, Artificial Sequence
  Description of Artificial Sequence: Synthetic oligonucleotide
  Sense strand starting at position 3423 of SEQ ID NO: 585950
guuuacuaggcagaguuua

SEQ ID NO: 680537 - RNA, 19 nt, Artificial Sequence
  Description of Artificial Sequence: Synthetic oligonucleotide
  Antisense strand to SEQ ID NO: 680536
uaaacucugccuaguaaac

SEQ ID NO: 680538 - RNA, 19 nt, Artificial Sequence
  Description of Artificial Sequence: Synthetic oligonucleotide
  Sense strand starting at position 3433 of SEQ ID NO: 585950
cagaguuuagagugauaua

SEQ ID NO: 680539 - RNA, 19 nt, Artificial Sequence
  Description of Artificial Sequence: Synthetic oligonucleotide
  Antisense strand to SEQ ID NO: 680538
uauaucacucuaaacucug

SEQ ID NO: 680540 - RNA, 19 nt, Artificial Sequence
  Description of Artificial Sequence: Synthetic oligonucleotide
  Sense strand starting at position 3529 of SEQ ID NO: 585950
ugacauacuuaggucuaua

SEQ ID NO: 680541 - RNA, 19 nt, Artificial Sequence
  Description of Artificial Sequence: Synthetic oligonucleotide
  Antisense strand to SEQ ID NO: 680540
uauagaccuaaguauguca

SEQ ID NO: 680542 - RNA, 19 nt, Artificial Sequence
  Description of Artificial Sequence: Synthetic oligonucleotide
  Sense strand starting at position 3670 of SEQ ID NO: 585950
gccacaauaugggcauauu

SEQ ID NO: 680543 - RNA, 19 nt, Artificial Sequence
  Description of Artificial Sequence: Synthetic oligonucleotide
  Antisense strand to SEQ ID NO: 680542
aauaugcccauauuguggc

SEQ ID NO: 680544 - RNA, 19 nt, Artificial Sequence
  Description of Artificial Sequence: Synthetic oligonucleotide
  Sense strand starting at position 3781 of SEQ ID NO: 585950
uccagcacucuguauauau

SEQ ID NO: 680545 - RNA, 19 nt, Artificial Sequence
  Description of Artificial Sequence: Synthetic oligonucleotide
  Antisense strand to SEQ ID NO: 680544
auauauacagagugcugga

SEQ ID NO: 680546 - RNA, 19 nt, Artificial Sequence
  Description of Artificial Sequence: Synthetic oligonucleotide
  Sense strand starting at position 3836 of SEQ ID NO: 585950
ugaucugagugauugugau

SEQ ID NO: 680547 - RNA, 19 nt, Artificial Sequence
  Description of Artificial Sequence: Synthetic oligonucleotide
  Antisense strand to SEQ ID NO: 680546
aucacaaucacucagauca

SEQ ID NO: 680548 - RNA, 19 nt, Artificial Sequence
  Description of Artificial Sequence: Synthetic oligonucleotide
  Sense strand starting at position 3855 of SEQ ID NO: 585950
guauuuaucugcuuccuuu

SEQ ID NO: 680549 - RNA, 19 nt, Artificial Sequence
  Description of Artificial Sequence: Synthetic oligonucleotide
  Antisense strand to SEQ ID NO: 680548
aaaggaagcagauaaauac

SEQ ID NO: 680550 - RNA, 19 nt, Artificial Sequence
  Description of Artificial Sequence: Synthetic oligonucleotide
  Sense strand starting at position 14 of SEQ ID NO: 585951
ggacucugccacugaguga

SEQ ID NO: 680551 - RNA, 19 nt, Artificial Sequence
  Description of Artificial Sequence: Synthetic oligonucleotide
  Antisense strand to SEQ ID NO: 680550
ucacucaguggcagagucc

SEQ ID NO: 680552 - RNA, 19 nt, Artificial Sequence
  Description of Artificial Sequence: Synthetic oligonucleotide
  Sense strand starting at position 36 of SEQ ID NO: 585951
ggaauauucucacucuuug

SEQ ID NO: 680553 - RNA, 19 nt, Artificial Sequence
  Description of Artificial Sequence: Synthetic oligonucleotide
  Antisense strand to SEQ ID NO: 680552
caaagagugagaauauucc

SEQ ID NO: 680554 - RNA, 19 nt, Artificial Sequence
  Description of Artificial Sequence: Synthetic oligonucleotide
  Sense strand starting at position 98 of SEQ ID NO: 585951
gggagaguuaugggucaga

SEQ ID NO: 680555 - RNA, 19 nt, Artificial Sequence
  Description of Artificial Sequence: Synthetic oligonucleotide
  Antisense strand to SEQ ID NO: 680554
ucugacccauaacucuccc

SEQ ID NO: 680556 - RNA, 19 nt, Artificial Sequence
  Description of Artificial Sequence: Synthetic oligonucleotide
  Sense strand starting at position 101 of SEQ ID NO: 585951
agaguuaugggucagaagu

SEQ ID NO: 680557 - RNA, 19 nt, Artificial Sequence
  Description of Artificial Sequence: Synthetic oligonucleotide
  Antisense strand to SEQ ID NO: 680556
acuucugacccauaacucu

SEQ ID NO: 680558 - RNA, 19 nt, Artificial Sequence
  Description of Artificial Sequence: Synthetic oligonucleotide
  Sense strand starting at position 185 of SEQ ID NO: 585951
cuuguuugauucccaugau

SEQ ID NO: 680559 - RNA, 19 nt, Artificial Sequence
  Description of Artificial Sequence: Synthetic oligonucleotide
  Antisense strand to SEQ ID NO: 680558
aucaugggaaucaaacaag

SEQ ID NO: 680560 - RNA, 19 nt, Artificial Sequence
  Description of Artificial Sequence: Synthetic oligonucleotide
  Sense strand starting at position 188 of SEQ ID NO: 585951
guuugauucccaugauaaa

SEQ ID NO: 680561 - RNA, 19 nt, Artificial Sequence
  Description of Artificial Sequence: Synthetic oligonucleotide
  Antisense strand to SEQ ID NO: 680560
uuuaucaugggaaucaaac

SEQ ID NO: 680562 - RNA, 19 nt, Artificial Sequence
  Description of Artificial Sequence: Synthetic oligonucleotide
  Sense strand starting at position 572 of SEQ ID NO: 585951
uuaaguaacuugucaaggu

SEQ ID NO: 680563 - RNA, 19 nt, Artificial Sequence
  Description of Artificial Sequence: Synthetic oligonucleotide
  Antisense strand to SEQ ID NO: 680562
accuugacaaguuacuuaa

SEQ ID NO: 680564 - RNA, 19 nt, Artificial Sequence
  Description of Artificial Sequence: Synthetic oligonucleotide
  Sense strand starting at position 624 of SEQ ID NO: 585951
aacgcaggucucuaagacu

SEQ ID NO: 680565 - RNA, 19 nt, Artificial Sequence
  Description of Artificial Sequence: Synthetic oligonucleotide
  Antisense strand to SEQ ID NO: 680564
agucuuagagaccugcguu

SEQ ID NO: 680566 - RNA, 19 nt, Artificial Sequence
  Description of Artificial Sequence: Synthetic oligonucleotide
  Sense strand starting at position 642 of SEQ ID NO: 585951
ucugcuauacuuggagaga

SEQ ID NO: 680567 - RNA, 19 nt, Artificial Sequence
  Description of Artificial Sequence: Synthetic oligonucleotide
  Antisense strand to SEQ ID NO: 680566
ucucuccaaguauagcaga

SEQ ID NO: 680568 - RNA, 19 nt, Artificial Sequence
  Description of Artificial Sequence: Synthetic oligonucleotide
  Sense strand starting at position 1241 of SEQ ID NO: 585951
cucgguuucgcgucugaau

SEQ ID NO: 680569 - RNA, 19 nt, Artificial Sequence
  Description of Artificial Sequence: Synthetic oligonucleotide
  Antisense strand to SEQ ID NO: 680568
auucagacgcgaaaccgag

SEQ ID NO: 680570 - RNA, 19 nt, Artificial Sequence
  Description of Artificial Sequence: Synthetic oligonucleotide
  Sense strand starting at position 1242 of SEQ ID NO: 585951
ucgguuucgcgucugaauc

SEQ ID NO: 680571 - RNA, 19 nt, Artificial Sequence
  Description of Artificial Sequence: Synthetic oligonucleotide
  Antisense strand to SEQ ID NO: 680570
gauucagacgcgaaaccga

SEQ ID NO: 680572 - RNA, 19 nt, Artificial Sequence
  Description of Artificial Sequence: Synthetic oligonucleotide
  Sense strand starting at position 1908 of SEQ ID NO: 585951
guggugggaucuucgaaga

SEQ ID NO: 680573 - RNA, 19 nt, Artificial Sequence
  Description of Artificial Sequence: Synthetic oligonucleotide
  Antisense strand to SEQ ID NO: 680572
ucuucgaagaucccaccac

SEQ ID NO: 680574 - RNA, 19 nt, Artificial Sequence
  Description of Artificial Sequence: Synthetic oligonucleotide
  Sense strand starting at position 2684 of SEQ ID NO: 585951
ccaacuuaggucuggagau

SEQ ID NO: 680575 - RNA, 19 nt, Artificial Sequence
  Description of Artificial Sequence: Synthetic oligonucleotide
  Antisense strand to SEQ ID NO: 680574
aucuccagaccuaaguugg

SEQ ID NO: 680576 - RNA, 19 nt, Artificial Sequence
  Description of Artificial Sequence: Synthetic oligonucleotide
  Sense strand starting at position 2690 of SEQ ID NO: 585951
uaggucuggagaugaguua

SEQ ID NO: 680577 - RNA, 19 nt, Artificial Sequence
  Description of Artificial Sequence: Synthetic oligonucleotide
  Antisense strand to SEQ ID NO: 680576
uaacucaucuccagaccua

SEQ ID NO: 680578 - RNA, 19 nt, Artificial Sequence
  Description of Artificial Sequence: Synthetic oligonucleotide
  Sense strand starting at position 2723 of SEQ ID NO: 585951
uggugugaggauugaguuu

SEQ ID NO: 680579 - RNA, 19 nt, Artificial Sequence
  Description of Artificial Sequence: Synthetic oligonucleotide
  Antisense strand to SEQ ID NO: 680578
aaacucaauccucacacca

SEQ ID NO: 680580 - RNA, 19 nt, Artificial Sequence
  Description of Artificial Sequence: Synthetic oligonucleotide
  Sense strand starting at position 2822 of SEQ ID NO: 585951
ugcaucuaccagugauuaa

SEQ ID NO: 680581 - RNA, 19 nt, Artificial Sequence
  Description of Artificial Sequence: Synthetic oligonucleotide
  Antisense strand to SEQ ID NO: 680580
uuaaucacugguagaugca

SEQ ID NO: 680582 - RNA, 19 nt, Artificial Sequence
  Description of Artificial Sequence: Synthetic oligonucleotide
  Sense strand starting at position 2976 of SEQ ID NO: 585951
uccacagccgacgauaaau

SEQ ID NO: 680583 - RNA, 19 nt, Artificial Sequence
  Description of Artificial Sequence: Synthetic oligonucleotide
  Antisense strand to SEQ ID NO: 680582
auuuaucgucggcugugga

SEQ ID NO: 680584 - RNA, 19 nt, Artificial Sequence
  Description of Artificial Sequence: Synthetic oligonucleotide
  Sense strand starting at position 3076 of SEQ ID NO: 585951
ugggaaacucugggaguuu

SEQ ID NO: 680585 - RNA, 19 nt, Artificial Sequence
  Description of Artificial Sequence: Synthetic oligonucleotide
  Antisense strand to SEQ ID NO: 680584
aaacucccagaguuuccca

SEQ ID NO: 680586 - RNA, 19 nt, Artificial Sequence
  Description of Artificial Sequence: Synthetic oligonucleotide
  Sense strand starting at position 3256 of SEQ ID NO: 585951
agguuugauuuauugcagu

SEQ ID NO: 680587 - RNA, 19 nt, Artificial Sequence
  Description of Artificial Sequence: Synthetic oligonucleotide
  Antisense strand to SEQ ID NO: 680586
acugcaauaaaucaaaccu

SEQ ID NO: 680588 - RNA, 19 nt, Artificial Sequence
  Description of Artificial Sequence: Synthetic oligonucleotide
  Sense strand starting at position 3285 of SEQ ID NO: 585951
cugaauccuauuggugagu

SEQ ID NO: 680589 - RNA, 19 nt, Artificial Sequence
  Description of Artificial Sequence: Synthetic oligonucleotide
  Antisense strand to SEQ ID NO: 680588
acucaccaauaggauucag

SEQ ID NO: 680590 - RNA, 19 nt, Artificial Sequence
  Description of Artificial Sequence: Synthetic oligonucleotide
  Sense strand starting at position 3286 of SEQ ID NO: 585951
ugaauccuauuggugaguu

SEQ ID NO: 680591 - RNA, 19 nt, Artificial Sequence
  Description of Artificial Sequence: Synthetic oligonucleotide
  Antisense strand to SEQ ID NO: 680590
aacucaccaauaggauuca

SEQ ID NO: 680592 - RNA, 19 nt, Artificial Sequence
  Description of Artificial Sequence: Synthetic oligonucleotide
  Sense strand starting at position 3290 of SEQ ID NO: 585951
uccuauuggugaguuggaa

SEQ ID NO: 680593 - RNA, 19 nt, Artificial Sequence
  Description of Artificial Sequence: Synthetic oligonucleotide
  Antisense strand to SEQ ID NO: 680592
uuccaacucaccaauagga

SEQ ID NO: 680594 - RNA, 19 nt, Artificial Sequence
  Description of Artificial Sequence: Synthetic oligonucleotide
  Sense strand starting at position 3306 of SEQ ID NO: 585951
gaaaucaguuuaguagauc

SEQ ID NO: 680595 - RNA, 19 nt, Artificial Sequence
  Description of Artificial Sequence: Synthetic oligonucleotide
  Antisense strand to SEQ ID NO: 680594
gaucuacuaaacugauuuc

SEQ ID NO: 680596 - RNA, 19 nt, Artificial Sequence
  Description of Artificial Sequence: Synthetic oligonucleotide
  Sense strand starting at position 3353 of SEQ ID NO: 585951
ggguguugcacuuagggua

SEQ ID NO: 680597 - RNA, 19 nt, Artificial Sequence
  Description of Artificial Sequence: Synthetic oligonucleotide
  Antisense strand to SEQ ID NO: 680596
uacccuaagugcaacaccc

SEQ ID NO: 680598 - RNA, 19 nt, Artificial Sequence
  Description of Artificial Sequence: Synthetic oligonucleotide
  Sense strand starting at position 3366 of SEQ ID NO: 585951
aggguauuguuucuugaca

SEQ ID NO: 680599 - RNA, 19 nt, Artificial Sequence
  Description of Artificial Sequence: Synthetic oligonucleotide
  Antisense strand to SEQ ID NO: 680598
ugucaagaaacaauacccu

SEQ ID NO: 680600 - RNA, 19 nt, Artificial Sequence
  Description of Artificial Sequence: Synthetic oligonucleotide
  Sense strand starting at position 3367 of SEQ ID NO: 585951
ggguauuguuucuugacac

SEQ ID NO: 680601 - RNA, 19 nt, Artificial Sequence
  Description of Artificial Sequence: Synthetic oligonucleotide
  Antisense strand to SEQ ID NO: 680600
gugucaagaaacaauaccc

SEQ ID NO: 680602 - RNA, 19 nt, Artificial Sequence
  Description of Artificial Sequence: Synthetic oligonucleotide
  Sense strand starting at position 3410 of SEQ ID NO: 585951
uguacuaggagguguucua

SEQ ID NO: 680603 - RNA, 19 nt, Artificial Sequence
  Description of Artificial Sequence: Synthetic oligonucleotide
  Antisense strand to SEQ ID NO: 680602
uagaacaccuccuaguaca

SEQ ID NO: 680604 - RNA, 19 nt, Artificial Sequence
  Description of Artificial Sequence: Synthetic oligonucleotide
  Sense strand starting at position 3438 of SEQ ID NO: 585951
ucuguaggucgcagugaga

SEQ ID NO: 680605 - RNA, 19 nt, Artificial Sequence
  Description of Artificial Sequence: Synthetic oligonucleotide
  Antisense strand to SEQ ID NO: 680604
ucucacugcgaccuacaga

SEQ ID NO: 680606 - RNA, 19 nt, Artificial Sequence
  Description of Artificial Sequence: Synthetic oligonucleotide
  Sense strand starting at position 3553 of SEQ ID NO: 585951
uuagcaugccaggaauaua

SEQ ID NO: 680607 - RNA, 19 nt, Artificial Sequence
  Description of Artificial Sequence: Synthetic oligonucleotide
  Antisense strand to SEQ ID NO: 680606
uauauuccuggcaugcuaa

SEQ ID NO: 680608 - RNA, 19 nt, Artificial Sequence
  Description of Artificial Sequence: Synthetic oligonucleotide
  Sense strand starting at position 3601 of SEQ ID NO: 585951
ggagguuacugugugagac

SEQ ID NO: 680609 - RNA, 19 nt, Artificial Sequence
  Description of Artificial Sequence: Synthetic oligonucleotide
  Antisense strand to SEQ ID NO: 680608
gucucacacaguaaccucc

SEQ ID NO: 680610 - RNA, 19 nt, Artificial Sequence
  Description of Artificial Sequence: Synthetic oligonucleotide
  Sense strand starting at position 3607 of SEQ ID NO: 585951
uacugugugagacgaaaga

SEQ ID NO: 680611 - RNA, 19 nt, Artificial Sequence
  Description of Artificial Sequence: Synthetic oligonucleotide
  Antisense strand to SEQ ID NO: 680610
ucuuucgucucacacagua

SEQ ID NO: 680612 - RNA, 19 nt, Artificial Sequence
  Description of Artificial Sequence: Synthetic oligonucleotide
  Sense strand starting at position 3689 of SEQ ID NO: 585951
uaagaaguugguuggcuua

SEQ ID NO: 680613 - RNA, 19 nt, Artificial Sequence
  Description of Artificial Sequence: Synthetic oligonucleotide
  Antisense strand to SEQ ID NO: 680612
uaagccaaccaacuucuua

SEQ ID NO: 680614 - RNA, 19 nt, Artificial Sequence
  Description of Artificial Sequence: Synthetic oligonucleotide
  Sense strand starting at position 3691 of SEQ ID NO: 585951
agaaguugguuggcuuaau

SEQ ID NO: 680615 - RNA, 19 nt, Artificial Sequence
  Description of Artificial Sequence: Synthetic oligonucleotide
  Antisense strand to SEQ ID NO: 680614
auuaagccaaccaacuucu

SEQ ID NO: 680616 - RNA, 19 nt, Artificial Sequence
  Description of Artificial Sequence: Synthetic oligonucleotide
  Sense strand starting at position 3805 of SEQ ID NO: 585951
gauucugggaguugugaaa

SEQ ID NO: 680617 - RNA, 19 nt, Artificial Sequence
  Description of Artificial Sequence: Synthetic oligonucleotide
  Antisense strand to SEQ ID NO: 680616
uuucacaacucccagaauc

SEQ ID NO: 680618 - RNA, 19 nt, Artificial Sequence
  Description of Artificial Sequence: Synthetic oligonucleotide
  Sense strand starting at position 3814 of SEQ ID NO: 585951
aguugugaaauugguguaa

SEQ ID NO: 680619 - RNA, 19 nt, Artificial Sequence
  Description of Artificial Sequence: Synthetic oligonucleotide
  Antisense strand to SEQ ID NO: 680618
uuacaccaauuucacaacu

SEQ ID NO: 680620 - RNA, 19 nt, Artificial Sequence
  Description of Artificial Sequence: Synthetic oligonucleotide
  Sense strand starting at position 3818 of SEQ ID NO: 585951
gugaaauugguguaaucug

SEQ ID NO: 680621 - RNA, 19 nt, Artificial Sequence
  Description of Artificial Sequence: Synthetic oligonucleotide
  Antisense strand to SEQ ID NO: 680620
cagauuacaccaauuucac

SEQ ID NO: 680622 - RNA, 19 nt, Artificial Sequence
  Description of Artificial Sequence: Synthetic oligonucleotide
  Sense strand starting at position 3827 of SEQ ID NO: 585951
guguaaucuguugcuugug

SEQ ID NO: 680623 - RNA, 19 nt, Artificial Sequence
  Description of Artificial Sequence: Synthetic oligonucleotide
  Antisense strand to SEQ ID NO: 680622
cacaagcaacagauuacac

SEQ ID NO: 680624 - RNA, 19 nt, Artificial Sequence
  Description of Artificial Sequence: Synthetic oligonucleotide
  Sense strand starting at position 3836 of SEQ ID NO: 585951
guugcuuguguggaacaau

SEQ ID NO: 680625 - RNA, 19 nt, Artificial Sequence
  Description of Artificial Sequence: Synthetic oligonucleotide
  Antisense strand to SEQ ID NO: 680624
auuguuccacacaagcaac

SEQ ID NO: 680626 - RNA, 19 nt, Artificial Sequence
  Description of Artificial Sequence: Synthetic oligonucleotide
  Sense strand starting at position 3839 of SEQ ID NO: 585951
gcuuguguggaacaauaaa

SEQ ID NO: 680627 - RNA, 19 nt, Artificial Sequence
  Description of Artificial Sequence: Synthetic oligonucleotide
  Antisense strand to SEQ ID NO: 680626
uuuauuguuccacacaagc

SEQ ID NO: 680628 - RNA, 19 nt, Artificial Sequence
  Description of Artificial Sequence: Synthetic oligonucleotide
  Sense strand starting at position 3931 of SEQ ID NO: 585951
uuggauuucugaggaucac

SEQ ID NO: 680629 - RNA, 19 nt, Artificial Sequence
  Description of Artificial Sequence: Synthetic oligonucleotide
  Antisense strand to SEQ ID NO: 680628
gugauccucagaaauccaa

SEQ ID NO: 680630 - RNA, 19 nt, Artificial Sequence
  Description of Artificial Sequence: Synthetic oligonucleotide
  Sense strand starting at position 587 of SEQ ID NO: 585952
ccaugacguucugaguauc

SEQ ID NO: 680631 - RNA, 19 nt, Artificial Sequence
  Description of Artificial Sequence: Synthetic oligonucleotide
  Antisense strand to SEQ ID NO: 680630
gauacucagaacgucaugg

SEQ ID NO: 680632 - RNA, 19 nt, Artificial Sequence
  Description of Artificial Sequence: Synthetic oligonucleotide
  Sense strand starting at position 590 of SEQ ID NO: 585952
ugacguucugaguauccca

SEQ ID NO: 680633 - RNA, 19 nt, Artificial Sequence
  Description of Artificial Sequence: Synthetic oligonucleotide
  Antisense strand to SEQ ID NO: 680632
ugggauacucagaacguca

SEQ ID NO: 680634 - RNA, 19 nt, Artificial Sequence
  Description of Artificial Sequence: Synthetic oligonucleotide
  Sense strand starting at position 595 of SEQ ID NO: 585952
uucugaguaucccacuaag

SEQ ID NO: 680635 - RNA, 19 nt, Artificial Sequence
  Description of Artificial Sequence: Synthetic oligonucleotide
  Antisense strand to SEQ ID NO: 680634
cuuagugggauacucagaa

SEQ ID NO: 680636 - RNA, 19 nt, Artificial Sequence
  Description of Artificial Sequence: Synthetic oligonucleotide
  Sense strand starting at position 649 of SEQ ID NO: 585952
gcgaguccuucucacauug

SEQ ID NO: 680637 - RNA, 19 nt, Artificial Sequence
  Description of Artificial Sequence: Synthetic oligonucleotide
  Antisense strand to SEQ ID NO: 680636
caaugugagaaggacucgc

SEQ ID NO: 680638 - RNA, 19 nt, Artificial Sequence
  Description of Artificial Sequence: Synthetic oligonucleotide
  Sense strand starting at position 659 of SEQ ID NO: 585952
cucacauugucuccaaguu

SEQ ID NO: 680639 - RNA, 19 nt, Artificial Sequence
  Description of Artificial Sequence: Synthetic oligonucleotide
  Antisense strand to SEQ ID NO: 680638
aacuuggagacaaugugag

SEQ ID NO: 680640 - RNA, 19 nt, Artificial Sequence
  Description of Artificial Sequence: Synthetic oligonucleotide
  Sense strand starting at position 791 of SEQ ID NO: 585952
agaagaugauccugaagag

SEQ ID NO: 680641 - RNA, 19 nt, Artificial Sequence
  Description of Artificial Sequence: Synthetic oligonucleotide
  Antisense strand to SEQ ID NO: 680640
cucuucaggaucaucuucu

SEQ ID NO: 680642 - RNA, 19 nt, Artificial Sequence
  Description of Artificial Sequence: Synthetic oligonucleotide
  Sense strand starting at position 826 of SEQ ID NO: 585952
agcugagacccuuaaacuu

SEQ ID NO: 680643 - RNA, 19 nt, Artificial Sequence
  Description of Artificial Sequence: Synthetic oligonucleotide
  Antisense strand to SEQ ID NO: 680642
aaguuuaagggucucagcu

SEQ ID NO: 680644 - RNA, 19 nt, Artificial Sequence
  Description of Artificial Sequence: Synthetic oligonucleotide
  Sense strand starting at position 1052 of SEQ ID NO: 585952
aaugguuaacaucgaggga

SEQ ID NO: 680645 - RNA, 19 nt, Artificial Sequence
  Description of Artificial Sequence: Synthetic oligonucleotide
  Antisense strand to SEQ ID NO: 680644
ucccucgauguuaaccauu

SEQ ID NO: 680646 - RNA, 19 nt, Artificial Sequence
  Description of Artificial Sequence: Synthetic oligonucleotide
  Sense strand starting at position 1054 of SEQ ID NO: 585952
ugguuaacaucgagggagu

SEQ ID NO: 680647 - RNA, 19 nt, Artificial Sequence
  Description of Artificial Sequence: Synthetic oligonucleotide
  Antisense strand to SEQ ID NO: 680646
acucccucgauguuaacca

SEQ ID NO: 680648 - RNA, 19 nt, Artificial Sequence
  Description of Artificial Sequence: Synthetic oligonucleotide
  Sense strand starting at position 1182 of SEQ ID NO: 585952
cagcucuuucccugagugu

SEQ ID NO: 680649 - RNA, 19 nt, Artificial Sequence
  Description of Artificial Sequence: Synthetic oligonucleotide
  Antisense strand to SEQ ID NO: 680648
acacucagggaaagagcug

SEQ ID NO: 680650 - RNA, 19 nt, Artificial Sequence
  Description of Artificial Sequence: Synthetic oligonucleotide
  Sense strand starting at position 1191 of SEQ ID NO: 585952
cccugagugucuucugugu

SEQ ID NO: 680651 - RNA, 19 nt, Artificial Sequence
  Description of Artificial Sequence: Synthetic oligonucleotide
  Antisense strand to SEQ ID NO: 680650
acacagaagacacucaggg

SEQ ID NO: 680652 - RNA, 19 nt, Artificial Sequence
  Description of Artificial Sequence: Synthetic oligonucleotide
  Sense strand starting at position 1197 of SEQ ID NO: 585952
gugucuucugugugccaga

SEQ ID NO: 680653 - RNA, 19 nt, Artificial Sequence
  Description of Artificial Sequence: Synthetic oligonucleotide
  Antisense strand to SEQ ID NO: 680652
ucuggcacacagaagacac

SEQ ID NO: 680654 - RNA, 19 nt, Artificial Sequence
  Description of Artificial Sequence: Synthetic oligonucleotide
  Sense strand starting at position 1253 of SEQ ID NO: 585952
cuccuuagcugucauauuu

SEQ ID NO: 680655 - RNA, 19 nt, Artificial Sequence
  Description of Artificial Sequence: Synthetic oligonucleotide
  Antisense strand to SEQ ID NO: 680654
aaauaugacagcuaaggag

SEQ ID NO: 680656 - RNA, 19 nt, Artificial Sequence
  Description of Artificial Sequence: Synthetic oligonucleotide
  Sense strand starting at position 1262 of SEQ ID NO: 585952
ugucauauuucccgcucuu

SEQ ID NO: 680657 - RNA, 19 nt, Artificial Sequence
  Description of Artificial Sequence: Synthetic oligonucleotide
  Antisense strand to SEQ ID NO: 680656
aagagcgggaaauaugaca

SEQ ID NO: 680658 - RNA, 19 nt, Artificial Sequence
  Description of Artificial Sequence: Synthetic oligonucleotide
  Sense strand starting at position 2082 of SEQ ID NO: 585952
aaacuuccuugguggagaa

SEQ ID NO: 680659 - RNA, 19 nt, Artificial Sequence
  Description of Artificial Sequence: Synthetic oligonucleotide
  Antisense strand to SEQ ID NO: 680658
uucuccaccaaggaaguuu

SEQ ID NO: 680660 - RNA, 19 nt, Artificial Sequence
  Description of Artificial Sequence: Synthetic oligonucleotide
  Sense strand starting at position 2083 of SEQ ID NO: 585952
aacuuccuugguggagaaa

SEQ ID NO: 680661 - RNA, 19 nt, Artificial Sequence
  Description of Artificial Sequence: Synthetic oligonucleotide
  Antisense strand to SEQ ID NO: 680660
uuucuccaccaaggaaguu

SEQ ID NO: 680662 - RNA, 19 nt, Artificial Sequence
  Description of Artificial Sequence: Synthetic oligonucleotide
  Sense strand starting at position 2105 of SEQ ID NO: 585952
augagcucaucuggaggaa

SEQ ID NO: 680663 - RNA, 19 nt, Artificial Sequence
  Description of Artificial Sequence: Synthetic oligonucleotide
  Antisense strand to SEQ ID NO: 680662
uuccuccagaugagcucau

SEQ ID NO: 680664 - RNA, 19 nt, Artificial Sequence
  Description of Artificial Sequence: Synthetic oligonucleotide
  Sense strand starting at position 2363 of SEQ ID NO: 585952
guggucuguuuccuucuaa

SEQ ID NO: 680665 - RNA, 19 nt, Artificial Sequence
  Description of Artificial Sequence: Synthetic oligonucleotide
  Antisense strand to SEQ ID NO: 680664
uuagaaggaaacagaccac

SEQ ID NO: 680666 - RNA, 19 nt, Artificial Sequence
  Description of Artificial Sequence: Synthetic oligonucleotide
  Sense strand starting at position 2437 of SEQ ID NO: 585952
agcugaguccuugagggag

SEQ ID NO: 680667 - RNA, 19 nt, Artificial Sequence
  Description of Artificial Sequence: Synthetic oligonucleotide
  Antisense strand to SEQ ID NO: 680666
cucccucaaggacucagcu

SEQ ID NO: 680668 - RNA, 19 nt, Artificial Sequence
  Description of Artificial Sequence: Synthetic oligonucleotide
  Sense strand starting at position 2488 of SEQ ID NO: 585952
aguccugaggccuguguuu

SEQ ID NO: 680669 - RNA, 19 nt, Artificial Sequence
  Description of Artificial Sequence: Synthetic oligonucleotide
  Antisense strand to SEQ ID NO: 680668
aaacacaggccucaggacu

SEQ ID NO: 680670 - RNA, 19 nt, Artificial Sequence
  Description of Artificial Sequence: Synthetic oligonucleotide
  Sense strand starting at position 2662 of SEQ ID NO: 585952
ucauucugacccggagacu

SEQ ID NO: 680671 - RNA, 19 nt, Artificial Sequence
  Description of Artificial Sequence: Synthetic oligonucleotide
  Antisense strand to SEQ ID NO: 680670
agucuccgggucagaauga

SEQ ID NO: 680672 - RNA, 19 nt, Artificial Sequence
  Description of Artificial Sequence: Synthetic oligonucleotide
  Sense strand starting at position 2671 of SEQ ID NO: 585952
cccggagacucauaaugcu

SEQ ID NO: 680673 - RNA, 19 nt, Artificial Sequence
  Description of Artificial Sequence: Synthetic oligonucleotide
  Antisense strand to SEQ ID NO: 680672
agcauuaugagucuccggg

SEQ ID NO: 680674 - RNA, 19 nt, Artificial Sequence
  Description of Artificial Sequence: Synthetic oligonucleotide
  Sense strand starting at position 2769 of SEQ ID NO: 585952
guggccauaucuucuuaaa

SEQ ID NO: 680675 - RNA, 19 nt, Artificial Sequence
  Description of Artificial Sequence: Synthetic oligonucleotide
  Antisense strand to SEQ ID NO: 680674
uuuaagaagauauggccac

SEQ ID NO: 680676 - RNA, 19 nt, Artificial Sequence
  Description of Artificial Sequence: Synthetic oligonucleotide
  Sense strand starting at position 2771 of SEQ ID NO: 585952
ggccauaucuucuuaaacg

SEQ ID NO: 680677 - RNA, 19 nt, Artificial Sequence
  Description of Artificial Sequence: Synthetic oligonucleotide
  Antisense strand to SEQ ID NO: 680676
cguuuaagaagauauggcc

SEQ ID NO: 680678 - RNA, 19 nt, Artificial Sequence
  Description of Artificial Sequence: Synthetic oligonucleotide
  Sense strand starting at position 2772 of SEQ ID NO: 585952
gccauaucuucuuaaacgu

SEQ ID NO: 680679 - RNA, 19 nt, Artificial Sequence
  Description of Artificial Sequence: Synthetic oligonucleotide
  Antisense strand to SEQ ID NO: 680678
acguuuaagaagauauggc

SEQ ID NO: 680680 - RNA, 19 nt, Artificial Sequence
  Description of Artificial Sequence: Synthetic oligonucleotide
  Sense strand starting at position 2888 of SEQ ID NO: 585952
cuuccauagcccuggacau

SEQ ID NO: 680681 - RNA, 19 nt, Artificial Sequence
  Description of Artificial Sequence: Synthetic oligonucleotide
  Antisense strand to SEQ ID NO: 680680
auguccagggcuauggaag

SEQ ID NO: 680682 - RNA, 19 nt, Artificial Sequence
  Description of Artificial Sequence: Synthetic oligonucleotide
  Sense strand starting at position 2913 of SEQ ID NO: 585952
acccauugcuguggucaca

SEQ ID NO: 680683 - RNA, 19 nt, Artificial Sequence
  Description of Artificial Sequence: Synthetic oligonucleotide
  Antisense strand to SEQ ID NO: 680682
ugugaccacagcaaugggu

SEQ ID NO: 680684 - RNA, 19 nt, Artificial Sequence
  Description of Artificial Sequence: Synthetic oligonucleotide
  Sense strand starting at position 2939 of SEQ ID NO: 585952
agaggucuccuguaaccca

SEQ ID NO: 680685 - RNA, 19 nt, Artificial Sequence
  Description of Artificial Sequence: Synthetic oligonucleotide
  Antisense strand to SEQ ID NO: 680684
uggguuacaggagaccucu

SEQ ID NO: 680686 - RNA, 19 nt, Artificial Sequence
  Description of Artificial Sequence: Synthetic oligonucleotide
  Sense strand starting at position 3088 of SEQ ID NO: 585952
uggugaguccaucacauau

SEQ ID NO: 680687 - RNA, 19 nt, Artificial Sequence
  Description of Artificial Sequence: Synthetic oligonucleotide
  Antisense strand to SEQ ID NO: 680686
auaugugauggacucacca

SEQ ID NO: 680688 - RNA, 19 nt, Artificial Sequence
  Description of Artificial Sequence: Synthetic oligonucleotide
  Sense strand starting at position 253 of SEQ ID NO: 585953
uagugagagcuguaaacca

SEQ ID NO: 680689 - RNA, 19 nt, Artificial Sequence
  Description of Artificial Sequence: Synthetic oligonucleotide
  Antisense strand to SEQ ID NO: 680688
ugguuuacagcucucacua

SEQ ID NO: 680690 - RNA, 19 nt, Artificial Sequence
  Description of Artificial Sequence: Synthetic oligonucleotide
  Sense strand starting at position 260 of SEQ ID NO: 585953
agcuguaaaccauaggcaa

SEQ ID NO: 680691 - RNA, 19 nt, Artificial Sequence
  Description of Artificial Sequence: Synthetic oligonucleotide
  Antisense strand to SEQ ID NO: 680690
uugccuaugguuuacagcu

SEQ ID NO: 680692 - RNA, 19 nt, Artificial Sequence
  Description of Artificial Sequence: Synthetic oligonucleotide
  Sense strand starting at position 283 of SEQ ID NO: 585953
ugcaaaugucaauaucgga

SEQ ID NO: 680693 - RNA, 19 nt, Artificial Sequence
  Description of Artificial Sequence: Synthetic oligonucleotide
  Antisense strand to SEQ ID NO: 680692
uccgauauugacauuugca

SEQ ID NO: 680694 - RNA, 19 nt, Artificial Sequence
  Description of Artificial Sequence: Synthetic oligonucleotide
  Sense strand starting at position 303 of SEQ ID NO: 585953
acgccagugugaucucauu

SEQ ID NO: 680695 - RNA, 19 nt, Artificial Sequence
  Description of Artificial Sequence: Synthetic oligonucleotide
  Antisense strand to SEQ ID NO: 680694
aaugagaucacacuggcgu

SEQ ID NO: 680696 - RNA, 19 nt, Artificial Sequence
  Description of Artificial Sequence: Synthetic oligonucleotide
  Sense strand starting at position 309 of SEQ ID NO: 585953
gugugaucucauugguagg

SEQ ID NO: 680697 - RNA, 19 nt, Artificial Sequence
  Description of Artificial Sequence: Synthetic oligonucleotide
  Antisense strand to SEQ ID NO: 680696
ccuaccaaugagaucacac

SEQ ID NO: 680698 - RNA, 19 nt, Artificial Sequence
  Description of Artificial Sequence: Synthetic oligonucleotide
  Sense strand starting at position 401 of SEQ ID NO: 585953
ccacucuacgcuuaagauu

SEQ ID NO: 680699 - RNA, 19 nt, Artificial Sequence
  Description of Artificial Sequence: Synthetic oligonucleotide
  Antisense strand to SEQ ID NO: 680698
aaucuuaagcguagagugg

SEQ ID NO: 680700 - RNA, 19 nt, Artificial Sequence
  Description of Artificial Sequence: Synthetic oligonucleotide
  Sense strand starting at position 438 of SEQ ID NO: 585953
auacguuauaaguggcaaa

SEQ ID NO: 680701 - RNA, 19 nt, Artificial Sequence
  Description of Artificial Sequence: Synthetic oligonucleotide
  Antisense strand to SEQ ID NO: 680700
uuugccacuuauaacguau

SEQ ID NO: 680702 - RNA, 19 nt, Artificial Sequence
  Description of Artificial Sequence: Synthetic oligonucleotide
  Sense strand starting at position 495 of SEQ ID NO: 585953
uuguuaccucacugucuua

SEQ ID NO: 680703 - RNA, 19 nt, Artificial Sequence
  Description of Artificial Sequence: Synthetic oligonucleotide
  Antisense strand to SEQ ID NO: 680702
uaagacagugagguaacaa

SEQ ID NO: 680704 - RNA, 19 nt, Artificial Sequence
  Description of Artificial Sequence: Synthetic oligonucleotide
  Sense strand starting at position 539 of SEQ ID NO: 585953
ucacuaggauuccacagaa

SEQ ID NO: 680705 - RNA, 19 nt, Artificial Sequence
  Description of Artificial Sequence: Synthetic oligonucleotide
  Antisense strand to SEQ ID NO: 680704
uucuguggaauccuaguga

SEQ ID NO: 680706 - RNA, 19 nt, Artificial Sequence
  Description of Artificial Sequence: Synthetic oligonucleotide
  Sense strand starting at position 552 of SEQ ID NO: 585953
acagaacuucuccguuacu

SEQ ID NO: 680707 - RNA, 19 nt, Artificial Sequence
  Description of Artificial Sequence: Synthetic oligonucleotide
  Antisense strand to SEQ ID NO: 680706
aguaacggagaaguucugu

SEQ ID NO: 680708 - RNA, 19 nt, Artificial Sequence
  Description of Artificial Sequence: Synthetic oligonucleotide
  Sense strand starting at position 741 of SEQ ID NO: 585953
cuuaaacaaugagaaugaa

SEQ ID NO: 680709 - RNA, 19 nt, Artificial Sequence
  Description of Artificial Sequence: Synthetic oligonucleotide
  Antisense strand to SEQ ID NO: 680708
uucauucucauuguuuaag

SEQ ID NO: 680710 - RNA, 19 nt, Artificial Sequence
  Description of Artificial Sequence: Synthetic oligonucleotide
  Sense strand starting at position 866 of SEQ ID NO: 585953
cuggcuuuccaaggcaaga

SEQ ID NO: 680711 - RNA, 19 nt, Artificial Sequence
  Description of Artificial Sequence: Synthetic oligonucleotide
  Antisense strand to SEQ ID NO: 680710
ucuugccuuggaaagccag

SEQ ID NO: 680712 - RNA, 19 nt, Artificial Sequence
  Description of Artificial Sequence: Synthetic oligonucleotide
  Sense strand starting at position 1151 of SEQ ID NO: 585953
ggaagcugucucugggacu

SEQ ID NO: 680713 - RNA, 19 nt, Artificial Sequence
  Description of Artificial Sequence: Synthetic oligonucleotide
  Antisense strand to SEQ ID NO: 680712
agucccagagacagcuucc

SEQ ID NO: 680714 - RNA, 19 nt, Artificial Sequence
  Description of Artificial Sequence: Synthetic oligonucleotide
  Sense strand starting at position 1389 of SEQ ID NO: 585953
uuaaguuccgugcauuauc

SEQ ID NO: 680715 - RNA, 19 nt, Artificial Sequence
  Description of Artificial Sequence: Synthetic oligonucleotide
  Antisense strand to SEQ ID NO: 680714
gauaaugcacggaacuuaa

SEQ ID NO: 680716 - RNA, 19 nt, Artificial Sequence
  Description of Artificial Sequence: Synthetic oligonucleotide
  Sense strand starting at position 1394 of SEQ ID NO: 585953
uuccgugcauuaucugaaa

SEQ ID NO: 680717 - RNA, 19 nt, Artificial Sequence
  Description of Artificial Sequence: Synthetic oligonucleotide
  Antisense strand to SEQ ID NO: 680716
uuucagauaaugcacggaa

SEQ ID NO: 680718 - RNA, 19 nt, Artificial Sequence
  Description of Artificial Sequence: Synthetic oligonucleotide
  Sense strand starting at position 2208 of SEQ ID NO: 585953
gugagucaccugggcauuu

SEQ ID NO: 680719 - RNA, 19 nt, Artificial Sequence
  Description of Artificial Sequence: Synthetic oligonucleotide
  Antisense strand to SEQ ID NO: 680718
aaaugcccaggugacucac

SEQ ID NO: 680720 - RNA, 19 nt, Artificial Sequence
  Description of Artificial Sequence: Synthetic oligonucleotide
  Sense strand starting at position 2241 of SEQ ID NO: 585953
acgucacauccauguggaa

SEQ ID NO: 680721 - RNA, 19 nt, Artificial Sequence
  Description of Artificial Sequence: Synthetic oligonucleotide
  Antisense strand to SEQ ID NO: 680720
uuccacauggaugugacgu

SEQ ID NO: 680722 - RNA, 19 nt, Artificial Sequence
  Description of Artificial Sequence: Synthetic oligonucleotide
  Sense strand starting at position 2253 of SEQ ID NO: 585953
uguggaaaucgcggugaug

SEQ ID NO: 680723 - RNA, 19 nt, Artificial Sequence
  Description of Artificial Sequence: Synthetic oligonucleotide
  Antisense strand to SEQ ID NO: 680722
caucaccgcgauuuccaca

SEQ ID NO: 680724 - RNA, 19 nt, Artificial Sequence
  Description of Artificial Sequence: Synthetic oligonucleotide
  Sense strand starting at position 2758 of SEQ ID NO: 585953
augugucuccaaggcuuua

SEQ ID NO: 680725 - RNA, 19 nt, Artificial Sequence
  Description of Artificial Sequence: Synthetic oligonucleotide
  Antisense strand to SEQ ID NO: 680724
uaaagccuuggagacacau

SEQ ID NO: 680726 - RNA, 19 nt, Artificial Sequence
  Description of Artificial Sequence: Synthetic oligonucleotide
  Sense strand starting at position 2788 of SEQ ID NO: 585953
uuuaguuguccugauaauc

SEQ ID NO: 680727 - RNA, 19 nt, Artificial Sequence
  Description of Artificial Sequence: Synthetic oligonucleotide
  Antisense strand to SEQ ID NO: 680726
gauuaucaggacaacuaaa

SEQ ID NO: 680728 - RNA, 19 nt, Artificial Sequence
  Description of Artificial Sequence: Synthetic oligonucleotide
  Sense strand starting at position 2818 of SEQ ID NO: 585953
gggugcugauggcugauaa

SEQ ID NO: 680729 - RNA, 19 nt, Artificial Sequence
  Description of Artificial Sequence: Synthetic oligonucleotide
  Antisense strand to SEQ ID NO: 680728
uuaucagccaucagcaccc

SEQ ID NO: 680730 - RNA, 19 nt, Artificial Sequence
  Description of Artificial Sequence: Synthetic oligonucleotide
  Sense strand starting at position 2819 of SEQ ID NO: 585953
ggugcugauggcugauaau

SEQ ID NO: 680731 - RNA, 19 nt, Artificial Sequence
  Description of Artificial Sequence: Synthetic oligonucleotide
  Antisense strand to SEQ ID NO: 680730
auuaucagccaucagcacc

SEQ ID NO: 680732 - RNA, 19 nt, Artificial Sequence
  Description of Artificial Sequence: Synthetic oligonucleotide
  Sense strand starting at position 2878 of SEQ ID NO: 585953
gggugagucauguggagau

SEQ ID NO: 680733 - RNA, 19 nt, Artificial Sequence
  Description of Artificial Sequence: Synthetic oligonucleotide
  Antisense strand to SEQ ID NO: 680732
aucuccacaugacucaccc

SEQ ID NO: 680734 - RNA, 19 nt, Artificial Sequence
  Description of Artificial Sequence: Synthetic oligonucleotide
  Sense strand starting at position 2881 of SEQ ID NO: 585953
ugagucauguggagaugga

SEQ ID NO: 680735 - RNA, 19 nt, Artificial Sequence
  Description of Artificial Sequence: Synthetic oligonucleotide
  Antisense strand to SEQ ID NO: 680734
uccaucuccacaugacuca

SEQ ID NO: 680736 - RNA, 19 nt, Artificial Sequence
  Description of Artificial Sequence: Synthetic oligonucleotide
  Sense strand starting at position 3002 of SEQ ID NO: 585953
uuacuagauuggcuaaacu

SEQ ID NO: 680737 - RNA, 19 nt, Artificial Sequence
  Description of Artificial Sequence: Synthetic oligonucleotide
  Antisense strand to SEQ ID NO: 680736
aguuuagccaaucuaguaa

SEQ ID NO: 680738 - RNA, 19 nt, Artificial Sequence
  Description of Artificial Sequence: Synthetic oligonucleotide
  Sense strand starting at position 3075 of SEQ ID NO: 585953
cuugucaggccauauauca

SEQ ID NO: 680739 - RNA, 19 nt, Artificial Sequence
  Description of Artificial Sequence: Synthetic oligonucleotide
  Antisense strand to SEQ ID NO: 680738
ugauauauggccugacaag

SEQ ID NO: 680740 - RNA, 19 nt, Artificial Sequence
  Description of Artificial Sequence: Synthetic oligonucleotide
  Sense strand starting at position 3226 of SEQ ID NO: 585953
gaagacugguccucgucuu

SEQ ID NO: 680741 - RNA, 19 nt, Artificial Sequence
  Description of Artificial Sequence: Synthetic oligonucleotide
  Antisense strand to SEQ ID NO: 680740
aagacgaggaccagucuuc

SEQ ID NO: 680742 - RNA, 19 nt, Artificial Sequence
  Description of Artificial Sequence: Synthetic oligonucleotide
  Sense strand starting at position 3257 of SEQ ID NO: 585953
gcuggaauuucuuccaguu

SEQ ID NO: 680743 - RNA, 19 nt, Artificial Sequence
  Description of Artificial Sequence: Synthetic oligonucleotide
  Antisense strand to SEQ ID NO: 680742
aacuggaagaaauuccagc

SEQ ID NO: 680744 - RNA, 19 nt, Artificial Sequence
  Description of Artificial Sequence: Synthetic oligonucleotide
  Sense strand starting at position 3388 of SEQ ID NO: 585953
gcagaaaugacagggucua

SEQ ID NO: 680745 - RNA, 19 nt, Artificial Sequence
  Description of Artificial Sequence: Synthetic oligonucleotide
  Antisense strand to SEQ ID NO: 680744
uagacccugucauuucugc

SEQ ID NO: 680746 - RNA, 19 nt, Artificial Sequence
  Description of Artificial Sequence: Synthetic oligonucleotide
  Sense strand starting at position 3460 of SEQ ID NO: 585953
gguuaagaagcuugaggca

SEQ ID NO: 680747 - RNA, 19 nt, Artificial Sequence
  Description of Artificial Sequence: Synthetic oligonucleotide
  Antisense strand to SEQ ID NO: 680746
ugccucaagcuucuuaacc

SEQ ID NO: 680748 - RNA, 19 nt, Artificial Sequence
  Description of Artificial Sequence: Synthetic oligonucleotide
  Sense strand starting at position 3472 of SEQ ID NO: 585953
ugaggcauuugcccaguuu

SEQ ID NO: 680749 - RNA, 19 nt, Artificial Sequence
  Description of Artificial Sequence: Synthetic oligonucleotide
  Antisense strand to SEQ ID NO: 680748
aaacugggcaaaugccuca

SEQ ID NO: 680750 - RNA, 19 nt, Artificial Sequence
  Description of Artificial Sequence: Synthetic oligonucleotide
  Sense strand starting at position 3519 of SEQ ID NO: 585953
uggcauuaagccuguguua

SEQ ID NO: 680751 - RNA, 19 nt, Artificial Sequence
  Description of Artificial Sequence: Synthetic oligonucleotide
  Antisense strand to SEQ ID NO: 680750
uaacacaggcuuaaugcca

SEQ ID NO: 680752 - RNA, 19 nt, Artificial Sequence
  Description of Artificial Sequence: Synthetic oligonucleotide
  Sense strand starting at position 3556 of SEQ ID NO: 585953
ccagucuuacuagaccauu

SEQ ID NO: 680753 - RNA, 19 nt, Artificial Sequence
  Description of Artificial Sequence: Synthetic oligonucleotide
  Antisense strand to SEQ ID NO: 680752
aauggucuaguaagacugg

SEQ ID NO: 680754 - RNA, 19 nt, Artificial Sequence
  Description of Artificial Sequence: Synthetic oligonucleotide
  Sense strand starting at position 3583 of SEQ ID NO: 585953
gaaagauccugugagacag

SEQ ID NO: 680755 - RNA, 19 nt, Artificial Sequence
  Description of Artificial Sequence: Synthetic oligonucleotide
  Antisense strand to SEQ ID NO: 680754
cugucucacaggaucuuuc

SEQ ID NO: 680756 - RNA, 19 nt, Artificial Sequence
  Description of Artificial Sequence: Synthetic oligonucleotide
  Sense strand starting at position 3719 of SEQ ID NO: 585953
uucaguugagcuggcagaa

SEQ ID NO: 680757 - RNA, 19 nt, Artificial Sequence
  Description of Artificial Sequence: Synthetic oligonucleotide
  Antisense strand to SEQ ID NO: 680756
uucugccagcucaacugaa

SEQ ID NO: 680758 - RNA, 19 nt, Artificial Sequence
  Description of Artificial Sequence: Synthetic oligonucleotide
  Sense strand starting at position 3741 of SEQ ID NO: 585953
gaucauguaucugaaagac

SEQ ID NO: 680759 - RNA, 19 nt, Artificial Sequence
  Description of Artificial Sequence: Synthetic oligonucleotide
  Antisense strand to SEQ ID NO: 680758
gucuuucagauacaugauc

SEQ ID NO: 680760 - RNA, 19 nt, Artificial Sequence
  Description of Artificial Sequence: Synthetic oligonucleotide
  Sense strand starting at position 3759 of SEQ ID NO: 585953
cccugcauggaauguuaau

SEQ ID NO: 680761 - RNA, 19 nt, Artificial Sequence
  Description of Artificial Sequence: Synthetic oligonucleotide
  Antisense strand to SEQ ID NO: 680760
auuaacauuccaugcaggg

SEQ ID NO: 680762 - RNA, 19 nt, Artificial Sequence
  Description of Artificial Sequence: Synthetic oligonucleotide
  Sense strand starting at position 3797 of SEQ ID NO: 585953
uggugcuccuuuguaaaca

SEQ ID NO: 680763 - RNA, 19 nt, Artificial Sequence
  Description of Artificial Sequence: Synthetic oligonucleotide
  Antisense strand to SEQ ID NO: 680762
uguuuacaaaggagcacca

SEQ ID NO: 680764 - RNA, 19 nt, Artificial Sequence
  Description of Artificial Sequence: Synthetic oligonucleotide
  Sense strand starting at position 3906 of SEQ ID NO: 585953
ggugucaugaacugggagu

SEQ ID NO: 680765 - RNA, 19 nt, Artificial Sequence
  Description of Artificial Sequence: Synthetic oligonucleotide
  Antisense strand to SEQ ID NO: 680764
acucccaguucaugacacc

SEQ ID NO: 680766 - RNA, 19 nt, Artificial Sequence
  Description of Artificial Sequence: Synthetic oligonucleotide
  Sense strand starting at position 3975 of SEQ ID NO: 585953
gccaacuguccugauguaa

SEQ ID NO: 680767 - RNA, 19 nt, Artificial Sequence
  Description of Artificial Sequence: Synthetic oligonucleotide
  Antisense strand to SEQ ID NO: 680766
uuacaucaggacaguuggc

SEQ ID NO: 680768 - RNA, 19 nt, Artificial Sequence
  Description of Artificial Sequence: Synthetic oligonucleotide
  Sense strand starting at position 126 of SEQ ID NO: 585954
agauauaaaccuuggccau

SEQ ID NO: 680769 - RNA, 19 nt, Artificial Sequence
  Description of Artificial Sequence: Synthetic oligonucleotide
  Antisense strand to SEQ ID NO: 680768
auggccaagguuuauaucu

SEQ ID NO: 680770 - RNA, 19 nt, Artificial Sequence
  Description of Artificial Sequence: Synthetic oligonucleotide
  Sense strand starting at position 138 of SEQ ID NO: 585954
uggccaugccauuaauaag

SEQ ID NO: 680771 - RNA, 19 nt, Artificial Sequence
  Description of Artificial Sequence: Synthetic oligonucleotide
  Antisense strand to SEQ ID NO: 680770
cuuauuaauggcauggcca

SEQ ID NO: 680772 - RNA, 19 nt, Artificial Sequence
  Description of Artificial Sequence: Synthetic oligonucleotide
  Sense strand starting at position 146 of SEQ ID NO: 585954
ccauuaauaagugggcaga

SEQ ID NO: 680773 - RNA, 19 nt, Artificial Sequence
  Description of Artificial Sequence: Synthetic oligonucleotide
  Antisense strand to SEQ ID NO: 680772
ucugcccacuuauuaaugg

SEQ ID NO: 680774 - RNA, 19 nt, Artificial Sequence
  Description of Artificial Sequence: Synthetic oligonucleotide
  Sense strand starting at position 147 of SEQ ID NO: 585954
cauuaauaagugggcagaa

SEQ ID NO: 680775 - RNA, 19 nt, Artificial Sequence
  Description of Artificial Sequence: Synthetic oligonucleotide
  Antisense strand to SEQ ID NO: 680774
uucugcccacuuauuaaug

SEQ ID NO: 680776 - RNA, 19 nt, Artificial Sequence
  Description of Artificial Sequence: Synthetic oligonucleotide
  Sense strand starting at position 148 of SEQ ID NO: 585954
auuaauaagugggcagaaa

SEQ ID NO: 680777 - RNA, 19 nt, Artificial Sequence
  Description of Artificial Sequence: Synthetic oligonucleotide
  Antisense strand to SEQ ID NO: 680776
uuucugcccacuuauuaau

SEQ ID NO: 680778 - RNA, 19 nt, Artificial Sequence
  Description of Artificial Sequence: Synthetic oligonucleotide
  Sense strand starting at position 168 of SEQ ID NO: 585954
gaguuucugaagggagacu

SEQ ID NO: 680779 - RNA, 19 nt, Artificial Sequence
  Description of Artificial Sequence: Synthetic oligonucleotide
  Antisense strand to SEQ ID NO: 680778
agucucccuucagaaacuc

SEQ ID NO: 680780 - RNA, 19 nt, Artificial Sequence
  Description of Artificial Sequence: Synthetic oligonucleotide
  Sense strand starting at position 188 of SEQ ID NO: 585954
ggacuugccucauuauaaa

SEQ ID NO: 680781 - RNA, 19 nt, Artificial Sequence
  Description of Artificial Sequence: Synthetic oligonucleotide
  Antisense strand to SEQ ID NO: 680780
uuuauaaugaggcaagucc

SEQ ID NO: 680782 - RNA, 19 nt, Artificial Sequence
  Description of Artificial Sequence: Synthetic oligonucleotide
  Sense strand starting at position 268 of SEQ ID NO: 585954
accagagugucuguaggau

SEQ ID NO: 680783 - RNA, 19 nt, Artificial Sequence
  Description of Artificial Sequence: Synthetic oligonucleotide
  Antisense strand to SEQ ID NO: 680782
auccuacagacacucuggu

SEQ ID NO: 680784 - RNA, 19 nt, Artificial Sequence
  Description of Artificial Sequence: Synthetic oligonucleotide
  Sense strand starting at position 307 of SEQ ID NO: 585954
cugcaauguccugagaucu

SEQ ID NO: 680785 - RNA, 19 nt, Artificial Sequence
  Description of Artificial Sequence: Synthetic oligonucleotide
  Antisense strand to SEQ ID NO: 680784
agaucucaggacauugcag

SEQ ID NO: 680786 - RNA, 19 nt, Artificial Sequence
  Description of Artificial Sequence: Synthetic oligonucleotide
  Sense strand starting at position 507 of SEQ ID NO: 585954
aggguuugaucucaaauuu

SEQ ID NO: 680787 - RNA, 19 nt, Artificial Sequence
  Description of Artificial Sequence: Synthetic oligonucleotide
  Antisense strand to SEQ ID NO: 680786
aaauuugagaucaaacccu

SEQ ID NO: 680788 - RNA, 19 nt, Artificial Sequence
  Description of Artificial Sequence: Synthetic oligonucleotide
  Sense strand starting at position 612 of SEQ ID NO: 585954
gaugauugacccgagaugu

SEQ ID NO: 680789 - RNA, 19 nt, Artificial Sequence
  Description of Artificial Sequence: Synthetic oligonucleotide
  Antisense strand to SEQ ID NO: 680788
acaucucgggucaaucauc

SEQ ID NO: 680790 - RNA, 19 nt, Artificial Sequence
  Description of Artificial Sequence: Synthetic oligonucleotide
  Sense strand starting at position 820 of SEQ ID NO: 585954
ugggucuaagggugauauu

SEQ ID NO: 680791 - RNA, 19 nt, Artificial Sequence
  Description of Artificial Sequence: Synthetic oligonucleotide
  Antisense strand to SEQ ID NO: 680790
aauaucacccuuagaccca

SEQ ID NO: 680792 - RNA, 19 nt, Artificial Sequence
  Description of Artificial Sequence: Synthetic oligonucleotide
  Sense strand starting at position 1001 of SEQ ID NO: 585954
guagcaucccgacaugaca

SEQ ID NO: 680793 - RNA, 19 nt, Artificial Sequence
  Description of Artificial Sequence: Synthetic oligonucleotide
  Antisense strand to SEQ ID NO: 680792
ugucaugucgggaugcuac

SEQ ID NO: 680794 - RNA, 19 nt, Artificial Sequence
  Description of Artificial Sequence: Synthetic oligonucleotide
  Sense strand starting at position 1883 of SEQ ID NO: 585954
aacgacuucccauagcgaa

SEQ ID NO: 680795 - RNA, 19 nt, Artificial Sequence
  Description of Artificial Sequence: Synthetic oligonucleotide
  Antisense strand to SEQ ID NO: 680794
uucgcuaugggaagucguu

SEQ ID NO: 680796 - RNA, 19 nt, Artificial Sequence
  Description of Artificial Sequence: Synthetic oligonucleotide
  Sense strand starting at position 2050 of SEQ ID NO: 585954
gcucuuugugcgguuggaa

SEQ ID NO: 680797 - RNA, 19 nt, Artificial Sequence
  Description of Artificial Sequence: Synthetic oligonucleotide
  Antisense strand to SEQ ID NO: 680796
uuccaaccgcacaaagagc

SEQ ID NO: 680798 - RNA, 19 nt, Artificial Sequence
  Description of Artificial Sequence: Synthetic oligonucleotide
  Sense strand starting at position 2114 of SEQ ID NO: 585954
uggcguucgcugaggaaau

SEQ ID NO: 680799 - RNA, 19 nt, Artificial Sequence
  Description of Artificial Sequence: Synthetic oligonucleotide
  Antisense strand to SEQ ID NO: 680798
auuuccucagcgaacgcca

SEQ ID NO: 680800 - RNA, 19 nt, Artificial Sequence
  Description of Artificial Sequence: Synthetic oligonucleotide
  Sense strand starting at position 2249 of SEQ ID NO: 585954
cauuguuucggacacgaug

SEQ ID NO: 680801 - RNA, 19 nt, Artificial Sequence
  Description of Artificial Sequence: Synthetic oligonucleotide
  Antisense strand to SEQ ID NO: 680800
caucguguccgaaacaaug

SEQ ID NO: 680802 - RNA, 19 nt, Artificial Sequence
  Description of Artificial Sequence: Synthetic oligonucleotide
  Sense strand starting at position 2273 of SEQ ID NO: 585954
aucagagagcgauggugaa

SEQ ID NO: 680803 - RNA, 19 nt, Artificial Sequence
  Description of Artificial Sequence: Synthetic oligonucleotide
  Antisense strand to SEQ ID NO: 680802
uucaccaucgcucucugau

SEQ ID NO: 680804 - RNA, 19 nt, Artificial Sequence
  Description of Artificial Sequence: Synthetic oligonucleotide
  Sense strand starting at position 2310 of SEQ ID NO: 585954
gaucaacugcgugacgaaa

SEQ ID NO: 680805 - RNA, 19 nt, Artificial Sequence
  Description of Artificial Sequence: Synthetic oligonucleotide
  Antisense strand to SEQ ID NO: 680804
uuucgucacgcaguugauc

SEQ ID NO: 680806 - RNA, 19 nt, Artificial Sequence
  Description of Artificial Sequence: Synthetic oligonucleotide
  Sense strand starting at position 2367 of SEQ ID NO: 585954
uguggaaucaccuggagag

SEQ ID NO: 680807 - RNA, 19 nt, Artificial Sequence
  Description of Artificial Sequence: Synthetic oligonucleotide
  Antisense strand to SEQ ID NO: 680806
cucuccaggugauuccaca

SEQ ID NO: 680808 - RNA, 19 nt, Artificial Sequence
  Description of Artificial Sequence: Synthetic oligonucleotide
  Sense strand starting at position 2626 of SEQ ID NO: 585954
ugguguuggguccauggau

SEQ ID NO: 680809 - RNA, 19 nt, Artificial Sequence
  Description of Artificial Sequence: Synthetic oligonucleotide
  Antisense strand to SEQ ID NO: 680808
auccauggacccaacacca

SEQ ID NO: 680810 - RNA, 19 nt, Artificial Sequence
  Description of Artificial Sequence: Synthetic oligonucleotide
  Sense strand starting at position 2722 of SEQ ID NO: 585954
aucggauuaucccugagau

SEQ ID NO: 680811 - RNA, 19 nt, Artificial Sequence
  Description of Artificial Sequence: Synthetic oligonucleotide
  Antisense strand to SEQ ID NO: 680810
aucucagggauaauccgau

SEQ ID NO: 680812 - RNA, 19 nt, Artificial Sequence
  Description of Artificial Sequence: Synthetic oligonucleotide
  Sense strand starting at position 2723 of SEQ ID NO: 585954
ucggauuaucccugagauu

SEQ ID NO: 680813 - RNA, 19 nt, Artificial Sequence
  Description of Artificial Sequence: Synthetic oligonucleotide
  Antisense strand to SEQ ID NO: 680812
aaucucagggauaauccga

SEQ ID NO: 680814 - RNA, 19 nt, Artificial Sequence
  Description of Artificial Sequence: Synthetic oligonucleotide
  Sense strand starting at position 2808 of SEQ ID NO: 585954
ucaggaugugggugguaga

SEQ ID NO: 680815 - RNA, 19 nt, Artificial Sequence
  Description of Artificial Sequence: Synthetic oligonucleotide
  Antisense strand to SEQ ID NO: 680814
ucuaccacccacauccuga

SEQ ID NO: 680816 - RNA, 19 nt, Artificial Sequence
  Description of Artificial Sequence: Synthetic oligonucleotide
  Sense strand starting at position 2818 of SEQ ID NO: 585954
ggugguagaauagguagua

SEQ ID NO: 680817 - RNA, 19 nt, Artificial Sequence
  Description of Artificial Sequence: Synthetic oligonucleotide
  Antisense strand to SEQ ID NO: 680816
uacuaccuauucuaccacc

SEQ ID NO: 680818 - RNA, 19 nt, Artificial Sequence
  Description of Artificial Sequence: Synthetic oligonucleotide
  Sense strand starting at position 2819 of SEQ ID NO: 585954
gugguagaauagguaguau

SEQ ID NO: 680819 - RNA, 19 nt, Artificial Sequence
  Description of Artificial Sequence: Synthetic oligonucleotide
  Antisense strand to SEQ ID NO: 680818
auacuaccuauucuaccac

SEQ ID NO: 680820 - RNA, 19 nt, Artificial Sequence
  Description of Artificial Sequence: Synthetic oligonucleotide
  Sense strand starting at position 2855 of SEQ ID NO: 585954
acuggaauauucucgugga

SEQ ID NO: 680821 - RNA, 19 nt, Artificial Sequence
  Description of Artificial Sequence: Synthetic oligonucleotide
  Antisense strand to SEQ ID NO: 680820
uccacgagaauauuccagu

SEQ ID NO: 680822 - RNA, 19 nt, Artificial Sequence
  Description of Artificial Sequence: Synthetic oligonucleotide
  Sense strand starting at position 2982 of SEQ ID NO: 585954
cguguuauccaucaucuag

SEQ ID NO: 680823 - RNA, 19 nt, Artificial Sequence
  Description of Artificial Sequence: Synthetic oligonucleotide
  Antisense strand to SEQ ID NO: 680822
cuagaugauggauaacacg

SEQ ID NO: 680824 - RNA, 19 nt, Artificial Sequence
  Description of Artificial Sequence: Synthetic oligonucleotide
  Sense strand starting at position 3252 of SEQ ID NO: 585954
cacacuuugguagaagcua

SEQ ID NO: 680825 - RNA, 19 nt, Artificial Sequence
  Description of Artificial Sequence: Synthetic oligonucleotide
  Antisense strand to SEQ ID NO: 680824
uagcuucuaccaaagugug

SEQ ID NO: 680826 - RNA, 19 nt, Artificial Sequence
  Description of Artificial Sequence: Synthetic oligonucleotide
  Sense strand starting at position 3315 of SEQ ID NO: 585954
gucaguauugucuauaaau

SEQ ID NO: 680827 - RNA, 19 nt, Artificial Sequence
  Description of Artificial Sequence: Synthetic oligonucleotide
  Antisense strand to SEQ ID NO: 680826
auuuauagacaauacugac

SEQ ID NO: 680828 - RNA, 19 nt, Artificial Sequence
  Description of Artificial Sequence: Synthetic oligonucleotide
  Sense strand starting at position 3539 of SEQ ID NO: 585954
augacuggccaauacuauu

SEQ ID NO: 680829 - RNA, 19 nt, Artificial Sequence
  Description of Artificial Sequence: Synthetic oligonucleotide
  Antisense strand to SEQ ID NO: 680828
aauaguauuggccagucau

SEQ ID NO: 680830 - RNA, 19 nt, Artificial Sequence
  Description of Artificial Sequence: Synthetic oligonucleotide
  Sense strand starting at position 3583 of SEQ ID NO: 585954
gaaguuacauagguauuaa

SEQ ID NO: 680831 - RNA, 19 nt, Artificial Sequence
  Description of Artificial Sequence: Synthetic oligonucleotide
  Antisense strand to SEQ ID NO: 680830
uuaauaccuauguaacuuc

SEQ ID NO: 680832 - RNA, 19 nt, Artificial Sequence
  Description of Artificial Sequence: Synthetic oligonucleotide
  Sense strand starting at position 3672 of SEQ ID NO: 585954
cgugguaauauaugauuga

SEQ ID NO: 680833 - RNA, 19 nt, Artificial Sequence
  Description of Artificial Sequence: Synthetic oligonucleotide
  Antisense strand to SEQ ID NO: 680832
ucaaucauauauuaccacg

SEQ ID NO: 680834 - RNA, 19 nt, Artificial Sequence
  Description of Artificial Sequence: Synthetic oligonucleotide
  Sense strand starting at position 3698 of SEQ ID NO: 585954
uaaagaguugggcaacuuu

SEQ ID NO: 680835 - RNA, 19 nt, Artificial Sequence
  Description of Artificial Sequence: Synthetic oligonucleotide
  Antisense strand to SEQ ID NO: 680834
aaaguugcccaacucuuua

SEQ ID NO: 680836 - RNA, 19 nt, Artificial Sequence
  Description of Artificial Sequence: Synthetic oligonucleotide
  Sense strand starting at position 3730 of SEQ ID NO: 585954
uggguuacuaugcagguau

SEQ ID NO: 680837 - RNA, 19 nt, Artificial Sequence
  Description of Artificial Sequence: Synthetic oligonucleotide
  Antisense strand to SEQ ID NO: 680836
auaccugcauaguaaccca

SEQ ID NO: 680838 - RNA, 19 nt, Artificial Sequence
  Description of Artificial Sequence: Synthetic oligonucleotide
  Sense strand starting at position 3794 of SEQ ID NO: 585954
uuguuuauuugugcuugga

SEQ ID NO: 680839 - RNA, 19 nt, Artificial Sequence
  Description of Artificial Sequence: Synthetic oligonucleotide
  Antisense strand to SEQ ID NO: 680838
uccaagcacaaauaaacaa

SEQ ID NO: 680840 - RNA, 19 nt, Artificial Sequence
  Description of Artificial Sequence: Synthetic oligonucleotide
  Sense strand starting at position 3797 of SEQ ID NO: 585954
uuuauuugugcuuggacca

SEQ ID NO: 680841 - RNA, 19 nt, Artificial Sequence
  Description of Artificial Sequence: Synthetic oligonucleotide
  Antisense strand to SEQ ID NO: 680840
ugguccaagcacaaauaaa

SEQ ID NO: 680842 - RNA, 19 nt, Artificial Sequence
  Description of Artificial Sequence: Synthetic oligonucleotide
  Sense strand starting at position 3807 of SEQ ID NO: 585954
cuuggaccacuuugaaacu

SEQ ID NO: 680843 - RNA, 19 nt, Artificial Sequence
  Description of Artificial Sequence: Synthetic oligonucleotide
  Antisense strand to SEQ ID NO: 680842
aguuucaaagugguccaag

SEQ ID NO: 680844 - RNA, 19 nt, Artificial Sequence
  Description of Artificial Sequence: Synthetic oligonucleotide
  Sense strand starting at position 3840 of SEQ ID NO: 585954
uguuccauugaucauauca

SEQ ID NO: 680845 - RNA, 19 nt, Artificial Sequence
  Description of Artificial Sequence: Synthetic oligonucleotide
  Antisense strand to SEQ ID NO: 680844
ugauaugaucaauggaaca

SEQ ID NO: 680846 - RNA, 19 nt, Artificial Sequence
  Description of Artificial Sequence: Synthetic oligonucleotide
  Sense strand starting at position 3936 of SEQ ID NO: 585954
cccucuauagagugauaga

SEQ ID NO: 680847 - RNA, 19 nt, Artificial Sequence
  Description of Artificial Sequence: Synthetic oligonucleotide
  Antisense strand to SEQ ID NO: 680846
ucuaucacucuauagaggg

SEQ ID NO: 680848 - RNA, 19 nt, Artificial Sequence
  Description of Artificial Sequence: Synthetic oligonucleotide
  Sense strand starting at position 80 of SEQ ID NO: 585955
ggauaauucugcucuucuc

SEQ ID NO: 680849 - RNA, 19 nt, Artificial Sequence
  Description of Artificial Sequence: Synthetic oligonucleotide
  Antisense strand to SEQ ID NO: 680848
gagaagagcagaauuaucc

SEQ ID NO: 680850 - RNA, 19 nt, Artificial Sequence
  Description of Artificial Sequence: Synthetic oligonucleotide
  Sense strand starting at position 114 of SEQ ID NO: 585955
caaagaauugggugucucu

SEQ ID NO: 680851 - RNA, 19 nt, Artificial Sequence
  Description of Artificial Sequence: Synthetic oligonucleotide
  Antisense strand to SEQ ID NO: 680850
agagacacccaauucuuug

SEQ ID NO: 680852 - RNA, 19 nt, Artificial Sequence
  Description of Artificial Sequence: Synthetic oligonucleotide
  Sense strand starting at position 281 of SEQ ID NO: 585955
cucagcuuccuggguauuu

SEQ ID NO: 680853 - RNA, 19 nt, Artificial Sequence
  Description of Artificial Sequence: Synthetic oligonucleotide
  Antisense strand to SEQ ID NO: 680852
aaauacccaggaagcugag

SEQ ID NO: 680854 - RNA, 19 nt, Artificial Sequence
  Description of Artificial Sequence: Synthetic oligonucleotide
  Sense strand starting at position 299 of SEQ ID NO: 585955
uuguguuguagccaacuuu

SEQ ID NO: 680855 - RNA, 19 nt, Artificial Sequence
  Description of Artificial Sequence: Synthetic oligonucleotide
  Antisense strand to SEQ ID NO: 680854
aaaguuggcuacaacacaa

SEQ ID NO: 680856 - RNA, 19 nt, Artificial Sequence
  Description of Artificial Sequence: Synthetic oligonucleotide
  Sense strand starting at position 319 of SEQ ID NO: 585955
acacuuugcucauuaggga

SEQ ID NO: 680857 - RNA, 19 nt, Artificial Sequence
  Description of Artificial Sequence: Synthetic oligonucleotide
  Antisense strand to SEQ ID NO: 680856
ucccuaaugagcaaagugu

SEQ ID NO: 680858 - RNA, 19 nt, Artificial Sequence
  Description of Artificial Sequence: Synthetic oligonucleotide
  Sense strand starting at position 440 of SEQ ID NO: 585955
gcuacacccucaguugaau

SEQ ID NO: 680859 - RNA, 19 nt, Artificial Sequence
  Description of Artificial Sequence: Synthetic oligonucleotide
  Antisense strand to SEQ ID NO: 680858
auucaacugaggguguagc

SEQ ID NO: 680860 - RNA, 19 nt, Artificial Sequence
  Description of Artificial Sequence: Synthetic oligonucleotide
  Sense strand starting at position 470 of SEQ ID NO: 585955
aggugaagguagaaggauu

SEQ ID NO: 680861 - RNA, 19 nt, Artificial Sequence
  Description of Artificial Sequence: Synthetic oligonucleotide
  Antisense strand to SEQ ID NO: 680860
aauccuucuaccuucaccu

SEQ ID NO: 680862 - RNA, 19 nt, Artificial Sequence
  Description of Artificial Sequence: Synthetic oligonucleotide
  Sense strand starting at position 481 of SEQ ID NO: 585955
gaaggauucuaggagugag

SEQ ID NO: 680863 - RNA, 19 nt, Artificial Sequence
  Description of Artificial Sequence: Synthetic oligonucleotide
  Antisense strand to SEQ ID NO: 680862
cucacuccuagaauccuuc

SEQ ID NO: 680864 - RNA, 19 nt, Artificial Sequence
  Description of Artificial Sequence: Synthetic oligonucleotide
  Sense strand starting at position 484 of SEQ ID NO: 585955
ggauucuaggagugagacu

SEQ ID NO: 680865 - RNA, 19 nt, Artificial Sequence
  Description of Artificial Sequence: Synthetic oligonucleotide
  Antisense strand to SEQ ID NO: 680864
agucucacuccuagaaucc

SEQ ID NO: 680866 - RNA, 19 nt, Artificial Sequence
  Description of Artificial Sequence: Synthetic oligonucleotide
  Sense strand starting at position 522 of SEQ ID NO: 585955
cucagauauugggcuggaa

SEQ ID NO: 680867 - RNA, 19 nt, Artificial Sequence
  Description of Artificial Sequence: Synthetic oligonucleotide
  Antisense strand to SEQ ID NO: 680866
uuccagcccaauaucugag

SEQ ID NO: 680868 - RNA, 19 nt, Artificial Sequence
  Description of Artificial Sequence: Synthetic oligonucleotide
  Sense strand starting at position 605 of SEQ ID NO: 585955
agcuaaucggccugggaau

SEQ ID NO: 680869 - RNA, 19 nt, Artificial Sequence
  Description of Artificial Sequence: Synthetic oligonucleotide
  Antisense strand to SEQ ID NO: 680868
auucccaggccgauuagcu

SEQ ID NO: 680870 - RNA, 19 nt, Artificial Sequence
  Description of Artificial Sequence: Synthetic oligonucleotide
  Sense strand starting at position 720 of SEQ ID NO: 585955
cuaggucuggagugagcaa

SEQ ID NO: 680871 - RNA, 19 nt, Artificial Sequence
  Description of Artificial Sequence: Synthetic oligonucleotide
  Antisense strand to SEQ ID NO: 680870
uugcucacuccagaccuag

SEQ ID NO: 680872 - RNA, 19 nt, Artificial Sequence
  Description of Artificial Sequence: Synthetic oligonucleotide
  Sense strand starting at position 849 of SEQ ID NO: 585955
ugguguuuccgaguugcuu

SEQ ID NO: 680873 - RNA, 19 nt, Artificial Sequence
  Description of Artificial Sequence: Synthetic oligonucleotide
  Antisense strand to SEQ ID NO: 680872
aagcaacucggaaacacca

SEQ ID NO: 680874 - RNA, 19 nt, Artificial Sequence
  Description of Artificial Sequence: Synthetic oligonucleotide
  Sense strand starting at position 868 of SEQ ID NO: 585955
cccaguaguuccucucagu

SEQ ID NO: 680875 - RNA, 19 nt, Artificial Sequence
  Description of Artificial Sequence: Synthetic oligonucleotide
  Antisense strand to SEQ ID NO: 680874
acugagaggaacuacuggg

SEQ ID NO: 680876 - RNA, 19 nt, Artificial Sequence
  Description of Artificial Sequence: Synthetic oligonucleotide
  Sense strand starting at position 896 of SEQ ID NO: 585955
aguuguuucuaugccauua

SEQ ID NO: 680877 - RNA, 19 nt, Artificial Sequence
  Description of Artificial Sequence: Synthetic oligonucleotide
  Antisense strand to SEQ ID NO: 680876
uaauggcauagaaacaacu

SEQ ID NO: 680878 - RNA, 19 nt, Artificial Sequence
  Description of Artificial Sequence: Synthetic oligonucleotide
  Sense strand starting at position 914 of SEQ ID NO: 585955
aaauucuuuccaggcgaga

SEQ ID NO: 680879 - RNA, 19 nt, Artificial Sequence
  Description of Artificial Sequence: Synthetic oligonucleotide
  Antisense strand to SEQ ID NO: 680878
ucucgccuggaaagaauuu

SEQ ID NO: 680880 - RNA, 19 nt, Artificial Sequence
  Description of Artificial Sequence: Synthetic oligonucleotide
  Sense strand starting at position 916 of SEQ ID NO: 585955
auucuuuccaggcgagaua

SEQ ID NO: 680881 - RNA, 19 nt, Artificial Sequence
  Description of Artificial Sequence: Synthetic oligonucleotide
  Antisense strand to SEQ ID NO: 680880
uaucucgccuggaaagaau

SEQ ID NO: 680882 - RNA, 19 nt, Artificial Sequence
  Description of Artificial Sequence: Synthetic oligonucleotide
  Sense strand starting at position 917 of SEQ ID NO: 585955
uucuuuccaggcgagauaa

SEQ ID NO: 680883 - RNA, 19 nt, Artificial Sequence
  Description of Artificial Sequence: Synthetic oligonucleotide
  Antisense strand to SEQ ID NO: 680882
uuaucucgccuggaaagaa

SEQ ID NO: 680884 - RNA, 19 nt, Artificial Sequence
  Description of Artificial Sequence: Synthetic oligonucleotide
  Sense strand starting at position 1356 of SEQ ID NO: 585955
cugcucuagcccgacauuu

SEQ ID NO: 680885 - RNA, 19 nt, Artificial Sequence
  Description of Artificial Sequence: Synthetic oligonucleotide
  Antisense strand to SEQ ID NO: 680884
aaaugucgggcuagagcag

SEQ ID NO: 680886 - RNA, 19 nt, Artificial Sequence
  Description of Artificial Sequence: Synthetic oligonucleotide
  Sense strand starting at position 1469 of SEQ ID NO: 585955
gggcucaccucaccaauaa

SEQ ID NO: 680887 - RNA, 19 nt, Artificial Sequence
  Description of Artificial Sequence: Synthetic oligonucleotide
  Antisense strand to SEQ ID NO: 680886
uuauuggugaggugagccc

SEQ ID NO: 680888 - RNA, 19 nt, Artificial Sequence
  Description of Artificial Sequence: Synthetic oligonucleotide
  Sense strand starting at position 1549 of SEQ ID NO: 585955
cucaguugucugcauccca

SEQ ID NO: 680889 - RNA, 19 nt, Artificial Sequence
  Description of Artificial Sequence: Synthetic oligonucleotide
  Antisense strand to SEQ ID NO: 680888
ugggaugcagacaacugag

SEQ ID NO: 680890 - RNA, 19 nt, Artificial Sequence
  Description of Artificial Sequence: Synthetic oligonucleotide
  Sense strand starting at position 1669 of SEQ ID NO: 585955
guccucuguccugaacaga

SEQ ID NO: 680891 - RNA, 19 nt, Artificial Sequence
  Description of Artificial Sequence: Synthetic oligonucleotide
  Antisense strand to SEQ ID NO: 680890
ucuguucaggacagaggac

SEQ ID NO: 680892 - RNA, 19 nt, Artificial Sequence
  Description of Artificial Sequence: Synthetic oligonucleotide
  Sense strand starting at position 1685 of SEQ ID NO: 585955
agaaguccuugcucuggaa

SEQ ID NO: 680893 - RNA, 19 nt, Artificial Sequence
  Description of Artificial Sequence: Synthetic oligonucleotide
  Antisense strand to SEQ ID NO: 680892
uuccagagcaaggacuucu

SEQ ID NO: 680894 - RNA, 19 nt, Artificial Sequence
  Description of Artificial Sequence: Synthetic oligonucleotide
  Sense strand starting at position 1755 of SEQ ID NO: 585955
cgagaaaucccuugccucu

SEQ ID NO: 680895 - RNA, 19 nt, Artificial Sequence
  Description of Artificial Sequence: Synthetic oligonucleotide
  Antisense strand to SEQ ID NO: 680894
agaggcaagggauuucucg

SEQ ID NO: 680896 - RNA, 19 nt, Artificial Sequence
  Description of Artificial Sequence: Synthetic oligonucleotide
  Sense strand starting at position 1885 of SEQ ID NO: 585955
agggaagucucccucacuu

SEQ ID NO: 680897 - RNA, 19 nt, Artificial Sequence
  Description of Artificial Sequence: Synthetic oligonucleotide
  Antisense strand to SEQ ID NO: 680896
aagugagggagacuucccu

SEQ ID NO: 680898 - RNA, 19 nt, Artificial Sequence
  Description of Artificial Sequence: Synthetic oligonucleotide
  Sense strand starting at position 1887 of SEQ ID NO: 585955
ggaagucucccucacuugu

SEQ ID NO: 680899 - RNA, 19 nt, Artificial Sequence
  Description of Artificial Sequence: Synthetic oligonucleotide
  Antisense strand to SEQ ID NO: 680898
acaagugagggagacuucc

SEQ ID NO: 680900 - RNA, 19 nt, Artificial Sequence
  Description of Artificial Sequence: Synthetic oligonucleotide
  Sense strand starting at position 2302 of SEQ ID NO: 585955
gguuuccucucagccuaua

SEQ ID NO: 680901 - RNA, 19 nt, Artificial Sequence
  Description of Artificial Sequence: Synthetic oligonucleotide
  Antisense strand to SEQ ID NO: 680900
uauaggcugagaggaaacc

SEQ ID NO: 680902 - RNA, 19 nt, Artificial Sequence
  Description of Artificial Sequence: Synthetic oligonucleotide
  Sense strand starting at position 2677 of SEQ ID NO: 585955
ucagcaagucccuagagaa

SEQ ID NO: 680903 - RNA, 19 nt, Artificial Sequence
  Description of Artificial Sequence: Synthetic oligonucleotide
  Antisense strand to SEQ ID NO: 680902
uucucuagggacuugcuga

SEQ ID NO: 680904 - RNA, 19 nt, Artificial Sequence
  Description of Artificial Sequence: Synthetic oligonucleotide
  Sense strand starting at position 2817 of SEQ ID NO: 585955
aagguuuaggguugaagaa

SEQ ID NO: 680905 - RNA, 19 nt, Artificial Sequence
  Description of Artificial Sequence: Synthetic oligonucleotide
  Antisense strand to SEQ ID NO: 680904
uucuucaacccuaaaccuu

SEQ ID NO: 680906 - RNA, 19 nt, Artificial Sequence
  Description of Artificial Sequence: Synthetic oligonucleotide
  Sense strand starting at position 2819 of SEQ ID NO: 585955
gguuuaggguugaagaaag

SEQ ID NO: 680907 - RNA, 19 nt, Artificial Sequence
  Description of Artificial Sequence: Synthetic oligonucleotide
  Antisense strand to SEQ ID NO: 680906
cuuucuucaacccuaaacc

SEQ ID NO: 680908 - RNA, 19 nt, Artificial Sequence
  Description of Artificial Sequence: Synthetic oligonucleotide
  Sense strand starting at position 2861 of SEQ ID NO: 585955
aagggugggucaccugaau

SEQ ID NO: 680909 - RNA, 19 nt, Artificial Sequence
  Description of Artificial Sequence: Synthetic oligonucleotide
  Antisense strand to SEQ ID NO: 680908
auucaggugacccacccuu

SEQ ID NO: 680910 - RNA, 19 nt, Artificial Sequence
  Description of Artificial Sequence: Synthetic oligonucleotide
  Sense strand starting at position 3224 of SEQ ID NO: 585955
ugagguguaacuuggccaa

SEQ ID NO: 680911 - RNA, 19 nt, Artificial Sequence
  Description of Artificial Sequence: Synthetic oligonucleotide
  Antisense strand to SEQ ID NO: 680910
uuggccaaguuacaccuca

SEQ ID NO: 680912 - RNA, 19 nt, Artificial Sequence
  Description of Artificial Sequence: Synthetic oligonucleotide
  Sense strand starting at position 3226 of SEQ ID NO: 585955
agguguaacuuggccaagu

SEQ ID NO: 680913 - RNA, 19 nt, Artificial Sequence
  Description of Artificial Sequence: Synthetic oligonucleotide
  Antisense strand to SEQ ID NO: 680912
acuuggccaaguuacaccu

SEQ ID NO: 680914 - RNA, 19 nt, Artificial Sequence
  Description of Artificial Sequence: Synthetic oligonucleotide
  Sense strand starting at position 3228 of SEQ ID NO: 585955
guguaacuuggccaaguca

SEQ ID NO: 680915 - RNA, 19 nt, Artificial Sequence
  Description of Artificial Sequence: Synthetic oligonucleotide
  Antisense strand to SEQ ID NO: 680914
ugacuuggccaaguuacac

SEQ ID NO: 680916 - RNA, 19 nt, Artificial Sequence
  Description of Artificial Sequence: Synthetic oligonucleotide
  Sense strand starting at position 3237 of SEQ ID NO: 585955
ggccaagucacgggugaaa

SEQ ID NO: 680917 - RNA, 19 nt, Artificial Sequence
  Description of Artificial Sequence: Synthetic oligonucleotide
  Antisense strand to SEQ ID NO: 680916
uuucacccgugacuuggcc

SEQ ID NO: 680918 - RNA, 19 nt, Artificial Sequence
  Description of Artificial Sequence: Synthetic oligonucleotide
  Sense strand starting at position 3270 of SEQ ID NO: 585955
cccauaugugcuugauucu

SEQ ID NO: 680919 - RNA, 19 nt, Artificial Sequence
  Description of Artificial Sequence: Synthetic oligonucleotide
  Antisense strand to SEQ ID NO: 680918
agaaucaagcacauauggg

SEQ ID NO: 680920 - RNA, 19 nt, Artificial Sequence
  Description of Artificial Sequence: Synthetic oligonucleotide
  Sense strand starting at position 3614 of SEQ ID NO: 585955
caaggaucuccuggcagga

SEQ ID NO: 680921 - RNA, 19 nt, Artificial Sequence
  Description of Artificial Sequence: Synthetic oligonucleotide
  Antisense strand to SEQ ID NO: 680920
uccugccaggagauccuug

SEQ ID NO: 680922 - RNA, 19 nt, Artificial Sequence
  Description of Artificial Sequence: Synthetic oligonucleotide
  Sense strand starting at position 3730 of SEQ ID NO: 585955
auuucuguuccauggucau

SEQ ID NO: 680923 - RNA, 19 nt, Artificial Sequence
  Description of Artificial Sequence: Synthetic oligonucleotide
  Antisense strand to SEQ ID NO: 680922
augaccauggaacagaaau

SEQ ID NO: 680924 - RNA, 19 nt, Artificial Sequence
  Description of Artificial Sequence: Synthetic oligonucleotide
  Sense strand starting at position 3743 of SEQ ID NO: 585955
ggucauauccuuuagugug

SEQ ID NO: 680925 - RNA, 19 nt, Artificial Sequence
  Description of Artificial Sequence: Synthetic oligonucleotide
  Antisense strand to SEQ ID NO: 680924
cacacuaaaggauaugacc

SEQ ID NO: 680926 - RNA, 19 nt, Artificial Sequence
  Description of Artificial Sequence: Synthetic oligonucleotide
  Sense strand starting at position 3924 of SEQ ID NO: 585955
agagaaaugugggauucca

SEQ ID NO: 680927 - RNA, 19 nt, Artificial Sequence
  Description of Artificial Sequence: Synthetic oligonucleotide
  Antisense strand to SEQ ID NO: 680926
uggaaucccacauuucucu

SEQ ID NO: 680928 - RNA, 19 nt, Artificial Sequence
  Description of Artificial Sequence: Synthetic oligonucleotide
  Sense strand starting at position 1019 of SEQ ID NO: 585956
ugcccauucguguccucau

SEQ ID NO: 680929 - RNA, 19 nt, Artificial Sequence
  Description of Artificial Sequence: Synthetic oligonucleotide
  Antisense strand to SEQ ID NO: 680928
augaggacacgaaugggca

SEQ ID NO: 680930 - RNA, 19 nt, Artificial Sequence
  Description of Artificial Sequence: Synthetic oligonucleotide
  Sense strand starting at position 1020 of SEQ ID NO: 585956
gcccauucguguccucaua

SEQ ID NO: 680931 - RNA, 19 nt, Artificial Sequence
  Description of Artificial Sequence: Synthetic oligonucleotide
  Antisense strand to SEQ ID NO: 680930
uaugaggacacgaaugggc

SEQ ID NO: 680932 - RNA, 19 nt, Artificial Sequence
  Description of Artificial Sequence: Synthetic oligonucleotide
  Sense strand starting at position 1022 of SEQ ID NO: 585956
ccauucguguccucauacu

SEQ ID NO: 680933 - RNA, 19 nt, Artificial Sequence
  Description of Artificial Sequence: Synthetic oligonucleotide
  Antisense strand to SEQ ID NO: 680932
aguaugaggacacgaaugg

SEQ ID NO: 680934 - RNA, 19 nt, Artificial Sequence
  Description of Artificial Sequence: Synthetic oligonucleotide
  Sense strand starting at position 1709 of SEQ ID NO: 585956
cagggagguuugccacuau

SEQ ID NO: 680935 - RNA, 19 nt, Artificial Sequence
  Description of Artificial Sequence: Synthetic oligonucleotide
  Antisense strand to SEQ ID NO: 680934
auaguggcaaaccucccug

SEQ ID NO: 680936 - RNA, 19 nt, Artificial Sequence
  Description of Artificial Sequence: Synthetic oligonucleotide
  Sense strand starting at position 1994 of SEQ ID NO: 585956
gcacaaguacuuuguuaaa

SEQ ID NO: 680937 - RNA, 19 nt, Artificial Sequence
  Description of Artificial Sequence: Synthetic oligonucleotide
  Antisense strand to SEQ ID NO: 680936
uuuaacaaaguacuugugc

SEQ ID NO: 680938 - RNA, 19 nt, Artificial Sequence
  Description of Artificial Sequence: Synthetic oligonucleotide
  Sense strand starting at position 43 of SEQ ID NO: 585957
gaggcuucucccuacgagu

SEQ ID NO: 680939 - RNA, 19 nt, Artificial Sequence
  Description of Artificial Sequence: Synthetic oligonucleotide
  Antisense strand to SEQ ID NO: 680938
acucguagggagaagccuc

SEQ ID NO: 680940 - RNA, 19 nt, Artificial Sequence
  Description of Artificial Sequence: Synthetic oligonucleotide
  Sense strand starting at position 1019 of SEQ ID NO: 585957
gcccguucguguccucaua

SEQ ID NO: 680941 - RNA, 19 nt, Artificial Sequence
  Description of Artificial Sequence: Synthetic oligonucleotide
  Antisense strand to SEQ ID NO: 680940
uaugaggacacgaacgggc

SEQ ID NO: 680942 - RNA, 19 nt, Artificial Sequence
  Description of Artificial Sequence: Synthetic oligonucleotide
  Sense strand starting at position 1021 of SEQ ID NO: 585957
ccguucguguccucauacu

SEQ ID NO: 680943 - RNA, 19 nt, Artificial Sequence
  Description of Artificial Sequence: Synthetic oligonucleotide
  Antisense strand to SEQ ID NO: 680942
aguaugaggacacgaacgg

SEQ ID NO: 680944 - RNA, 19 nt, Artificial Sequence
  Description of Artificial Sequence: Synthetic oligonucleotide
  Sense strand starting at position 1767 of SEQ ID NO: 585957
gcgaguaaugaggagcagu

SEQ ID NO: 680945 - RNA, 19 nt, Artificial Sequence
  Description of Artificial Sequence: Synthetic oligonucleotide
  Antisense strand to SEQ ID NO: 680944
acugcuccucauuacucgc

SEQ ID NO: 680946 - RNA, 19 nt, Artificial Sequence
  Description of Artificial Sequence: Synthetic oligonucleotide
  Sense strand starting at position 2103 of SEQ ID NO: 585957
agcagaaacuuguauuucu

SEQ ID NO: 680947 - RNA, 19 nt, Artificial Sequence
  Description of Artificial Sequence: Synthetic oligonucleotide
  Antisense strand to SEQ ID NO: 680946
agaaauacaaguuucugcu

SEQ ID NO: 680948 - RNA, 19 nt, Artificial Sequence
  Description of Artificial Sequence: Synthetic oligonucleotide
  Sense strand starting at position 2304 of SEQ ID NO: 585957
ggagguagcuccuucucca

SEQ ID NO: 680949 - RNA, 19 nt, Artificial Sequence
  Description of Artificial Sequence: Synthetic oligonucleotide
  Antisense strand to SEQ ID NO: 680948
uggagaaggagcuaccucc

SEQ ID NO: 680950 - RNA, 19 nt, Artificial Sequence
  Description of Artificial Sequence: Synthetic oligonucleotide
  Sense strand starting at position 2344 of SEQ ID NO: 585957
agggaaagcucuuagucac

SEQ ID NO: 680951 - RNA, 19 nt, Artificial Sequence
  Description of Artificial Sequence: Synthetic oligonucleotide
  Antisense strand to SEQ ID NO: 680950
gugacuaagagcuuucccu

SEQ ID NO: 680952 - RNA, 19 nt, Artificial Sequence
  Description of Artificial Sequence: Synthetic oligonucleotide
  Sense strand starting at position 2347 of SEQ ID NO: 585957
gaaagcucuuagucacaug

SEQ ID NO: 680953 - RNA, 19 nt, Artificial Sequence
  Description of Artificial Sequence: Synthetic oligonucleotide
  Antisense strand to SEQ ID NO: 680952
caugugacuaagagcuuuc

SEQ ID NO: 680954 - RNA, 19 nt, Artificial Sequence
  Description of Artificial Sequence: Synthetic oligonucleotide
  Sense strand starting at position 2399 of SEQ ID NO: 585957
ggugugagguucugggaaa

SEQ ID NO: 680955 - RNA, 19 nt, Artificial Sequence
  Description of Artificial Sequence: Synthetic oligonucleotide
  Antisense strand to SEQ ID NO: 680954
uuucccagaaccucacacc

SEQ ID NO: 680956 - RNA, 19 nt, Artificial Sequence
  Description of Artificial Sequence: Synthetic oligonucleotide
  Sense strand starting at position 2400 of SEQ ID NO: 585957
gugugagguucugggaaau

SEQ ID NO: 680957 - RNA, 19 nt, Artificial Sequence
  Description of Artificial Sequence: Synthetic oligonucleotide
  Antisense strand to SEQ ID NO: 680956
auuucccagaaccucacac

SEQ ID NO: 680958 - RNA, 19 nt, Artificial Sequence
  Description of Artificial Sequence: Synthetic oligonucleotide
  Sense strand starting at position 2412 of SEQ ID NO: 585957
gggaaauggucccuccagu

SEQ ID NO: 680959 - RNA, 19 nt, Artificial Sequence
  Description of Artificial Sequence: Synthetic oligonucleotide
  Antisense strand to SEQ ID NO: 680958
acuggagggaccauuuccc

SEQ ID NO: 680960 - RNA, 19 nt, Artificial Sequence
  Description of Artificial Sequence: Synthetic oligonucleotide
  Sense strand starting at position 2559 of SEQ ID NO: 585957
cccugcugugaucgaggau

SEQ ID NO: 680961 - RNA, 19 nt, Artificial Sequence
  Description of Artificial Sequence: Synthetic oligonucleotide
  Antisense strand to SEQ ID NO: 680960
auccucgaucacagcaggg

SEQ ID NO: 680962 - RNA, 19 nt, Artificial Sequence
  Description of Artificial Sequence: Synthetic oligonucleotide
  Sense strand starting at position 2701 of SEQ ID NO: 585957
ggaggucucuggguuguca

SEQ ID NO: 680963 - RNA, 19 nt, Artificial Sequence
  Description of Artificial Sequence: Synthetic oligonucleotide
  Antisense strand to SEQ ID NO: 680962
ugacaacccagagaccucc

SEQ ID NO: 680964 - RNA, 19 nt, Artificial Sequence
  Description of Artificial Sequence: Synthetic oligonucleotide
  Sense strand starting at position 2709 of SEQ ID NO: 585957
cuggguugucacggagaca

SEQ ID NO: 680965 - RNA, 19 nt, Artificial Sequence
  Description of Artificial Sequence: Synthetic oligonucleotide
  Antisense strand to SEQ ID NO: 680964
ugucuccgugacaacccag

SEQ ID NO: 680966 - RNA, 19 nt, Artificial Sequence
  Description of Artificial Sequence: Synthetic oligonucleotide
  Sense strand starting at position 2814 of SEQ ID NO: 585957
uggccaucagccugaacau

SEQ ID NO: 680967 - RNA, 19 nt, Artificial Sequence
  Description of Artificial Sequence: Synthetic oligonucleotide
  Antisense strand to SEQ ID NO: 680966
auguucaggcugauggcca

SEQ ID NO: 680968 - RNA, 19 nt, Artificial Sequence
  Description of Artificial Sequence: Synthetic oligonucleotide
  Sense strand starting at position 2909 of SEQ ID NO: 585957
gggauuagcugggagaaca

SEQ ID NO: 680969 - RNA, 19 nt, Artificial Sequence
  Description of Artificial Sequence: Synthetic oligonucleotide
  Antisense strand to SEQ ID NO: 680968
uguucucccagcuaauccc

SEQ ID NO: 680970 - RNA, 19 nt, Artificial Sequence
  Description of Artificial Sequence: Synthetic oligonucleotide
  Sense strand starting at position 2998 of SEQ ID NO: 585957
gugaggguuugggaagaga

SEQ ID NO: 680971 - RNA, 19 nt, Artificial Sequence
  Description of Artificial Sequence: Synthetic oligonucleotide
  Antisense strand to SEQ ID NO: 680970
ucucuucccaaacccucac

SEQ ID NO: 680972 - RNA, 19 nt, Artificial Sequence
  Description of Artificial Sequence: Synthetic oligonucleotide
  Sense strand starting at position 3081 of SEQ ID NO: 585957
gacucaugguccugggagu

SEQ ID NO: 680973 - RNA, 19 nt, Artificial Sequence
  Description of Artificial Sequence: Synthetic oligonucleotide
  Antisense strand to SEQ ID NO: 680972
acucccaggaccaugaguc

SEQ ID NO: 680974 - RNA, 19 nt, Artificial Sequence
  Description of Artificial Sequence: Synthetic oligonucleotide
  Sense strand starting at position 3138 of SEQ ID NO: 585957
ggagcugagucauaggcau

SEQ ID NO: 680975 - RNA, 19 nt, Artificial Sequence
  Description of Artificial Sequence: Synthetic oligonucleotide
  Antisense strand to SEQ ID NO: 680974
augccuaugacucagcucc

SEQ ID NO: 680976 - RNA, 19 nt, Artificial Sequence
  Description of Artificial Sequence: Synthetic oligonucleotide
  Sense strand starting at position 3140 of SEQ ID NO: 585957
agcugagucauaggcauag

SEQ ID NO: 680977 - RNA, 19 nt, Artificial Sequence
  Description of Artificial Sequence: Synthetic oligonucleotide
  Antisense strand to SEQ ID NO: 680976
cuaugccuaugacucagcu

SEQ ID NO: 680978 - RNA, 19 nt, Artificial Sequence
  Description of Artificial Sequence: Synthetic oligonucleotide
  Sense strand starting at position 3144 of SEQ ID NO: 585957
gagucauaggcauagugac

SEQ ID NO: 680979 - RNA, 19 nt, Artificial Sequence
  Description of Artificial Sequence: Synthetic oligonucleotide
  Antisense strand to SEQ ID NO: 680978
gucacuaugccuaugacuc

SEQ ID NO: 680980 - RNA, 19 nt, Artificial Sequence
  Description of Artificial Sequence: Synthetic oligonucleotide
  Sense strand starting at position 3171 of SEQ ID NO: 585957
uuuccaucgucuuuccaua

SEQ ID NO: 680981 - RNA, 19 nt, Artificial Sequence
  Description of Artificial Sequence: Synthetic oligonucleotide
  Antisense strand to SEQ ID NO: 680980
uauggaaagacgauggaaa

SEQ ID NO: 680982 - RNA, 19 nt, Artificial Sequence
  Description of Artificial Sequence: Synthetic oligonucleotide
  Sense strand starting at position 3176 of SEQ ID NO: 585957
aucgucuuuccauagccaa

SEQ ID NO: 680983 - RNA, 19 nt, Artificial Sequence
  Description of Artificial Sequence: Synthetic oligonucleotide
  Antisense strand to SEQ ID NO: 680982
uuggcuauggaaagacgau

SEQ ID NO: 680984 - RNA, 19 nt, Artificial Sequence
  Description of Artificial Sequence: Synthetic oligonucleotide
  Sense strand starting at position 3269 of SEQ ID NO: 585957
gcgccauucccagcauuau

SEQ ID NO: 680985 - RNA, 19 nt, Artificial Sequence
  Description of Artificial Sequence: Synthetic oligonucleotide
  Antisense strand to SEQ ID NO: 680984
auaaugcugggaauggcgc

SEQ ID NO: 680986 - RNA, 19 nt, Artificial Sequence
  Description of Artificial Sequence: Synthetic oligonucleotide
  Sense strand starting at position 3281 of SEQ ID NO: 585957
gcauuaugcaggugaggac

SEQ ID NO: 680987 - RNA, 19 nt, Artificial Sequence
  Description of Artificial Sequence: Synthetic oligonucleotide
  Antisense strand to SEQ ID NO: 680986
guccucaccugcauaaugc

SEQ ID NO: 680988 - RNA, 19 nt, Artificial Sequence
  Description of Artificial Sequence: Synthetic oligonucleotide
  Sense strand starting at position 3314 of SEQ ID NO: 585957
gaugaagcggcuuguccau

SEQ ID NO: 680989 - RNA, 19 nt, Artificial Sequence
  Description of Artificial Sequence: Synthetic oligonucleotide
  Antisense strand to SEQ ID NO: 680988
auggacaagccgcuucauc

SEQ ID NO: 680990 - RNA, 19 nt, Artificial Sequence
  Description of Artificial Sequence: Synthetic oligonucleotide
  Sense strand starting at position 3401 of SEQ ID NO: 585957
uuuauuuccucagcaguca

SEQ ID NO: 680991 - RNA, 19 nt, Artificial Sequence
  Description of Artificial Sequence: Synthetic oligonucleotide
  Antisense strand to SEQ ID NO: 680990
ugacugcugaggaaauaaa

SEQ ID NO: 680992 - RNA, 19 nt, Artificial Sequence
  Description of Artificial Sequence: Synthetic oligonucleotide
  Sense strand starting at position 3410 of SEQ ID NO: 585957
ucagcagucagcgaaugaa

SEQ ID NO: 680993 - RNA, 19 nt, Artificial Sequence
  Description of Artificial Sequence: Synthetic oligonucleotide
  Antisense strand to SEQ ID NO: 680992
uucauucgcugacugcuga

SEQ ID NO: 680994 - RNA, 19 nt, Artificial Sequence
  Description of Artificial Sequence: Synthetic oligonucleotide
  Sense strand starting at position 3430 of SEQ ID NO: 585957
ggaaguaaugcauaugcuu

SEQ ID NO: 680995 - RNA, 19 nt, Artificial Sequence
  Description of Artificial Sequence: Synthetic oligonucleotide
  Antisense strand to SEQ ID NO: 680994
aagcauaugcauuacuucc

SEQ ID NO: 680996 - RNA, 19 nt, Artificial Sequence
  Description of Artificial Sequence: Synthetic oligonucleotide
  Sense strand starting at position 3473 of SEQ ID NO: 585957
ggacucacuuucggaguua

SEQ ID NO: 680997 - RNA, 19 nt, Artificial Sequence
  Description of Artificial Sequence: Synthetic oligonucleotide
  Antisense strand to SEQ ID NO: 680996
uaacuccgaaagugagucc

SEQ ID NO: 680998 - RNA, 19 nt, Artificial Sequence
  Description of Artificial Sequence: Synthetic oligonucleotide
  Sense strand starting at position 3474 of SEQ ID NO: 585957
gacucacuuucggaguuaa

SEQ ID NO: 680999 - RNA, 19 nt, Artificial Sequence
  Description of Artificial Sequence: Synthetic oligonucleotide
  Antisense strand to SEQ ID NO: 680998
uuaacuccgaaagugaguc

SEQ ID NO: 681000 - RNA, 19 nt, Artificial Sequence
  Description of Artificial Sequence: Synthetic oligonucleotide
  Sense strand starting at position 3486 of SEQ ID NO: 585957
gaguuaagaugguuguguc

SEQ ID NO: 681001 - RNA, 19 nt, Artificial Sequence
  Description of Artificial Sequence: Synthetic oligonucleotide
  Antisense strand to SEQ ID NO: 681000
gacacaaccaucuuaacuc

SEQ ID NO: 681002 - RNA, 19 nt, Artificial Sequence
  Description of Artificial Sequence: Synthetic oligonucleotide
  Sense strand starting at position 3487 of SEQ ID NO: 585957
aguuaagaugguuguguca

SEQ ID NO: 681003 - RNA, 19 nt, Artificial Sequence
  Description of Artificial Sequence: Synthetic oligonucleotide
  Antisense strand to SEQ ID NO: 681002
ugacacaaccaucuuaacu

SEQ ID NO: 681004 - RNA, 19 nt, Artificial Sequence
  Description of Artificial Sequence: Synthetic oligonucleotide
  Sense strand starting at position 3498 of SEQ ID NO: 585957
uugugucagggcugauaga

SEQ ID NO: 681005 - RNA, 19 nt, Artificial Sequence
  Description of Artificial Sequence: Synthetic oligonucleotide
  Antisense strand to SEQ ID NO: 681004
ucuaucagcccugacacaa

SEQ ID NO: 681006 - RNA, 19 nt, Artificial Sequence
  Description of Artificial Sequence: Synthetic oligonucleotide
  Sense strand starting at position 3515 of SEQ ID NO: 585957
gagggaaucucacgggaag

SEQ ID NO: 681007 - RNA, 19 nt, Artificial Sequence
  Description of Artificial Sequence: Synthetic oligonucleotide
  Antisense strand to SEQ ID NO: 681006
cuucccgugagauucccuc

SEQ ID NO: 681008 - RNA, 19 nt, Artificial Sequence
  Description of Artificial Sequence: Synthetic oligonucleotide
  Sense strand starting at position 3637 of SEQ ID NO: 585957
ucguuuccugccugacaga

SEQ ID NO: 681009 - RNA, 19 nt, Artificial Sequence
  Description of Artificial Sequence: Synthetic oligonucleotide
  Antisense strand to SEQ ID NO: 681008
ucugucaggcaggaaacga

SEQ ID NO: 681010 - RNA, 19 nt, Artificial Sequence
  Description of Artificial Sequence: Synthetic oligonucleotide
  Sense strand starting at position 3752 of SEQ ID NO: 585957
uccuuauccuuguacugga

SEQ ID NO: 681011 - RNA, 19 nt, Artificial Sequence
  Description of Artificial Sequence: Synthetic oligonucleotide
  Antisense strand to SEQ ID NO: 681010
uccaguacaaggauaagga

SEQ ID NO: 681012 - RNA, 19 nt, Artificial Sequence
  Description of Artificial Sequence: Synthetic oligonucleotide
  Sense strand starting at position 62 of SEQ ID NO: 585958
gucucuaggucuccuaaga

SEQ ID NO: 681013 - RNA, 19 nt, Artificial Sequence
  Description of Artificial Sequence: Synthetic oligonucleotide
  Antisense strand to SEQ ID NO: 681012
ucuuaggagaccuagagac

SEQ ID NO: 681014 - RNA, 19 nt, Artificial Sequence
  Description of Artificial Sequence: Synthetic oligonucleotide
  Sense strand starting at position 88 of SEQ ID NO: 585958
ggguguaguucagugcuua

SEQ ID NO: 681015 - RNA, 19 nt, Artificial Sequence
  Description of Artificial Sequence: Synthetic oligonucleotide
  Antisense strand to SEQ ID NO: 681014
uaagcacugaacuacaccc

SEQ ID NO: 681016 - RNA, 19 nt, Artificial Sequence
  Description of Artificial Sequence: Synthetic oligonucleotide
  Sense strand starting at position 89 of SEQ ID NO: 585958
gguguaguucagugcuuac

SEQ ID NO: 681017 - RNA, 19 nt, Artificial Sequence
  Description of Artificial Sequence: Synthetic oligonucleotide
  Antisense strand to SEQ ID NO: 681016
guaagcacugaacuacacc

SEQ ID NO: 681018 - RNA, 19 nt, Artificial Sequence
  Description of Artificial Sequence: Synthetic oligonucleotide
  Sense strand starting at position 201 of SEQ ID NO: 585958
aguaucaaguuccuggaaa

SEQ ID NO: 681019 - RNA, 19 nt, Artificial Sequence
  Description of Artificial Sequence: Synthetic oligonucleotide
  Antisense strand to SEQ ID NO: 681018
uuuccaggaacuugauacu

SEQ ID NO: 681020 - RNA, 19 nt, Artificial Sequence
  Description of Artificial Sequence: Synthetic oligonucleotide
  Sense strand starting at position 238 of SEQ ID NO: 585958
cccuguggucacugaguca

SEQ ID NO: 681021 - RNA, 19 nt, Artificial Sequence
  Description of Artificial Sequence: Synthetic oligonucleotide
  Antisense strand to SEQ ID NO: 681020
ugacucagugaccacaggg

SEQ ID NO: 681022 - RNA, 19 nt, Artificial Sequence
  Description of Artificial Sequence: Synthetic oligonucleotide
  Sense strand starting at position 249 of SEQ ID NO: 585958
cugagucaguuguacaguu

SEQ ID NO: 681023 - RNA, 19 nt, Artificial Sequence
  Description of Artificial Sequence: Synthetic oligonucleotide
  Antisense strand to SEQ ID NO: 681022
aacuguacaacugacucag

SEQ ID NO: 681024 - RNA, 19 nt, Artificial Sequence
  Description of Artificial Sequence: Synthetic oligonucleotide
  Sense strand starting at position 251 of SEQ ID NO: 585958
gagucaguuguacaguuaa

SEQ ID NO: 681025 - RNA, 19 nt, Artificial Sequence
  Description of Artificial Sequence: Synthetic oligonucleotide
  Antisense strand to SEQ ID NO: 681024
uuaacuguacaacugacuc

SEQ ID NO: 681026 - RNA, 19 nt, Artificial Sequence
  Description of Artificial Sequence: Synthetic oligonucleotide
  Sense strand starting at position 259 of SEQ ID NO: 585958
uguacaguuaacgaaaugu

SEQ ID NO: 681027 - RNA, 19 nt, Artificial Sequence
  Description of Artificial Sequence: Synthetic oligonucleotide
  Antisense strand to SEQ ID NO: 681026
acauuucguuaacuguaca

SEQ ID NO: 681028 - RNA, 19 nt, Artificial Sequence
  Description of Artificial Sequence: Synthetic oligonucleotide
  Sense strand starting at position 315 of SEQ ID NO: 585958
cguugauacgugguuguga

SEQ ID NO: 681029 - RNA, 19 nt, Artificial Sequence
  Description of Artificial Sequence: Synthetic oligonucleotide
  Antisense strand to SEQ ID NO: 681028
ucacaaccacguaucaacg

SEQ ID NO: 681030 - RNA, 19 nt, Artificial Sequence
  Description of Artificial Sequence: Synthetic oligonucleotide
  Sense strand starting at position 1360 of SEQ ID NO: 585958
gccuguuuacgugcuagca

SEQ ID NO: 681031 - RNA, 19 nt, Artificial Sequence
  Description of Artificial Sequence: Synthetic oligonucleotide
  Antisense strand to SEQ ID NO: 681030
ugcuagcacguaaacaggc

SEQ ID NO: 681032 - RNA, 19 nt, Artificial Sequence
  Description of Artificial Sequence: Synthetic oligonucleotide
  Sense strand starting at position 1384 of SEQ ID NO: 585958
ucccuugaucagggugaca

SEQ ID NO: 681033 - RNA, 19 nt, Artificial Sequence
  Description of Artificial Sequence: Synthetic oligonucleotide
  Antisense strand to SEQ ID NO: 681032
ugucacccugaucaaggga

SEQ ID NO: 681034 - RNA, 19 nt, Artificial Sequence
  Description of Artificial Sequence: Synthetic oligonucleotide
  Sense strand starting at position 1386 of SEQ ID NO: 585958
ccuugaucagggugacauu

SEQ ID NO: 681035 - RNA, 19 nt, Artificial Sequence
  Description of Artificial Sequence: Synthetic oligonucleotide
  Antisense strand to SEQ ID NO: 681034
aaugucacccugaucaagg

SEQ ID NO: 681036 - RNA, 19 nt, Artificial Sequence
  Description of Artificial Sequence: Synthetic oligonucleotide
  Sense strand starting at position 1461 of SEQ ID NO: 585958
cagggaucucagugaggca

SEQ ID NO: 681037 - RNA, 19 nt, Artificial Sequence
  Description of Artificial Sequence: Synthetic oligonucleotide
  Antisense strand to SEQ ID NO: 681036
ugccucacugagaucccug

SEQ ID NO: 681038 - RNA, 19 nt, Artificial Sequence
  Description of Artificial Sequence: Synthetic oligonucleotide
  Sense strand starting at position 1497 of SEQ ID NO: 585958
acgccacaaugcugguaau

SEQ ID NO: 681039 - RNA, 19 nt, Artificial Sequence
  Description of Artificial Sequence: Synthetic oligonucleotide
  Antisense strand to SEQ ID NO: 681038
auuaccagcauuguggcgu

SEQ ID NO: 681040 - RNA, 19 nt, Artificial Sequence
  Description of Artificial Sequence: Synthetic oligonucleotide
  Sense strand starting at position 1500 of SEQ ID NO: 585958
ccacaaugcugguaauguu

SEQ ID NO: 681041 - RNA, 19 nt, Artificial Sequence
  Description of Artificial Sequence: Synthetic oligonucleotide
  Antisense strand to SEQ ID NO: 681040
aacauuaccagcauugugg

SEQ ID NO: 681042 - RNA, 19 nt, Artificial Sequence
  Description of Artificial Sequence: Synthetic oligonucleotide
  Sense strand starting at position 1503 of SEQ ID NO: 585958
caaugcugguaauguuaaa

SEQ ID NO: 681043 - RNA, 19 nt, Artificial Sequence
  Description of Artificial Sequence: Synthetic oligonucleotide
  Antisense strand to SEQ ID NO: 681042
uuuaacauuaccagcauug

SEQ ID NO: 681044 - RNA, 19 nt, Artificial Sequence
  Description of Artificial Sequence: Synthetic oligonucleotide
  Sense strand starting at position 1545 of SEQ ID NO: 585958
gcgccagccucgcaagaaa

SEQ ID NO: 681045 - RNA, 19 nt, Artificial Sequence
  Description of Artificial Sequence: Synthetic oligonucleotide
  Antisense strand to SEQ ID NO: 681044
uuucuugcgaggcuggcgc

SEQ ID NO: 681046 - RNA, 19 nt, Artificial Sequence
  Description of Artificial Sequence: Synthetic oligonucleotide
  Sense strand starting at position 1610 of SEQ ID NO: 585958
cucgguuaccuccggaagu

SEQ ID NO: 681047 - RNA, 19 nt, Artificial Sequence
  Description of Artificial Sequence: Synthetic oligonucleotide
  Antisense strand to SEQ ID NO: 681046
acuuccggagguaaccgag

SEQ ID NO: 681048 - RNA, 19 nt, Artificial Sequence
  Description of Artificial Sequence: Synthetic oligonucleotide
  Sense strand starting at position 1612 of SEQ ID NO: 585958
cgguuaccuccggaaguca

SEQ ID NO: 681049 - RNA, 19 nt, Artificial Sequence
  Description of Artificial Sequence: Synthetic oligonucleotide
  Antisense strand to SEQ ID NO: 681048
ugacuuccggagguaaccg

SEQ ID NO: 681050 - RNA, 19 nt, Artificial Sequence
  Description of Artificial Sequence: Synthetic oligonucleotide
  Sense strand starting at position 1992 of SEQ ID NO: 585958
ucacgcgugcugugaucau

SEQ ID NO: 681051 - RNA, 19 nt, Artificial Sequence
  Description of Artificial Sequence: Synthetic oligonucleotide
  Antisense strand to SEQ ID NO: 681050
augaucacagcacgcguga

SEQ ID NO: 681052 - RNA, 19 nt, Artificial Sequence
  Description of Artificial Sequence: Synthetic oligonucleotide
  Sense strand starting at position 1996 of SEQ ID NO: 585958
gcgugcugugaucauuuaa

SEQ ID NO: 681053 - RNA, 19 nt, Artificial Sequence
  Description of Artificial Sequence: Synthetic oligonucleotide
  Antisense strand to SEQ ID NO: 681052
uuaaaugaucacagcacgc

SEQ ID NO: 681054 - RNA, 19 nt, Artificial Sequence
  Description of Artificial Sequence: Synthetic oligonucleotide
  Sense strand starting at position 2010 of SEQ ID NO: 585958
uuuaauuggcuugggagga

SEQ ID NO: 681055 - RNA, 19 nt, Artificial Sequence
  Description of Artificial Sequence: Synthetic oligonucleotide
  Antisense strand to SEQ ID NO: 681054
uccucccaagccaauuaaa

SEQ ID NO: 681056 - RNA, 19 nt, Artificial Sequence
  Description of Artificial Sequence: Synthetic oligonucleotide
  Sense strand starting at position 2699 of SEQ ID NO: 585958
cggaaacgcuggucucaga

SEQ ID NO: 681057 - RNA, 19 nt, Artificial Sequence
  Description of Artificial Sequence: Synthetic oligonucleotide
  Antisense strand to SEQ ID NO: 681056
ucugagaccagcguuuccg

SEQ ID NO: 681058 - RNA, 19 nt, Artificial Sequence
  Description of Artificial Sequence: Synthetic oligonucleotide
  Sense strand starting at position 3394 of SEQ ID NO: 585958
cccaguuaacgcuaaagca

SEQ ID NO: 681059 - RNA, 19 nt, Artificial Sequence
  Description of Artificial Sequence: Synthetic oligonucleotide
  Antisense strand to SEQ ID NO: 681058
ugcuuuagcguuaacuggg

SEQ ID NO: 681060 - RNA, 19 nt, Artificial Sequence
  Description of Artificial Sequence: Synthetic oligonucleotide
  Sense strand starting at position 3565 of SEQ ID NO: 585958
ugcugacaucaagggaauu

SEQ ID NO: 681061 - RNA, 19 nt, Artificial Sequence
  Description of Artificial Sequence: Synthetic oligonucleotide
  Antisense strand to SEQ ID NO: 681060
aauucccuugaugucagca

SEQ ID NO: 681062 - RNA, 19 nt, Artificial Sequence
  Description of Artificial Sequence: Synthetic oligonucleotide
  Sense strand starting at position 3577 of SEQ ID NO: 585958
gggaauuucuagcaugaug

SEQ ID NO: 681063 - RNA, 19 nt, Artificial Sequence
  Description of Artificial Sequence: Synthetic oligonucleotide
  Antisense strand to SEQ ID NO: 681062
caucaugcuagaaauuccc

SEQ ID NO: 681064 - RNA, 19 nt, Artificial Sequence
  Description of Artificial Sequence: Synthetic oligonucleotide
  Sense strand starting at position 3614 of SEQ ID NO: 585958
ucggcaucuacugagauga

SEQ ID NO: 681065 - RNA, 19 nt, Artificial Sequence
  Description of Artificial Sequence: Synthetic oligonucleotide
  Antisense strand to SEQ ID NO: 681064
ucaucucaguagaugccga

SEQ ID NO: 681066 - RNA, 19 nt, Artificial Sequence
  Description of Artificial Sequence: Synthetic oligonucleotide
  Sense strand starting at position 3630 of SEQ ID NO: 585958
ugagcauguguccaagacu

SEQ ID NO: 681067 - RNA, 19 nt, Artificial Sequence
  Description of Artificial Sequence: Synthetic oligonucleotide
  Antisense strand to SEQ ID NO: 681066
agucuuggacacaugcuca

SEQ ID NO: 681068 - RNA, 19 nt, Artificial Sequence
  Description of Artificial Sequence: Synthetic oligonucleotide
  Sense strand starting at position 3647 of SEQ ID NO: 585958
cucccugcucuagagaaau

SEQ ID NO: 681069 - RNA, 19 nt, Artificial Sequence
  Description of Artificial Sequence: Synthetic oligonucleotide
  Antisense strand to SEQ ID NO: 681068
auuucucuagagcagggag

SEQ ID NO: 681070 - RNA, 19 nt, Artificial Sequence
  Description of Artificial Sequence: Synthetic oligonucleotide
  Sense strand starting at position 3658 of SEQ ID NO: 585958
agagaaauucgaugagucc

SEQ ID NO: 681071 - RNA, 19 nt, Artificial Sequence
  Description of Artificial Sequence: Synthetic oligonucleotide
  Antisense strand to SEQ ID NO: 681070
ggacucaucgaauuucucu

SEQ ID NO: 681072 - RNA, 19 nt, Artificial Sequence
  Description of Artificial Sequence: Synthetic oligonucleotide
  Sense strand starting at position 3804 of SEQ ID NO: 585958
cccugauacugggagaaac

SEQ ID NO: 681073 - RNA, 19 nt, Artificial Sequence
  Description of Artificial Sequence: Synthetic oligonucleotide
  Antisense strand to SEQ ID NO: 681072
guuucucccaguaucaggg

SEQ ID NO: 681074 - RNA, 19 nt, Artificial Sequence
  Description of Artificial Sequence: Synthetic oligonucleotide
  Sense strand starting at position 3831 of SEQ ID NO: 585958
aggagagugucccuuugua

SEQ ID NO: 681075 - RNA, 19 nt, Artificial Sequence
  Description of Artificial Sequence: Synthetic oligonucleotide
  Antisense strand to SEQ ID NO: 681074
uacaaagggacacucuccu

SEQ ID NO: 681076 - RNA, 19 nt, Artificial Sequence
  Description of Artificial Sequence: Synthetic oligonucleotide
  Sense strand starting at position 1664 of SEQ ID NO: 585959
gcggcuuccggagugcaaa

SEQ ID NO: 681077 - RNA, 19 nt, Artificial Sequence
  Description of Artificial Sequence: Synthetic oligonucleotide
  Antisense strand to SEQ ID NO: 681076
uuugcacuccggaagccgc

SEQ ID NO: 681078 - RNA, 19 nt, Artificial Sequence
  Description of Artificial Sequence: Synthetic oligonucleotide
  Sense strand starting at position 1874 of SEQ ID NO: 585959
uccgccuuucccgaggaga

SEQ ID NO: 681079 - RNA, 19 nt, Artificial Sequence
  Description of Artificial Sequence: Synthetic oligonucleotide
  Antisense strand to SEQ ID NO: 681078
ucuccucgggaaaggcgga

SEQ ID NO: 681080 - RNA, 19 nt, Artificial Sequence
  Description of Artificial Sequence: Synthetic oligonucleotide
  Sense strand starting at position 1876 of SEQ ID NO: 585959
cgccuuucccgaggagacu

SEQ ID NO: 681081 - RNA, 19 nt, Artificial Sequence
  Description of Artificial Sequence: Synthetic oligonucleotide
  Antisense strand to SEQ ID NO: 681080
agucuccucgggaaaggcg

SEQ ID NO: 681082 - RNA, 19 nt, Artificial Sequence
  Description of Artificial Sequence: Synthetic oligonucleotide
  Sense strand starting at position 1892 of SEQ ID NO: 585959
acucgucucccgcgucuaa

SEQ ID NO: 681083 - RNA, 19 nt, Artificial Sequence
  Description of Artificial Sequence: Synthetic oligonucleotide
  Antisense strand to SEQ ID NO: 681082
uuagacgcgggagacgagu

SEQ ID NO: 681084 - RNA, 19 nt, Artificial Sequence
  Description of Artificial Sequence: Synthetic oligonucleotide
  Sense strand starting at position 1903 of SEQ ID NO: 585959
gcgucuaacuuaccgcuua

SEQ ID NO: 681085 - RNA, 19 nt, Artificial Sequence
  Description of Artificial Sequence: Synthetic oligonucleotide
  Antisense strand to SEQ ID NO: 681084
uaagcgguaaguuagacgc

SEQ ID NO: 681086 - RNA, 19 nt, Artificial Sequence
  Description of Artificial Sequence: Synthetic oligonucleotide
  Sense strand starting at position 1904 of SEQ ID NO: 585959
cgucuaacuuaccgcuuaa

SEQ ID NO: 681087 - RNA, 19 nt, Artificial Sequence
  Description of Artificial Sequence: Synthetic oligonucleotide
  Antisense strand to SEQ ID NO: 681086
uuaagcgguaaguuagacg

SEQ ID NO: 681088 - RNA, 19 nt, Artificial Sequence
  Description of Artificial Sequence: Synthetic oligonucleotide
  Sense strand starting at position 2050 of SEQ ID NO: 585959
agggaaguuucagguuaca

SEQ ID NO: 681089 - RNA, 19 nt, Artificial Sequence
  Description of Artificial Sequence: Synthetic oligonucleotide
  Antisense strand to SEQ ID NO: 681088
uguaaccugaaacuucccu

SEQ ID NO: 681090 - RNA, 19 nt, Artificial Sequence
  Description of Artificial Sequence: Synthetic oligonucleotide
  Sense strand starting at position 2086 of SEQ ID NO: 585959
uuuguaccuucucgcauua

SEQ ID NO: 681091 - RNA, 19 nt, Artificial Sequence
  Description of Artificial Sequence: Synthetic oligonucleotide
  Antisense strand to SEQ ID NO: 681090
uaaugcgagaagguacaaa

SEQ ID NO: 681092 - RNA, 19 nt, Artificial Sequence
  Description of Artificial Sequence: Synthetic oligonucleotide
  Sense strand starting at position 2196 of SEQ ID NO: 585959
gggagagucugggaacaaa

SEQ ID NO: 681093 - RNA, 19 nt, Artificial Sequence
  Description of Artificial Sequence: Synthetic oligonucleotide
  Antisense strand to SEQ ID NO: 681092
uuuguucccagacucuccc

SEQ ID NO: 681094 - RNA, 19 nt, Artificial Sequence
  Description of Artificial Sequence: Synthetic oligonucleotide
  Sense strand starting at position 2602 of SEQ ID NO: 585959
gguggaaauuaacgaggaa

SEQ ID NO: 681095 - RNA, 19 nt, Artificial Sequence
  Description of Artificial Sequence: Synthetic oligonucleotide
  Antisense strand to SEQ ID NO: 681094
uuccucguuaauuuccacc

SEQ ID NO: 681096 - RNA, 19 nt, Artificial Sequence
  Description of Artificial Sequence: Synthetic oligonucleotide
  Sense strand starting at position 2698 of SEQ ID NO: 585959
guauuuaccuuggacugga

SEQ ID NO: 681097 - RNA, 19 nt, Artificial Sequence
  Description of Artificial Sequence: Synthetic oligonucleotide
  Antisense strand to SEQ ID NO: 681096
uccaguccaagguaaauac

SEQ ID NO: 681098 - RNA, 19 nt, Artificial Sequence
  Description of Artificial Sequence: Synthetic oligonucleotide
  Sense strand starting at position 3166 of SEQ ID NO: 585959
agacuugagucucccggaa

SEQ ID NO: 681099 - RNA, 19 nt, Artificial Sequence
  Description of Artificial Sequence: Synthetic oligonucleotide
  Antisense strand to SEQ ID NO: 681098
uuccgggagacucaagucu

SEQ ID NO: 681100 - RNA, 19 nt, Artificial Sequence
  Description of Artificial Sequence: Synthetic oligonucleotide
  Sense strand starting at position 3168 of SEQ ID NO: 585959
acuugagucucccggaaag

SEQ ID NO: 681101 - RNA, 19 nt, Artificial Sequence
  Description of Artificial Sequence: Synthetic oligonucleotide
  Antisense strand to SEQ ID NO: 681100
cuuuccgggagacucaagu

SEQ ID NO: 681102 - RNA, 19 nt, Artificial Sequence
  Description of Artificial Sequence: Synthetic oligonucleotide
  Sense strand starting at position 3224 of SEQ ID NO: 585959
caagucacuucuguggaga

SEQ ID NO: 681103 - RNA, 19 nt, Artificial Sequence
  Description of Artificial Sequence: Synthetic oligonucleotide
  Antisense strand to SEQ ID NO: 681102
ucuccacagaagugacuug

SEQ ID NO: 681104 - RNA, 19 nt, Artificial Sequence
  Description of Artificial Sequence: Synthetic oligonucleotide
  Sense strand starting at position 3225 of SEQ ID NO: 585959
aagucacuucuguggagaa

SEQ ID NO: 681105 - RNA, 19 nt, Artificial Sequence
  Description of Artificial Sequence: Synthetic oligonucleotide
  Antisense strand to SEQ ID NO: 681104
uucuccacagaagugacuu

SEQ ID NO: 681106 - RNA, 19 nt, Artificial Sequence
  Description of Artificial Sequence: Synthetic oligonucleotide
  Sense strand starting at position 3226 of SEQ ID NO: 585959
agucacuucuguggagaaa

SEQ ID NO: 681107 - RNA, 19 nt, Artificial Sequence
  Description of Artificial Sequence: Synthetic oligonucleotide
  Antisense strand to SEQ ID NO: 681106
uuucuccacagaagugacu

SEQ ID NO: 681108 - RNA, 19 nt, Artificial Sequence
  Description of Artificial Sequence: Synthetic oligonucleotide
  Sense strand starting at position 3227 of SEQ ID NO: 585959
gucacuucuguggagaaag

SEQ ID NO: 681109 - RNA, 19 nt, Artificial Sequence
  Description of Artificial Sequence: Synthetic oligonucleotide
  Antisense strand to SEQ ID NO: 681108
cuuucuccacagaagugac

SEQ ID NO: 681110 - RNA, 19 nt, Artificial Sequence
  Description of Artificial Sequence: Synthetic oligonucleotide
  Sense strand starting at position 3368 of SEQ ID NO: 585959
caaauugaaugguugguua

SEQ ID NO: 681111 - RNA, 19 nt, Artificial Sequence
  Description of Artificial Sequence: Synthetic oligonucleotide
  Antisense strand to SEQ ID NO: 681110
uaaccaaccauucaauuug

SEQ ID NO: 681112 - RNA, 19 nt, Artificial Sequence
  Description of Artificial Sequence: Synthetic oligonucleotide
  Sense strand starting at position 3378 of SEQ ID NO: 585959
gguugguuaccggaaggau

SEQ ID NO: 681113 - RNA, 19 nt, Artificial Sequence
  Description of Artificial Sequence: Synthetic oligonucleotide
  Antisense strand to SEQ ID NO: 681112
auccuuccgguaaccaacc

SEQ ID NO: 681114 - RNA, 19 nt, Artificial Sequence
  Description of Artificial Sequence: Synthetic oligonucleotide
  Sense strand starting at position 3386 of SEQ ID NO: 585959
accggaaggaucuguuauu

SEQ ID NO: 681115 - RNA, 19 nt, Artificial Sequence
  Description of Artificial Sequence: Synthetic oligonucleotide
  Antisense strand to SEQ ID NO: 681114
aauaacagauccuuccggu

SEQ ID NO: 681116 - RNA, 19 nt, Artificial Sequence
  Description of Artificial Sequence: Synthetic oligonucleotide
  Sense strand starting at position 3387 of SEQ ID NO: 585959
ccggaaggaucuguuauua

SEQ ID NO: 681117 - RNA, 19 nt, Artificial Sequence
  Description of Artificial Sequence: Synthetic oligonucleotide
  Antisense strand to SEQ ID NO: 681116
uaauaacagauccuuccgg

SEQ ID NO: 681118 - RNA, 19 nt, Artificial Sequence
  Description of Artificial Sequence: Synthetic oligonucleotide
  Sense strand starting at position 3392 of SEQ ID NO: 585959
aggaucuguuauuauacca

SEQ ID NO: 681119 - RNA, 19 nt, Artificial Sequence
  Description of Artificial Sequence: Synthetic oligonucleotide
  Antisense strand to SEQ ID NO: 681118
ugguauaauaacagauccu

SEQ ID NO: 681120 - RNA, 19 nt, Artificial Sequence
  Description of Artificial Sequence: Synthetic oligonucleotide
  Sense strand starting at position 3399 of SEQ ID NO: 585959
guuauuauaccagacaggu

SEQ ID NO: 681121 - RNA, 19 nt, Artificial Sequence
  Description of Artificial Sequence: Synthetic oligonucleotide
  Antisense strand to SEQ ID NO: 681120
accugucugguauaauaac

SEQ ID NO: 681122 - RNA, 19 nt, Artificial Sequence
  Description of Artificial Sequence: Synthetic oligonucleotide
  Sense strand starting at position 3424 of SEQ ID NO: 585959
uucugaaagcccuaucguu

SEQ ID NO: 681123 - RNA, 19 nt, Artificial Sequence
  Description of Artificial Sequence: Synthetic oligonucleotide
  Antisense strand to SEQ ID NO: 681122
aacgauagggcuuucagaa

SEQ ID NO: 681124 - RNA, 19 nt, Artificial Sequence
  Description of Artificial Sequence: Synthetic oligonucleotide
  Sense strand starting at position 3436 of SEQ ID NO: 585959
uaucguugcucucuguaac

SEQ ID NO: 681125 - RNA, 19 nt, Artificial Sequence
  Description of Artificial Sequence: Synthetic oligonucleotide
  Antisense strand to SEQ ID NO: 681124
guuacagagagcaacgaua

SEQ ID NO: 681126 - RNA, 19 nt, Artificial Sequence
  Description of Artificial Sequence: Synthetic oligonucleotide
  Sense strand starting at position 3437 of SEQ ID NO: 585959
aucguugcucucuguaacu

SEQ ID NO: 681127 - RNA, 19 nt, Artificial Sequence
  Description of Artificial Sequence: Synthetic oligonucleotide
  Antisense strand to SEQ ID NO: 681126
aguuacagagagcaacgau

SEQ ID NO: 681128 - RNA, 19 nt, Artificial Sequence
  Description of Artificial Sequence: Synthetic oligonucleotide
  Sense strand starting at position 3551 of SEQ ID NO: 585959
aaacaugguucggaaauuu

SEQ ID NO: 681129 - RNA, 19 nt, Artificial Sequence
  Description of Artificial Sequence: Synthetic oligonucleotide
  Antisense strand to SEQ ID NO: 681128
aaauuuccgaaccauguuu

SEQ ID NO: 681130 - RNA, 19 nt, Artificial Sequence
  Description of Artificial Sequence: Synthetic oligonucleotide
  Sense strand starting at position 3568 of SEQ ID NO: 585959
uuaagaccuggucguauua

SEQ ID NO: 681131 - RNA, 19 nt, Artificial Sequence
  Description of Artificial Sequence: Synthetic oligonucleotide
  Antisense strand to SEQ ID NO: 681130
uaauacgaccaggucuuaa

SEQ ID NO: 681132 - RNA, 19 nt, Artificial Sequence
  Description of Artificial Sequence: Synthetic oligonucleotide
  Sense strand starting at position 3570 of SEQ ID NO: 585959
aagaccuggucguauuaaa

SEQ ID NO: 681133 - RNA, 19 nt, Artificial Sequence
  Description of Artificial Sequence: Synthetic oligonucleotide
  Antisense strand to SEQ ID NO: 681132
uuuaauacgaccaggucuu

SEQ ID NO: 681134 - RNA, 19 nt, Artificial Sequence
  Description of Artificial Sequence: Synthetic oligonucleotide
  Sense strand starting at position 3610 of SEQ ID NO: 585959
aggcuugugccugggacau

SEQ ID NO: 681135 - RNA, 19 nt, Artificial Sequence
  Description of Artificial Sequence: Synthetic oligonucleotide
  Antisense strand to SEQ ID NO: 681134
augucccaggcacaagccu

SEQ ID NO: 681136 - RNA, 19 nt, Artificial Sequence
  Description of Artificial Sequence: Synthetic oligonucleotide
  Sense strand starting at position 3621 of SEQ ID NO: 585959
ugggacaugugccuuuagu

SEQ ID NO: 681137 - RNA, 19 nt, Artificial Sequence
  Description of Artificial Sequence: Synthetic oligonucleotide
  Antisense strand to SEQ ID NO: 681136
acuaaaggcacauguccca

SEQ ID NO: 681138 - RNA, 19 nt, Artificial Sequence
  Description of Artificial Sequence: Synthetic oligonucleotide
  Sense strand starting at position 3629 of SEQ ID NO: 585959
gugccuuuagugugaagaa

SEQ ID NO: 681139 - RNA, 19 nt, Artificial Sequence
  Description of Artificial Sequence: Synthetic oligonucleotide
  Antisense strand to SEQ ID NO: 681138
uucuucacacuaaaggcac

SEQ ID NO: 681140 - RNA, 19 nt, Artificial Sequence
  Description of Artificial Sequence: Synthetic oligonucleotide
  Sense strand starting at position 3630 of SEQ ID NO: 585959
ugccuuuagugugaagaaa

SEQ ID NO: 681141 - RNA, 19 nt, Artificial Sequence
  Description of Artificial Sequence: Synthetic oligonucleotide
  Antisense strand to SEQ ID NO: 681140
uuucuucacacuaaaggca

SEQ ID NO: 681142 - RNA, 19 nt, Artificial Sequence
  Description of Artificial Sequence: Synthetic oligonucleotide
  Sense strand starting at position 3752 of SEQ ID NO: 585959
ugcagagauuugugcacaa

SEQ ID NO: 681143 - RNA, 19 nt, Artificial Sequence
  Description of Artificial Sequence: Synthetic oligonucleotide
  Antisense strand to SEQ ID NO: 681142
uugugcacaaaucucugca

SEQ ID NO: 681144 - RNA, 19 nt, Artificial Sequence
  Description of Artificial Sequence: Synthetic oligonucleotide
  Sense strand starting at position 3882 of SEQ ID NO: 585959
gcuguagucauguucugua

SEQ ID NO: 681145 - RNA, 19 nt, Artificial Sequence
  Description of Artificial Sequence: Synthetic oligonucleotide
  Antisense strand to SEQ ID NO: 681144
uacagaacaugacuacagc

SEQ ID NO: 681146 - RNA, 19 nt, Artificial Sequence
  Description of Artificial Sequence: Synthetic oligonucleotide
  Sense strand starting at position 626 of SEQ ID NO: 585960
gcggcuuccggagugcaaa

SEQ ID NO: 681147 - RNA, 19 nt, Artificial Sequence
  Description of Artificial Sequence: Synthetic oligonucleotide
  Antisense strand to SEQ ID NO: 681146
uuugcacuccggaagccgc

SEQ ID NO: 681148 - RNA, 19 nt, Artificial Sequence
  Description of Artificial Sequence: Synthetic oligonucleotide
  Sense strand starting at position 836 of SEQ ID NO: 585960
uccgccuuucccgaggaga

SEQ ID NO: 681149 - RNA, 19 nt, Artificial Sequence
  Description of Artificial Sequence: Synthetic oligonucleotide
  Antisense strand to SEQ ID NO: 681148
ucuccucgggaaaggcgga

SEQ ID NO: 681150 - RNA, 19 nt, Artificial Sequence
  Description of Artificial Sequence: Synthetic oligonucleotide
  Sense strand starting at position 1158 of SEQ ID NO: 585960
gggagagucugggaacaaa

SEQ ID NO: 681151 - RNA, 19 nt, Artificial Sequence
  Description of Artificial Sequence: Synthetic oligonucleotide
  Antisense strand to SEQ ID NO: 681150
uuuguucccagacucuccc

SEQ ID NO: 681152 - RNA, 19 nt, Artificial Sequence
  Description of Artificial Sequence: Synthetic oligonucleotide
  Sense strand starting at position 1660 of SEQ ID NO: 585960
guauuuaccuuggacugga

SEQ ID NO: 681153 - RNA, 19 nt, Artificial Sequence
  Description of Artificial Sequence: Synthetic oligonucleotide
  Antisense strand to SEQ ID NO: 681152
uccaguccaagguaaauac

SEQ ID NO: 681154 - RNA, 19 nt, Artificial Sequence
  Description of Artificial Sequence: Synthetic oligonucleotide
  Sense strand starting at position 2128 of SEQ ID NO: 585960
agacuugagucucccggaa

SEQ ID NO: 681155 - RNA, 19 nt, Artificial Sequence
  Description of Artificial Sequence: Synthetic oligonucleotide
  Antisense strand to SEQ ID NO: 681154
uuccgggagacucaagucu

SEQ ID NO: 681156 - RNA, 19 nt, Artificial Sequence
  Description of Artificial Sequence: Synthetic oligonucleotide
  Sense strand starting at position 2186 of SEQ ID NO: 585960
caagucacuucuguggaga

SEQ ID NO: 681157 - RNA, 19 nt, Artificial Sequence
  Description of Artificial Sequence: Synthetic oligonucleotide
  Antisense strand to SEQ ID NO: 681156
ucuccacagaagugacuug

SEQ ID NO: 681158 - RNA, 19 nt, Artificial Sequence
  Description of Artificial Sequence: Synthetic oligonucleotide
  Sense strand starting at position 2187 of SEQ ID NO: 585960
aagucacuucuguggagaa

SEQ ID NO: 681159 - RNA, 19 nt, Artificial Sequence
  Description of Artificial Sequence: Synthetic oligonucleotide
  Antisense strand to SEQ ID NO: 681158
uucuccacagaagugacuu

SEQ ID NO: 681160 - RNA, 19 nt, Artificial Sequence
  Description of Artificial Sequence: Synthetic oligonucleotide
  Sense strand starting at position 2189 of SEQ ID NO: 585960
gucacuucuguggagaaag

SEQ ID NO: 681161 - RNA, 19 nt, Artificial Sequence
  Description of Artificial Sequence: Synthetic oligonucleotide
  Antisense strand to SEQ ID NO: 681160
cuuucuccacagaagugac

SEQ ID NO: 681162 - RNA, 19 nt, Artificial Sequence
  Description of Artificial Sequence: Synthetic oligonucleotide
  Sense strand starting at position 2330 of SEQ ID NO: 585960
caaauugaaugguugguua

SEQ ID NO: 681163 - RNA, 19 nt, Artificial Sequence
  Description of Artificial Sequence: Synthetic oligonucleotide
  Antisense strand to SEQ ID NO: 681162
uaaccaaccauucaauuug

SEQ ID NO: 681164 - RNA, 19 nt, Artificial Sequence
  Description of Artificial Sequence: Synthetic oligonucleotide
  Sense strand starting at position 2340 of SEQ ID NO: 585960
gguugguuaccggaaggau

SEQ ID NO: 681165 - RNA, 19 nt, Artificial Sequence
  Description of Artificial Sequence: Synthetic oligonucleotide
  Antisense strand to SEQ ID NO: 681164
auccuuccgguaaccaacc

SEQ ID NO: 681166 - RNA, 19 nt, Artificial Sequence
  Description of Artificial Sequence: Synthetic oligonucleotide
  Sense strand starting at position 2348 of SEQ ID NO: 585960
accggaaggaucuguuauu

SEQ ID NO: 681167 - RNA, 19 nt, Artificial Sequence
  Description of Artificial Sequence: Synthetic oligonucleotide
  Antisense strand to SEQ ID NO: 681166
aauaacagauccuuccggu

SEQ ID NO: 681168 - RNA, 19 nt, Artificial Sequence
  Description of Artificial Sequence: Synthetic oligonucleotide
  Sense strand starting at position 2349 of SEQ ID NO: 585960
ccggaaggaucuguuauua

SEQ ID NO: 681169 - RNA, 19 nt, Artificial Sequence
  Description of Artificial Sequence: Synthetic oligonucleotide
  Antisense strand to SEQ ID NO: 681168
uaauaacagauccuuccgg

SEQ ID NO: 681170 - RNA, 19 nt, Artificial Sequence
  Description of Artificial Sequence: Synthetic oligonucleotide
  Sense strand starting at position 2361 of SEQ ID NO: 585960
guuauuauaccagacaggu

SEQ ID NO: 681171 - RNA, 19 nt, Artificial Sequence
  Description of Artificial Sequence: Synthetic oligonucleotide
  Antisense strand to SEQ ID NO: 681170
accugucugguauaauaac

SEQ ID NO: 681172 - RNA, 19 nt, Artificial Sequence
  Description of Artificial Sequence: Synthetic oligonucleotide
  Sense strand starting at position 2386 of SEQ ID NO: 585960
uucugaaagcccuaucguu

SEQ ID NO: 681173 - RNA, 19 nt, Artificial Sequence
  Description of Artificial Sequence: Synthetic oligonucleotide
  Antisense strand to SEQ ID NO: 681172
aacgauagggcuuucagaa

SEQ ID NO: 681174 - RNA, 19 nt, Artificial Sequence
  Description of Artificial Sequence: Synthetic oligonucleotide
  Sense strand starting at position 2513 of SEQ ID NO: 585960
aaacaugguucggaaauuu

SEQ ID NO: 681175 - RNA, 19 nt, Artificial Sequence
  Description of Artificial Sequence: Synthetic oligonucleotide
  Antisense strand to SEQ ID NO: 681174
aaauuuccgaaccauguuu

SEQ ID NO: 681176 - RNA, 19 nt, Artificial Sequence
  Description of Artificial Sequence: Synthetic oligonucleotide
  Sense strand starting at position 2530 of SEQ ID NO: 585960
uuaagaccuggucguauua

SEQ ID NO: 681177 - RNA, 19 nt, Artificial Sequence
  Description of Artificial Sequence: Synthetic oligonucleotide
  Antisense strand to SEQ ID NO: 681176
uaauacgaccaggucuuaa

SEQ ID NO: 681178 - RNA, 19 nt, Artificial Sequence
  Description of Artificial Sequence: Synthetic oligonucleotide
  Sense strand starting at position 2844 of SEQ ID NO: 585960
gcuguagucauguucugua

SEQ ID NO: 681179 - RNA, 19 nt, Artificial Sequence
  Description of Artificial Sequence: Synthetic oligonucleotide
  Antisense strand to SEQ ID NO: 681178
uacagaacaugacuacagc

SEQ ID NO: 681180 - RNA, 19 nt, Artificial Sequence
  Description of Artificial Sequence: Synthetic oligonucleotide
  Sense strand starting at position 3049 of SEQ ID NO: 585960
uuguuaggagagugagaua

SEQ ID NO: 681181 - RNA, 19 nt, Artificial Sequence
  Description of Artificial Sequence: Synthetic oligonucleotide
  Antisense strand to SEQ ID NO: 681180
uaucucacucuccuaacaa

SEQ ID NO: 681182 - RNA, 19 nt, Artificial Sequence
  Description of Artificial Sequence: Synthetic oligonucleotide
  Sense strand starting at position 3145 of SEQ ID NO: 585960
guauuauugcuuguugcua

SEQ ID NO: 681183 - RNA, 19 nt, Artificial Sequence
  Description of Artificial Sequence: Synthetic oligonucleotide
  Antisense strand to SEQ ID NO: 681182
uagcaacaagcaauaauac

SEQ ID NO: 681184 - RNA, 19 nt, Artificial Sequence
  Description of Artificial Sequence: Synthetic oligonucleotide
  Sense strand starting at position 3169 of SEQ ID NO: 585960
guuguuguucuguuguaca

SEQ ID NO: 681185 - RNA, 19 nt, Artificial Sequence
  Description of Artificial Sequence: Synthetic oligonucleotide
  Antisense strand to SEQ ID NO: 681184
uguacaacagaacaacaac

SEQ ID NO: 681186 - RNA, 19 nt, Artificial Sequence
  Description of Artificial Sequence: Synthetic oligonucleotide
  Sense strand starting at position 3174 of SEQ ID NO: 585960
uguucuguuguacaaauga

SEQ ID NO: 681187 - RNA, 19 nt, Artificial Sequence
  Description of Artificial Sequence: Synthetic oligonucleotide
  Antisense strand to SEQ ID NO: 681186
ucauuuguacaacagaaca

SEQ ID NO: 681188 - RNA, 19 nt, Artificial Sequence
  Description of Artificial Sequence: Synthetic oligonucleotide
  Sense strand starting at position 3218 of SEQ ID NO: 585960
gacugagugucuuccacuu

SEQ ID NO: 681189 - RNA, 19 nt, Artificial Sequence
  Description of Artificial Sequence: Synthetic oligonucleotide
  Antisense strand to SEQ ID NO: 681188
aaguggaagacacucaguc

SEQ ID NO: 681190 - RNA, 19 nt, Artificial Sequence
  Description of Artificial Sequence: Synthetic oligonucleotide
  Sense strand starting at position 3243 of SEQ ID NO: 585960
cacugugcugaucacagau

SEQ ID NO: 681191 - RNA, 19 nt, Artificial Sequence
  Description of Artificial Sequence: Synthetic oligonucleotide
  Antisense strand to SEQ ID NO: 681190
aucugugaucagcacagug

SEQ ID NO: 681192 - RNA, 19 nt, Artificial Sequence
  Description of Artificial Sequence: Synthetic oligonucleotide
  Sense strand starting at position 3358 of SEQ ID NO: 585960
uguucaaaugagugaugga

SEQ ID NO: 681193 - RNA, 19 nt, Artificial Sequence
  Description of Artificial Sequence: Synthetic oligonucleotide
  Antisense strand to SEQ ID NO: 681192
uccaucacucauuugaaca

SEQ ID NO: 681194 - RNA, 19 nt, Artificial Sequence
  Description of Artificial Sequence: Synthetic oligonucleotide
  Sense strand starting at position 3431 of SEQ ID NO: 585960
gccucuaggcaagauuaag

SEQ ID NO: 681195 - RNA, 19 nt, Artificial Sequence
  Description of Artificial Sequence: Synthetic oligonucleotide
  Antisense strand to SEQ ID NO: 681194
cuuaaucuugccuagaggc

SEQ ID NO: 681196 - RNA, 19 nt, Artificial Sequence
  Description of Artificial Sequence: Synthetic oligonucleotide
  Sense strand starting at position 3443 of SEQ ID NO: 585960
gauuaaggaguuugugcaa

SEQ ID NO: 681197 - RNA, 19 nt, Artificial Sequence
  Description of Artificial Sequence: Synthetic oligonucleotide
  Antisense strand to SEQ ID NO: 681196
uugcacaaacuccuuaauc

SEQ ID NO: 681198 - RNA, 19 nt, Artificial Sequence
  Description of Artificial Sequence: Synthetic oligonucleotide
  Sense strand starting at position 3446 of SEQ ID NO: 585960
uaaggaguuugugcaaagu

SEQ ID NO: 681199 - RNA, 19 nt, Artificial Sequence
  Description of Artificial Sequence: Synthetic oligonucleotide
  Antisense strand to SEQ ID NO: 681198
acuuugcacaaacuccuua

SEQ ID NO: 681200 - RNA, 19 nt, Artificial Sequence
  Description of Artificial Sequence: Synthetic oligonucleotide
  Sense strand starting at position 3576 of SEQ ID NO: 585960
cccagaaauuuagggucau

SEQ ID NO: 681201 - RNA, 19 nt, Artificial Sequence
  Description of Artificial Sequence: Synthetic oligonucleotide
  Antisense strand to SEQ ID NO: 681200
augacccuaaauuucuggg

SEQ ID NO: 681202 - RNA, 19 nt, Artificial Sequence
  Description of Artificial Sequence: Synthetic oligonucleotide
  Sense strand starting at position 3577 of SEQ ID NO: 585960
ccagaaauuuagggucauu

SEQ ID NO: 681203 - RNA, 19 nt, Artificial Sequence
  Description of Artificial Sequence: Synthetic oligonucleotide
  Antisense strand to SEQ ID NO: 681202
aaugacccuaaauuucugg

SEQ ID NO: 681204 - RNA, 19 nt, Artificial Sequence
  Description of Artificial Sequence: Synthetic oligonucleotide
  Sense strand starting at position 3589 of SEQ ID NO: 585960
ggucauuucuagcucugac

SEQ ID NO: 681205 - RNA, 19 nt, Artificial Sequence
  Description of Artificial Sequence: Synthetic oligonucleotide
  Antisense strand to SEQ ID NO: 681204
gucagagcuagaaaugacc

SEQ ID NO: 681206 - RNA, 19 nt, Artificial Sequence
  Description of Artificial Sequence: Synthetic oligonucleotide
  Sense strand starting at position 3612 of SEQ ID NO: 585960
gccugcugugugucuucua

SEQ ID NO: 681207 - RNA, 19 nt, Artificial Sequence
  Description of Artificial Sequence: Synthetic oligonucleotide
  Antisense strand to SEQ ID NO: 681206
uagaagacacacagcaggc

SEQ ID NO: 681208 - RNA, 19 nt, Artificial Sequence
  Description of Artificial Sequence: Synthetic oligonucleotide
  Sense strand starting at position 3619 of SEQ ID NO: 585960
gugugucuucuauaauagg

SEQ ID NO: 681209 - RNA, 19 nt, Artificial Sequence
  Description of Artificial Sequence: Synthetic oligonucleotide
  Antisense strand to SEQ ID NO: 681208
ccuauuauagaagacacac

SEQ ID NO: 681210 - RNA, 19 nt, Artificial Sequence
  Description of Artificial Sequence: Synthetic oligonucleotide
  Sense strand starting at position 3653 of SEQ ID NO: 585960
ugaagauauuuccaugaaa

SEQ ID NO: 681211 - RNA, 19 nt, Artificial Sequence
  Description of Artificial Sequence: Synthetic oligonucleotide
  Antisense strand to SEQ ID NO: 681210
uuucauggaaauaucuuca

SEQ ID NO: 681212 - RNA, 19 nt, Artificial Sequence
  Description of Artificial Sequence: Synthetic oligonucleotide
  Sense strand starting at position 3769 of SEQ ID NO: 585960
cucuguaacuauguuagua

SEQ ID NO: 681213 - RNA, 19 nt, Artificial Sequence
  Description of Artificial Sequence: Synthetic oligonucleotide
  Antisense strand to SEQ ID NO: 681212
uacuaacauaguuacagag

SEQ ID NO: 681214 - RNA, 19 nt, Artificial Sequence
  Description of Artificial Sequence: Synthetic oligonucleotide
  Sense strand starting at position 3773 of SEQ ID NO: 585960
guaacuauguuaguaauag

SEQ ID NO: 681215 - RNA, 19 nt, Artificial Sequence
  Description of Artificial Sequence: Synthetic oligonucleotide
  Antisense strand to SEQ ID NO: 681214
cuauuacuaacauaguuac

SEQ ID NO: 681216 - RNA, 19 nt, Artificial Sequence
  Description of Artificial Sequence: Synthetic oligonucleotide
  Sense strand starting at position 3810 of SEQ ID NO: 585960
uuuaaagucucuuuaaggu

SEQ ID NO: 681217 - RNA, 19 nt, Artificial Sequence
  Description of Artificial Sequence: Synthetic oligonucleotide
  Antisense strand to SEQ ID NO: 681216
accuuaaagagacuuuaaa

SEQ ID NO: 681218 - RNA, 19 nt, Artificial Sequence
  Description of Artificial Sequence: Synthetic oligonucleotide
  Sense strand starting at position 3816 of SEQ ID NO: 585960
gucucuuuaagguagaguu

SEQ ID NO: 681219 - RNA, 19 nt, Artificial Sequence
  Description of Artificial Sequence: Synthetic oligonucleotide
  Antisense strand to SEQ ID NO: 681218
aacucuaccuuaaagagac

SEQ ID NO: 681220 - RNA, 19 nt, Artificial Sequence
  Description of Artificial Sequence: Synthetic oligonucleotide
  Sense strand starting at position 3824 of SEQ ID NO: 585960
aagguagaguugccagauu

SEQ ID NO: 681221 - RNA, 19 nt, Artificial Sequence
  Description of Artificial Sequence: Synthetic oligonucleotide
  Antisense strand to SEQ ID NO: 681220
aaucuggcaacucuaccuu

SEQ ID NO: 681222 - RNA, 19 nt, Artificial Sequence
  Description of Artificial Sequence: Synthetic oligonucleotide
  Sense strand starting at position 3943 of SEQ ID NO: 585960
uguugcuuauaguugaaau

SEQ ID NO: 681223 - RNA, 19 nt, Artificial Sequence
  Description of Artificial Sequence: Synthetic oligonucleotide
  Antisense strand to SEQ ID NO: 681222
auuucaacuauaagcaaca

SEQ ID NO: 681224 - RNA, 19 nt, Artificial Sequence
  Description of Artificial Sequence: Synthetic oligonucleotide
  Sense strand starting at position 3968 of SEQ ID NO: 585960
uuaauugaguauccuguau

SEQ ID NO: 681225 - RNA, 19 nt, Artificial Sequence
  Description of Artificial Sequence: Synthetic oligonucleotide
  Antisense strand to SEQ ID NO: 681224
auacaggauacucaauuaa

SEQ ID NO: 681226 - RNA, 19 nt, Artificial Sequence
  Description of Artificial Sequence: Synthetic oligonucleotide
  Sense strand starting at position 256 of SEQ ID NO: 585961
agucauaggcuuugaguga

SEQ ID NO: 681227 - RNA, 19 nt, Artificial Sequence
  Description of Artificial Sequence: Synthetic oligonucleotide
  Antisense strand to SEQ ID NO: 681226
ucacucaaagccuaugacu

SEQ ID NO: 681228 - RNA, 19 nt, Artificial Sequence
  Description of Artificial Sequence: Synthetic oligonucleotide
  Sense strand starting at position 260 of SEQ ID NO: 585961
auaggcuuugagugagaau

SEQ ID NO: 681229 - RNA, 19 nt, Artificial Sequence
  Description of Artificial Sequence: Synthetic oligonucleotide
  Antisense strand to SEQ ID NO: 681228
auucucacucaaagccuau

SEQ ID NO: 681230 - RNA, 19 nt, Artificial Sequence
  Description of Artificial Sequence: Synthetic oligonucleotide
  Sense strand starting at position 261 of SEQ ID NO: 585961
uaggcuuugagugagaaug

SEQ ID NO: 681231 - RNA, 19 nt, Artificial Sequence
  Description of Artificial Sequence: Synthetic oligonucleotide
  Antisense strand to SEQ ID NO: 681230
cauucucacucaaagccua

SEQ ID NO: 681232 - RNA, 19 nt, Artificial Sequence
  Description of Artificial Sequence: Synthetic oligonucleotide
  Sense strand starting at position 310 of SEQ ID NO: 585961
uuaccuaucuggcuguaaa

SEQ ID NO: 681233 - RNA, 19 nt, Artificial Sequence
  Description of Artificial Sequence: Synthetic oligonucleotide
  Antisense strand to SEQ ID NO: 681232
uuuacagccagauagguaa

SEQ ID NO: 681234 - RNA, 19 nt, Artificial Sequence
  Description of Artificial Sequence: Synthetic oligonucleotide
  Sense strand starting at position 313 of SEQ ID NO: 585961
ccuaucuggcuguaaacaa

SEQ ID NO: 681235 - RNA, 19 nt, Artificial Sequence
  Description of Artificial Sequence: Synthetic oligonucleotide
  Antisense strand to SEQ ID NO: 681234
uuguuuacagccagauagg

SEQ ID NO: 681236 - RNA, 19 nt, Artificial Sequence
  Description of Artificial Sequence: Synthetic oligonucleotide
  Sense strand starting at position 405 of SEQ ID NO: 585961
cucucuguagaaugggaau

SEQ ID NO: 681237 - RNA, 19 nt, Artificial Sequence
  Description of Artificial Sequence: Synthetic oligonucleotide
  Antisense strand to SEQ ID NO: 681236
auucccauucuacagagag

SEQ ID NO: 681238 - RNA, 19 nt, Artificial Sequence
  Description of Artificial Sequence: Synthetic oligonucleotide
  Sense strand starting at position 539 of SEQ ID NO: 585961
gcauacuaggguuauaguu

SEQ ID NO: 681239 - RNA, 19 nt, Artificial Sequence
  Description of Artificial Sequence: Synthetic oligonucleotide
  Antisense strand to SEQ ID NO: 681238
aacuauaacccuaguaugc

SEQ ID NO: 681240 - RNA, 19 nt, Artificial Sequence
  Description of Artificial Sequence: Synthetic oligonucleotide
  Sense strand starting at position 751 of SEQ ID NO: 585961
uaaguaaaucuuggaagua

SEQ ID NO: 681241 - RNA, 19 nt, Artificial Sequence
  Description of Artificial Sequence: Synthetic oligonucleotide
  Antisense strand to SEQ ID NO: 681240
uacuuccaagauuuacuua

SEQ ID NO: 681242 - RNA, 19 nt, Artificial Sequence
  Description of Artificial Sequence: Synthetic oligonucleotide
  Sense strand starting at position 821 of SEQ ID NO: 585961
uucggaugucuucagaagu

SEQ ID NO: 681243 - RNA, 19 nt, Artificial Sequence
  Description of Artificial Sequence: Synthetic oligonucleotide
  Antisense strand to SEQ ID NO: 681242
acuucugaagacauccgaa

SEQ ID NO: 681244 - RNA, 19 nt, Artificial Sequence
  Description of Artificial Sequence: Synthetic oligonucleotide
  Sense strand starting at position 832 of SEQ ID NO: 585961
ucagaaguuguaugaaugu

SEQ ID NO: 681245 - RNA, 19 nt, Artificial Sequence
  Description of Artificial Sequence: Synthetic oligonucleotide
  Antisense strand to SEQ ID NO: 681244
acauucauacaacuucuga

SEQ ID NO: 681246 - RNA, 19 nt, Artificial Sequence
  Description of Artificial Sequence: Synthetic oligonucleotide
  Sense strand starting at position 839 of SEQ ID NO: 585961
uuguaugaauguuuccuau

SEQ ID NO: 681247 - RNA, 19 nt, Artificial Sequence
  Description of Artificial Sequence: Synthetic oligonucleotide
  Antisense strand to SEQ ID NO: 681246
auaggaaacauucauacaa

SEQ ID NO: 681248 - RNA, 19 nt, Artificial Sequence
  Description of Artificial Sequence: Synthetic oligonucleotide
  Sense strand starting at position 841 of SEQ ID NO: 585961
guaugaauguuuccuaucu

SEQ ID NO: 681249 - RNA, 19 nt, Artificial Sequence
  Description of Artificial Sequence: Synthetic oligonucleotide
  Antisense strand to SEQ ID NO: 681248
agauaggaaacauucauac

SEQ ID NO: 681250 - RNA, 19 nt, Artificial Sequence
  Description of Artificial Sequence: Synthetic oligonucleotide
  Sense strand starting at position 950 of SEQ ID NO: 585961
ggccaaggccaguaaugaa

SEQ ID NO: 681251 - RNA, 19 nt, Artificial Sequence
  Description of Artificial Sequence: Synthetic oligonucleotide
  Antisense strand to SEQ ID NO: 681250
uucauuacuggccuuggcc

SEQ ID NO: 681252 - RNA, 19 nt, Artificial Sequence
  Description of Artificial Sequence: Synthetic oligonucleotide
  Sense strand starting at position 1030 of SEQ ID NO: 585961
gcuucaguucuggcgugaa

SEQ ID NO: 681253 - RNA, 19 nt, Artificial Sequence
  Description of Artificial Sequence: Synthetic oligonucleotide
  Antisense strand to SEQ ID NO: 681252
uucacgccagaacugaagc

SEQ ID NO: 681254 - RNA, 19 nt, Artificial Sequence
  Description of Artificial Sequence: Synthetic oligonucleotide
  Sense strand starting at position 1089 of SEQ ID NO: 585961
cccucacccuugguugaau

SEQ ID NO: 681255 - RNA, 19 nt, Artificial Sequence
  Description of Artificial Sequence: Synthetic oligonucleotide
  Antisense strand to SEQ ID NO: 681254
auucaaccaagggugaggg

SEQ ID NO: 681256 - RNA, 19 nt, Artificial Sequence
  Description of Artificial Sequence: Synthetic oligonucleotide
  Sense strand starting at position 1091 of SEQ ID NO: 585961
cucacccuugguugaauua

SEQ ID NO: 681257 - RNA, 19 nt, Artificial Sequence
  Description of Artificial Sequence: Synthetic oligonucleotide
  Antisense strand to SEQ ID NO: 681256
uaauucaaccaagggugag

SEQ ID NO: 681258 - RNA, 19 nt, Artificial Sequence
  Description of Artificial Sequence: Synthetic oligonucleotide
  Sense strand starting at position 1092 of SEQ ID NO: 585961
ucacccuugguugaauuau

SEQ ID NO: 681259 - RNA, 19 nt, Artificial Sequence
  Description of Artificial Sequence: Synthetic oligonucleotide
  Antisense strand to SEQ ID NO: 681258
auaauucaaccaaggguga

SEQ ID NO: 681260 - RNA, 19 nt, Artificial Sequence
  Description of Artificial Sequence: Synthetic oligonucleotide
  Sense strand starting at position 1310 of SEQ ID NO: 585961
gcaucaggucaugaaccuu

SEQ ID NO: 681261 - RNA, 19 nt, Artificial Sequence
  Description of Artificial Sequence: Synthetic oligonucleotide
  Antisense strand to SEQ ID NO: 681260
aagguucaugaccugaugc

SEQ ID NO: 681262 - RNA, 19 nt, Artificial Sequence
  Description of Artificial Sequence: Synthetic oligonucleotide
  Sense strand starting at position 1394 of SEQ ID NO: 585961
aaagaaugguggcuuugau

SEQ ID NO: 681263 - RNA, 19 nt, Artificial Sequence
  Description of Artificial Sequence: Synthetic oligonucleotide
  Antisense strand to SEQ ID NO: 681262
aucaaagccaccauucuuu

SEQ ID NO: 681264 - RNA, 19 nt, Artificial Sequence
  Description of Artificial Sequence: Synthetic oligonucleotide
  Sense strand starting at position 1403 of SEQ ID NO: 585961
uggcuuugauugccuuaaa

SEQ ID NO: 681265 - RNA, 19 nt, Artificial Sequence
  Description of Artificial Sequence: Synthetic oligonucleotide
  Antisense strand to SEQ ID NO: 681264
uuuaaggcaaucaaagcca

SEQ ID NO: 681266 - RNA, 19 nt, Artificial Sequence
  Description of Artificial Sequence: Synthetic oligonucleotide
  Sense strand starting at position 1404 of SEQ ID NO: 585961
ggcuuugauugccuuaaag

SEQ ID NO: 681267 - RNA, 19 nt, Artificial Sequence
  Description of Artificial Sequence: Synthetic oligonucleotide
  Antisense strand to SEQ ID NO: 681266
cuuuaaggcaaucaaagcc

SEQ ID NO: 681268 - RNA, 19 nt, Artificial Sequence
  Description of Artificial Sequence: Synthetic oligonucleotide
  Sense strand starting at position 1558 of SEQ ID NO: 585961
gaacgauuccaucggaauu

SEQ ID NO: 681269 - RNA, 19 nt, Artificial Sequence
  Description of Artificial Sequence: Synthetic oligonucleotide
  Antisense strand to SEQ ID NO: 681268
aauuccgauggaaucguuc

SEQ ID NO: 681270 - RNA, 19 nt, Artificial Sequence
  Description of Artificial Sequence: Synthetic oligonucleotide
  Sense strand starting at position 2180 of SEQ ID NO: 585961
uggaguucuggaugugcaa

SEQ ID NO: 681271 - RNA, 19 nt, Artificial Sequence
  Description of Artificial Sequence: Synthetic oligonucleotide
  Antisense strand to SEQ ID NO: 681270
uugcacauccagaacucca

SEQ ID NO: 681272 - RNA, 19 nt, Artificial Sequence
  Description of Artificial Sequence: Synthetic oligonucleotide
  Sense strand starting at position 2182 of SEQ ID NO: 585961
gaguucuggaugugcaaca

SEQ ID NO: 681273 - RNA, 19 nt, Artificial Sequence
  Description of Artificial Sequence: Synthetic oligonucleotide
  Antisense strand to SEQ ID NO: 681272
uguugcacauccagaacuc

SEQ ID NO: 681274 - RNA, 19 nt, Artificial Sequence
  Description of Artificial Sequence: Synthetic oligonucleotide
  Sense strand starting at position 2211 of SEQ ID NO: 585961
cuguucuguccgagagcga

SEQ ID NO: 681275 - RNA, 19 nt, Artificial Sequence
  Description of Artificial Sequence: Synthetic oligonucleotide
  Antisense strand to SEQ ID NO: 681274
ucgcucucggacagaacag

SEQ ID NO: 681276 - RNA, 19 nt, Artificial Sequence
  Description of Artificial Sequence: Synthetic oligonucleotide
  Sense strand starting at position 2623 of SEQ ID NO: 585961
gggcauaacgcagagauau

SEQ ID NO: 681277 - RNA, 19 nt, Artificial Sequence
  Description of Artificial Sequence: Synthetic oligonucleotide
  Antisense strand to SEQ ID NO: 681276
auaucucugcguuaugccc

SEQ ID NO: 681278 - RNA, 19 nt, Artificial Sequence
  Description of Artificial Sequence: Synthetic oligonucleotide
  Sense strand starting at position 2625 of SEQ ID NO: 585961
gcauaacgcagagauauug

SEQ ID NO: 681279 - RNA, 19 nt, Artificial Sequence
  Description of Artificial Sequence: Synthetic oligonucleotide
  Antisense strand to SEQ ID NO: 681278
caauaucucugcguuaugc

SEQ ID NO: 681280 - RNA, 19 nt, Artificial Sequence
  Description of Artificial Sequence: Synthetic oligonucleotide
  Sense strand starting at position 2666 of SEQ ID NO: 585961
caauaaagcgaguauugca

SEQ ID NO: 681281 - RNA, 19 nt, Artificial Sequence
  Description of Artificial Sequence: Synthetic oligonucleotide
  Antisense strand to SEQ ID NO: 681280
ugcaauacucgcuuuauug

SEQ ID NO: 681282 - RNA, 19 nt, Artificial Sequence
  Description of Artificial Sequence: Synthetic oligonucleotide
  Sense strand starting at position 2769 of SEQ ID NO: 585961
auagcacgaugucuagaaa

SEQ ID NO: 681283 - RNA, 19 nt, Artificial Sequence
  Description of Artificial Sequence: Synthetic oligonucleotide
  Antisense strand to SEQ ID NO: 681282
uuucuagacaucgugcuau

SEQ ID NO: 681284 - RNA, 19 nt, Artificial Sequence
  Description of Artificial Sequence: Synthetic oligonucleotide
  Sense strand starting at position 2772 of SEQ ID NO: 585961
gcacgaugucuagaaagag

SEQ ID NO: 681285 - RNA, 19 nt, Artificial Sequence
  Description of Artificial Sequence: Synthetic oligonucleotide
  Antisense strand to SEQ ID NO: 681284
cucuuucuagacaucgugc

SEQ ID NO: 681286 - RNA, 19 nt, Artificial Sequence
  Description of Artificial Sequence: Synthetic oligonucleotide
  Sense strand starting at position 2787 of SEQ ID NO: 585961
agagcaauguaccuaccuu

SEQ ID NO: 681287 - RNA, 19 nt, Artificial Sequence
  Description of Artificial Sequence: Synthetic oligonucleotide
  Antisense strand to SEQ ID NO: 681286
aagguagguacauugcucu

SEQ ID NO: 681288 - RNA, 19 nt, Artificial Sequence
  Description of Artificial Sequence: Synthetic oligonucleotide
  Sense strand starting at position 2907 of SEQ ID NO: 585961
cugauugauccugguagug

SEQ ID NO: 681289 - RNA, 19 nt, Artificial Sequence
  Description of Artificial Sequence: Synthetic oligonucleotide
  Antisense strand to SEQ ID NO: 681288
cacuaccaggaucaaucag

SEQ ID NO: 681290 - RNA, 19 nt, Artificial Sequence
  Description of Artificial Sequence: Synthetic oligonucleotide
  Sense strand starting at position 2936 of SEQ ID NO: 585961
gcugcaauagcugugucaa

SEQ ID NO: 681291 - RNA, 19 nt, Artificial Sequence
  Description of Artificial Sequence: Synthetic oligonucleotide
  Antisense strand to SEQ ID NO: 681290
uugacacagcuauugcagc

SEQ ID NO: 681292 - RNA, 19 nt, Artificial Sequence
  Description of Artificial Sequence: Synthetic oligonucleotide
  Sense strand starting at position 3155 of SEQ ID NO: 585961
ucaacaaugcugugaacaa

SEQ ID NO: 681293 - RNA, 19 nt, Artificial Sequence
  Description of Artificial Sequence: Synthetic oligonucleotide
  Antisense strand to SEQ ID NO: 681292
uuguucacagcauuguuga

SEQ ID NO: 681294 - RNA, 19 nt, Artificial Sequence
  Description of Artificial Sequence: Synthetic oligonucleotide
  Sense strand starting at position 3251 of SEQ ID NO: 585961
gucuuaugagauugagcaa

SEQ ID NO: 681295 - RNA, 19 nt, Artificial Sequence
  Description of Artificial Sequence: Synthetic oligonucleotide
  Antisense strand to SEQ ID NO: 681294
uugcucaaucucauaagac

SEQ ID NO: 681296 - RNA, 19 nt, Artificial Sequence
  Description of Artificial Sequence: Synthetic oligonucleotide
  Sense strand starting at position 3602 of SEQ ID NO: 585961
cuacaagaugaauguuguu

SEQ ID NO: 681297 - RNA, 19 nt, Artificial Sequence
  Description of Artificial Sequence: Synthetic oligonucleotide
  Antisense strand to SEQ ID NO: 681296
aacaacauucaucuuguag

SEQ ID NO: 681298 - RNA, 19 nt, Artificial Sequence
  Description of Artificial Sequence: Synthetic oligonucleotide
  Sense strand starting at position 3664 of SEQ ID NO: 585961
ucaacuguugagugacaaa

SEQ ID NO: 681299 - RNA, 19 nt, Artificial Sequence
  Description of Artificial Sequence: Synthetic oligonucleotide
  Antisense strand to SEQ ID NO: 681298
uuugucacucaacaguuga

SEQ ID NO: 681300 - RNA, 19 nt, Artificial Sequence
  Description of Artificial Sequence: Synthetic oligonucleotide
  Sense strand starting at position 3742 of SEQ ID NO: 585961
agucuuaauagugggcuua

SEQ ID NO: 681301 - RNA, 19 nt, Artificial Sequence
  Description of Artificial Sequence: Synthetic oligonucleotide
  Antisense strand to SEQ ID NO: 681300
uaagcccacuauuaagacu

SEQ ID NO: 681302 - RNA, 19 nt, Artificial Sequence
  Description of Artificial Sequence: Synthetic oligonucleotide
  Sense strand starting at position 3743 of SEQ ID NO: 585961
gucuuaauagugggcuuaa

SEQ ID NO: 681303 - RNA, 19 nt, Artificial Sequence
  Description of Artificial Sequence: Synthetic oligonucleotide
  Antisense strand to SEQ ID NO: 681302
uuaagcccacuauuaagac

SEQ ID NO: 681304 - RNA, 19 nt, Artificial Sequence
  Description of Artificial Sequence: Synthetic oligonucleotide
  Sense strand starting at position 3972 of SEQ ID NO: 585961
gguauugacuucuuuguag

SEQ ID NO: 681305 - RNA, 19 nt, Artificial Sequence
  Description of Artificial Sequence: Synthetic oligonucleotide
  Antisense strand to SEQ ID NO: 681304
cuacaaagaagucaauacc

SEQ ID NO: 681306 - RNA, 19 nt, Artificial Sequence
  Description of Artificial Sequence: Synthetic oligonucleotide
  Sense strand starting at position 210 of SEQ ID NO: 585962
uaaguaaaucuuggaagua

SEQ ID NO: 681307 - RNA, 19 nt, Artificial Sequence
  Description of Artificial Sequence: Synthetic oligonucleotide
  Antisense strand to SEQ ID NO: 681306
uacuuccaagauuuacuua

SEQ ID NO: 681308 - RNA, 19 nt, Artificial Sequence
  Description of Artificial Sequence: Synthetic oligonucleotide
  Sense strand starting at position 280 of SEQ ID NO: 585962
uucggaugucuucagaagu

SEQ ID NO: 681309 - RNA, 19 nt, Artificial Sequence
  Description of Artificial Sequence: Synthetic oligonucleotide
  Antisense strand to SEQ ID NO: 681308
acuucugaagacauccgaa

SEQ ID NO: 681310 - RNA, 19 nt, Artificial Sequence
  Description of Artificial Sequence: Synthetic oligonucleotide
  Sense strand starting at position 291 of SEQ ID NO: 585962
ucagaaguuguaugaaugu

SEQ ID NO: 681311 - RNA, 19 nt, Artificial Sequence
  Description of Artificial Sequence: Synthetic oligonucleotide
  Antisense strand to SEQ ID NO: 681310
acauucauacaacuucuga

SEQ ID NO: 681312 - RNA, 19 nt, Artificial Sequence
  Description of Artificial Sequence: Synthetic oligonucleotide
  Sense strand starting at position 298 of SEQ ID NO: 585962
uuguaugaauguuuccuau

SEQ ID NO: 681313 - RNA, 19 nt, Artificial Sequence
  Description of Artificial Sequence: Synthetic oligonucleotide
  Antisense strand to SEQ ID NO: 681312
auaggaaacauucauacaa

SEQ ID NO: 681314 - RNA, 19 nt, Artificial Sequence
  Description of Artificial Sequence: Synthetic oligonucleotide
  Sense strand starting at position 300 of SEQ ID NO: 585962
guaugaauguuuccuaucu

SEQ ID NO: 681315 - RNA, 19 nt, Artificial Sequence
  Description of Artificial Sequence: Synthetic oligonucleotide
  Antisense strand to SEQ ID NO: 681314
agauaggaaacauucauac

SEQ ID NO: 681316 - RNA, 19 nt, Artificial Sequence
  Description of Artificial Sequence: Synthetic oligonucleotide
  Sense strand starting at position 409 of SEQ ID NO: 585962
ggccaaggccaguaaugaa

SEQ ID NO: 681317 - RNA, 19 nt, Artificial Sequence
  Description of Artificial Sequence: Synthetic oligonucleotide
  Antisense strand to SEQ ID NO: 681316
uucauuacuggccuuggcc

SEQ ID NO: 681318 - RNA, 19 nt, Artificial Sequence
  Description of Artificial Sequence: Synthetic oligonucleotide
  Sense strand starting at position 489 of SEQ ID NO: 585962
gcuucaguucuggcgugaa

SEQ ID NO: 681319 - RNA, 19 nt, Artificial Sequence
  Description of Artificial Sequence: Synthetic oligonucleotide
  Antisense strand to SEQ ID NO: 681318
uucacgccagaacugaagc

SEQ ID NO: 681320 - RNA, 19 nt, Artificial Sequence
  Description of Artificial Sequence: Synthetic oligonucleotide
  Sense strand starting at position 548 of SEQ ID NO: 585962
cccucacccuugguugaau

SEQ ID NO: 681321 - RNA, 19 nt, Artificial Sequence
  Description of Artificial Sequence: Synthetic oligonucleotide
  Antisense strand to SEQ ID NO: 681320
auucaaccaagggugaggg

SEQ ID NO: 681322 - RNA, 19 nt, Artificial Sequence
  Description of Artificial Sequence: Synthetic oligonucleotide
  Sense strand starting at position 550 of SEQ ID NO: 585962
cucacccuugguugaauua

SEQ ID NO: 681323 - RNA, 19 nt, Artificial Sequence
  Description of Artificial Sequence: Synthetic oligonucleotide
  Antisense strand to SEQ ID NO: 681322
uaauucaaccaagggugag

SEQ ID NO: 681324 - RNA, 19 nt, Artificial Sequence
  Description of Artificial Sequence: Synthetic oligonucleotide
  Sense strand starting at position 551 of SEQ ID NO: 585962
ucacccuugguugaauuau

SEQ ID NO: 681325 - RNA, 19 nt, Artificial Sequence
  Description of Artificial Sequence: Synthetic oligonucleotide
  Antisense strand to SEQ ID NO: 681324
auaauucaaccaaggguga

SEQ ID NO: 681326 - RNA, 19 nt, Artificial Sequence
  Description of Artificial Sequence: Synthetic oligonucleotide
  Sense strand starting at position 769 of SEQ ID NO: 585962
gcaucaggucaugaaccuu

SEQ ID NO: 681327 - RNA, 19 nt, Artificial Sequence
  Description of Artificial Sequence: Synthetic oligonucleotide
  Antisense strand to SEQ ID NO: 681326
aagguucaugaccugaugc

SEQ ID NO: 681328 - RNA, 19 nt, Artificial Sequence
  Description of Artificial Sequence: Synthetic oligonucleotide
  Sense strand starting at position 853 of SEQ ID NO: 585962
aaagaaugguggcuuugau

SEQ ID NO: 681329 - RNA, 19 nt, Artificial Sequence
  Description of Artificial Sequence: Synthetic oligonucleotide
  Antisense strand to SEQ ID NO: 681328
aucaaagccaccauucuuu

SEQ ID NO: 681330 - RNA, 19 nt, Artificial Sequence
  Description of Artificial Sequence: Synthetic oligonucleotide
  Sense strand starting at position 862 of SEQ ID NO: 585962
uggcuuugauugccuuaaa

SEQ ID NO: 681331 - RNA, 19 nt, Artificial Sequence
  Description of Artificial Sequence: Synthetic oligonucleotide
  Antisense strand to SEQ ID NO: 681330
uuuaaggcaaucaaagcca

SEQ ID NO: 681332 - RNA, 19 nt, Artificial Sequence
  Description of Artificial Sequence: Synthetic oligonucleotide
  Sense strand starting at position 863 of SEQ ID NO: 585962
ggcuuugauugccuuaaag

SEQ ID NO: 681333 - RNA, 19 nt, Artificial Sequence
  Description of Artificial Sequence: Synthetic oligonucleotide
  Antisense strand to SEQ ID NO: 681332
cuuuaaggcaaucaaagcc

SEQ ID NO: 681334 - RNA, 19 nt, Artificial Sequence
  Description of Artificial Sequence: Synthetic oligonucleotide
  Sense strand starting at position 1017 of SEQ ID NO: 585962
gaacgauuccaucggaauu

SEQ ID NO: 681335 - RNA, 19 nt, Artificial Sequence
  Description of Artificial Sequence: Synthetic oligonucleotide
  Antisense strand to SEQ ID NO: 681334
aauuccgauggaaucguuc

SEQ ID NO: 681336 - RNA, 19 nt, Artificial Sequence
  Description of Artificial Sequence: Synthetic oligonucleotide
  Sense strand starting at position 1639 of SEQ ID NO: 585962
uggaguucuggaugugcaa

SEQ ID NO: 681337 - RNA, 19 nt, Artificial Sequence
  Description of Artificial Sequence: Synthetic oligonucleotide
  Antisense strand to SEQ ID NO: 681336
uugcacauccagaacucca

SEQ ID NO: 681338 - RNA, 19 nt, Artificial Sequence
  Description of Artificial Sequence: Synthetic oligonucleotide
  Sense strand starting at position 1641 of SEQ ID NO: 585962
gaguucuggaugugcaaca

SEQ ID NO: 681339 - RNA, 19 nt, Artificial Sequence
  Description of Artificial Sequence: Synthetic oligonucleotide
  Antisense strand to SEQ ID NO: 681338
uguugcacauccagaacuc

SEQ ID NO: 681340 - RNA, 19 nt, Artificial Sequence
  Description of Artificial Sequence: Synthetic oligonucleotide
  Sense strand starting at position 1670 of SEQ ID NO: 585962
cuguucuguccgagagcga

SEQ ID NO: 681341 - RNA, 19 nt, Artificial Sequence
  Description of Artificial Sequence: Synthetic oligonucleotide
  Antisense strand to SEQ ID NO: 681340
ucgcucucggacagaacag

SEQ ID NO: 681342 - RNA, 19 nt, Artificial Sequence
  Description of Artificial Sequence: Synthetic oligonucleotide
  Sense strand starting at position 2082 of SEQ ID NO: 585962
gggcauaacgcagagauau

SEQ ID NO: 681343 - RNA, 19 nt, Artificial Sequence
  Description of Artificial Sequence: Synthetic oligonucleotide
  Antisense strand to SEQ ID NO: 681342
auaucucugcguuaugccc

SEQ ID NO: 681344 - RNA, 19 nt, Artificial Sequence
  Description of Artificial Sequence: Synthetic oligonucleotide
  Sense strand starting at position 2084 of SEQ ID NO: 585962
gcauaacgcagagauauug

SEQ ID NO: 681345 - RNA, 19 nt, Artificial Sequence
  Description of Artificial Sequence: Synthetic oligonucleotide
  Antisense strand to SEQ ID NO: 681344
caauaucucugcguuaugc

SEQ ID NO: 681346 - RNA, 19 nt, Artificial Sequence
  Description of Artificial Sequence: Synthetic oligonucleotide
  Sense strand starting at position 2125 of SEQ ID NO: 585962
caauaaagcgaguauugca

SEQ ID NO: 681347 - RNA, 19 nt, Artificial Sequence
  Description of Artificial Sequence: Synthetic oligonucleotide
  Antisense strand to SEQ ID NO: 681346
ugcaauacucgcuuuauug

SEQ ID NO: 681348 - RNA, 19 nt, Artificial Sequence
  Description of Artificial Sequence: Synthetic oligonucleotide
  Sense strand starting at position 2228 of SEQ ID NO: 585962
auagcacgaugucuagaaa

SEQ ID NO: 681349 - RNA, 19 nt, Artificial Sequence
  Description of Artificial Sequence: Synthetic oligonucleotide
  Antisense strand to SEQ ID NO: 681348
uuucuagacaucgugcuau

SEQ ID NO: 681350 - RNA, 19 nt, Artificial Sequence
  Description of Artificial Sequence: Synthetic oligonucleotide
  Sense strand starting at position 2231 of SEQ ID NO: 585962
gcacgaugucuagaaagag

SEQ ID NO: 681351 - RNA, 19 nt, Artificial Sequence
  Description of Artificial Sequence: Synthetic oligonucleotide
  Antisense strand to SEQ ID NO: 681350
cucuuucuagacaucgugc

SEQ ID NO: 681352 - RNA, 19 nt, Artificial Sequence
  Description of Artificial Sequence: Synthetic oligonucleotide
  Sense strand starting at position 2246 of SEQ ID NO: 585962
agagcaauguaccuaccuu

SEQ ID NO: 681353 - RNA, 19 nt, Artificial Sequence
  Description of Artificial Sequence: Synthetic oligonucleotide
  Antisense strand to SEQ ID NO: 681352
aagguagguacauugcucu

SEQ ID NO: 681354 - RNA, 19 nt, Artificial Sequence
  Description of Artificial Sequence: Synthetic oligonucleotide
  Sense strand starting at position 2366 of SEQ ID NO: 585962
cugauugauccugguagug

SEQ ID NO: 681355 - RNA, 19 nt, Artificial Sequence
  Description of Artificial Sequence: Synthetic oligonucleotide
  Antisense strand to SEQ ID NO: 681354
cacuaccaggaucaaucag

SEQ ID NO: 681356 - RNA, 19 nt, Artificial Sequence
  Description of Artificial Sequence: Synthetic oligonucleotide
  Sense strand starting at position 2375 of SEQ ID NO: 585962
ccugguagugauugcugaa

SEQ ID NO: 681357 - RNA, 19 nt, Artificial Sequence
  Description of Artificial Sequence: Synthetic oligonucleotide
  Antisense strand to SEQ ID NO: 681356
uucagcaaucacuaccagg

SEQ ID NO: 681358 - RNA, 19 nt, Artificial Sequence
  Description of Artificial Sequence: Synthetic oligonucleotide
  Sense strand starting at position 2395 of SEQ ID NO: 585962
gcugcaauagcugugucaa

SEQ ID NO: 681359 - RNA, 19 nt, Artificial Sequence
  Description of Artificial Sequence: Synthetic oligonucleotide
  Antisense strand to SEQ ID NO: 681358
uugacacagcuauugcagc

SEQ ID NO: 681360 - RNA, 19 nt, Artificial Sequence
  Description of Artificial Sequence: Synthetic oligonucleotide
  Sense strand starting at position 2614 of SEQ ID NO: 585962
ucaacaaugcugugaacaa

SEQ ID NO: 681361 - RNA, 19 nt, Artificial Sequence
  Description of Artificial Sequence: Synthetic oligonucleotide
  Antisense strand to SEQ ID NO: 681360
uuguucacagcauuguuga

SEQ ID NO: 681362 - RNA, 19 nt, Artificial Sequence
  Description of Artificial Sequence: Synthetic oligonucleotide
  Sense strand starting at position 2710 of SEQ ID NO: 585962
gucuuaugagauugagcaa

SEQ ID NO: 681363 - RNA, 19 nt, Artificial Sequence
  Description of Artificial Sequence: Synthetic oligonucleotide
  Antisense strand to SEQ ID NO: 681362
uugcucaaucucauaagac

SEQ ID NO: 681364 - RNA, 19 nt, Artificial Sequence
  Description of Artificial Sequence: Synthetic oligonucleotide
  Sense strand starting at position 3061 of SEQ ID NO: 585962
cuacaagaugaauguuguu

SEQ ID NO: 681365 - RNA, 19 nt, Artificial Sequence
  Description of Artificial Sequence: Synthetic oligonucleotide
  Antisense strand to SEQ ID NO: 681364
aacaacauucaucuuguag

SEQ ID NO: 681366 - RNA, 19 nt, Artificial Sequence
  Description of Artificial Sequence: Synthetic oligonucleotide
  Sense strand starting at position 3123 of SEQ ID NO: 585962
ucaacuguugagugacaaa

SEQ ID NO: 681367 - RNA, 19 nt, Artificial Sequence
  Description of Artificial Sequence: Synthetic oligonucleotide
  Antisense strand to SEQ ID NO: 681366
uuugucacucaacaguuga

SEQ ID NO: 681368 - RNA, 19 nt, Artificial Sequence
  Description of Artificial Sequence: Synthetic oligonucleotide
  Sense strand starting at position 3201 of SEQ ID NO: 585962
agucuuaauagugggcuua

SEQ ID NO: 681369 - RNA, 19 nt, Artificial Sequence
  Description of Artificial Sequence: Synthetic oligonucleotide
  Antisense strand to SEQ ID NO: 681368
uaagcccacuauuaagacu

SEQ ID NO: 681370 - RNA, 19 nt, Artificial Sequence
  Description of Artificial Sequence: Synthetic oligonucleotide
  Sense strand starting at position 3202 of SEQ ID NO: 585962
gucuuaauagugggcuuaa

SEQ ID NO: 681371 - RNA, 19 nt, Artificial Sequence
  Description of Artificial Sequence: Synthetic oligonucleotide
  Antisense strand to SEQ ID NO: 681370
uuaagcccacuauuaagac

SEQ ID NO: 681372 - RNA, 19 nt, Artificial Sequence
  Description of Artificial Sequence: Synthetic oligonucleotide
  Sense strand starting at position 3431 of SEQ ID NO: 585962
gguauugacuucuuuguag

SEQ ID NO: 681373 - RNA, 19 nt, Artificial Sequence
  Description of Artificial Sequence: Synthetic oligonucleotide
  Antisense strand to SEQ ID NO: 681372
cuacaaagaagucaauacc

SEQ ID NO: 681374 - RNA, 19 nt, Artificial Sequence
  Description of Artificial Sequence: Synthetic oligonucleotide
  Sense strand starting at position 3464 of SEQ ID NO: 585962
gguagcaucuucuuccaau

SEQ ID NO: 681375 - RNA, 19 nt, Artificial Sequence
  Description of Artificial Sequence: Synthetic oligonucleotide
  Antisense strand to SEQ ID NO: 681374
auuggaagaagaugcuacc

SEQ ID NO: 681376 - RNA, 19 nt, Artificial Sequence
  Description of Artificial Sequence: Synthetic oligonucleotide
  Sense strand starting at position 3726 of SEQ ID NO: 585962
agggcuuugcccuggauua

SEQ ID NO: 681377 - RNA, 19 nt, Artificial Sequence
  Description of Artificial Sequence: Synthetic oligonucleotide
  Antisense strand to SEQ ID NO: 681376
uaauccagggcaaagcccu

SEQ ID NO: 681378 - RNA, 19 nt, Artificial Sequence
  Description of Artificial Sequence: Synthetic oligonucleotide
  Sense strand starting at position 3738 of SEQ ID NO: 585962
uggauuaggcugugguuaa

SEQ ID NO: 681379 - RNA, 19 nt, Artificial Sequence
  Description of Artificial Sequence: Synthetic oligonucleotide
  Antisense strand to SEQ ID NO: 681378
uuaaccacagccuaaucca

SEQ ID NO: 681380 - RNA, 19 nt, Artificial Sequence
  Description of Artificial Sequence: Synthetic oligonucleotide
  Sense strand starting at position 3742 of SEQ ID NO: 585962
uuaggcugugguuaagaga

SEQ ID NO: 681381 - RNA, 19 nt, Artificial Sequence
  Description of Artificial Sequence: Synthetic oligonucleotide
  Antisense strand to SEQ ID NO: 681380
ucucuuaaccacagccuaa

SEQ ID NO: 681382 - RNA, 19 nt, Artificial Sequence
  Description of Artificial Sequence: Synthetic oligonucleotide
  Sense strand starting at position 3779 of SEQ ID NO: 585962
ucggguuugauccagacca

SEQ ID NO: 681383 - RNA, 19 nt, Artificial Sequence
  Description of Artificial Sequence: Synthetic oligonucleotide
  Antisense strand to SEQ ID NO: 681382
uggucuggaucaaacccga

SEQ ID NO: 681384 - RNA, 19 nt, Artificial Sequence
  Description of Artificial Sequence: Synthetic oligonucleotide
  Sense strand starting at position 3835 of SEQ ID NO: 585962
cuuccuuaucguuugugua

SEQ ID NO: 681385 - RNA, 19 nt, Artificial Sequence
  Description of Artificial Sequence: Synthetic oligonucleotide
  Antisense strand to SEQ ID NO: 681384
uacacaaacgauaaggaag

SEQ ID NO: 681386 - RNA, 19 nt, Artificial Sequence
  Description of Artificial Sequence: Synthetic oligonucleotide
  Sense strand starting at position 206 of SEQ ID NO: 585963
uaaguaaaucuuggaagua

SEQ ID NO: 681387 - RNA, 19 nt, Artificial Sequence
  Description of Artificial Sequence: Synthetic oligonucleotide
  Antisense strand to SEQ ID NO: 681386
uacuuccaagauuuacuua

SEQ ID NO: 681388 - RNA, 19 nt, Artificial Sequence
  Description of Artificial Sequence: Synthetic oligonucleotide
  Sense strand starting at position 276 of SEQ ID NO: 585963
uucggaugucuucagaagu

SEQ ID NO: 681389 - RNA, 19 nt, Artificial Sequence
  Description of Artificial Sequence: Synthetic oligonucleotide
  Antisense strand to SEQ ID NO: 681388
acuucugaagacauccgaa

SEQ ID NO: 681390 - RNA, 19 nt, Artificial Sequence
  Description of Artificial Sequence: Synthetic oligonucleotide
  Sense strand starting at position 287 of SEQ ID NO: 585963
ucagaaguuguaugaaugu

SEQ ID NO: 681391 - RNA, 19 nt, Artificial Sequence
  Description of Artificial Sequence: Synthetic oligonucleotide
  Antisense strand to SEQ ID NO: 681390
acauucauacaacuucuga

SEQ ID NO: 681392 - RNA, 19 nt, Artificial Sequence
  Description of Artificial Sequence: Synthetic oligonucleotide
  Sense strand starting at position 294 of SEQ ID NO: 585963
uuguaugaauguuuccuau

SEQ ID NO: 681393 - RNA, 19 nt, Artificial Sequence
  Description of Artificial Sequence: Synthetic oligonucleotide
  Antisense strand to SEQ ID NO: 681392
auaggaaacauucauacaa

SEQ ID NO: 681394 - RNA, 19 nt, Artificial Sequence
  Description of Artificial Sequence: Synthetic oligonucleotide
  Sense strand starting at position 296 of SEQ ID NO: 585963
guaugaauguuuccuaucu

SEQ ID NO: 681395 - RNA, 19 nt, Artificial Sequence
  Description of Artificial Sequence: Synthetic oligonucleotide
  Antisense strand to SEQ ID NO: 681394
agauaggaaacauucauac

SEQ ID NO: 681396 - RNA, 19 nt, Artificial Sequence
  Description of Artificial Sequence: Synthetic oligonucleotide
  Sense strand starting at position 405 of SEQ ID NO: 585963
ggccaaggccaguaaugaa

SEQ ID NO: 681397 - RNA, 19 nt, Artificial Sequence
  Description of Artificial Sequence: Synthetic oligonucleotide
  Antisense strand to SEQ ID NO: 681396
uucauuacuggccuuggcc

SEQ ID NO: 681398 - RNA, 19 nt, Artificial Sequence
  Description of Artificial Sequence: Synthetic oligonucleotide
  Sense strand starting at position 485 of SEQ ID NO: 585963
gcuucaguucuggcgugaa

SEQ ID NO: 681399 - RNA, 19 nt, Artificial Sequence
  Description of Artificial Sequence: Synthetic oligonucleotide
  Antisense strand to SEQ ID NO: 681398
uucacgccagaacugaagc

SEQ ID NO: 681400 - RNA, 19 nt, Artificial Sequence
  Description of Artificial Sequence: Synthetic oligonucleotide
  Sense strand starting at position 544 of SEQ ID NO: 585963
cccucacccuugguugaau

SEQ ID NO: 681401 - RNA, 19 nt, Artificial Sequence
  Description of Artificial Sequence: Synthetic oligonucleotide
  Antisense strand to SEQ ID NO: 681400
auucaaccaagggugaggg

SEQ ID NO: 681402 - RNA, 19 nt, Artificial Sequence
  Description of Artificial Sequence: Synthetic oligonucleotide
  Sense strand starting at position 546 of SEQ ID NO: 585963
cucacccuugguugaauua

SEQ ID NO: 681403 - RNA, 19 nt, Artificial Sequence
  Description of Artificial Sequence: Synthetic oligonucleotide
  Antisense strand to SEQ ID NO: 681402
uaauucaaccaagggugag

SEQ ID NO: 681404 - RNA, 19 nt, Artificial Sequence
  Description of Artificial Sequence: Synthetic oligonucleotide
  Sense strand starting at position 547 of SEQ ID NO: 585963
ucacccuugguugaauuau

SEQ ID NO: 681405 - RNA, 19 nt, Artificial Sequence
  Description of Artificial Sequence: Synthetic oligonucleotide
  Antisense strand to SEQ ID NO: 681404
auaauucaaccaaggguga

SEQ ID NO: 681406 - RNA, 19 nt, Artificial Sequence
  Description of Artificial Sequence: Synthetic oligonucleotide
  Sense strand starting at position 765 of SEQ ID NO: 585963
gcaucaggucaugaaccuu

SEQ ID NO: 681407 - RNA, 19 nt, Artificial Sequence
  Description of Artificial Sequence: Synthetic oligonucleotide
  Antisense strand to SEQ ID NO: 681406
aagguucaugaccugaugc

SEQ ID NO: 681408 - RNA, 19 nt, Artificial Sequence
  Description of Artificial Sequence: Synthetic oligonucleotide
  Sense strand starting at position 849 of SEQ ID NO: 585963
aaagaaugguggcuuugau

SEQ ID NO: 681409 - RNA, 19 nt, Artificial Sequence
  Description of Artificial Sequence: Synthetic oligonucleotide
  Antisense strand to SEQ ID NO: 681408
aucaaagccaccauucuuu

SEQ ID NO: 681410 - RNA, 19 nt, Artificial Sequence
  Description of Artificial Sequence: Synthetic oligonucleotide
  Sense strand starting at position 858 of SEQ ID NO: 585963
uggcuuugauugccuuaaa

SEQ ID NO: 681411 - RNA, 19 nt, Artificial Sequence
  Description of Artificial Sequence: Synthetic oligonucleotide
  Antisense strand to SEQ ID NO: 681410
uuuaaggcaaucaaagcca

SEQ ID NO: 681412 - RNA, 19 nt, Artificial Sequence
  Description of Artificial Sequence: Synthetic oligonucleotide
  Sense strand starting at position 859 of SEQ ID NO: 585963
ggcuuugauugccuuaaag

SEQ ID NO: 681413 - RNA, 19 nt, Artificial Sequence
  Description of Artificial Sequence: Synthetic oligonucleotide
  Antisense strand to SEQ ID NO: 681412
cuuuaaggcaaucaaagcc

SEQ ID NO: 681414 - RNA, 19 nt, Artificial Sequence
  Description of Artificial Sequence: Synthetic oligonucleotide
  Sense strand starting at position 1013 of SEQ ID NO: 585963
gaacgauuccaucggaauu

SEQ ID NO: 681415 - RNA, 19 nt, Artificial Sequence
  Description of Artificial Sequence: Synthetic oligonucleotide
  Antisense strand to SEQ ID NO: 681414
aauuccgauggaaucguuc

SEQ ID NO: 681416 - RNA, 19 nt, Artificial Sequence
  Description of Artificial Sequence: Synthetic oligonucleotide
  Sense strand starting at position 1635 of SEQ ID NO: 585963
uggaguucuggaugugcaa

SEQ ID NO: 681417 - RNA, 19 nt, Artificial Sequence
  Description of Artificial Sequence: Synthetic oligonucleotide
  Antisense strand to SEQ ID NO: 681416
uugcacauccagaacucca

SEQ ID NO: 681418 - RNA, 19 nt, Artificial Sequence
  Description of Artificial Sequence: Synthetic oligonucleotide
  Sense strand starting at position 1637 of SEQ ID NO: 585963
gaguucuggaugugcaaca

SEQ ID NO: 681419 - RNA, 19 nt, Artificial Sequence
  Description of Artificial Sequence: Synthetic oligonucleotide
  Antisense strand to SEQ ID NO: 681418
uguugcacauccagaacuc

SEQ ID NO: 681420 - RNA, 19 nt, Artificial Sequence
  Description of Artificial Sequence: Synthetic oligonucleotide
  Sense strand starting at position 1666 of SEQ ID NO: 585963
cuguucuguccgagagcga

SEQ ID NO: 681421 - RNA, 19 nt, Artificial Sequence
  Description of Artificial Sequence: Synthetic oligonucleotide
  Antisense strand to SEQ ID NO: 681420
ucgcucucggacagaacag

SEQ ID NO: 681422 - RNA, 19 nt, Artificial Sequence
  Description of Artificial Sequence: Synthetic oligonucleotide
  Sense strand starting at position 2078 of SEQ ID NO: 585963
gggcauaacgcagagauau

SEQ ID NO: 681423 - RNA, 19 nt, Artificial Sequence
  Description of Artificial Sequence: Synthetic oligonucleotide
  Antisense strand to SEQ ID NO: 681422
auaucucugcguuaugccc

SEQ ID NO: 681424 - RNA, 19 nt, Artificial Sequence
  Description of Artificial Sequence: Synthetic oligonucleotide
  Sense strand starting at position 2080 of SEQ ID NO: 585963
gcauaacgcagagauauug

SEQ ID NO: 681425 - RNA, 19 nt, Artificial Sequence
  Description of Artificial Sequence: Synthetic oligonucleotide
  Antisense strand to SEQ ID NO: 681424
caauaucucugcguuaugc

SEQ ID NO: 681426 - RNA, 19 nt, Artificial Sequence
  Description of Artificial Sequence: Synthetic oligonucleotide
  Sense strand starting at position 2121 of SEQ ID NO: 585963
caauaaagcgaguauugca

SEQ ID NO: 681427 - RNA, 19 nt, Artificial Sequence
  Description of Artificial Sequence: Synthetic oligonucleotide
  Antisense strand to SEQ ID NO: 681426
ugcaauacucgcuuuauug

SEQ ID NO: 681428 - RNA, 19 nt, Artificial Sequence
  Description of Artificial Sequence: Synthetic oligonucleotide
  Sense strand starting at position 2224 of SEQ ID NO: 585963
auagcacgaugucuagaaa

SEQ ID NO: 681429 - RNA, 19 nt, Artificial Sequence
  Description of Artificial Sequence: Synthetic oligonucleotide
  Antisense strand to SEQ ID NO: 681428
uuucuagacaucgugcuau

SEQ ID NO: 681430 - RNA, 19 nt, Artificial Sequence
  Description of Artificial Sequence: Synthetic oligonucleotide
  Sense strand starting at position 2227 of SEQ ID NO: 585963
gcacgaugucuagaaagag

SEQ ID NO: 681431 - RNA, 19 nt, Artificial Sequence
  Description of Artificial Sequence: Synthetic oligonucleotide
  Antisense strand to SEQ ID NO: 681430
cucuuucuagacaucgugc

SEQ ID NO: 681432 - RNA, 19 nt, Artificial Sequence
  Description of Artificial Sequence: Synthetic oligonucleotide
  Sense strand starting at position 2242 of SEQ ID NO: 585963
agagcaauguaccuaccuu

SEQ ID NO: 681433 - RNA, 19 nt, Artificial Sequence
  Description of Artificial Sequence: Synthetic oligonucleotide
  Antisense strand to SEQ ID NO: 681432
aagguagguacauugcucu

SEQ ID NO: 681434 - RNA, 19 nt, Artificial Sequence
  Description of Artificial Sequence: Synthetic oligonucleotide
  Sense strand starting at position 2362 of SEQ ID NO: 585963
cugauugauccugguagug

SEQ ID NO: 681435 - RNA, 19 nt, Artificial Sequence
  Description of Artificial Sequence: Synthetic oligonucleotide
  Antisense strand to SEQ ID NO: 681434
cacuaccaggaucaaucag

SEQ ID NO: 681436 - RNA, 19 nt, Artificial Sequence
  Description of Artificial Sequence: Synthetic oligonucleotide
  Sense strand starting at position 2371 of SEQ ID NO: 585963
ccugguagugauugcugaa

SEQ ID NO: 681437 - RNA, 19 nt, Artificial Sequence
  Description of Artificial Sequence: Synthetic oligonucleotide
  Antisense strand to SEQ ID NO: 681436
uucagcaaucacuaccagg

SEQ ID NO: 681438 - RNA, 19 nt, Artificial Sequence
  Description of Artificial Sequence: Synthetic oligonucleotide
  Sense strand starting at position 2391 of SEQ ID NO: 585963
gcugcaauagcugugucaa

SEQ ID NO: 681439 - RNA, 19 nt, Artificial Sequence
  Description of Artificial Sequence: Synthetic oligonucleotide
  Antisense strand to SEQ ID NO: 681438
uugacacagcuauugcagc

SEQ ID NO: 681440 - RNA, 19 nt, Artificial Sequence
  Description of Artificial Sequence: Synthetic oligonucleotide
  Sense strand starting at position 2610 of SEQ ID NO: 585963
ucaacaaugcugugaacaa

SEQ ID NO: 681441 - RNA, 19 nt, Artificial Sequence
  Description of Artificial Sequence: Synthetic oligonucleotide
  Antisense strand to SEQ ID NO: 681440
uuguucacagcauuguuga

SEQ ID NO: 681442 - RNA, 19 nt, Artificial Sequence
  Description of Artificial Sequence: Synthetic oligonucleotide
  Sense strand starting at position 2706 of SEQ ID NO: 585963
gucuuaugagauugagcaa

SEQ ID NO: 681443 - RNA, 19 nt, Artificial Sequence
  Description of Artificial Sequence: Synthetic oligonucleotide
  Antisense strand to SEQ ID NO: 681442
uugcucaaucucauaagac

SEQ ID NO: 681444 - RNA, 19 nt, Artificial Sequence
  Description of Artificial Sequence: Synthetic oligonucleotide
  Sense strand starting at position 3057 of SEQ ID NO: 585963
cuacaagaugaauguuguu

SEQ ID NO: 681445 - RNA, 19 nt, Artificial Sequence
  Description of Artificial Sequence: Synthetic oligonucleotide
  Antisense strand to SEQ ID NO: 681444
aacaacauucaucuuguag

SEQ ID NO: 681446 - RNA, 19 nt, Artificial Sequence
  Description of Artificial Sequence: Synthetic oligonucleotide
  Sense strand starting at position 3119 of SEQ ID NO: 585963
ucaacuguugagugacaaa

SEQ ID NO: 681447 - RNA, 19 nt, Artificial Sequence
  Description of Artificial Sequence: Synthetic oligonucleotide
  Antisense strand to SEQ ID NO: 681446
uuugucacucaacaguuga

SEQ ID NO: 681448 - RNA, 19 nt, Artificial Sequence
  Description of Artificial Sequence: Synthetic oligonucleotide
  Sense strand starting at position 3197 of SEQ ID NO: 585963
agucuuaauagugggcuua

SEQ ID NO: 681449 - RNA, 19 nt, Artificial Sequence
  Description of Artificial Sequence: Synthetic oligonucleotide
  Antisense strand to SEQ ID NO: 681448
uaagcccacuauuaagacu

SEQ ID NO: 681450 - RNA, 19 nt, Artificial Sequence
  Description of Artificial Sequence: Synthetic oligonucleotide
  Sense strand starting at position 3198 of SEQ ID NO: 585963
gucuuaauagugggcuuaa

SEQ ID NO: 681451 - RNA, 19 nt, Artificial Sequence
  Description of Artificial Sequence: Synthetic oligonucleotide
  Antisense strand to SEQ ID NO: 681450
uuaagcccacuauuaagac

SEQ ID NO: 681452 - RNA, 19 nt, Artificial Sequence
  Description of Artificial Sequence: Synthetic oligonucleotide
  Sense strand starting at position 3427 of SEQ ID NO: 585963
gguauugacuucuuuguag

SEQ ID NO: 681453 - RNA, 19 nt, Artificial Sequence
  Description of Artificial Sequence: Synthetic oligonucleotide
  Antisense strand to SEQ ID NO: 681452
cuacaaagaagucaauacc

SEQ ID NO: 681454 - RNA, 19 nt, Artificial Sequence
  Description of Artificial Sequence: Synthetic oligonucleotide
  Sense strand starting at position 3460 of SEQ ID NO: 585963
gguagcaucuucuuccaau

SEQ ID NO: 681455 - RNA, 19 nt, Artificial Sequence
  Description of Artificial Sequence: Synthetic oligonucleotide
  Antisense strand to SEQ ID NO: 681454
auuggaagaagaugcuacc

SEQ ID NO: 681456 - RNA, 19 nt, Artificial Sequence
  Description of Artificial Sequence: Synthetic oligonucleotide
  Sense strand starting at position 3722 of SEQ ID NO: 585963
agggcuuugcccuggauua

SEQ ID NO: 681457 - RNA, 19 nt, Artificial Sequence
  Description of Artificial Sequence: Synthetic oligonucleotide
  Antisense strand to SEQ ID NO: 681456
uaauccagggcaaagcccu

SEQ ID NO: 681458 - RNA, 19 nt, Artificial Sequence
  Description of Artificial Sequence: Synthetic oligonucleotide
  Sense strand starting at position 3734 of SEQ ID NO: 585963
uggauuaggcugugguuaa

SEQ ID NO: 681459 - RNA, 19 nt, Artificial Sequence
  Description of Artificial Sequence: Synthetic oligonucleotide
  Antisense strand to SEQ ID NO: 681458
uuaaccacagccuaaucca

SEQ ID NO: 681460 - RNA, 19 nt, Artificial Sequence
  Description of Artificial Sequence: Synthetic oligonucleotide
  Sense strand starting at position 3738 of SEQ ID NO: 585963
uuaggcugugguuaagaga

SEQ ID NO: 681461 - RNA, 19 nt, Artificial Sequence
  Description of Artificial Sequence: Synthetic oligonucleotide
  Antisense strand to SEQ ID NO: 681460
ucucuuaaccacagccuaa

SEQ ID NO: 681462 - RNA, 19 nt, Artificial Sequence
  Description of Artificial Sequence: Synthetic oligonucleotide
  Sense strand starting at position 3775 of SEQ ID NO: 585963
ucggguuugauccagacca

SEQ ID NO: 681463 - RNA, 19 nt, Artificial Sequence
  Description of Artificial Sequence: Synthetic oligonucleotide
  Antisense strand to SEQ ID NO: 681462
uggucuggaucaaacccga

SEQ ID NO: 681464 - RNA, 19 nt, Artificial Sequence
  Description of Artificial Sequence: Synthetic oligonucleotide
  Sense strand starting at position 3831 of SEQ ID NO: 585963
cuuccuuaucguuugugua

SEQ ID NO: 681465 - RNA, 19 nt, Artificial Sequence
  Description of Artificial Sequence: Synthetic oligonucleotide
  Antisense strand to SEQ ID NO: 681464
uacacaaacgauaaggaag

SEQ ID NO: 681466 - RNA, 19 nt, Artificial Sequence
  Description of Artificial Sequence: Synthetic oligonucleotide
  Sense strand starting at position 81 of SEQ ID NO: 585964
gagaaagaguucuccuuuc

SEQ ID NO: 681467 - RNA, 19 nt, Artificial Sequence
  Description of Artificial Sequence: Synthetic oligonucleotide
  Antisense strand to SEQ ID NO: 681466
gaaaggagaacucuuucuc

SEQ ID NO: 681468 - RNA, 19 nt, Artificial Sequence
  Description of Artificial Sequence: Synthetic oligonucleotide
  Sense strand starting at position 145 of SEQ ID NO: 585964
gauccaucugaauguauga

SEQ ID NO: 681469 - RNA, 19 nt, Artificial Sequence
  Description of Artificial Sequence: Synthetic oligonucleotide
  Antisense strand to SEQ ID NO: 681468
ucauacauucagauggauc

SEQ ID NO: 681470 - RNA, 19 nt, Artificial Sequence
  Description of Artificial Sequence: Synthetic oligonucleotide
  Sense strand starting at position 150 of SEQ ID NO: 585964
aucugaauguaugaggaaa

SEQ ID NO: 681471 - RNA, 19 nt, Artificial Sequence
  Description of Artificial Sequence: Synthetic oligonucleotide
  Antisense strand to SEQ ID NO: 681470
uuuccucauacauucagau

SEQ ID NO: 681472 - RNA, 19 nt, Artificial Sequence
  Description of Artificial Sequence: Synthetic oligonucleotide
  Sense strand starting at position 247 of SEQ ID NO: 585964
uagugaaacuaguuuggau

SEQ ID NO: 681473 - RNA, 19 nt, Artificial Sequence
  Description of Artificial Sequence: Synthetic oligonucleotide
  Antisense strand to SEQ ID NO: 681472
auccaaacuaguuucacua

SEQ ID NO: 681474 - RNA, 19 nt, Artificial Sequence
  Description of Artificial Sequence: Synthetic oligonucleotide
  Sense strand starting at position 249 of SEQ ID NO: 585964
gugaaacuaguuuggauua

SEQ ID NO: 681475 - RNA, 19 nt, Artificial Sequence
  Description of Artificial Sequence: Synthetic oligonucleotide
  Antisense strand to SEQ ID NO: 681474
uaauccaaacuaguuucac

SEQ ID NO: 681476 - RNA, 19 nt, Artificial Sequence
  Description of Artificial Sequence: Synthetic oligonucleotide
  Sense strand starting at position 279 of SEQ ID NO: 585964
uauuauuggugguucuaau

SEQ ID NO: 681477 - RNA, 19 nt, Artificial Sequence
  Description of Artificial Sequence: Synthetic oligonucleotide
  Antisense strand to SEQ ID NO: 681476
auuagaaccaccaauaaua

SEQ ID NO: 681478 - RNA, 19 nt, Artificial Sequence
  Description of Artificial Sequence: Synthetic oligonucleotide
  Sense strand starting at position 368 of SEQ ID NO: 585964
ugccaaauuuggccucagu

SEQ ID NO: 681479 - RNA, 19 nt, Artificial Sequence
  Description of Artificial Sequence: Synthetic oligonucleotide
  Antisense strand to SEQ ID NO: 681478
acugaggccaaauuuggca

SEQ ID NO: 681480 - RNA, 19 nt, Artificial Sequence
  Description of Artificial Sequence: Synthetic oligonucleotide
  Sense strand starting at position 379 of SEQ ID NO: 585964
gccucaguaugcuuaggau

SEQ ID NO: 681481 - RNA, 19 nt, Artificial Sequence
  Description of Artificial Sequence: Synthetic oligonucleotide
  Antisense strand to SEQ ID NO: 681480
auccuaagcauacugaggc

SEQ ID NO: 681482 - RNA, 19 nt, Artificial Sequence
  Description of Artificial Sequence: Synthetic oligonucleotide
  Sense strand starting at position 415 of SEQ ID NO: 585964
cucucauuaccugggaaca

SEQ ID NO: 681483 - RNA, 19 nt, Artificial Sequence
  Description of Artificial Sequence: Synthetic oligonucleotide
  Antisense strand to SEQ ID NO: 681482
uguucccagguaaugagag

SEQ ID NO: 681484 - RNA, 19 nt, Artificial Sequence
  Description of Artificial Sequence: Synthetic oligonucleotide
  Sense strand starting at position 416 of SEQ ID NO: 585964
ucucauuaccugggaacau

SEQ ID NO: 681485 - RNA, 19 nt, Artificial Sequence
  Description of Artificial Sequence: Synthetic oligonucleotide
  Antisense strand to SEQ ID NO: 681484
auguucccagguaaugaga

SEQ ID NO: 681486 - RNA, 19 nt, Artificial Sequence
  Description of Artificial Sequence: Synthetic oligonucleotide
  Sense strand starting at position 474 of SEQ ID NO: 585964
cugcaagacccugauggua

SEQ ID NO: 681487 - RNA, 19 nt, Artificial Sequence
  Description of Artificial Sequence: Synthetic oligonucleotide
  Antisense strand to SEQ ID NO: 681486
uaccaucagggucuugcag

SEQ ID NO: 681488 - RNA, 19 nt, Artificial Sequence
  Description of Artificial Sequence: Synthetic oligonucleotide
  Sense strand starting at position 522 of SEQ ID NO: 585964
gucaguagaaaguaucuga

SEQ ID NO: 681489 - RNA, 19 nt, Artificial Sequence
  Description of Artificial Sequence: Synthetic oligonucleotide
  Antisense strand to SEQ ID NO: 681488
ucagauacuuucuacugac

SEQ ID NO: 681490 - RNA, 19 nt, Artificial Sequence
  Description of Artificial Sequence: Synthetic oligonucleotide
  Sense strand starting at position 538 of SEQ ID NO: 585964
ugauuuauauuggguacag

SEQ ID NO: 681491 - RNA, 19 nt, Artificial Sequence
  Description of Artificial Sequence: Synthetic oligonucleotide
  Antisense strand to SEQ ID NO: 681490
cuguacccaauauaaauca

SEQ ID NO: 681492 - RNA, 19 nt, Artificial Sequence
  Description of Artificial Sequence: Synthetic oligonucleotide
  Sense strand starting at position 647 of SEQ ID NO: 585964
agagaagcauaaucuuuau

SEQ ID NO: 681493 - RNA, 19 nt, Artificial Sequence
  Description of Artificial Sequence: Synthetic oligonucleotide
  Antisense strand to SEQ ID NO: 681492
auaaagauuaugcuucucu

SEQ ID NO: 681494 - RNA, 19 nt, Artificial Sequence
  Description of Artificial Sequence: Synthetic oligonucleotide
  Sense strand starting at position 653 of SEQ ID NO: 585964
gcauaaucuuuaucagagu

SEQ ID NO: 681495 - RNA, 19 nt, Artificial Sequence
  Description of Artificial Sequence: Synthetic oligonucleotide
  Antisense strand to SEQ ID NO: 681494
acucugauaaagauuaugc

SEQ ID NO: 681496 - RNA, 19 nt, Artificial Sequence
  Description of Artificial Sequence: Synthetic oligonucleotide
  Sense strand starting at position 747 of SEQ ID NO: 585964
acuuaaucaugucuuaguu

SEQ ID NO: 681497 - RNA, 19 nt, Artificial Sequence
  Description of Artificial Sequence: Synthetic oligonucleotide
  Antisense strand to SEQ ID NO: 681496
aacuaagacaugauuaagu

SEQ ID NO: 681498 - RNA, 19 nt, Artificial Sequence
  Description of Artificial Sequence: Synthetic oligonucleotide
  Sense strand starting at position 1004 of SEQ ID NO: 585964
aacaguuucucagcaugga

SEQ ID NO: 681499 - RNA, 19 nt, Artificial Sequence
  Description of Artificial Sequence: Synthetic oligonucleotide
  Antisense strand to SEQ ID NO: 681498
uccaugcugagaaacuguu

SEQ ID NO: 681500 - RNA, 19 nt, Artificial Sequence
  Description of Artificial Sequence: Synthetic oligonucleotide
  Sense strand starting at position 1253 of SEQ ID NO: 585964
aagaguaugacucggugaa

SEQ ID NO: 681501 - RNA, 19 nt, Artificial Sequence
  Description of Artificial Sequence: Synthetic oligonucleotide
  Antisense strand to SEQ ID NO: 681500
uucaccgagucauacucuu

SEQ ID NO: 681502 - RNA, 19 nt, Artificial Sequence
  Description of Artificial Sequence: Synthetic oligonucleotide
  Sense strand starting at position 1254 of SEQ ID NO: 585964
agaguaugacucggugaau

SEQ ID NO: 681503 - RNA, 19 nt, Artificial Sequence
  Description of Artificial Sequence: Synthetic oligonucleotide
  Antisense strand to SEQ ID NO: 681502
auucaccgagucauacucu

SEQ ID NO: 681504 - RNA, 19 nt, Artificial Sequence
  Description of Artificial Sequence: Synthetic oligonucleotide
  Sense strand starting at position 1255 of SEQ ID NO: 585964
gaguaugacucggugaauu

SEQ ID NO: 681505 - RNA, 19 nt, Artificial Sequence
  Description of Artificial Sequence: Synthetic oligonucleotide
  Antisense strand to SEQ ID NO: 681504
aauucaccgagucauacuc

SEQ ID NO: 681506 - RNA, 19 nt, Artificial Sequence
  Description of Artificial Sequence: Synthetic oligonucleotide
  Sense strand starting at position 1425 of SEQ ID NO: 585964
gagaguccguuucuauaaa

SEQ ID NO: 681507 - RNA, 19 nt, Artificial Sequence
  Description of Artificial Sequence: Synthetic oligonucleotide
  Antisense strand to SEQ ID NO: 681506
uuuauagaaacggacucuc

SEQ ID NO: 681508 - RNA, 19 nt, Artificial Sequence
  Description of Artificial Sequence: Synthetic oligonucleotide
  Sense strand starting at position 1761 of SEQ ID NO: 585964
ggcugucuacgcuuguaag

SEQ ID NO: 681509 - RNA, 19 nt, Artificial Sequence
  Description of Artificial Sequence: Synthetic oligonucleotide
  Antisense strand to SEQ ID NO: 681508
cuuacaagcguagacagcc

SEQ ID NO: 681510 - RNA, 19 nt, Artificial Sequence
  Description of Artificial Sequence: Synthetic oligonucleotide
  Sense strand starting at position 2598 of SEQ ID NO: 585964
guggguaucugucugaaga

SEQ ID NO: 681511 - RNA, 19 nt, Artificial Sequence
  Description of Artificial Sequence: Synthetic oligonucleotide
  Antisense strand to SEQ ID NO: 681510
ucuucagacagauacccac

SEQ ID NO: 681512 - RNA, 19 nt, Artificial Sequence
  Description of Artificial Sequence: Synthetic oligonucleotide
  Sense strand starting at position 2599 of SEQ ID NO: 585964
uggguaucugucugaagaa

SEQ ID NO: 681513 - RNA, 19 nt, Artificial Sequence
  Description of Artificial Sequence: Synthetic oligonucleotide
  Antisense strand to SEQ ID NO: 681512
uucuucagacagauaccca

SEQ ID NO: 681514 - RNA, 19 nt, Artificial Sequence
  Description of Artificial Sequence: Synthetic oligonucleotide
  Sense strand starting at position 2802 of SEQ ID NO: 585964
uccgaaagcuucucggaaa

SEQ ID NO: 681515 - RNA, 19 nt, Artificial Sequence
  Description of Artificial Sequence: Synthetic oligonucleotide
  Antisense strand to SEQ ID NO: 681514
uuuccgagaagcuuucgga

SEQ ID NO: 681516 - RNA, 19 nt, Artificial Sequence
  Description of Artificial Sequence: Synthetic oligonucleotide
  Sense strand starting at position 2921 of SEQ ID NO: 585964
uuguucuucccggccgaua

SEQ ID NO: 681517 - RNA, 19 nt, Artificial Sequence
  Description of Artificial Sequence: Synthetic oligonucleotide
  Antisense strand to SEQ ID NO: 681516
uaucggccgggaagaacaa

SEQ ID NO: 681518 - RNA, 19 nt, Artificial Sequence
  Description of Artificial Sequence: Synthetic oligonucleotide
  Sense strand starting at position 2977 of SEQ ID NO: 585964
guaguaauucucuggcaca

SEQ ID NO: 681519 - RNA, 19 nt, Artificial Sequence
  Description of Artificial Sequence: Synthetic oligonucleotide
  Antisense strand to SEQ ID NO: 681518
ugugccagagaauuacuac

SEQ ID NO: 681520 - RNA, 19 nt, Artificial Sequence
  Description of Artificial Sequence: Synthetic oligonucleotide
  Sense strand starting at position 3038 of SEQ ID NO: 585964
ggguaacuccucugggauu

SEQ ID NO: 681521 - RNA, 19 nt, Artificial Sequence
  Description of Artificial Sequence: Synthetic oligonucleotide
  Antisense strand to SEQ ID NO: 681520
aaucccagaggaguuaccc

SEQ ID NO: 681522 - RNA, 19 nt, Artificial Sequence
  Description of Artificial Sequence: Synthetic oligonucleotide
  Sense strand starting at position 3110 of SEQ ID NO: 585964
gcagcugacaggugaaaga

SEQ ID NO: 681523 - RNA, 19 nt, Artificial Sequence
  Description of Artificial Sequence: Synthetic oligonucleotide
  Antisense strand to SEQ ID NO: 681522
ucuuucaccugucagcugc

SEQ ID NO: 681524 - RNA, 19 nt, Artificial Sequence
  Description of Artificial Sequence: Synthetic oligonucleotide
  Sense strand starting at position 3143 of SEQ ID NO: 585964
gacccagcuguagaaaguu

SEQ ID NO: 681525 - RNA, 19 nt, Artificial Sequence
  Description of Artificial Sequence: Synthetic oligonucleotide
  Antisense strand to SEQ ID NO: 681524
aacuuucuacagcuggguc

SEQ ID NO: 681526 - RNA, 19 nt, Artificial Sequence
  Description of Artificial Sequence: Synthetic oligonucleotide
  Sense strand starting at position 3198 of SEQ ID NO: 585964
ccagucuucccuuggguaa

SEQ ID NO: 681527 - RNA, 19 nt, Artificial Sequence
  Description of Artificial Sequence: Synthetic oligonucleotide
  Antisense strand to SEQ ID NO: 681526
uuacccaagggaagacugg

SEQ ID NO: 681528 - RNA, 19 nt, Artificial Sequence
  Description of Artificial Sequence: Synthetic oligonucleotide
  Sense strand starting at position 3199 of SEQ ID NO: 585964
cagucuucccuuggguaag

SEQ ID NO: 681529 - RNA, 19 nt, Artificial Sequence
  Description of Artificial Sequence: Synthetic oligonucleotide
  Antisense strand to SEQ ID NO: 681528
cuuacccaagggaagacug

SEQ ID NO: 681530 - RNA, 19 nt, Artificial Sequence
  Description of Artificial Sequence: Synthetic oligonucleotide
  Sense strand starting at position 3395 of SEQ ID NO: 585964
uuugccuugcugggagaau

SEQ ID NO: 681531 - RNA, 19 nt, Artificial Sequence
  Description of Artificial Sequence: Synthetic oligonucleotide
  Antisense strand to SEQ ID NO: 681530
auucucccagcaaggcaaa

SEQ ID NO: 681532 - RNA, 19 nt, Artificial Sequence
  Description of Artificial Sequence: Synthetic oligonucleotide
  Sense strand starting at position 3438 of SEQ ID NO: 585964
gggauuuaauauugaauca

SEQ ID NO: 681533 - RNA, 19 nt, Artificial Sequence
  Description of Artificial Sequence: Synthetic oligonucleotide
  Antisense strand to SEQ ID NO: 681532
ugauucaauauuaaauccc

SEQ ID NO: 681534 - RNA, 19 nt, Artificial Sequence
  Description of Artificial Sequence: Synthetic oligonucleotide
  Sense strand starting at position 3455 of SEQ ID NO: 585964
cauugaacugcauguugaa

SEQ ID NO: 681535 - RNA, 19 nt, Artificial Sequence
  Description of Artificial Sequence: Synthetic oligonucleotide
  Antisense strand to SEQ ID NO: 681534
uucaacaugcaguucaaug

SEQ ID NO: 681536 - RNA, 19 nt, Artificial Sequence
  Description of Artificial Sequence: Synthetic oligonucleotide
  Sense strand starting at position 3462 of SEQ ID NO: 585964
cugcauguugaauauugaa

SEQ ID NO: 681537 - RNA, 19 nt, Artificial Sequence
  Description of Artificial Sequence: Synthetic oligonucleotide
  Antisense strand to SEQ ID NO: 681536
uucaauauucaacaugcag

SEQ ID NO: 681538 - RNA, 19 nt, Artificial Sequence
  Description of Artificial Sequence: Synthetic oligonucleotide
  Sense strand starting at position 3931 of SEQ ID NO: 585964
guauaauguugagcaugaa

SEQ ID NO: 681539 - RNA, 19 nt, Artificial Sequence
  Description of Artificial Sequence: Synthetic oligonucleotide
  Antisense strand to SEQ ID NO: 681538
uucaugcucaacauuauac

SEQ ID NO: 681540 - RNA, 19 nt, Artificial Sequence
  Description of Artificial Sequence: Synthetic oligonucleotide
  Sense strand starting at position 3946 of SEQ ID NO: 585964
ugaaaccaauugguuauau

SEQ ID NO: 681541 - RNA, 19 nt, Artificial Sequence
  Description of Artificial Sequence: Synthetic oligonucleotide
  Antisense strand to SEQ ID NO: 681540
auauaaccaauugguuuca

SEQ ID NO: 681542 - RNA, 19 nt, Artificial Sequence
  Description of Artificial Sequence: Synthetic oligonucleotide
  Sense strand starting at position 3957 of SEQ ID NO: 585964
gguuauauuuagguguguu

SEQ ID NO: 681543 - RNA, 19 nt, Artificial Sequence
  Description of Artificial Sequence: Synthetic oligonucleotide
  Antisense strand to SEQ ID NO: 681542
aacacaccuaaauauaacc

SEQ ID NO: 681544 - RNA, 19 nt, Artificial Sequence
  Description of Artificial Sequence: Synthetic oligonucleotide
  Sense strand starting at position 3958 of SEQ ID NO: 585964
guuauauuuagguguguuu

SEQ ID NO: 681545 - RNA, 19 nt, Artificial Sequence
  Description of Artificial Sequence: Synthetic oligonucleotide
  Antisense strand to SEQ ID NO: 681544
aaacacaccuaaauauaac

SEQ ID NO: 681546 - RNA, 19 nt, Artificial Sequence
  Description of Artificial Sequence: Synthetic oligonucleotide
  Sense strand starting at position 30 of SEQ ID NO: 585965
ucacccuuacaugguauua

SEQ ID NO: 681547 - RNA, 19 nt, Artificial Sequence
  Description of Artificial Sequence: Synthetic oligonucleotide
  Antisense strand to SEQ ID NO: 681546
uaauaccauguaaggguga

SEQ ID NO: 681548 - RNA, 19 nt, Artificial Sequence
  Description of Artificial Sequence: Synthetic oligonucleotide
  Sense strand starting at position 40 of SEQ ID NO: 585965
augguauuaggauguguuu

SEQ ID NO: 681549 - RNA, 19 nt, Artificial Sequence
  Description of Artificial Sequence: Synthetic oligonucleotide
  Antisense strand to SEQ ID NO: 681548
aaacacauccuaauaccau

SEQ ID NO: 681550 - RNA, 19 nt, Artificial Sequence
  Description of Artificial Sequence: Synthetic oligonucleotide
  Sense strand starting at position 190 of SEQ ID NO: 585965
ugccuugacucuguggaca

SEQ ID NO: 681551 - RNA, 19 nt, Artificial Sequence
  Description of Artificial Sequence: Synthetic oligonucleotide
  Antisense strand to SEQ ID NO: 681550
uguccacagagucaaggca

SEQ ID NO: 681552 - RNA, 19 nt, Artificial Sequence
  Description of Artificial Sequence: Synthetic oligonucleotide
  Sense strand starting at position 216 of SEQ ID NO: 585965
agacuauccuuccugggua

SEQ ID NO: 681553 - RNA, 19 nt, Artificial Sequence
  Description of Artificial Sequence: Synthetic oligonucleotide
  Antisense strand to SEQ ID NO: 681552
uacccaggaaggauagucu

SEQ ID NO: 681554 - RNA, 19 nt, Artificial Sequence
  Description of Artificial Sequence: Synthetic oligonucleotide
  Sense strand starting at position 283 of SEQ ID NO: 585965
uuuggcuagagccaguaau

SEQ ID NO: 681555 - RNA, 19 nt, Artificial Sequence
  Description of Artificial Sequence: Synthetic oligonucleotide
  Antisense strand to SEQ ID NO: 681554
auuacuggcucuagccaaa

SEQ ID NO: 681556 - RNA, 19 nt, Artificial Sequence
  Description of Artificial Sequence: Synthetic oligonucleotide
  Sense strand starting at position 370 of SEQ ID NO: 585965
uuuaccucuugccuugaga

SEQ ID NO: 681557 - RNA, 19 nt, Artificial Sequence
  Description of Artificial Sequence: Synthetic oligonucleotide
  Antisense strand to SEQ ID NO: 681556
ucucaaggcaagagguaaa

SEQ ID NO: 681558 - RNA, 19 nt, Artificial Sequence
  Description of Artificial Sequence: Synthetic oligonucleotide
  Sense strand starting at position 550 of SEQ ID NO: 585965
auaugugaauaaucgguaa

SEQ ID NO: 681559 - RNA, 19 nt, Artificial Sequence
  Description of Artificial Sequence: Synthetic oligonucleotide
  Antisense strand to SEQ ID NO: 681558
uuaccgauuauucacauau

SEQ ID NO: 681560 - RNA, 19 nt, Artificial Sequence
  Description of Artificial Sequence: Synthetic oligonucleotide
  Sense strand starting at position 552 of SEQ ID NO: 585965
augugaauaaucgguaaac

SEQ ID NO: 681561 - RNA, 19 nt, Artificial Sequence
  Description of Artificial Sequence: Synthetic oligonucleotide
  Antisense strand to SEQ ID NO: 681560
guuuaccgauuauucacau

SEQ ID NO: 681562 - RNA, 19 nt, Artificial Sequence
  Description of Artificial Sequence: Synthetic oligonucleotide
  Sense strand starting at position 553 of SEQ ID NO: 585965
ugugaauaaucgguaaaca

SEQ ID NO: 681563 - RNA, 19 nt, Artificial Sequence
  Description of Artificial Sequence: Synthetic oligonucleotide
  Antisense strand to SEQ ID NO: 681562
uguuuaccgauuauucaca

SEQ ID NO: 681564 - RNA, 19 nt, Artificial Sequence
  Description of Artificial Sequence: Synthetic oligonucleotide
  Sense strand starting at position 612 of SEQ ID NO: 585965
ggacuauccuggcuuuguu

SEQ ID NO: 681565 - RNA, 19 nt, Artificial Sequence
  Description of Artificial Sequence: Synthetic oligonucleotide
  Antisense strand to SEQ ID NO: 681564
aacaaagccaggauagucc

SEQ ID NO: 681566 - RNA, 19 nt, Artificial Sequence
  Description of Artificial Sequence: Synthetic oligonucleotide
  Sense strand starting at position 675 of SEQ ID NO: 585965
ucaauuuacugaugaagaa

SEQ ID NO: 681567 - RNA, 19 nt, Artificial Sequence
  Description of Artificial Sequence: Synthetic oligonucleotide
  Antisense strand to SEQ ID NO: 681566
uucuucaucaguaaauuga

SEQ ID NO: 681568 - RNA, 19 nt, Artificial Sequence
  Description of Artificial Sequence: Synthetic oligonucleotide
  Sense strand starting at position 687 of SEQ ID NO: 585965
ugaagaaauccaggcuuag

SEQ ID NO: 681569 - RNA, 19 nt, Artificial Sequence
  Description of Artificial Sequence: Synthetic oligonucleotide
  Antisense strand to SEQ ID NO: 681568
cuaagccuggauuucuuca

SEQ ID NO: 681570 - RNA, 19 nt, Artificial Sequence
  Description of Artificial Sequence: Synthetic oligonucleotide
  Sense strand starting at position 710 of SEQ ID NO: 585965
gucagagugaauugccuaa

SEQ ID NO: 681571 - RNA, 19 nt, Artificial Sequence
  Description of Artificial Sequence: Synthetic oligonucleotide
  Antisense strand to SEQ ID NO: 681570
uuaggcaauucacucugac

SEQ ID NO: 681572 - RNA, 19 nt, Artificial Sequence
  Description of Artificial Sequence: Synthetic oligonucleotide
  Sense strand starting at position 712 of SEQ ID NO: 585965
cagagugaauugccuaagu

SEQ ID NO: 681573 - RNA, 19 nt, Artificial Sequence
  Description of Artificial Sequence: Synthetic oligonucleotide
  Antisense strand to SEQ ID NO: 681572
acuuaggcaauucacucug

SEQ ID NO: 681574 - RNA, 19 nt, Artificial Sequence
  Description of Artificial Sequence: Synthetic oligonucleotide
  Sense strand starting at position 714 of SEQ ID NO: 585965
gagugaauugccuaaguca

SEQ ID NO: 681575 - RNA, 19 nt, Artificial Sequence
  Description of Artificial Sequence: Synthetic oligonucleotide
  Antisense strand to SEQ ID NO: 681574
ugacuuaggcaauucacuc

SEQ ID NO: 681576 - RNA, 19 nt, Artificial Sequence
  Description of Artificial Sequence: Synthetic oligonucleotide
  Sense strand starting at position 722 of SEQ ID NO: 585965
ugccuaagucauggaacca

SEQ ID NO: 681577 - RNA, 19 nt, Artificial Sequence
  Description of Artificial Sequence: Synthetic oligonucleotide
  Antisense strand to SEQ ID NO: 681576
ugguuccaugacuuaggca

SEQ ID NO: 681578 - RNA, 19 nt, Artificial Sequence
  Description of Artificial Sequence: Synthetic oligonucleotide
  Sense strand starting at position 854 of SEQ ID NO: 585965
acuugaaagucacaagaag

SEQ ID NO: 681579 - RNA, 19 nt, Artificial Sequence
  Description of Artificial Sequence: Synthetic oligonucleotide
  Antisense strand to SEQ ID NO: 681578
cuucuugugacuuucaagu

SEQ ID NO: 681580 - RNA, 19 nt, Artificial Sequence
  Description of Artificial Sequence: Synthetic oligonucleotide
  Sense strand starting at position 863 of SEQ ID NO: 585965
ucacaagaagcuugauuag

SEQ ID NO: 681581 - RNA, 19 nt, Artificial Sequence
  Description of Artificial Sequence: Synthetic oligonucleotide
  Antisense strand to SEQ ID NO: 681580
cuaaucaagcuucuuguga

SEQ ID NO: 681582 - RNA, 19 nt, Artificial Sequence
  Description of Artificial Sequence: Synthetic oligonucleotide
  Sense strand starting at position 1010 of SEQ ID NO: 585965
gcagaacuuccuggcccaa

SEQ ID NO: 681583 - RNA, 19 nt, Artificial Sequence
  Description of Artificial Sequence: Synthetic oligonucleotide
  Antisense strand to SEQ ID NO: 681582
uugggccaggaaguucugc

SEQ ID NO: 681584 - RNA, 19 nt, Artificial Sequence
  Description of Artificial Sequence: Synthetic oligonucleotide
  Sense strand starting at position 1156 of SEQ ID NO: 585965
gggcuugaauucuugagag

SEQ ID NO: 681585 - RNA, 19 nt, Artificial Sequence
  Description of Artificial Sequence: Synthetic oligonucleotide
  Antisense strand to SEQ ID NO: 681584
cucucaagaauucaagccc

SEQ ID NO: 681586 - RNA, 19 nt, Artificial Sequence
  Description of Artificial Sequence: Synthetic oligonucleotide
  Sense strand starting at position 1160 of SEQ ID NO: 585965
uugaauucuugagagaaac

SEQ ID NO: 681587 - RNA, 19 nt, Artificial Sequence
  Description of Artificial Sequence: Synthetic oligonucleotide
  Antisense strand to SEQ ID NO: 681586
guuucucucaagaauucaa

SEQ ID NO: 681588 - RNA, 19 nt, Artificial Sequence
  Description of Artificial Sequence: Synthetic oligonucleotide
  Sense strand starting at position 1241 of SEQ ID NO: 585965
cgagccuccucuccucaaa

SEQ ID NO: 681589 - RNA, 19 nt, Artificial Sequence
  Description of Artificial Sequence: Synthetic oligonucleotide
  Antisense strand to SEQ ID NO: 681588
uuugaggagaggaggcucg

SEQ ID NO: 681590 - RNA, 19 nt, Artificial Sequence
  Description of Artificial Sequence: Synthetic oligonucleotide
  Sense strand starting at position 1359 of SEQ ID NO: 585965
gugcgaacaaguuaaagga

SEQ ID NO: 681591 - RNA, 19 nt, Artificial Sequence
  Description of Artificial Sequence: Synthetic oligonucleotide
  Antisense strand to SEQ ID NO: 681590
uccuuuaacuuguucgcac

SEQ ID NO: 681592 - RNA, 19 nt, Artificial Sequence
  Description of Artificial Sequence: Synthetic oligonucleotide
  Sense strand starting at position 1482 of SEQ ID NO: 585965
ggcaacuccgaauaacuua

SEQ ID NO: 681593 - RNA, 19 nt, Artificial Sequence
  Description of Artificial Sequence: Synthetic oligonucleotide
  Antisense strand to SEQ ID NO: 681592
uaaguuauucggaguugcc

SEQ ID NO: 681594 - RNA, 19 nt, Artificial Sequence
  Description of Artificial Sequence: Synthetic oligonucleotide
  Sense strand starting at position 1489 of SEQ ID NO: 585965
ccgaauaacuuaccuuaga

SEQ ID NO: 681595 - RNA, 19 nt, Artificial Sequence
  Description of Artificial Sequence: Synthetic oligonucleotide
  Antisense strand to SEQ ID NO: 681594
ucuaagguaaguuauucgg

SEQ ID NO: 681596 - RNA, 19 nt, Artificial Sequence
  Description of Artificial Sequence: Synthetic oligonucleotide
  Sense strand starting at position 1490 of SEQ ID NO: 585965
cgaauaacuuaccuuagau

SEQ ID NO: 681597 - RNA, 19 nt, Artificial Sequence
  Description of Artificial Sequence: Synthetic oligonucleotide
  Antisense strand to SEQ ID NO: 681596
aucuaagguaaguuauucg

SEQ ID NO: 681598 - RNA, 19 nt, Artificial Sequence
  Description of Artificial Sequence: Synthetic oligonucleotide
  Sense strand starting at position 1652 of SEQ ID NO: 585965
cuaggaagccucugcucaa

SEQ ID NO: 681599 - RNA, 19 nt, Artificial Sequence
  Description of Artificial Sequence: Synthetic oligonucleotide
  Antisense strand to SEQ ID NO: 681598
uugagcagaggcuuccuag

SEQ ID NO: 681600 - RNA, 19 nt, Artificial Sequence
  Description of Artificial Sequence: Synthetic oligonucleotide
  Sense strand starting at position 1855 of SEQ ID NO: 585965
gggugucuccgggaggaga

SEQ ID NO: 681601 - RNA, 19 nt, Artificial Sequence
  Description of Artificial Sequence: Synthetic oligonucleotide
  Antisense strand to SEQ ID NO: 681600
ucuccucccggagacaccc

SEQ ID NO: 681602 - RNA, 19 nt, Artificial Sequence
  Description of Artificial Sequence: Synthetic oligonucleotide
  Sense strand starting at position 1869 of SEQ ID NO: 585965
ggagauugaacucgaaugu

SEQ ID NO: 681603 - RNA, 19 nt, Artificial Sequence
  Description of Artificial Sequence: Synthetic oligonucleotide
  Antisense strand to SEQ ID NO: 681602
acauucgaguucaaucucc

SEQ ID NO: 681604 - RNA, 19 nt, Artificial Sequence
  Description of Artificial Sequence: Synthetic oligonucleotide
  Sense strand starting at position 1873 of SEQ ID NO: 585965
auugaacucgaauguuaag

SEQ ID NO: 681605 - RNA, 19 nt, Artificial Sequence
  Description of Artificial Sequence: Synthetic oligonucleotide
  Antisense strand to SEQ ID NO: 681604
cuuaacauucgaguucaau

SEQ ID NO: 681606 - RNA, 19 nt, Artificial Sequence
  Description of Artificial Sequence: Synthetic oligonucleotide
  Sense strand starting at position 2311 of SEQ ID NO: 585965
aguauuugcugcccauaac

SEQ ID NO: 681607 - RNA, 19 nt, Artificial Sequence
  Description of Artificial Sequence: Synthetic oligonucleotide
  Antisense strand to SEQ ID NO: 681606
guuaugggcagcaaauacu

SEQ ID NO: 681608 - RNA, 19 nt, Artificial Sequence
  Description of Artificial Sequence: Synthetic oligonucleotide
  Sense strand starting at position 2567 of SEQ ID NO: 585965
uaaucaguagccugcagaa

SEQ ID NO: 681609 - RNA, 19 nt, Artificial Sequence
  Description of Artificial Sequence: Synthetic oligonucleotide
  Antisense strand to SEQ ID NO: 681608
uucugcaggcuacugauua

SEQ ID NO: 681610 - RNA, 19 nt, Artificial Sequence
  Description of Artificial Sequence: Synthetic oligonucleotide
  Sense strand starting at position 2569 of SEQ ID NO: 585965
aucaguagccugcagaauu

SEQ ID NO: 681611 - RNA, 19 nt, Artificial Sequence
  Description of Artificial Sequence: Synthetic oligonucleotide
  Antisense strand to SEQ ID NO: 681610
aauucugcaggcuacugau

SEQ ID NO: 681612 - RNA, 19 nt, Artificial Sequence
  Description of Artificial Sequence: Synthetic oligonucleotide
  Sense strand starting at position 2922 of SEQ ID NO: 585965
gaagcagguugcucaacau

SEQ ID NO: 681613 - RNA, 19 nt, Artificial Sequence
  Description of Artificial Sequence: Synthetic oligonucleotide
  Antisense strand to SEQ ID NO: 681612
auguugagcaaccugcuuc

SEQ ID NO: 681614 - RNA, 19 nt, Artificial Sequence
  Description of Artificial Sequence: Synthetic oligonucleotide
  Sense strand starting at position 2993 of SEQ ID NO: 585965
uugcauuugguuugcagaa

SEQ ID NO: 681615 - RNA, 19 nt, Artificial Sequence
  Description of Artificial Sequence: Synthetic oligonucleotide
  Antisense strand to SEQ ID NO: 681614
uucugcaaaccaaaugcaa

SEQ ID NO: 681616 - RNA, 19 nt, Artificial Sequence
  Description of Artificial Sequence: Synthetic oligonucleotide
  Sense strand starting at position 2994 of SEQ ID NO: 585965
ugcauuugguuugcagaaa

SEQ ID NO: 681617 - RNA, 19 nt, Artificial Sequence
  Description of Artificial Sequence: Synthetic oligonucleotide
  Antisense strand to SEQ ID NO: 681616
uuucugcaaaccaaaugca

SEQ ID NO: 681618 - RNA, 19 nt, Artificial Sequence
  Description of Artificial Sequence: Synthetic oligonucleotide
  Sense strand starting at position 3045 of SEQ ID NO: 585965
uguauuaucugagccacua

SEQ ID NO: 681619 - RNA, 19 nt, Artificial Sequence
  Description of Artificial Sequence: Synthetic oligonucleotide
  Antisense strand to SEQ ID NO: 681618
uaguggcucagauaauaca

SEQ ID NO: 681620 - RNA, 19 nt, Artificial Sequence
  Description of Artificial Sequence: Synthetic oligonucleotide
  Sense strand starting at position 3074 of SEQ ID NO: 585965
guggcucugagauauuauu

SEQ ID NO: 681621 - RNA, 19 nt, Artificial Sequence
  Description of Artificial Sequence: Synthetic oligonucleotide
  Antisense strand to SEQ ID NO: 681620
aauaauaucucagagccac

SEQ ID NO: 681622 - RNA, 19 nt, Artificial Sequence
  Description of Artificial Sequence: Synthetic oligonucleotide
  Sense strand starting at position 3117 of SEQ ID NO: 585965
uugccaauauaugugacau

SEQ ID NO: 681623 - RNA, 19 nt, Artificial Sequence
  Description of Artificial Sequence: Synthetic oligonucleotide
  Antisense strand to SEQ ID NO: 681622
augucacauauauuggcaa

SEQ ID NO: 681624 - RNA, 19 nt, Artificial Sequence
  Description of Artificial Sequence: Synthetic oligonucleotide
  Sense strand starting at position 3175 of SEQ ID NO: 585965
gacagugucucagucuauu

SEQ ID NO: 681625 - RNA, 19 nt, Artificial Sequence
  Description of Artificial Sequence: Synthetic oligonucleotide
  Antisense strand to SEQ ID NO: 681624
aauagacugagacacuguc

SEQ ID NO: 681626 - RNA, 19 nt, Artificial Sequence
  Description of Artificial Sequence: Synthetic oligonucleotide
  Sense strand starting at position 81 of SEQ ID NO: 585966
aucucagaauccuugguca

SEQ ID NO: 681627 - RNA, 19 nt, Artificial Sequence
  Description of Artificial Sequence: Synthetic oligonucleotide
  Antisense strand to SEQ ID NO: 681626
ugaccaaggauucugagau

SEQ ID NO: 681628 - RNA, 19 nt, Artificial Sequence
  Description of Artificial Sequence: Synthetic oligonucleotide
  Sense strand starting at position 83 of SEQ ID NO: 585966
cucagaauccuuggucaac

SEQ ID NO: 681629 - RNA, 19 nt, Artificial Sequence
  Description of Artificial Sequence: Synthetic oligonucleotide
  Antisense strand to SEQ ID NO: 681628
guugaccaaggauucugag

SEQ ID NO: 681630 - RNA, 19 nt, Artificial Sequence
  Description of Artificial Sequence: Synthetic oligonucleotide
  Sense strand starting at position 84 of SEQ ID NO: 585966
ucagaauccuuggucaaca

SEQ ID NO: 681631 - RNA, 19 nt, Artificial Sequence
  Description of Artificial Sequence: Synthetic oligonucleotide
  Antisense strand to SEQ ID NO: 681630
uguugaccaaggauucuga

SEQ ID NO: 681632 - RNA, 19 nt, Artificial Sequence
  Description of Artificial Sequence: Synthetic oligonucleotide
  Sense strand starting at position 333 of SEQ ID NO: 585966
gauuguuucggucagaaug

SEQ ID NO: 681633 - RNA, 19 nt, Artificial Sequence
  Description of Artificial Sequence: Synthetic oligonucleotide
  Antisense strand to SEQ ID NO: 681632
cauucugaccgaaacaauc

SEQ ID NO: 681634 - RNA, 19 nt, Artificial Sequence
  Description of Artificial Sequence: Synthetic oligonucleotide
  Sense strand starting at position 369 of SEQ ID NO: 585966
gcuggacaaguuuaauauc

SEQ ID NO: 681635 - RNA, 19 nt, Artificial Sequence
  Description of Artificial Sequence: Synthetic oligonucleotide
  Antisense strand to SEQ ID NO: 681634
gauauuaaacuuguccagc

SEQ ID NO: 681636 - RNA, 19 nt, Artificial Sequence
  Description of Artificial Sequence: Synthetic oligonucleotide
  Sense strand starting at position 433 of SEQ ID NO: 585966
cccaccugucaugagcuaa

SEQ ID NO: 681637 - RNA, 19 nt, Artificial Sequence
  Description of Artificial Sequence: Synthetic oligonucleotide
  Antisense strand to SEQ ID NO: 681636
uuagcucaugacagguggg

SEQ ID NO: 681638 - RNA, 19 nt, Artificial Sequence
  Description of Artificial Sequence: Synthetic oligonucleotide
  Sense strand starting at position 478 of SEQ ID NO: 585966
ucugauaugcaccagauau

SEQ ID NO: 681639 - RNA, 19 nt, Artificial Sequence
  Description of Artificial Sequence: Synthetic oligonucleotide
  Antisense strand to SEQ ID NO: 681638
auaucuggugcauaucaga

SEQ ID NO: 681640 - RNA, 19 nt, Artificial Sequence
  Description of Artificial Sequence: Synthetic oligonucleotide
  Sense strand starting at position 525 of SEQ ID NO: 585966
acgacaauccuguaaguau

SEQ ID NO: 681641 - RNA, 19 nt, Artificial Sequence
  Description of Artificial Sequence: Synthetic oligonucleotide
  Antisense strand to SEQ ID NO: 681640
auacuuacaggauugucgu

SEQ ID NO: 681642 - RNA, 19 nt, Artificial Sequence
  Description of Artificial Sequence: Synthetic oligonucleotide
  Sense strand starting at position 536 of SEQ ID NO: 585966
guaaguauuagugacccau

SEQ ID NO: 681643 - RNA, 19 nt, Artificial Sequence
  Description of Artificial Sequence: Synthetic oligonucleotide
  Antisense strand to SEQ ID NO: 681642
augggucacuaauacuuac

SEQ ID NO: 681644 - RNA, 19 nt, Artificial Sequence
  Description of Artificial Sequence: Synthetic oligonucleotide
  Sense strand starting at position 1080 of SEQ ID NO: 585966
ucaccauucgaugaaugua

SEQ ID NO: 681645 - RNA, 19 nt, Artificial Sequence
  Description of Artificial Sequence: Synthetic oligonucleotide
  Antisense strand to SEQ ID NO: 681644
uacauucaucgaaugguga

SEQ ID NO: 681646 - RNA, 19 nt, Artificial Sequence
  Description of Artificial Sequence: Synthetic oligonucleotide
  Sense strand starting at position 1174 of SEQ ID NO: 585966
gauugcuacgauuaucauc

SEQ ID NO: 681647 - RNA, 19 nt, Artificial Sequence
  Description of Artificial Sequence: Synthetic oligonucleotide
  Antisense strand to SEQ ID NO: 681646
gaugauaaucguagcaauc

SEQ ID NO: 681648 - RNA, 19 nt, Artificial Sequence
  Description of Artificial Sequence: Synthetic oligonucleotide
  Sense strand starting at position 1213 of SEQ ID NO: 585966
gggagaaaggcauguuuau

SEQ ID NO: 681649 - RNA, 19 nt, Artificial Sequence
  Description of Artificial Sequence: Synthetic oligonucleotide
  Antisense strand to SEQ ID NO: 681648
auaaacaugccuuucuccc

SEQ ID NO: 681650 - RNA, 19 nt, Artificial Sequence
  Description of Artificial Sequence: Synthetic oligonucleotide
  Sense strand starting at position 1285 of SEQ ID NO: 585966
aggcucauucuccauagaa

SEQ ID NO: 681651 - RNA, 19 nt, Artificial Sequence
  Description of Artificial Sequence: Synthetic oligonucleotide
  Antisense strand to SEQ ID NO: 681650
uucuauggagaaugagccu

SEQ ID NO: 681652 - RNA, 19 nt, Artificial Sequence
  Description of Artificial Sequence: Synthetic oligonucleotide
  Sense strand starting at position 1287 of SEQ ID NO: 585966
gcucauucuccauagaaag

SEQ ID NO: 681653 - RNA, 19 nt, Artificial Sequence
  Description of Artificial Sequence: Synthetic oligonucleotide
  Antisense strand to SEQ ID NO: 681652
cuuucuauggagaaugagc

SEQ ID NO: 681654 - RNA, 19 nt, Artificial Sequence
  Description of Artificial Sequence: Synthetic oligonucleotide
  Sense strand starting at position 1477 of SEQ ID NO: 585966
gcccgaaucacugagugag

SEQ ID NO: 681655 - RNA, 19 nt, Artificial Sequence
  Description of Artificial Sequence: Synthetic oligonucleotide
  Antisense strand to SEQ ID NO: 681654
cucacucagugauucgggc

SEQ ID NO: 681656 - RNA, 19 nt, Artificial Sequence
  Description of Artificial Sequence: Synthetic oligonucleotide
  Sense strand starting at position 1595 of SEQ ID NO: 585966
ugucuucugcguguacaca

SEQ ID NO: 681657 - RNA, 19 nt, Artificial Sequence
  Description of Artificial Sequence: Synthetic oligonucleotide
  Antisense strand to SEQ ID NO: 681656
uguguacacgcagaagaca

SEQ ID NO: 681658 - RNA, 19 nt, Artificial Sequence
  Description of Artificial Sequence: Synthetic oligonucleotide
  Sense strand starting at position 1810 of SEQ ID NO: 585966
uagauucugucaguggaga

SEQ ID NO: 681659 - RNA, 19 nt, Artificial Sequence
  Description of Artificial Sequence: Synthetic oligonucleotide
  Antisense strand to SEQ ID NO: 681658
ucuccacugacagaaucua

SEQ ID NO: 681660 - RNA, 19 nt, Artificial Sequence
  Description of Artificial Sequence: Synthetic oligonucleotide
  Sense strand starting at position 1812 of SEQ ID NO: 585966
gauucugucaguggagaac

SEQ ID NO: 681661 - RNA, 19 nt, Artificial Sequence
  Description of Artificial Sequence: Synthetic oligonucleotide
  Antisense strand to SEQ ID NO: 681660
guucuccacugacagaauc

SEQ ID NO: 681662 - RNA, 19 nt, Artificial Sequence
  Description of Artificial Sequence: Synthetic oligonucleotide
  Sense strand starting at position 2043 of SEQ ID NO: 585966
gugucugguuugaccguua

SEQ ID NO: 681663 - RNA, 19 nt, Artificial Sequence
  Description of Artificial Sequence: Synthetic oligonucleotide
  Antisense strand to SEQ ID NO: 681662
uaacggucaaaccagacac

SEQ ID NO: 681664 - RNA, 19 nt, Artificial Sequence
  Description of Artificial Sequence: Synthetic oligonucleotide
  Sense strand starting at position 2248 of SEQ ID NO: 585966
uuuggaauguacuuacauc

SEQ ID NO: 681665 - RNA, 19 nt, Artificial Sequence
  Description of Artificial Sequence: Synthetic oligonucleotide
  Antisense strand to SEQ ID NO: 681664
gauguaaguacauuccaaa

SEQ ID NO: 681666 - RNA, 19 nt, Artificial Sequence
  Description of Artificial Sequence: Synthetic oligonucleotide
  Sense strand starting at position 2305 of SEQ ID NO: 585966
cucggauucuauccucaaa

SEQ ID NO: 681667 - RNA, 19 nt, Artificial Sequence
  Description of Artificial Sequence: Synthetic oligonucleotide
  Antisense strand to SEQ ID NO: 681666
uuugaggauagaauccgag

SEQ ID NO: 681668 - RNA, 19 nt, Artificial Sequence
  Description of Artificial Sequence: Synthetic oligonucleotide
  Sense strand starting at position 2307 of SEQ ID NO: 585966
cggauucuauccucaaaua

SEQ ID NO: 681669 - RNA, 19 nt, Artificial Sequence
  Description of Artificial Sequence: Synthetic oligonucleotide
  Antisense strand to SEQ ID NO: 681668
uauuugaggauagaauccg

SEQ ID NO: 681670 - RNA, 19 nt, Artificial Sequence
  Description of Artificial Sequence: Synthetic oligonucleotide
  Sense strand starting at position 2352 of SEQ ID NO: 585966
ggaguuggcccuuaaugag

SEQ ID NO: 681671 - RNA, 19 nt, Artificial Sequence
  Description of Artificial Sequence: Synthetic oligonucleotide
  Antisense strand to SEQ ID NO: 681670
cucauuaagggccaacucc

SEQ ID NO: 681672 - RNA, 19 nt, Artificial Sequence
  Description of Artificial Sequence: Synthetic oligonucleotide
  Sense strand starting at position 2366 of SEQ ID NO: 585966
augagagguucucucaaga

SEQ ID NO: 681673 - RNA, 19 nt, Artificial Sequence
  Description of Artificial Sequence: Synthetic oligonucleotide
  Antisense strand to SEQ ID NO: 681672
ucuugagagaaccucucau

SEQ ID NO: 681674 - RNA, 19 nt, Artificial Sequence
  Description of Artificial Sequence: Synthetic oligonucleotide
  Sense strand starting at position 2519 of SEQ ID NO: 585966
guaggcauuuaaguaguua

SEQ ID NO: 681675 - RNA, 19 nt, Artificial Sequence
  Description of Artificial Sequence: Synthetic oligonucleotide
  Antisense strand to SEQ ID NO: 681674
uaacuacuuaaaugccuac

SEQ ID NO: 681676 - RNA, 19 nt, Artificial Sequence
  Description of Artificial Sequence: Synthetic oligonucleotide
  Sense strand starting at position 2523 of SEQ ID NO: 585966
gcauuuaaguaguuaaugu

SEQ ID NO: 681677 - RNA, 19 nt, Artificial Sequence
  Description of Artificial Sequence: Synthetic oligonucleotide
  Antisense strand to SEQ ID NO: 681676
acauuaacuacuuaaaugc

SEQ ID NO: 681678 - RNA, 19 nt, Artificial Sequence
  Description of Artificial Sequence: Synthetic oligonucleotide
  Sense strand starting at position 2538 of SEQ ID NO: 585966
auguuauguccauaauuag

SEQ ID NO: 681679 - RNA, 19 nt, Artificial Sequence
  Description of Artificial Sequence: Synthetic oligonucleotide
  Antisense strand to SEQ ID NO: 681678
cuaauuauggacauaacau

SEQ ID NO: 681680 - RNA, 19 nt, Artificial Sequence
  Description of Artificial Sequence: Synthetic oligonucleotide
  Sense strand starting at position 2541 of SEQ ID NO: 585966
uuauguccauaauuaggau

SEQ ID NO: 681681 - RNA, 19 nt, Artificial Sequence
  Description of Artificial Sequence: Synthetic oligonucleotide
  Antisense strand to SEQ ID NO: 681680
auccuaauuauggacauaa

SEQ ID NO: 681682 - RNA, 19 nt, Artificial Sequence
  Description of Artificial Sequence: Synthetic oligonucleotide
  Sense strand starting at position 2729 of SEQ ID NO: 585966
auguguggcauacaaguaa

SEQ ID NO: 681683 - RNA, 19 nt, Artificial Sequence
  Description of Artificial Sequence: Synthetic oligonucleotide
  Antisense strand to SEQ ID NO: 681682
uuacuuguaugccacacau

SEQ ID NO: 681684 - RNA, 19 nt, Artificial Sequence
  Description of Artificial Sequence: Synthetic oligonucleotide
  Sense strand starting at position 2733 of SEQ ID NO: 585966
guggcauacaaguaacuga

SEQ ID NO: 681685 - RNA, 19 nt, Artificial Sequence
  Description of Artificial Sequence: Synthetic oligonucleotide
  Antisense strand to SEQ ID NO: 681684
ucaguuacuuguaugccac

SEQ ID NO: 681686 - RNA, 19 nt, Artificial Sequence
  Description of Artificial Sequence: Synthetic oligonucleotide
  Sense strand starting at position 2779 of SEQ ID NO: 585966
uagugaggucauuauuaug

SEQ ID NO: 681687 - RNA, 19 nt, Artificial Sequence
  Description of Artificial Sequence: Synthetic oligonucleotide
  Antisense strand to SEQ ID NO: 681686
cauaauaaugaccucacua

SEQ ID NO: 681688 - RNA, 19 nt, Artificial Sequence
  Description of Artificial Sequence: Synthetic oligonucleotide
  Sense strand starting at position 2836 of SEQ ID NO: 585966
uuguaugaaacuuggagca

SEQ ID NO: 681689 - RNA, 19 nt, Artificial Sequence
  Description of Artificial Sequence: Synthetic oligonucleotide
  Antisense strand to SEQ ID NO: 681688
ugcuccaaguuucauacaa

SEQ ID NO: 681690 - RNA, 19 nt, Artificial Sequence
  Description of Artificial Sequence: Synthetic oligonucleotide
  Sense strand starting at position 3150 of SEQ ID NO: 585966
cgagaugcucuugauggga

SEQ ID NO: 681691 - RNA, 19 nt, Artificial Sequence
  Description of Artificial Sequence: Synthetic oligonucleotide
  Antisense strand to SEQ ID NO: 681690
ucccaucaagagcaucucg

SEQ ID NO: 681692 - RNA, 19 nt, Artificial Sequence
  Description of Artificial Sequence: Synthetic oligonucleotide
  Sense strand starting at position 3153 of SEQ ID NO: 585966
gaugcucuugaugggaaga

SEQ ID NO: 681693 - RNA, 19 nt, Artificial Sequence
  Description of Artificial Sequence: Synthetic oligonucleotide
  Antisense strand to SEQ ID NO: 681692
ucuucccaucaagagcauc

SEQ ID NO: 681694 - RNA, 19 nt, Artificial Sequence
  Description of Artificial Sequence: Synthetic oligonucleotide
  Sense strand starting at position 3486 of SEQ ID NO: 585966
ugugaauccuucccacaug

SEQ ID NO: 681695 - RNA, 19 nt, Artificial Sequence
  Description of Artificial Sequence: Synthetic oligonucleotide
  Antisense strand to SEQ ID NO: 681694
caugugggaaggauucaca

SEQ ID NO: 681696 - RNA, 19 nt, Artificial Sequence
  Description of Artificial Sequence: Synthetic oligonucleotide
  Sense strand starting at position 3566 of SEQ ID NO: 585966
ggacaauuaacacguauga

SEQ ID NO: 681697 - RNA, 19 nt, Artificial Sequence
  Description of Artificial Sequence: Synthetic oligonucleotide
  Antisense strand to SEQ ID NO: 681696
ucauacguguuaauugucc

SEQ ID NO: 681698 - RNA, 19 nt, Artificial Sequence
  Description of Artificial Sequence: Synthetic oligonucleotide
  Sense strand starting at position 3849 of SEQ ID NO: 585966
auugcuauuauaugggaga

SEQ ID NO: 681699 - RNA, 19 nt, Artificial Sequence
  Description of Artificial Sequence: Synthetic oligonucleotide
  Antisense strand to SEQ ID NO: 681698
ucucccauauaauagcaau

SEQ ID NO: 681700 - RNA, 19 nt, Artificial Sequence
  Description of Artificial Sequence: Synthetic oligonucleotide
  Sense strand starting at position 3851 of SEQ ID NO: 585966
ugcuauuauaugggagaga

SEQ ID NO: 681701 - RNA, 19 nt, Artificial Sequence
  Description of Artificial Sequence: Synthetic oligonucleotide
  Antisense strand to SEQ ID NO: 681700
ucucucccauauaauagca

SEQ ID NO: 681702 - RNA, 19 nt, Artificial Sequence
  Description of Artificial Sequence: Synthetic oligonucleotide
  Sense strand starting at position 3877 of SEQ ID NO: 585966
uagugucaggguugagaag

SEQ ID NO: 681703 - RNA, 19 nt, Artificial Sequence
  Description of Artificial Sequence: Synthetic oligonucleotide
  Antisense strand to SEQ ID NO: 681702
cuucucaacccugacacua

SEQ ID NO: 681704 - RNA, 19 nt, Artificial Sequence
  Description of Artificial Sequence: Synthetic oligonucleotide
  Sense strand starting at position 3938 of SEQ ID NO: 585966
ccugcaugacuuuggaaau

SEQ ID NO: 681705 - RNA, 19 nt, Artificial Sequence
  Description of Artificial Sequence: Synthetic oligonucleotide
  Antisense strand to SEQ ID NO: 681704
auuuccaaagucaugcagg

SEQ ID NO: 681706 - RNA, 19 nt, Artificial Sequence
  Description of Artificial Sequence: Synthetic oligonucleotide
  Sense strand starting at position 83 of SEQ ID NO: 585967
guugguaggagauguuaug

SEQ ID NO: 681707 - RNA, 19 nt, Artificial Sequence
  Description of Artificial Sequence: Synthetic oligonucleotide
  Antisense strand to SEQ ID NO: 681706
cauaacaucuccuaccaac

SEQ ID NO: 681708 - RNA, 19 nt, Artificial Sequence
  Description of Artificial Sequence: Synthetic oligonucleotide
  Sense strand starting at position 112 of SEQ ID NO: 585967
cugauaugaucucaguuaa

SEQ ID NO: 681709 - RNA, 19 nt, Artificial Sequence
  Description of Artificial Sequence: Synthetic oligonucleotide
  Antisense strand to SEQ ID NO: 681708
uuaacugagaucauaucag

SEQ ID NO: 681710 - RNA, 19 nt, Artificial Sequence
  Description of Artificial Sequence: Synthetic oligonucleotide
  Sense strand starting at position 163 of SEQ ID NO: 585967
uuaugaacgucuuuaauga

SEQ ID NO: 681711 - RNA, 19 nt, Artificial Sequence
  Description of Artificial Sequence: Synthetic oligonucleotide
  Antisense strand to SEQ ID NO: 681710
ucauuaaagacguucauaa

SEQ ID NO: 681712 - RNA, 19 nt, Artificial Sequence
  Description of Artificial Sequence: Synthetic oligonucleotide
  Sense strand starting at position 164 of SEQ ID NO: 585967
uaugaacgucuuuaaugau

SEQ ID NO: 681713 - RNA, 19 nt, Artificial Sequence
  Description of Artificial Sequence: Synthetic oligonucleotide
  Antisense strand to SEQ ID NO: 681712
aucauuaaagacguucaua

SEQ ID NO: 681714 - RNA, 19 nt, Artificial Sequence
  Description of Artificial Sequence: Synthetic oligonucleotide
  Sense strand starting at position 210 of SEQ ID NO: 585967
cagucagacuagucacaga

SEQ ID NO: 681715 - RNA, 19 nt, Artificial Sequence
  Description of Artificial Sequence: Synthetic oligonucleotide
  Antisense strand to SEQ ID NO: 681714
ucugugacuagucugacug

SEQ ID NO: 681716 - RNA, 19 nt, Artificial Sequence
  Description of Artificial Sequence: Synthetic oligonucleotide
  Sense strand starting at position 213 of SEQ ID NO: 585967
ucagacuagucacagaaca

SEQ ID NO: 681717 - RNA, 19 nt, Artificial Sequence
  Description of Artificial Sequence: Synthetic oligonucleotide
  Antisense strand to SEQ ID NO: 681716
uguucugugacuagucuga

SEQ ID NO: 681718 - RNA, 19 nt, Artificial Sequence
  Description of Artificial Sequence: Synthetic oligonucleotide
  Sense strand starting at position 246 of SEQ ID NO: 585967
cggauaugacucuguguga

SEQ ID NO: 681719 - RNA, 19 nt, Artificial Sequence
  Description of Artificial Sequence: Synthetic oligonucleotide
  Antisense strand to SEQ ID NO: 681718
ucacacagagucauauccg

SEQ ID NO: 681720 - RNA, 19 nt, Artificial Sequence
  Description of Artificial Sequence: Synthetic oligonucleotide
  Sense strand starting at position 247 of SEQ ID NO: 585967
ggauaugacucugugugac

SEQ ID NO: 681721 - RNA, 19 nt, Artificial Sequence
  Description of Artificial Sequence: Synthetic oligonucleotide
  Antisense strand to SEQ ID NO: 681720
gucacacagagucauaucc

SEQ ID NO: 681722 - RNA, 19 nt, Artificial Sequence
  Description of Artificial Sequence: Synthetic oligonucleotide
  Sense strand starting at position 420 of SEQ ID NO: 585967
ccguuuauuuccuacagac

SEQ ID NO: 681723 - RNA, 19 nt, Artificial Sequence
  Description of Artificial Sequence: Synthetic oligonucleotide
  Antisense strand to SEQ ID NO: 681722
gucuguaggaaauaaacgg

SEQ ID NO: 681724 - RNA, 19 nt, Artificial Sequence
  Description of Artificial Sequence: Synthetic oligonucleotide
  Sense strand starting at position 491 of SEQ ID NO: 585967
acaagaacguucccagcuu

SEQ ID NO: 681725 - RNA, 19 nt, Artificial Sequence
  Description of Artificial Sequence: Synthetic oligonucleotide
  Antisense strand to SEQ ID NO: 681724
aagcugggaacguucuugu

SEQ ID NO: 681726 - RNA, 19 nt, Artificial Sequence
  Description of Artificial Sequence: Synthetic oligonucleotide
  Sense strand starting at position 514 of SEQ ID NO: 585967
gcagcuucgccagccaauu

SEQ ID NO: 681727 - RNA, 19 nt, Artificial Sequence
  Description of Artificial Sequence: Synthetic oligonucleotide
  Antisense strand to SEQ ID NO: 681726
aauuggcuggcgaagcugc

SEQ ID NO: 681728 - RNA, 19 nt, Artificial Sequence
  Description of Artificial Sequence: Synthetic oligonucleotide
  Sense strand starting at position 536 of SEQ ID NO: 585967
gcccuugucauucguagag

SEQ ID NO: 681729 - RNA, 19 nt, Artificial Sequence
  Description of Artificial Sequence: Synthetic oligonucleotide
  Antisense strand to SEQ ID NO: 681728
cucuacgaaugacaagggc

SEQ ID NO: 681730 - RNA, 19 nt, Artificial Sequence
  Description of Artificial Sequence: Synthetic oligonucleotide
  Sense strand starting at position 540 of SEQ ID NO: 585967
uugucauucguagagauac

SEQ ID NO: 681731 - RNA, 19 nt, Artificial Sequence
  Description of Artificial Sequence: Synthetic oligonucleotide
  Antisense strand to SEQ ID NO: 681730
guaucucuacgaaugacaa

SEQ ID NO: 681732 - RNA, 19 nt, Artificial Sequence
  Description of Artificial Sequence: Synthetic oligonucleotide
  Sense strand starting at position 542 of SEQ ID NO: 585967
gucauucguagagauacag

SEQ ID NO: 681733 - RNA, 19 nt, Artificial Sequence
  Description of Artificial Sequence: Synthetic oligonucleotide
  Antisense strand to SEQ ID NO: 681732
cuguaucucuacgaaugac

SEQ ID NO: 681734 - RNA, 19 nt, Artificial Sequence
  Description of Artificial Sequence: Synthetic oligonucleotide
  Sense strand starting at position 611 of SEQ ID NO: 585967
cuccaucuccaaggaaguu

SEQ ID NO: 681735 - RNA, 19 nt, Artificial Sequence
  Description of Artificial Sequence: Synthetic oligonucleotide
  Antisense strand to SEQ ID NO: 681734
aacuuccuuggagauggag

SEQ ID NO: 681736 - RNA, 19 nt, Artificial Sequence
  Description of Artificial Sequence: Synthetic oligonucleotide
  Sense strand starting at position 649 of SEQ ID NO: 585967
cuaacccaaccgugagaau

SEQ ID NO: 681737 - RNA, 19 nt, Artificial Sequence
  Description of Artificial Sequence: Synthetic oligonucleotide
  Antisense strand to SEQ ID NO: 681736
auucucacgguuggguuag

SEQ ID NO: 681738 - RNA, 19 nt, Artificial Sequence
  Description of Artificial Sequence: Synthetic oligonucleotide
  Sense strand starting at position 660 of SEQ ID NO: 585967
gugagaaugcaauaagcaa

SEQ ID NO: 681739 - RNA, 19 nt, Artificial Sequence
  Description of Artificial Sequence: Synthetic oligonucleotide
  Antisense strand to SEQ ID NO: 681738
uugcuuauugcauucucac

SEQ ID NO: 681740 - RNA, 19 nt, Artificial Sequence
  Description of Artificial Sequence: Synthetic oligonucleotide
  Sense strand starting at position 740 of SEQ ID NO: 585967
gggaaugucgcucacauau

SEQ ID NO: 681741 - RNA, 19 nt, Artificial Sequence
  Description of Artificial Sequence: Synthetic oligonucleotide
  Antisense strand to SEQ ID NO: 681740
auaugugagcgacauuccc

SEQ ID NO: 681742 - RNA, 19 nt, Artificial Sequence
  Description of Artificial Sequence: Synthetic oligonucleotide
  Sense strand starting at position 758 of SEQ ID NO: 585967
ucucacuucugagacaaga

SEQ ID NO: 681743 - RNA, 19 nt, Artificial Sequence
  Description of Artificial Sequence: Synthetic oligonucleotide
  Antisense strand to SEQ ID NO: 681742
ucuugucucagaagugaga

SEQ ID NO: 681744 - RNA, 19 nt, Artificial Sequence
  Description of Artificial Sequence: Synthetic oligonucleotide
  Sense strand starting at position 838 of SEQ ID NO: 585967
uuucuugcucugcaagagu

SEQ ID NO: 681745 - RNA, 19 nt, Artificial Sequence
  Description of Artificial Sequence: Synthetic oligonucleotide
  Antisense strand to SEQ ID NO: 681744
acucuugcagagcaagaaa

SEQ ID NO: 681746 - RNA, 19 nt, Artificial Sequence
  Description of Artificial Sequence: Synthetic oligonucleotide
  Sense strand starting at position 858 of SEQ ID NO: 585967
gggaauccuucccaucagu

SEQ ID NO: 681747 - RNA, 19 nt, Artificial Sequence
  Description of Artificial Sequence: Synthetic oligonucleotide
  Antisense strand to SEQ ID NO: 681746
acugaugggaaggauuccc

SEQ ID NO: 681748 - RNA, 19 nt, Artificial Sequence
  Description of Artificial Sequence: Synthetic oligonucleotide
  Sense strand starting at position 1035 of SEQ ID NO: 585967
cucuucuugucucuguaaa

SEQ ID NO: 681749 - RNA, 19 nt, Artificial Sequence
  Description of Artificial Sequence: Synthetic oligonucleotide
  Antisense strand to SEQ ID NO: 681748
uuuacagagacaagaagag

SEQ ID NO: 681750 - RNA, 19 nt, Artificial Sequence
  Description of Artificial Sequence: Synthetic oligonucleotide
  Sense strand starting at position 1036 of SEQ ID NO: 585967
ucuucuugucucuguaaag

SEQ ID NO: 681751 - RNA, 19 nt, Artificial Sequence
  Description of Artificial Sequence: Synthetic oligonucleotide
  Antisense strand to SEQ ID NO: 681750
cuuuacagagacaagaaga

SEQ ID NO: 681752 - RNA, 19 nt, Artificial Sequence
  Description of Artificial Sequence: Synthetic oligonucleotide
  Sense strand starting at position 1095 of SEQ ID NO: 585967
caguucacggagugguaaa

SEQ ID NO: 681753 - RNA, 19 nt, Artificial Sequence
  Description of Artificial Sequence: Synthetic oligonucleotide
  Antisense strand to SEQ ID NO: 681752
uuuaccacuccgugaacug

SEQ ID NO: 681754 - RNA, 19 nt, Artificial Sequence
  Description of Artificial Sequence: Synthetic oligonucleotide
  Sense strand starting at position 1722 of SEQ ID NO: 585967
aggcucucaccucgaacau

SEQ ID NO: 681755 - RNA, 19 nt, Artificial Sequence
  Description of Artificial Sequence: Synthetic oligonucleotide
  Antisense strand to SEQ ID NO: 681754
auguucgaggugagagccu

SEQ ID NO: 681756 - RNA, 19 nt, Artificial Sequence
  Description of Artificial Sequence: Synthetic oligonucleotide
  Sense strand starting at position 1723 of SEQ ID NO: 585967
ggcucucaccucgaacaua

SEQ ID NO: 681757 - RNA, 19 nt, Artificial Sequence
  Description of Artificial Sequence: Synthetic oligonucleotide
  Antisense strand to SEQ ID NO: 681756
uauguucgaggugagagcc

SEQ ID NO: 681758 - RNA, 19 nt, Artificial Sequence
  Description of Artificial Sequence: Synthetic oligonucleotide
  Sense strand starting at position 1773 of SEQ ID NO: 585967
agccgauguccgcaugguu

SEQ ID NO: 681759 - RNA, 19 nt, Artificial Sequence
  Description of Artificial Sequence: Synthetic oligonucleotide
  Antisense strand to SEQ ID NO: 681758
aaccaugcggacaucggcu

SEQ ID NO: 681760 - RNA, 19 nt, Artificial Sequence
  Description of Artificial Sequence: Synthetic oligonucleotide
  Sense strand starting at position 1785 of SEQ ID NO: 585967
caugguuguggaugacgaa

SEQ ID NO: 681761 - RNA, 19 nt, Artificial Sequence
  Description of Artificial Sequence: Synthetic oligonucleotide
  Antisense strand to SEQ ID NO: 681760
uucgucauccacaaccaug

SEQ ID NO: 681762 - RNA, 19 nt, Artificial Sequence
  Description of Artificial Sequence: Synthetic oligonucleotide
  Sense strand starting at position 1797 of SEQ ID NO: 585967
ugacgaacuccuggcugaa

SEQ ID NO: 681763 - RNA, 19 nt, Artificial Sequence
  Description of Artificial Sequence: Synthetic oligonucleotide
  Antisense strand to SEQ ID NO: 681762
uucagccaggaguucguca

SEQ ID NO: 681764 - RNA, 19 nt, Artificial Sequence
  Description of Artificial Sequence: Synthetic oligonucleotide
  Sense strand starting at position 1799 of SEQ ID NO: 585967
acgaacuccuggcugaaga

SEQ ID NO: 681765 - RNA, 19 nt, Artificial Sequence
  Description of Artificial Sequence: Synthetic oligonucleotide
  Antisense strand to SEQ ID NO: 681764
ucuucagccaggaguucgu

SEQ ID NO: 681766 - RNA, 19 nt, Artificial Sequence
  Description of Artificial Sequence: Synthetic oligonucleotide
  Sense strand starting at position 3320 of SEQ ID NO: 585967
caccuaugagguugaacuu

SEQ ID NO: 681767 - RNA, 19 nt, Artificial Sequence
  Description of Artificial Sequence: Synthetic oligonucleotide
  Antisense strand to SEQ ID NO: 681766
aaguucaaccucauaggug

SEQ ID NO: 681768 - RNA, 19 nt, Artificial Sequence
  Description of Artificial Sequence: Synthetic oligonucleotide
  Sense strand starting at position 3329 of SEQ ID NO: 585967
gguugaacuuuauacaauu

SEQ ID NO: 681769 - RNA, 19 nt, Artificial Sequence
  Description of Artificial Sequence: Synthetic oligonucleotide
  Antisense strand to SEQ ID NO: 681768
aauuguauaaaguucaacc

SEQ ID NO: 681770 - RNA, 19 nt, Artificial Sequence
  Description of Artificial Sequence: Synthetic oligonucleotide
  Sense strand starting at position 3342 of SEQ ID NO: 585967
acaauugguuucuuuauag

SEQ ID NO: 681771 - RNA, 19 nt, Artificial Sequence
  Description of Artificial Sequence: Synthetic oligonucleotide
  Antisense strand to SEQ ID NO: 681770
cuauaaagaaaccaauugu

SEQ ID NO: 681772 - RNA, 19 nt, Artificial Sequence
  Description of Artificial Sequence: Synthetic oligonucleotide
  Sense strand starting at position 3349 of SEQ ID NO: 585967
guuucuuuauagguuuaga

SEQ ID NO: 681773 - RNA, 19 nt, Artificial Sequence
  Description of Artificial Sequence: Synthetic oligonucleotide
  Antisense strand to SEQ ID NO: 681772
ucuaaaccuauaaagaaac

SEQ ID NO: 681774 - RNA, 19 nt, Artificial Sequence
  Description of Artificial Sequence: Synthetic oligonucleotide
  Sense strand starting at position 3357 of SEQ ID NO: 585967
auagguuuagaugguugaa

SEQ ID NO: 681775 - RNA, 19 nt, Artificial Sequence
  Description of Artificial Sequence: Synthetic oligonucleotide
  Antisense strand to SEQ ID NO: 681774
uucaaccaucuaaaccuau

SEQ ID NO: 681776 - RNA, 19 nt, Artificial Sequence
  Description of Artificial Sequence: Synthetic oligonucleotide
  Sense strand starting at position 3359 of SEQ ID NO: 585967
agguuuagaugguugaauu

SEQ ID NO: 681777 - RNA, 19 nt, Artificial Sequence
  Description of Artificial Sequence: Synthetic oligonucleotide
  Antisense strand to SEQ ID NO: 681776
aauucaaccaucuaaaccu

SEQ ID NO: 681778 - RNA, 19 nt, Artificial Sequence
  Description of Artificial Sequence: Synthetic oligonucleotide
  Sense strand starting at position 3620 of SEQ ID NO: 585967
ccgcaagugauccgccauu

SEQ ID NO: 681779 - RNA, 19 nt, Artificial Sequence
  Description of Artificial Sequence: Synthetic oligonucleotide
  Antisense strand to SEQ ID NO: 681778
aauggcggaucacuugcgg

SEQ ID NO: 681780 - RNA, 19 nt, Artificial Sequence
  Description of Artificial Sequence: Synthetic oligonucleotide
  Sense strand starting at position 3834 of SEQ ID NO: 585967
uguugaacuccugaucuuc

SEQ ID NO: 681781 - RNA, 19 nt, Artificial Sequence
  Description of Artificial Sequence: Synthetic oligonucleotide
  Antisense strand to SEQ ID NO: 681780
gaagaucaggaguucaaca

SEQ ID NO: 681782 - RNA, 19 nt, Artificial Sequence
  Description of Artificial Sequence: Synthetic oligonucleotide
  Sense strand starting at position 3978 of SEQ ID NO: 585967
accagaaacacgugguuaa

SEQ ID NO: 681783 - RNA, 19 nt, Artificial Sequence
  Description of Artificial Sequence: Synthetic oligonucleotide
  Antisense strand to SEQ ID NO: 681782
uuaaccacguguuucuggu

SEQ ID NO: 681784 - RNA, 19 nt, Artificial Sequence
  Description of Artificial Sequence: Synthetic oligonucleotide
  Sense strand starting at position 3979 of SEQ ID NO: 585967
ccagaaacacgugguuaau

SEQ ID NO: 681785 - RNA, 19 nt, Artificial Sequence
  Description of Artificial Sequence: Synthetic oligonucleotide
  Antisense strand to SEQ ID NO: 681784
auuaaccacguguuucugg

SEQ ID NO: 681786 - RNA, 19 nt, Artificial Sequence
  Description of Artificial Sequence: Synthetic oligonucleotide
  Sense strand starting at position 255 of SEQ ID NO: 585968
gcaaauuugugaguuucuu

SEQ ID NO: 681787 - RNA, 19 nt, Artificial Sequence
  Description of Artificial Sequence: Synthetic oligonucleotide
  Antisense strand to SEQ ID NO: 681786
aagaaacucacaaauuugc

SEQ ID NO: 681788 - RNA, 19 nt, Artificial Sequence
  Description of Artificial Sequence: Synthetic oligonucleotide
  Sense strand starting at position 425 of SEQ ID NO: 585968
acaagaaaugcugguaaau

SEQ ID NO: 681789 - RNA, 19 nt, Artificial Sequence
  Description of Artificial Sequence: Synthetic oligonucleotide
  Antisense strand to SEQ ID NO: 681788
auuuaccagcauuucuugu

SEQ ID NO: 681790 - RNA, 19 nt, Artificial Sequence
  Description of Artificial Sequence: Synthetic oligonucleotide
  Sense strand starting at position 434 of SEQ ID NO: 585968
gcugguaaauuaucaauga

SEQ ID NO: 681791 - RNA, 19 nt, Artificial Sequence
  Description of Artificial Sequence: Synthetic oligonucleotide
  Antisense strand to SEQ ID NO: 681790
ucauugauaauuuaccagc

SEQ ID NO: 681792 - RNA, 19 nt, Artificial Sequence
  Description of Artificial Sequence: Synthetic oligonucleotide
  Sense strand starting at position 571 of SEQ ID NO: 585968
gaaugaugagauuguugug

SEQ ID NO: 681793 - RNA, 19 nt, Artificial Sequence
  Description of Artificial Sequence: Synthetic oligonucleotide
  Antisense strand to SEQ ID NO: 681792
cacaacaaucucaucauuc

SEQ ID NO: 681794 - RNA, 19 nt, Artificial Sequence
  Description of Artificial Sequence: Synthetic oligonucleotide
  Sense strand starting at position 727 of SEQ ID NO: 585968
augggugggcacuauuaua

SEQ ID NO: 681795 - RNA, 19 nt, Artificial Sequence
  Description of Artificial Sequence: Synthetic oligonucleotide
  Antisense strand to SEQ ID NO: 681794
uauaauagugcccacccau

SEQ ID NO: 681796 - RNA, 19 nt, Artificial Sequence
  Description of Artificial Sequence: Synthetic oligonucleotide
  Sense strand starting at position 828 of SEQ ID NO: 585968
aggacuguaccuugaacua

SEQ ID NO: 681797 - RNA, 19 nt, Artificial Sequence
  Description of Artificial Sequence: Synthetic oligonucleotide
  Antisense strand to SEQ ID NO: 681796
uaguucaagguacaguccu

SEQ ID NO: 681798 - RNA, 19 nt, Artificial Sequence
  Description of Artificial Sequence: Synthetic oligonucleotide
  Sense strand starting at position 1121 of SEQ ID NO: 585968
gagguaucugcaggcauuu

SEQ ID NO: 681799 - RNA, 19 nt, Artificial Sequence
  Description of Artificial Sequence: Synthetic oligonucleotide
  Antisense strand to SEQ ID NO: 681798
aaaugccugcagauaccuc

SEQ ID NO: 681800 - RNA, 19 nt, Artificial Sequence
  Description of Artificial Sequence: Synthetic oligonucleotide
  Sense strand starting at position 1154 of SEQ ID NO: 585968
cuaguuagucacuacaauu

SEQ ID NO: 681801 - RNA, 19 nt, Artificial Sequence
  Description of Artificial Sequence: Synthetic oligonucleotide
  Antisense strand to SEQ ID NO: 681800
aauuguagugacuaacuag

SEQ ID NO: 681802 - RNA, 19 nt, Artificial Sequence
  Description of Artificial Sequence: Synthetic oligonucleotide
  Sense strand starting at position 1552 of SEQ ID NO: 585968
uuuccugaaguaugaaaua

SEQ ID NO: 681803 - RNA, 19 nt, Artificial Sequence
  Description of Artificial Sequence: Synthetic oligonucleotide
  Antisense strand to SEQ ID NO: 681802
uauuucauacuucaggaaa

SEQ ID NO: 681804 - RNA, 19 nt, Artificial Sequence
  Description of Artificial Sequence: Synthetic oligonucleotide
  Sense strand starting at position 1654 of SEQ ID NO: 585968
accuuaaaguguguauaaa

SEQ ID NO: 681805 - RNA, 19 nt, Artificial Sequence
  Description of Artificial Sequence: Synthetic oligonucleotide
  Antisense strand to SEQ ID NO: 681804
uuuauacacacuuuaaggu

SEQ ID NO: 681806 - RNA, 19 nt, Artificial Sequence
  Description of Artificial Sequence: Synthetic oligonucleotide
  Sense strand starting at position 1655 of SEQ ID NO: 585968
ccuuaaaguguguauaaag

SEQ ID NO: 681807 - RNA, 19 nt, Artificial Sequence
  Description of Artificial Sequence: Synthetic oligonucleotide
  Antisense strand to SEQ ID NO: 681806
cuuuauacacacuuuaagg

SEQ ID NO: 681808 - RNA, 19 nt, Artificial Sequence
  Description of Artificial Sequence: Synthetic oligonucleotide
  Sense strand starting at position 1682 of SEQ ID NO: 585968
auucuuuauguaggagaua

SEQ ID NO: 681809 - RNA, 19 nt, Artificial Sequence
  Description of Artificial Sequence: Synthetic oligonucleotide
  Antisense strand to SEQ ID NO: 681808
uaucuccuacauaaagaau

SEQ ID NO: 681810 - RNA, 19 nt, Artificial Sequence
  Description of Artificial Sequence: Synthetic oligonucleotide
  Sense strand starting at position 1887 of SEQ ID NO: 585968
gugugcagggcgagacaua

SEQ ID NO: 681811 - RNA, 19 nt, Artificial Sequence
  Description of Artificial Sequence: Synthetic oligonucleotide
  Antisense strand to SEQ ID NO: 681810
uaugucucgcccugcacac

SEQ ID NO: 681812 - RNA, 19 nt, Artificial Sequence
  Description of Artificial Sequence: Synthetic oligonucleotide
  Sense strand starting at position 1898 of SEQ ID NO: 585968
gagacauagugcuugauag

SEQ ID NO: 681813 - RNA, 19 nt, Artificial Sequence
  Description of Artificial Sequence: Synthetic oligonucleotide
  Antisense strand to SEQ ID NO: 681812
cuaucaagcacuaugucuc

SEQ ID NO: 681814 - RNA, 19 nt, Artificial Sequence
  Description of Artificial Sequence: Synthetic oligonucleotide
  Sense strand starting at position 1899 of SEQ ID NO: 585968
agacauagugcuugauaga

SEQ ID NO: 681815 - RNA, 19 nt, Artificial Sequence
  Description of Artificial Sequence: Synthetic oligonucleotide
  Antisense strand to SEQ ID NO: 681814
ucuaucaagcacuaugucu

SEQ ID NO: 681816 - RNA, 19 nt, Artificial Sequence
  Description of Artificial Sequence: Synthetic oligonucleotide
  Sense strand starting at position 1900 of SEQ ID NO: 585968
gacauagugcuugauagau

SEQ ID NO: 681817 - RNA, 19 nt, Artificial Sequence
  Description of Artificial Sequence: Synthetic oligonucleotide
  Antisense strand to SEQ ID NO: 681816
aucuaucaagcacuauguc

SEQ ID NO: 681818 - RNA, 19 nt, Artificial Sequence
  Description of Artificial Sequence: Synthetic oligonucleotide
  Sense strand starting at position 1906 of SEQ ID NO: 585968
gugcuugauagaugaagaa

SEQ ID NO: 681819 - RNA, 19 nt, Artificial Sequence
  Description of Artificial Sequence: Synthetic oligonucleotide
  Antisense strand to SEQ ID NO: 681818
uucuucaucuaucaagcac

SEQ ID NO: 681820 - RNA, 19 nt, Artificial Sequence
  Description of Artificial Sequence: Synthetic oligonucleotide
  Sense strand starting at position 2087 of SEQ ID NO: 585968
gaacaacaggauugucuua

SEQ ID NO: 681821 - RNA, 19 nt, Artificial Sequence
  Description of Artificial Sequence: Synthetic oligonucleotide
  Antisense strand to SEQ ID NO: 681820
uaagacaauccuguuguuc

SEQ ID NO: 681822 - RNA, 19 nt, Artificial Sequence
  Description of Artificial Sequence: Synthetic oligonucleotide
  Sense strand starting at position 2089 of SEQ ID NO: 585968
acaacaggauugucuuaua

SEQ ID NO: 681823 - RNA, 19 nt, Artificial Sequence
  Description of Artificial Sequence: Synthetic oligonucleotide
  Antisense strand to SEQ ID NO: 681822
uauaagacaauccuguugu

SEQ ID NO: 681824 - RNA, 19 nt, Artificial Sequence
  Description of Artificial Sequence: Synthetic oligonucleotide
  Sense strand starting at position 2189 of SEQ ID NO: 585968
ugaagucagaccugaagca

SEQ ID NO: 681825 - RNA, 19 nt, Artificial Sequence
  Description of Artificial Sequence: Synthetic oligonucleotide
  Antisense strand to SEQ ID NO: 681824
ugcuucaggucugacuuca

SEQ ID NO: 681826 - RNA, 19 nt, Artificial Sequence
  Description of Artificial Sequence: Synthetic oligonucleotide
  Sense strand starting at position 2234 of SEQ ID NO: 585968
gagggaguucaagaguggu

SEQ ID NO: 681827 - RNA, 19 nt, Artificial Sequence
  Description of Artificial Sequence: Synthetic oligonucleotide
  Antisense strand to SEQ ID NO: 681826
accacucuugaacucccuc

SEQ ID NO: 681828 - RNA, 19 nt, Artificial Sequence
  Description of Artificial Sequence: Synthetic oligonucleotide
  Sense strand starting at position 2301 of SEQ ID NO: 585968
uucgcaauccaagauagau

SEQ ID NO: 681829 - RNA, 19 nt, Artificial Sequence
  Description of Artificial Sequence: Synthetic oligonucleotide
  Antisense strand to SEQ ID NO: 681828
aucuaucuuggauugcgaa

SEQ ID NO: 681830 - RNA, 19 nt, Artificial Sequence
  Description of Artificial Sequence: Synthetic oligonucleotide
  Sense strand starting at position 2343 of SEQ ID NO: 585968
uuggauugauuguuguaag

SEQ ID NO: 681831 - RNA, 19 nt, Artificial Sequence
  Description of Artificial Sequence: Synthetic oligonucleotide
  Antisense strand to SEQ ID NO: 681830
cuuacaacaaucaauccaa

SEQ ID NO: 681832 - RNA, 19 nt, Artificial Sequence
  Description of Artificial Sequence: Synthetic oligonucleotide
  Sense strand starting at position 2377 of SEQ ID NO: 585968
aucagcaaucuguagguaa

SEQ ID NO: 681833 - RNA, 19 nt, Artificial Sequence
  Description of Artificial Sequence: Synthetic oligonucleotide
  Antisense strand to SEQ ID NO: 681832
uuaccuacagauugcugau

SEQ ID NO: 681834 - RNA, 19 nt, Artificial Sequence
  Description of Artificial Sequence: Synthetic oligonucleotide
  Sense strand starting at position 2546 of SEQ ID NO: 585968
gagugauagaaugggcaau

SEQ ID NO: 681835 - RNA, 19 nt, Artificial Sequence
  Description of Artificial Sequence: Synthetic oligonucleotide
  Antisense strand to SEQ ID NO: 681834
auugcccauucuaucacuc

SEQ ID NO: 681836 - RNA, 19 nt, Artificial Sequence
  Description of Artificial Sequence: Synthetic oligonucleotide
  Sense strand starting at position 2547 of SEQ ID NO: 585968
agugauagaaugggcaaua

SEQ ID NO: 681837 - RNA, 19 nt, Artificial Sequence
  Description of Artificial Sequence: Synthetic oligonucleotide
  Antisense strand to SEQ ID NO: 681836
uauugcccauucuaucacu

SEQ ID NO: 681838 - RNA, 19 nt, Artificial Sequence
  Description of Artificial Sequence: Synthetic oligonucleotide
  Sense strand starting at position 2548 of SEQ ID NO: 585968
gugauagaaugggcaauau

SEQ ID NO: 681839 - RNA, 19 nt, Artificial Sequence
  Description of Artificial Sequence: Synthetic oligonucleotide
  Antisense strand to SEQ ID NO: 681838
auauugcccauucuaucac

SEQ ID NO: 681840 - RNA, 19 nt, Artificial Sequence
  Description of Artificial Sequence: Synthetic oligonucleotide
  Sense strand starting at position 2668 of SEQ ID NO: 585968
ugagacguaagcuauugaa

SEQ ID NO: 681841 - RNA, 19 nt, Artificial Sequence
  Description of Artificial Sequence: Synthetic oligonucleotide
  Antisense strand to SEQ ID NO: 681840
uucaauagcuuacgucuca

SEQ ID NO: 681842 - RNA, 19 nt, Artificial Sequence
  Description of Artificial Sequence: Synthetic oligonucleotide
  Sense strand starting at position 2832 of SEQ ID NO: 585968
auaguuugaguccauuagu

SEQ ID NO: 681843 - RNA, 19 nt, Artificial Sequence
  Description of Artificial Sequence: Synthetic oligonucleotide
  Antisense strand to SEQ ID NO: 681842
acuaauggacucaaacuau

SEQ ID NO: 681844 - RNA, 19 nt, Artificial Sequence
  Description of Artificial Sequence: Synthetic oligonucleotide
  Sense strand starting at position 2913 of SEQ ID NO: 585968
ugugguguaguugaaagaa

SEQ ID NO: 681845 - RNA, 19 nt, Artificial Sequence
  Description of Artificial Sequence: Synthetic oligonucleotide
  Antisense strand to SEQ ID NO: 681844
uucuuucaacuacaccaca

SEQ ID NO: 681846 - RNA, 19 nt, Artificial Sequence
  Description of Artificial Sequence: Synthetic oligonucleotide
  Sense strand starting at position 3136 of SEQ ID NO: 585968
guuacuauagguuauucuu

SEQ ID NO: 681847 - RNA, 19 nt, Artificial Sequence
  Description of Artificial Sequence: Synthetic oligonucleotide
  Antisense strand to SEQ ID NO: 681846
aagaauaaccuauaguaac

SEQ ID NO: 681848 - RNA, 19 nt, Artificial Sequence
  Description of Artificial Sequence: Synthetic oligonucleotide
  Sense strand starting at position 3149 of SEQ ID NO: 585968
auucuugugguuggauaaa

SEQ ID NO: 681849 - RNA, 19 nt, Artificial Sequence
  Description of Artificial Sequence: Synthetic oligonucleotide
  Antisense strand to SEQ ID NO: 681848
uuuauccaaccacaagaau

SEQ ID NO: 681850 - RNA, 19 nt, Artificial Sequence
  Description of Artificial Sequence: Synthetic oligonucleotide
  Sense strand starting at position 3214 of SEQ ID NO: 585968
guucuaugacacuaugauc

SEQ ID NO: 681851 - RNA, 19 nt, Artificial Sequence
  Description of Artificial Sequence: Synthetic oligonucleotide
  Antisense strand to SEQ ID NO: 681850
gaucauagugucauagaac

SEQ ID NO: 681852 - RNA, 19 nt, Artificial Sequence
  Description of Artificial Sequence: Synthetic oligonucleotide
  Sense strand starting at position 3432 of SEQ ID NO: 585968
gagguugagaaauguauuc

SEQ ID NO: 681853 - RNA, 19 nt, Artificial Sequence
  Description of Artificial Sequence: Synthetic oligonucleotide
  Antisense strand to SEQ ID NO: 681852
gaauacauuucucaaccuc

SEQ ID NO: 681854 - RNA, 19 nt, Artificial Sequence
  Description of Artificial Sequence: Synthetic oligonucleotide
  Sense strand starting at position 3611 of SEQ ID NO: 585968
ggucaauuugugggcaauc

SEQ ID NO: 681855 - RNA, 19 nt, Artificial Sequence
  Description of Artificial Sequence: Synthetic oligonucleotide
  Antisense strand to SEQ ID NO: 681854
gauugcccacaaauugacc

SEQ ID NO: 681856 - RNA, 19 nt, Artificial Sequence
  Description of Artificial Sequence: Synthetic oligonucleotide
  Sense strand starting at position 3629 of SEQ ID NO: 585968
ccuaguucugaguaagaua

SEQ ID NO: 681857 - RNA, 19 nt, Artificial Sequence
  Description of Artificial Sequence: Synthetic oligonucleotide
  Antisense strand to SEQ ID NO: 681856
uaucuuacucagaacuagg

SEQ ID NO: 681858 - RNA, 19 nt, Artificial Sequence
  Description of Artificial Sequence: Synthetic oligonucleotide
  Sense strand starting at position 3761 of SEQ ID NO: 585968
gagaauucgggaugucauu

SEQ ID NO: 681859 - RNA, 19 nt, Artificial Sequence
  Description of Artificial Sequence: Synthetic oligonucleotide
  Antisense strand to SEQ ID NO: 681858
aaugacaucccgaauucuc

SEQ ID NO: 681860 - RNA, 19 nt, Artificial Sequence
  Description of Artificial Sequence: Synthetic oligonucleotide
  Sense strand starting at position 3771 of SEQ ID NO: 585968
gaugucauuggauguauua

SEQ ID NO: 681861 - RNA, 19 nt, Artificial Sequence
  Description of Artificial Sequence: Synthetic oligonucleotide
  Antisense strand to SEQ ID NO: 681860
uaauacauccaaugacauc

SEQ ID NO: 681862 - RNA, 19 nt, Artificial Sequence
  Description of Artificial Sequence: Synthetic oligonucleotide
  Sense strand starting at position 3773 of SEQ ID NO: 585968
ugucauuggauguauuaga

SEQ ID NO: 681863 - RNA, 19 nt, Artificial Sequence
  Description of Artificial Sequence: Synthetic oligonucleotide
  Antisense strand to SEQ ID NO: 681862
ucuaauacauccaaugaca

SEQ ID NO: 681864 - RNA, 19 nt, Artificial Sequence
  Description of Artificial Sequence: Synthetic oligonucleotide
  Sense strand starting at position 3924 of SEQ ID NO: 585968
agcuguacucaucaucaca

SEQ ID NO: 681865 - RNA, 19 nt, Artificial Sequence
  Description of Artificial Sequence: Synthetic oligonucleotide
  Antisense strand to SEQ ID NO: 681864
ugugaugaugaguacagcu

SEQ ID NO: 681866 - RNA, 19 nt, Artificial Sequence
  Description of Artificial Sequence: Synthetic oligonucleotide
  Sense strand starting at position 55 of SEQ ID NO: 585969
auaacuugugcagagcuaa

SEQ ID NO: 681867 - RNA, 19 nt, Artificial Sequence
  Description of Artificial Sequence: Synthetic oligonucleotide
  Antisense strand to SEQ ID NO: 681866
uuagcucugcacaaguuau

SEQ ID NO: 681868 - RNA, 19 nt, Artificial Sequence
  Description of Artificial Sequence: Synthetic oligonucleotide
  Sense strand starting at position 440 of SEQ ID NO: 585969
agaaaucucucaguaauug

SEQ ID NO: 681869 - RNA, 19 nt, Artificial Sequence
  Description of Artificial Sequence: Synthetic oligonucleotide
  Antisense strand to SEQ ID NO: 681868
caauuacugagagauuucu

SEQ ID NO: 681870 - RNA, 19 nt, Artificial Sequence
  Description of Artificial Sequence: Synthetic oligonucleotide
  Sense strand starting at position 461 of SEQ ID NO: 585969
auuaauacgaggugucaga

SEQ ID NO: 681871 - RNA, 19 nt, Artificial Sequence
  Description of Artificial Sequence: Synthetic oligonucleotide
  Antisense strand to SEQ ID NO: 681870
ucugacaccucguauuaau

SEQ ID NO: 681872 - RNA, 19 nt, Artificial Sequence
  Description of Artificial Sequence: Synthetic oligonucleotide
  Sense strand starting at position 1030 of SEQ ID NO: 585969
cacaguaaguuuguggaau

SEQ ID NO: 681873 - RNA, 19 nt, Artificial Sequence
  Description of Artificial Sequence: Synthetic oligonucleotide
  Antisense strand to SEQ ID NO: 681872
auuccacaaacuuacugug

SEQ ID NO: 681874 - RNA, 19 nt, Artificial Sequence
  Description of Artificial Sequence: Synthetic oligonucleotide
  Sense strand starting at position 1102 of SEQ ID NO: 585969
gggaacacuuaugucuuaa

SEQ ID NO: 681875 - RNA, 19 nt, Artificial Sequence
  Description of Artificial Sequence: Synthetic oligonucleotide
  Antisense strand to SEQ ID NO: 681874
uuaagacauaaguguuccc

SEQ ID NO: 681876 - RNA, 19 nt, Artificial Sequence
  Description of Artificial Sequence: Synthetic oligonucleotide
  Sense strand starting at position 1268 of SEQ ID NO: 585969
uuaaguaagcauuagugua

SEQ ID NO: 681877 - RNA, 19 nt, Artificial Sequence
  Description of Artificial Sequence: Synthetic oligonucleotide
  Antisense strand to SEQ ID NO: 681876
uacacuaaugcuuacuuaa

SEQ ID NO: 681878 - RNA, 19 nt, Artificial Sequence
  Description of Artificial Sequence: Synthetic oligonucleotide
  Sense strand starting at position 1339 of SEQ ID NO: 585969
ggauaagauaucggccauc

SEQ ID NO: 681879 - RNA, 19 nt, Artificial Sequence
  Description of Artificial Sequence: Synthetic oligonucleotide
  Antisense strand to SEQ ID NO: 681878
gauggccgauaucuuaucc

SEQ ID NO: 681880 - RNA, 19 nt, Artificial Sequence
  Description of Artificial Sequence: Synthetic oligonucleotide
  Sense strand starting at position 1342 of SEQ ID NO: 585969
uaagauaucggccaucaug

SEQ ID NO: 681881 - RNA, 19 nt, Artificial Sequence
  Description of Artificial Sequence: Synthetic oligonucleotide
  Antisense strand to SEQ ID NO: 681880
caugauggccgauaucuua

SEQ ID NO: 681882 - RNA, 19 nt, Artificial Sequence
  Description of Artificial Sequence: Synthetic oligonucleotide
  Sense strand starting at position 1345 of SEQ ID NO: 585969
gauaucggccaucauguua

SEQ ID NO: 681883 - RNA, 19 nt, Artificial Sequence
  Description of Artificial Sequence: Synthetic oligonucleotide
  Antisense strand to SEQ ID NO: 681882
uaacaugauggccgauauc

SEQ ID NO: 681884 - RNA, 19 nt, Artificial Sequence
  Description of Artificial Sequence: Synthetic oligonucleotide
  Sense strand starting at position 1360 of SEQ ID NO: 585969
guuacaugaccauagcuau

SEQ ID NO: 681885 - RNA, 19 nt, Artificial Sequence
  Description of Artificial Sequence: Synthetic oligonucleotide
  Antisense strand to SEQ ID NO: 681884
auagcuauggucauguaac

SEQ ID NO: 681886 - RNA, 19 nt, Artificial Sequence
  Description of Artificial Sequence: Synthetic oligonucleotide
  Sense strand starting at position 1378 of SEQ ID NO: 585969
uuuauagaggugugaguaa

SEQ ID NO: 681887 - RNA, 19 nt, Artificial Sequence
  Description of Artificial Sequence: Synthetic oligonucleotide
  Antisense strand to SEQ ID NO: 681886
uuacucacaccucuauaaa

SEQ ID NO: 681888 - RNA, 19 nt, Artificial Sequence
  Description of Artificial Sequence: Synthetic oligonucleotide
  Sense strand starting at position 1413 of SEQ ID NO: 585969
gggccuuugguauagcaga

SEQ ID NO: 681889 - RNA, 19 nt, Artificial Sequence
  Description of Artificial Sequence: Synthetic oligonucleotide
  Antisense strand to SEQ ID NO: 681888
ucugcuauaccaaaggccc

SEQ ID NO: 681890 - RNA, 19 nt, Artificial Sequence
  Description of Artificial Sequence: Synthetic oligonucleotide
  Sense strand starting at position 1420 of SEQ ID NO: 585969
ugguauagcagagaacagu

SEQ ID NO: 681891 - RNA, 19 nt, Artificial Sequence
  Description of Artificial Sequence: Synthetic oligonucleotide
  Antisense strand to SEQ ID NO: 681890
acuguucucugcuauacca

SEQ ID NO: 681892 - RNA, 19 nt, Artificial Sequence
  Description of Artificial Sequence: Synthetic oligonucleotide
  Sense strand starting at position 1531 of SEQ ID NO: 585969
uguauagaaucauugacca

SEQ ID NO: 681893 - RNA, 19 nt, Artificial Sequence
  Description of Artificial Sequence: Synthetic oligonucleotide
  Antisense strand to SEQ ID NO: 681892
uggucaaugauucuauaca

SEQ ID NO: 681894 - RNA, 19 nt, Artificial Sequence
  Description of Artificial Sequence: Synthetic oligonucleotide
  Sense strand starting at position 1539 of SEQ ID NO: 585969
aucauugaccaaggcaauu

SEQ ID NO: 681895 - RNA, 19 nt, Artificial Sequence
  Description of Artificial Sequence: Synthetic oligonucleotide
  Antisense strand to SEQ ID NO: 681894
aauugccuuggucaaugau

SEQ ID NO: 681896 - RNA, 19 nt, Artificial Sequence
  Description of Artificial Sequence: Synthetic oligonucleotide
  Sense strand starting at position 1550 of SEQ ID NO: 585969
aggcaauuaccuuaaagca

SEQ ID NO: 681897 - RNA, 19 nt, Artificial Sequence
  Description of Artificial Sequence: Synthetic oligonucleotide
  Antisense strand to SEQ ID NO: 681896
ugcuuuaagguaauugccu

SEQ ID NO: 681898 - RNA, 19 nt, Artificial Sequence
  Description of Artificial Sequence: Synthetic oligonucleotide
  Sense strand starting at position 1944 of SEQ ID NO: 585969
gccucaucucccuaggacu

SEQ ID NO: 681899 - RNA, 19 nt, Artificial Sequence
  Description of Artificial Sequence: Synthetic oligonucleotide
  Antisense strand to SEQ ID NO: 681898
aguccuagggagaugaggc

SEQ ID NO: 681900 - RNA, 19 nt, Artificial Sequence
  Description of Artificial Sequence: Synthetic oligonucleotide
  Sense strand starting at position 2169 of SEQ ID NO: 585969
aguugaaaguaaucuuauc

SEQ ID NO: 681901 - RNA, 19 nt, Artificial Sequence
  Description of Artificial Sequence: Synthetic oligonucleotide
  Antisense strand to SEQ ID NO: 681900
gauaagauuacuuucaacu

SEQ ID NO: 681902 - RNA, 19 nt, Artificial Sequence
  Description of Artificial Sequence: Synthetic oligonucleotide
  Sense strand starting at position 2179 of SEQ ID NO: 585969
aaucuuauccgugagagcu

SEQ ID NO: 681903 - RNA, 19 nt, Artificial Sequence
  Description of Artificial Sequence: Synthetic oligonucleotide
  Antisense strand to SEQ ID NO: 681902
agcucucacggauaagauu

SEQ ID NO: 681904 - RNA, 19 nt, Artificial Sequence
  Description of Artificial Sequence: Synthetic oligonucleotide
  Sense strand starting at position 2214 of SEQ ID NO: 585969
gcucuuaaugcucagaaca

SEQ ID NO: 681905 - RNA, 19 nt, Artificial Sequence
  Description of Artificial Sequence: Synthetic oligonucleotide
  Antisense strand to SEQ ID NO: 681904
uguucugagcauuaagagc

SEQ ID NO: 681906 - RNA, 19 nt, Artificial Sequence
  Description of Artificial Sequence: Synthetic oligonucleotide
  Sense strand starting at position 2263 of SEQ ID NO: 585969
gucccaaaugucuaucaca

SEQ ID NO: 681907 - RNA, 19 nt, Artificial Sequence
  Description of Artificial Sequence: Synthetic oligonucleotide
  Antisense strand to SEQ ID NO: 681906
ugugauagacauuugggac

SEQ ID NO: 681908 - RNA, 19 nt, Artificial Sequence
  Description of Artificial Sequence: Synthetic oligonucleotide
  Sense strand starting at position 2291 of SEQ ID NO: 585969
gaggguagucuugaguaau

SEQ ID NO: 681909 - RNA, 19 nt, Artificial Sequence
  Description of Artificial Sequence: Synthetic oligonucleotide
  Antisense strand to SEQ ID NO: 681908
auuacucaagacuacccuc

SEQ ID NO: 681910 - RNA, 19 nt, Artificial Sequence
  Description of Artificial Sequence: Synthetic oligonucleotide
  Sense strand starting at position 2569 of SEQ ID NO: 585969
ugcauuuauccaugcagua

SEQ ID NO: 681911 - RNA, 19 nt, Artificial Sequence
  Description of Artificial Sequence: Synthetic oligonucleotide
  Antisense strand to SEQ ID NO: 681910
uacugcauggauaaaugca

SEQ ID NO: 681912 - RNA, 19 nt, Artificial Sequence
  Description of Artificial Sequence: Synthetic oligonucleotide
  Sense strand starting at position 2603 of SEQ ID NO: 585969
ugacauaaaguuuaguagu

SEQ ID NO: 681913 - RNA, 19 nt, Artificial Sequence
  Description of Artificial Sequence: Synthetic oligonucleotide
  Antisense strand to SEQ ID NO: 681912
acuacuaaacuuuauguca

SEQ ID NO: 681914 - RNA, 19 nt, Artificial Sequence
  Description of Artificial Sequence: Synthetic oligonucleotide
  Sense strand starting at position 2613 of SEQ ID NO: 585969
uuuaguaguccacagccaa

SEQ ID NO: 681915 - RNA, 19 nt, Artificial Sequence
  Description of Artificial Sequence: Synthetic oligonucleotide
  Antisense strand to SEQ ID NO: 681914
uuggcuguggacuacuaaa

SEQ ID NO: 681916 - RNA, 19 nt, Artificial Sequence
  Description of Artificial Sequence: Synthetic oligonucleotide
  Sense strand starting at position 2739 of SEQ ID NO: 585969
acagguguuaaugagcaaa

SEQ ID NO: 681917 - RNA, 19 nt, Artificial Sequence
  Description of Artificial Sequence: Synthetic oligonucleotide
  Antisense strand to SEQ ID NO: 681916
uuugcucauuaacaccugu

SEQ ID NO: 681918 - RNA, 19 nt, Artificial Sequence
  Description of Artificial Sequence: Synthetic oligonucleotide
  Sense strand starting at position 2790 of SEQ ID NO: 585969
aggagaaucgaagggcauu

SEQ ID NO: 681919 - RNA, 19 nt, Artificial Sequence
  Description of Artificial Sequence: Synthetic oligonucleotide
  Antisense strand to SEQ ID NO: 681918
aaugcccuucgauucuccu

SEQ ID NO: 681920 - RNA, 19 nt, Artificial Sequence
  Description of Artificial Sequence: Synthetic oligonucleotide
  Sense strand starting at position 2796 of SEQ ID NO: 585969
aucgaagggcauugauaau

SEQ ID NO: 681921 - RNA, 19 nt, Artificial Sequence
  Description of Artificial Sequence: Synthetic oligonucleotide
  Antisense strand to SEQ ID NO: 681920
auuaucaaugcccuucgau

SEQ ID NO: 681922 - RNA, 19 nt, Artificial Sequence
  Description of Artificial Sequence: Synthetic oligonucleotide
  Sense strand starting at position 2823 of SEQ ID NO: 585969
cuagccaaucugugaauaa

SEQ ID NO: 681923 - RNA, 19 nt, Artificial Sequence
  Description of Artificial Sequence: Synthetic oligonucleotide
  Antisense strand to SEQ ID NO: 681922
uuauucacagauuggcuag

SEQ ID NO: 681924 - RNA, 19 nt, Artificial Sequence
  Description of Artificial Sequence: Synthetic oligonucleotide
  Sense strand starting at position 2834 of SEQ ID NO: 585969
gugaauaaucaaggguuga

SEQ ID NO: 681925 - RNA, 19 nt, Artificial Sequence
  Description of Artificial Sequence: Synthetic oligonucleotide
  Antisense strand to SEQ ID NO: 681924
ucaacccuugauuauucac

SEQ ID NO: 681926 - RNA, 19 nt, Artificial Sequence
  Description of Artificial Sequence: Synthetic oligonucleotide
  Sense strand starting at position 3322 of SEQ ID NO: 585969
gcccacuagcgggaugaaa

SEQ ID NO: 681927 - RNA, 19 nt, Artificial Sequence
  Description of Artificial Sequence: Synthetic oligonucleotide
  Antisense strand to SEQ ID NO: 681926
uuucaucccgcuagugggc

SEQ ID NO: 681928 - RNA, 19 nt, Artificial Sequence
  Description of Artificial Sequence: Synthetic oligonucleotide
  Sense strand starting at position 3383 of SEQ ID NO: 585969
ggucuaaggagguauccua

SEQ ID NO: 681929 - RNA, 19 nt, Artificial Sequence
  Description of Artificial Sequence: Synthetic oligonucleotide
  Antisense strand to SEQ ID NO: 681928
uaggauaccuccuuagacc

SEQ ID NO: 681930 - RNA, 19 nt, Artificial Sequence
  Description of Artificial Sequence: Synthetic oligonucleotide
  Sense strand starting at position 3529 of SEQ ID NO: 585969
auuguaguuaacugaagga

SEQ ID NO: 681931 - RNA, 19 nt, Artificial Sequence
  Description of Artificial Sequence: Synthetic oligonucleotide
  Antisense strand to SEQ ID NO: 681930
uccuucaguuaacuacaau

SEQ ID NO: 681932 - RNA, 19 nt, Artificial Sequence
  Description of Artificial Sequence: Synthetic oligonucleotide
  Sense strand starting at position 3699 of SEQ ID NO: 585969
uauugauguuagucuuaag

SEQ ID NO: 681933 - RNA, 19 nt, Artificial Sequence
  Description of Artificial Sequence: Synthetic oligonucleotide
  Antisense strand to SEQ ID NO: 681932
cuuaagacuaacaucaaua

SEQ ID NO: 681934 - RNA, 19 nt, Artificial Sequence
  Description of Artificial Sequence: Synthetic oligonucleotide
  Sense strand starting at position 3813 of SEQ ID NO: 585969
ucaaaccuuucugugagau

SEQ ID NO: 681935 - RNA, 19 nt, Artificial Sequence
  Description of Artificial Sequence: Synthetic oligonucleotide
  Antisense strand to SEQ ID NO: 681934
aucucacagaaagguuuga

SEQ ID NO: 681936 - RNA, 19 nt, Artificial Sequence
  Description of Artificial Sequence: Synthetic oligonucleotide
  Sense strand starting at position 3814 of SEQ ID NO: 585969
caaaccuuucugugagaug

SEQ ID NO: 681937 - RNA, 19 nt, Artificial Sequence
  Description of Artificial Sequence: Synthetic oligonucleotide
  Antisense strand to SEQ ID NO: 681936
caucucacagaaagguuug

SEQ ID NO: 681938 - RNA, 19 nt, Artificial Sequence
  Description of Artificial Sequence: Synthetic oligonucleotide
  Sense strand starting at position 3831 of SEQ ID NO: 585969
ugaguugaugaaugucauu

SEQ ID NO: 681939 - RNA, 19 nt, Artificial Sequence
  Description of Artificial Sequence: Synthetic oligonucleotide
  Antisense strand to SEQ ID NO: 681938
aaugacauucaucaacuca

SEQ ID NO: 681940 - RNA, 19 nt, Artificial Sequence
  Description of Artificial Sequence: Synthetic oligonucleotide
  Sense strand starting at position 3836 of SEQ ID NO: 585969
ugaugaaugucauuaggca

SEQ ID NO: 681941 - RNA, 19 nt, Artificial Sequence
  Description of Artificial Sequence: Synthetic oligonucleotide
  Antisense strand to SEQ ID NO: 681940
ugccuaaugacauucauca

SEQ ID NO: 681942 - RNA, 19 nt, Artificial Sequence
  Description of Artificial Sequence: Synthetic oligonucleotide
  Sense strand starting at position 3844 of SEQ ID NO: 585969
gucauuaggcagugagaaa

SEQ ID NO: 681943 - RNA, 19 nt, Artificial Sequence
  Description of Artificial Sequence: Synthetic oligonucleotide
  Antisense strand to SEQ ID NO: 681942
uuucucacugccuaaugac

SEQ ID NO: 681944 - RNA, 19 nt, Artificial Sequence
  Description of Artificial Sequence: Synthetic oligonucleotide
  Sense strand starting at position 3857 of SEQ ID NO: 585969
gagaaauuggcaugguucu

SEQ ID NO: 681945 - RNA, 19 nt, Artificial Sequence
  Description of Artificial Sequence: Synthetic oligonucleotide
  Antisense strand to SEQ ID NO: 681944
agaaccaugccaauuucuc

SEQ ID NO: 681946 - RNA, 19 nt, Artificial Sequence
  Description of Artificial Sequence: Synthetic oligonucleotide
  Sense strand starting at position 36 of SEQ ID NO: 585970
acagaucugccugaccuua

SEQ ID NO: 681947 - RNA, 19 nt, Artificial Sequence
  Description of Artificial Sequence: Synthetic oligonucleotide
  Antisense strand to SEQ ID NO: 681946
uaaggucaggcagaucugu

SEQ ID NO: 681948 - RNA, 19 nt, Artificial Sequence
  Description of Artificial Sequence: Synthetic oligonucleotide
  Sense strand starting at position 81 of SEQ ID NO: 585970
ggaguuuaaaggugaaauc

SEQ ID NO: 681949 - RNA, 19 nt, Artificial Sequence
  Description of Artificial Sequence: Synthetic oligonucleotide
  Antisense strand to SEQ ID NO: 681948
gauuucaccuuuaaacucc

SEQ ID NO: 681950 - RNA, 19 nt, Artificial Sequence
  Description of Artificial Sequence: Synthetic oligonucleotide
  Sense strand starting at position 286 of SEQ ID NO: 585970
cugggagacuucucuauca

SEQ ID NO: 681951 - RNA, 19 nt, Artificial Sequence
  Description of Artificial Sequence: Synthetic oligonucleotide
  Antisense strand to SEQ ID NO: 681950
ugauagagaagucucccag

SEQ ID NO: 681952 - RNA, 19 nt, Artificial Sequence
  Description of Artificial Sequence: Synthetic oligonucleotide
  Sense strand starting at position 367 of SEQ ID NO: 585970
agcccuaaccucugaaguu

SEQ ID NO: 681953 - RNA, 19 nt, Artificial Sequence
  Description of Artificial Sequence: Synthetic oligonucleotide
  Antisense strand to SEQ ID NO: 681952
aacuucagagguuagggcu

SEQ ID NO: 681954 - RNA, 19 nt, Artificial Sequence
  Description of Artificial Sequence: Synthetic oligonucleotide
  Sense strand starting at position 431 of SEQ ID NO: 585970
gugggaguuacaggugacu

SEQ ID NO: 681955 - RNA, 19 nt, Artificial Sequence
  Description of Artificial Sequence: Synthetic oligonucleotide
  Antisense strand to SEQ ID NO: 681954
agucaccuguaacucccac

SEQ ID NO: 681956 - RNA, 19 nt, Artificial Sequence
  Description of Artificial Sequence: Synthetic oligonucleotide
  Sense strand starting at position 433 of SEQ ID NO: 585970
gggaguuacaggugacuga

SEQ ID NO: 681957 - RNA, 19 nt, Artificial Sequence
  Description of Artificial Sequence: Synthetic oligonucleotide
  Antisense strand to SEQ ID NO: 681956
ucagucaccuguaacuccc

SEQ ID NO: 681958 - RNA, 19 nt, Artificial Sequence
  Description of Artificial Sequence: Synthetic oligonucleotide
  Sense strand starting at position 437 of SEQ ID NO: 585970
guuacaggugacugaguuu

SEQ ID NO: 681959 - RNA, 19 nt, Artificial Sequence
  Description of Artificial Sequence: Synthetic oligonucleotide
  Antisense strand to SEQ ID NO: 681958
aaacucagucaccuguaac

SEQ ID NO: 681960 - RNA, 19 nt, Artificial Sequence
  Description of Artificial Sequence: Synthetic oligonucleotide
  Sense strand starting at position 713 of SEQ ID NO: 585970
cccaaagucucaccauagu

SEQ ID NO: 681961 - RNA, 19 nt, Artificial Sequence
  Description of Artificial Sequence: Synthetic oligonucleotide
  Antisense strand to SEQ ID NO: 681960
acuauggugagacuuuggg

SEQ ID NO: 681962 - RNA, 19 nt, Artificial Sequence
  Description of Artificial Sequence: Synthetic oligonucleotide
  Sense strand starting at position 719 of SEQ ID NO: 585970
gucucaccauaguuaagua

SEQ ID NO: 681963 - RNA, 19 nt, Artificial Sequence
  Description of Artificial Sequence: Synthetic oligonucleotide
  Antisense strand to SEQ ID NO: 681962
uacuuaacuauggugagac

SEQ ID NO: 681964 - RNA, 19 nt, Artificial Sequence
  Description of Artificial Sequence: Synthetic oligonucleotide
  Sense strand starting at position 819 of SEQ ID NO: 585970
uagagaaguccuggcccaa

SEQ ID NO: 681965 - RNA, 19 nt, Artificial Sequence
  Description of Artificial Sequence: Synthetic oligonucleotide
  Antisense strand to SEQ ID NO: 681964
uugggccaggacuucucua

SEQ ID NO: 681966 - RNA, 19 nt, Artificial Sequence
  Description of Artificial Sequence: Synthetic oligonucleotide
  Sense strand starting at position 1008 of SEQ ID NO: 585970
ugcacuuguccaugaggag

SEQ ID NO: 681967 - RNA, 19 nt, Artificial Sequence
  Description of Artificial Sequence: Synthetic oligonucleotide
  Antisense strand to SEQ ID NO: 681966
cuccucauggacaagugca

SEQ ID NO: 681968 - RNA, 19 nt, Artificial Sequence
  Description of Artificial Sequence: Synthetic oligonucleotide
  Sense strand starting at position 1104 of SEQ ID NO: 585970
aaggcaguuguccaugacu

SEQ ID NO: 681969 - RNA, 19 nt, Artificial Sequence
  Description of Artificial Sequence: Synthetic oligonucleotide
  Antisense strand to SEQ ID NO: 681968
agucauggacaacugccuu

SEQ ID NO: 681970 - RNA, 19 nt, Artificial Sequence
  Description of Artificial Sequence: Synthetic oligonucleotide
  Sense strand starting at position 1113 of SEQ ID NO: 585970
guccaugacuuugcucaaa

SEQ ID NO: 681971 - RNA, 19 nt, Artificial Sequence
  Description of Artificial Sequence: Synthetic oligonucleotide
  Antisense strand to SEQ ID NO: 681970
uuugagcaaagucauggac

SEQ ID NO: 681972 - RNA, 19 nt, Artificial Sequence
  Description of Artificial Sequence: Synthetic oligonucleotide
  Sense strand starting at position 1115 of SEQ ID NO: 585970
ccaugacuuugcucaaagu

SEQ ID NO: 681973 - RNA, 19 nt, Artificial Sequence
  Description of Artificial Sequence: Synthetic oligonucleotide
  Antisense strand to SEQ ID NO: 681972
acuuugagcaaagucaugg

SEQ ID NO: 681974 - RNA, 19 nt, Artificial Sequence
  Description of Artificial Sequence: Synthetic oligonucleotide
  Sense strand starting at position 1383 of SEQ ID NO: 585970
cauggagagcugggaugau

SEQ ID NO: 681975 - RNA, 19 nt, Artificial Sequence
  Description of Artificial Sequence: Synthetic oligonucleotide
  Antisense strand to SEQ ID NO: 681974
aucaucccagcucuccaug

SEQ ID NO: 681976 - RNA, 19 nt, Artificial Sequence
  Description of Artificial Sequence: Synthetic oligonucleotide
  Sense strand starting at position 1464 of SEQ ID NO: 585970
uuugcugucccauaguaga

SEQ ID NO: 681977 - RNA, 19 nt, Artificial Sequence
  Description of Artificial Sequence: Synthetic oligonucleotide
  Antisense strand to SEQ ID NO: 681976
ucuacuaugggacagcaaa

SEQ ID NO: 681978 - RNA, 19 nt, Artificial Sequence
  Description of Artificial Sequence: Synthetic oligonucleotide
  Sense strand starting at position 1521 of SEQ ID NO: 585970
gguuuaacagauugucaac

SEQ ID NO: 681979 - RNA, 19 nt, Artificial Sequence
  Description of Artificial Sequence: Synthetic oligonucleotide
  Antisense strand to SEQ ID NO: 681978
guugacaaucuguuaaacc

SEQ ID NO: 681980 - RNA, 19 nt, Artificial Sequence
  Description of Artificial Sequence: Synthetic oligonucleotide
  Sense strand starting at position 1740 of SEQ ID NO: 585970
cccaauucuggguagagca

SEQ ID NO: 681981 - RNA, 19 nt, Artificial Sequence
  Description of Artificial Sequence: Synthetic oligonucleotide
  Antisense strand to SEQ ID NO: 681980
ugcucuacccagaauuggg

SEQ ID NO: 681982 - RNA, 19 nt, Artificial Sequence
  Description of Artificial Sequence: Synthetic oligonucleotide
  Sense strand starting at position 1875 of SEQ ID NO: 585970
uuccuugucuuaccugaga

SEQ ID NO: 681983 - RNA, 19 nt, Artificial Sequence
  Description of Artificial Sequence: Synthetic oligonucleotide
  Antisense strand to SEQ ID NO: 681982
ucucagguaagacaaggaa

SEQ ID NO: 681984 - RNA, 19 nt, Artificial Sequence
  Description of Artificial Sequence: Synthetic oligonucleotide
  Sense strand starting at position 2038 of SEQ ID NO: 585970
aggccauuccugggaguca

SEQ ID NO: 681985 - RNA, 19 nt, Artificial Sequence
  Description of Artificial Sequence: Synthetic oligonucleotide
  Antisense strand to SEQ ID NO: 681984
ugacucccaggaauggccu

SEQ ID NO: 681986 - RNA, 19 nt, Artificial Sequence
  Description of Artificial Sequence: Synthetic oligonucleotide
  Sense strand starting at position 2128 of SEQ ID NO: 585970
acucacuucucaguuaagu

SEQ ID NO: 681987 - RNA, 19 nt, Artificial Sequence
  Description of Artificial Sequence: Synthetic oligonucleotide
  Antisense strand to SEQ ID NO: 681986
acuuaacugagaagugagu

SEQ ID NO: 681988 - RNA, 19 nt, Artificial Sequence
  Description of Artificial Sequence: Synthetic oligonucleotide
  Sense strand starting at position 2137 of SEQ ID NO: 585970
ucaguuaaguuucuuugaa

SEQ ID NO: 681989 - RNA, 19 nt, Artificial Sequence
  Description of Artificial Sequence: Synthetic oligonucleotide
  Antisense strand to SEQ ID NO: 681988
uucaaagaaacuuaacuga

SEQ ID NO: 681990 - RNA, 19 nt, Artificial Sequence
  Description of Artificial Sequence: Synthetic oligonucleotide
  Sense strand starting at position 2139 of SEQ ID NO: 585970
aguuaaguuucuuugaacu

SEQ ID NO: 681991 - RNA, 19 nt, Artificial Sequence
  Description of Artificial Sequence: Synthetic oligonucleotide
  Antisense strand to SEQ ID NO: 681990
aguucaaagaaacuuaacu

SEQ ID NO: 681992 - RNA, 19 nt, Artificial Sequence
  Description of Artificial Sequence: Synthetic oligonucleotide
  Sense strand starting at position 2313 of SEQ ID NO: 585970
uccaguuuaguguagugaa

SEQ ID NO: 681993 - RNA, 19 nt, Artificial Sequence
  Description of Artificial Sequence: Synthetic oligonucleotide
  Antisense strand to SEQ ID NO: 681992
uucacuacacuaaacugga

SEQ ID NO: 681994 - RNA, 19 nt, Artificial Sequence
  Description of Artificial Sequence: Synthetic oligonucleotide
  Sense strand starting at position 2507 of SEQ ID NO: 585970
ucagcauugccacagacau

SEQ ID NO: 681995 - RNA, 19 nt, Artificial Sequence
  Description of Artificial Sequence: Synthetic oligonucleotide
  Antisense strand to SEQ ID NO: 681994
augucuguggcaaugcuga

SEQ ID NO: 681996 - RNA, 19 nt, Artificial Sequence
  Description of Artificial Sequence: Synthetic oligonucleotide
  Sense strand starting at position 2827 of SEQ ID NO: 585970
cagagauguccuuaaagca

SEQ ID NO: 681997 - RNA, 19 nt, Artificial Sequence
  Description of Artificial Sequence: Synthetic oligonucleotide
  Antisense strand to SEQ ID NO: 681996
ugcuuuaaggacaucucug

SEQ ID NO: 681998 - RNA, 19 nt, Artificial Sequence
  Description of Artificial Sequence: Synthetic oligonucleotide
  Sense strand starting at position 2900 of SEQ ID NO: 585970
gcuuuccaggucugagaag

SEQ ID NO: 681999 - RNA, 19 nt, Artificial Sequence
  Description of Artificial Sequence: Synthetic oligonucleotide
  Antisense strand to SEQ ID NO: 681998
cuucucagaccuggaaagc

SEQ ID NO: 682000 - RNA, 19 nt, Artificial Sequence
  Description of Artificial Sequence: Synthetic oligonucleotide
  Sense strand starting at position 3178 of SEQ ID NO: 585970
auugauugcuacucaagua

SEQ ID NO: 682001 - RNA, 19 nt, Artificial Sequence
  Description of Artificial Sequence: Synthetic oligonucleotide
  Antisense strand to SEQ ID NO: 682000
uacuugaguagcaaucaau

SEQ ID NO: 682002 - RNA, 19 nt, Artificial Sequence
  Description of Artificial Sequence: Synthetic oligonucleotide
  Sense strand starting at position 3213 of SEQ ID NO: 585970
guacuaucaugucuguaaa

SEQ ID NO: 682003 - RNA, 19 nt, Artificial Sequence
  Description of Artificial Sequence: Synthetic oligonucleotide
  Antisense strand to SEQ ID NO: 682002
uuuacagacaugauaguac

SEQ ID NO: 682004 - RNA, 19 nt, Artificial Sequence
  Description of Artificial Sequence: Synthetic oligonucleotide
  Sense strand starting at position 3215 of SEQ ID NO: 585970
acuaucaugucuguaaauu

SEQ ID NO: 682005 - RNA, 19 nt, Artificial Sequence
  Description of Artificial Sequence: Synthetic oligonucleotide
  Antisense strand to SEQ ID NO: 682004
aauuuacagacaugauagu

SEQ ID NO: 682006 - RNA, 19 nt, Artificial Sequence
  Description of Artificial Sequence: Synthetic oligonucleotide
  Sense strand starting at position 3216 of SEQ ID NO: 585970
cuaucaugucuguaaauua

SEQ ID NO: 682007 - RNA, 19 nt, Artificial Sequence
  Description of Artificial Sequence: Synthetic oligonucleotide
  Antisense strand to SEQ ID NO: 682006
uaauuuacagacaugauag

SEQ ID NO: 682008 - RNA, 19 nt, Artificial Sequence
  Description of Artificial Sequence: Synthetic oligonucleotide
  Sense strand starting at position 3361 of SEQ ID NO: 585970
agagaucauuuguagugga

SEQ ID NO: 682009 - RNA, 19 nt, Artificial Sequence
  Description of Artificial Sequence: Synthetic oligonucleotide
  Antisense strand to SEQ ID NO: 682008
uccacuacaaaugaucucu

SEQ ID NO: 682010 - RNA, 19 nt, Artificial Sequence
  Description of Artificial Sequence: Synthetic oligonucleotide
  Sense strand starting at position 3678 of SEQ ID NO: 585970
auauacuuuguguggagga

SEQ ID NO: 682011 - RNA, 19 nt, Artificial Sequence
  Description of Artificial Sequence: Synthetic oligonucleotide
  Antisense strand to SEQ ID NO: 682010
uccuccacacaaaguauau

SEQ ID NO: 682012 - RNA, 19 nt, Artificial Sequence
  Description of Artificial Sequence: Synthetic oligonucleotide
  Sense strand starting at position 3680 of SEQ ID NO: 585970
auacuuuguguggaggauu

SEQ ID NO: 682013 - RNA, 19 nt, Artificial Sequence
  Description of Artificial Sequence: Synthetic oligonucleotide
  Antisense strand to SEQ ID NO: 682012
aauccuccacacaaaguau

SEQ ID NO: 682014 - RNA, 19 nt, Artificial Sequence
  Description of Artificial Sequence: Synthetic oligonucleotide
  Sense strand starting at position 3683 of SEQ ID NO: 585970
cuuuguguggaggauuaag

SEQ ID NO: 682015 - RNA, 19 nt, Artificial Sequence
  Description of Artificial Sequence: Synthetic oligonucleotide
  Antisense strand to SEQ ID NO: 682014
cuuaauccuccacacaaag

SEQ ID NO: 682016 - RNA, 19 nt, Artificial Sequence
  Description of Artificial Sequence: Synthetic oligonucleotide
  Sense strand starting at position 3855 of SEQ ID NO: 585970
ucuccacuugucugaucua

SEQ ID NO: 682017 - RNA, 19 nt, Artificial Sequence
  Description of Artificial Sequence: Synthetic oligonucleotide
  Antisense strand to SEQ ID NO: 682016
uagaucagacaaguggaga

SEQ ID NO: 682018 - RNA, 19 nt, Artificial Sequence
  Description of Artificial Sequence: Synthetic oligonucleotide
  Sense strand starting at position 3864 of SEQ ID NO: 585970
gucugaucuauuuguguac

SEQ ID NO: 682019 - RNA, 19 nt, Artificial Sequence
  Description of Artificial Sequence: Synthetic oligonucleotide
  Antisense strand to SEQ ID NO: 682018
guacacaaauagaucagac

SEQ ID NO: 682020 - RNA, 19 nt, Artificial Sequence
  Description of Artificial Sequence: Synthetic oligonucleotide
  Sense strand starting at position 3871 of SEQ ID NO: 585970
cuauuuguguacuugaggu

SEQ ID NO: 682021 - RNA, 19 nt, Artificial Sequence
  Description of Artificial Sequence: Synthetic oligonucleotide
  Antisense strand to SEQ ID NO: 682020
accucaaguacacaaauag

SEQ ID NO: 682022 - RNA, 19 nt, Artificial Sequence
  Description of Artificial Sequence: Synthetic oligonucleotide
  Sense strand starting at position 3878 of SEQ ID NO: 585970
uguacuugaggucaacagu

SEQ ID NO: 682023 - RNA, 19 nt, Artificial Sequence
  Description of Artificial Sequence: Synthetic oligonucleotide
  Antisense strand to SEQ ID NO: 682022
acuguugaccucaaguaca

SEQ ID NO: 682024 - RNA, 19 nt, Artificial Sequence
  Description of Artificial Sequence: Synthetic oligonucleotide
  Sense strand starting at position 3884 of SEQ ID NO: 585970
ugaggucaacagugcaaau

SEQ ID NO: 682025 - RNA, 19 nt, Artificial Sequence
  Description of Artificial Sequence: Synthetic oligonucleotide
  Antisense strand to SEQ ID NO: 682024
auuugcacuguugaccuca

SEQ ID NO: 682026 - RNA, 19 nt, Artificial Sequence
  Description of Artificial Sequence: Synthetic oligonucleotide
  Sense strand starting at position 167 of SEQ ID NO: 585971
guagauuccgcagcguaau

SEQ ID NO: 682027 - RNA, 19 nt, Artificial Sequence
  Description of Artificial Sequence: Synthetic oligonucleotide
  Antisense strand to SEQ ID NO: 682026
auuacgcugcggaaucuac

SEQ ID NO: 682028 - RNA, 19 nt, Artificial Sequence
  Description of Artificial Sequence: Synthetic oligonucleotide
  Sense strand starting at position 522 of SEQ ID NO: 585971
gaaggagcuuagguucuua

SEQ ID NO: 682029 - RNA, 19 nt, Artificial Sequence
  Description of Artificial Sequence: Synthetic oligonucleotide
  Antisense strand to SEQ ID NO: 682028
uaagaaccuaagcuccuuc

SEQ ID NO: 682030 - RNA, 19 nt, Artificial Sequence
  Description of Artificial Sequence: Synthetic oligonucleotide
  Sense strand starting at position 526 of SEQ ID NO: 585971
gagcuuagguucuuauaca

SEQ ID NO: 682031 - RNA, 19 nt, Artificial Sequence
  Description of Artificial Sequence: Synthetic oligonucleotide
  Antisense strand to SEQ ID NO: 682030
uguauaagaaccuaagcuc

SEQ ID NO: 682032 - RNA, 19 nt, Artificial Sequence
  Description of Artificial Sequence: Synthetic oligonucleotide
  Sense strand starting at position 639 of SEQ ID NO: 585971
ggccuccuuggagaaguaa

SEQ ID NO: 682033 - RNA, 19 nt, Artificial Sequence
  Description of Artificial Sequence: Synthetic oligonucleotide
  Antisense strand to SEQ ID NO: 682032
uuacuucuccaaggaggcc

SEQ ID NO: 682034 - RNA, 19 nt, Artificial Sequence
  Description of Artificial Sequence: Synthetic oligonucleotide
  Sense strand starting at position 647 of SEQ ID NO: 585971
uggagaaguaacugaccuu

SEQ ID NO: 682035 - RNA, 19 nt, Artificial Sequence
  Description of Artificial Sequence: Synthetic oligonucleotide
  Antisense strand to SEQ ID NO: 682034
aaggucaguuacuucucca

SEQ ID NO: 682036 - RNA, 19 nt, Artificial Sequence
  Description of Artificial Sequence: Synthetic oligonucleotide
  Sense strand starting at position 660 of SEQ ID NO: 585971
gaccuucucugggucuauu

SEQ ID NO: 682037 - RNA, 19 nt, Artificial Sequence
  Description of Artificial Sequence: Synthetic oligonucleotide
  Antisense strand to SEQ ID NO: 682036
aauagacccagagaagguc

SEQ ID NO: 682038 - RNA, 19 nt, Artificial Sequence
  Description of Artificial Sequence: Synthetic oligonucleotide
  Sense strand starting at position 681 of SEQ ID NO: 585971
ggaggcacuuggucuuaaa

SEQ ID NO: 682039 - RNA, 19 nt, Artificial Sequence
  Description of Artificial Sequence: Synthetic oligonucleotide
  Antisense strand to SEQ ID NO: 682038
uuuaagaccaagugccucc

SEQ ID NO: 682040 - RNA, 19 nt, Artificial Sequence
  Description of Artificial Sequence: Synthetic oligonucleotide
  Sense strand starting at position 827 of SEQ ID NO: 585971
cgacuuuccugaccuuuaa

SEQ ID NO: 682041 - RNA, 19 nt, Artificial Sequence
  Description of Artificial Sequence: Synthetic oligonucleotide
  Antisense strand to SEQ ID NO: 682040
uuaaaggucaggaaagucg

SEQ ID NO: 682042 - RNA, 19 nt, Artificial Sequence
  Description of Artificial Sequence: Synthetic oligonucleotide
  Sense strand starting at position 855 of SEQ ID NO: 585971
ucccuauuucuguggcuuu

SEQ ID NO: 682043 - RNA, 19 nt, Artificial Sequence
  Description of Artificial Sequence: Synthetic oligonucleotide
  Antisense strand to SEQ ID NO: 682042
aaagccacagaaauaggga

SEQ ID NO: 682044 - RNA, 19 nt, Artificial Sequence
  Description of Artificial Sequence: Synthetic oligonucleotide
  Sense strand starting at position 889 of SEQ ID NO: 585971
aggacccgucucggagaua

SEQ ID NO: 682045 - RNA, 19 nt, Artificial Sequence
  Description of Artificial Sequence: Synthetic oligonucleotide
  Antisense strand to SEQ ID NO: 682044
uaucuccgagacggguccu

SEQ ID NO: 682046 - RNA, 19 nt, Artificial Sequence
  Description of Artificial Sequence: Synthetic oligonucleotide
  Sense strand starting at position 916 of SEQ ID NO: 585971
gagacaugaggcugcuauu

SEQ ID NO: 682047 - RNA, 19 nt, Artificial Sequence
  Description of Artificial Sequence: Synthetic oligonucleotide
  Antisense strand to SEQ ID NO: 682046
aauagcagccucaugucuc

SEQ ID NO: 682048 - RNA, 19 nt, Artificial Sequence
  Description of Artificial Sequence: Synthetic oligonucleotide
  Sense strand starting at position 1062 of SEQ ID NO: 585971
gugacagaggcuugaaaga

SEQ ID NO: 682049 - RNA, 19 nt, Artificial Sequence
  Description of Artificial Sequence: Synthetic oligonucleotide
  Antisense strand to SEQ ID NO: 682048
ucuuucaagccucugucac

SEQ ID NO: 682050 - RNA, 19 nt, Artificial Sequence
  Description of Artificial Sequence: Synthetic oligonucleotide
  Sense strand starting at position 1302 of SEQ ID NO: 585971
ggaagaagcaauuguguac

SEQ ID NO: 682051 - RNA, 19 nt, Artificial Sequence
  Description of Artificial Sequence: Synthetic oligonucleotide
  Antisense strand to SEQ ID NO: 682050
guacacaauugcuucuucc

SEQ ID NO: 682052 - RNA, 19 nt, Artificial Sequence
  Description of Artificial Sequence: Synthetic oligonucleotide
  Sense strand starting at position 1305 of SEQ ID NO: 585971
agaagcaauuguguacaaa

SEQ ID NO: 682053 - RNA, 19 nt, Artificial Sequence
  Description of Artificial Sequence: Synthetic oligonucleotide
  Antisense strand to SEQ ID NO: 682052
uuuguacacaauugcuucu

SEQ ID NO: 682054 - RNA, 19 nt, Artificial Sequence
  Description of Artificial Sequence: Synthetic oligonucleotide
  Sense strand starting at position 1442 of SEQ ID NO: 585971
agaugaacauccucagguu

SEQ ID NO: 682055 - RNA, 19 nt, Artificial Sequence
  Description of Artificial Sequence: Synthetic oligonucleotide
  Antisense strand to SEQ ID NO: 682054
aaccugaggauguucaucu

SEQ ID NO: 682056 - RNA, 19 nt, Artificial Sequence
  Description of Artificial Sequence: Synthetic oligonucleotide
  Sense strand starting at position 1640 of SEQ ID NO: 585971
gcagaaagagucugagggu

SEQ ID NO: 682057 - RNA, 19 nt, Artificial Sequence
  Description of Artificial Sequence: Synthetic oligonucleotide
  Antisense strand to SEQ ID NO: 682056
acccucagacucuuucugc

SEQ ID NO: 682058 - RNA, 19 nt, Artificial Sequence
  Description of Artificial Sequence: Synthetic oligonucleotide
  Sense strand starting at position 1848 of SEQ ID NO: 585971
ggauccuaccugugacaaa

SEQ ID NO: 682059 - RNA, 19 nt, Artificial Sequence
  Description of Artificial Sequence: Synthetic oligonucleotide
  Antisense strand to SEQ ID NO: 682058
uuugucacagguaggaucc

SEQ ID NO: 682060 - RNA, 19 nt, Artificial Sequence
  Description of Artificial Sequence: Synthetic oligonucleotide
  Sense strand starting at position 2386 of SEQ ID NO: 585971
gcugucauuccuguagugu

SEQ ID NO: 682061 - RNA, 19 nt, Artificial Sequence
  Description of Artificial Sequence: Synthetic oligonucleotide
  Antisense strand to SEQ ID NO: 682060
acacuacaggaaugacagc

SEQ ID NO: 682062 - RNA, 19 nt, Artificial Sequence
  Description of Artificial Sequence: Synthetic oligonucleotide
  Sense strand starting at position 2397 of SEQ ID NO: 585971
uguaguguggcagcaguua

SEQ ID NO: 682063 - RNA, 19 nt, Artificial Sequence
  Description of Artificial Sequence: Synthetic oligonucleotide
  Antisense strand to SEQ ID NO: 682062
uaacugcugccacacuaca

SEQ ID NO: 682064 - RNA, 19 nt, Artificial Sequence
  Description of Artificial Sequence: Synthetic oligonucleotide
  Sense strand starting at position 2495 of SEQ ID NO: 585971
ugaucuauacagugggaau

SEQ ID NO: 682065 - RNA, 19 nt, Artificial Sequence
  Description of Artificial Sequence: Synthetic oligonucleotide
  Antisense strand to SEQ ID NO: 682064
auucccacuguauagauca

SEQ ID NO: 682066 - RNA, 19 nt, Artificial Sequence
  Description of Artificial Sequence: Synthetic oligonucleotide
  Sense strand starting at position 2529 of SEQ ID NO: 585971
gguuaucaggagcaccaua

SEQ ID NO: 682067 - RNA, 19 nt, Artificial Sequence
  Description of Artificial Sequence: Synthetic oligonucleotide
  Antisense strand to SEQ ID NO: 682066
uauggugcuccugauaacc

SEQ ID NO: 682068 - RNA, 19 nt, Artificial Sequence
  Description of Artificial Sequence: Synthetic oligonucleotide
  Sense strand starting at position 2617 of SEQ ID NO: 585971
ccauuauccuaguuagaag

SEQ ID NO: 682069 - RNA, 19 nt, Artificial Sequence
  Description of Artificial Sequence: Synthetic oligonucleotide
  Antisense strand to SEQ ID NO: 682068
cuucuaacuaggauaaugg

SEQ ID NO: 682070 - RNA, 19 nt, Artificial Sequence
  Description of Artificial Sequence: Synthetic oligonucleotide
  Sense strand starting at position 2641 of SEQ ID NO: 585971
agggaaaugggcuguccau

SEQ ID NO: 682071 - RNA, 19 nt, Artificial Sequence
  Description of Artificial Sequence: Synthetic oligonucleotide
  Antisense strand to SEQ ID NO: 682070
auggacagcccauuucccu

SEQ ID NO: 682072 - RNA, 19 nt, Artificial Sequence
  Description of Artificial Sequence: Synthetic oligonucleotide
  Sense strand starting at position 2647 of SEQ ID NO: 585971
augggcuguccauaagaca

SEQ ID NO: 682073 - RNA, 19 nt, Artificial Sequence
  Description of Artificial Sequence: Synthetic oligonucleotide
  Antisense strand to SEQ ID NO: 682072
ugucuuauggacagcccau

SEQ ID NO: 682074 - RNA, 19 nt, Artificial Sequence
  Description of Artificial Sequence: Synthetic oligonucleotide
  Sense strand starting at position 2778 of SEQ ID NO: 585971
gcuugaacuccugaucauc

SEQ ID NO: 682075 - RNA, 19 nt, Artificial Sequence
  Description of Artificial Sequence: Synthetic oligonucleotide
  Antisense strand to SEQ ID NO: 682074
gaugaucaggaguucaagc

SEQ ID NO: 682076 - RNA, 19 nt, Artificial Sequence
  Description of Artificial Sequence: Synthetic oligonucleotide
  Sense strand starting at position 2815 of SEQ ID NO: 585971
caggauauuucucagaguu

SEQ ID NO: 682077 - RNA, 19 nt, Artificial Sequence
  Description of Artificial Sequence: Synthetic oligonucleotide
  Antisense strand to SEQ ID NO: 682076
aacucugagaaauauccug

SEQ ID NO: 682078 - RNA, 19 nt, Artificial Sequence
  Description of Artificial Sequence: Synthetic oligonucleotide
  Sense strand starting at position 2954 of SEQ ID NO: 585971
ggaggcuugagucaauucu

SEQ ID NO: 682079 - RNA, 19 nt, Artificial Sequence
  Description of Artificial Sequence: Synthetic oligonucleotide
  Antisense strand to SEQ ID NO: 682078
agaauugacucaagccucc

SEQ ID NO: 682080 - RNA, 19 nt, Artificial Sequence
  Description of Artificial Sequence: Synthetic oligonucleotide
  Sense strand starting at position 3036 of SEQ ID NO: 585971
guagauuaucagggucuac

SEQ ID NO: 682081 - RNA, 19 nt, Artificial Sequence
  Description of Artificial Sequence: Synthetic oligonucleotide
  Antisense strand to SEQ ID NO: 682080
guagacccugauaaucuac

SEQ ID NO: 682082 - RNA, 19 nt, Artificial Sequence
  Description of Artificial Sequence: Synthetic oligonucleotide
  Sense strand starting at position 3135 of SEQ ID NO: 585971
cagggaaugugcuuggaga

SEQ ID NO: 682083 - RNA, 19 nt, Artificial Sequence
  Description of Artificial Sequence: Synthetic oligonucleotide
  Antisense strand to SEQ ID NO: 682082
ucuccaagcacauucccug

SEQ ID NO: 682084 - RNA, 19 nt, Artificial Sequence
  Description of Artificial Sequence: Synthetic oligonucleotide
  Sense strand starting at position 3136 of SEQ ID NO: 585971
agggaaugugcuuggagau

SEQ ID NO: 682085 - RNA, 19 nt, Artificial Sequence
  Description of Artificial Sequence: Synthetic oligonucleotide
  Antisense strand to SEQ ID NO: 682084
aucuccaagcacauucccu

SEQ ID NO: 682086 - RNA, 19 nt, Artificial Sequence
  Description of Artificial Sequence: Synthetic oligonucleotide
  Sense strand starting at position 3137 of SEQ ID NO: 585971
gggaaugugcuuggagaug

SEQ ID NO: 682087 - RNA, 19 nt, Artificial Sequence
  Description of Artificial Sequence: Synthetic oligonucleotide
  Antisense strand to SEQ ID NO: 682086
caucuccaagcacauuccc

SEQ ID NO: 682088 - RNA, 19 nt, Artificial Sequence
  Description of Artificial Sequence: Synthetic oligonucleotide
  Sense strand starting at position 3247 of SEQ ID NO: 585971
gccugaagaucacucugua

SEQ ID NO: 682089 - RNA, 19 nt, Artificial Sequence
  Description of Artificial Sequence: Synthetic oligonucleotide
  Antisense strand to SEQ ID NO: 682088
uacagagugaucuucaggc

SEQ ID NO: 682090 - RNA, 19 nt, Artificial Sequence
  Description of Artificial Sequence: Synthetic oligonucleotide
  Sense strand starting at position 3250 of SEQ ID NO: 585971
ugaagaucacucuguaggu

SEQ ID NO: 682091 - RNA, 19 nt, Artificial Sequence
  Description of Artificial Sequence: Synthetic oligonucleotide
  Antisense strand to SEQ ID NO: 682090
accuacagagugaucuuca

SEQ ID NO: 682092 - RNA, 19 nt, Artificial Sequence
  Description of Artificial Sequence: Synthetic oligonucleotide
  Sense strand starting at position 3251 of SEQ ID NO: 585971
gaagaucacucuguaggua

SEQ ID NO: 682093 - RNA, 19 nt, Artificial Sequence
  Description of Artificial Sequence: Synthetic oligonucleotide
  Antisense strand to SEQ ID NO: 682092
uaccuacagagugaucuuc

SEQ ID NO: 682094 - RNA, 19 nt, Artificial Sequence
  Description of Artificial Sequence: Synthetic oligonucleotide
  Sense strand starting at position 3296 of SEQ ID NO: 585971
cagguuuauuggcccauaa

SEQ ID NO: 682095 - RNA, 19 nt, Artificial Sequence
  Description of Artificial Sequence: Synthetic oligonucleotide
  Antisense strand to SEQ ID NO: 682094
uuaugggccaauaaaccug

SEQ ID NO: 682096 - RNA, 19 nt, Artificial Sequence
  Description of Artificial Sequence: Synthetic oligonucleotide
  Sense strand starting at position 3298 of SEQ ID NO: 585971
gguuuauuggcccauaauu

SEQ ID NO: 682097 - RNA, 19 nt, Artificial Sequence
  Description of Artificial Sequence: Synthetic oligonucleotide
  Antisense strand to SEQ ID NO: 682096
aauuaugggccaauaaacc

SEQ ID NO: 682098 - RNA, 19 nt, Artificial Sequence
  Description of Artificial Sequence: Synthetic oligonucleotide
  Sense strand starting at position 3354 of SEQ ID NO: 585971
uguguaaauguugacaaac

SEQ ID NO: 682099 - RNA, 19 nt, Artificial Sequence
  Description of Artificial Sequence: Synthetic oligonucleotide
  Antisense strand to SEQ ID NO: 682098
guuugucaacauuuacaca

SEQ ID NO: 682100 - RNA, 19 nt, Artificial Sequence
  Description of Artificial Sequence: Synthetic oligonucleotide
  Sense strand starting at position 3560 of SEQ ID NO: 585971
ugucauagacauggaauua

SEQ ID NO: 682101 - RNA, 19 nt, Artificial Sequence
  Description of Artificial Sequence: Synthetic oligonucleotide
  Antisense strand to SEQ ID NO: 682100
uaauuccaugucuaugaca

SEQ ID NO: 682102 - RNA, 19 nt, Artificial Sequence
  Description of Artificial Sequence: Synthetic oligonucleotide
  Sense strand starting at position 3689 of SEQ ID NO: 585971
ucauucuaugguugaacca

SEQ ID NO: 682103 - RNA, 19 nt, Artificial Sequence
  Description of Artificial Sequence: Synthetic oligonucleotide
  Antisense strand to SEQ ID NO: 682102
ugguucaaccauagaauga

SEQ ID NO: 682104 - RNA, 19 nt, Artificial Sequence
  Description of Artificial Sequence: Synthetic oligonucleotide
  Sense strand starting at position 3813 of SEQ ID NO: 585971
ggacauauguuucuauuac

SEQ ID NO: 682105 - RNA, 19 nt, Artificial Sequence
  Description of Artificial Sequence: Synthetic oligonucleotide
  Antisense strand to SEQ ID NO: 682104
guaauagaaacauaugucc

SEQ ID NO: 682106 - RNA, 19 nt, Artificial Sequence
  Description of Artificial Sequence: Synthetic oligonucleotide
  Sense strand starting at position 31 of SEQ ID NO: 585972
cagggagucucaucuuguc

SEQ ID NO: 682107 - RNA, 19 nt, Artificial Sequence
  Description of Artificial Sequence: Synthetic oligonucleotide
  Antisense strand to SEQ ID NO: 682106
gacaagaugagacucccug

SEQ ID NO: 682108 - RNA, 19 nt, Artificial Sequence
  Description of Artificial Sequence: Synthetic oligonucleotide
  Sense strand starting at position 36 of SEQ ID NO: 585972
agucucaucuugucacaau

SEQ ID NO: 682109 - RNA, 19 nt, Artificial Sequence
  Description of Artificial Sequence: Synthetic oligonucleotide
  Antisense strand to SEQ ID NO: 682108
auugugacaagaugagacu

SEQ ID NO: 682110 - RNA, 19 nt, Artificial Sequence
  Description of Artificial Sequence: Synthetic oligonucleotide
  Sense strand starting at position 207 of SEQ ID NO: 585972
cccucuuauuuagagggaa

SEQ ID NO: 682111 - RNA, 19 nt, Artificial Sequence
  Description of Artificial Sequence: Synthetic oligonucleotide
  Antisense strand to SEQ ID NO: 682110
uucccucuaaauaagaggg

SEQ ID NO: 682112 - RNA, 19 nt, Artificial Sequence
  Description of Artificial Sequence: Synthetic oligonucleotide
  Sense strand starting at position 653 of SEQ ID NO: 585972
gcugucugugcuucaggua

SEQ ID NO: 682113 - RNA, 19 nt, Artificial Sequence
  Description of Artificial Sequence: Synthetic oligonucleotide
  Antisense strand to SEQ ID NO: 682112
uaccugaagcacagacagc

SEQ ID NO: 682114 - RNA, 19 nt, Artificial Sequence
  Description of Artificial Sequence: Synthetic oligonucleotide
  Sense strand starting at position 775 of SEQ ID NO: 585972
aaaguuaugggcuguggga

SEQ ID NO: 682115 - RNA, 19 nt, Artificial Sequence
  Description of Artificial Sequence: Synthetic oligonucleotide
  Antisense strand to SEQ ID NO: 682114
ucccacagcccauaacuuu

SEQ ID NO: 682116 - RNA, 19 nt, Artificial Sequence
  Description of Artificial Sequence: Synthetic oligonucleotide
  Sense strand starting at position 777 of SEQ ID NO: 585972
aguuaugggcugugggaau

SEQ ID NO: 682117 - RNA, 19 nt, Artificial Sequence
  Description of Artificial Sequence: Synthetic oligonucleotide
  Antisense strand to SEQ ID NO: 682116
auucccacagcccauaacu

SEQ ID NO: 682118 - RNA, 19 nt, Artificial Sequence
  Description of Artificial Sequence: Synthetic oligonucleotide
  Sense strand starting at position 882 of SEQ ID NO: 585972
aacgaaaggaguugaaguu

SEQ ID NO: 682119 - RNA, 19 nt, Artificial Sequence
  Description of Artificial Sequence: Synthetic oligonucleotide
  Antisense strand to SEQ ID NO: 682118
aacuucaacuccuuucguu

SEQ ID NO: 682120 - RNA, 19 nt, Artificial Sequence
  Description of Artificial Sequence: Synthetic oligonucleotide
  Sense strand starting at position 917 of SEQ ID NO: 585972
uaccuacuuguaggugaga

SEQ ID NO: 682121 - RNA, 19 nt, Artificial Sequence
  Description of Artificial Sequence: Synthetic oligonucleotide
  Antisense strand to SEQ ID NO: 682120
ucucaccuacaaguaggua

SEQ ID NO: 682122 - RNA, 19 nt, Artificial Sequence
  Description of Artificial Sequence: Synthetic oligonucleotide
  Sense strand starting at position 919 of SEQ ID NO: 585972
ccuacuuguaggugagaca

SEQ ID NO: 682123 - RNA, 19 nt, Artificial Sequence
  Description of Artificial Sequence: Synthetic oligonucleotide
  Antisense strand to SEQ ID NO: 682122
ugucucaccuacaaguagg

SEQ ID NO: 682124 - RNA, 19 nt, Artificial Sequence
  Description of Artificial Sequence: Synthetic oligonucleotide
  Sense strand starting at position 920 of SEQ ID NO: 585972
cuacuuguaggugagacau

SEQ ID NO: 682125 - RNA, 19 nt, Artificial Sequence
  Description of Artificial Sequence: Synthetic oligonucleotide
  Antisense strand to SEQ ID NO: 682124
augucucaccuacaaguag

SEQ ID NO: 682126 - RNA, 19 nt, Artificial Sequence
  Description of Artificial Sequence: Synthetic oligonucleotide
  Sense strand starting at position 940 of SEQ ID NO: 585972
cuagauggccugugaagac

SEQ ID NO: 682127 - RNA, 19 nt, Artificial Sequence
  Description of Artificial Sequence: Synthetic oligonucleotide
  Antisense strand to SEQ ID NO: 682126
gucuucacaggccaucuag

SEQ ID NO: 682128 - RNA, 19 nt, Artificial Sequence
  Description of Artificial Sequence: Synthetic oligonucleotide
  Sense strand starting at position 1008 of SEQ ID NO: 585972
ccgcuauuacaggaauaaa

SEQ ID NO: 682129 - RNA, 19 nt, Artificial Sequence
  Description of Artificial Sequence: Synthetic oligonucleotide
  Antisense strand to SEQ ID NO: 682128
uuuauuccuguaauagcgg

SEQ ID NO: 682130 - RNA, 19 nt, Artificial Sequence
  Description of Artificial Sequence: Synthetic oligonucleotide
  Sense strand starting at position 1104 of SEQ ID NO: 585972
auaaguuagcaucaaguau

SEQ ID NO: 682131 - RNA, 19 nt, Artificial Sequence
  Description of Artificial Sequence: Synthetic oligonucleotide
  Antisense strand to SEQ ID NO: 682130
auacuugaugcuaacuuau

SEQ ID NO: 682132 - RNA, 19 nt, Artificial Sequence
  Description of Artificial Sequence: Synthetic oligonucleotide
  Sense strand starting at position 1110 of SEQ ID NO: 585972
uagcaucaaguauguugaa

SEQ ID NO: 682133 - RNA, 19 nt, Artificial Sequence
  Description of Artificial Sequence: Synthetic oligonucleotide
  Antisense strand to SEQ ID NO: 682132
uucaacauacuugaugcua

SEQ ID NO: 682134 - RNA, 19 nt, Artificial Sequence
  Description of Artificial Sequence: Synthetic oligonucleotide
  Sense strand starting at position 1111 of SEQ ID NO: 585972
agcaucaaguauguugaaa

SEQ ID NO: 682135 - RNA, 19 nt, Artificial Sequence
  Description of Artificial Sequence: Synthetic oligonucleotide
  Antisense strand to SEQ ID NO: 682134
uuucaacauacuugaugcu

SEQ ID NO: 682136 - RNA, 19 nt, Artificial Sequence
  Description of Artificial Sequence: Synthetic oligonucleotide
  Sense strand starting at position 1425 of SEQ ID NO: 585972
cagagagacucugugcaaa

SEQ ID NO: 682137 - RNA, 19 nt, Artificial Sequence
  Description of Artificial Sequence: Synthetic oligonucleotide
  Antisense strand to SEQ ID NO: 682136
uuugcacagagucucucug

SEQ ID NO: 682138 - RNA, 19 nt, Artificial Sequence
  Description of Artificial Sequence: Synthetic oligonucleotide
  Sense strand starting at position 1535 of SEQ ID NO: 585972
cacccaggucugugagaaa

SEQ ID NO: 682139 - RNA, 19 nt, Artificial Sequence
  Description of Artificial Sequence: Synthetic oligonucleotide
  Antisense strand to SEQ ID NO: 682138
uuucucacagaccugggug

SEQ ID NO: 682140 - RNA, 19 nt, Artificial Sequence
  Description of Artificial Sequence: Synthetic oligonucleotide
  Sense strand starting at position 1637 of SEQ ID NO: 585972
ccuucugagcuuugacauc

SEQ ID NO: 682141 - RNA, 19 nt, Artificial Sequence
  Description of Artificial Sequence: Synthetic oligonucleotide
  Antisense strand to SEQ ID NO: 682140
gaugucaaagcucagaagg

SEQ ID NO: 682142 - RNA, 19 nt, Artificial Sequence
  Description of Artificial Sequence: Synthetic oligonucleotide
  Sense strand starting at position 1937 of SEQ ID NO: 585972
cauggcugggcagagaaau

SEQ ID NO: 682143 - RNA, 19 nt, Artificial Sequence
  Description of Artificial Sequence: Synthetic oligonucleotide
  Antisense strand to SEQ ID NO: 682142
auuucucugcccagccaug

SEQ ID NO: 682144 - RNA, 19 nt, Artificial Sequence
  Description of Artificial Sequence: Synthetic oligonucleotide
  Sense strand starting at position 1995 of SEQ ID NO: 585972
gccugagggcaggaaacau

SEQ ID NO: 682145 - RNA, 19 nt, Artificial Sequence
  Description of Artificial Sequence: Synthetic oligonucleotide
  Antisense strand to SEQ ID NO: 682144
auguuuccugcccucaggc

SEQ ID NO: 682146 - RNA, 19 nt, Artificial Sequence
  Description of Artificial Sequence: Synthetic oligonucleotide
  Sense strand starting at position 2006 of SEQ ID NO: 585972
ggaaacaucugccucagaa

SEQ ID NO: 682147 - RNA, 19 nt, Artificial Sequence
  Description of Artificial Sequence: Synthetic oligonucleotide
  Antisense strand to SEQ ID NO: 682146
uucugaggcagauguuucc

SEQ ID NO: 682148 - RNA, 19 nt, Artificial Sequence
  Description of Artificial Sequence: Synthetic oligonucleotide
  Sense strand starting at position 2349 of SEQ ID NO: 585972
cucucaauucuuugggagu

SEQ ID NO: 682149 - RNA, 19 nt, Artificial Sequence
  Description of Artificial Sequence: Synthetic oligonucleotide
  Antisense strand to SEQ ID NO: 682148
acucccaaagaauugagag

SEQ ID NO: 682150 - RNA, 19 nt, Artificial Sequence
  Description of Artificial Sequence: Synthetic oligonucleotide
  Sense strand starting at position 2392 of SEQ ID NO: 585972
ggagguuguaugcaguaca

SEQ ID NO: 682151 - RNA, 19 nt, Artificial Sequence
  Description of Artificial Sequence: Synthetic oligonucleotide
  Antisense strand to SEQ ID NO: 682150
uguacugcauacaaccucc

SEQ ID NO: 682152 - RNA, 19 nt, Artificial Sequence
  Description of Artificial Sequence: Synthetic oligonucleotide
  Sense strand starting at position 2466 of SEQ ID NO: 585972
uuuauuguccuggacacua

SEQ ID NO: 682153 - RNA, 19 nt, Artificial Sequence
  Description of Artificial Sequence: Synthetic oligonucleotide
  Antisense strand to SEQ ID NO: 682152
uaguguccaggacaauaaa

SEQ ID NO: 682154 - RNA, 19 nt, Artificial Sequence
  Description of Artificial Sequence: Synthetic oligonucleotide
  Sense strand starting at position 2591 of SEQ ID NO: 585972
uuaacuaguugguuauuga

SEQ ID NO: 682155 - RNA, 19 nt, Artificial Sequence
  Description of Artificial Sequence: Synthetic oligonucleotide
  Antisense strand to SEQ ID NO: 682154
ucaauaaccaacuaguuaa

SEQ ID NO: 682156 - RNA, 19 nt, Artificial Sequence
  Description of Artificial Sequence: Synthetic oligonucleotide
  Sense strand starting at position 2592 of SEQ ID NO: 585972
uaacuaguugguuauugaa

SEQ ID NO: 682157 - RNA, 19 nt, Artificial Sequence
  Description of Artificial Sequence: Synthetic oligonucleotide
  Antisense strand to SEQ ID NO: 682156
uucaauaaccaacuaguua

SEQ ID NO: 682158 - RNA, 19 nt, Artificial Sequence
  Description of Artificial Sequence: Synthetic oligonucleotide
  Sense strand starting at position 2829 of SEQ ID NO: 585972
ucuaucuucucuguuggaa

SEQ ID NO: 682159 - RNA, 19 nt, Artificial Sequence
  Description of Artificial Sequence: Synthetic oligonucleotide
  Antisense strand to SEQ ID NO: 682158
uuccaacagagaagauaga

SEQ ID NO: 682160 - RNA, 19 nt, Artificial Sequence
  Description of Artificial Sequence: Synthetic oligonucleotide
  Sense strand starting at position 2902 of SEQ ID NO: 585972
aaggguauuggccaaguuu

SEQ ID NO: 682161 - RNA, 19 nt, Artificial Sequence
  Description of Artificial Sequence: Synthetic oligonucleotide
  Antisense strand to SEQ ID NO: 682160
aaacuuggccaauacccuu

SEQ ID NO: 682162 - RNA, 19 nt, Artificial Sequence
  Description of Artificial Sequence: Synthetic oligonucleotide
  Sense strand starting at position 2922 of SEQ ID NO: 585972
gcugaagggugauugaaua

SEQ ID NO: 682163 - RNA, 19 nt, Artificial Sequence
  Description of Artificial Sequence: Synthetic oligonucleotide
  Antisense strand to SEQ ID NO: 682162
uauucaaucacccuucagc

SEQ ID NO: 682164 - RNA, 19 nt, Artificial Sequence
  Description of Artificial Sequence: Synthetic oligonucleotide
  Sense strand starting at position 2954 of SEQ ID NO: 585972
gagugcaacguccagagau

SEQ ID NO: 682165 - RNA, 19 nt, Artificial Sequence
  Description of Artificial Sequence: Synthetic oligonucleotide
  Antisense strand to SEQ ID NO: 682164
aucucuggacguugcacuc

SEQ ID NO: 682166 - RNA, 19 nt, Artificial Sequence
  Description of Artificial Sequence: Synthetic oligonucleotide
  Sense strand starting at position 2964 of SEQ ID NO: 585972
uccagagauuugcucgcau

SEQ ID NO: 682167 - RNA, 19 nt, Artificial Sequence
  Description of Artificial Sequence: Synthetic oligonucleotide
  Antisense strand to SEQ ID NO: 682166
augcgagcaaaucucugga

SEQ ID NO: 682168 - RNA, 19 nt, Artificial Sequence
  Description of Artificial Sequence: Synthetic oligonucleotide
  Sense strand starting at position 2966 of SEQ ID NO: 585972
cagagauuugcucgcauuc

SEQ ID NO: 682169 - RNA, 19 nt, Artificial Sequence
  Description of Artificial Sequence: Synthetic oligonucleotide
  Antisense strand to SEQ ID NO: 682168
gaaugcgagcaaaucucug

SEQ ID NO: 682170 - RNA, 19 nt, Artificial Sequence
  Description of Artificial Sequence: Synthetic oligonucleotide
  Sense strand starting at position 3002 of SEQ ID NO: 585972
agauuuacauuccagagua

SEQ ID NO: 682171 - RNA, 19 nt, Artificial Sequence
  Description of Artificial Sequence: Synthetic oligonucleotide
  Antisense strand to SEQ ID NO: 682170
uacucuggaauguaaaucu

SEQ ID NO: 682172 - RNA, 19 nt, Artificial Sequence
  Description of Artificial Sequence: Synthetic oligonucleotide
  Sense strand starting at position 3184 of SEQ ID NO: 585972
uggaauugggcucgaggaa

SEQ ID NO: 682173 - RNA, 19 nt, Artificial Sequence
  Description of Artificial Sequence: Synthetic oligonucleotide
  Antisense strand to SEQ ID NO: 682172
uuccucgagcccaauucca

SEQ ID NO: 682174 - RNA, 19 nt, Artificial Sequence
  Description of Artificial Sequence: Synthetic oligonucleotide
  Sense strand starting at position 3207 of SEQ ID NO: 585972
gacaaagugugaguaauaa

SEQ ID NO: 682175 - RNA, 19 nt, Artificial Sequence
  Description of Artificial Sequence: Synthetic oligonucleotide
  Antisense strand to SEQ ID NO: 682174
uuauuacucacacuuuguc

SEQ ID NO: 682176 - RNA, 19 nt, Artificial Sequence
  Description of Artificial Sequence: Synthetic oligonucleotide
  Sense strand starting at position 3314 of SEQ ID NO: 585972
ugcccuaaucuggagggua

SEQ ID NO: 682177 - RNA, 19 nt, Artificial Sequence
  Description of Artificial Sequence: Synthetic oligonucleotide
  Antisense strand to SEQ ID NO: 682176
uacccuccagauuagggca

SEQ ID NO: 682178 - RNA, 19 nt, Artificial Sequence
  Description of Artificial Sequence: Synthetic oligonucleotide
  Sense strand starting at position 3508 of SEQ ID NO: 585972
gagauugggugaccaacuu

SEQ ID NO: 682179 - RNA, 19 nt, Artificial Sequence
  Description of Artificial Sequence: Synthetic oligonucleotide
  Antisense strand to SEQ ID NO: 682178
aaguuggucacccaaucuc

SEQ ID NO: 682180 - RNA, 19 nt, Artificial Sequence
  Description of Artificial Sequence: Synthetic oligonucleotide
  Sense strand starting at position 3556 of SEQ ID NO: 585972
uugggacuuucugugcaaa

SEQ ID NO: 682181 - RNA, 19 nt, Artificial Sequence
  Description of Artificial Sequence: Synthetic oligonucleotide
  Antisense strand to SEQ ID NO: 682180
uuugcacagaaagucccaa

SEQ ID NO: 682182 - RNA, 19 nt, Artificial Sequence
  Description of Artificial Sequence: Synthetic oligonucleotide
  Sense strand starting at position 3710 of SEQ ID NO: 585972
gcguguugugugaagaggu

SEQ ID NO: 682183 - RNA, 19 nt, Artificial Sequence
  Description of Artificial Sequence: Synthetic oligonucleotide
  Antisense strand to SEQ ID NO: 682182
accucuucacacaacacgc

SEQ ID NO: 682184 - RNA, 19 nt, Artificial Sequence
  Description of Artificial Sequence: Synthetic oligonucleotide
  Sense strand starting at position 3712 of SEQ ID NO: 585972
guguugugugaagagguga

SEQ ID NO: 682185 - RNA, 19 nt, Artificial Sequence
  Description of Artificial Sequence: Synthetic oligonucleotide
  Antisense strand to SEQ ID NO: 682184
ucaccucuucacacaacac

SEQ ID NO: 682186 - RNA, 19 nt, Artificial Sequence
  Description of Artificial Sequence: Synthetic oligonucleotide
  Sense strand starting at position 6 of SEQ ID NO: 585973
ucaugcccucagugagaca

SEQ ID NO: 682187 - RNA, 19 nt, Artificial Sequence
  Description of Artificial Sequence: Synthetic oligonucleotide
  Antisense strand to SEQ ID NO: 682186
ugucucacugagggcauga

SEQ ID NO: 682188 - RNA, 19 nt, Artificial Sequence
  Description of Artificial Sequence: Synthetic oligonucleotide
  Sense strand starting at position 44 of SEQ ID NO: 585973
aggucauuaaguugugaaa

SEQ ID NO: 682189 - RNA, 19 nt, Artificial Sequence
  Description of Artificial Sequence: Synthetic oligonucleotide
  Antisense strand to SEQ ID NO: 682188
uuucacaacuuaaugaccu

SEQ ID NO: 682190 - RNA, 19 nt, Artificial Sequence
  Description of Artificial Sequence: Synthetic oligonucleotide
  Sense strand starting at position 230 of SEQ ID NO: 585973
auagaucaagccugucuaa

SEQ ID NO: 682191 - RNA, 19 nt, Artificial Sequence
  Description of Artificial Sequence: Synthetic oligonucleotide
  Antisense strand to SEQ ID NO: 682190
uuagacaggcuugaucuau

SEQ ID NO: 682192 - RNA, 19 nt, Artificial Sequence
  Description of Artificial Sequence: Synthetic oligonucleotide
  Sense strand starting at position 277 of SEQ ID NO: 585973
gugugaaccacaggauucu

SEQ ID NO: 682193 - RNA, 19 nt, Artificial Sequence
  Description of Artificial Sequence: Synthetic oligonucleotide
  Antisense strand to SEQ ID NO: 682192
agaauccugugguucacac

SEQ ID NO: 682194 - RNA, 19 nt, Artificial Sequence
  Description of Artificial Sequence: Synthetic oligonucleotide
  Sense strand starting at position 340 of SEQ ID NO: 585973
aggaguaagauguggucca

SEQ ID NO: 682195 - RNA, 19 nt, Artificial Sequence
  Description of Artificial Sequence: Synthetic oligonucleotide
  Antisense strand to SEQ ID NO: 682194
uggaccacaucuuacuccu

SEQ ID NO: 682196 - RNA, 19 nt, Artificial Sequence
  Description of Artificial Sequence: Synthetic oligonucleotide
  Sense strand starting at position 481 of SEQ ID NO: 585973
ucagcugacucuucugaua

SEQ ID NO: 682197 - RNA, 19 nt, Artificial Sequence
  Description of Artificial Sequence: Synthetic oligonucleotide
  Antisense strand to SEQ ID NO: 682196
uaucagaagagucagcuga

SEQ ID NO: 682198 - RNA, 19 nt, Artificial Sequence
  Description of Artificial Sequence: Synthetic oligonucleotide
  Sense strand starting at position 617 of SEQ ID NO: 585973
cacuuaguggugugauuag

SEQ ID NO: 682199 - RNA, 19 nt, Artificial Sequence
  Description of Artificial Sequence: Synthetic oligonucleotide
  Antisense strand to SEQ ID NO: 682198
cuaaucacaccacuaagug

SEQ ID NO: 682200 - RNA, 19 nt, Artificial Sequence
  Description of Artificial Sequence: Synthetic oligonucleotide
  Sense strand starting at position 626 of SEQ ID NO: 585973
gugugauuaggucaccugu

SEQ ID NO: 682201 - RNA, 19 nt, Artificial Sequence
  Description of Artificial Sequence: Synthetic oligonucleotide
  Antisense strand to SEQ ID NO: 682200
acaggugaccuaaucacac

SEQ ID NO: 682202 - RNA, 19 nt, Artificial Sequence
  Description of Artificial Sequence: Synthetic oligonucleotide
  Sense strand starting at position 634 of SEQ ID NO: 585973
aggucaccuguuugauaca

SEQ ID NO: 682203 - RNA, 19 nt, Artificial Sequence
  Description of Artificial Sequence: Synthetic oligonucleotide
  Antisense strand to SEQ ID NO: 682202
uguaucaaacaggugaccu

SEQ ID NO: 682204 - RNA, 19 nt, Artificial Sequence
  Description of Artificial Sequence: Synthetic oligonucleotide
  Sense strand starting at position 1024 of SEQ ID NO: 585973
gguggaugagcccaggauu

SEQ ID NO: 682205 - RNA, 19 nt, Artificial Sequence
  Description of Artificial Sequence: Synthetic oligonucleotide
  Antisense strand to SEQ ID NO: 682204
aauccugggcucauccacc

SEQ ID NO: 682206 - RNA, 19 nt, Artificial Sequence
  Description of Artificial Sequence: Synthetic oligonucleotide
  Sense strand starting at position 1037 of SEQ ID NO: 585973
aggauuucuuagcacaaga

SEQ ID NO: 682207 - RNA, 19 nt, Artificial Sequence
  Description of Artificial Sequence: Synthetic oligonucleotide
  Antisense strand to SEQ ID NO: 682206
ucuugugcuaagaaauccu

SEQ ID NO: 682208 - RNA, 19 nt, Artificial Sequence
  Description of Artificial Sequence: Synthetic oligonucleotide
  Sense strand starting at position 1276 of SEQ ID NO: 585973
gggugagguuccucaagga

SEQ ID NO: 682209 - RNA, 19 nt, Artificial Sequence
  Description of Artificial Sequence: Synthetic oligonucleotide
  Antisense strand to SEQ ID NO: 682208
uccuugaggaaccucaccc

SEQ ID NO: 682210 - RNA, 19 nt, Artificial Sequence
  Description of Artificial Sequence: Synthetic oligonucleotide
  Sense strand starting at position 1301 of SEQ ID NO: 585973
guaucugugaggugggaaa

SEQ ID NO: 682211 - RNA, 19 nt, Artificial Sequence
  Description of Artificial Sequence: Synthetic oligonucleotide
  Antisense strand to SEQ ID NO: 682210
uuucccaccucacagauac

SEQ ID NO: 682212 - RNA, 19 nt, Artificial Sequence
  Description of Artificial Sequence: Synthetic oligonucleotide
  Sense strand starting at position 1491 of SEQ ID NO: 585973
aauugagggcucugcuuua

SEQ ID NO: 682213 - RNA, 19 nt, Artificial Sequence
  Description of Artificial Sequence: Synthetic oligonucleotide
  Antisense strand to SEQ ID NO: 682212
uaaagcagagcccucaauu

SEQ ID NO: 682214 - RNA, 19 nt, Artificial Sequence
  Description of Artificial Sequence: Synthetic oligonucleotide
  Sense strand starting at position 1503 of SEQ ID NO: 585973
ugcuuuaaagccugaggaa

SEQ ID NO: 682215 - RNA, 19 nt, Artificial Sequence
  Description of Artificial Sequence: Synthetic oligonucleotide
  Antisense strand to SEQ ID NO: 682214
uuccucaggcuuuaaagca

SEQ ID NO: 682216 - RNA, 19 nt, Artificial Sequence
  Description of Artificial Sequence: Synthetic oligonucleotide
  Sense strand starting at position 1504 of SEQ ID NO: 585973
gcuuuaaagccugaggaag

SEQ ID NO: 682217 - RNA, 19 nt, Artificial Sequence
  Description of Artificial Sequence: Synthetic oligonucleotide
  Antisense strand to SEQ ID NO: 682216
cuuccucaggcuuuaaagc

SEQ ID NO: 682218 - RNA, 19 nt, Artificial Sequence
  Description of Artificial Sequence: Synthetic oligonucleotide
  Sense strand starting at position 1553 of SEQ ID NO: 585973
gguccagagcuuuaucuug

SEQ ID NO: 682219 - RNA, 19 nt, Artificial Sequence
  Description of Artificial Sequence: Synthetic oligonucleotide
  Antisense strand to SEQ ID NO: 682218
caagauaaagcucuggacc

SEQ ID NO: 682220 - RNA, 19 nt, Artificial Sequence
  Description of Artificial Sequence: Synthetic oligonucleotide
  Sense strand starting at position 1620 of SEQ ID NO: 585973
agagcuaagucagcccuaa

SEQ ID NO: 682221 - RNA, 19 nt, Artificial Sequence
  Description of Artificial Sequence: Synthetic oligonucleotide
  Antisense strand to SEQ ID NO: 682220
uuagggcugacuuagcucu

SEQ ID NO: 682222 - RNA, 19 nt, Artificial Sequence
  Description of Artificial Sequence: Synthetic oligonucleotide
  Sense strand starting at position 1839 of SEQ ID NO: 585973
cagugucaggccuggagau

SEQ ID NO: 682223 - RNA, 19 nt, Artificial Sequence
  Description of Artificial Sequence: Synthetic oligonucleotide
  Antisense strand to SEQ ID NO: 682222
aucuccaggccugacacug

SEQ ID NO: 682224 - RNA, 19 nt, Artificial Sequence
  Description of Artificial Sequence: Synthetic oligonucleotide
  Sense strand starting at position 1927 of SEQ ID NO: 585973
aagugaagcugcccauuua

SEQ ID NO: 682225 - RNA, 19 nt, Artificial Sequence
  Description of Artificial Sequence: Synthetic oligonucleotide
  Antisense strand to SEQ ID NO: 682224
uaaaugggcagcuucacuu

SEQ ID NO: 682226 - RNA, 19 nt, Artificial Sequence
  Description of Artificial Sequence: Synthetic oligonucleotide
  Sense strand starting at position 2144 of SEQ ID NO: 585973
agaaacuggucccuaggau

SEQ ID NO: 682227 - RNA, 19 nt, Artificial Sequence
  Description of Artificial Sequence: Synthetic oligonucleotide
  Antisense strand to SEQ ID NO: 682226
auccuagggaccaguuucu

SEQ ID NO: 682228 - RNA, 19 nt, Artificial Sequence
  Description of Artificial Sequence: Synthetic oligonucleotide
  Sense strand starting at position 2272 of SEQ ID NO: 585973
cucagacccuaguuucuua

SEQ ID NO: 682229 - RNA, 19 nt, Artificial Sequence
  Description of Artificial Sequence: Synthetic oligonucleotide
  Antisense strand to SEQ ID NO: 682228
uaagaaacuagggucugag

SEQ ID NO: 682230 - RNA, 19 nt, Artificial Sequence
  Description of Artificial Sequence: Synthetic oligonucleotide
  Sense strand starting at position 2395 of SEQ ID NO: 585973
agaacagucacuuguguuc

SEQ ID NO: 682231 - RNA, 19 nt, Artificial Sequence
  Description of Artificial Sequence: Synthetic oligonucleotide
  Antisense strand to SEQ ID NO: 682230
gaacacaagugacuguucu

SEQ ID NO: 682232 - RNA, 19 nt, Artificial Sequence
  Description of Artificial Sequence: Synthetic oligonucleotide
  Sense strand starting at position 2431 of SEQ ID NO: 585973
cuuacaggcucacuugaaa

SEQ ID NO: 682233 - RNA, 19 nt, Artificial Sequence
  Description of Artificial Sequence: Synthetic oligonucleotide
  Antisense strand to SEQ ID NO: 682232
uuucaagugagccuguaag

SEQ ID NO: 682234 - RNA, 19 nt, Artificial Sequence
  Description of Artificial Sequence: Synthetic oligonucleotide
  Sense strand starting at position 2909 of SEQ ID NO: 585973
guggaaaugacccagcacu

SEQ ID NO: 682235 - RNA, 19 nt, Artificial Sequence
  Description of Artificial Sequence: Synthetic oligonucleotide
  Antisense strand to SEQ ID NO: 682234
agugcugggucauuuccac

SEQ ID NO: 682236 - RNA, 19 nt, Artificial Sequence
  Description of Artificial Sequence: Synthetic oligonucleotide
  Sense strand starting at position 3035 of SEQ ID NO: 585973
cuggacucccgugauuaug

SEQ ID NO: 682237 - RNA, 19 nt, Artificial Sequence
  Description of Artificial Sequence: Synthetic oligonucleotide
  Antisense strand to SEQ ID NO: 682236
cauaaucacgggaguccag

SEQ ID NO: 682238 - RNA, 19 nt, Artificial Sequence
  Description of Artificial Sequence: Synthetic oligonucleotide
  Sense strand starting at position 3037 of SEQ ID NO: 585973
ggacucccgugauuaugua

SEQ ID NO: 682239 - RNA, 19 nt, Artificial Sequence
  Description of Artificial Sequence: Synthetic oligonucleotide
  Antisense strand to SEQ ID NO: 682238
uacauaaucacgggagucc

SEQ ID NO: 682240 - RNA, 19 nt, Artificial Sequence
  Description of Artificial Sequence: Synthetic oligonucleotide
  Sense strand starting at position 3038 of SEQ ID NO: 585973
gacucccgugauuauguau

SEQ ID NO: 682241 - RNA, 19 nt, Artificial Sequence
  Description of Artificial Sequence: Synthetic oligonucleotide
  Antisense strand to SEQ ID NO: 682240
auacauaaucacgggaguc

SEQ ID NO: 682242 - RNA, 19 nt, Artificial Sequence
  Description of Artificial Sequence: Synthetic oligonucleotide
  Sense strand starting at position 3080 of SEQ ID NO: 585973
uguuucuacuccuuagaug

SEQ ID NO: 682243 - RNA, 19 nt, Artificial Sequence
  Description of Artificial Sequence: Synthetic oligonucleotide
  Antisense strand to SEQ ID NO: 682242
caucuaaggaguagaaaca

SEQ ID NO: 682244 - RNA, 19 nt, Artificial Sequence
  Description of Artificial Sequence: Synthetic oligonucleotide
  Sense strand starting at position 3091 of SEQ ID NO: 585973
cuuagaugggacugucaaa

SEQ ID NO: 682245 - RNA, 19 nt, Artificial Sequence
  Description of Artificial Sequence: Synthetic oligonucleotide
  Antisense strand to SEQ ID NO: 682244
uuugacagucccaucuaag

SEQ ID NO: 682246 - RNA, 19 nt, Artificial Sequence
  Description of Artificial Sequence: Synthetic oligonucleotide
  Sense strand starting at position 3272 of SEQ ID NO: 585973
auaguuauauaguucccuu

SEQ ID NO: 682247 - RNA, 19 nt, Artificial Sequence
  Description of Artificial Sequence: Synthetic oligonucleotide
  Antisense strand to SEQ ID NO: 682246
aagggaacuauauaacuau

SEQ ID NO: 682248 - RNA, 19 nt, Artificial Sequence
  Description of Artificial Sequence: Synthetic oligonucleotide
  Sense strand starting at position 3275 of SEQ ID NO: 585973
guuauauaguucccuuauu

SEQ ID NO: 682249 - RNA, 19 nt, Artificial Sequence
  Description of Artificial Sequence: Synthetic oligonucleotide
  Antisense strand to SEQ ID NO: 682248
aauaagggaacuauauaac

SEQ ID NO: 682250 - RNA, 19 nt, Artificial Sequence
  Description of Artificial Sequence: Synthetic oligonucleotide
  Sense strand starting at position 3296 of SEQ ID NO: 585973
gccuauccuguuggaaaga

SEQ ID NO: 682251 - RNA, 19 nt, Artificial Sequence
  Description of Artificial Sequence: Synthetic oligonucleotide
  Antisense strand to SEQ ID NO: 682250
ucuuuccaacaggauaggc

SEQ ID NO: 682252 - RNA, 19 nt, Artificial Sequence
  Description of Artificial Sequence: Synthetic oligonucleotide
  Sense strand starting at position 3432 of SEQ ID NO: 585973
caaaguugaggucacuuau

SEQ ID NO: 682253 - RNA, 19 nt, Artificial Sequence
  Description of Artificial Sequence: Synthetic oligonucleotide
  Antisense strand to SEQ ID NO: 682252
auaagugaccucaacuuug

SEQ ID NO: 682254 - RNA, 19 nt, Artificial Sequence
  Description of Artificial Sequence: Synthetic oligonucleotide
  Sense strand starting at position 3445 of SEQ ID NO: 585973
acuuaugaggccuaacugu

SEQ ID NO: 682255 - RNA, 19 nt, Artificial Sequence
  Description of Artificial Sequence: Synthetic oligonucleotide
  Antisense strand to SEQ ID NO: 682254
acaguuaggccucauaagu

SEQ ID NO: 682256 - RNA, 19 nt, Artificial Sequence
  Description of Artificial Sequence: Synthetic oligonucleotide
  Sense strand starting at position 3733 of SEQ ID NO: 585973
aggaaugagacacgauugu

SEQ ID NO: 682257 - RNA, 19 nt, Artificial Sequence
  Description of Artificial Sequence: Synthetic oligonucleotide
  Antisense strand to SEQ ID NO: 682256
acaaucgugucucauuccu

SEQ ID NO: 682258 - RNA, 19 nt, Artificial Sequence
  Description of Artificial Sequence: Synthetic oligonucleotide
  Sense strand starting at position 3737 of SEQ ID NO: 585973
augagacacgauugucacu

SEQ ID NO: 682259 - RNA, 19 nt, Artificial Sequence
  Description of Artificial Sequence: Synthetic oligonucleotide
  Antisense strand to SEQ ID NO: 682258
agugacaaucgugucucau

SEQ ID NO: 682260 - RNA, 19 nt, Artificial Sequence
  Description of Artificial Sequence: Synthetic oligonucleotide
  Sense strand starting at position 3742 of SEQ ID NO: 585973
acacgauugucacuugaga

SEQ ID NO: 682261 - RNA, 19 nt, Artificial Sequence
  Description of Artificial Sequence: Synthetic oligonucleotide
  Antisense strand to SEQ ID NO: 682260
ucucaagugacaaucgugu

SEQ ID NO: 682262 - RNA, 19 nt, Artificial Sequence
  Description of Artificial Sequence: Synthetic oligonucleotide
  Sense strand starting at position 3744 of SEQ ID NO: 585973
acgauugucacuugagacc

SEQ ID NO: 682263 - RNA, 19 nt, Artificial Sequence
  Description of Artificial Sequence: Synthetic oligonucleotide
  Antisense strand to SEQ ID NO: 682262
ggucucaagugacaaucgu

SEQ ID NO: 682264 - RNA, 19 nt, Artificial Sequence
  Description of Artificial Sequence: Synthetic oligonucleotide
  Sense strand starting at position 3968 of SEQ ID NO: 585973
gcgcuuggaauccaugauu

SEQ ID NO: 682265 - RNA, 19 nt, Artificial Sequence
  Description of Artificial Sequence: Synthetic oligonucleotide
  Antisense strand to SEQ ID NO: 682264
aaucauggauuccaagcgc

SEQ ID NO: 682266 - RNA, 19 nt, Artificial Sequence
  Description of Artificial Sequence: Synthetic oligonucleotide
  Sense strand starting at position 195 of SEQ ID NO: 585974
ugaccuaccuggucucaga

SEQ ID NO: 682267 - RNA, 19 nt, Artificial Sequence
  Description of Artificial Sequence: Synthetic oligonucleotide
  Antisense strand to SEQ ID NO: 682266
ucugagaccagguagguca

SEQ ID NO: 682268 - RNA, 19 nt, Artificial Sequence
  Description of Artificial Sequence: Synthetic oligonucleotide
  Sense strand starting at position 392 of SEQ ID NO: 585974
guaacugaggccugagauc

SEQ ID NO: 682269 - RNA, 19 nt, Artificial Sequence
  Description of Artificial Sequence: Synthetic oligonucleotide
  Antisense strand to SEQ ID NO: 682268
gaucucaggccucaguuac

SEQ ID NO: 682270 - RNA, 19 nt, Artificial Sequence
  Description of Artificial Sequence: Synthetic oligonucleotide
  Sense strand starting at position 401 of SEQ ID NO: 585974
gccugagaucuccauaacc

SEQ ID NO: 682271 - RNA, 19 nt, Artificial Sequence
  Description of Artificial Sequence: Synthetic oligonucleotide
  Antisense strand to SEQ ID NO: 682270
gguuauggagaucucaggc

SEQ ID NO: 682272 - RNA, 19 nt, Artificial Sequence
  Description of Artificial Sequence: Synthetic oligonucleotide
  Sense strand starting at position 496 of SEQ ID NO: 585974
caagguguuccauauggac

SEQ ID NO: 682273 - RNA, 19 nt, Artificial Sequence
  Description of Artificial Sequence: Synthetic oligonucleotide
  Antisense strand to SEQ ID NO: 682272
guccauauggaacaccuug

SEQ ID NO: 682274 - RNA, 19 nt, Artificial Sequence
  Description of Artificial Sequence: Synthetic oligonucleotide
  Sense strand starting at position 498 of SEQ ID NO: 585974
agguguuccauauggacuu

SEQ ID NO: 682275 - RNA, 19 nt, Artificial Sequence
  Description of Artificial Sequence: Synthetic oligonucleotide
  Antisense strand to SEQ ID NO: 682274
aaguccauauggaacaccu

SEQ ID NO: 682276 - RNA, 19 nt, Artificial Sequence
  Description of Artificial Sequence: Synthetic oligonucleotide
  Sense strand starting at position 533 of SEQ ID NO: 585974
ucccaucaucgugagaaca

SEQ ID NO: 682277 - RNA, 19 nt, Artificial Sequence
  Description of Artificial Sequence: Synthetic oligonucleotide
  Antisense strand to SEQ ID NO: 682276
uguucucacgaugauggga

SEQ ID NO: 682278 - RNA, 19 nt, Artificial Sequence
  Description of Artificial Sequence: Synthetic oligonucleotide
  Sense strand starting at position 555 of SEQ ID NO: 585974
cgaucuucugaucacauca

SEQ ID NO: 682279 - RNA, 19 nt, Artificial Sequence
  Description of Artificial Sequence: Synthetic oligonucleotide
  Antisense strand to SEQ ID NO: 682278
ugaugugaucagaagaucg

SEQ ID NO: 682280 - RNA, 19 nt, Artificial Sequence
  Description of Artificial Sequence: Synthetic oligonucleotide
  Sense strand starting at position 582 of SEQ ID NO: 585974
auguuucucucccuaagag

SEQ ID NO: 682281 - RNA, 19 nt, Artificial Sequence
  Description of Artificial Sequence: Synthetic oligonucleotide
  Antisense strand to SEQ ID NO: 682280
cucuuagggagagaaacau

SEQ ID NO: 682282 - RNA, 19 nt, Artificial Sequence
  Description of Artificial Sequence: Synthetic oligonucleotide
  Sense strand starting at position 583 of SEQ ID NO: 585974
uguuucucucccuaagaga

SEQ ID NO: 682283 - RNA, 19 nt, Artificial Sequence
  Description of Artificial Sequence: Synthetic oligonucleotide
  Antisense strand to SEQ ID NO: 682282
ucucuuagggagagaaaca

SEQ ID NO: 682284 - RNA, 19 nt, Artificial Sequence
  Description of Artificial Sequence: Synthetic oligonucleotide
  Sense strand starting at position 908 of SEQ ID NO: 585974
gaugucuuaagccaggagu

SEQ ID NO: 682285 - RNA, 19 nt, Artificial Sequence
  Description of Artificial Sequence: Synthetic oligonucleotide
  Antisense strand to SEQ ID NO: 682284
acuccuggcuuaagacauc

SEQ ID NO: 682286 - RNA, 19 nt, Artificial Sequence
  Description of Artificial Sequence: Synthetic oligonucleotide
  Sense strand starting at position 934 of SEQ ID NO: 585974
gccuaagaucugcaugaca

SEQ ID NO: 682287 - RNA, 19 nt, Artificial Sequence
  Description of Artificial Sequence: Synthetic oligonucleotide
  Antisense strand to SEQ ID NO: 682286
ugucaugcagaucuuaggc

SEQ ID NO: 682288 - RNA, 19 nt, Artificial Sequence
  Description of Artificial Sequence: Synthetic oligonucleotide
  Sense strand starting at position 1071 of SEQ ID NO: 585974
gaggguaccuucccaacaa

SEQ ID NO: 682289 - RNA, 19 nt, Artificial Sequence
  Description of Artificial Sequence: Synthetic oligonucleotide
  Antisense strand to SEQ ID NO: 682288
uuguugggaagguacccuc

SEQ ID NO: 682290 - RNA, 19 nt, Artificial Sequence
  Description of Artificial Sequence: Synthetic oligonucleotide
  Sense strand starting at position 1705 of SEQ ID NO: 585974
aguucugaugcccacacau

SEQ ID NO: 682291 - RNA, 19 nt, Artificial Sequence
  Description of Artificial Sequence: Synthetic oligonucleotide
  Antisense strand to SEQ ID NO: 682290
augugugggcaucagaacu

SEQ ID NO: 682292 - RNA, 19 nt, Artificial Sequence
  Description of Artificial Sequence: Synthetic oligonucleotide
  Sense strand starting at position 2266 of SEQ ID NO: 585974
aagaauaaagcuggugaau

SEQ ID NO: 682293 - RNA, 19 nt, Artificial Sequence
  Description of Artificial Sequence: Synthetic oligonucleotide
  Antisense strand to SEQ ID NO: 682292
auucaccagcuuuauucuu

SEQ ID NO: 682294 - RNA, 19 nt, Artificial Sequence
  Description of Artificial Sequence: Synthetic oligonucleotide
  Sense strand starting at position 2454 of SEQ ID NO: 585974
acaagauguucccuggaaa

SEQ ID NO: 682295 - RNA, 19 nt, Artificial Sequence
  Description of Artificial Sequence: Synthetic oligonucleotide
  Antisense strand to SEQ ID NO: 682294
uuuccagggaacaucuugu

SEQ ID NO: 682296 - RNA, 19 nt, Artificial Sequence
  Description of Artificial Sequence: Synthetic oligonucleotide
  Sense strand starting at position 2455 of SEQ ID NO: 585974
caagauguucccuggaaau

SEQ ID NO: 682297 - RNA, 19 nt, Artificial Sequence
  Description of Artificial Sequence: Synthetic oligonucleotide
  Antisense strand to SEQ ID NO: 682296
auuuccagggaacaucuug

SEQ ID NO: 682298 - RNA, 19 nt, Artificial Sequence
  Description of Artificial Sequence: Synthetic oligonucleotide
  Sense strand starting at position 2501 of SEQ ID NO: 585974
gagagugcuggucagggaa

SEQ ID NO: 682299 - RNA, 19 nt, Artificial Sequence
  Description of Artificial Sequence: Synthetic oligonucleotide
  Antisense strand to SEQ ID NO: 682298
uucccugaccagcacucuc

SEQ ID NO: 682300 - RNA, 19 nt, Artificial Sequence
  Description of Artificial Sequence: Synthetic oligonucleotide
  Sense strand starting at position 2538 of SEQ ID NO: 585974
guaggaguggaucaguuau

SEQ ID NO: 682301 - RNA, 19 nt, Artificial Sequence
  Description of Artificial Sequence: Synthetic oligonucleotide
  Antisense strand to SEQ ID NO: 682300
auaacugauccacuccuac

SEQ ID NO: 682302 - RNA, 19 nt, Artificial Sequence
  Description of Artificial Sequence: Synthetic oligonucleotide
  Sense strand starting at position 2558 of SEQ ID NO: 585974
guagcuugggaucaucuca

SEQ ID NO: 682303 - RNA, 19 nt, Artificial Sequence
  Description of Artificial Sequence: Synthetic oligonucleotide
  Antisense strand to SEQ ID NO: 682302
ugagaugaucccaagcuac

SEQ ID NO: 682304 - RNA, 19 nt, Artificial Sequence
  Description of Artificial Sequence: Synthetic oligonucleotide
  Sense strand starting at position 2691 of SEQ ID NO: 585974
cuggauuacuacccaaugu

SEQ ID NO: 682305 - RNA, 19 nt, Artificial Sequence
  Description of Artificial Sequence: Synthetic oligonucleotide
  Antisense strand to SEQ ID NO: 682304
acauuggguaguaauccag

SEQ ID NO: 682306 - RNA, 19 nt, Artificial Sequence
  Description of Artificial Sequence: Synthetic oligonucleotide
  Sense strand starting at position 2726 of SEQ ID NO: 585974
ggaguccaugcugauguaa

SEQ ID NO: 682307 - RNA, 19 nt, Artificial Sequence
  Description of Artificial Sequence: Synthetic oligonucleotide
  Antisense strand to SEQ ID NO: 682306
uuacaucagcauggacucc

SEQ ID NO: 682308 - RNA, 19 nt, Artificial Sequence
  Description of Artificial Sequence: Synthetic oligonucleotide
  Sense strand starting at position 2858 of SEQ ID NO: 585974
augugauagcguuaagagg

SEQ ID NO: 682309 - RNA, 19 nt, Artificial Sequence
  Description of Artificial Sequence: Synthetic oligonucleotide
  Antisense strand to SEQ ID NO: 682308
ccucuuaacgcuaucacau

SEQ ID NO: 682310 - RNA, 19 nt, Artificial Sequence
  Description of Artificial Sequence: Synthetic oligonucleotide
  Sense strand starting at position 2867 of SEQ ID NO: 585974
cguuaagaggugggaucuu

SEQ ID NO: 682311 - RNA, 19 nt, Artificial Sequence
  Description of Artificial Sequence: Synthetic oligonucleotide
  Antisense strand to SEQ ID NO: 682310
aagaucccaccucuuaacg

SEQ ID NO: 682312 - RNA, 19 nt, Artificial Sequence
  Description of Artificial Sequence: Synthetic oligonucleotide
  Sense strand starting at position 2908 of SEQ ID NO: 585974
gggcgucauccucaagaau

SEQ ID NO: 682313 - RNA, 19 nt, Artificial Sequence
  Description of Artificial Sequence: Synthetic oligonucleotide
  Antisense strand to SEQ ID NO: 682312
auucuugaggaugacgccc

SEQ ID NO: 682314 - RNA, 19 nt, Artificial Sequence
  Description of Artificial Sequence: Synthetic oligonucleotide
  Sense strand starting at position 2911 of SEQ ID NO: 585974
cgucauccucaagaaugca

SEQ ID NO: 682315 - RNA, 19 nt, Artificial Sequence
  Description of Artificial Sequence: Synthetic oligonucleotide
  Antisense strand to SEQ ID NO: 682314
ugcauucuugaggaugacg

SEQ ID NO: 682316 - RNA, 19 nt, Artificial Sequence
  Description of Artificial Sequence: Synthetic oligonucleotide
  Sense strand starting at position 2936 of SEQ ID NO: 585974
gcccuuauaccagagauug

SEQ ID NO: 682317 - RNA, 19 nt, Artificial Sequence
  Description of Artificial Sequence: Synthetic oligonucleotide
  Antisense strand to SEQ ID NO: 682316
caaucucugguauaagggc

SEQ ID NO: 682318 - RNA, 19 nt, Artificial Sequence
  Description of Artificial Sequence: Synthetic oligonucleotide
  Sense strand starting at position 3137 of SEQ ID NO: 585974
uuuagaaagucuccagucu

SEQ ID NO: 682319 - RNA, 19 nt, Artificial Sequence
  Description of Artificial Sequence: Synthetic oligonucleotide
  Antisense strand to SEQ ID NO: 682318
agacuggagacuuucuaaa

SEQ ID NO: 682320 - RNA, 19 nt, Artificial Sequence
  Description of Artificial Sequence: Synthetic oligonucleotide
  Sense strand starting at position 3138 of SEQ ID NO: 585974
uuagaaagucuccagucua

SEQ ID NO: 682321 - RNA, 19 nt, Artificial Sequence
  Description of Artificial Sequence: Synthetic oligonucleotide
  Antisense strand to SEQ ID NO: 682320
uagacuggagacuuucuaa

SEQ ID NO: 682322 - RNA, 19 nt, Artificial Sequence
  Description of Artificial Sequence: Synthetic oligonucleotide
  Sense strand starting at position 3239 of SEQ ID NO: 585974
auaaauucccacggcuuaa

SEQ ID NO: 682323 - RNA, 19 nt, Artificial Sequence
  Description of Artificial Sequence: Synthetic oligonucleotide
  Antisense strand to SEQ ID NO: 682322
uuaagccgugggaauuuau

SEQ ID NO: 682324 - RNA, 19 nt, Artificial Sequence
  Description of Artificial Sequence: Synthetic oligonucleotide
  Sense strand starting at position 3271 of SEQ ID NO: 585974
aggugacuuuccuccagag

SEQ ID NO: 682325 - RNA, 19 nt, Artificial Sequence
  Description of Artificial Sequence: Synthetic oligonucleotide
  Antisense strand to SEQ ID NO: 682324
cucuggaggaaagucaccu

SEQ ID NO: 682326 - RNA, 19 nt, Artificial Sequence
  Description of Artificial Sequence: Synthetic oligonucleotide
  Sense strand starting at position 3382 of SEQ ID NO: 585974
gauaacucagguuguuaga

SEQ ID NO: 682327 - RNA, 19 nt, Artificial Sequence
  Description of Artificial Sequence: Synthetic oligonucleotide
  Antisense strand to SEQ ID NO: 682326
ucuaacaaccugaguuauc

SEQ ID NO: 682328 - RNA, 19 nt, Artificial Sequence
  Description of Artificial Sequence: Synthetic oligonucleotide
  Sense strand starting at position 3384 of SEQ ID NO: 585974
uaacucagguuguuagaau

SEQ ID NO: 682329 - RNA, 19 nt, Artificial Sequence
  Description of Artificial Sequence: Synthetic oligonucleotide
  Antisense strand to SEQ ID NO: 682328
auucuaacaaccugaguua

SEQ ID NO: 682330 - RNA, 19 nt, Artificial Sequence
  Description of Artificial Sequence: Synthetic oligonucleotide
  Sense strand starting at position 3397 of SEQ ID NO: 585974
uagaaugugucauugacuu

SEQ ID NO: 682331 - RNA, 19 nt, Artificial Sequence
  Description of Artificial Sequence: Synthetic oligonucleotide
  Antisense strand to SEQ ID NO: 682330
aagucaaugacacauucua

SEQ ID NO: 682332 - RNA, 19 nt, Artificial Sequence
  Description of Artificial Sequence: Synthetic oligonucleotide
  Sense strand starting at position 3401 of SEQ ID NO: 585974
augugucauugacuugaug

SEQ ID NO: 682333 - RNA, 19 nt, Artificial Sequence
  Description of Artificial Sequence: Synthetic oligonucleotide
  Antisense strand to SEQ ID NO: 682332
caucaagucaaugacacau

SEQ ID NO: 682334 - RNA, 19 nt, Artificial Sequence
  Description of Artificial Sequence: Synthetic oligonucleotide
  Sense strand starting at position 3404 of SEQ ID NO: 585974
ugucauugacuugauguga

SEQ ID NO: 682335 - RNA, 19 nt, Artificial Sequence
  Description of Artificial Sequence: Synthetic oligonucleotide
  Antisense strand to SEQ ID NO: 682334
ucacaucaagucaaugaca

SEQ ID NO: 682336 - RNA, 19 nt, Artificial Sequence
  Description of Artificial Sequence: Synthetic oligonucleotide
  Sense strand starting at position 3417 of SEQ ID NO: 585974
augugaugacagggcaauu

SEQ ID NO: 682337 - RNA, 19 nt, Artificial Sequence
  Description of Artificial Sequence: Synthetic oligonucleotide
  Antisense strand to SEQ ID NO: 682336
aauugcccugucaucacau

SEQ ID NO: 682338 - RNA, 19 nt, Artificial Sequence
  Description of Artificial Sequence: Synthetic oligonucleotide
  Sense strand starting at position 3682 of SEQ ID NO: 585974
ggguaaucugaaugaagua

SEQ ID NO: 682339 - RNA, 19 nt, Artificial Sequence
  Description of Artificial Sequence: Synthetic oligonucleotide
  Antisense strand to SEQ ID NO: 682338
uacuucauucagauuaccc

SEQ ID NO: 682340 - RNA, 19 nt, Artificial Sequence
  Description of Artificial Sequence: Synthetic oligonucleotide
  Sense strand starting at position 3778 of SEQ ID NO: 585974
guagguauuguugaagaaa

SEQ ID NO: 682341 - RNA, 19 nt, Artificial Sequence
  Description of Artificial Sequence: Synthetic oligonucleotide
  Antisense strand to SEQ ID NO: 682340
uuucuucaacaauaccuac

SEQ ID NO: 682342 - RNA, 19 nt, Artificial Sequence
  Description of Artificial Sequence: Synthetic oligonucleotide
  Sense strand starting at position 3937 of SEQ ID NO: 585974
ugugguauugcuugauuua

SEQ ID NO: 682343 - RNA, 19 nt, Artificial Sequence
  Description of Artificial Sequence: Synthetic oligonucleotide
  Antisense strand to SEQ ID NO: 682342
uaaaucaagcaauaccaca

SEQ ID NO: 682344 - RNA, 19 nt, Artificial Sequence
  Description of Artificial Sequence: Synthetic oligonucleotide
  Sense strand starting at position 3940 of SEQ ID NO: 585974
gguauugcuugauuuagua

SEQ ID NO: 682345 - RNA, 19 nt, Artificial Sequence
  Description of Artificial Sequence: Synthetic oligonucleotide
  Antisense strand to SEQ ID NO: 682344
uacuaaaucaagcaauacc

SEQ ID NO: 682346 - RNA, 19 nt, Artificial Sequence
  Description of Artificial Sequence: Synthetic oligonucleotide
  Sense strand starting at position 61 of SEQ ID NO: 585975
ggcaaaggcugcugguuaa

SEQ ID NO: 682347 - RNA, 19 nt, Artificial Sequence
  Description of Artificial Sequence: Synthetic oligonucleotide
  Antisense strand to SEQ ID NO: 682346
uuaaccagcagccuuugcc

SEQ ID NO: 682348 - RNA, 19 nt, Artificial Sequence
  Description of Artificial Sequence: Synthetic oligonucleotide
  Sense strand starting at position 64 of SEQ ID NO: 585975
aaaggcugcugguuaacua

SEQ ID NO: 682349 - RNA, 19 nt, Artificial Sequence
  Description of Artificial Sequence: Synthetic oligonucleotide
  Antisense strand to SEQ ID NO: 682348
uaguuaaccagcagccuuu

SEQ ID NO: 682350 - RNA, 19 nt, Artificial Sequence
  Description of Artificial Sequence: Synthetic oligonucleotide
  Sense strand starting at position 104 of SEQ ID NO: 585975
cuguuauccucuccaguca

SEQ ID NO: 682351 - RNA, 19 nt, Artificial Sequence
  Description of Artificial Sequence: Synthetic oligonucleotide
  Antisense strand to SEQ ID NO: 682350
ugacuggagaggauaacag

SEQ ID NO: 682352 - RNA, 19 nt, Artificial Sequence
  Description of Artificial Sequence: Synthetic oligonucleotide
  Sense strand starting at position 168 of SEQ ID NO: 585975
aagggucagugaugcagaa

SEQ ID NO: 682353 - RNA, 19 nt, Artificial Sequence
  Description of Artificial Sequence: Synthetic oligonucleotide
  Antisense strand to SEQ ID NO: 682352
uucugcaucacugacccuu

SEQ ID NO: 682354 - RNA, 19 nt, Artificial Sequence
  Description of Artificial Sequence: Synthetic oligonucleotide
  Sense strand starting at position 191 of SEQ ID NO: 585975
ggugcuaacugggacaacu

SEQ ID NO: 682355 - RNA, 19 nt, Artificial Sequence
  Description of Artificial Sequence: Synthetic oligonucleotide
  Antisense strand to SEQ ID NO: 682354
aguugucccaguuagcacc

SEQ ID NO: 682356 - RNA, 19 nt, Artificial Sequence
  Description of Artificial Sequence: Synthetic oligonucleotide
  Sense strand starting at position 576 of SEQ ID NO: 585975
gugaaggagugguuugguu

SEQ ID NO: 682357 - RNA, 19 nt, Artificial Sequence
  Description of Artificial Sequence: Synthetic oligonucleotide
  Antisense strand to SEQ ID NO: 682356
aaccaaaccacuccuucac

SEQ ID NO: 682358 - RNA, 19 nt, Artificial Sequence
  Description of Artificial Sequence: Synthetic oligonucleotide
  Sense strand starting at position 581 of SEQ ID NO: 585975
ggagugguuugguugguuu

SEQ ID NO: 682359 - RNA, 19 nt, Artificial Sequence
  Description of Artificial Sequence: Synthetic oligonucleotide
  Antisense strand to SEQ ID NO: 682358
aaaccaaccaaaccacucc

SEQ ID NO: 682360 - RNA, 19 nt, Artificial Sequence
  Description of Artificial Sequence: Synthetic oligonucleotide
  Sense strand starting at position 767 of SEQ ID NO: 585975
acacauauguaucauguca

SEQ ID NO: 682361 - RNA, 19 nt, Artificial Sequence
  Description of Artificial Sequence: Synthetic oligonucleotide
  Antisense strand to SEQ ID NO: 682360
ugacaugauacauaugugu

SEQ ID NO: 682362 - RNA, 19 nt, Artificial Sequence
  Description of Artificial Sequence: Synthetic oligonucleotide
  Sense strand starting at position 769 of SEQ ID NO: 585975
acauauguaucaugucaaa

SEQ ID NO: 682363 - RNA, 19 nt, Artificial Sequence
  Description of Artificial Sequence: Synthetic oligonucleotide
  Antisense strand to SEQ ID NO: 682362
uuugacaugauacauaugu

SEQ ID NO: 682364 - RNA, 19 nt, Artificial Sequence
  Description of Artificial Sequence: Synthetic oligonucleotide
  Sense strand starting at position 809 of SEQ ID NO: 585975
gcgguuucuuagcuggaga

SEQ ID NO: 682365 - RNA, 19 nt, Artificial Sequence
  Description of Artificial Sequence: Synthetic oligonucleotide
  Antisense strand to SEQ ID NO: 682364
ucuccagcuaagaaaccgc

SEQ ID NO: 682366 - RNA, 19 nt, Artificial Sequence
  Description of Artificial Sequence: Synthetic oligonucleotide
  Sense strand starting at position 811 of SEQ ID NO: 585975
gguuucuuagcuggagaau

SEQ ID NO: 682367 - RNA, 19 nt, Artificial Sequence
  Description of Artificial Sequence: Synthetic oligonucleotide
  Antisense strand to SEQ ID NO: 682366
auucuccagcuaagaaacc

SEQ ID NO: 682368 - RNA, 19 nt, Artificial Sequence
  Description of Artificial Sequence: Synthetic oligonucleotide
  Sense strand starting at position 812 of SEQ ID NO: 585975
guuucuuagcuggagaaug

SEQ ID NO: 682369 - RNA, 19 nt, Artificial Sequence
  Description of Artificial Sequence: Synthetic oligonucleotide
  Antisense strand to SEQ ID NO: 682368
cauucuccagcuaagaaac

SEQ ID NO: 682370 - RNA, 19 nt, Artificial Sequence
  Description of Artificial Sequence: Synthetic oligonucleotide
  Sense strand starting at position 979 of SEQ ID NO: 585975
cugcuugcauagugaaagu

SEQ ID NO: 682371 - RNA, 19 nt, Artificial Sequence
  Description of Artificial Sequence: Synthetic oligonucleotide
  Antisense strand to SEQ ID NO: 682370
acuuucacuaugcaagcag

SEQ ID NO: 682372 - RNA, 19 nt, Artificial Sequence
  Description of Artificial Sequence: Synthetic oligonucleotide
  Sense strand starting at position 1059 of SEQ ID NO: 585975
ccgucuucucgaggagcau

SEQ ID NO: 682373 - RNA, 19 nt, Artificial Sequence
  Description of Artificial Sequence: Synthetic oligonucleotide
  Antisense strand to SEQ ID NO: 682372
augcuccucgagaagacgg

SEQ ID NO: 682374 - RNA, 19 nt, Artificial Sequence
  Description of Artificial Sequence: Synthetic oligonucleotide
  Sense strand starting at position 1127 of SEQ ID NO: 585975
uuggcuguuucugcaacaa

SEQ ID NO: 682375 - RNA, 19 nt, Artificial Sequence
  Description of Artificial Sequence: Synthetic oligonucleotide
  Antisense strand to SEQ ID NO: 682374
uuguugcagaaacagccaa

SEQ ID NO: 682376 - RNA, 19 nt, Artificial Sequence
  Description of Artificial Sequence: Synthetic oligonucleotide
  Sense strand starting at position 1152 of SEQ ID NO: 585975
gggcaauccgacgagaaga

SEQ ID NO: 682377 - RNA, 19 nt, Artificial Sequence
  Description of Artificial Sequence: Synthetic oligonucleotide
  Antisense strand to SEQ ID NO: 682376
ucuucucgucggauugccc

SEQ ID NO: 682378 - RNA, 19 nt, Artificial Sequence
  Description of Artificial Sequence: Synthetic oligonucleotide
  Sense strand starting at position 1279 of SEQ ID NO: 585975
gcccucagccuguaaacaa

SEQ ID NO: 682379 - RNA, 19 nt, Artificial Sequence
  Description of Artificial Sequence: Synthetic oligonucleotide
  Antisense strand to SEQ ID NO: 682378
uuguuuacaggcugagggc

SEQ ID NO: 682380 - RNA, 19 nt, Artificial Sequence
  Description of Artificial Sequence: Synthetic oligonucleotide
  Sense strand starting at position 1608 of SEQ ID NO: 585975
cggccagaaacuuacuagu

SEQ ID NO: 682381 - RNA, 19 nt, Artificial Sequence
  Description of Artificial Sequence: Synthetic oligonucleotide
  Antisense strand to SEQ ID NO: 682380
acuaguaaguuucuggccg

SEQ ID NO: 682382 - RNA, 19 nt, Artificial Sequence
  Description of Artificial Sequence: Synthetic oligonucleotide
  Sense strand starting at position 1610 of SEQ ID NO: 585975
gccagaaacuuacuaguga

SEQ ID NO: 682383 - RNA, 19 nt, Artificial Sequence
  Description of Artificial Sequence: Synthetic oligonucleotide
  Antisense strand to SEQ ID NO: 682382
ucacuaguaaguuucuggc

SEQ ID NO: 682384 - RNA, 19 nt, Artificial Sequence
  Description of Artificial Sequence: Synthetic oligonucleotide
  Sense strand starting at position 1614 of SEQ ID NO: 585975
gaaacuuacuagugagcaa

SEQ ID NO: 682385 - RNA, 19 nt, Artificial Sequence
  Description of Artificial Sequence: Synthetic oligonucleotide
  Antisense strand to SEQ ID NO: 682384
uugcucacuaguaaguuuc

SEQ ID NO: 682386 - RNA, 19 nt, Artificial Sequence
  Description of Artificial Sequence: Synthetic oligonucleotide
  Sense strand starting at position 1849 of SEQ ID NO: 585975
gccucucagccaucgcuua

SEQ ID NO: 682387 - RNA, 19 nt, Artificial Sequence
  Description of Artificial Sequence: Synthetic oligonucleotide
  Antisense strand to SEQ ID NO: 682386
uaagcgauggcugagaggc

SEQ ID NO: 682388 - RNA, 19 nt, Artificial Sequence
  Description of Artificial Sequence: Synthetic oligonucleotide
  Sense strand starting at position 2129 of SEQ ID NO: 585975
cagcaaaucgacugucaaa

SEQ ID NO: 682389 - RNA, 19 nt, Artificial Sequence
  Description of Artificial Sequence: Synthetic oligonucleotide
  Antisense strand to SEQ ID NO: 682388
uuugacagucgauuugcug

SEQ ID NO: 682390 - RNA, 19 nt, Artificial Sequence
  Description of Artificial Sequence: Synthetic oligonucleotide
  Sense strand starting at position 2257 of SEQ ID NO: 585975
gagauaucccuccgcagag

SEQ ID NO: 682391 - RNA, 19 nt, Artificial Sequence
  Description of Artificial Sequence: Synthetic oligonucleotide
  Antisense strand to SEQ ID NO: 682390
cucugcggagggauaucuc

SEQ ID NO: 682392 - RNA, 19 nt, Artificial Sequence
  Description of Artificial Sequence: Synthetic oligonucleotide
  Sense strand starting at position 2408 of SEQ ID NO: 585975
gcgcauuguucgcagccuu

SEQ ID NO: 682393 - RNA, 19 nt, Artificial Sequence
  Description of Artificial Sequence: Synthetic oligonucleotide
  Antisense strand to SEQ ID NO: 682392
aaggcugcgaacaaugcgc

SEQ ID NO: 682394 - RNA, 19 nt, Artificial Sequence
  Description of Artificial Sequence: Synthetic oligonucleotide
  Sense strand starting at position 2443 of SEQ ID NO: 585975
ugacuuuauuugugcgcuu

SEQ ID NO: 682395 - RNA, 19 nt, Artificial Sequence
  Description of Artificial Sequence: Synthetic oligonucleotide
  Antisense strand to SEQ ID NO: 682394
aagcgcacaaauaaaguca

SEQ ID NO: 682396 - RNA, 19 nt, Artificial Sequence
  Description of Artificial Sequence: Synthetic oligonucleotide
  Sense strand starting at position 2444 of SEQ ID NO: 585975
gacuuuauuugugcgcuuu

SEQ ID NO: 682397 - RNA, 19 nt, Artificial Sequence
  Description of Artificial Sequence: Synthetic oligonucleotide
  Antisense strand to SEQ ID NO: 682396
aaagcgcacaaauaaaguc

SEQ ID NO: 682398 - RNA, 19 nt, Artificial Sequence
  Description of Artificial Sequence: Synthetic oligonucleotide
  Sense strand starting at position 2664 of SEQ ID NO: 585975
gcaggauugcuuccugcgu

SEQ ID NO: 682399 - RNA, 19 nt, Artificial Sequence
  Description of Artificial Sequence: Synthetic oligonucleotide
  Antisense strand to SEQ ID NO: 682398
acgcaggaagcaauccugc

SEQ ID NO: 682400 - RNA, 19 nt, Artificial Sequence
  Description of Artificial Sequence: Synthetic oligonucleotide
  Sense strand starting at position 2665 of SEQ ID NO: 585975
caggauugcuuccugcgua

SEQ ID NO: 682401 - RNA, 19 nt, Artificial Sequence
  Description of Artificial Sequence: Synthetic oligonucleotide
  Antisense strand to SEQ ID NO: 682400
uacgcaggaagcaauccug

SEQ ID NO: 682402 - RNA, 19 nt, Artificial Sequence
  Description of Artificial Sequence: Synthetic oligonucleotide
  Sense strand starting at position 2683 of SEQ ID NO: 585975
agccgucccgguuauugua

SEQ ID NO: 682403 - RNA, 19 nt, Artificial Sequence
  Description of Artificial Sequence: Synthetic oligonucleotide
  Antisense strand to SEQ ID NO: 682402
uacaauaaccgggacggcu

SEQ ID NO: 682404 - RNA, 19 nt, Artificial Sequence
  Description of Artificial Sequence: Synthetic oligonucleotide
  Sense strand starting at position 2751 of SEQ ID NO: 585975
uuucuaaguguuugcaaag

SEQ ID NO: 682405 - RNA, 19 nt, Artificial Sequence
  Description of Artificial Sequence: Synthetic oligonucleotide
  Antisense strand to SEQ ID NO: 682404
cuuugcaaacacuuagaaa

SEQ ID NO: 682406 - RNA, 19 nt, Artificial Sequence
  Description of Artificial Sequence: Synthetic oligonucleotide
  Sense strand starting at position 2752 of SEQ ID NO: 585975
uucuaaguguuugcaaaga

SEQ ID NO: 682407 - RNA, 19 nt, Artificial Sequence
  Description of Artificial Sequence: Synthetic oligonucleotide
  Antisense strand to SEQ ID NO: 682406
ucuuugcaaacacuuagaa

SEQ ID NO: 682408 - RNA, 19 nt, Artificial Sequence
  Description of Artificial Sequence: Synthetic oligonucleotide
  Sense strand starting at position 3435 of SEQ ID NO: 585975
cuuuccuggucagaggaaa

SEQ ID NO: 682409 - RNA, 19 nt, Artificial Sequence
  Description of Artificial Sequence: Synthetic oligonucleotide
  Antisense strand to SEQ ID NO: 682408
uuuccucugaccaggaaag

SEQ ID NO: 682410 - RNA, 19 nt, Artificial Sequence
  Description of Artificial Sequence: Synthetic oligonucleotide
  Sense strand starting at position 3453 of SEQ ID NO: 585975
acgugaaccaaagguaguu

SEQ ID NO: 682411 - RNA, 19 nt, Artificial Sequence
  Description of Artificial Sequence: Synthetic oligonucleotide
  Antisense strand to SEQ ID NO: 682410
aacuaccuuugguucacgu

SEQ ID NO: 682412 - RNA, 19 nt, Artificial Sequence
  Description of Artificial Sequence: Synthetic oligonucleotide
  Sense strand starting at position 3699 of SEQ ID NO: 585975
gaggcuauaugggagcuua

SEQ ID NO: 682413 - RNA, 19 nt, Artificial Sequence
  Description of Artificial Sequence: Synthetic oligonucleotide
  Antisense strand to SEQ ID NO: 682412
uaagcucccauauagccuc

SEQ ID NO: 682414 - RNA, 19 nt, Artificial Sequence
  Description of Artificial Sequence: Synthetic oligonucleotide
  Sense strand starting at position 3736 of SEQ ID NO: 585975
ggaggagacugcugccaaa

SEQ ID NO: 682415 - RNA, 19 nt, Artificial Sequence
  Description of Artificial Sequence: Synthetic oligonucleotide
  Antisense strand to SEQ ID NO: 682414
uuuggcagcagucuccucc

SEQ ID NO: 682416 - RNA, 19 nt, Artificial Sequence
  Description of Artificial Sequence: Synthetic oligonucleotide
  Sense strand starting at position 3882 of SEQ ID NO: 585975
ccgggcuauuucgcuuaau

SEQ ID NO: 682417 - RNA, 19 nt, Artificial Sequence
  Description of Artificial Sequence: Synthetic oligonucleotide
  Antisense strand to SEQ ID NO: 682416
auuaagcgaaauagcccgg

SEQ ID NO: 682418 - RNA, 19 nt, Artificial Sequence
  Description of Artificial Sequence: Synthetic oligonucleotide
  Sense strand starting at position 3883 of SEQ ID NO: 585975
cgggcuauuucgcuuaaug

SEQ ID NO: 682419 - RNA, 19 nt, Artificial Sequence
  Description of Artificial Sequence: Synthetic oligonucleotide
  Antisense strand to SEQ ID NO: 682418
cauuaagcgaaauagcccg

SEQ ID NO: 682420 - RNA, 19 nt, Artificial Sequence
  Description of Artificial Sequence: Synthetic oligonucleotide
  Sense strand starting at position 475 of SEQ ID NO: 585976
gggucuucuuccucuugau

SEQ ID NO: 682421 - RNA, 19 nt, Artificial Sequence
  Description of Artificial Sequence: Synthetic oligonucleotide
  Antisense strand to SEQ ID NO: 682420
aucaagaggaagaagaccc

SEQ ID NO: 682422 - RNA, 19 nt, Artificial Sequence
  Description of Artificial Sequence: Synthetic oligonucleotide
  Sense strand starting at position 497 of SEQ ID NO: 585976
ucucuaagacuuuggauca

SEQ ID NO: 682423 - RNA, 19 nt, Artificial Sequence
  Description of Artificial Sequence: Synthetic oligonucleotide
  Antisense strand to SEQ ID NO: 682422
ugauccaaagucuuagaga

SEQ ID NO: 682424 - RNA, 19 nt, Artificial Sequence
  Description of Artificial Sequence: Synthetic oligonucleotide
  Sense strand starting at position 673 of SEQ ID NO: 585976
guuuccgacucaucccaaa

SEQ ID NO: 682425 - RNA, 19 nt, Artificial Sequence
  Description of Artificial Sequence: Synthetic oligonucleotide
  Antisense strand to SEQ ID NO: 682424
uuugggaugagucggaaac

SEQ ID NO: 682426 - RNA, 19 nt, Artificial Sequence
  Description of Artificial Sequence: Synthetic oligonucleotide
  Sense strand starting at position 730 of SEQ ID NO: 585976
aucaauuaucuguguauga

SEQ ID NO: 682427 - RNA, 19 nt, Artificial Sequence
  Description of Artificial Sequence: Synthetic oligonucleotide
  Antisense strand to SEQ ID NO: 682426
ucauacacagauaauugau

SEQ ID NO: 682428 - RNA, 19 nt, Artificial Sequence
  Description of Artificial Sequence: Synthetic oligonucleotide
  Sense strand starting at position 731 of SEQ ID NO: 585976
ucaauuaucuguguaugac

SEQ ID NO: 682429 - RNA, 19 nt, Artificial Sequence
  Description of Artificial Sequence: Synthetic oligonucleotide
  Antisense strand to SEQ ID NO: 682428
gucauacacagauaauuga

SEQ ID NO: 682430 - RNA, 19 nt, Artificial Sequence
  Description of Artificial Sequence: Synthetic oligonucleotide
  Sense strand starting at position 761 of SEQ ID NO: 585976
gaagaaacuuggguaaugu

SEQ ID NO: 682431 - RNA, 19 nt, Artificial Sequence
  Description of Artificial Sequence: Synthetic oligonucleotide
  Antisense strand to SEQ ID NO: 682430
acauuacccaaguuucuuc

SEQ ID NO: 682432 - RNA, 19 nt, Artificial Sequence
  Description of Artificial Sequence: Synthetic oligonucleotide
  Sense strand starting at position 844 of SEQ ID NO: 585976
acacgauaaauaugugugu

SEQ ID NO: 682433 - RNA, 19 nt, Artificial Sequence
  Description of Artificial Sequence: Synthetic oligonucleotide
  Antisense strand to SEQ ID NO: 682432
acacacauauuuaucgugu

SEQ ID NO: 682434 - RNA, 19 nt, Artificial Sequence
  Description of Artificial Sequence: Synthetic oligonucleotide
  Sense strand starting at position 1030 of SEQ ID NO: 585976
gccugaauauauguaaaca

SEQ ID NO: 682435 - RNA, 19 nt, Artificial Sequence
  Description of Artificial Sequence: Synthetic oligonucleotide
  Antisense strand to SEQ ID NO: 682434
uguuuacauauauucaggc

SEQ ID NO: 682436 - RNA, 19 nt, Artificial Sequence
  Description of Artificial Sequence: Synthetic oligonucleotide
  Sense strand starting at position 1211 of SEQ ID NO: 585976
acaccugauccauggcaca

SEQ ID NO: 682437 - RNA, 19 nt, Artificial Sequence
  Description of Artificial Sequence: Synthetic oligonucleotide
  Antisense strand to SEQ ID NO: 682436
ugugccauggaucaggugu

SEQ ID NO: 682438 - RNA, 19 nt, Artificial Sequence
  Description of Artificial Sequence: Synthetic oligonucleotide
  Sense strand starting at position 1239 of SEQ ID NO: 585976
acucauguuuggucacuca

SEQ ID NO: 682439 - RNA, 19 nt, Artificial Sequence
  Description of Artificial Sequence: Synthetic oligonucleotide
  Antisense strand to SEQ ID NO: 682438
ugagugaccaaacaugagu

SEQ ID NO: 682440 - RNA, 19 nt, Artificial Sequence
  Description of Artificial Sequence: Synthetic oligonucleotide
  Sense strand starting at position 1283 of SEQ ID NO: 585976
ucccguuaucuguuggcca

SEQ ID NO: 682441 - RNA, 19 nt, Artificial Sequence
  Description of Artificial Sequence: Synthetic oligonucleotide
  Antisense strand to SEQ ID NO: 682440
uggccaacagauaacggga

SEQ ID NO: 682442 - RNA, 19 nt, Artificial Sequence
  Description of Artificial Sequence: Synthetic oligonucleotide
  Sense strand starting at position 1290 of SEQ ID NO: 585976
aucuguuggccacaaguga

SEQ ID NO: 682443 - RNA, 19 nt, Artificial Sequence
  Description of Artificial Sequence: Synthetic oligonucleotide
  Antisense strand to SEQ ID NO: 682442
ucacuuguggccaacagau

SEQ ID NO: 682444 - RNA, 19 nt, Artificial Sequence
  Description of Artificial Sequence: Synthetic oligonucleotide
  Sense strand starting at position 1364 of SEQ ID NO: 585976
ucuauugccugggugauca

SEQ ID NO: 682445 - RNA, 19 nt, Artificial Sequence
  Description of Artificial Sequence: Synthetic oligonucleotide
  Antisense strand to SEQ ID NO: 682444
ugaucacccaggcaauaga

SEQ ID NO: 682446 - RNA, 19 nt, Artificial Sequence
  Description of Artificial Sequence: Synthetic oligonucleotide
  Sense strand starting at position 1376 of SEQ ID NO: 585976
gugaucauguaaguaagga

SEQ ID NO: 682447 - RNA, 19 nt, Artificial Sequence
  Description of Artificial Sequence: Synthetic oligonucleotide
  Antisense strand to SEQ ID NO: 682446
uccuuacuuacaugaucac

SEQ ID NO: 682448 - RNA, 19 nt, Artificial Sequence
  Description of Artificial Sequence: Synthetic oligonucleotide
  Sense strand starting at position 2355 of SEQ ID NO: 585976
gcugucuccaaagagauug

SEQ ID NO: 682449 - RNA, 19 nt, Artificial Sequence
  Description of Artificial Sequence: Synthetic oligonucleotide
  Antisense strand to SEQ ID NO: 682448
caaucucuuuggagacagc

SEQ ID NO: 682450 - RNA, 19 nt, Artificial Sequence
  Description of Artificial Sequence: Synthetic oligonucleotide
  Sense strand starting at position 2517 of SEQ ID NO: 585976
cuggaauauucccuaugau

SEQ ID NO: 682451 - RNA, 19 nt, Artificial Sequence
  Description of Artificial Sequence: Synthetic oligonucleotide
  Antisense strand to SEQ ID NO: 682450
aucauagggaauauuccag

SEQ ID NO: 682452 - RNA, 19 nt, Artificial Sequence
  Description of Artificial Sequence: Synthetic oligonucleotide
  Sense strand starting at position 2552 of SEQ ID NO: 585976
acuacuaacggccagaauu

SEQ ID NO: 682453 - RNA, 19 nt, Artificial Sequence
  Description of Artificial Sequence: Synthetic oligonucleotide
  Antisense strand to SEQ ID NO: 682452
aauucuggccguuaguagu

SEQ ID NO: 682454 - RNA, 19 nt, Artificial Sequence
  Description of Artificial Sequence: Synthetic oligonucleotide
  Sense strand starting at position 2852 of SEQ ID NO: 585976
cgcaaagugagccacauau

SEQ ID NO: 682455 - RNA, 19 nt, Artificial Sequence
  Description of Artificial Sequence: Synthetic oligonucleotide
  Antisense strand to SEQ ID NO: 682454
auauguggcucacuuugcg

SEQ ID NO: 682456 - RNA, 19 nt, Artificial Sequence
  Description of Artificial Sequence: Synthetic oligonucleotide
  Sense strand starting at position 2882 of SEQ ID NO: 585976
uuuccuaguggccauauaa

SEQ ID NO: 682457 - RNA, 19 nt, Artificial Sequence
  Description of Artificial Sequence: Synthetic oligonucleotide
  Antisense strand to SEQ ID NO: 682456
uuauauggccacuaggaaa

SEQ ID NO: 682458 - RNA, 19 nt, Artificial Sequence
  Description of Artificial Sequence: Synthetic oligonucleotide
  Sense strand starting at position 2905 of SEQ ID NO: 585976
agucuaaacaggugaaagu

SEQ ID NO: 682459 - RNA, 19 nt, Artificial Sequence
  Description of Artificial Sequence: Synthetic oligonucleotide
  Antisense strand to SEQ ID NO: 682458
acuuucaccuguuuagacu

SEQ ID NO: 682460 - RNA, 19 nt, Artificial Sequence
  Description of Artificial Sequence: Synthetic oligonucleotide
  Sense strand starting at position 3389 of SEQ ID NO: 585976
aaagaaauccgguauguau

SEQ ID NO: 682461 - RNA, 19 nt, Artificial Sequence
  Description of Artificial Sequence: Synthetic oligonucleotide
  Antisense strand to SEQ ID NO: 682460
auacauaccggauuucuuu

SEQ ID NO: 682462 - RNA, 19 nt, Artificial Sequence
  Description of Artificial Sequence: Synthetic oligonucleotide
  Sense strand starting at position 3477 of SEQ ID NO: 585976
ggcuccuguauuggacaaa

SEQ ID NO: 682463 - RNA, 19 nt, Artificial Sequence
  Description of Artificial Sequence: Synthetic oligonucleotide
  Antisense strand to SEQ ID NO: 682462
uuuguccaauacaggagcc

SEQ ID NO: 682464 - RNA, 19 nt, Artificial Sequence
  Description of Artificial Sequence: Synthetic oligonucleotide
  Sense strand starting at position 3552 of SEQ ID NO: 585976
guaauaaagugauuagagu

SEQ ID NO: 682465 - RNA, 19 nt, Artificial Sequence
  Description of Artificial Sequence: Synthetic oligonucleotide
  Antisense strand to SEQ ID NO: 682464
acucuaaucacuuuauuac

SEQ ID NO: 682466 - RNA, 19 nt, Artificial Sequence
  Description of Artificial Sequence: Synthetic oligonucleotide
  Sense strand starting at position 3644 of SEQ ID NO: 585976
agaugugugcaugggugaa

SEQ ID NO: 682467 - RNA, 19 nt, Artificial Sequence
  Description of Artificial Sequence: Synthetic oligonucleotide
  Antisense strand to SEQ ID NO: 682466
uucacccaugcacacaucu

SEQ ID NO: 682468 - RNA, 19 nt, Artificial Sequence
  Description of Artificial Sequence: Synthetic oligonucleotide
  Sense strand starting at position 3677 of SEQ ID NO: 585976
gaucuuggucuuggcauga

SEQ ID NO: 682469 - RNA, 19 nt, Artificial Sequence
  Description of Artificial Sequence: Synthetic oligonucleotide
  Antisense strand to SEQ ID NO: 682468
ucaugccaagaccaagauc

SEQ ID NO: 682470 - RNA, 19 nt, Artificial Sequence
  Description of Artificial Sequence: Synthetic oligonucleotide
  Sense strand starting at position 3714 of SEQ ID NO: 585976
ggcuuuaagccaggagacu

SEQ ID NO: 682471 - RNA, 19 nt, Artificial Sequence
  Description of Artificial Sequence: Synthetic oligonucleotide
  Antisense strand to SEQ ID NO: 682470
agucuccuggcuuaaagcc

SEQ ID NO: 682472 - RNA, 19 nt, Artificial Sequence
  Description of Artificial Sequence: Synthetic oligonucleotide
  Sense strand starting at position 3772 of SEQ ID NO: 585976
uuuggaaagucacuuuaca

SEQ ID NO: 682473 - RNA, 19 nt, Artificial Sequence
  Description of Artificial Sequence: Synthetic oligonucleotide
  Antisense strand to SEQ ID NO: 682472
uguaaagugacuuuccaaa

SEQ ID NO: 682474 - RNA, 19 nt, Artificial Sequence
  Description of Artificial Sequence: Synthetic oligonucleotide
  Sense strand starting at position 3791 of SEQ ID NO: 585976
uuuggaaagucaguuuaca

SEQ ID NO: 682475 - RNA, 19 nt, Artificial Sequence
  Description of Artificial Sequence: Synthetic oligonucleotide
  Antisense strand to SEQ ID NO: 682474
uguaaacugacuuuccaaa

SEQ ID NO: 682476 - RNA, 19 nt, Artificial Sequence
  Description of Artificial Sequence: Synthetic oligonucleotide
  Sense strand starting at position 3830 of SEQ ID NO: 585976
agguaauaauguuugccua

SEQ ID NO: 682477 - RNA, 19 nt, Artificial Sequence
  Description of Artificial Sequence: Synthetic oligonucleotide
  Antisense strand to SEQ ID NO: 682476
uaggcaaacauuauuaccu

SEQ ID NO: 682478 - RNA, 19 nt, Artificial Sequence
  Description of Artificial Sequence: Synthetic oligonucleotide
  Sense strand starting at position 3832 of SEQ ID NO: 585976
guaauaauguuugccuaga

SEQ ID NO: 682479 - RNA, 19 nt, Artificial Sequence
  Description of Artificial Sequence: Synthetic oligonucleotide
  Antisense strand to SEQ ID NO: 682478
ucuaggcaaacauuauuac

SEQ ID NO: 682480 - RNA, 19 nt, Artificial Sequence
  Description of Artificial Sequence: Synthetic oligonucleotide
  Sense strand starting at position 3833 of SEQ ID NO: 585976
uaauaauguuugccuagag

SEQ ID NO: 682481 - RNA, 19 nt, Artificial Sequence
  Description of Artificial Sequence: Synthetic oligonucleotide
  Antisense strand to SEQ ID NO: 682480
cucuaggcaaacauuauua

SEQ ID NO: 682482 - RNA, 19 nt, Artificial Sequence
  Description of Artificial Sequence: Synthetic oligonucleotide
  Sense strand starting at position 3837 of SEQ ID NO: 585976
aauguuugccuagaggguu

SEQ ID NO: 682483 - RNA, 19 nt, Artificial Sequence
  Description of Artificial Sequence: Synthetic oligonucleotide
  Antisense strand to SEQ ID NO: 682482
aacccucuaggcaaacauu

SEQ ID NO: 682484 - RNA, 19 nt, Artificial Sequence
  Description of Artificial Sequence: Synthetic oligonucleotide
  Sense strand starting at position 3843 of SEQ ID NO: 585976
ugccuagaggguuauuaaa

SEQ ID NO: 682485 - RNA, 19 nt, Artificial Sequence
  Description of Artificial Sequence: Synthetic oligonucleotide
  Antisense strand to SEQ ID NO: 682484
uuuaauaacccucuaggca

SEQ ID NO: 682486 - RNA, 19 nt, Artificial Sequence
  Description of Artificial Sequence: Synthetic oligonucleotide
  Sense strand starting at position 3892 of SEQ ID NO: 585976
ccuagauaaaugugguuga

SEQ ID NO: 682487 - RNA, 19 nt, Artificial Sequence
  Description of Artificial Sequence: Synthetic oligonucleotide
  Antisense strand to SEQ ID NO: 682486
ucaaccacauuuaucuagg

SEQ ID NO: 682488 - RNA, 19 nt, Artificial Sequence
  Description of Artificial Sequence: Synthetic oligonucleotide
  Sense strand starting at position 3895 of SEQ ID NO: 585976
agauaaaugugguugaaac

SEQ ID NO: 682489 - RNA, 19 nt, Artificial Sequence
  Description of Artificial Sequence: Synthetic oligonucleotide
  Antisense strand to SEQ ID NO: 682488
guuucaaccacauuuaucu

SEQ ID NO: 682490 - RNA, 19 nt, Artificial Sequence
  Description of Artificial Sequence: Synthetic oligonucleotide
  Sense strand starting at position 3896 of SEQ ID NO: 585976
gauaaaugugguugaaacu

SEQ ID NO: 682491 - RNA, 19 nt, Artificial Sequence
  Description of Artificial Sequence: Synthetic oligonucleotide
  Antisense strand to SEQ ID NO: 682490
aguuucaaccacauuuauc

SEQ ID NO: 682492 - RNA, 19 nt, Artificial Sequence
  Description of Artificial Sequence: Synthetic oligonucleotide
  Sense strand starting at position 3902 of SEQ ID NO: 585976
ugugguugaaacugauuau

SEQ ID NO: 682493 - RNA, 19 nt, Artificial Sequence
  Description of Artificial Sequence: Synthetic oligonucleotide
  Antisense strand to SEQ ID NO: 682492
auaaucaguuucaaccaca

SEQ ID NO: 682494 - RNA, 19 nt, Artificial Sequence
  Description of Artificial Sequence: Synthetic oligonucleotide
  Sense strand starting at position 3903 of SEQ ID NO: 585976
gugguugaaacugauuauc

SEQ ID NO: 682495 - RNA, 19 nt, Artificial Sequence
  Description of Artificial Sequence: Synthetic oligonucleotide
  Antisense strand to SEQ ID NO: 682494
gauaaucaguuucaaccac

SEQ ID NO: 682496 - RNA, 19 nt, Artificial Sequence
  Description of Artificial Sequence: Synthetic oligonucleotide
  Sense strand starting at position 3905 of SEQ ID NO: 585976
gguugaaacugauuaucug

SEQ ID NO: 682497 - RNA, 19 nt, Artificial Sequence
  Description of Artificial Sequence: Synthetic oligonucleotide
  Antisense strand to SEQ ID NO: 682496
cagauaaucaguuucaacc

SEQ ID NO: 682498 - RNA, 19 nt, Artificial Sequence
  Description of Artificial Sequence: Synthetic oligonucleotide
  Sense strand starting at position 3914 of SEQ ID NO: 585976
ugauuaucugacuaaucgu

SEQ ID NO: 682499 - RNA, 19 nt, Artificial Sequence
  Description of Artificial Sequence: Synthetic oligonucleotide
  Antisense strand to SEQ ID NO: 682498
acgauuagucagauaauca

SEQ ID NO: 682500 - RNA, 19 nt, Artificial Sequence
  Description of Artificial Sequence: Synthetic oligonucleotide
  Sense strand starting at position 178 of SEQ ID NO: 585977
ggaagagacuaugugcaaa

SEQ ID NO: 682501 - RNA, 19 nt, Artificial Sequence
  Description of Artificial Sequence: Synthetic oligonucleotide
  Antisense strand to SEQ ID NO: 682500
uuugcacauagucucuucc

SEQ ID NO: 682502 - RNA, 19 nt, Artificial Sequence
  Description of Artificial Sequence: Synthetic oligonucleotide
  Sense strand starting at position 339 of SEQ ID NO: 585977
uugaaugucuugcuaaaga

SEQ ID NO: 682503 - RNA, 19 nt, Artificial Sequence
  Description of Artificial Sequence: Synthetic oligonucleotide
  Antisense strand to SEQ ID NO: 682502
ucuuuagcaagacauucaa

SEQ ID NO: 682504 - RNA, 19 nt, Artificial Sequence
  Description of Artificial Sequence: Synthetic oligonucleotide
  Sense strand starting at position 349 of SEQ ID NO: 585977
ugcuaaagaccuuggacuu

SEQ ID NO: 682505 - RNA, 19 nt, Artificial Sequence
  Description of Artificial Sequence: Synthetic oligonucleotide
  Antisense strand to SEQ ID NO: 682504
aaguccaaggucuuuagca

SEQ ID NO: 682506 - RNA, 19 nt, Artificial Sequence
  Description of Artificial Sequence: Synthetic oligonucleotide
  Sense strand starting at position 553 of SEQ ID NO: 585977
auuaaagauuugggagaug

SEQ ID NO: 682507 - RNA, 19 nt, Artificial Sequence
  Description of Artificial Sequence: Synthetic oligonucleotide
  Antisense strand to SEQ ID NO: 682506
caucucccaaaucuuuaau

SEQ ID NO: 682508 - RNA, 19 nt, Artificial Sequence
  Description of Artificial Sequence: Synthetic oligonucleotide
  Sense strand starting at position 824 of SEQ ID NO: 585977
gcccauaaucugcagaaga

SEQ ID NO: 682509 - RNA, 19 nt, Artificial Sequence
  Description of Artificial Sequence: Synthetic oligonucleotide
  Antisense strand to SEQ ID NO: 682508
ucuucugcagauuaugggc

SEQ ID NO: 682510 - RNA, 19 nt, Artificial Sequence
  Description of Artificial Sequence: Synthetic oligonucleotide
  Sense strand starting at position 854 of SEQ ID NO: 585977
auuggagcuuucuuuccau

SEQ ID NO: 682511 - RNA, 19 nt, Artificial Sequence
  Description of Artificial Sequence: Synthetic oligonucleotide
  Antisense strand to SEQ ID NO: 682510
auggaaagaaagcuccaau

SEQ ID NO: 682512 - RNA, 19 nt, Artificial Sequence
  Description of Artificial Sequence: Synthetic oligonucleotide
  Sense strand starting at position 860 of SEQ ID NO: 585977
gcuuucuuuccauagugag

SEQ ID NO: 682513 - RNA, 19 nt, Artificial Sequence
  Description of Artificial Sequence: Synthetic oligonucleotide
  Antisense strand to SEQ ID NO: 682512
cucacuauggaaagaaagc

SEQ ID NO: 682514 - RNA, 19 nt, Artificial Sequence
  Description of Artificial Sequence: Synthetic oligonucleotide
  Sense strand starting at position 1000 of SEQ ID NO: 585977
cugggaaugccucgaaagu

SEQ ID NO: 682515 - RNA, 19 nt, Artificial Sequence
  Description of Artificial Sequence: Synthetic oligonucleotide
  Antisense strand to SEQ ID NO: 682514
acuuucgaggcauucccag

SEQ ID NO: 682516 - RNA, 19 nt, Artificial Sequence
  Description of Artificial Sequence: Synthetic oligonucleotide
  Sense strand starting at position 1001 of SEQ ID NO: 585977
ugggaaugccucgaaaguc

SEQ ID NO: 682517 - RNA, 19 nt, Artificial Sequence
  Description of Artificial Sequence: Synthetic oligonucleotide
  Antisense strand to SEQ ID NO: 682516
gacuuucgaggcauuccca

SEQ ID NO: 682518 - RNA, 19 nt, Artificial Sequence
  Description of Artificial Sequence: Synthetic oligonucleotide
  Sense strand starting at position 2010 of SEQ ID NO: 585977
gagugagagguguggacuu

SEQ ID NO: 682519 - RNA, 19 nt, Artificial Sequence
  Description of Artificial Sequence: Synthetic oligonucleotide
  Antisense strand to SEQ ID NO: 682518
aaguccacaccucucacuc

SEQ ID NO: 682520 - RNA, 19 nt, Artificial Sequence
  Description of Artificial Sequence: Synthetic oligonucleotide
  Sense strand starting at position 2028 of SEQ ID NO: 585977
ucgggagauucugccggaa

SEQ ID NO: 682521 - RNA, 19 nt, Artificial Sequence
  Description of Artificial Sequence: Synthetic oligonucleotide
  Antisense strand to SEQ ID NO: 682520
uuccggcagaaucucccga

SEQ ID NO: 682522 - RNA, 19 nt, Artificial Sequence
  Description of Artificial Sequence: Synthetic oligonucleotide
  Sense strand starting at position 2031 of SEQ ID NO: 585977
ggagauucugccggaagug

SEQ ID NO: 682523 - RNA, 19 nt, Artificial Sequence
  Description of Artificial Sequence: Synthetic oligonucleotide
  Antisense strand to SEQ ID NO: 682522
cacuuccggcagaaucucc

SEQ ID NO: 682524 - RNA, 19 nt, Artificial Sequence
  Description of Artificial Sequence: Synthetic oligonucleotide
  Sense strand starting at position 2032 of SEQ ID NO: 585977
gagauucugccggaagugu

SEQ ID NO: 682525 - RNA, 19 nt, Artificial Sequence
  Description of Artificial Sequence: Synthetic oligonucleotide
  Antisense strand to SEQ ID NO: 682524
acacuuccggcagaaucuc

SEQ ID NO: 682526 - RNA, 19 nt, Artificial Sequence
  Description of Artificial Sequence: Synthetic oligonucleotide
  Sense strand starting at position 2076 of SEQ ID NO: 585977
gcagguaggguguaaggau

SEQ ID NO: 682527 - RNA, 19 nt, Artificial Sequence
  Description of Artificial Sequence: Synthetic oligonucleotide
  Antisense strand to SEQ ID NO: 682526
auccuuacacccuaccugc

SEQ ID NO: 682528 - RNA, 19 nt, Artificial Sequence
  Description of Artificial Sequence: Synthetic oligonucleotide
  Sense strand starting at position 2083 of SEQ ID NO: 585977
ggguguaaggauugcucau

SEQ ID NO: 682529 - RNA, 19 nt, Artificial Sequence
  Description of Artificial Sequence: Synthetic oligonucleotide
  Antisense strand to SEQ ID NO: 682528
augagcaauccuuacaccc

SEQ ID NO: 682530 - RNA, 19 nt, Artificial Sequence
  Description of Artificial Sequence: Synthetic oligonucleotide
  Sense strand starting at position 2210 of SEQ ID NO: 585977
ucggguaacacuggacuau

SEQ ID NO: 682531 - RNA, 19 nt, Artificial Sequence
  Description of Artificial Sequence: Synthetic oligonucleotide
  Antisense strand to SEQ ID NO: 682530
auaguccaguguuacccga

SEQ ID NO: 682532 - RNA, 19 nt, Artificial Sequence
  Description of Artificial Sequence: Synthetic oligonucleotide
  Sense strand starting at position 2211 of SEQ ID NO: 585977
cggguaacacuggacuauu

SEQ ID NO: 682533 - RNA, 19 nt, Artificial Sequence
  Description of Artificial Sequence: Synthetic oligonucleotide
  Antisense strand to SEQ ID NO: 682532
aauaguccaguguuacccg

SEQ ID NO: 682534 - RNA, 19 nt, Artificial Sequence
  Description of Artificial Sequence: Synthetic oligonucleotide
  Sense strand starting at position 2345 of SEQ ID NO: 585977
uuagucagauaaucaguuu

SEQ ID NO: 682535 - RNA, 19 nt, Artificial Sequence
  Description of Artificial Sequence: Synthetic oligonucleotide
  Antisense strand to SEQ ID NO: 682534
aaacugauuaucugacuaa

SEQ ID NO: 682536 - RNA, 19 nt, Artificial Sequence
  Description of Artificial Sequence: Synthetic oligonucleotide
  Sense strand starting at position 2373 of SEQ ID NO: 585977
uuaucuaggguuuaguauu

SEQ ID NO: 682537 - RNA, 19 nt, Artificial Sequence
  Description of Artificial Sequence: Synthetic oligonucleotide
  Antisense strand to SEQ ID NO: 682536
aauacuaaacccuagauaa

SEQ ID NO: 682538 - RNA, 19 nt, Artificial Sequence
  Description of Artificial Sequence: Synthetic oligonucleotide
  Sense strand starting at position 2503 of SEQ ID NO: 585977
gucacaaagcuagaaagua

SEQ ID NO: 682539 - RNA, 19 nt, Artificial Sequence
  Description of Artificial Sequence: Synthetic oligonucleotide
  Antisense strand to SEQ ID NO: 682538
uacuuucuagcuuugugac

SEQ ID NO: 682540 - RNA, 19 nt, Artificial Sequence
  Description of Artificial Sequence: Synthetic oligonucleotide
  Sense strand starting at position 2516 of SEQ ID NO: 585977
aaaguaucacguuaaggac

SEQ ID NO: 682541 - RNA, 19 nt, Artificial Sequence
  Description of Artificial Sequence: Synthetic oligonucleotide
  Antisense strand to SEQ ID NO: 682540
guccuuaacgugauacuuu

SEQ ID NO: 682542 - RNA, 19 nt, Artificial Sequence
  Description of Artificial Sequence: Synthetic oligonucleotide
  Sense strand starting at position 2539 of SEQ ID NO: 585977
ccagucuccuggcuuaaag

SEQ ID NO: 682543 - RNA, 19 nt, Artificial Sequence
  Description of Artificial Sequence: Synthetic oligonucleotide
  Antisense strand to SEQ ID NO: 682542
cuuuaagccaggagacugg

SEQ ID NO: 682544 - RNA, 19 nt, Artificial Sequence
  Description of Artificial Sequence: Synthetic oligonucleotide
  Sense strand starting at position 2618 of SEQ ID NO: 585977
augcacacaucuguggaua

SEQ ID NO: 682545 - RNA, 19 nt, Artificial Sequence
  Description of Artificial Sequence: Synthetic oligonucleotide
  Antisense strand to SEQ ID NO: 682544
uauccacagaugugugcau

SEQ ID NO: 682546 - RNA, 19 nt, Artificial Sequence
  Description of Artificial Sequence: Synthetic oligonucleotide
  Sense strand starting at position 2619 of SEQ ID NO: 585977
ugcacacaucuguggauaa

SEQ ID NO: 682547 - RNA, 19 nt, Artificial Sequence
  Description of Artificial Sequence: Synthetic oligonucleotide
  Antisense strand to SEQ ID NO: 682546
uuauccacagaugugugca

SEQ ID NO: 682548 - RNA, 19 nt, Artificial Sequence
  Description of Artificial Sequence: Synthetic oligonucleotide
  Sense strand starting at position 2768 of SEQ ID NO: 585977
caggaacuaguuuguccaa

SEQ ID NO: 682549 - RNA, 19 nt, Artificial Sequence
  Description of Artificial Sequence: Synthetic oligonucleotide
  Antisense strand to SEQ ID NO: 682548
uuggacaaacuaguuccug

SEQ ID NO: 682550 - RNA, 19 nt, Artificial Sequence
  Description of Artificial Sequence: Synthetic oligonucleotide
  Sense strand starting at position 2769 of SEQ ID NO: 585977
aggaacuaguuuguccaau

SEQ ID NO: 682551 - RNA, 19 nt, Artificial Sequence
  Description of Artificial Sequence: Synthetic oligonucleotide
  Antisense strand to SEQ ID NO: 682550
auuggacaaacuaguuccu

SEQ ID NO: 682552 - RNA, 19 nt, Artificial Sequence
  Description of Artificial Sequence: Synthetic oligonucleotide
  Sense strand starting at position 2775 of SEQ ID NO: 585977
uaguuuguccaauacagga

SEQ ID NO: 682553 - RNA, 19 nt, Artificial Sequence
  Description of Artificial Sequence: Synthetic oligonucleotide
  Antisense strand to SEQ ID NO: 682552
uccuguauuggacaaacua

SEQ ID NO: 682554 - RNA, 19 nt, Artificial Sequence
  Description of Artificial Sequence: Synthetic oligonucleotide
  Sense strand starting at position 2808 of SEQ ID NO: 585977
gugucuacugagcacugaa

SEQ ID NO: 682555 - RNA, 19 nt, Artificial Sequence
  Description of Artificial Sequence: Synthetic oligonucleotide
  Antisense strand to SEQ ID NO: 682554
uucagugcucaguagacac

SEQ ID NO: 682556 - RNA, 19 nt, Artificial Sequence
  Description of Artificial Sequence: Synthetic oligonucleotide
  Sense strand starting at position 2811 of SEQ ID NO: 585977
ucuacugagcacugaaaug

SEQ ID NO: 682557 - RNA, 19 nt, Artificial Sequence
  Description of Artificial Sequence: Synthetic oligonucleotide
  Antisense strand to SEQ ID NO: 682556
cauuucagugcucaguaga

SEQ ID NO: 682558 - RNA, 19 nt, Artificial Sequence
  Description of Artificial Sequence: Synthetic oligonucleotide
  Sense strand starting at position 3411 of SEQ ID NO: 585977
cucacuuugcguuuauguu

SEQ ID NO: 682559 - RNA, 19 nt, Artificial Sequence
  Description of Artificial Sequence: Synthetic oligonucleotide
  Antisense strand to SEQ ID NO: 682558
aacauaaacgcaaagugag

SEQ ID NO: 682560 - RNA, 19 nt, Artificial Sequence
  Description of Artificial Sequence: Synthetic oligonucleotide
  Sense strand starting at position 3421 of SEQ ID NO: 585977
guuuauguugaauagcauu

SEQ ID NO: 682561 - RNA, 19 nt, Artificial Sequence
  Description of Artificial Sequence: Synthetic oligonucleotide
  Antisense strand to SEQ ID NO: 682560
aaugcuauucaacauaaac

SEQ ID NO: 682562 - RNA, 19 nt, Artificial Sequence
  Description of Artificial Sequence: Synthetic oligonucleotide
  Sense strand starting at position 3429 of SEQ ID NO: 585977
ugaauagcauugcucggaa

SEQ ID NO: 682563 - RNA, 19 nt, Artificial Sequence
  Description of Artificial Sequence: Synthetic oligonucleotide
  Antisense strand to SEQ ID NO: 682562
uuccgagcaaugcuauuca

SEQ ID NO: 682564 - RNA, 19 nt, Artificial Sequence
  Description of Artificial Sequence: Synthetic oligonucleotide
  Sense strand starting at position 3431 of SEQ ID NO: 585977
aauagcauugcucggaaga

SEQ ID NO: 682565 - RNA, 19 nt, Artificial Sequence
  Description of Artificial Sequence: Synthetic oligonucleotide
  Antisense strand to SEQ ID NO: 682564
ucuuccgagcaaugcuauu

SEQ ID NO: 682566 - RNA, 19 nt, Artificial Sequence
  Description of Artificial Sequence: Synthetic oligonucleotide
  Sense strand starting at position 3557 of SEQ ID NO: 585977
uccuaauagcacugauguu

SEQ ID NO: 682567 - RNA, 19 nt, Artificial Sequence
  Description of Artificial Sequence: Synthetic oligonucleotide
  Antisense strand to SEQ ID NO: 682566
aacaucagugcuauuagga

SEQ ID NO: 682568 - RNA, 19 nt, Artificial Sequence
  Description of Artificial Sequence: Synthetic oligonucleotide
  Sense strand starting at position 3567 of SEQ ID NO: 585977
acugauguugcagagcaga

SEQ ID NO: 682569 - RNA, 19 nt, Artificial Sequence
  Description of Artificial Sequence: Synthetic oligonucleotide
  Antisense strand to SEQ ID NO: 682568
ucugcucugcaacaucagu

SEQ ID NO: 682570 - RNA, 19 nt, Artificial Sequence
  Description of Artificial Sequence: Synthetic oligonucleotide
  Sense strand starting at position 3699 of SEQ ID NO: 585977
aauaaauucuggccguuag

SEQ ID NO: 682571 - RNA, 19 nt, Artificial Sequence
  Description of Artificial Sequence: Synthetic oligonucleotide
  Antisense strand to SEQ ID NO: 682570
cuaacggccagaauuuauu

SEQ ID NO: 682572 - RNA, 19 nt, Artificial Sequence
  Description of Artificial Sequence: Synthetic oligonucleotide
  Sense strand starting at position 3787 of SEQ ID NO: 585977
aggcaucaccauugaaguu

SEQ ID NO: 682573 - RNA, 19 nt, Artificial Sequence
  Description of Artificial Sequence: Synthetic oligonucleotide
  Antisense strand to SEQ ID NO: 682572
aacuucaauggugaugccu

SEQ ID NO: 682574 - RNA, 19 nt, Artificial Sequence
  Description of Artificial Sequence: Synthetic oligonucleotide
  Sense strand starting at position 3888 of SEQ ID NO: 585977
ggcugauaccuccaaucuc

SEQ ID NO: 682575 - RNA, 19 nt, Artificial Sequence
  Description of Artificial Sequence: Synthetic oligonucleotide
  Antisense strand to SEQ ID NO: 682574
gagauuggagguaucagcc

SEQ ID NO: 682576 - RNA, 19 nt, Artificial Sequence
  Description of Artificial Sequence: Synthetic oligonucleotide
  Sense strand starting at position 3896 of SEQ ID NO: 585977
ccuccaaucucuuuggaga

SEQ ID NO: 682577 - RNA, 19 nt, Artificial Sequence
  Description of Artificial Sequence: Synthetic oligonucleotide
  Antisense strand to SEQ ID NO: 682576
ucuccaaagagauuggagg

SEQ ID NO: 682578 - RNA, 19 nt, Artificial Sequence
  Description of Artificial Sequence: Synthetic oligonucleotide
  Sense strand starting at position 3897 of SEQ ID NO: 585977
cuccaaucucuuuggagac

SEQ ID NO: 682579 - RNA, 19 nt, Artificial Sequence
  Description of Artificial Sequence: Synthetic oligonucleotide
  Antisense strand to SEQ ID NO: 682578
gucuccaaagagauuggag

SEQ ID NO: 682580 - RNA, 19 nt, Artificial Sequence
  Description of Artificial Sequence: Synthetic oligonucleotide
  Sense strand starting at position 118 of SEQ ID NO: 585978
ccaaguuuaccaggcuauu

SEQ ID NO: 682581 - RNA, 19 nt, Artificial Sequence
  Description of Artificial Sequence: Synthetic oligonucleotide
  Antisense strand to SEQ ID NO: 682580
aauagccugguaaacuugg

SEQ ID NO: 682582 - RNA, 19 nt, Artificial Sequence
  Description of Artificial Sequence: Synthetic oligonucleotide
  Sense strand starting at position 131 of SEQ ID NO: 585978
gcuauuugagguugaggca

SEQ ID NO: 682583 - RNA, 19 nt, Artificial Sequence
  Description of Artificial Sequence: Synthetic oligonucleotide
  Antisense strand to SEQ ID NO: 682582
ugccucaaccucaaauagc

SEQ ID NO: 682584 - RNA, 19 nt, Artificial Sequence
  Description of Artificial Sequence: Synthetic oligonucleotide
  Sense strand starting at position 159 of SEQ ID NO: 585978
aaguacgagugucucauua

SEQ ID NO: 682585 - RNA, 19 nt, Artificial Sequence
  Description of Artificial Sequence: Synthetic oligonucleotide
  Antisense strand to SEQ ID NO: 682584
uaaugagacacucguacuu

SEQ ID NO: 682586 - RNA, 19 nt, Artificial Sequence
  Description of Artificial Sequence: Synthetic oligonucleotide
  Sense strand starting at position 306 of SEQ ID NO: 585978
auaaaugucccugagucua

SEQ ID NO: 682587 - RNA, 19 nt, Artificial Sequence
  Description of Artificial Sequence: Synthetic oligonucleotide
  Antisense strand to SEQ ID NO: 682586
uagacucagggacauuuau

SEQ ID NO: 682588 - RNA, 19 nt, Artificial Sequence
  Description of Artificial Sequence: Synthetic oligonucleotide
  Sense strand starting at position 316 of SEQ ID NO: 585978
cugagucuacacugaaauu

SEQ ID NO: 682589 - RNA, 19 nt, Artificial Sequence
  Description of Artificial Sequence: Synthetic oligonucleotide
  Antisense strand to SEQ ID NO: 682588
aauuucaguguagacucag

SEQ ID NO: 682590 - RNA, 19 nt, Artificial Sequence
  Description of Artificial Sequence: Synthetic oligonucleotide
  Sense strand starting at position 523 of SEQ ID NO: 585978
cuaacuguacaguggagaa

SEQ ID NO: 682591 - RNA, 19 nt, Artificial Sequence
  Description of Artificial Sequence: Synthetic oligonucleotide
  Antisense strand to SEQ ID NO: 682590
uucuccacuguacaguuag

SEQ ID NO: 682592 - RNA, 19 nt, Artificial Sequence
  Description of Artificial Sequence: Synthetic oligonucleotide
  Sense strand starting at position 594 of SEQ ID NO: 585978
guacaugcccuugauacga

SEQ ID NO: 682593 - RNA, 19 nt, Artificial Sequence
  Description of Artificial Sequence: Synthetic oligonucleotide
  Antisense strand to SEQ ID NO: 682592
ucguaucaagggcauguac

SEQ ID NO: 682594 - RNA, 19 nt, Artificial Sequence
  Description of Artificial Sequence: Synthetic oligonucleotide
  Sense strand starting at position 602 of SEQ ID NO: 585978
ccuugauacgaugggauga

SEQ ID NO: 682595 - RNA, 19 nt, Artificial Sequence
  Description of Artificial Sequence: Synthetic oligonucleotide
  Antisense strand to SEQ ID NO: 682594
ucaucccaucguaucaagg

SEQ ID NO: 682596 - RNA, 19 nt, Artificial Sequence
  Description of Artificial Sequence: Synthetic oligonucleotide
  Sense strand starting at position 603 of SEQ ID NO: 585978
cuugauacgaugggaugau

SEQ ID NO: 682597 - RNA, 19 nt, Artificial Sequence
  Description of Artificial Sequence: Synthetic oligonucleotide
  Antisense strand to SEQ ID NO: 682596
aucaucccaucguaucaag

SEQ ID NO: 682598 - RNA, 19 nt, Artificial Sequence
  Description of Artificial Sequence: Synthetic oligonucleotide
  Sense strand starting at position 819 of SEQ ID NO: 585978
ugugguaaccuccauggga

SEQ ID NO: 682599 - RNA, 19 nt, Artificial Sequence
  Description of Artificial Sequence: Synthetic oligonucleotide
  Antisense strand to SEQ ID NO: 682598
ucccauggagguuaccaca

SEQ ID NO: 682600 - RNA, 19 nt, Artificial Sequence
  Description of Artificial Sequence: Synthetic oligonucleotide
  Sense strand starting at position 821 of SEQ ID NO: 585978
ugguaaccuccaugggauc

SEQ ID NO: 682601 - RNA, 19 nt, Artificial Sequence
  Description of Artificial Sequence: Synthetic oligonucleotide
  Antisense strand to SEQ ID NO: 682600
gaucccauggagguuacca

SEQ ID NO: 682602 - RNA, 19 nt, Artificial Sequence
  Description of Artificial Sequence: Synthetic oligonucleotide
  Sense strand starting at position 889 of SEQ ID NO: 585978
uauggacuuuggucaauaa

SEQ ID NO: 682603 - RNA, 19 nt, Artificial Sequence
  Description of Artificial Sequence: Synthetic oligonucleotide
  Antisense strand to SEQ ID NO: 682602
uuauugaccaaaguccaua

SEQ ID NO: 682604 - RNA, 19 nt, Artificial Sequence
  Description of Artificial Sequence: Synthetic oligonucleotide
  Sense strand starting at position 913 of SEQ ID NO: 585978
uauugauauugguuaacug

SEQ ID NO: 682605 - RNA, 19 nt, Artificial Sequence
  Description of Artificial Sequence: Synthetic oligonucleotide
  Antisense strand to SEQ ID NO: 682604
caguuaaccaauaucaaua

SEQ ID NO: 682606 - RNA, 19 nt, Artificial Sequence
  Description of Artificial Sequence: Synthetic oligonucleotide
  Sense strand starting at position 920 of SEQ ID NO: 585978
auugguuaacugcaacaaa

SEQ ID NO: 682607 - RNA, 19 nt, Artificial Sequence
  Description of Artificial Sequence: Synthetic oligonucleotide
  Antisense strand to SEQ ID NO: 682606
uuuguugcaguuaaccaau

SEQ ID NO: 682608 - RNA, 19 nt, Artificial Sequence
  Description of Artificial Sequence: Synthetic oligonucleotide
  Sense strand starting at position 923 of SEQ ID NO: 585978
gguuaacugcaacaaaugu

SEQ ID NO: 682609 - RNA, 19 nt, Artificial Sequence
  Description of Artificial Sequence: Synthetic oligonucleotide
  Antisense strand to SEQ ID NO: 682608
acauuuguugcaguuaacc

SEQ ID NO: 682610 - RNA, 19 nt, Artificial Sequence
  Description of Artificial Sequence: Synthetic oligonucleotide
  Sense strand starting at position 1177 of SEQ ID NO: 585978
gagguuaaggcaugcauaa

SEQ ID NO: 682611 - RNA, 19 nt, Artificial Sequence
  Description of Artificial Sequence: Synthetic oligonucleotide
  Antisense strand to SEQ ID NO: 682610
uuaugcaugccuuaaccuc

SEQ ID NO: 682612 - RNA, 19 nt, Artificial Sequence
  Description of Artificial Sequence: Synthetic oligonucleotide
  Sense strand starting at position 1179 of SEQ ID NO: 585978
gguuaaggcaugcauaaac

SEQ ID NO: 682613 - RNA, 19 nt, Artificial Sequence
  Description of Artificial Sequence: Synthetic oligonucleotide
  Antisense strand to SEQ ID NO: 682612
guuuaugcaugccuuaacc

SEQ ID NO: 682614 - RNA, 19 nt, Artificial Sequence
  Description of Artificial Sequence: Synthetic oligonucleotide
  Sense strand starting at position 1189 of SEQ ID NO: 585978
ugcauaaacgaaugucauu

SEQ ID NO: 682615 - RNA, 19 nt, Artificial Sequence
  Description of Artificial Sequence: Synthetic oligonucleotide
  Antisense strand to SEQ ID NO: 682614
aaugacauucguuuaugca

SEQ ID NO: 682616 - RNA, 19 nt, Artificial Sequence
  Description of Artificial Sequence: Synthetic oligonucleotide
  Sense strand starting at position 1226 of SEQ ID NO: 585978
cacacaaaucgugggucaa

SEQ ID NO: 682617 - RNA, 19 nt, Artificial Sequence
  Description of Artificial Sequence: Synthetic oligonucleotide
  Antisense strand to SEQ ID NO: 682616
uugacccacgauuugugug

SEQ ID NO: 682618 - RNA, 19 nt, Artificial Sequence
  Description of Artificial Sequence: Synthetic oligonucleotide
  Sense strand starting at position 1227 of SEQ ID NO: 585978
acacaaaucgugggucaaa

SEQ ID NO: 682619 - RNA, 19 nt, Artificial Sequence
  Description of Artificial Sequence: Synthetic oligonucleotide
  Antisense strand to SEQ ID NO: 682618
uuugacccacgauuugugu

SEQ ID NO: 682620 - RNA, 19 nt, Artificial Sequence
  Description of Artificial Sequence: Synthetic oligonucleotide
  Sense strand starting at position 1405 of SEQ ID NO: 585978
accgguuuacuccgaacaa

SEQ ID NO: 682621 - RNA, 19 nt, Artificial Sequence
  Description of Artificial Sequence: Synthetic oligonucleotide
  Antisense strand to SEQ ID NO: 682620
uuguucggaguaaaccggu

SEQ ID NO: 682622 - RNA, 19 nt, Artificial Sequence
  Description of Artificial Sequence: Synthetic oligonucleotide
  Sense strand starting at position 1480 of SEQ ID NO: 585978
ggauuagucgccuaucuac

SEQ ID NO: 682623 - RNA, 19 nt, Artificial Sequence
  Description of Artificial Sequence: Synthetic oligonucleotide
  Antisense strand to SEQ ID NO: 682622
guagauaggcgacuaaucc

SEQ ID NO: 682624 - RNA, 19 nt, Artificial Sequence
  Description of Artificial Sequence: Synthetic oligonucleotide
  Sense strand starting at position 1541 of SEQ ID NO: 585978
ucugguuccgcagacuaga

SEQ ID NO: 682625 - RNA, 19 nt, Artificial Sequence
  Description of Artificial Sequence: Synthetic oligonucleotide
  Antisense strand to SEQ ID NO: 682624
ucuagucugcggaaccaga

SEQ ID NO: 682626 - RNA, 19 nt, Artificial Sequence
  Description of Artificial Sequence: Synthetic oligonucleotide
  Sense strand starting at position 1564 of SEQ ID NO: 585978
augggagucugaguaggau

SEQ ID NO: 682627 - RNA, 19 nt, Artificial Sequence
  Description of Artificial Sequence: Synthetic oligonucleotide
  Antisense strand to SEQ ID NO: 682626
auccuacucagacucccau

SEQ ID NO: 682628 - RNA, 19 nt, Artificial Sequence
  Description of Artificial Sequence: Synthetic oligonucleotide
  Sense strand starting at position 1943 of SEQ ID NO: 585978
gggcccuucgccgagauuu

SEQ ID NO: 682629 - RNA, 19 nt, Artificial Sequence
  Description of Artificial Sequence: Synthetic oligonucleotide
  Antisense strand to SEQ ID NO: 682628
aaaucucggcgaagggccc

SEQ ID NO: 682630 - RNA, 19 nt, Artificial Sequence
  Description of Artificial Sequence: Synthetic oligonucleotide
  Sense strand starting at position 1945 of SEQ ID NO: 585978
gcccuucgccgagauuucu

SEQ ID NO: 682631 - RNA, 19 nt, Artificial Sequence
  Description of Artificial Sequence: Synthetic oligonucleotide
  Antisense strand to SEQ ID NO: 682630
agaaaucucggcgaagggc

SEQ ID NO: 682632 - RNA, 19 nt, Artificial Sequence
  Description of Artificial Sequence: Synthetic oligonucleotide
  Sense strand starting at position 1951 of SEQ ID NO: 585978
cgccgagauuucucccgga

SEQ ID NO: 682633 - RNA, 19 nt, Artificial Sequence
  Description of Artificial Sequence: Synthetic oligonucleotide
  Antisense strand to SEQ ID NO: 682632
uccgggagaaaucucggcg

SEQ ID NO: 682634 - RNA, 19 nt, Artificial Sequence
  Description of Artificial Sequence: Synthetic oligonucleotide
  Sense strand starting at position 2034 of SEQ ID NO: 585978
cacugaucaccgggcaaau

SEQ ID NO: 682635 - RNA, 19 nt, Artificial Sequence
  Description of Artificial Sequence: Synthetic oligonucleotide
  Antisense strand to SEQ ID NO: 682634
auuugcccggugaucagug

SEQ ID NO: 682636 - RNA, 19 nt, Artificial Sequence
  Description of Artificial Sequence: Synthetic oligonucleotide
  Sense strand starting at position 2143 of SEQ ID NO: 585978
ugaguuuggcgcguaauug

SEQ ID NO: 682637 - RNA, 19 nt, Artificial Sequence
  Description of Artificial Sequence: Synthetic oligonucleotide
  Antisense strand to SEQ ID NO: 682636
caauuacgcgccaaacuca

SEQ ID NO: 682638 - RNA, 19 nt, Artificial Sequence
  Description of Artificial Sequence: Synthetic oligonucleotide
  Sense strand starting at position 2221 of SEQ ID NO: 585978
ggacucuugagagggcaau

SEQ ID NO: 682639 - RNA, 19 nt, Artificial Sequence
  Description of Artificial Sequence: Synthetic oligonucleotide
  Antisense strand to SEQ ID NO: 682638
auugcccucucaagagucc

SEQ ID NO: 682640 - RNA, 19 nt, Artificial Sequence
  Description of Artificial Sequence: Synthetic oligonucleotide
  Sense strand starting at position 2222 of SEQ ID NO: 585978
gacucuugagagggcaaua

SEQ ID NO: 682641 - RNA, 19 nt, Artificial Sequence
  Description of Artificial Sequence: Synthetic oligonucleotide
  Antisense strand to SEQ ID NO: 682640
uauugcccucucaagaguc

SEQ ID NO: 682642 - RNA, 19 nt, Artificial Sequence
  Description of Artificial Sequence: Synthetic oligonucleotide
  Sense strand starting at position 2335 of SEQ ID NO: 585978
ccaggugcucaacaucaaa

SEQ ID NO: 682643 - RNA, 19 nt, Artificial Sequence
  Description of Artificial Sequence: Synthetic oligonucleotide
  Antisense strand to SEQ ID NO: 682642
uuugauguugagcaccugg

SEQ ID NO: 682644 - RNA, 19 nt, Artificial Sequence
  Description of Artificial Sequence: Synthetic oligonucleotide
  Sense strand starting at position 2413 of SEQ ID NO: 585978
gcaagcaaauacucucaga

SEQ ID NO: 682645 - RNA, 19 nt, Artificial Sequence
  Description of Artificial Sequence: Synthetic oligonucleotide
  Antisense strand to SEQ ID NO: 682644
ucugagaguauuugcuugc

SEQ ID NO: 682646 - RNA, 19 nt, Artificial Sequence
  Description of Artificial Sequence: Synthetic oligonucleotide
  Sense strand starting at position 2567 of SEQ ID NO: 585978
gcuccucgacgcugaauuu

SEQ ID NO: 682647 - RNA, 19 nt, Artificial Sequence
  Description of Artificial Sequence: Synthetic oligonucleotide
  Antisense strand to SEQ ID NO: 682646
aaauucagcgucgaggagc

SEQ ID NO: 682648 - RNA, 19 nt, Artificial Sequence
  Description of Artificial Sequence: Synthetic oligonucleotide
  Sense strand starting at position 3355 of SEQ ID NO: 585978
guugguggugugggaagaa

SEQ ID NO: 682649 - RNA, 19 nt, Artificial Sequence
  Description of Artificial Sequence: Synthetic oligonucleotide
  Antisense strand to SEQ ID NO: 682648
uucuucccacaccaccaac

SEQ ID NO: 682650 - RNA, 19 nt, Artificial Sequence
  Description of Artificial Sequence: Synthetic oligonucleotide
  Sense strand starting at position 3364 of SEQ ID NO: 585978
gugggaagaaaguguguuu

SEQ ID NO: 682651 - RNA, 19 nt, Artificial Sequence
  Description of Artificial Sequence: Synthetic oligonucleotide
  Antisense strand to SEQ ID NO: 682650
aaacacacuuucuucccac

SEQ ID NO: 682652 - RNA, 19 nt, Artificial Sequence
  Description of Artificial Sequence: Synthetic oligonucleotide
  Sense strand starting at position 3367 of SEQ ID NO: 585978
ggaagaaaguguguuuaac

SEQ ID NO: 682653 - RNA, 19 nt, Artificial Sequence
  Description of Artificial Sequence: Synthetic oligonucleotide
  Antisense strand to SEQ ID NO: 682652
guuaaacacacuuucuucc

SEQ ID NO: 682654 - RNA, 19 nt, Artificial Sequence
  Description of Artificial Sequence: Synthetic oligonucleotide
  Sense strand starting at position 3369 of SEQ ID NO: 585978
aagaaaguguguuuaacau

SEQ ID NO: 682655 - RNA, 19 nt, Artificial Sequence
  Description of Artificial Sequence: Synthetic oligonucleotide
  Antisense strand to SEQ ID NO: 682654
auguuaaacacacuuucuu

SEQ ID NO: 682656 - RNA, 19 nt, Artificial Sequence
  Description of Artificial Sequence: Synthetic oligonucleotide
  Sense strand starting at position 3767 of SEQ ID NO: 585978
agaccauucugggcagacu

SEQ ID NO: 682657 - RNA, 19 nt, Artificial Sequence
  Description of Artificial Sequence: Synthetic oligonucleotide
  Antisense strand to SEQ ID NO: 682656
agucugcccagaauggucu

SEQ ID NO: 682658 - RNA, 19 nt, Artificial Sequence
  Description of Artificial Sequence: Synthetic oligonucleotide
  Sense strand starting at position 3879 of SEQ ID NO: 585978
acaugacagcucugcuuaa

SEQ ID NO: 682659 - RNA, 19 nt, Artificial Sequence
  Description of Artificial Sequence: Synthetic oligonucleotide
  Antisense strand to SEQ ID NO: 682658
uuaagcagagcugucaugu

SEQ ID NO: 682660 - RNA, 19 nt, Artificial Sequence
  Description of Artificial Sequence: Synthetic oligonucleotide
  Sense strand starting at position 53 of SEQ ID NO: 585979
ugguacuucuuaucacaca

SEQ ID NO: 682661 - RNA, 19 nt, Artificial Sequence
  Description of Artificial Sequence: Synthetic oligonucleotide
  Antisense strand to SEQ ID NO: 682660
ugugugauaagaaguacca

SEQ ID NO: 682662 - RNA, 19 nt, Artificial Sequence
  Description of Artificial Sequence: Synthetic oligonucleotide
  Sense strand starting at position 222 of SEQ ID NO: 585979
cuaccucgucaggacuauu

SEQ ID NO: 682663 - RNA, 19 nt, Artificial Sequence
  Description of Artificial Sequence: Synthetic oligonucleotide
  Antisense strand to SEQ ID NO: 682662
aauaguccugacgagguag

SEQ ID NO: 682664 - RNA, 19 nt, Artificial Sequence
  Description of Artificial Sequence: Synthetic oligonucleotide
  Sense strand starting at position 281 of SEQ ID NO: 585979
uaggauauugcaugacuua

SEQ ID NO: 682665 - RNA, 19 nt, Artificial Sequence
  Description of Artificial Sequence: Synthetic oligonucleotide
  Antisense strand to SEQ ID NO: 682664
uaagucaugcaauauccua

SEQ ID NO: 682666 - RNA, 19 nt, Artificial Sequence
  Description of Artificial Sequence: Synthetic oligonucleotide
  Sense strand starting at position 301 of SEQ ID NO: 585979
cggaacugugacuggagua

SEQ ID NO: 682667 - RNA, 19 nt, Artificial Sequence
  Description of Artificial Sequence: Synthetic oligonucleotide
  Antisense strand to SEQ ID NO: 682666
uacuccagucacaguuccg

SEQ ID NO: 682668 - RNA, 19 nt, Artificial Sequence
  Description of Artificial Sequence: Synthetic oligonucleotide
  Sense strand starting at position 344 of SEQ ID NO: 585979
guagcucuuccauauaggu

SEQ ID NO: 682669 - RNA, 19 nt, Artificial Sequence
  Description of Artificial Sequence: Synthetic oligonucleotide
  Antisense strand to SEQ ID NO: 682668
accuauauggaagagcuac

SEQ ID NO: 682670 - RNA, 19 nt, Artificial Sequence
  Description of Artificial Sequence: Synthetic oligonucleotide
  Sense strand starting at position 357 of SEQ ID NO: 585979
auagguacacugugaaagu

SEQ ID NO: 682671 - RNA, 19 nt, Artificial Sequence
  Description of Artificial Sequence: Synthetic oligonucleotide
  Antisense strand to SEQ ID NO: 682670
acuuucacaguguaccuau

SEQ ID NO: 682672 - RNA, 19 nt, Artificial Sequence
  Description of Artificial Sequence: Synthetic oligonucleotide
  Sense strand starting at position 383 of SEQ ID NO: 585979
uucccucaugugugaaaug

SEQ ID NO: 682673 - RNA, 19 nt, Artificial Sequence
  Description of Artificial Sequence: Synthetic oligonucleotide
  Antisense strand to SEQ ID NO: 682672
cauuucacacaugagggaa

SEQ ID NO: 682674 - RNA, 19 nt, Artificial Sequence
  Description of Artificial Sequence: Synthetic oligonucleotide
  Sense strand starting at position 388 of SEQ ID NO: 585979
ucaugugugaaaugggcaa

SEQ ID NO: 682675 - RNA, 19 nt, Artificial Sequence
  Description of Artificial Sequence: Synthetic oligonucleotide
  Antisense strand to SEQ ID NO: 682674
uugcccauuucacacauga

SEQ ID NO: 682676 - RNA, 19 nt, Artificial Sequence
  Description of Artificial Sequence: Synthetic oligonucleotide
  Sense strand starting at position 437 of SEQ ID NO: 585979
ucaccagagugagugaaau

SEQ ID NO: 682677 - RNA, 19 nt, Artificial Sequence
  Description of Artificial Sequence: Synthetic oligonucleotide
  Antisense strand to SEQ ID NO: 682676
auuucacucacucugguga

SEQ ID NO: 682678 - RNA, 19 nt, Artificial Sequence
  Description of Artificial Sequence: Synthetic oligonucleotide
  Sense strand starting at position 477 of SEQ ID NO: 585979
aauguuaagugauugcaca

SEQ ID NO: 682679 - RNA, 19 nt, Artificial Sequence
  Description of Artificial Sequence: Synthetic oligonucleotide
  Antisense strand to SEQ ID NO: 682678
ugugcaaucacuuaacauu

SEQ ID NO: 682680 - RNA, 19 nt, Artificial Sequence
  Description of Artificial Sequence: Synthetic oligonucleotide
  Sense strand starting at position 484 of SEQ ID NO: 585979
agugauugcacaugaaugu

SEQ ID NO: 682681 - RNA, 19 nt, Artificial Sequence
  Description of Artificial Sequence: Synthetic oligonucleotide
  Antisense strand to SEQ ID NO: 682680
acauucaugugcaaucacu

SEQ ID NO: 682682 - RNA, 19 nt, Artificial Sequence
  Description of Artificial Sequence: Synthetic oligonucleotide
  Sense strand starting at position 485 of SEQ ID NO: 585979
gugauugcacaugaaugua

SEQ ID NO: 682683 - RNA, 19 nt, Artificial Sequence
  Description of Artificial Sequence: Synthetic oligonucleotide
  Antisense strand to SEQ ID NO: 682682
uacauucaugugcaaucac

SEQ ID NO: 682684 - RNA, 19 nt, Artificial Sequence
  Description of Artificial Sequence: Synthetic oligonucleotide
  Sense strand starting at position 520 of SEQ ID NO: 585979
gacauaauuguguacgcau

SEQ ID NO: 682685 - RNA, 19 nt, Artificial Sequence
  Description of Artificial Sequence: Synthetic oligonucleotide
  Antisense strand to SEQ ID NO: 682684
augcguacacaauuauguc

SEQ ID NO: 682686 - RNA, 19 nt, Artificial Sequence
  Description of Artificial Sequence: Synthetic oligonucleotide
  Sense strand starting at position 583 of SEQ ID NO: 585979
ccuugaaggucaccuuaca

SEQ ID NO: 682687 - RNA, 19 nt, Artificial Sequence
  Description of Artificial Sequence: Synthetic oligonucleotide
  Antisense strand to SEQ ID NO: 682686
uguaaggugaccuucaagg

SEQ ID NO: 682688 - RNA, 19 nt, Artificial Sequence
  Description of Artificial Sequence: Synthetic oligonucleotide
  Sense strand starting at position 612 of SEQ ID NO: 585979
auguaauacuuuguuucca

SEQ ID NO: 682689 - RNA, 19 nt, Artificial Sequence
  Description of Artificial Sequence: Synthetic oligonucleotide
  Antisense strand to SEQ ID NO: 682688
uggaaacaaaguauuacau

SEQ ID NO: 682690 - RNA, 19 nt, Artificial Sequence
  Description of Artificial Sequence: Synthetic oligonucleotide
  Sense strand starting at position 655 of SEQ ID NO: 585979
cacaaagggcucugugagu

SEQ ID NO: 682691 - RNA, 19 nt, Artificial Sequence
  Description of Artificial Sequence: Synthetic oligonucleotide
  Antisense strand to SEQ ID NO: 682690
acucacagagcccuuugug

SEQ ID NO: 682692 - RNA, 19 nt, Artificial Sequence
  Description of Artificial Sequence: Synthetic oligonucleotide
  Sense strand starting at position 662 of SEQ ID NO: 585979
ggcucugugagucacauga

SEQ ID NO: 682693 - RNA, 19 nt, Artificial Sequence
  Description of Artificial Sequence: Synthetic oligonucleotide
  Antisense strand to SEQ ID NO: 682692
ucaugugacucacagagcc

SEQ ID NO: 682694 - RNA, 19 nt, Artificial Sequence
  Description of Artificial Sequence: Synthetic oligonucleotide
  Sense strand starting at position 669 of SEQ ID NO: 585979
ugagucacaugauuccaca

SEQ ID NO: 682695 - RNA, 19 nt, Artificial Sequence
  Description of Artificial Sequence: Synthetic oligonucleotide
  Antisense strand to SEQ ID NO: 682694
uguggaaucaugugacuca

SEQ ID NO: 682696 - RNA, 19 nt, Artificial Sequence
  Description of Artificial Sequence: Synthetic oligonucleotide
  Sense strand starting at position 735 of SEQ ID NO: 585979
gacuuacuccagcagcgaa

SEQ ID NO: 682697 - RNA, 19 nt, Artificial Sequence
  Description of Artificial Sequence: Synthetic oligonucleotide
  Antisense strand to SEQ ID NO: 682696
uucgcugcuggaguaaguc

SEQ ID NO: 682698 - RNA, 19 nt, Artificial Sequence
  Description of Artificial Sequence: Synthetic oligonucleotide
  Sense strand starting at position 831 of SEQ ID NO: 585979
augggcauaagucaguuaa

SEQ ID NO: 682699 - RNA, 19 nt, Artificial Sequence
  Description of Artificial Sequence: Synthetic oligonucleotide
  Antisense strand to SEQ ID NO: 682698
uuaacugacuuaugcccau

SEQ ID NO: 682700 - RNA, 19 nt, Artificial Sequence
  Description of Artificial Sequence: Synthetic oligonucleotide
  Sense strand starting at position 873 of SEQ ID NO: 585979
agccgaugggaguaagagu

SEQ ID NO: 682701 - RNA, 19 nt, Artificial Sequence
  Description of Artificial Sequence: Synthetic oligonucleotide
  Antisense strand to SEQ ID NO: 682700
acucuuacucccaucggcu

SEQ ID NO: 682702 - RNA, 19 nt, Artificial Sequence
  Description of Artificial Sequence: Synthetic oligonucleotide
  Sense strand starting at position 963 of SEQ ID NO: 585979
caauguguccgugagacag

SEQ ID NO: 682703 - RNA, 19 nt, Artificial Sequence
  Description of Artificial Sequence: Synthetic oligonucleotide
  Antisense strand to SEQ ID NO: 682702
cugucucacggacacauug

SEQ ID NO: 682704 - RNA, 19 nt, Artificial Sequence
  Description of Artificial Sequence: Synthetic oligonucleotide
  Sense strand starting at position 971 of SEQ ID NO: 585979
ccgugagacagguaacaug

SEQ ID NO: 682705 - RNA, 19 nt, Artificial Sequence
  Description of Artificial Sequence: Synthetic oligonucleotide
  Antisense strand to SEQ ID NO: 682704
cauguuaccugucucacgg

SEQ ID NO: 682706 - RNA, 19 nt, Artificial Sequence
  Description of Artificial Sequence: Synthetic oligonucleotide
  Sense strand starting at position 1057 of SEQ ID NO: 585979
cuccaaaucugagugcuga

SEQ ID NO: 682707 - RNA, 19 nt, Artificial Sequence
  Description of Artificial Sequence: Synthetic oligonucleotide
  Antisense strand to SEQ ID NO: 682706
ucagcacucagauuuggag

SEQ ID NO: 682708 - RNA, 19 nt, Artificial Sequence
  Description of Artificial Sequence: Synthetic oligonucleotide
  Sense strand starting at position 1096 of SEQ ID NO: 585979
ggaaaugacggcugugaac

SEQ ID NO: 682709 - RNA, 19 nt, Artificial Sequence
  Description of Artificial Sequence: Synthetic oligonucleotide
  Antisense strand to SEQ ID NO: 682708
guucacagccgucauuucc

SEQ ID NO: 682710 - RNA, 19 nt, Artificial Sequence
  Description of Artificial Sequence: Synthetic oligonucleotide
  Sense strand starting at position 2087 of SEQ ID NO: 585979
gccugagcuguuuccucuu

SEQ ID NO: 682711 - RNA, 19 nt, Artificial Sequence
  Description of Artificial Sequence: Synthetic oligonucleotide
  Antisense strand to SEQ ID NO: 682710
aagaggaaacagcucaggc

SEQ ID NO: 682712 - RNA, 19 nt, Artificial Sequence
  Description of Artificial Sequence: Synthetic oligonucleotide
  Sense strand starting at position 2777 of SEQ ID NO: 585979
aagguuuaauuaucagaug

SEQ ID NO: 682713 - RNA, 19 nt, Artificial Sequence
  Description of Artificial Sequence: Synthetic oligonucleotide
  Antisense strand to SEQ ID NO: 682712
caucugauaauuaaaccuu

SEQ ID NO: 682714 - RNA, 19 nt, Artificial Sequence
  Description of Artificial Sequence: Synthetic oligonucleotide
  Sense strand starting at position 2796 of SEQ ID NO: 585979
guaacauuucuguguguca

SEQ ID NO: 682715 - RNA, 19 nt, Artificial Sequence
  Description of Artificial Sequence: Synthetic oligonucleotide
  Antisense strand to SEQ ID NO: 682714
ugacacacagaaauguuac

SEQ ID NO: 682716 - RNA, 19 nt, Artificial Sequence
  Description of Artificial Sequence: Synthetic oligonucleotide
  Sense strand starting at position 2799 of SEQ ID NO: 585979
acauuucugugugucaaua

SEQ ID NO: 682717 - RNA, 19 nt, Artificial Sequence
  Description of Artificial Sequence: Synthetic oligonucleotide
  Antisense strand to SEQ ID NO: 682716
uauugacacacagaaaugu

SEQ ID NO: 682718 - RNA, 19 nt, Artificial Sequence
  Description of Artificial Sequence: Synthetic oligonucleotide
  Sense strand starting at position 3014 of SEQ ID NO: 585979
uguuguauugaguagcaac

SEQ ID NO: 682719 - RNA, 19 nt, Artificial Sequence
  Description of Artificial Sequence: Synthetic oligonucleotide
  Antisense strand to SEQ ID NO: 682718
guugcuacucaauacaaca

SEQ ID NO: 682720 - RNA, 19 nt, Artificial Sequence
  Description of Artificial Sequence: Synthetic oligonucleotide
  Sense strand starting at position 3095 of SEQ ID NO: 585979
cuuggagucccacaauacu

SEQ ID NO: 682721 - RNA, 19 nt, Artificial Sequence
  Description of Artificial Sequence: Synthetic oligonucleotide
  Antisense strand to SEQ ID NO: 682720
aguauugugggacuccaag

SEQ ID NO: 682722 - RNA, 19 nt, Artificial Sequence
  Description of Artificial Sequence: Synthetic oligonucleotide
  Sense strand starting at position 3115 of SEQ ID NO: 585979
auugucuuaucauccagua

SEQ ID NO: 682723 - RNA, 19 nt, Artificial Sequence
  Description of Artificial Sequence: Synthetic oligonucleotide
  Antisense strand to SEQ ID NO: 682722
uacuggaugauaagacaau

SEQ ID NO: 682724 - RNA, 19 nt, Artificial Sequence
  Description of Artificial Sequence: Synthetic oligonucleotide
  Sense strand starting at position 3120 of SEQ ID NO: 585979
cuuaucauccaguagaccu

SEQ ID NO: 682725 - RNA, 19 nt, Artificial Sequence
  Description of Artificial Sequence: Synthetic oligonucleotide
  Antisense strand to SEQ ID NO: 682724
aggucuacuggaugauaag

SEQ ID NO: 682726 - RNA, 19 nt, Artificial Sequence
  Description of Artificial Sequence: Synthetic oligonucleotide
  Sense strand starting at position 3128 of SEQ ID NO: 585979
ccaguagaccuccagcauu

SEQ ID NO: 682727 - RNA, 19 nt, Artificial Sequence
  Description of Artificial Sequence: Synthetic oligonucleotide
  Antisense strand to SEQ ID NO: 682726
aaugcuggaggucuacugg

SEQ ID NO: 682728 - RNA, 19 nt, Artificial Sequence
  Description of Artificial Sequence: Synthetic oligonucleotide
  Sense strand starting at position 3551 of SEQ ID NO: 585979
uugguuugagauuggguca

SEQ ID NO: 682729 - RNA, 19 nt, Artificial Sequence
  Description of Artificial Sequence: Synthetic oligonucleotide
  Antisense strand to SEQ ID NO: 682728
ugacccaaucucaaaccaa

SEQ ID NO: 682730 - RNA, 19 nt, Artificial Sequence
  Description of Artificial Sequence: Synthetic oligonucleotide
  Sense strand starting at position 3552 of SEQ ID NO: 585979
ugguuugagauugggucaa

SEQ ID NO: 682731 - RNA, 19 nt, Artificial Sequence
  Description of Artificial Sequence: Synthetic oligonucleotide
  Antisense strand to SEQ ID NO: 682730
uugacccaaucucaaacca

SEQ ID NO: 682732 - RNA, 19 nt, Artificial Sequence
  Description of Artificial Sequence: Synthetic oligonucleotide
  Sense strand starting at position 3554 of SEQ ID NO: 585979
guuugagauugggucaaca

SEQ ID NO: 682733 - RNA, 19 nt, Artificial Sequence
  Description of Artificial Sequence: Synthetic oligonucleotide
  Antisense strand to SEQ ID NO: 682732
uguugacccaaucucaaac

SEQ ID NO: 682734 - RNA, 19 nt, Artificial Sequence
  Description of Artificial Sequence: Synthetic oligonucleotide
  Sense strand starting at position 3594 of SEQ ID NO: 585979
ggauaugucuauucucauu

SEQ ID NO: 682735 - RNA, 19 nt, Artificial Sequence
  Description of Artificial Sequence: Synthetic oligonucleotide
  Antisense strand to SEQ ID NO: 682734
aaugagaauagacauaucc

SEQ ID NO: 682736 - RNA, 19 nt, Artificial Sequence
  Description of Artificial Sequence: Synthetic oligonucleotide
  Sense strand starting at position 3638 of SEQ ID NO: 585979
ugcaauacagugcagaaau

SEQ ID NO: 682737 - RNA, 19 nt, Artificial Sequence
  Description of Artificial Sequence: Synthetic oligonucleotide
  Antisense strand to SEQ ID NO: 682736
auuucugcacuguauugca

SEQ ID NO: 682738 - RNA, 19 nt, Artificial Sequence
  Description of Artificial Sequence: Synthetic oligonucleotide
  Sense strand starting at position 3744 of SEQ ID NO: 585979
agaauugauuguguuuauc

SEQ ID NO: 682739 - RNA, 19 nt, Artificial Sequence
  Description of Artificial Sequence: Synthetic oligonucleotide
  Antisense strand to SEQ ID NO: 682738
gauaaacacaaucaauucu

SEQ ID NO: 682740 - RNA, 19 nt, Artificial Sequence
  Description of Artificial Sequence: Synthetic oligonucleotide
  Sense strand starting at position 368 of SEQ ID NO: 585980
gcagucagcccgcuguaau

SEQ ID NO: 682741 - RNA, 19 nt, Artificial Sequence
  Description of Artificial Sequence: Synthetic oligonucleotide
  Antisense strand to SEQ ID NO: 682740
auuacagcgggcugacugc

SEQ ID NO: 682742 - RNA, 19 nt, Artificial Sequence
  Description of Artificial Sequence: Synthetic oligonucleotide
  Sense strand starting at position 498 of SEQ ID NO: 585980
ccaggagcuuuggcagaga

SEQ ID NO: 682743 - RNA, 19 nt, Artificial Sequence
  Description of Artificial Sequence: Synthetic oligonucleotide
  Antisense strand to SEQ ID NO: 682742
ucucugccaaagcuccugg

SEQ ID NO: 682744 - RNA, 19 nt, Artificial Sequence
  Description of Artificial Sequence: Synthetic oligonucleotide
  Sense strand starting at position 501 of SEQ ID NO: 585980
ggagcuuuggcagagaugu

SEQ ID NO: 682745 - RNA, 19 nt, Artificial Sequence
  Description of Artificial Sequence: Synthetic oligonucleotide
  Antisense strand to SEQ ID NO: 682744
acaucucugccaaagcucc

SEQ ID NO: 682746 - RNA, 19 nt, Artificial Sequence
  Description of Artificial Sequence: Synthetic oligonucleotide
  Sense strand starting at position 503 of SEQ ID NO: 585980
agcuuuggcagagauguuu

SEQ ID NO: 682747 - RNA, 19 nt, Artificial Sequence
  Description of Artificial Sequence: Synthetic oligonucleotide
  Antisense strand to SEQ ID NO: 682746
aaacaucucugccaaagcu

SEQ ID NO: 682748 - RNA, 19 nt, Artificial Sequence
  Description of Artificial Sequence: Synthetic oligonucleotide
  Sense strand starting at position 751 of SEQ ID NO: 585980
ugaguccuuguguaauuau

SEQ ID NO: 682749 - RNA, 19 nt, Artificial Sequence
  Description of Artificial Sequence: Synthetic oligonucleotide
  Antisense strand to SEQ ID NO: 682748
auaauuacacaaggacuca

SEQ ID NO: 682750 - RNA, 19 nt, Artificial Sequence
  Description of Artificial Sequence: Synthetic oligonucleotide
  Sense strand starting at position 882 of SEQ ID NO: 585980
uauggauggugcuuuggaa

SEQ ID NO: 682751 - RNA, 19 nt, Artificial Sequence
  Description of Artificial Sequence: Synthetic oligonucleotide
  Antisense strand to SEQ ID NO: 682750
uuccaaagcaccauccaua

SEQ ID NO: 682752 - RNA, 19 nt, Artificial Sequence
  Description of Artificial Sequence: Synthetic oligonucleotide
  Sense strand starting at position 1002 of SEQ ID NO: 585980
gagguaaagugauuccuug

SEQ ID NO: 682753 - RNA, 19 nt, Artificial Sequence
  Description of Artificial Sequence: Synthetic oligonucleotide
  Antisense strand to SEQ ID NO: 682752
caaggaaucacuuuaccuc

SEQ ID NO: 682754 - RNA, 19 nt, Artificial Sequence
  Description of Artificial Sequence: Synthetic oligonucleotide
  Sense strand starting at position 1320 of SEQ ID NO: 585980
uucgaucaagcugacauua

SEQ ID NO: 682755 - RNA, 19 nt, Artificial Sequence
  Description of Artificial Sequence: Synthetic oligonucleotide
  Antisense strand to SEQ ID NO: 682754
uaaugucagcuugaucgaa

SEQ ID NO: 682756 - RNA, 19 nt, Artificial Sequence
  Description of Artificial Sequence: Synthetic oligonucleotide
  Sense strand starting at position 1397 of SEQ ID NO: 585980
cgcagaaauaguggaacau

SEQ ID NO: 682757 - RNA, 19 nt, Artificial Sequence
  Description of Artificial Sequence: Synthetic oligonucleotide
  Antisense strand to SEQ ID NO: 682756
auguuccacuauuucugcg

SEQ ID NO: 682758 - RNA, 19 nt, Artificial Sequence
  Description of Artificial Sequence: Synthetic oligonucleotide
  Sense strand starting at position 1468 of SEQ ID NO: 585980
gcuuguagagcuuggauuu

SEQ ID NO: 682759 - RNA, 19 nt, Artificial Sequence
  Description of Artificial Sequence: Synthetic oligonucleotide
  Antisense strand to SEQ ID NO: 682758
aaauccaagcucuacaagc

SEQ ID NO: 682760 - RNA, 19 nt, Artificial Sequence
  Description of Artificial Sequence: Synthetic oligonucleotide
  Sense strand starting at position 1787 of SEQ ID NO: 585980
uggauacuguuucuaggaa

SEQ ID NO: 682761 - RNA, 19 nt, Artificial Sequence
  Description of Artificial Sequence: Synthetic oligonucleotide
  Antisense strand to SEQ ID NO: 682760
uuccuagaaacaguaucca

SEQ ID NO: 682762 - RNA, 19 nt, Artificial Sequence
  Description of Artificial Sequence: Synthetic oligonucleotide
  Sense strand starting at position 1833 of SEQ ID NO: 585980
gucagagauucugccaauu

SEQ ID NO: 682763 - RNA, 19 nt, Artificial Sequence
  Description of Artificial Sequence: Synthetic oligonucleotide
  Antisense strand to SEQ ID NO: 682762
aauuggcagaaucucugac

SEQ ID NO: 682764 - RNA, 19 nt, Artificial Sequence
  Description of Artificial Sequence: Synthetic oligonucleotide
  Sense strand starting at position 1975 of SEQ ID NO: 585980
uugcuaccucuugagaaca

SEQ ID NO: 682765 - RNA, 19 nt, Artificial Sequence
  Description of Artificial Sequence: Synthetic oligonucleotide
  Antisense strand to SEQ ID NO: 682764
uguucucaagagguagcaa

SEQ ID NO: 682766 - RNA, 19 nt, Artificial Sequence
  Description of Artificial Sequence: Synthetic oligonucleotide
  Sense strand starting at position 1997 of SEQ ID NO: 585980
ggauacuuugaauguguaa

SEQ ID NO: 682767 - RNA, 19 nt, Artificial Sequence
  Description of Artificial Sequence: Synthetic oligonucleotide
  Antisense strand to SEQ ID NO: 682766
uuacacauucaaaguaucc

SEQ ID NO: 682768 - RNA, 19 nt, Artificial Sequence
  Description of Artificial Sequence: Synthetic oligonucleotide
  Sense strand starting at position 2032 of SEQ ID NO: 585980
ugaaauaaguuguccugaa

SEQ ID NO: 682769 - RNA, 19 nt, Artificial Sequence
  Description of Artificial Sequence: Synthetic oligonucleotide
  Antisense strand to SEQ ID NO: 682768
uucaggacaacuuauuuca

SEQ ID NO: 682770 - RNA, 19 nt, Artificial Sequence
  Description of Artificial Sequence: Synthetic oligonucleotide
  Sense strand starting at position 2033 of SEQ ID NO: 585980
gaaauaaguuguccugaac

SEQ ID NO: 682771 - RNA, 19 nt, Artificial Sequence
  Description of Artificial Sequence: Synthetic oligonucleotide
  Antisense strand to SEQ ID NO: 682770
guucaggacaacuuauuuc

SEQ ID NO: 682772 - RNA, 19 nt, Artificial Sequence
  Description of Artificial Sequence: Synthetic oligonucleotide
  Sense strand starting at position 2036 of SEQ ID NO: 585980
auaaguuguccugaacuuu

SEQ ID NO: 682773 - RNA, 19 nt, Artificial Sequence
  Description of Artificial Sequence: Synthetic oligonucleotide
  Antisense strand to SEQ ID NO: 682772
aaaguucaggacaacuuau

SEQ ID NO: 682774 - RNA, 19 nt, Artificial Sequence
  Description of Artificial Sequence: Synthetic oligonucleotide
  Sense strand starting at position 2042 of SEQ ID NO: 585980
uguccugaacuuuggacua

SEQ ID NO: 682775 - RNA, 19 nt, Artificial Sequence
  Description of Artificial Sequence: Synthetic oligonucleotide
  Antisense strand to SEQ ID NO: 682774
uaguccaaaguucaggaca

SEQ ID NO: 682776 - RNA, 19 nt, Artificial Sequence
  Description of Artificial Sequence: Synthetic oligonucleotide
  Sense strand starting at position 2056 of SEQ ID NO: 585980
gacuaaagguauguuugua

SEQ ID NO: 682777 - RNA, 19 nt, Artificial Sequence
  Description of Artificial Sequence: Synthetic oligonucleotide
  Antisense strand to SEQ ID NO: 682776
uacaaacauaccuuuaguc

SEQ ID NO: 682778 - RNA, 19 nt, Artificial Sequence
  Description of Artificial Sequence: Synthetic oligonucleotide
  Sense strand starting at position 2073 of SEQ ID NO: 585980
uauggugguugacuaagau

SEQ ID NO: 682779 - RNA, 19 nt, Artificial Sequence
  Description of Artificial Sequence: Synthetic oligonucleotide
  Antisense strand to SEQ ID NO: 682778
aucuuagucaaccaccaua

SEQ ID NO: 682780 - RNA, 19 nt, Artificial Sequence
  Description of Artificial Sequence: Synthetic oligonucleotide
  Sense strand starting at position 2165 of SEQ ID NO: 585980
gguggugaugccuacugaa

SEQ ID NO: 682781 - RNA, 19 nt, Artificial Sequence
  Description of Artificial Sequence: Synthetic oligonucleotide
  Antisense strand to SEQ ID NO: 682780
uucaguaggcaucaccacc

SEQ ID NO: 682782 - RNA, 19 nt, Artificial Sequence
  Description of Artificial Sequence: Synthetic oligonucleotide
  Sense strand starting at position 2267 of SEQ ID NO: 585980
agggcaauucucuaccuca

SEQ ID NO: 682783 - RNA, 19 nt, Artificial Sequence
  Description of Artificial Sequence: Synthetic oligonucleotide
  Antisense strand to SEQ ID NO: 682782
ugagguagagaauugcccu

SEQ ID NO: 682784 - RNA, 19 nt, Artificial Sequence
  Description of Artificial Sequence: Synthetic oligonucleotide
  Sense strand starting at position 2377 of SEQ ID NO: 585980
ucccuagcucaguaggaua

SEQ ID NO: 682785 - RNA, 19 nt, Artificial Sequence
  Description of Artificial Sequence: Synthetic oligonucleotide
  Antisense strand to SEQ ID NO: 682784
uauccuacugagcuaggga

SEQ ID NO: 682786 - RNA, 19 nt, Artificial Sequence
  Description of Artificial Sequence: Synthetic oligonucleotide
  Sense strand starting at position 2860 of SEQ ID NO: 585980
agggcuuguggaugauuau

SEQ ID NO: 682787 - RNA, 19 nt, Artificial Sequence
  Description of Artificial Sequence: Synthetic oligonucleotide
  Antisense strand to SEQ ID NO: 682786
auaaucauccacaagcccu

SEQ ID NO: 682788 - RNA, 19 nt, Artificial Sequence
  Description of Artificial Sequence: Synthetic oligonucleotide
  Sense strand starting at position 2861 of SEQ ID NO: 585980
gggcuuguggaugauuauu

SEQ ID NO: 682789 - RNA, 19 nt, Artificial Sequence
  Description of Artificial Sequence: Synthetic oligonucleotide
  Antisense strand to SEQ ID NO: 682788
aauaaucauccacaagccc

SEQ ID NO: 682790 - RNA, 19 nt, Artificial Sequence
  Description of Artificial Sequence: Synthetic oligonucleotide
  Sense strand starting at position 2878 of SEQ ID NO: 585980
uuauaauaauagccagagu

SEQ ID NO: 682791 - RNA, 19 nt, Artificial Sequence
  Description of Artificial Sequence: Synthetic oligonucleotide
  Antisense strand to SEQ ID NO: 682790
acucuggcuauuauuauaa

SEQ ID NO: 682792 - RNA, 19 nt, Artificial Sequence
  Description of Artificial Sequence: Synthetic oligonucleotide
  Sense strand starting at position 2887 of SEQ ID NO: 585980
uagccagagugaucauaca

SEQ ID NO: 682793 - RNA, 19 nt, Artificial Sequence
  Description of Artificial Sequence: Synthetic oligonucleotide
  Antisense strand to SEQ ID NO: 682792
uguaugaucacucuggcua

SEQ ID NO: 682794 - RNA, 19 nt, Artificial Sequence
  Description of Artificial Sequence: Synthetic oligonucleotide
  Sense strand starting at position 2983 of SEQ ID NO: 585980
aaauguccaguuuggacua

SEQ ID NO: 682795 - RNA, 19 nt, Artificial Sequence
  Description of Artificial Sequence: Synthetic oligonucleotide
  Antisense strand to SEQ ID NO: 682794
uaguccaaacuggacauuu

SEQ ID NO: 682796 - RNA, 19 nt, Artificial Sequence
  Description of Artificial Sequence: Synthetic oligonucleotide
  Sense strand starting at position 3055 of SEQ ID NO: 585980
auguuauaccuccagaccu

SEQ ID NO: 682797 - RNA, 19 nt, Artificial Sequence
  Description of Artificial Sequence: Synthetic oligonucleotide
  Antisense strand to SEQ ID NO: 682796
aggucuggagguauaacau

SEQ ID NO: 682798 - RNA, 19 nt, Artificial Sequence
  Description of Artificial Sequence: Synthetic oligonucleotide
  Sense strand starting at position 3057 of SEQ ID NO: 585980
guuauaccuccagaccuuu

SEQ ID NO: 682799 - RNA, 19 nt, Artificial Sequence
  Description of Artificial Sequence: Synthetic oligonucleotide
  Antisense strand to SEQ ID NO: 682798
aaaggucuggagguauaac

SEQ ID NO: 682800 - RNA, 19 nt, Artificial Sequence
  Description of Artificial Sequence: Synthetic oligonucleotide
  Sense strand starting at position 3107 of SEQ ID NO: 585980
agucuaacaucuguaaauu

SEQ ID NO: 682801 - RNA, 19 nt, Artificial Sequence
  Description of Artificial Sequence: Synthetic oligonucleotide
  Antisense strand to SEQ ID NO: 682800
aauuuacagauguuagacu

SEQ ID NO: 682802 - RNA, 19 nt, Artificial Sequence
  Description of Artificial Sequence: Synthetic oligonucleotide
  Sense strand starting at position 3108 of SEQ ID NO: 585980
gucuaacaucuguaaauug

SEQ ID NO: 682803 - RNA, 19 nt, Artificial Sequence
  Description of Artificial Sequence: Synthetic oligonucleotide
  Antisense strand to SEQ ID NO: 682802
caauuuacagauguuagac

SEQ ID NO: 682804 - RNA, 19 nt, Artificial Sequence
  Description of Artificial Sequence: Synthetic oligonucleotide
  Sense strand starting at position 3188 of SEQ ID NO: 585980
guuugacuggcaugaugau

SEQ ID NO: 682805 - RNA, 19 nt, Artificial Sequence
  Description of Artificial Sequence: Synthetic oligonucleotide
  Antisense strand to SEQ ID NO: 682804
aucaucaugccagucaaac

SEQ ID NO: 682806 - RNA, 19 nt, Artificial Sequence
  Description of Artificial Sequence: Synthetic oligonucleotide
  Sense strand starting at position 3189 of SEQ ID NO: 585980
uuugacuggcaugaugauu

SEQ ID NO: 682807 - RNA, 19 nt, Artificial Sequence
  Description of Artificial Sequence: Synthetic oligonucleotide
  Antisense strand to SEQ ID NO: 682806
aaucaucaugccagucaaa

SEQ ID NO: 682808 - RNA, 19 nt, Artificial Sequence
  Description of Artificial Sequence: Synthetic oligonucleotide
  Sense strand starting at position 3221 of SEQ ID NO: 585980
uaauguagaugccuuuaga

SEQ ID NO: 682809 - RNA, 19 nt, Artificial Sequence
  Description of Artificial Sequence: Synthetic oligonucleotide
  Antisense strand to SEQ ID NO: 682808
ucuaaaggcaucuacauua

SEQ ID NO: 682810 - RNA, 19 nt, Artificial Sequence
  Description of Artificial Sequence: Synthetic oligonucleotide
  Sense strand starting at position 3224 of SEQ ID NO: 585980
uguagaugccuuuagagag

SEQ ID NO: 682811 - RNA, 19 nt, Artificial Sequence
  Description of Artificial Sequence: Synthetic oligonucleotide
  Antisense strand to SEQ ID NO: 682810
cucucuaaaggcaucuaca

SEQ ID NO: 682812 - RNA, 19 nt, Artificial Sequence
  Description of Artificial Sequence: Synthetic oligonucleotide
  Sense strand starting at position 3300 of SEQ ID NO: 585980
uugacauuaugacucugau

SEQ ID NO: 682813 - RNA, 19 nt, Artificial Sequence
  Description of Artificial Sequence: Synthetic oligonucleotide
  Antisense strand to SEQ ID NO: 682812
aucagagucauaaugucaa

SEQ ID NO: 682814 - RNA, 19 nt, Artificial Sequence
  Description of Artificial Sequence: Synthetic oligonucleotide
  Sense strand starting at position 3490 of SEQ ID NO: 585980
ggagccugaugauugacau

SEQ ID NO: 682815 - RNA, 19 nt, Artificial Sequence
  Description of Artificial Sequence: Synthetic oligonucleotide
  Antisense strand to SEQ ID NO: 682814
augucaaucaucaggcucc

SEQ ID NO: 682816 - RNA, 19 nt, Artificial Sequence
  Description of Artificial Sequence: Synthetic oligonucleotide
  Sense strand starting at position 3491 of SEQ ID NO: 585980
gagccugaugauugacauc

SEQ ID NO: 682817 - RNA, 19 nt, Artificial Sequence
  Description of Artificial Sequence: Synthetic oligonucleotide
  Antisense strand to SEQ ID NO: 682816
gaugucaaucaucaggcuc

SEQ ID NO: 682818 - RNA, 19 nt, Artificial Sequence
  Description of Artificial Sequence: Synthetic oligonucleotide
  Sense strand starting at position 3514 of SEQ ID NO: 585980
gcaaauucucuggagaagu

SEQ ID NO: 682819 - RNA, 19 nt, Artificial Sequence
  Description of Artificial Sequence: Synthetic oligonucleotide
  Antisense strand to SEQ ID NO: 682818
acuucuccagagaauuugc

SEQ ID NO: 682820 - RNA, 19 nt, Artificial Sequence
  Description of Artificial Sequence: Synthetic oligonucleotide
  Sense strand starting at position 828 of SEQ ID NO: 585981
gugaauaccucuucugcag

SEQ ID NO: 682821 - RNA, 19 nt, Artificial Sequence
  Description of Artificial Sequence: Synthetic oligonucleotide
  Antisense strand to SEQ ID NO: 682820
cugcagaagagguauucac

SEQ ID NO: 682822 - RNA, 19 nt, Artificial Sequence
  Description of Artificial Sequence: Synthetic oligonucleotide
  Sense strand starting at position 861 of SEQ ID NO: 585981
gugggacuucccuggcuaa

SEQ ID NO: 682823 - RNA, 19 nt, Artificial Sequence
  Description of Artificial Sequence: Synthetic oligonucleotide
  Antisense strand to SEQ ID NO: 682822
uuagccagggaagucccac

SEQ ID NO: 682824 - RNA, 19 nt, Artificial Sequence
  Description of Artificial Sequence: Synthetic oligonucleotide
  Sense strand starting at position 862 of SEQ ID NO: 585981
ugggacuucccuggcuaau

SEQ ID NO: 682825 - RNA, 19 nt, Artificial Sequence
  Description of Artificial Sequence: Synthetic oligonucleotide
  Antisense strand to SEQ ID NO: 682824
auuagccagggaaguccca

SEQ ID NO: 682826 - RNA, 19 nt, Artificial Sequence
  Description of Artificial Sequence: Synthetic oligonucleotide
  Sense strand starting at position 864 of SEQ ID NO: 585981
ggacuucccuggcuaauaa

SEQ ID NO: 682827 - RNA, 19 nt, Artificial Sequence
  Description of Artificial Sequence: Synthetic oligonucleotide
  Antisense strand to SEQ ID NO: 682826
uuauuagccagggaagucc

SEQ ID NO: 682828 - RNA, 19 nt, Artificial Sequence
  Description of Artificial Sequence: Synthetic oligonucleotide
  Sense strand starting at position 878 of SEQ ID NO: 585981
aauaacgucuugcuagaga

SEQ ID NO: 682829 - RNA, 19 nt, Artificial Sequence
  Description of Artificial Sequence: Synthetic oligonucleotide
  Antisense strand to SEQ ID NO: 682828
ucucuagcaagacguuauu

SEQ ID NO: 682830 - RNA, 19 nt, Artificial Sequence
  Description of Artificial Sequence: Synthetic oligonucleotide
  Sense strand starting at position 940 of SEQ ID NO: 585981
accagaagaaccgguuuau

SEQ ID NO: 682831 - RNA, 19 nt, Artificial Sequence
  Description of Artificial Sequence: Synthetic oligonucleotide
  Antisense strand to SEQ ID NO: 682830
auaaaccgguucuucuggu

SEQ ID NO: 682832 - RNA, 19 nt, Artificial Sequence
  Description of Artificial Sequence: Synthetic oligonucleotide
  Sense strand starting at position 944 of SEQ ID NO: 585981
gaagaaccgguuuauccuu

SEQ ID NO: 682833 - RNA, 19 nt, Artificial Sequence
  Description of Artificial Sequence: Synthetic oligonucleotide
  Antisense strand to SEQ ID NO: 682832
aaggauaaaccgguucuuc

SEQ ID NO: 682834 - RNA, 19 nt, Artificial Sequence
  Description of Artificial Sequence: Synthetic oligonucleotide
  Sense strand starting at position 988 of SEQ ID NO: 585981
gaauaagaauuggaaagaa

SEQ ID NO: 682835 - RNA, 19 nt, Artificial Sequence
  Description of Artificial Sequence: Synthetic oligonucleotide
  Antisense strand to SEQ ID NO: 682834
uucuuuccaauucuuauuc

SEQ ID NO: 682836 - RNA, 19 nt, Artificial Sequence
  Description of Artificial Sequence: Synthetic oligonucleotide
  Sense strand starting at position 1042 of SEQ ID NO: 585981
uuauuucuaugggaucaga

SEQ ID NO: 682837 - RNA, 19 nt, Artificial Sequence
  Description of Artificial Sequence: Synthetic oligonucleotide
  Antisense strand to SEQ ID NO: 682836
ucugaucccauagaaauaa

SEQ ID NO: 682838 - RNA, 19 nt, Artificial Sequence
  Description of Artificial Sequence: Synthetic oligonucleotide
  Sense strand starting at position 1362 of SEQ ID NO: 585981
uuugaagagugccuagaau

SEQ ID NO: 682839 - RNA, 19 nt, Artificial Sequence
  Description of Artificial Sequence: Synthetic oligonucleotide
  Antisense strand to SEQ ID NO: 682838
auucuaggcacucuucaaa

SEQ ID NO: 682840 - RNA, 19 nt, Artificial Sequence
  Description of Artificial Sequence: Synthetic oligonucleotide
  Sense strand starting at position 1719 of SEQ ID NO: 585981
cccugcugucacgaaauau

SEQ ID NO: 682841 - RNA, 19 nt, Artificial Sequence
  Description of Artificial Sequence: Synthetic oligonucleotide
  Antisense strand to SEQ ID NO: 682840
auauuucgugacagcaggg

SEQ ID NO: 682842 - RNA, 19 nt, Artificial Sequence
  Description of Artificial Sequence: Synthetic oligonucleotide
  Sense strand starting at position 2243 of SEQ ID NO: 585981
uucuauaacugcucugaag

SEQ ID NO: 682843 - RNA, 19 nt, Artificial Sequence
  Description of Artificial Sequence: Synthetic oligonucleotide
  Antisense strand to SEQ ID NO: 682842
cuucagagcaguuauagaa

SEQ ID NO: 682844 - RNA, 19 nt, Artificial Sequence
  Description of Artificial Sequence: Synthetic oligonucleotide
  Sense strand starting at position 2292 of SEQ ID NO: 585981
guaggacucauuggcauca

SEQ ID NO: 682845 - RNA, 19 nt, Artificial Sequence
  Description of Artificial Sequence: Synthetic oligonucleotide
  Antisense strand to SEQ ID NO: 682844
ugaugccaaugaguccuac

SEQ ID NO: 682846 - RNA, 19 nt, Artificial Sequence
  Description of Artificial Sequence: Synthetic oligonucleotide
  Sense strand starting at position 2542 of SEQ ID NO: 585981
agggucaaguccuuaauga

SEQ ID NO: 682847 - RNA, 19 nt, Artificial Sequence
  Description of Artificial Sequence: Synthetic oligonucleotide
  Antisense strand to SEQ ID NO: 682846
ucauuaaggacuugacccu

SEQ ID NO: 682848 - RNA, 19 nt, Artificial Sequence
  Description of Artificial Sequence: Synthetic oligonucleotide
  Sense strand starting at position 2543 of SEQ ID NO: 585981
gggucaaguccuuaaugac

SEQ ID NO: 682849 - RNA, 19 nt, Artificial Sequence
  Description of Artificial Sequence: Synthetic oligonucleotide
  Antisense strand to SEQ ID NO: 682848
gucauuaaggacuugaccc

SEQ ID NO: 682850 - RNA, 19 nt, Artificial Sequence
  Description of Artificial Sequence: Synthetic oligonucleotide
  Sense strand starting at position 2604 of SEQ ID NO: 585981
aucaccacccguuagaauu

SEQ ID NO: 682851 - RNA, 19 nt, Artificial Sequence
  Description of Artificial Sequence: Synthetic oligonucleotide
  Antisense strand to SEQ ID NO: 682850
aauucuaacggguggugau

SEQ ID NO: 682852 - RNA, 19 nt, Artificial Sequence
  Description of Artificial Sequence: Synthetic oligonucleotide
  Sense strand starting at position 2659 of SEQ ID NO: 585981
acaauaagagcuugucaca

SEQ ID NO: 682853 - RNA, 19 nt, Artificial Sequence
  Description of Artificial Sequence: Synthetic oligonucleotide
  Antisense strand to SEQ ID NO: 682852
ugugacaagcucuuauugu

SEQ ID NO: 682854 - RNA, 19 nt, Artificial Sequence
  Description of Artificial Sequence: Synthetic oligonucleotide
  Sense strand starting at position 2681 of SEQ ID NO: 585981
auaagucucagguguaaga

SEQ ID NO: 682855 - RNA, 19 nt, Artificial Sequence
  Description of Artificial Sequence: Synthetic oligonucleotide
  Antisense strand to SEQ ID NO: 682854
ucuuacaccugagacuuau

SEQ ID NO: 682856 - RNA, 19 nt, Artificial Sequence
  Description of Artificial Sequence: Synthetic oligonucleotide
  Sense strand starting at position 2697 of SEQ ID NO: 585981
agaggcauuuaugauaaca

SEQ ID NO: 682857 - RNA, 19 nt, Artificial Sequence
  Description of Artificial Sequence: Synthetic oligonucleotide
  Antisense strand to SEQ ID NO: 682856
uguuaucauaaaugccucu

SEQ ID NO: 682858 - RNA, 19 nt, Artificial Sequence
  Description of Artificial Sequence: Synthetic oligonucleotide
  Sense strand starting at position 2699 of SEQ ID NO: 585981
aggcauuuaugauaacaac

SEQ ID NO: 682859 - RNA, 19 nt, Artificial Sequence
  Description of Artificial Sequence: Synthetic oligonucleotide
  Antisense strand to SEQ ID NO: 682858
guuguuaucauaaaugccu

SEQ ID NO: 682860 - RNA, 19 nt, Artificial Sequence
  Description of Artificial Sequence: Synthetic oligonucleotide
  Sense strand starting at position 2718 of SEQ ID NO: 585981
auaauaaaugcuggcuuaa

SEQ ID NO: 682861 - RNA, 19 nt, Artificial Sequence
  Description of Artificial Sequence: Synthetic oligonucleotide
  Antisense strand to SEQ ID NO: 682860
uuaagccagcauuuauuau

SEQ ID NO: 682862 - RNA, 19 nt, Artificial Sequence
  Description of Artificial Sequence: Synthetic oligonucleotide
  Sense strand starting at position 2802 of SEQ ID NO: 585981
acuugaauucugggagcca

SEQ ID NO: 682863 - RNA, 19 nt, Artificial Sequence
  Description of Artificial Sequence: Synthetic oligonucleotide
  Antisense strand to SEQ ID NO: 682862
uggcucccagaauucaagu

SEQ ID NO: 682864 - RNA, 19 nt, Artificial Sequence
  Description of Artificial Sequence: Synthetic oligonucleotide
  Sense strand starting at position 2855 of SEQ ID NO: 585981
ccugauagccaauggaaca

SEQ ID NO: 682865 - RNA, 19 nt, Artificial Sequence
  Description of Artificial Sequence: Synthetic oligonucleotide
  Antisense strand to SEQ ID NO: 682864
uguuccauuggcuaucagg

SEQ ID NO: 682866 - RNA, 19 nt, Artificial Sequence
  Description of Artificial Sequence: Synthetic oligonucleotide
  Sense strand starting at position 3130 of SEQ ID NO: 585981
cccugaauccuugguccca

SEQ ID NO: 682867 - RNA, 19 nt, Artificial Sequence
  Description of Artificial Sequence: Synthetic oligonucleotide
  Antisense strand to SEQ ID NO: 682866
ugggaccaaggauucaggg

SEQ ID NO: 682868 - RNA, 19 nt, Artificial Sequence
  Description of Artificial Sequence: Synthetic oligonucleotide
  Sense strand starting at position 3152 of SEQ ID NO: 585981
ugaguccuugcagauaucu

SEQ ID NO: 682869 - RNA, 19 nt, Artificial Sequence
  Description of Artificial Sequence: Synthetic oligonucleotide
  Antisense strand to SEQ ID NO: 682868
agauaucugcaaggacuca

SEQ ID NO: 682870 - RNA, 19 nt, Artificial Sequence
  Description of Artificial Sequence: Synthetic oligonucleotide
  Sense strand starting at position 3177 of SEQ ID NO: 585981
uucauuguuguggauguga

SEQ ID NO: 682871 - RNA, 19 nt, Artificial Sequence
  Description of Artificial Sequence: Synthetic oligonucleotide
  Antisense strand to SEQ ID NO: 682870
ucacauccacaacaaugaa

SEQ ID NO: 682872 - RNA, 19 nt, Artificial Sequence
  Description of Artificial Sequence: Synthetic oligonucleotide
  Sense strand starting at position 3188 of SEQ ID NO: 585981
ggaugugacucuguaccca

SEQ ID NO: 682873 - RNA, 19 nt, Artificial Sequence
  Description of Artificial Sequence: Synthetic oligonucleotide
  Antisense strand to SEQ ID NO: 682872
uggguacagagucacaucc

SEQ ID NO: 682874 - RNA, 19 nt, Artificial Sequence
  Description of Artificial Sequence: Synthetic oligonucleotide
  Sense strand starting at position 3206 of SEQ ID NO: 585981
aggcauggcucauuccaga

SEQ ID NO: 682875 - RNA, 19 nt, Artificial Sequence
  Description of Artificial Sequence: Synthetic oligonucleotide
  Antisense strand to SEQ ID NO: 682874
ucuggaaugagccaugccu

SEQ ID NO: 682876 - RNA, 19 nt, Artificial Sequence
  Description of Artificial Sequence: Synthetic oligonucleotide
  Sense strand starting at position 3211 of SEQ ID NO: 585981
uggcucauuccagaucugu

SEQ ID NO: 682877 - RNA, 19 nt, Artificial Sequence
  Description of Artificial Sequence: Synthetic oligonucleotide
  Antisense strand to SEQ ID NO: 682876
acagaucuggaaugagcca

SEQ ID NO: 682878 - RNA, 19 nt, Artificial Sequence
  Description of Artificial Sequence: Synthetic oligonucleotide
  Sense strand starting at position 3332 of SEQ ID NO: 585981
uuguaagucacaggaugaa

SEQ ID NO: 682879 - RNA, 19 nt, Artificial Sequence
  Description of Artificial Sequence: Synthetic oligonucleotide
  Antisense strand to SEQ ID NO: 682878
uucauccugugacuuacaa

SEQ ID NO: 682880 - RNA, 19 nt, Artificial Sequence
  Description of Artificial Sequence: Synthetic oligonucleotide
  Sense strand starting at position 3450 of SEQ ID NO: 585981
aagaguggccucuagucau

SEQ ID NO: 682881 - RNA, 19 nt, Artificial Sequence
  Description of Artificial Sequence: Synthetic oligonucleotide
  Antisense strand to SEQ ID NO: 682880
augacuagaggccacucuu

SEQ ID NO: 682882 - RNA, 19 nt, Artificial Sequence
  Description of Artificial Sequence: Synthetic oligonucleotide
  Sense strand starting at position 3489 of SEQ ID NO: 585981
gaauuauaauguguuagca

SEQ ID NO: 682883 - RNA, 19 nt, Artificial Sequence
  Description of Artificial Sequence: Synthetic oligonucleotide
  Antisense strand to SEQ ID NO: 682882
ugcuaacacauuauaauuc

SEQ ID NO: 682884 - RNA, 19 nt, Artificial Sequence
  Description of Artificial Sequence: Synthetic oligonucleotide
  Sense strand starting at position 3531 of SEQ ID NO: 585981
uccauagugguuuauaaau

SEQ ID NO: 682885 - RNA, 19 nt, Artificial Sequence
  Description of Artificial Sequence: Synthetic oligonucleotide
  Antisense strand to SEQ ID NO: 682884
auuuauaaaccacuaugga

SEQ ID NO: 682886 - RNA, 19 nt, Artificial Sequence
  Description of Artificial Sequence: Synthetic oligonucleotide
  Sense strand starting at position 3542 of SEQ ID NO: 585981
uuauaaauaccauggcgau

SEQ ID NO: 682887 - RNA, 19 nt, Artificial Sequence
  Description of Artificial Sequence: Synthetic oligonucleotide
  Antisense strand to SEQ ID NO: 682886
aucgccaugguauuuauaa

SEQ ID NO: 682888 - RNA, 19 nt, Artificial Sequence
  Description of Artificial Sequence: Synthetic oligonucleotide
  Sense strand starting at position 3554 of SEQ ID NO: 585981
uggcgaugucaggaagcua

SEQ ID NO: 682889 - RNA, 19 nt, Artificial Sequence
  Description of Artificial Sequence: Synthetic oligonucleotide
  Antisense strand to SEQ ID NO: 682888
uagcuuccugacaucgcca

SEQ ID NO: 682890 - RNA, 19 nt, Artificial Sequence
  Description of Artificial Sequence: Synthetic oligonucleotide
  Sense strand starting at position 3609 of SEQ ID NO: 585981
cugggaauugcccacaucu

SEQ ID NO: 682891 - RNA, 19 nt, Artificial Sequence
  Description of Artificial Sequence: Synthetic oligonucleotide
  Antisense strand to SEQ ID NO: 682890
agaugugggcaauucccag

SEQ ID NO: 682892 - RNA, 19 nt, Artificial Sequence
  Description of Artificial Sequence: Synthetic oligonucleotide
  Sense strand starting at position 3611 of SEQ ID NO: 585981
gggaauugcccacaucuuu

SEQ ID NO: 682893 - RNA, 19 nt, Artificial Sequence
  Description of Artificial Sequence: Synthetic oligonucleotide
  Antisense strand to SEQ ID NO: 682892
aaagaugugggcaauuccc

SEQ ID NO: 682894 - RNA, 19 nt, Artificial Sequence
  Description of Artificial Sequence: Synthetic oligonucleotide
  Sense strand starting at position 3653 of SEQ ID NO: 585981
acuccuuguuuaguacaua

SEQ ID NO: 682895 - RNA, 19 nt, Artificial Sequence
  Description of Artificial Sequence: Synthetic oligonucleotide
  Antisense strand to SEQ ID NO: 682894
uauguacuaaacaaggagu

SEQ ID NO: 682896 - RNA, 19 nt, Artificial Sequence
  Description of Artificial Sequence: Synthetic oligonucleotide
  Sense strand starting at position 3684 of SEQ ID NO: 585981
cuguaaguaucuguauuag

SEQ ID NO: 682897 - RNA, 19 nt, Artificial Sequence
  Description of Artificial Sequence: Synthetic oligonucleotide
  Antisense strand to SEQ ID NO: 682896
cuaauacagauacuuacag

SEQ ID NO: 682898 - RNA, 19 nt, Artificial Sequence
  Description of Artificial Sequence: Synthetic oligonucleotide
  Sense strand starting at position 3742 of SEQ ID NO: 585981
aguaauuuauaccaggaaa

SEQ ID NO: 682899 - RNA, 19 nt, Artificial Sequence
  Description of Artificial Sequence: Synthetic oligonucleotide
  Antisense strand to SEQ ID NO: 682898
uuuccugguauaaauuacu

SEQ ID NO: 682900 - RNA, 19 nt, Artificial Sequence
  Description of Artificial Sequence: Synthetic oligonucleotide
  Sense strand starting at position 37 of SEQ ID NO: 585982
ugauuaauccacuggaguc

SEQ ID NO: 682901 - RNA, 19 nt, Artificial Sequence
  Description of Artificial Sequence: Synthetic oligonucleotide
  Antisense strand to SEQ ID NO: 682900
gacuccaguggauuaauca

SEQ ID NO: 682902 - RNA, 19 nt, Artificial Sequence
  Description of Artificial Sequence: Synthetic oligonucleotide
  Sense strand starting at position 47 of SEQ ID NO: 585982
acuggagucuaagcuugau

SEQ ID NO: 682903 - RNA, 19 nt, Artificial Sequence
  Description of Artificial Sequence: Synthetic oligonucleotide
  Antisense strand to SEQ ID NO: 682902
aucaagcuuagacuccagu

SEQ ID NO: 682904 - RNA, 19 nt, Artificial Sequence
  Description of Artificial Sequence: Synthetic oligonucleotide
  Sense strand starting at position 139 of SEQ ID NO: 585982
agugucuugggccagacau

SEQ ID NO: 682905 - RNA, 19 nt, Artificial Sequence
  Description of Artificial Sequence: Synthetic oligonucleotide
  Antisense strand to SEQ ID NO: 682904
augucuggcccaagacacu

SEQ ID NO: 682906 - RNA, 19 nt, Artificial Sequence
  Description of Artificial Sequence: Synthetic oligonucleotide
  Sense strand starting at position 236 of SEQ ID NO: 585982
acagaagguccaugcauaa

SEQ ID NO: 682907 - RNA, 19 nt, Artificial Sequence
  Description of Artificial Sequence: Synthetic oligonucleotide
  Antisense strand to SEQ ID NO: 682906
uuaugcauggaccuucugu

SEQ ID NO: 682908 - RNA, 19 nt, Artificial Sequence
  Description of Artificial Sequence: Synthetic oligonucleotide
  Sense strand starting at position 316 of SEQ ID NO: 585982
ugcucuaaaggcuaacaaa

SEQ ID NO: 682909 - RNA, 19 nt, Artificial Sequence
  Description of Artificial Sequence: Synthetic oligonucleotide
  Antisense strand to SEQ ID NO: 682908
uuuguuagccuuuagagca

SEQ ID NO: 682910 - RNA, 19 nt, Artificial Sequence
  Description of Artificial Sequence: Synthetic oligonucleotide
  Sense strand starting at position 429 of SEQ ID NO: 585982
cucuucuuggaaugacauu

SEQ ID NO: 682911 - RNA, 19 nt, Artificial Sequence
  Description of Artificial Sequence: Synthetic oligonucleotide
  Antisense strand to SEQ ID NO: 682910
aaugucauuccaagaagag

SEQ ID NO: 682912 - RNA, 19 nt, Artificial Sequence
  Description of Artificial Sequence: Synthetic oligonucleotide
  Sense strand starting at position 525 of SEQ ID NO: 585982
uuaaauauugcugagcuca

SEQ ID NO: 682913 - RNA, 19 nt, Artificial Sequence
  Description of Artificial Sequence: Synthetic oligonucleotide
  Antisense strand to SEQ ID NO: 682912
ugagcucagcaauauuuaa

SEQ ID NO: 682914 - RNA, 19 nt, Artificial Sequence
  Description of Artificial Sequence: Synthetic oligonucleotide
  Sense strand starting at position 569 of SEQ ID NO: 585982
caacgagucuauuuguagu

SEQ ID NO: 682915 - RNA, 19 nt, Artificial Sequence
  Description of Artificial Sequence: Synthetic oligonucleotide
  Antisense strand to SEQ ID NO: 682914
acuacaaauagacucguug

SEQ ID NO: 682916 - RNA, 19 nt, Artificial Sequence
  Description of Artificial Sequence: Synthetic oligonucleotide
  Sense strand starting at position 571 of SEQ ID NO: 585982
acgagucuauuuguaguga

SEQ ID NO: 682917 - RNA, 19 nt, Artificial Sequence
  Description of Artificial Sequence: Synthetic oligonucleotide
  Antisense strand to SEQ ID NO: 682916
ucacuacaaauagacucgu

SEQ ID NO: 682918 - RNA, 19 nt, Artificial Sequence
  Description of Artificial Sequence: Synthetic oligonucleotide
  Sense strand starting at position 663 of SEQ ID NO: 585982
gugguugcgaauuaagaga

SEQ ID NO: 682919 - RNA, 19 nt, Artificial Sequence
  Description of Artificial Sequence: Synthetic oligonucleotide
  Antisense strand to SEQ ID NO: 682918
ucucuuaauucgcaaccac

SEQ ID NO: 682920 - RNA, 19 nt, Artificial Sequence
  Description of Artificial Sequence: Synthetic oligonucleotide
  Sense strand starting at position 884 of SEQ ID NO: 585982
aaggaaauuugguagaucu

SEQ ID NO: 682921 - RNA, 19 nt, Artificial Sequence
  Description of Artificial Sequence: Synthetic oligonucleotide
  Antisense strand to SEQ ID NO: 682920
agaucuaccaaauuuccuu

SEQ ID NO: 682922 - RNA, 19 nt, Artificial Sequence
  Description of Artificial Sequence: Synthetic oligonucleotide
  Sense strand starting at position 898 of SEQ ID NO: 585982
gaucuaugugcugagagau

SEQ ID NO: 682923 - RNA, 19 nt, Artificial Sequence
  Description of Artificial Sequence: Synthetic oligonucleotide
  Antisense strand to SEQ ID NO: 682922
aucucucagcacauagauc

SEQ ID NO: 682924 - RNA, 19 nt, Artificial Sequence
  Description of Artificial Sequence: Synthetic oligonucleotide
  Sense strand starting at position 908 of SEQ ID NO: 585982
cugagagauaaguggccau

SEQ ID NO: 682925 - RNA, 19 nt, Artificial Sequence
  Description of Artificial Sequence: Synthetic oligonucleotide
  Antisense strand to SEQ ID NO: 682924
auggccacuuaucucucag

SEQ ID NO: 682926 - RNA, 19 nt, Artificial Sequence
  Description of Artificial Sequence: Synthetic oligonucleotide
  Sense strand starting at position 911 of SEQ ID NO: 585982
agagauaaguggccaugua

SEQ ID NO: 682927 - RNA, 19 nt, Artificial Sequence
  Description of Artificial Sequence: Synthetic oligonucleotide
  Antisense strand to SEQ ID NO: 682926
uacauggccacuuaucucu

SEQ ID NO: 682928 - RNA, 19 nt, Artificial Sequence
  Description of Artificial Sequence: Synthetic oligonucleotide
  Sense strand starting at position 912 of SEQ ID NO: 585982
gagauaaguggccauguaa

SEQ ID NO: 682929 - RNA, 19 nt, Artificial Sequence
  Description of Artificial Sequence: Synthetic oligonucleotide
  Antisense strand to SEQ ID NO: 682928
uuacauggccacuuaucuc

SEQ ID NO: 682930 - RNA, 19 nt, Artificial Sequence
  Description of Artificial Sequence: Synthetic oligonucleotide
  Sense strand starting at position 924 of SEQ ID NO: 585982
cauguaaugagguagguua

SEQ ID NO: 682931 - RNA, 19 nt, Artificial Sequence
  Description of Artificial Sequence: Synthetic oligonucleotide
  Antisense strand to SEQ ID NO: 682930
uaaccuaccucauuacaug

SEQ ID NO: 682932 - RNA, 19 nt, Artificial Sequence
  Description of Artificial Sequence: Synthetic oligonucleotide
  Sense strand starting at position 1003 of SEQ ID NO: 585982
acugauaacuucuuuggau

SEQ ID NO: 682933 - RNA, 19 nt, Artificial Sequence
  Description of Artificial Sequence: Synthetic oligonucleotide
  Antisense strand to SEQ ID NO: 682932
auccaaagaaguuaucagu

SEQ ID NO: 682934 - RNA, 19 nt, Artificial Sequence
  Description of Artificial Sequence: Synthetic oligonucleotide
  Sense strand starting at position 1004 of SEQ ID NO: 585982
cugauaacuucuuuggauu

SEQ ID NO: 682935 - RNA, 19 nt, Artificial Sequence
  Description of Artificial Sequence: Synthetic oligonucleotide
  Antisense strand to SEQ ID NO: 682934
aauccaaagaaguuaucag

SEQ ID NO: 682936 - RNA, 19 nt, Artificial Sequence
  Description of Artificial Sequence: Synthetic oligonucleotide
  Sense strand starting at position 1007 of SEQ ID NO: 585982
auaacuucuuuggauuuga

SEQ ID NO: 682937 - RNA, 19 nt, Artificial Sequence
  Description of Artificial Sequence: Synthetic oligonucleotide
  Antisense strand to SEQ ID NO: 682936
ucaaauccaaagaaguuau

SEQ ID NO: 682938 - RNA, 19 nt, Artificial Sequence
  Description of Artificial Sequence: Synthetic oligonucleotide
  Sense strand starting at position 1023 of SEQ ID NO: 585982
ugaauuucuucugucagca

SEQ ID NO: 682939 - RNA, 19 nt, Artificial Sequence
  Description of Artificial Sequence: Synthetic oligonucleotide
  Antisense strand to SEQ ID NO: 682938
ugcugacagaagaaauuca

SEQ ID NO: 682940 - RNA, 19 nt, Artificial Sequence
  Description of Artificial Sequence: Synthetic oligonucleotide
  Sense strand starting at position 1031 of SEQ ID NO: 585982
uucugucagcaauaggaga

SEQ ID NO: 682941 - RNA, 19 nt, Artificial Sequence
  Description of Artificial Sequence: Synthetic oligonucleotide
  Antisense strand to SEQ ID NO: 682940
ucuccuauugcugacagaa

SEQ ID NO: 682942 - RNA, 19 nt, Artificial Sequence
  Description of Artificial Sequence: Synthetic oligonucleotide
  Sense strand starting at position 1090 of SEQ ID NO: 585982
uugacuuguggugauccua

SEQ ID NO: 682943 - RNA, 19 nt, Artificial Sequence
  Description of Artificial Sequence: Synthetic oligonucleotide
  Antisense strand to SEQ ID NO: 682942
uaggaucaccacaagucaa

SEQ ID NO: 682944 - RNA, 19 nt, Artificial Sequence
  Description of Artificial Sequence: Synthetic oligonucleotide
  Sense strand starting at position 2146 of SEQ ID NO: 585982
cgaggaauccucuggagau

SEQ ID NO: 682945 - RNA, 19 nt, Artificial Sequence
  Description of Artificial Sequence: Synthetic oligonucleotide
  Antisense strand to SEQ ID NO: 682944
aucuccagaggauuccucg

SEQ ID NO: 682946 - RNA, 19 nt, Artificial Sequence
  Description of Artificial Sequence: Synthetic oligonucleotide
  Sense strand starting at position 2443 of SEQ ID NO: 585982
gucacuuccgacuagugga

SEQ ID NO: 682947 - RNA, 19 nt, Artificial Sequence
  Description of Artificial Sequence: Synthetic oligonucleotide
  Antisense strand to SEQ ID NO: 682946
uccacuagucggaagugac

SEQ ID NO: 682948 - RNA, 19 nt, Artificial Sequence
  Description of Artificial Sequence: Synthetic oligonucleotide
  Sense strand starting at position 2829 of SEQ ID NO: 585982
cuuagcaggucagugauuu

SEQ ID NO: 682949 - RNA, 19 nt, Artificial Sequence
  Description of Artificial Sequence: Synthetic oligonucleotide
  Antisense strand to SEQ ID NO: 682948
aaaucacugaccugcuaag

SEQ ID NO: 682950 - RNA, 19 nt, Artificial Sequence
  Description of Artificial Sequence: Synthetic oligonucleotide
  Sense strand starting at position 3044 of SEQ ID NO: 585982
agcacuagucauggagaau

SEQ ID NO: 682951 - RNA, 19 nt, Artificial Sequence
  Description of Artificial Sequence: Synthetic oligonucleotide
  Antisense strand to SEQ ID NO: 682950
auucuccaugacuagugcu

SEQ ID NO: 682952 - RNA, 19 nt, Artificial Sequence
  Description of Artificial Sequence: Synthetic oligonucleotide
  Sense strand starting at position 3094 of SEQ ID NO: 585982
uacucuccucggugagaaa

SEQ ID NO: 682953 - RNA, 19 nt, Artificial Sequence
  Description of Artificial Sequence: Synthetic oligonucleotide
  Antisense strand to SEQ ID NO: 682952
uuucucaccgaggagagua

SEQ ID NO: 682954 - RNA, 19 nt, Artificial Sequence
  Description of Artificial Sequence: Synthetic oligonucleotide
  Sense strand starting at position 3117 of SEQ ID NO: 585982
ccuaauuuccgguguaaau

SEQ ID NO: 682955 - RNA, 19 nt, Artificial Sequence
  Description of Artificial Sequence: Synthetic oligonucleotide
  Antisense strand to SEQ ID NO: 682954
auuuacaccggaaauuagg

SEQ ID NO: 682956 - RNA, 19 nt, Artificial Sequence
  Description of Artificial Sequence: Synthetic oligonucleotide
  Sense strand starting at position 3128 of SEQ ID NO: 585982
guguaaauugugcugcugu

SEQ ID NO: 682957 - RNA, 19 nt, Artificial Sequence
  Description of Artificial Sequence: Synthetic oligonucleotide
  Antisense strand to SEQ ID NO: 682956
acagcagcacaauuuacac

SEQ ID NO: 682958 - RNA, 19 nt, Artificial Sequence
  Description of Artificial Sequence: Synthetic oligonucleotide
  Sense strand starting at position 3130 of SEQ ID NO: 585982
guaaauugugcugcuguuu

SEQ ID NO: 682959 - RNA, 19 nt, Artificial Sequence
  Description of Artificial Sequence: Synthetic oligonucleotide
  Antisense strand to SEQ ID NO: 682958
aaacagcagcacaauuuac

SEQ ID NO: 682960 - RNA, 19 nt, Artificial Sequence
  Description of Artificial Sequence: Synthetic oligonucleotide
  Sense strand starting at position 3230 of SEQ ID NO: 585982
guauaaagauuugggauca

SEQ ID NO: 682961 - RNA, 19 nt, Artificial Sequence
  Description of Artificial Sequence: Synthetic oligonucleotide
  Antisense strand to SEQ ID NO: 682960
ugaucccaaaucuuuauac

SEQ ID NO: 682962 - RNA, 19 nt, Artificial Sequence
  Description of Artificial Sequence: Synthetic oligonucleotide
  Sense strand starting at position 3258 of SEQ ID NO: 585982
auuacaguugucuaccuuu

SEQ ID NO: 682963 - RNA, 19 nt, Artificial Sequence
  Description of Artificial Sequence: Synthetic oligonucleotide
  Antisense strand to SEQ ID NO: 682962
aaagguagacaacuguaau

SEQ ID NO: 682964 - RNA, 19 nt, Artificial Sequence
  Description of Artificial Sequence: Synthetic oligonucleotide
  Sense strand starting at position 3402 of SEQ ID NO: 585982
agaugucucacuuguaagg

SEQ ID NO: 682965 - RNA, 19 nt, Artificial Sequence
  Description of Artificial Sequence: Synthetic oligonucleotide
  Antisense strand to SEQ ID NO: 682964
ccuuacaagugagacaucu

SEQ ID NO: 682966 - RNA, 19 nt, Artificial Sequence
  Description of Artificial Sequence: Synthetic oligonucleotide
  Sense strand starting at position 3413 of SEQ ID NO: 585982
uuguaaggguaguuugaaa

SEQ ID NO: 682967 - RNA, 19 nt, Artificial Sequence
  Description of Artificial Sequence: Synthetic oligonucleotide
  Antisense strand to SEQ ID NO: 682966
uuucaaacuacccuuacaa

SEQ ID NO: 682968 - RNA, 19 nt, Artificial Sequence
  Description of Artificial Sequence: Synthetic oligonucleotide
  Sense strand starting at position 3504 of SEQ ID NO: 585982
auuuguggcgcuuaagaug

SEQ ID NO: 682969 - RNA, 19 nt, Artificial Sequence
  Description of Artificial Sequence: Synthetic oligonucleotide
  Antisense strand to SEQ ID NO: 682968
caucuuaagcgccacaaau

SEQ ID NO: 682970 - RNA, 19 nt, Artificial Sequence
  Description of Artificial Sequence: Synthetic oligonucleotide
  Sense strand starting at position 3607 of SEQ ID NO: 585982
aguucuaaggacugugaag

SEQ ID NO: 682971 - RNA, 19 nt, Artificial Sequence
  Description of Artificial Sequence: Synthetic oligonucleotide
  Antisense strand to SEQ ID NO: 682970
cuucacaguccuuagaacu

SEQ ID NO: 682972 - RNA, 19 nt, Artificial Sequence
  Description of Artificial Sequence: Synthetic oligonucleotide
  Sense strand starting at position 3633 of SEQ ID NO: 585982
uugccuagagacugauauu

SEQ ID NO: 682973 - RNA, 19 nt, Artificial Sequence
  Description of Artificial Sequence: Synthetic oligonucleotide
  Antisense strand to SEQ ID NO: 682972
aauaucagucucuaggcaa

SEQ ID NO: 682974 - RNA, 19 nt, Artificial Sequence
  Description of Artificial Sequence: Synthetic oligonucleotide
  Sense strand starting at position 3684 of SEQ ID NO: 585982
aagggagacugucuaggua

SEQ ID NO: 682975 - RNA, 19 nt, Artificial Sequence
  Description of Artificial Sequence: Synthetic oligonucleotide
  Antisense strand to SEQ ID NO: 682974
uaccuagacagucucccuu

SEQ ID NO: 682976 - RNA, 19 nt, Artificial Sequence
  Description of Artificial Sequence: Synthetic oligonucleotide
  Sense strand starting at position 3754 of SEQ ID NO: 585982
aaaucuuugcuguagagag

SEQ ID NO: 682977 - RNA, 19 nt, Artificial Sequence
  Description of Artificial Sequence: Synthetic oligonucleotide
  Antisense strand to SEQ ID NO: 682976
cucucuacagcaaagauuu

SEQ ID NO: 682978 - RNA, 19 nt, Artificial Sequence
  Description of Artificial Sequence: Synthetic oligonucleotide
  Sense strand starting at position 3815 of SEQ ID NO: 585982
uucuccuugcaguaugaaa

SEQ ID NO: 682979 - RNA, 19 nt, Artificial Sequence
  Description of Artificial Sequence: Synthetic oligonucleotide
  Antisense strand to SEQ ID NO: 682978
uuucauacugcaaggagaa

SEQ ID NO: 682980 - RNA, 19 nt, Artificial Sequence
  Description of Artificial Sequence: Synthetic oligonucleotide
  Sense strand starting at position 12 of SEQ ID NO: 585983
ucccuauguuaaguccuaa

SEQ ID NO: 682981 - RNA, 19 nt, Artificial Sequence
  Description of Artificial Sequence: Synthetic oligonucleotide
  Antisense strand to SEQ ID NO: 682980
uuaggacuuaacauaggga

SEQ ID NO: 682982 - RNA, 19 nt, Artificial Sequence
  Description of Artificial Sequence: Synthetic oligonucleotide
  Sense strand starting at position 336 of SEQ ID NO: 585983
aaaggaaucugagaaguaa

SEQ ID NO: 682983 - RNA, 19 nt, Artificial Sequence
  Description of Artificial Sequence: Synthetic oligonucleotide
  Antisense strand to SEQ ID NO: 682982
uuacuucucagauuccuuu

SEQ ID NO: 682984 - RNA, 19 nt, Artificial Sequence
  Description of Artificial Sequence: Synthetic oligonucleotide
  Sense strand starting at position 424 of SEQ ID NO: 585983
ugauuaauccacuggaguc

SEQ ID NO: 682985 - RNA, 19 nt, Artificial Sequence
  Description of Artificial Sequence: Synthetic oligonucleotide
  Antisense strand to SEQ ID NO: 682984
gacuccaguggauuaauca

SEQ ID NO: 682986 - RNA, 19 nt, Artificial Sequence
  Description of Artificial Sequence: Synthetic oligonucleotide
  Sense strand starting at position 434 of SEQ ID NO: 585983
acuggagucuaagcuugau

SEQ ID NO: 682987 - RNA, 19 nt, Artificial Sequence
  Description of Artificial Sequence: Synthetic oligonucleotide
  Antisense strand to SEQ ID NO: 682986
aucaagcuuagacuccagu

SEQ ID NO: 682988 - RNA, 19 nt, Artificial Sequence
  Description of Artificial Sequence: Synthetic oligonucleotide
  Sense strand starting at position 526 of SEQ ID NO: 585983
agugucuugggccagacau

SEQ ID NO: 682989 - RNA, 19 nt, Artificial Sequence
  Description of Artificial Sequence: Synthetic oligonucleotide
  Antisense strand to SEQ ID NO: 682988
augucuggcccaagacacu

SEQ ID NO: 682990 - RNA, 19 nt, Artificial Sequence
  Description of Artificial Sequence: Synthetic oligonucleotide
  Sense strand starting at position 623 of SEQ ID NO: 585983
acagaagguccaugcauaa

SEQ ID NO: 682991 - RNA, 19 nt, Artificial Sequence
  Description of Artificial Sequence: Synthetic oligonucleotide
  Antisense strand to SEQ ID NO: 682990
uuaugcauggaccuucugu

SEQ ID NO: 682992 - RNA, 19 nt, Artificial Sequence
  Description of Artificial Sequence: Synthetic oligonucleotide
  Sense strand starting at position 703 of SEQ ID NO: 585983
ugcucuaaaggcuaacaaa

SEQ ID NO: 682993 - RNA, 19 nt, Artificial Sequence
  Description of Artificial Sequence: Synthetic oligonucleotide
  Antisense strand to SEQ ID NO: 682992
uuuguuagccuuuagagca

SEQ ID NO: 682994 - RNA, 19 nt, Artificial Sequence
  Description of Artificial Sequence: Synthetic oligonucleotide
  Sense strand starting at position 812 of SEQ ID NO: 585983
ugcucucuucuuggaauga

SEQ ID NO: 682995 - RNA, 19 nt, Artificial Sequence
  Description of Artificial Sequence: Synthetic oligonucleotide
  Antisense strand to SEQ ID NO: 682994
ucauuccaagaagagagca

SEQ ID NO: 682996 - RNA, 19 nt, Artificial Sequence
  Description of Artificial Sequence: Synthetic oligonucleotide
  Sense strand starting at position 816 of SEQ ID NO: 585983
cucuucuuggaaugacauu

SEQ ID NO: 682997 - RNA, 19 nt, Artificial Sequence
  Description of Artificial Sequence: Synthetic oligonucleotide
  Antisense strand to SEQ ID NO: 682996
aaugucauuccaagaagag

SEQ ID NO: 682998 - RNA, 19 nt, Artificial Sequence
  Description of Artificial Sequence: Synthetic oligonucleotide
  Sense strand starting at position 912 of SEQ ID NO: 585983
uuaaauauugcugagcuca

SEQ ID NO: 682999 - RNA, 19 nt, Artificial Sequence
  Description of Artificial Sequence: Synthetic oligonucleotide
  Antisense strand to SEQ ID NO: 682998
ugagcucagcaauauuuaa

SEQ ID NO: 683000 - RNA, 19 nt, Artificial Sequence
  Description of Artificial Sequence: Synthetic oligonucleotide
  Sense strand starting at position 956 of SEQ ID NO: 585983
caacgagucuauuuguagu

SEQ ID NO: 683001 - RNA, 19 nt, Artificial Sequence
  Description of Artificial Sequence: Synthetic oligonucleotide
  Antisense strand to SEQ ID NO: 683000
acuacaaauagacucguug

SEQ ID NO: 683002 - RNA, 19 nt, Artificial Sequence
  Description of Artificial Sequence: Synthetic oligonucleotide
  Sense strand starting at position 958 of SEQ ID NO: 585983
acgagucuauuuguaguga

SEQ ID NO: 683003 - RNA, 19 nt, Artificial Sequence
  Description of Artificial Sequence: Synthetic oligonucleotide
  Antisense strand to SEQ ID NO: 683002
ucacuacaaauagacucgu

SEQ ID NO: 683004 - RNA, 19 nt, Artificial Sequence
  Description of Artificial Sequence: Synthetic oligonucleotide
  Sense strand starting at position 1050 of SEQ ID NO: 585983
gugguugcgaauuaagaga

SEQ ID NO: 683005 - RNA, 19 nt, Artificial Sequence
  Description of Artificial Sequence: Synthetic oligonucleotide
  Antisense strand to SEQ ID NO: 683004
ucucuuaauucgcaaccac

SEQ ID NO: 683006 - RNA, 19 nt, Artificial Sequence
  Description of Artificial Sequence: Synthetic oligonucleotide
  Sense strand starting at position 1271 of SEQ ID NO: 585983
aaggaaauuugguagaucu

SEQ ID NO: 683007 - RNA, 19 nt, Artificial Sequence
  Description of Artificial Sequence: Synthetic oligonucleotide
  Antisense strand to SEQ ID NO: 683006
agaucuaccaaauuuccuu

SEQ ID NO: 683008 - RNA, 19 nt, Artificial Sequence
  Description of Artificial Sequence: Synthetic oligonucleotide
  Sense strand starting at position 1282 of SEQ ID NO: 585983
guagaucuaugugcugaga

SEQ ID NO: 683009 - RNA, 19 nt, Artificial Sequence
  Description of Artificial Sequence: Synthetic oligonucleotide
  Antisense strand to SEQ ID NO: 683008
ucucagcacauagaucuac

SEQ ID NO: 683010 - RNA, 19 nt, Artificial Sequence
  Description of Artificial Sequence: Synthetic oligonucleotide
  Sense strand starting at position 1285 of SEQ ID NO: 585983
gaucuaugugcugagagau

SEQ ID NO: 683011 - RNA, 19 nt, Artificial Sequence
  Description of Artificial Sequence: Synthetic oligonucleotide
  Antisense strand to SEQ ID NO: 683010
aucucucagcacauagauc

SEQ ID NO: 683012 - RNA, 19 nt, Artificial Sequence
  Description of Artificial Sequence: Synthetic oligonucleotide
  Sense strand starting at position 1295 of SEQ ID NO: 585983
cugagagauaaguggccau

SEQ ID NO: 683013 - RNA, 19 nt, Artificial Sequence
  Description of Artificial Sequence: Synthetic oligonucleotide
  Antisense strand to SEQ ID NO: 683012
auggccacuuaucucucag

SEQ ID NO: 683014 - RNA, 19 nt, Artificial Sequence
  Description of Artificial Sequence: Synthetic oligonucleotide
  Sense strand starting at position 1298 of SEQ ID NO: 585983
agagauaaguggccaugua

SEQ ID NO: 683015 - RNA, 19 nt, Artificial Sequence
  Description of Artificial Sequence: Synthetic oligonucleotide
  Antisense strand to SEQ ID NO: 683014
uacauggccacuuaucucu

SEQ ID NO: 683016 - RNA, 19 nt, Artificial Sequence
  Description of Artificial Sequence: Synthetic oligonucleotide
  Sense strand starting at position 1299 of SEQ ID NO: 585983
gagauaaguggccauguaa

SEQ ID NO: 683017 - RNA, 19 nt, Artificial Sequence
  Description of Artificial Sequence: Synthetic oligonucleotide
  Antisense strand to SEQ ID NO: 683016
uuacauggccacuuaucuc

SEQ ID NO: 683018 - RNA, 19 nt, Artificial Sequence
  Description of Artificial Sequence: Synthetic oligonucleotide
  Sense strand starting at position 1311 of SEQ ID NO: 585983
cauguaaugagguagguua

SEQ ID NO: 683019 - RNA, 19 nt, Artificial Sequence
  Description of Artificial Sequence: Synthetic oligonucleotide
  Antisense strand to SEQ ID NO: 683018
uaaccuaccucauuacaug

SEQ ID NO: 683020 - RNA, 19 nt, Artificial Sequence
  Description of Artificial Sequence: Synthetic oligonucleotide
  Sense strand starting at position 1390 of SEQ ID NO: 585983
acugauaacuucuuuggau

SEQ ID NO: 683021 - RNA, 19 nt, Artificial Sequence
  Description of Artificial Sequence: Synthetic oligonucleotide
  Antisense strand to SEQ ID NO: 683020
auccaaagaaguuaucagu

SEQ ID NO: 683022 - RNA, 19 nt, Artificial Sequence
  Description of Artificial Sequence: Synthetic oligonucleotide
  Sense strand starting at position 1391 of SEQ ID NO: 585983
cugauaacuucuuuggauu

SEQ ID NO: 683023 - RNA, 19 nt, Artificial Sequence
  Description of Artificial Sequence: Synthetic oligonucleotide
  Antisense strand to SEQ ID NO: 683022
aauccaaagaaguuaucag

SEQ ID NO: 683024 - RNA, 19 nt, Artificial Sequence
  Description of Artificial Sequence: Synthetic oligonucleotide
  Sense strand starting at position 1394 of SEQ ID NO: 585983
auaacuucuuuggauuuga

SEQ ID NO: 683025 - RNA, 19 nt, Artificial Sequence
  Description of Artificial Sequence: Synthetic oligonucleotide
  Antisense strand to SEQ ID NO: 683024
ucaaauccaaagaaguuau

SEQ ID NO: 683026 - RNA, 19 nt, Artificial Sequence
  Description of Artificial Sequence: Synthetic oligonucleotide
  Sense strand starting at position 1410 of SEQ ID NO: 585983
ugaauuucuucugucagca

SEQ ID NO: 683027 - RNA, 19 nt, Artificial Sequence
  Description of Artificial Sequence: Synthetic oligonucleotide
  Antisense strand to SEQ ID NO: 683026
ugcugacagaagaaauuca

SEQ ID NO: 683028 - RNA, 19 nt, Artificial Sequence
  Description of Artificial Sequence: Synthetic oligonucleotide
  Sense strand starting at position 1418 of SEQ ID NO: 585983
uucugucagcaauaggaga

SEQ ID NO: 683029 - RNA, 19 nt, Artificial Sequence
  Description of Artificial Sequence: Synthetic oligonucleotide
  Antisense strand to SEQ ID NO: 683028
ucuccuauugcugacagaa

SEQ ID NO: 683030 - RNA, 19 nt, Artificial Sequence
  Description of Artificial Sequence: Synthetic oligonucleotide
  Sense strand starting at position 1477 of SEQ ID NO: 585983
uugacuuguggugauccua

SEQ ID NO: 683031 - RNA, 19 nt, Artificial Sequence
  Description of Artificial Sequence: Synthetic oligonucleotide
  Antisense strand to SEQ ID NO: 683030
uaggaucaccacaagucaa

SEQ ID NO: 683032 - RNA, 19 nt, Artificial Sequence
  Description of Artificial Sequence: Synthetic oligonucleotide
  Sense strand starting at position 2533 of SEQ ID NO: 585983
cgaggaauccucuggagau

SEQ ID NO: 683033 - RNA, 19 nt, Artificial Sequence
  Description of Artificial Sequence: Synthetic oligonucleotide
  Antisense strand to SEQ ID NO: 683032
aucuccagaggauuccucg

SEQ ID NO: 683034 - RNA, 19 nt, Artificial Sequence
  Description of Artificial Sequence: Synthetic oligonucleotide
  Sense strand starting at position 2830 of SEQ ID NO: 585983
gucacuuccgacuagugga

SEQ ID NO: 683035 - RNA, 19 nt, Artificial Sequence
  Description of Artificial Sequence: Synthetic oligonucleotide
  Antisense strand to SEQ ID NO: 683034
uccacuagucggaagugac

SEQ ID NO: 683036 - RNA, 19 nt, Artificial Sequence
  Description of Artificial Sequence: Synthetic oligonucleotide
  Sense strand starting at position 2891 of SEQ ID NO: 585983
cgcgguagacuucaaauac

SEQ ID NO: 683037 - RNA, 19 nt, Artificial Sequence
  Description of Artificial Sequence: Synthetic oligonucleotide
  Antisense strand to SEQ ID NO: 683036
guauuugaagucuaccgcg

SEQ ID NO: 683038 - RNA, 19 nt, Artificial Sequence
  Description of Artificial Sequence: Synthetic oligonucleotide
  Sense strand starting at position 3216 of SEQ ID NO: 585983
cuuagcaggucagugauuu

SEQ ID NO: 683039 - RNA, 19 nt, Artificial Sequence
  Description of Artificial Sequence: Synthetic oligonucleotide
  Antisense strand to SEQ ID NO: 683038
aaaucacugaccugcuaag

SEQ ID NO: 683040 - RNA, 19 nt, Artificial Sequence
  Description of Artificial Sequence: Synthetic oligonucleotide
  Sense strand starting at position 3431 of SEQ ID NO: 585983
agcacuagucauggagaau

SEQ ID NO: 683041 - RNA, 19 nt, Artificial Sequence
  Description of Artificial Sequence: Synthetic oligonucleotide
  Antisense strand to SEQ ID NO: 683040
auucuccaugacuagugcu

SEQ ID NO: 683042 - RNA, 19 nt, Artificial Sequence
  Description of Artificial Sequence: Synthetic oligonucleotide
  Sense strand starting at position 3481 of SEQ ID NO: 585983
uacucuccucggugagaaa

SEQ ID NO: 683043 - RNA, 19 nt, Artificial Sequence
  Description of Artificial Sequence: Synthetic oligonucleotide
  Antisense strand to SEQ ID NO: 683042
uuucucaccgaggagagua

SEQ ID NO: 683044 - RNA, 19 nt, Artificial Sequence
  Description of Artificial Sequence: Synthetic oligonucleotide
  Sense strand starting at position 3504 of SEQ ID NO: 585983
ccuaauuuccgguguaaau

SEQ ID NO: 683045 - RNA, 19 nt, Artificial Sequence
  Description of Artificial Sequence: Synthetic oligonucleotide
  Antisense strand to SEQ ID NO: 683044
auuuacaccggaaauuagg

SEQ ID NO: 683046 - RNA, 19 nt, Artificial Sequence
  Description of Artificial Sequence: Synthetic oligonucleotide
  Sense strand starting at position 3515 of SEQ ID NO: 585983
guguaaauugugcugcugu

SEQ ID NO: 683047 - RNA, 19 nt, Artificial Sequence
  Description of Artificial Sequence: Synthetic oligonucleotide
  Antisense strand to SEQ ID NO: 683046
acagcagcacaauuuacac

SEQ ID NO: 683048 - RNA, 19 nt, Artificial Sequence
  Description of Artificial Sequence: Synthetic oligonucleotide
  Sense strand starting at position 3517 of SEQ ID NO: 585983
guaaauugugcugcuguuu

SEQ ID NO: 683049 - RNA, 19 nt, Artificial Sequence
  Description of Artificial Sequence: Synthetic oligonucleotide
  Antisense strand to SEQ ID NO: 683048
aaacagcagcacaauuuac

SEQ ID NO: 683050 - RNA, 19 nt, Artificial Sequence
  Description of Artificial Sequence: Synthetic oligonucleotide
  Sense strand starting at position 3617 of SEQ ID NO: 585983
guauaaagauuugggauca

SEQ ID NO: 683051 - RNA, 19 nt, Artificial Sequence
  Description of Artificial Sequence: Synthetic oligonucleotide
  Antisense strand to SEQ ID NO: 683050
ugaucccaaaucuuuauac

SEQ ID NO: 683052 - RNA, 19 nt, Artificial Sequence
  Description of Artificial Sequence: Synthetic oligonucleotide
  Sense strand starting at position 3645 of SEQ ID NO: 585983
auuacaguugucuaccuuu

SEQ ID NO: 683053 - RNA, 19 nt, Artificial Sequence
  Description of Artificial Sequence: Synthetic oligonucleotide
  Antisense strand to SEQ ID NO: 683052
aaagguagacaacuguaau

SEQ ID NO: 683054 - RNA, 19 nt, Artificial Sequence
  Description of Artificial Sequence: Synthetic oligonucleotide
  Sense strand starting at position 3789 of SEQ ID NO: 585983
agaugucucacuuguaagg

SEQ ID NO: 683055 - RNA, 19 nt, Artificial Sequence
  Description of Artificial Sequence: Synthetic oligonucleotide
  Antisense strand to SEQ ID NO: 683054
ccuuacaagugagacaucu

SEQ ID NO: 683056 - RNA, 19 nt, Artificial Sequence
  Description of Artificial Sequence: Synthetic oligonucleotide
  Sense strand starting at position 3800 of SEQ ID NO: 585983
uuguaaggguaguuugaaa

SEQ ID NO: 683057 - RNA, 19 nt, Artificial Sequence
  Description of Artificial Sequence: Synthetic oligonucleotide
  Antisense strand to SEQ ID NO: 683056
uuucaaacuacccuuacaa

SEQ ID NO: 683058 - RNA, 19 nt, Artificial Sequence
  Description of Artificial Sequence: Synthetic oligonucleotide
  Sense strand starting at position 3891 of SEQ ID NO: 585983
auuuguggcgcuuaagaug

SEQ ID NO: 683059 - RNA, 19 nt, Artificial Sequence
  Description of Artificial Sequence: Synthetic oligonucleotide
  Antisense strand to SEQ ID NO: 683058
caucuuaagcgccacaaau

SEQ ID NO: 683060 - RNA, 19 nt, Artificial Sequence
  Description of Artificial Sequence: Synthetic oligonucleotide
  Sense strand starting at position 346 of SEQ ID NO: 585984
accggaacugguggauuaa

SEQ ID NO: 683061 - RNA, 19 nt, Artificial Sequence
  Description of Artificial Sequence: Synthetic oligonucleotide
  Antisense strand to SEQ ID NO: 683060
uuaauccaccaguuccggu

SEQ ID NO: 683062 - RNA, 19 nt, Artificial Sequence
  Description of Artificial Sequence: Synthetic oligonucleotide
  Sense strand starting at position 359 of SEQ ID NO: 585984
gauuaaauaguguacaguu

SEQ ID NO: 683063 - RNA, 19 nt, Artificial Sequence
  Description of Artificial Sequence: Synthetic oligonucleotide
  Antisense strand to SEQ ID NO: 683062
aacuguacacuauuuaauc

SEQ ID NO: 683064 - RNA, 19 nt, Artificial Sequence
  Description of Artificial Sequence: Synthetic oligonucleotide
  Sense strand starting at position 935 of SEQ ID NO: 585984
acuguaaguuaccugaaau

SEQ ID NO: 683065 - RNA, 19 nt, Artificial Sequence
  Description of Artificial Sequence: Synthetic oligonucleotide
  Antisense strand to SEQ ID NO: 683064
auuucagguaacuuacagu

SEQ ID NO: 683066 - RNA, 19 nt, Artificial Sequence
  Description of Artificial Sequence: Synthetic oligonucleotide
  Sense strand starting at position 1147 of SEQ ID NO: 585984
cgauauuaccuaugcccaa

SEQ ID NO: 683067 - RNA, 19 nt, Artificial Sequence
  Description of Artificial Sequence: Synthetic oligonucleotide
  Antisense strand to SEQ ID NO: 683066
uugggcauagguaauaucg

SEQ ID NO: 683068 - RNA, 19 nt, Artificial Sequence
  Description of Artificial Sequence: Synthetic oligonucleotide
  Sense strand starting at position 1161 of SEQ ID NO: 585984
cccaauaaccagugugaaa

SEQ ID NO: 683069 - RNA, 19 nt, Artificial Sequence
  Description of Artificial Sequence: Synthetic oligonucleotide
  Antisense strand to SEQ ID NO: 683068
uuucacacugguuauuggg

SEQ ID NO: 683070 - RNA, 19 nt, Artificial Sequence
  Description of Artificial Sequence: Synthetic oligonucleotide
  Sense strand starting at position 1232 of SEQ ID NO: 585984
aguucuuccuaaguuuaau

SEQ ID NO: 683071 - RNA, 19 nt, Artificial Sequence
  Description of Artificial Sequence: Synthetic oligonucleotide
  Antisense strand to SEQ ID NO: 683070
auuaaacuuaggaagaacu

SEQ ID NO: 683072 - RNA, 19 nt, Artificial Sequence
  Description of Artificial Sequence: Synthetic oligonucleotide
  Sense strand starting at position 1455 of SEQ ID NO: 585984
agcuuacgaucucuaccua

SEQ ID NO: 683073 - RNA, 19 nt, Artificial Sequence
  Description of Artificial Sequence: Synthetic oligonucleotide
  Antisense strand to SEQ ID NO: 683072
uagguagagaucguaagcu

SEQ ID NO: 683074 - RNA, 19 nt, Artificial Sequence
  Description of Artificial Sequence: Synthetic oligonucleotide
  Sense strand starting at position 1462 of SEQ ID NO: 585984
gaucucuaccuagggagua

SEQ ID NO: 683075 - RNA, 19 nt, Artificial Sequence
  Description of Artificial Sequence: Synthetic oligonucleotide
  Antisense strand to SEQ ID NO: 683074
uacucccuagguagagauc

SEQ ID NO: 683076 - RNA, 19 nt, Artificial Sequence
  Description of Artificial Sequence: Synthetic oligonucleotide
  Sense strand starting at position 1474 of SEQ ID NO: 585984
gggaguaucucauccucug

SEQ ID NO: 683077 - RNA, 19 nt, Artificial Sequence
  Description of Artificial Sequence: Synthetic oligonucleotide
  Antisense strand to SEQ ID NO: 683076
cagaggaugagauacuccc

SEQ ID NO: 683078 - RNA, 19 nt, Artificial Sequence
  Description of Artificial Sequence: Synthetic oligonucleotide
  Sense strand starting at position 2092 of SEQ ID NO: 585984
ucccuauguuaaguccuaa

SEQ ID NO: 683079 - RNA, 19 nt, Artificial Sequence
  Description of Artificial Sequence: Synthetic oligonucleotide
  Antisense strand to SEQ ID NO: 683078
uuaggacuuaacauaggga

SEQ ID NO: 683080 - RNA, 19 nt, Artificial Sequence
  Description of Artificial Sequence: Synthetic oligonucleotide
  Sense strand starting at position 2251 of SEQ ID NO: 585984
ugaucuaucuugucucuua

SEQ ID NO: 683081 - RNA, 19 nt, Artificial Sequence
  Description of Artificial Sequence: Synthetic oligonucleotide
  Antisense strand to SEQ ID NO: 683080
uaagagacaagauagauca

SEQ ID NO: 683082 - RNA, 19 nt, Artificial Sequence
  Description of Artificial Sequence: Synthetic oligonucleotide
  Sense strand starting at position 2416 of SEQ ID NO: 585984
aaaggaaucugagaaguaa

SEQ ID NO: 683083 - RNA, 19 nt, Artificial Sequence
  Description of Artificial Sequence: Synthetic oligonucleotide
  Antisense strand to SEQ ID NO: 683082
uuacuucucagauuccuuu

SEQ ID NO: 683084 - RNA, 19 nt, Artificial Sequence
  Description of Artificial Sequence: Synthetic oligonucleotide
  Sense strand starting at position 2504 of SEQ ID NO: 585984
ugauuaauccacuggaguc

SEQ ID NO: 683085 - RNA, 19 nt, Artificial Sequence
  Description of Artificial Sequence: Synthetic oligonucleotide
  Antisense strand to SEQ ID NO: 683084
gacuccaguggauuaauca

SEQ ID NO: 683086 - RNA, 19 nt, Artificial Sequence
  Description of Artificial Sequence: Synthetic oligonucleotide
  Sense strand starting at position 2514 of SEQ ID NO: 585984
acuggagucuaagcuugau

SEQ ID NO: 683087 - RNA, 19 nt, Artificial Sequence
  Description of Artificial Sequence: Synthetic oligonucleotide
  Antisense strand to SEQ ID NO: 683086
aucaagcuuagacuccagu

SEQ ID NO: 683088 - RNA, 19 nt, Artificial Sequence
  Description of Artificial Sequence: Synthetic oligonucleotide
  Sense strand starting at position 2517 of SEQ ID NO: 585984
ggagucuaagcuugauucu

SEQ ID NO: 683089 - RNA, 19 nt, Artificial Sequence
  Description of Artificial Sequence: Synthetic oligonucleotide
  Antisense strand to SEQ ID NO: 683088
agaaucaagcuuagacucc

SEQ ID NO: 683090 - RNA, 19 nt, Artificial Sequence
  Description of Artificial Sequence: Synthetic oligonucleotide
  Sense strand starting at position 2536 of SEQ ID NO: 585984
cugacacuguucucucauu

SEQ ID NO: 683091 - RNA, 19 nt, Artificial Sequence
  Description of Artificial Sequence: Synthetic oligonucleotide
  Antisense strand to SEQ ID NO: 683090
aaugagagaacagugucag

SEQ ID NO: 683092 - RNA, 19 nt, Artificial Sequence
  Description of Artificial Sequence: Synthetic oligonucleotide
  Sense strand starting at position 2606 of SEQ ID NO: 585984
agugucuugggccagacau

SEQ ID NO: 683093 - RNA, 19 nt, Artificial Sequence
  Description of Artificial Sequence: Synthetic oligonucleotide
  Antisense strand to SEQ ID NO: 683092
augucuggcccaagacacu

SEQ ID NO: 683094 - RNA, 19 nt, Artificial Sequence
  Description of Artificial Sequence: Synthetic oligonucleotide
  Sense strand starting at position 2703 of SEQ ID NO: 585984
acagaagguccaugcauaa

SEQ ID NO: 683095 - RNA, 19 nt, Artificial Sequence
  Description of Artificial Sequence: Synthetic oligonucleotide
  Antisense strand to SEQ ID NO: 683094
uuaugcauggaccuucugu

SEQ ID NO: 683096 - RNA, 19 nt, Artificial Sequence
  Description of Artificial Sequence: Synthetic oligonucleotide
  Sense strand starting at position 2771 of SEQ ID NO: 585984
guuagauaccacugcucua

SEQ ID NO: 683097 - RNA, 19 nt, Artificial Sequence
  Description of Artificial Sequence: Synthetic oligonucleotide
  Antisense strand to SEQ ID NO: 683096
uagagcagugguaucuaac

SEQ ID NO: 683098 - RNA, 19 nt, Artificial Sequence
  Description of Artificial Sequence: Synthetic oligonucleotide
  Sense strand starting at position 2783 of SEQ ID NO: 585984
ugcucuaaaggcuaacaaa

SEQ ID NO: 683099 - RNA, 19 nt, Artificial Sequence
  Description of Artificial Sequence: Synthetic oligonucleotide
  Antisense strand to SEQ ID NO: 683098
uuuguuagccuuuagagca

SEQ ID NO: 683100 - RNA, 19 nt, Artificial Sequence
  Description of Artificial Sequence: Synthetic oligonucleotide
  Sense strand starting at position 2892 of SEQ ID NO: 585984
ugcucucuucuuggaauga

SEQ ID NO: 683101 - RNA, 19 nt, Artificial Sequence
  Description of Artificial Sequence: Synthetic oligonucleotide
  Antisense strand to SEQ ID NO: 683100
ucauuccaagaagagagca

SEQ ID NO: 683102 - RNA, 19 nt, Artificial Sequence
  Description of Artificial Sequence: Synthetic oligonucleotide
  Sense strand starting at position 2896 of SEQ ID NO: 585984
cucuucuuggaaugacauu

SEQ ID NO: 683103 - RNA, 19 nt, Artificial Sequence
  Description of Artificial Sequence: Synthetic oligonucleotide
  Antisense strand to SEQ ID NO: 683102
aaugucauuccaagaagag

SEQ ID NO: 683104 - RNA, 19 nt, Artificial Sequence
  Description of Artificial Sequence: Synthetic oligonucleotide
  Sense strand starting at position 2992 of SEQ ID NO: 585984
uuaaauauugcugagcuca

SEQ ID NO: 683105 - RNA, 19 nt, Artificial Sequence
  Description of Artificial Sequence: Synthetic oligonucleotide
  Antisense strand to SEQ ID NO: 683104
ugagcucagcaauauuuaa

SEQ ID NO: 683106 - RNA, 19 nt, Artificial Sequence
  Description of Artificial Sequence: Synthetic oligonucleotide
  Sense strand starting at position 3036 of SEQ ID NO: 585984
caacgagucuauuuguagu

SEQ ID NO: 683107 - RNA, 19 nt, Artificial Sequence
  Description of Artificial Sequence: Synthetic oligonucleotide
  Antisense strand to SEQ ID NO: 683106
acuacaaauagacucguug

SEQ ID NO: 683108 - RNA, 19 nt, Artificial Sequence
  Description of Artificial Sequence: Synthetic oligonucleotide
  Sense strand starting at position 3038 of SEQ ID NO: 585984
acgagucuauuuguaguga

SEQ ID NO: 683109 - RNA, 19 nt, Artificial Sequence
  Description of Artificial Sequence: Synthetic oligonucleotide
  Antisense strand to SEQ ID NO: 683108
ucacuacaaauagacucgu

SEQ ID NO: 683110 - RNA, 19 nt, Artificial Sequence
  Description of Artificial Sequence: Synthetic oligonucleotide
  Sense strand starting at position 3130 of SEQ ID NO: 585984
gugguugcgaauuaagaga

SEQ ID NO: 683111 - RNA, 19 nt, Artificial Sequence
  Description of Artificial Sequence: Synthetic oligonucleotide
  Antisense strand to SEQ ID NO: 683110
ucucuuaauucgcaaccac

SEQ ID NO: 683112 - RNA, 19 nt, Artificial Sequence
  Description of Artificial Sequence: Synthetic oligonucleotide
  Sense strand starting at position 3351 of SEQ ID NO: 585984
aaggaaauuugguagaucu

SEQ ID NO: 683113 - RNA, 19 nt, Artificial Sequence
  Description of Artificial Sequence: Synthetic oligonucleotide
  Antisense strand to SEQ ID NO: 683112
agaucuaccaaauuuccuu

SEQ ID NO: 683114 - RNA, 19 nt, Artificial Sequence
  Description of Artificial Sequence: Synthetic oligonucleotide
  Sense strand starting at position 3361 of SEQ ID NO: 585984
gguagaucuaugugcugag

SEQ ID NO: 683115 - RNA, 19 nt, Artificial Sequence
  Description of Artificial Sequence: Synthetic oligonucleotide
  Antisense strand to SEQ ID NO: 683114
cucagcacauagaucuacc

SEQ ID NO: 683116 - RNA, 19 nt, Artificial Sequence
  Description of Artificial Sequence: Synthetic oligonucleotide
  Sense strand starting at position 3362 of SEQ ID NO: 585984
guagaucuaugugcugaga

SEQ ID NO: 683117 - RNA, 19 nt, Artificial Sequence
  Description of Artificial Sequence: Synthetic oligonucleotide
  Antisense strand to SEQ ID NO: 683116
ucucagcacauagaucuac

SEQ ID NO: 683118 - RNA, 19 nt, Artificial Sequence
  Description of Artificial Sequence: Synthetic oligonucleotide
  Sense strand starting at position 3365 of SEQ ID NO: 585984
gaucuaugugcugagagau

SEQ ID NO: 683119 - RNA, 19 nt, Artificial Sequence
  Description of Artificial Sequence: Synthetic oligonucleotide
  Antisense strand to SEQ ID NO: 683118
aucucucagcacauagauc

SEQ ID NO: 683120 - RNA, 19 nt, Artificial Sequence
  Description of Artificial Sequence: Synthetic oligonucleotide
  Sense strand starting at position 3375 of SEQ ID NO: 585984
cugagagauaaguggccau

SEQ ID NO: 683121 - RNA, 19 nt, Artificial Sequence
  Description of Artificial Sequence: Synthetic oligonucleotide
  Antisense strand to SEQ ID NO: 683120
auggccacuuaucucucag

SEQ ID NO: 683122 - RNA, 19 nt, Artificial Sequence
  Description of Artificial Sequence: Synthetic oligonucleotide
  Sense strand starting at position 3378 of SEQ ID NO: 585984
agagauaaguggccaugua

SEQ ID NO: 683123 - RNA, 19 nt, Artificial Sequence
  Description of Artificial Sequence: Synthetic oligonucleotide
  Antisense strand to SEQ ID NO: 683122
uacauggccacuuaucucu

SEQ ID NO: 683124 - RNA, 19 nt, Artificial Sequence
  Description of Artificial Sequence: Synthetic oligonucleotide
  Sense strand starting at position 3379 of SEQ ID NO: 585984
gagauaaguggccauguaa

SEQ ID NO: 683125 - RNA, 19 nt, Artificial Sequence
  Description of Artificial Sequence: Synthetic oligonucleotide
  Antisense strand to SEQ ID NO: 683124
uuacauggccacuuaucuc

SEQ ID NO: 683126 - RNA, 19 nt, Artificial Sequence
  Description of Artificial Sequence: Synthetic oligonucleotide
  Sense strand starting at position 3391 of SEQ ID NO: 585984
cauguaaugagguagguua

SEQ ID NO: 683127 - RNA, 19 nt, Artificial Sequence
  Description of Artificial Sequence: Synthetic oligonucleotide
  Antisense strand to SEQ ID NO: 683126
uaaccuaccucauuacaug

SEQ ID NO: 683128 - RNA, 19 nt, Artificial Sequence
  Description of Artificial Sequence: Synthetic oligonucleotide
  Sense strand starting at position 3470 of SEQ ID NO: 585984
acugauaacuucuuuggau

SEQ ID NO: 683129 - RNA, 19 nt, Artificial Sequence
  Description of Artificial Sequence: Synthetic oligonucleotide
  Antisense strand to SEQ ID NO: 683128
auccaaagaaguuaucagu

SEQ ID NO: 683130 - RNA, 19 nt, Artificial Sequence
  Description of Artificial Sequence: Synthetic oligonucleotide
  Sense strand starting at position 3471 of SEQ ID NO: 585984
cugauaacuucuuuggauu

SEQ ID NO: 683131 - RNA, 19 nt, Artificial Sequence
  Description of Artificial Sequence: Synthetic oligonucleotide
  Antisense strand to SEQ ID NO: 683130
aauccaaagaaguuaucag

SEQ ID NO: 683132 - RNA, 19 nt, Artificial Sequence
  Description of Artificial Sequence: Synthetic oligonucleotide
  Sense strand starting at position 3474 of SEQ ID NO: 585984
auaacuucuuuggauuuga

SEQ ID NO: 683133 - RNA, 19 nt, Artificial Sequence
  Description of Artificial Sequence: Synthetic oligonucleotide
  Antisense strand to SEQ ID NO: 683132
ucaaauccaaagaaguuau

SEQ ID NO: 683134 - RNA, 19 nt, Artificial Sequence
  Description of Artificial Sequence: Synthetic oligonucleotide
  Sense strand starting at position 3490 of SEQ ID NO: 585984
ugaauuucuucugucagca

SEQ ID NO: 683135 - RNA, 19 nt, Artificial Sequence
  Description of Artificial Sequence: Synthetic oligonucleotide
  Antisense strand to SEQ ID NO: 683134
ugcugacagaagaaauuca

SEQ ID NO: 683136 - RNA, 19 nt, Artificial Sequence
  Description of Artificial Sequence: Synthetic oligonucleotide
  Sense strand starting at position 3498 of SEQ ID NO: 585984
uucugucagcaauaggaga

SEQ ID NO: 683137 - RNA, 19 nt, Artificial Sequence
  Description of Artificial Sequence: Synthetic oligonucleotide
  Antisense strand to SEQ ID NO: 683136
ucuccuauugcugacagaa

SEQ ID NO: 683138 - RNA, 19 nt, Artificial Sequence
  Description of Artificial Sequence: Synthetic oligonucleotide
  Sense strand starting at position 3557 of SEQ ID NO: 585984
uugacuuguggugauccua

SEQ ID NO: 683139 - RNA, 19 nt, Artificial Sequence
  Description of Artificial Sequence: Synthetic oligonucleotide
  Antisense strand to SEQ ID NO: 683138
uaggaucaccacaagucaa

SEQ ID NO: 683140 - RNA, 19 nt, Artificial Sequence
  Description of Artificial Sequence: Synthetic oligonucleotide
  Sense strand starting at position 2 of SEQ ID NO: 585985
gagagaauccuuugagggu

SEQ ID NO: 683141 - RNA, 19 nt, Artificial Sequence
  Description of Artificial Sequence: Synthetic oligonucleotide
  Antisense strand to SEQ ID NO: 683140
acccucaaaggauucucuc

SEQ ID NO: 683142 - RNA, 19 nt, Artificial Sequence
  Description of Artificial Sequence: Synthetic oligonucleotide
  Sense strand starting at position 97 of SEQ ID NO: 585985
aaugguuaccucugaggac

SEQ ID NO: 683143 - RNA, 19 nt, Artificial Sequence
  Description of Artificial Sequence: Synthetic oligonucleotide
  Antisense strand to SEQ ID NO: 683142
guccucagagguaaccauu

SEQ ID NO: 683144 - RNA, 19 nt, Artificial Sequence
  Description of Artificial Sequence: Synthetic oligonucleotide
  Sense strand starting at position 342 of SEQ ID NO: 585985
gcaggauaauuacuagugu

SEQ ID NO: 683145 - RNA, 19 nt, Artificial Sequence
  Description of Artificial Sequence: Synthetic oligonucleotide
  Antisense strand to SEQ ID NO: 683144
acacuaguaauuauccugc

SEQ ID NO: 683146 - RNA, 19 nt, Artificial Sequence
  Description of Artificial Sequence: Synthetic oligonucleotide
  Sense strand starting at position 442 of SEQ ID NO: 585985
uugcauuaguuaguccaau

SEQ ID NO: 683147 - RNA, 19 nt, Artificial Sequence
  Description of Artificial Sequence: Synthetic oligonucleotide
  Antisense strand to SEQ ID NO: 683146
auuggacuaacuaaugcaa

SEQ ID NO: 683148 - RNA, 19 nt, Artificial Sequence
  Description of Artificial Sequence: Synthetic oligonucleotide
  Sense strand starting at position 443 of SEQ ID NO: 585985
ugcauuaguuaguccaauu

SEQ ID NO: 683149 - RNA, 19 nt, Artificial Sequence
  Description of Artificial Sequence: Synthetic oligonucleotide
  Antisense strand to SEQ ID NO: 683148
aauuggacuaacuaaugca

SEQ ID NO: 683150 - RNA, 19 nt, Artificial Sequence
  Description of Artificial Sequence: Synthetic oligonucleotide
  Sense strand starting at position 619 of SEQ ID NO: 585985
agagauguccauuguugag

SEQ ID NO: 683151 - RNA, 19 nt, Artificial Sequence
  Description of Artificial Sequence: Synthetic oligonucleotide
  Antisense strand to SEQ ID NO: 683150
cucaacaauggacaucucu

SEQ ID NO: 683152 - RNA, 19 nt, Artificial Sequence
  Description of Artificial Sequence: Synthetic oligonucleotide
  Sense strand starting at position 1470 of SEQ ID NO: 585985
ugucauugucauggccaaa

SEQ ID NO: 683153 - RNA, 19 nt, Artificial Sequence
  Description of Artificial Sequence: Synthetic oligonucleotide
  Antisense strand to SEQ ID NO: 683152
uuuggccaugacaaugaca

SEQ ID NO: 683154 - RNA, 19 nt, Artificial Sequence
  Description of Artificial Sequence: Synthetic oligonucleotide
  Sense strand starting at position 1544 of SEQ ID NO: 585985
gagaguuuggcaggaguuu

SEQ ID NO: 683155 - RNA, 19 nt, Artificial Sequence
  Description of Artificial Sequence: Synthetic oligonucleotide
  Antisense strand to SEQ ID NO: 683154
aaacuccugccaaacucuc

SEQ ID NO: 683156 - RNA, 19 nt, Artificial Sequence
  Description of Artificial Sequence: Synthetic oligonucleotide
  Sense strand starting at position 1734 of SEQ ID NO: 585985
acuagagacuuguauaaug

SEQ ID NO: 683157 - RNA, 19 nt, Artificial Sequence
  Description of Artificial Sequence: Synthetic oligonucleotide
  Antisense strand to SEQ ID NO: 683156
cauuauacaagucucuagu

SEQ ID NO: 683158 - RNA, 19 nt, Artificial Sequence
  Description of Artificial Sequence: Synthetic oligonucleotide
  Sense strand starting at position 1736 of SEQ ID NO: 585985
uagagacuuguauaauguu

SEQ ID NO: 683159 - RNA, 19 nt, Artificial Sequence
  Description of Artificial Sequence: Synthetic oligonucleotide
  Antisense strand to SEQ ID NO: 683158
aacauuauacaagucucua

SEQ ID NO: 683160 - RNA, 19 nt, Artificial Sequence
  Description of Artificial Sequence: Synthetic oligonucleotide
  Sense strand starting at position 1763 of SEQ ID NO: 585985
cuuuguuccuuccugucaa

SEQ ID NO: 683161 - RNA, 19 nt, Artificial Sequence
  Description of Artificial Sequence: Synthetic oligonucleotide
  Antisense strand to SEQ ID NO: 683160
uugacaggaaggaacaaag

SEQ ID NO: 683162 - RNA, 19 nt, Artificial Sequence
  Description of Artificial Sequence: Synthetic oligonucleotide
  Sense strand starting at position 2050 of SEQ ID NO: 585985
gguggaaagacucaugcuu

SEQ ID NO: 683163 - RNA, 19 nt, Artificial Sequence
  Description of Artificial Sequence: Synthetic oligonucleotide
  Antisense strand to SEQ ID NO: 683162
aagcaugagucuuuccacc

SEQ ID NO: 683164 - RNA, 19 nt, Artificial Sequence
  Description of Artificial Sequence: Synthetic oligonucleotide
  Sense strand starting at position 2178 of SEQ ID NO: 585985
gccuuugacgucgauauga

SEQ ID NO: 683165 - RNA, 19 nt, Artificial Sequence
  Description of Artificial Sequence: Synthetic oligonucleotide
  Antisense strand to SEQ ID NO: 683164
ucauaucgacgucaaaggc

SEQ ID NO: 683166 - RNA, 19 nt, Artificial Sequence
  Description of Artificial Sequence: Synthetic oligonucleotide
  Sense strand starting at position 2180 of SEQ ID NO: 585985
cuuugacgucgauaugaca

SEQ ID NO: 683167 - RNA, 19 nt, Artificial Sequence
  Description of Artificial Sequence: Synthetic oligonucleotide
  Antisense strand to SEQ ID NO: 683166
ugucauaucgacgucaaag

SEQ ID NO: 683168 - RNA, 19 nt, Artificial Sequence
  Description of Artificial Sequence: Synthetic oligonucleotide
  Sense strand starting at position 2187 of SEQ ID NO: 585985
gucgauaugacaggaaaug

SEQ ID NO: 683169 - RNA, 19 nt, Artificial Sequence
  Description of Artificial Sequence: Synthetic oligonucleotide
  Antisense strand to SEQ ID NO: 683168
cauuuccugucauaucgac

SEQ ID NO: 683170 - RNA, 19 nt, Artificial Sequence
  Description of Artificial Sequence: Synthetic oligonucleotide
  Sense strand starting at position 2320 of SEQ ID NO: 585985
ugucuaaguucccuccagu

SEQ ID NO: 683171 - RNA, 19 nt, Artificial Sequence
  Description of Artificial Sequence: Synthetic oligonucleotide
  Antisense strand to SEQ ID NO: 683170
acuggagggaacuuagaca

SEQ ID NO: 683172 - RNA, 19 nt, Artificial Sequence
  Description of Artificial Sequence: Synthetic oligonucleotide
  Sense strand starting at position 2340 of SEQ ID NO: 585985
aggcuagucuuggcauuga

SEQ ID NO: 683173 - RNA, 19 nt, Artificial Sequence
  Description of Artificial Sequence: Synthetic oligonucleotide
  Antisense strand to SEQ ID NO: 683172
ucaaugccaagacuagccu

SEQ ID NO: 683174 - RNA, 19 nt, Artificial Sequence
  Description of Artificial Sequence: Synthetic oligonucleotide
  Sense strand starting at position 2344 of SEQ ID NO: 585985
uagucuuggcauugaguuu

SEQ ID NO: 683175 - RNA, 19 nt, Artificial Sequence
  Description of Artificial Sequence: Synthetic oligonucleotide
  Antisense strand to SEQ ID NO: 683174
aaacucaaugccaagacua

SEQ ID NO: 683176 - RNA, 19 nt, Artificial Sequence
  Description of Artificial Sequence: Synthetic oligonucleotide
  Sense strand starting at position 2350 of SEQ ID NO: 585985
uggcauugaguuugaggga

SEQ ID NO: 683177 - RNA, 19 nt, Artificial Sequence
  Description of Artificial Sequence: Synthetic oligonucleotide
  Antisense strand to SEQ ID NO: 683176
ucccucaaacucaaugcca

SEQ ID NO: 683178 - RNA, 19 nt, Artificial Sequence
  Description of Artificial Sequence: Synthetic oligonucleotide
  Sense strand starting at position 2385 of SEQ ID NO: 585985
acuaauaagggcugucacu

SEQ ID NO: 683179 - RNA, 19 nt, Artificial Sequence
  Description of Artificial Sequence: Synthetic oligonucleotide
  Antisense strand to SEQ ID NO: 683178
agugacagcccuuauuagu

SEQ ID NO: 683180 - RNA, 19 nt, Artificial Sequence
  Description of Artificial Sequence: Synthetic oligonucleotide
  Sense strand starting at position 2392 of SEQ ID NO: 585985
agggcugucacuugaaacu

SEQ ID NO: 683181 - RNA, 19 nt, Artificial Sequence
  Description of Artificial Sequence: Synthetic oligonucleotide
  Antisense strand to SEQ ID NO: 683180
aguuucaagugacagcccu

SEQ ID NO: 683182 - RNA, 19 nt, Artificial Sequence
  Description of Artificial Sequence: Synthetic oligonucleotide
  Sense strand starting at position 2418 of SEQ ID NO: 585985
guccaagacgcuuguugaa

SEQ ID NO: 683183 - RNA, 19 nt, Artificial Sequence
  Description of Artificial Sequence: Synthetic oligonucleotide
  Antisense strand to SEQ ID NO: 683182
uucaacaagcgucuuggac

SEQ ID NO: 683184 - RNA, 19 nt, Artificial Sequence
  Description of Artificial Sequence: Synthetic oligonucleotide
  Sense strand starting at position 2622 of SEQ ID NO: 585985
gugaaaguguacucaauac

SEQ ID NO: 683185 - RNA, 19 nt, Artificial Sequence
  Description of Artificial Sequence: Synthetic oligonucleotide
  Antisense strand to SEQ ID NO: 683184
guauugaguacacuuucac

SEQ ID NO: 683186 - RNA, 19 nt, Artificial Sequence
  Description of Artificial Sequence: Synthetic oligonucleotide
  Sense strand starting at position 2719 of SEQ ID NO: 585985
uuauguucugaugagugua

SEQ ID NO: 683187 - RNA, 19 nt, Artificial Sequence
  Description of Artificial Sequence: Synthetic oligonucleotide
  Antisense strand to SEQ ID NO: 683186
uacacucaucagaacauaa

SEQ ID NO: 683188 - RNA, 19 nt, Artificial Sequence
  Description of Artificial Sequence: Synthetic oligonucleotide
  Sense strand starting at position 2722 of SEQ ID NO: 585985
uguucugaugaguguaucu

SEQ ID NO: 683189 - RNA, 19 nt, Artificial Sequence
  Description of Artificial Sequence: Synthetic oligonucleotide
  Antisense strand to SEQ ID NO: 683188
agauacacucaucagaaca

SEQ ID NO: 683190 - RNA, 19 nt, Artificial Sequence
  Description of Artificial Sequence: Synthetic oligonucleotide
  Sense strand starting at position 2724 of SEQ ID NO: 585985
uucugaugaguguaucuuu

SEQ ID NO: 683191 - RNA, 19 nt, Artificial Sequence
  Description of Artificial Sequence: Synthetic oligonucleotide
  Antisense strand to SEQ ID NO: 683190
aaagauacacucaucagaa

SEQ ID NO: 683192 - RNA, 19 nt, Artificial Sequence
  Description of Artificial Sequence: Synthetic oligonucleotide
  Sense strand starting at position 2792 of SEQ ID NO: 585985
aggugacucuuggaggaag

SEQ ID NO: 683193 - RNA, 19 nt, Artificial Sequence
  Description of Artificial Sequence: Synthetic oligonucleotide
  Antisense strand to SEQ ID NO: 683192
cuuccuccaagagucaccu

SEQ ID NO: 683194 - RNA, 19 nt, Artificial Sequence
  Description of Artificial Sequence: Synthetic oligonucleotide
  Sense strand starting at position 2793 of SEQ ID NO: 585985
ggugacucuuggaggaaga

SEQ ID NO: 683195 - RNA, 19 nt, Artificial Sequence
  Description of Artificial Sequence: Synthetic oligonucleotide
  Antisense strand to SEQ ID NO: 683194
ucuuccuccaagagucacc

SEQ ID NO: 683196 - RNA, 19 nt, Artificial Sequence
  Description of Artificial Sequence: Synthetic oligonucleotide
  Sense strand starting at position 2826 of SEQ ID NO: 585985
gcagaagaaccaugugauu

SEQ ID NO: 683197 - RNA, 19 nt, Artificial Sequence
  Description of Artificial Sequence: Synthetic oligonucleotide
  Antisense strand to SEQ ID NO: 683196
aaucacaugguucuucugc

SEQ ID NO: 683198 - RNA, 19 nt, Artificial Sequence
  Description of Artificial Sequence: Synthetic oligonucleotide
  Sense strand starting at position 2829 of SEQ ID NO: 585985
gaagaaccaugugauuaga

SEQ ID NO: 683199 - RNA, 19 nt, Artificial Sequence
  Description of Artificial Sequence: Synthetic oligonucleotide
  Antisense strand to SEQ ID NO: 683198
ucuaaucacaugguucuuc

SEQ ID NO: 683200 - RNA, 19 nt, Artificial Sequence
  Description of Artificial Sequence: Synthetic oligonucleotide
  Sense strand starting at position 2850 of SEQ ID NO: 585985
gugggaucuuucuuucuuu

SEQ ID NO: 683201 - RNA, 19 nt, Artificial Sequence
  Description of Artificial Sequence: Synthetic oligonucleotide
  Antisense strand to SEQ ID NO: 683200
aaagaaagaaagaucccac

SEQ ID NO: 683202 - RNA, 19 nt, Artificial Sequence
  Description of Artificial Sequence: Synthetic oligonucleotide
  Sense strand starting at position 3233 of SEQ ID NO: 585985
cugaguuaaucaccaacag

SEQ ID NO: 683203 - RNA, 19 nt, Artificial Sequence
  Description of Artificial Sequence: Synthetic oligonucleotide
  Antisense strand to SEQ ID NO: 683202
cuguuggugauuaacucag

SEQ ID NO: 683204 - RNA, 19 nt, Artificial Sequence
  Description of Artificial Sequence: Synthetic oligonucleotide
  Sense strand starting at position 3305 of SEQ ID NO: 585985
caaagagguuuggagagau

SEQ ID NO: 683205 - RNA, 19 nt, Artificial Sequence
  Description of Artificial Sequence: Synthetic oligonucleotide
  Antisense strand to SEQ ID NO: 683204
aucucuccaaaccucuuug

SEQ ID NO: 683206 - RNA, 19 nt, Artificial Sequence
  Description of Artificial Sequence: Synthetic oligonucleotide
  Sense strand starting at position 3435 of SEQ ID NO: 585985
gugaaauuaccaugauccu

SEQ ID NO: 683207 - RNA, 19 nt, Artificial Sequence
  Description of Artificial Sequence: Synthetic oligonucleotide
  Antisense strand to SEQ ID NO: 683206
aggaucaugguaauuucac

SEQ ID NO: 683208 - RNA, 19 nt, Artificial Sequence
  Description of Artificial Sequence: Synthetic oligonucleotide
  Sense strand starting at position 3442 of SEQ ID NO: 585985
uaccaugauccuggugauu

SEQ ID NO: 683209 - RNA, 19 nt, Artificial Sequence
  Description of Artificial Sequence: Synthetic oligonucleotide
  Antisense strand to SEQ ID NO: 683208
aaucaccaggaucauggua

SEQ ID NO: 683210 - RNA, 19 nt, Artificial Sequence
  Description of Artificial Sequence: Synthetic oligonucleotide
  Sense strand starting at position 3444 of SEQ ID NO: 585985
ccaugauccuggugauuuc

SEQ ID NO: 683211 - RNA, 19 nt, Artificial Sequence
  Description of Artificial Sequence: Synthetic oligonucleotide
  Antisense strand to SEQ ID NO: 683210
gaaaucaccaggaucaugg

SEQ ID NO: 683212 - RNA, 19 nt, Artificial Sequence
  Description of Artificial Sequence: Synthetic oligonucleotide
  Sense strand starting at position 3641 of SEQ ID NO: 585985
uaaggcauuuccgacaaug

SEQ ID NO: 683213 - RNA, 19 nt, Artificial Sequence
  Description of Artificial Sequence: Synthetic oligonucleotide
  Antisense strand to SEQ ID NO: 683212
cauugucggaaaugccuua

SEQ ID NO: 683214 - RNA, 19 nt, Artificial Sequence
  Description of Artificial Sequence: Synthetic oligonucleotide
  Sense strand starting at position 3708 of SEQ ID NO: 585985
gucguaucucaugaaauag

SEQ ID NO: 683215 - RNA, 19 nt, Artificial Sequence
  Description of Artificial Sequence: Synthetic oligonucleotide
  Antisense strand to SEQ ID NO: 683214
cuauuucaugagauacgac

SEQ ID NO: 683216 - RNA, 19 nt, Artificial Sequence
  Description of Artificial Sequence: Synthetic oligonucleotide
  Sense strand starting at position 3770 of SEQ ID NO: 585985
gccacagugguguaaacau

SEQ ID NO: 683217 - RNA, 19 nt, Artificial Sequence
  Description of Artificial Sequence: Synthetic oligonucleotide
  Antisense strand to SEQ ID NO: 683216
auguuuacaccacuguggc

SEQ ID NO: 683218 - RNA, 19 nt, Artificial Sequence
  Description of Artificial Sequence: Synthetic oligonucleotide
  Sense strand starting at position 3795 of SEQ ID NO: 585985
gggauucagaucugggugu

SEQ ID NO: 683219 - RNA, 19 nt, Artificial Sequence
  Description of Artificial Sequence: Synthetic oligonucleotide
  Antisense strand to SEQ ID NO: 683218
acacccagaucugaauccc

SEQ ID NO: 683220 - RNA, 19 nt, Artificial Sequence
  Description of Artificial Sequence: Synthetic oligonucleotide
  Sense strand starting at position 75 of SEQ ID NO: 585986
auacaaauaucugcacgaa

SEQ ID NO: 683221 - RNA, 19 nt, Artificial Sequence
  Description of Artificial Sequence: Synthetic oligonucleotide
  Antisense strand to SEQ ID NO: 683220
uucgugcagauauuuguau

SEQ ID NO: 683222 - RNA, 19 nt, Artificial Sequence
  Description of Artificial Sequence: Synthetic oligonucleotide
  Sense strand starting at position 107 of SEQ ID NO: 585986
gaguauugugaggauucua

SEQ ID NO: 683223 - RNA, 19 nt, Artificial Sequence
  Description of Artificial Sequence: Synthetic oligonucleotide
  Antisense strand to SEQ ID NO: 683222
uagaauccucacaauacuc

SEQ ID NO: 683224 - RNA, 19 nt, Artificial Sequence
  Description of Artificial Sequence: Synthetic oligonucleotide
  Sense strand starting at position 219 of SEQ ID NO: 585986
gaaucaaggcaguaugcaa

SEQ ID NO: 683225 - RNA, 19 nt, Artificial Sequence
  Description of Artificial Sequence: Synthetic oligonucleotide
  Antisense strand to SEQ ID NO: 683224
uugcauacugccuugauuc

SEQ ID NO: 683226 - RNA, 19 nt, Artificial Sequence
  Description of Artificial Sequence: Synthetic oligonucleotide
  Sense strand starting at position 246 of SEQ ID NO: 585986
gcauauaugguauauuaug

SEQ ID NO: 683227 - RNA, 19 nt, Artificial Sequence
  Description of Artificial Sequence: Synthetic oligonucleotide
  Antisense strand to SEQ ID NO: 683226
cauaauauaccauauaugc

SEQ ID NO: 683228 - RNA, 19 nt, Artificial Sequence
  Description of Artificial Sequence: Synthetic oligonucleotide
  Sense strand starting at position 257 of SEQ ID NO: 585986
auauuaugacauuggcauu

SEQ ID NO: 683229 - RNA, 19 nt, Artificial Sequence
  Description of Artificial Sequence: Synthetic oligonucleotide
  Antisense strand to SEQ ID NO: 683228
aaugccaaugucauaauau

SEQ ID NO: 683230 - RNA, 19 nt, Artificial Sequence
  Description of Artificial Sequence: Synthetic oligonucleotide
  Sense strand starting at position 286 of SEQ ID NO: 585986
gggaaacuauaugaaucau

SEQ ID NO: 683231 - RNA, 19 nt, Artificial Sequence
  Description of Artificial Sequence: Synthetic oligonucleotide
  Antisense strand to SEQ ID NO: 683230
augauucauauaguuuccc

SEQ ID NO: 683232 - RNA, 19 nt, Artificial Sequence
  Description of Artificial Sequence: Synthetic oligonucleotide
  Sense strand starting at position 307 of SEQ ID NO: 585986
aacaaauggugauaggaca

SEQ ID NO: 683233 - RNA, 19 nt, Artificial Sequence
  Description of Artificial Sequence: Synthetic oligonucleotide
  Antisense strand to SEQ ID NO: 683232
uguccuaucaccauuuguu

SEQ ID NO: 683234 - RNA, 19 nt, Artificial Sequence
  Description of Artificial Sequence: Synthetic oligonucleotide
  Sense strand starting at position 434 of SEQ ID NO: 585986
uuagaacguucuguguaau

SEQ ID NO: 683235 - RNA, 19 nt, Artificial Sequence
  Description of Artificial Sequence: Synthetic oligonucleotide
  Antisense strand to SEQ ID NO: 683234
auuacacagaacguucuaa

SEQ ID NO: 683236 - RNA, 19 nt, Artificial Sequence
  Description of Artificial Sequence: Synthetic oligonucleotide
  Sense strand starting at position 435 of SEQ ID NO: 585986
uagaacguucuguguaauc

SEQ ID NO: 683237 - RNA, 19 nt, Artificial Sequence
  Description of Artificial Sequence: Synthetic oligonucleotide
  Antisense strand to SEQ ID NO: 683236
gauuacacagaacguucua

SEQ ID NO: 683238 - RNA, 19 nt, Artificial Sequence
  Description of Artificial Sequence: Synthetic oligonucleotide
  Sense strand starting at position 437 of SEQ ID NO: 585986
gaacguucuguguaaucuu

SEQ ID NO: 683239 - RNA, 19 nt, Artificial Sequence
  Description of Artificial Sequence: Synthetic oligonucleotide
  Antisense strand to SEQ ID NO: 683238
aagauuacacagaacguuc

SEQ ID NO: 683240 - RNA, 19 nt, Artificial Sequence
  Description of Artificial Sequence: Synthetic oligonucleotide
  Sense strand starting at position 627 of SEQ ID NO: 585986
gagagaauccuuugagggu

SEQ ID NO: 683241 - RNA, 19 nt, Artificial Sequence
  Description of Artificial Sequence: Synthetic oligonucleotide
  Antisense strand to SEQ ID NO: 683240
acccucaaaggauucucuc

SEQ ID NO: 683242 - RNA, 19 nt, Artificial Sequence
  Description of Artificial Sequence: Synthetic oligonucleotide
  Sense strand starting at position 722 of SEQ ID NO: 585986
aaugguuaccucugaggac

SEQ ID NO: 683243 - RNA, 19 nt, Artificial Sequence
  Description of Artificial Sequence: Synthetic oligonucleotide
  Antisense strand to SEQ ID NO: 683242
guccucagagguaaccauu

SEQ ID NO: 683244 - RNA, 19 nt, Artificial Sequence
  Description of Artificial Sequence: Synthetic oligonucleotide
  Sense strand starting at position 967 of SEQ ID NO: 585986
gcaggauaauuacuagugu

SEQ ID NO: 683245 - RNA, 19 nt, Artificial Sequence
  Description of Artificial Sequence: Synthetic oligonucleotide
  Antisense strand to SEQ ID NO: 683244
acacuaguaauuauccugc

SEQ ID NO: 683246 - RNA, 19 nt, Artificial Sequence
  Description of Artificial Sequence: Synthetic oligonucleotide
  Sense strand starting at position 1067 of SEQ ID NO: 585986
uugcauuaguuaguccaau

SEQ ID NO: 683247 - RNA, 19 nt, Artificial Sequence
  Description of Artificial Sequence: Synthetic oligonucleotide
  Antisense strand to SEQ ID NO: 683246
auuggacuaacuaaugcaa

SEQ ID NO: 683248 - RNA, 19 nt, Artificial Sequence
  Description of Artificial Sequence: Synthetic oligonucleotide
  Sense strand starting at position 1068 of SEQ ID NO: 585986
ugcauuaguuaguccaauu

SEQ ID NO: 683249 - RNA, 19 nt, Artificial Sequence
  Description of Artificial Sequence: Synthetic oligonucleotide
  Antisense strand to SEQ ID NO: 683248
aauuggacuaacuaaugca

SEQ ID NO: 683250 - RNA, 19 nt, Artificial Sequence
  Description of Artificial Sequence: Synthetic oligonucleotide
  Sense strand starting at position 1244 of SEQ ID NO: 585986
agagauguccauuguugag

SEQ ID NO: 683251 - RNA, 19 nt, Artificial Sequence
  Description of Artificial Sequence: Synthetic oligonucleotide
  Antisense strand to SEQ ID NO: 683250
cucaacaauggacaucucu

SEQ ID NO: 683252 - RNA, 19 nt, Artificial Sequence
  Description of Artificial Sequence: Synthetic oligonucleotide
  Sense strand starting at position 2095 of SEQ ID NO: 585986
ugucauugucauggccaaa

SEQ ID NO: 683253 - RNA, 19 nt, Artificial Sequence
  Description of Artificial Sequence: Synthetic oligonucleotide
  Antisense strand to SEQ ID NO: 683252
uuuggccaugacaaugaca

SEQ ID NO: 683254 - RNA, 19 nt, Artificial Sequence
  Description of Artificial Sequence: Synthetic oligonucleotide
  Sense strand starting at position 2169 of SEQ ID NO: 585986
gagaguuuggcaggaguuu

SEQ ID NO: 683255 - RNA, 19 nt, Artificial Sequence
  Description of Artificial Sequence: Synthetic oligonucleotide
  Antisense strand to SEQ ID NO: 683254
aaacuccugccaaacucuc

SEQ ID NO: 683256 - RNA, 19 nt, Artificial Sequence
  Description of Artificial Sequence: Synthetic oligonucleotide
  Sense strand starting at position 2361 of SEQ ID NO: 585986
uagagacuuguauaauguu

SEQ ID NO: 683257 - RNA, 19 nt, Artificial Sequence
  Description of Artificial Sequence: Synthetic oligonucleotide
  Antisense strand to SEQ ID NO: 683256
aacauuauacaagucucua

SEQ ID NO: 683258 - RNA, 19 nt, Artificial Sequence
  Description of Artificial Sequence: Synthetic oligonucleotide
  Sense strand starting at position 2675 of SEQ ID NO: 585986
gguggaaagacucaugcuu

SEQ ID NO: 683259 - RNA, 19 nt, Artificial Sequence
  Description of Artificial Sequence: Synthetic oligonucleotide
  Antisense strand to SEQ ID NO: 683258
aagcaugagucuuuccacc

SEQ ID NO: 683260 - RNA, 19 nt, Artificial Sequence
  Description of Artificial Sequence: Synthetic oligonucleotide
  Sense strand starting at position 2803 of SEQ ID NO: 585986
gccuuugacgucgauauga

SEQ ID NO: 683261 - RNA, 19 nt, Artificial Sequence
  Description of Artificial Sequence: Synthetic oligonucleotide
  Antisense strand to SEQ ID NO: 683260
ucauaucgacgucaaaggc

SEQ ID NO: 683262 - RNA, 19 nt, Artificial Sequence
  Description of Artificial Sequence: Synthetic oligonucleotide
  Sense strand starting at position 2805 of SEQ ID NO: 585986
cuuugacgucgauaugaca

SEQ ID NO: 683263 - RNA, 19 nt, Artificial Sequence
  Description of Artificial Sequence: Synthetic oligonucleotide
  Antisense strand to SEQ ID NO: 683262
ugucauaucgacgucaaag

SEQ ID NO: 683264 - RNA, 19 nt, Artificial Sequence
  Description of Artificial Sequence: Synthetic oligonucleotide
  Sense strand starting at position 2812 of SEQ ID NO: 585986
gucgauaugacaggaaaug

SEQ ID NO: 683265 - RNA, 19 nt, Artificial Sequence
  Description of Artificial Sequence: Synthetic oligonucleotide
  Antisense strand to SEQ ID NO: 683264
cauuuccugucauaucgac

SEQ ID NO: 683266 - RNA, 19 nt, Artificial Sequence
  Description of Artificial Sequence: Synthetic oligonucleotide
  Sense strand starting at position 2965 of SEQ ID NO: 585986
aggcuagucuuggcauuga

SEQ ID NO: 683267 - RNA, 19 nt, Artificial Sequence
  Description of Artificial Sequence: Synthetic oligonucleotide
  Antisense strand to SEQ ID NO: 683266
ucaaugccaagacuagccu

SEQ ID NO: 683268 - RNA, 19 nt, Artificial Sequence
  Description of Artificial Sequence: Synthetic oligonucleotide
  Sense strand starting at position 2969 of SEQ ID NO: 585986
uagucuuggcauugaguuu

SEQ ID NO: 683269 - RNA, 19 nt, Artificial Sequence
  Description of Artificial Sequence: Synthetic oligonucleotide
  Antisense strand to SEQ ID NO: 683268
aaacucaaugccaagacua

SEQ ID NO: 683270 - RNA, 19 nt, Artificial Sequence
  Description of Artificial Sequence: Synthetic oligonucleotide
  Sense strand starting at position 2975 of SEQ ID NO: 585986
uggcauugaguuugaggga

SEQ ID NO: 683271 - RNA, 19 nt, Artificial Sequence
  Description of Artificial Sequence: Synthetic oligonucleotide
  Antisense strand to SEQ ID NO: 683270
ucccucaaacucaaugcca

SEQ ID NO: 683272 - RNA, 19 nt, Artificial Sequence
  Description of Artificial Sequence: Synthetic oligonucleotide
  Sense strand starting at position 3010 of SEQ ID NO: 585986
acuaauaagggcugucacu

SEQ ID NO: 683273 - RNA, 19 nt, Artificial Sequence
  Description of Artificial Sequence: Synthetic oligonucleotide
  Antisense strand to SEQ ID NO: 683272
agugacagcccuuauuagu

SEQ ID NO: 683274 - RNA, 19 nt, Artificial Sequence
  Description of Artificial Sequence: Synthetic oligonucleotide
  Sense strand starting at position 3017 of SEQ ID NO: 585986
agggcugucacuugaaacu

SEQ ID NO: 683275 - RNA, 19 nt, Artificial Sequence
  Description of Artificial Sequence: Synthetic oligonucleotide
  Antisense strand to SEQ ID NO: 683274
aguuucaagugacagcccu

SEQ ID NO: 683276 - RNA, 19 nt, Artificial Sequence
  Description of Artificial Sequence: Synthetic oligonucleotide
  Sense strand starting at position 3043 of SEQ ID NO: 585986
guccaagacgcuuguugaa

SEQ ID NO: 683277 - RNA, 19 nt, Artificial Sequence
  Description of Artificial Sequence: Synthetic oligonucleotide
  Antisense strand to SEQ ID NO: 683276
uucaacaagcgucuuggac

SEQ ID NO: 683278 - RNA, 19 nt, Artificial Sequence
  Description of Artificial Sequence: Synthetic oligonucleotide
  Sense strand starting at position 3247 of SEQ ID NO: 585986
gugaaaguguacucaauac

SEQ ID NO: 683279 - RNA, 19 nt, Artificial Sequence
  Description of Artificial Sequence: Synthetic oligonucleotide
  Antisense strand to SEQ ID NO: 683278
guauugaguacacuuucac

SEQ ID NO: 683280 - RNA, 19 nt, Artificial Sequence
  Description of Artificial Sequence: Synthetic oligonucleotide
  Sense strand starting at position 3344 of SEQ ID NO: 585986
uuauguucugaugagugua

SEQ ID NO: 683281 - RNA, 19 nt, Artificial Sequence
  Description of Artificial Sequence: Synthetic oligonucleotide
  Antisense strand to SEQ ID NO: 683280
uacacucaucagaacauaa

SEQ ID NO: 683282 - RNA, 19 nt, Artificial Sequence
  Description of Artificial Sequence: Synthetic oligonucleotide
  Sense strand starting at position 3347 of SEQ ID NO: 585986
uguucugaugaguguaucu

SEQ ID NO: 683283 - RNA, 19 nt, Artificial Sequence
  Description of Artificial Sequence: Synthetic oligonucleotide
  Antisense strand to SEQ ID NO: 683282
agauacacucaucagaaca

SEQ ID NO: 683284 - RNA, 19 nt, Artificial Sequence
  Description of Artificial Sequence: Synthetic oligonucleotide
  Sense strand starting at position 3349 of SEQ ID NO: 585986
uucugaugaguguaucuuu

SEQ ID NO: 683285 - RNA, 19 nt, Artificial Sequence
  Description of Artificial Sequence: Synthetic oligonucleotide
  Antisense strand to SEQ ID NO: 683284
aaagauacacucaucagaa

SEQ ID NO: 683286 - RNA, 19 nt, Artificial Sequence
  Description of Artificial Sequence: Synthetic oligonucleotide
  Sense strand starting at position 3417 of SEQ ID NO: 585986
aggugacucuuggaggaag

SEQ ID NO: 683287 - RNA, 19 nt, Artificial Sequence
  Description of Artificial Sequence: Synthetic oligonucleotide
  Antisense strand to SEQ ID NO: 683286
cuuccuccaagagucaccu

SEQ ID NO: 683288 - RNA, 19 nt, Artificial Sequence
  Description of Artificial Sequence: Synthetic oligonucleotide
  Sense strand starting at position 3418 of SEQ ID NO: 585986
ggugacucuuggaggaaga

SEQ ID NO: 683289 - RNA, 19 nt, Artificial Sequence
  Description of Artificial Sequence: Synthetic oligonucleotide
  Antisense strand to SEQ ID NO: 683288
ucuuccuccaagagucacc

SEQ ID NO: 683290 - RNA, 19 nt, Artificial Sequence
  Description of Artificial Sequence: Synthetic oligonucleotide
  Sense strand starting at position 3451 of SEQ ID NO: 585986
gcagaagaaccaugugauu

SEQ ID NO: 683291 - RNA, 19 nt, Artificial Sequence
  Description of Artificial Sequence: Synthetic oligonucleotide
  Antisense strand to SEQ ID NO: 683290
aaucacaugguucuucugc

SEQ ID NO: 683292 - RNA, 19 nt, Artificial Sequence
  Description of Artificial Sequence: Synthetic oligonucleotide
  Sense strand starting at position 3454 of SEQ ID NO: 585986
gaagaaccaugugauuaga

SEQ ID NO: 683293 - RNA, 19 nt, Artificial Sequence
  Description of Artificial Sequence: Synthetic oligonucleotide
  Antisense strand to SEQ ID NO: 683292
ucuaaucacaugguucuuc

SEQ ID NO: 683294 - RNA, 19 nt, Artificial Sequence
  Description of Artificial Sequence: Synthetic oligonucleotide
  Sense strand starting at position 3475 of SEQ ID NO: 585986
gugggaucuuucuuucuuu

SEQ ID NO: 683295 - RNA, 19 nt, Artificial Sequence
  Description of Artificial Sequence: Synthetic oligonucleotide
  Antisense strand to SEQ ID NO: 683294
aaagaaagaaagaucccac

SEQ ID NO: 683296 - RNA, 19 nt, Artificial Sequence
  Description of Artificial Sequence: Synthetic oligonucleotide
  Sense strand starting at position 3858 of SEQ ID NO: 585986
cugaguuaaucaccaacag

SEQ ID NO: 683297 - RNA, 19 nt, Artificial Sequence
  Description of Artificial Sequence: Synthetic oligonucleotide
  Antisense strand to SEQ ID NO: 683296
cuguuggugauuaacucag

SEQ ID NO: 683298 - RNA, 19 nt, Artificial Sequence
  Description of Artificial Sequence: Synthetic oligonucleotide
  Sense strand starting at position 3930 of SEQ ID NO: 585986
caaagagguuuggagagau

SEQ ID NO: 683299 - RNA, 19 nt, Artificial Sequence
  Description of Artificial Sequence: Synthetic oligonucleotide
  Antisense strand to SEQ ID NO: 683298
aucucuccaaaccucuuug

SEQ ID NO: 683300 - RNA, 19 nt, Artificial Sequence
  Description of Artificial Sequence: Synthetic oligonucleotide
  Sense strand starting at position 122 of SEQ ID NO: 585987
cucacuuuccagugauuac

SEQ ID NO: 683301 - RNA, 19 nt, Artificial Sequence
  Description of Artificial Sequence: Synthetic oligonucleotide
  Antisense strand to SEQ ID NO: 683300
guaaucacuggaaagugag

SEQ ID NO: 683302 - RNA, 19 nt, Artificial Sequence
  Description of Artificial Sequence: Synthetic oligonucleotide
  Sense strand starting at position 177 of SEQ ID NO: 585987
acauauucgcuuuagcaaa

SEQ ID NO: 683303 - RNA, 19 nt, Artificial Sequence
  Description of Artificial Sequence: Synthetic oligonucleotide
  Antisense strand to SEQ ID NO: 683302
uuugcuaaagcgaauaugu

SEQ ID NO: 683304 - RNA, 19 nt, Artificial Sequence
  Description of Artificial Sequence: Synthetic oligonucleotide
  Sense strand starting at position 561 of SEQ ID NO: 585987
ucaucucagguugauguua

SEQ ID NO: 683305 - RNA, 19 nt, Artificial Sequence
  Description of Artificial Sequence: Synthetic oligonucleotide
  Antisense strand to SEQ ID NO: 683304
uaacaucaaccugagauga

SEQ ID NO: 683306 - RNA, 19 nt, Artificial Sequence
  Description of Artificial Sequence: Synthetic oligonucleotide
  Sense strand starting at position 625 of SEQ ID NO: 585987
cugccuauguucucuauuu

SEQ ID NO: 683307 - RNA, 19 nt, Artificial Sequence
  Description of Artificial Sequence: Synthetic oligonucleotide
  Antisense strand to SEQ ID NO: 683306
aaauagagaacauaggcag

SEQ ID NO: 683308 - RNA, 19 nt, Artificial Sequence
  Description of Artificial Sequence: Synthetic oligonucleotide
  Sense strand starting at position 677 of SEQ ID NO: 585987
ggagucauaccugacuggu

SEQ ID NO: 683309 - RNA, 19 nt, Artificial Sequence
  Description of Artificial Sequence: Synthetic oligonucleotide
  Antisense strand to SEQ ID NO: 683308
accagucagguaugacucc

SEQ ID NO: 683310 - RNA, 19 nt, Artificial Sequence
  Description of Artificial Sequence: Synthetic oligonucleotide
  Sense strand starting at position 731 of SEQ ID NO: 585987
augacuguauggccuaaau

SEQ ID NO: 683311 - RNA, 19 nt, Artificial Sequence
  Description of Artificial Sequence: Synthetic oligonucleotide
  Antisense strand to SEQ ID NO: 683310
auuuaggccauacagucau

SEQ ID NO: 683312 - RNA, 19 nt, Artificial Sequence
  Description of Artificial Sequence: Synthetic oligonucleotide
  Sense strand starting at position 733 of SEQ ID NO: 585987
gacuguauggccuaaauau

SEQ ID NO: 683313 - RNA, 19 nt, Artificial Sequence
  Description of Artificial Sequence: Synthetic oligonucleotide
  Antisense strand to SEQ ID NO: 683312
auauuuaggccauacaguc

SEQ ID NO: 683314 - RNA, 19 nt, Artificial Sequence
  Description of Artificial Sequence: Synthetic oligonucleotide
  Sense strand starting at position 866 of SEQ ID NO: 585987
auccauccuccauaguguu

SEQ ID NO: 683315 - RNA, 19 nt, Artificial Sequence
  Description of Artificial Sequence: Synthetic oligonucleotide
  Antisense strand to SEQ ID NO: 683314
aacacuauggaggauggau

SEQ ID NO: 683316 - RNA, 19 nt, Artificial Sequence
  Description of Artificial Sequence: Synthetic oligonucleotide
  Sense strand starting at position 1117 of SEQ ID NO: 585987
agugucaucuccucuggaa

SEQ ID NO: 683317 - RNA, 19 nt, Artificial Sequence
  Description of Artificial Sequence: Synthetic oligonucleotide
  Antisense strand to SEQ ID NO: 683316
uuccagaggagaugacacu

SEQ ID NO: 683318 - RNA, 19 nt, Artificial Sequence
  Description of Artificial Sequence: Synthetic oligonucleotide
  Sense strand starting at position 1197 of SEQ ID NO: 585987
cucauauuuccaugugcau

SEQ ID NO: 683319 - RNA, 19 nt, Artificial Sequence
  Description of Artificial Sequence: Synthetic oligonucleotide
  Antisense strand to SEQ ID NO: 683318
augcacauggaaauaugag

SEQ ID NO: 683320 - RNA, 19 nt, Artificial Sequence
  Description of Artificial Sequence: Synthetic oligonucleotide
  Sense strand starting at position 1301 of SEQ ID NO: 585987
ggcagagauugcuuacauc

SEQ ID NO: 683321 - RNA, 19 nt, Artificial Sequence
  Description of Artificial Sequence: Synthetic oligonucleotide
  Antisense strand to SEQ ID NO: 683320
gauguaagcaaucucugcc

SEQ ID NO: 683322 - RNA, 19 nt, Artificial Sequence
  Description of Artificial Sequence: Synthetic oligonucleotide
  Sense strand starting at position 1480 of SEQ ID NO: 585987
gagcauuuguuagcugucu

SEQ ID NO: 683323 - RNA, 19 nt, Artificial Sequence
  Description of Artificial Sequence: Synthetic oligonucleotide
  Antisense strand to SEQ ID NO: 683322
agacagcuaacaaaugcuc

SEQ ID NO: 683324 - RNA, 19 nt, Artificial Sequence
  Description of Artificial Sequence: Synthetic oligonucleotide
  Sense strand starting at position 1527 of SEQ ID NO: 585987
gagugagaugaccggucau

SEQ ID NO: 683325 - RNA, 19 nt, Artificial Sequence
  Description of Artificial Sequence: Synthetic oligonucleotide
  Antisense strand to SEQ ID NO: 683324
augaccggucaucucacuc

SEQ ID NO: 683326 - RNA, 19 nt, Artificial Sequence
  Description of Artificial Sequence: Synthetic oligonucleotide
  Sense strand starting at position 2269 of SEQ ID NO: 585987
ucaccauuuccuuguaggu

SEQ ID NO: 683327 - RNA, 19 nt, Artificial Sequence
  Description of Artificial Sequence: Synthetic oligonucleotide
  Antisense strand to SEQ ID NO: 683326
accuacaaggaaaugguga

SEQ ID NO: 683328 - RNA, 19 nt, Artificial Sequence
  Description of Artificial Sequence: Synthetic oligonucleotide
  Sense strand starting at position 2407 of SEQ ID NO: 585987
acucuugaggucugauaua

SEQ ID NO: 683329 - RNA, 19 nt, Artificial Sequence
  Description of Artificial Sequence: Synthetic oligonucleotide
  Antisense strand to SEQ ID NO: 683328
uauaucagaccucaagagu

SEQ ID NO: 683330 - RNA, 19 nt, Artificial Sequence
  Description of Artificial Sequence: Synthetic oligonucleotide
  Sense strand starting at position 2483 of SEQ ID NO: 585987
aggcaauaauuauuagguu

SEQ ID NO: 683331 - RNA, 19 nt, Artificial Sequence
  Description of Artificial Sequence: Synthetic oligonucleotide
  Antisense strand to SEQ ID NO: 683330
aaccuaauaauuauugccu

SEQ ID NO: 683332 - RNA, 19 nt, Artificial Sequence
  Description of Artificial Sequence: Synthetic oligonucleotide
  Sense strand starting at position 2496 of SEQ ID NO: 585987
uagguuguguuauuuguua

SEQ ID NO: 683333 - RNA, 19 nt, Artificial Sequence
  Description of Artificial Sequence: Synthetic oligonucleotide
  Antisense strand to SEQ ID NO: 683332
uaacaaauaacacaaccua

SEQ ID NO: 683334 - RNA, 19 nt, Artificial Sequence
  Description of Artificial Sequence: Synthetic oligonucleotide
  Sense strand starting at position 2498 of SEQ ID NO: 585987
gguuguguuauuuguuaga

SEQ ID NO: 683335 - RNA, 19 nt, Artificial Sequence
  Description of Artificial Sequence: Synthetic oligonucleotide
  Antisense strand to SEQ ID NO: 683334
ucuaacaaauaacacaacc

SEQ ID NO: 683336 - RNA, 19 nt, Artificial Sequence
  Description of Artificial Sequence: Synthetic oligonucleotide
  Sense strand starting at position 2500 of SEQ ID NO: 585987
uuguguuauuuguuagacu

SEQ ID NO: 683337 - RNA, 19 nt, Artificial Sequence
  Description of Artificial Sequence: Synthetic oligonucleotide
  Antisense strand to SEQ ID NO: 683336
agucuaacaaauaacacaa

SEQ ID NO: 683338 - RNA, 19 nt, Artificial Sequence
  Description of Artificial Sequence: Synthetic oligonucleotide
  Sense strand starting at position 2583 of SEQ ID NO: 585987
cauagcagauaguuuauga

SEQ ID NO: 683339 - RNA, 19 nt, Artificial Sequence
  Description of Artificial Sequence: Synthetic oligonucleotide
  Antisense strand to SEQ ID NO: 683338
ucauaaacuaucugcuaug

SEQ ID NO: 683340 - RNA, 19 nt, Artificial Sequence
  Description of Artificial Sequence: Synthetic oligonucleotide
  Sense strand starting at position 2845 of SEQ ID NO: 585987
uuugcauuucucuguggua

SEQ ID NO: 683341 - RNA, 19 nt, Artificial Sequence
  Description of Artificial Sequence: Synthetic oligonucleotide
  Antisense strand to SEQ ID NO: 683340
uaccacagagaaaugcaaa

SEQ ID NO: 683342 - RNA, 19 nt, Artificial Sequence
  Description of Artificial Sequence: Synthetic oligonucleotide
  Sense strand starting at position 2846 of SEQ ID NO: 585987
uugcauuucucugugguau

SEQ ID NO: 683343 - RNA, 19 nt, Artificial Sequence
  Description of Artificial Sequence: Synthetic oligonucleotide
  Antisense strand to SEQ ID NO: 683342
auaccacagagaaaugcaa

SEQ ID NO: 683344 - RNA, 19 nt, Artificial Sequence
  Description of Artificial Sequence: Synthetic oligonucleotide
  Sense strand starting at position 2847 of SEQ ID NO: 585987
ugcauuucucugugguauu

SEQ ID NO: 683345 - RNA, 19 nt, Artificial Sequence
  Description of Artificial Sequence: Synthetic oligonucleotide
  Antisense strand to SEQ ID NO: 683344
aauaccacagagaaaugca

SEQ ID NO: 683346 - RNA, 19 nt, Artificial Sequence
  Description of Artificial Sequence: Synthetic oligonucleotide
  Sense strand starting at position 2930 of SEQ ID NO: 585987
augcgcagugguagugauu

SEQ ID NO: 683347 - RNA, 19 nt, Artificial Sequence
  Description of Artificial Sequence: Synthetic oligonucleotide
  Antisense strand to SEQ ID NO: 683346
aaucacuaccacugcgcau

SEQ ID NO: 683348 - RNA, 19 nt, Artificial Sequence
  Description of Artificial Sequence: Synthetic oligonucleotide
  Sense strand starting at position 2931 of SEQ ID NO: 585987
ugcgcagugguagugauua

SEQ ID NO: 683349 - RNA, 19 nt, Artificial Sequence
  Description of Artificial Sequence: Synthetic oligonucleotide
  Antisense strand to SEQ ID NO: 683348
uaaucacuaccacugcgca

SEQ ID NO: 683350 - RNA, 19 nt, Artificial Sequence
  Description of Artificial Sequence: Synthetic oligonucleotide
  Sense strand starting at position 2936 of SEQ ID NO: 585987
agugguagugauuaagaac

SEQ ID NO: 683351 - RNA, 19 nt, Artificial Sequence
  Description of Artificial Sequence: Synthetic oligonucleotide
  Antisense strand to SEQ ID NO: 683350
guucuuaaucacuaccacu

SEQ ID NO: 683352 - RNA, 19 nt, Artificial Sequence
  Description of Artificial Sequence: Synthetic oligonucleotide
  Sense strand starting at position 3069 of SEQ ID NO: 585987
ccugcaaaggauuguuaca

SEQ ID NO: 683353 - RNA, 19 nt, Artificial Sequence
  Description of Artificial Sequence: Synthetic oligonucleotide
  Antisense strand to SEQ ID NO: 683352
uguaacaauccuuugcagg

SEQ ID NO: 683354 - RNA, 19 nt, Artificial Sequence
  Description of Artificial Sequence: Synthetic oligonucleotide
  Sense strand starting at position 3222 of SEQ ID NO: 585987
uuaggaauaugucucaagu

SEQ ID NO: 683355 - RNA, 19 nt, Artificial Sequence
  Description of Artificial Sequence: Synthetic oligonucleotide
  Antisense strand to SEQ ID NO: 683354
acuugagacauauuccuaa

SEQ ID NO: 683356 - RNA, 19 nt, Artificial Sequence
  Description of Artificial Sequence: Synthetic oligonucleotide
  Sense strand starting at position 3333 of SEQ ID NO: 585987
uguuuacuauuugagaaga

SEQ ID NO: 683357 - RNA, 19 nt, Artificial Sequence
  Description of Artificial Sequence: Synthetic oligonucleotide
  Antisense strand to SEQ ID NO: 683356
ucuucucaaauaguaaaca

SEQ ID NO: 683358 - RNA, 19 nt, Artificial Sequence
  Description of Artificial Sequence: Synthetic oligonucleotide
  Sense strand starting at position 3335 of SEQ ID NO: 585987
uuuacuauuugagaagaga

SEQ ID NO: 683359 - RNA, 19 nt, Artificial Sequence
  Description of Artificial Sequence: Synthetic oligonucleotide
  Antisense strand to SEQ ID NO: 683358
ucucuucucaaauaguaaa

SEQ ID NO: 683360 - RNA, 19 nt, Artificial Sequence
  Description of Artificial Sequence: Synthetic oligonucleotide
  Sense strand starting at position 3390 of SEQ ID NO: 585987
ggaaaugaugugcaguacu

SEQ ID NO: 683361 - RNA, 19 nt, Artificial Sequence
  Description of Artificial Sequence: Synthetic oligonucleotide
  Antisense strand to SEQ ID NO: 683360
aguacugcacaucauuucc

SEQ ID NO: 683362 - RNA, 19 nt, Artificial Sequence
  Description of Artificial Sequence: Synthetic oligonucleotide
  Sense strand starting at position 3682 of SEQ ID NO: 585987
gaaucuaaauuguuggaua

SEQ ID NO: 683363 - RNA, 19 nt, Artificial Sequence
  Description of Artificial Sequence: Synthetic oligonucleotide
  Antisense strand to SEQ ID NO: 683362
uauccaacaauuuagauuc

SEQ ID NO: 683364 - RNA, 19 nt, Artificial Sequence
  Description of Artificial Sequence: Synthetic oligonucleotide
  Sense strand starting at position 3696 of SEQ ID NO: 585987
ggauaccuggucuggagaa

SEQ ID NO: 683365 - RNA, 19 nt, Artificial Sequence
  Description of Artificial Sequence: Synthetic oligonucleotide
  Antisense strand to SEQ ID NO: 683364
uucuccagaccagguaucc

SEQ ID NO: 683366 - RNA, 19 nt, Artificial Sequence
  Description of Artificial Sequence: Synthetic oligonucleotide
  Sense strand starting at position 3698 of SEQ ID NO: 585987
auaccuggucuggagaagu

SEQ ID NO: 683367 - RNA, 19 nt, Artificial Sequence
  Description of Artificial Sequence: Synthetic oligonucleotide
  Antisense strand to SEQ ID NO: 683366
acuucuccagaccagguau

SEQ ID NO: 683368 - RNA, 19 nt, Artificial Sequence
  Description of Artificial Sequence: Synthetic oligonucleotide
  Sense strand starting at position 3717 of SEQ ID NO: 585987
agagauuaaccuugcacag

SEQ ID NO: 683369 - RNA, 19 nt, Artificial Sequence
  Description of Artificial Sequence: Synthetic oligonucleotide
  Antisense strand to SEQ ID NO: 683368
cugugcaagguuaaucucu

SEQ ID NO: 683370 - RNA, 19 nt, Artificial Sequence
  Description of Artificial Sequence: Synthetic oligonucleotide
  Sense strand starting at position 3751 of SEQ ID NO: 585987
guggaacuacugugacauc

SEQ ID NO: 683371 - RNA, 19 nt, Artificial Sequence
  Description of Artificial Sequence: Synthetic oligonucleotide
  Antisense strand to SEQ ID NO: 683370
gaugucacaguaguuccac

SEQ ID NO: 683372 - RNA, 19 nt, Artificial Sequence
  Description of Artificial Sequence: Synthetic oligonucleotide
  Sense strand starting at position 3760 of SEQ ID NO: 585987
cugugacaucagugaaacu

SEQ ID NO: 683373 - RNA, 19 nt, Artificial Sequence
  Description of Artificial Sequence: Synthetic oligonucleotide
  Antisense strand to SEQ ID NO: 683372
aguuucacugaugucacag

SEQ ID NO: 683374 - RNA, 19 nt, Artificial Sequence
  Description of Artificial Sequence: Synthetic oligonucleotide
  Sense strand starting at position 3812 of SEQ ID NO: 585987
aguucuugagcuuacaaga

SEQ ID NO: 683375 - RNA, 19 nt, Artificial Sequence
  Description of Artificial Sequence: Synthetic oligonucleotide
  Antisense strand to SEQ ID NO: 683374
ucuuguaagcucaagaacu

SEQ ID NO: 683376 - RNA, 19 nt, Artificial Sequence
  Description of Artificial Sequence: Synthetic oligonucleotide
  Sense strand starting at position 3820 of SEQ ID NO: 585987
agcuuacaagagugguuaa

SEQ ID NO: 683377 - RNA, 19 nt, Artificial Sequence
  Description of Artificial Sequence: Synthetic oligonucleotide
  Antisense strand to SEQ ID NO: 683376
uuaaccacucuuguaagcu

SEQ ID NO: 683378 - RNA, 19 nt, Artificial Sequence
  Description of Artificial Sequence: Synthetic oligonucleotide
  Sense strand starting at position 3823 of SEQ ID NO: 585987
uuacaagagugguuaagaa

SEQ ID NO: 683379 - RNA, 19 nt, Artificial Sequence
  Description of Artificial Sequence: Synthetic oligonucleotide
  Antisense strand to SEQ ID NO: 683378
uucuuaaccacucuuguaa

SEQ ID NO: 683380 - RNA, 19 nt, Artificial Sequence
  Description of Artificial Sequence: Synthetic oligonucleotide
  Sense strand starting at position 80 of SEQ ID NO: 585988
cacagagguccagaagcuu

SEQ ID NO: 683381 - RNA, 19 nt, Artificial Sequence
  Description of Artificial Sequence: Synthetic oligonucleotide
  Antisense strand to SEQ ID NO: 683380
aagcuucuggaccucugug

SEQ ID NO: 683382 - RNA, 19 nt, Artificial Sequence
  Description of Artificial Sequence: Synthetic oligonucleotide
  Sense strand starting at position 112 of SEQ ID NO: 585988
ccgcccuagucaucauauu

SEQ ID NO: 683383 - RNA, 19 nt, Artificial Sequence
  Description of Artificial Sequence: Synthetic oligonucleotide
  Antisense strand to SEQ ID NO: 683382
aauaugaugacuagggcgg

SEQ ID NO: 683384 - RNA, 19 nt, Artificial Sequence
  Description of Artificial Sequence: Synthetic oligonucleotide
  Sense strand starting at position 113 of SEQ ID NO: 585988
cgcccuagucaucauauua

SEQ ID NO: 683385 - RNA, 19 nt, Artificial Sequence
  Description of Artificial Sequence: Synthetic oligonucleotide
  Antisense strand to SEQ ID NO: 683384
uaauaugaugacuagggcg

SEQ ID NO: 683386 - RNA, 19 nt, Artificial Sequence
  Description of Artificial Sequence: Synthetic oligonucleotide
  Sense strand starting at position 709 of SEQ ID NO: 585988
acucaauugcucugcugaa

SEQ ID NO: 683387 - RNA, 19 nt, Artificial Sequence
  Description of Artificial Sequence: Synthetic oligonucleotide
  Antisense strand to SEQ ID NO: 683386
uucagcagagcaauugagu

SEQ ID NO: 683388 - RNA, 19 nt, Artificial Sequence
  Description of Artificial Sequence: Synthetic oligonucleotide
  Sense strand starting at position 710 of SEQ ID NO: 585988
cucaauugcucugcugaau

SEQ ID NO: 683389 - RNA, 19 nt, Artificial Sequence
  Description of Artificial Sequence: Synthetic oligonucleotide
  Antisense strand to SEQ ID NO: 683388
auucagcagagcaauugag

SEQ ID NO: 683390 - RNA, 19 nt, Artificial Sequence
  Description of Artificial Sequence: Synthetic oligonucleotide
  Sense strand starting at position 724 of SEQ ID NO: 585988
ugaauuaugugcuucugga

SEQ ID NO: 683391 - RNA, 19 nt, Artificial Sequence
  Description of Artificial Sequence: Synthetic oligonucleotide
  Antisense strand to SEQ ID NO: 683390
uccagaagcacauaauuca

SEQ ID NO: 683392 - RNA, 19 nt, Artificial Sequence
  Description of Artificial Sequence: Synthetic oligonucleotide
  Sense strand starting at position 786 of SEQ ID NO: 585988
cacugugugccuuaccaga

SEQ ID NO: 683393 - RNA, 19 nt, Artificial Sequence
  Description of Artificial Sequence: Synthetic oligonucleotide
  Antisense strand to SEQ ID NO: 683392
ucugguaaggcacacagug

SEQ ID NO: 683394 - RNA, 19 nt, Artificial Sequence
  Description of Artificial Sequence: Synthetic oligonucleotide
  Sense strand starting at position 936 of SEQ ID NO: 585988
ggcauagcuguggagacau

SEQ ID NO: 683395 - RNA, 19 nt, Artificial Sequence
  Description of Artificial Sequence: Synthetic oligonucleotide
  Antisense strand to SEQ ID NO: 683394
augucuccacagcuaugcc

SEQ ID NO: 683396 - RNA, 19 nt, Artificial Sequence
  Description of Artificial Sequence: Synthetic oligonucleotide
  Sense strand starting at position 975 of SEQ ID NO: 585988
ggaggagguuccguggcaa

SEQ ID NO: 683397 - RNA, 19 nt, Artificial Sequence
  Description of Artificial Sequence: Synthetic oligonucleotide
  Antisense strand to SEQ ID NO: 683396
uugccacggaaccuccucc

SEQ ID NO: 683398 - RNA, 19 nt, Artificial Sequence
  Description of Artificial Sequence: Synthetic oligonucleotide
  Sense strand starting at position 996 of SEQ ID NO: 585988
ggaggaggcucucuggcau

SEQ ID NO: 683399 - RNA, 19 nt, Artificial Sequence
  Description of Artificial Sequence: Synthetic oligonucleotide
  Antisense strand to SEQ ID NO: 683398
augccagagagccuccucc

SEQ ID NO: 683400 - RNA, 19 nt, Artificial Sequence
  Description of Artificial Sequence: Synthetic oligonucleotide
  Sense strand starting at position 1027 of SEQ ID NO: 585988
auacccuugugggcugaaa

SEQ ID NO: 683401 - RNA, 19 nt, Artificial Sequence
  Description of Artificial Sequence: Synthetic oligonucleotide
  Antisense strand to SEQ ID NO: 683400
uuucagcccacaaggguau

SEQ ID NO: 683402 - RNA, 19 nt, Artificial Sequence
  Description of Artificial Sequence: Synthetic oligonucleotide
  Sense strand starting at position 1029 of SEQ ID NO: 585988
acccuugugggcugaaaug

SEQ ID NO: 683403 - RNA, 19 nt, Artificial Sequence
  Description of Artificial Sequence: Synthetic oligonucleotide
  Antisense strand to SEQ ID NO: 683402
cauuucagcccacaagggu

SEQ ID NO: 683404 - RNA, 19 nt, Artificial Sequence
  Description of Artificial Sequence: Synthetic oligonucleotide
  Sense strand starting at position 1050 of SEQ ID NO: 585988
ggcagauggguuuaggcau

SEQ ID NO: 683405 - RNA, 19 nt, Artificial Sequence
  Description of Artificial Sequence: Synthetic oligonucleotide
  Antisense strand to SEQ ID NO: 683404
augccuaaacccaucugcc

SEQ ID NO: 683406 - RNA, 19 nt, Artificial Sequence
  Description of Artificial Sequence: Synthetic oligonucleotide
  Sense strand starting at position 1057 of SEQ ID NO: 585988
ggguuuaggcaucauguaa

SEQ ID NO: 683407 - RNA, 19 nt, Artificial Sequence
  Description of Artificial Sequence: Synthetic oligonucleotide
  Antisense strand to SEQ ID NO: 683406
uuacaugaugccuaaaccc

SEQ ID NO: 683408 - RNA, 19 nt, Artificial Sequence
  Description of Artificial Sequence: Synthetic oligonucleotide
  Sense strand starting at position 1182 of SEQ ID NO: 585988
cauagaggguuucuuacuu

SEQ ID NO: 683409 - RNA, 19 nt, Artificial Sequence
  Description of Artificial Sequence: Synthetic oligonucleotide
  Antisense strand to SEQ ID NO: 683408
aaguaagaaacccucuaug

SEQ ID NO: 683410 - RNA, 19 nt, Artificial Sequence
  Description of Artificial Sequence: Synthetic oligonucleotide
  Sense strand starting at position 1254 of SEQ ID NO: 585988
ggccaauauaugggaguaa

SEQ ID NO: 683411 - RNA, 19 nt, Artificial Sequence
  Description of Artificial Sequence: Synthetic oligonucleotide
  Antisense strand to SEQ ID NO: 683410
uuacucccauauauuggcc

SEQ ID NO: 683412 - RNA, 19 nt, Artificial Sequence
  Description of Artificial Sequence: Synthetic oligonucleotide
  Sense strand starting at position 1255 of SEQ ID NO: 585988
gccaauauaugggaguaau

SEQ ID NO: 683413 - RNA, 19 nt, Artificial Sequence
  Description of Artificial Sequence: Synthetic oligonucleotide
  Antisense strand to SEQ ID NO: 683412
auuacucccauauauuggc

SEQ ID NO: 683414 - RNA, 19 nt, Artificial Sequence
  Description of Artificial Sequence: Synthetic oligonucleotide
  Sense strand starting at position 1265 of SEQ ID NO: 585988
gggaguaauucagauauag

SEQ ID NO: 683415 - RNA, 19 nt, Artificial Sequence
  Description of Artificial Sequence: Synthetic oligonucleotide
  Antisense strand to SEQ ID NO: 683414
cuauaucugaauuacuccc

SEQ ID NO: 683416 - RNA, 19 nt, Artificial Sequence
  Description of Artificial Sequence: Synthetic oligonucleotide
  Sense strand starting at position 1311 of SEQ ID NO: 585988
cagggccaugugugagaaa

SEQ ID NO: 683417 - RNA, 19 nt, Artificial Sequence
  Description of Artificial Sequence: Synthetic oligonucleotide
  Antisense strand to SEQ ID NO: 683416
uuucucacacauggcccug

SEQ ID NO: 683418 - RNA, 19 nt, Artificial Sequence
  Description of Artificial Sequence: Synthetic oligonucleotide
  Sense strand starting at position 1543 of SEQ ID NO: 585988
cagagaacaugcuagugau

SEQ ID NO: 683419 - RNA, 19 nt, Artificial Sequence
  Description of Artificial Sequence: Synthetic oligonucleotide
  Antisense strand to SEQ ID NO: 683418
aucacuagcauguucucug

SEQ ID NO: 683420 - RNA, 19 nt, Artificial Sequence
  Description of Artificial Sequence: Synthetic oligonucleotide
  Sense strand starting at position 2027 of SEQ ID NO: 585988
acaucugucccaggcuuau

SEQ ID NO: 683421 - RNA, 19 nt, Artificial Sequence
  Description of Artificial Sequence: Synthetic oligonucleotide
  Antisense strand to SEQ ID NO: 683420
auaagccugggacagaugu

SEQ ID NO: 683422 - RNA, 19 nt, Artificial Sequence
  Description of Artificial Sequence: Synthetic oligonucleotide
  Sense strand starting at position 2267 of SEQ ID NO: 585988
gaaacaacugccuggucuu

SEQ ID NO: 683423 - RNA, 19 nt, Artificial Sequence
  Description of Artificial Sequence: Synthetic oligonucleotide
  Antisense strand to SEQ ID NO: 683422
aagaccaggcaguuguuuc

SEQ ID NO: 683424 - RNA, 19 nt, Artificial Sequence
  Description of Artificial Sequence: Synthetic oligonucleotide
  Sense strand starting at position 2273 of SEQ ID NO: 585988
acugccuggucuuugauua

SEQ ID NO: 683425 - RNA, 19 nt, Artificial Sequence
  Description of Artificial Sequence: Synthetic oligonucleotide
  Antisense strand to SEQ ID NO: 683424
uaaucaaagaccaggcagu

SEQ ID NO: 683426 - RNA, 19 nt, Artificial Sequence
  Description of Artificial Sequence: Synthetic oligonucleotide
  Sense strand starting at position 2274 of SEQ ID NO: 585988
cugccuggucuuugauuaa

SEQ ID NO: 683427 - RNA, 19 nt, Artificial Sequence
  Description of Artificial Sequence: Synthetic oligonucleotide
  Antisense strand to SEQ ID NO: 683426
uuaaucaaagaccaggcag

SEQ ID NO: 683428 - RNA, 19 nt, Artificial Sequence
  Description of Artificial Sequence: Synthetic oligonucleotide
  Sense strand starting at position 2316 of SEQ ID NO: 585988
cuuugcaugucauuugcau

SEQ ID NO: 683429 - RNA, 19 nt, Artificial Sequence
  Description of Artificial Sequence: Synthetic oligonucleotide
  Antisense strand to SEQ ID NO: 683428
augcaaaugacaugcaaag

SEQ ID NO: 683430 - RNA, 19 nt, Artificial Sequence
  Description of Artificial Sequence: Synthetic oligonucleotide
  Sense strand starting at position 2322 of SEQ ID NO: 585988
augucauuugcauguggga

SEQ ID NO: 683431 - RNA, 19 nt, Artificial Sequence
  Description of Artificial Sequence: Synthetic oligonucleotide
  Antisense strand to SEQ ID NO: 683430
ucccacaugcaaaugacau

SEQ ID NO: 683432 - RNA, 19 nt, Artificial Sequence
  Description of Artificial Sequence: Synthetic oligonucleotide
  Sense strand starting at position 2324 of SEQ ID NO: 585988
gucauuugcaugugggaca

SEQ ID NO: 683433 - RNA, 19 nt, Artificial Sequence
  Description of Artificial Sequence: Synthetic oligonucleotide
  Antisense strand to SEQ ID NO: 683432
ugucccacaugcaaaugac

SEQ ID NO: 683434 - RNA, 19 nt, Artificial Sequence
  Description of Artificial Sequence: Synthetic oligonucleotide
  Sense strand starting at position 2476 of SEQ ID NO: 585988
aguauucuggacugacuau

SEQ ID NO: 683435 - RNA, 19 nt, Artificial Sequence
  Description of Artificial Sequence: Synthetic oligonucleotide
  Antisense strand to SEQ ID NO: 683434
auagucaguccagaauacu

SEQ ID NO: 683436 - RNA, 19 nt, Artificial Sequence
  Description of Artificial Sequence: Synthetic oligonucleotide
  Sense strand starting at position 2887 of SEQ ID NO: 585988
gcauauuucuacuugucuu

SEQ ID NO: 683437 - RNA, 19 nt, Artificial Sequence
  Description of Artificial Sequence: Synthetic oligonucleotide
  Antisense strand to SEQ ID NO: 683436
aagacaaguagaaauaugc

SEQ ID NO: 683438 - RNA, 19 nt, Artificial Sequence
  Description of Artificial Sequence: Synthetic oligonucleotide
  Sense strand starting at position 2958 of SEQ ID NO: 585988
auuucuguccaguggugga

SEQ ID NO: 683439 - RNA, 19 nt, Artificial Sequence
  Description of Artificial Sequence: Synthetic oligonucleotide
  Antisense strand to SEQ ID NO: 683438
uccaccacuggacagaaau

SEQ ID NO: 683440 - RNA, 19 nt, Artificial Sequence
  Description of Artificial Sequence: Synthetic oligonucleotide
  Sense strand starting at position 3106 of SEQ ID NO: 585988
ugacauaugauguguggaa

SEQ ID NO: 683441 - RNA, 19 nt, Artificial Sequence
  Description of Artificial Sequence: Synthetic oligonucleotide
  Antisense strand to SEQ ID NO: 683440
uuccacacaucauauguca

SEQ ID NO: 683442 - RNA, 19 nt, Artificial Sequence
  Description of Artificial Sequence: Synthetic oligonucleotide
  Sense strand starting at position 3107 of SEQ ID NO: 585988
gacauaugauguguggaag

SEQ ID NO: 683443 - RNA, 19 nt, Artificial Sequence
  Description of Artificial Sequence: Synthetic oligonucleotide
  Antisense strand to SEQ ID NO: 683442
cuuccacacaucauauguc

SEQ ID NO: 683444 - RNA, 19 nt, Artificial Sequence
  Description of Artificial Sequence: Synthetic oligonucleotide
  Sense strand starting at position 3110 of SEQ ID NO: 585988
auaugauguguggaaggca

SEQ ID NO: 683445 - RNA, 19 nt, Artificial Sequence
  Description of Artificial Sequence: Synthetic oligonucleotide
  Antisense strand to SEQ ID NO: 683444
ugccuuccacacaucauau

SEQ ID NO: 683446 - RNA, 19 nt, Artificial Sequence
  Description of Artificial Sequence: Synthetic oligonucleotide
  Sense strand starting at position 3189 of SEQ ID NO: 585988
ugaucugccuuucucagau

SEQ ID NO: 683447 - RNA, 19 nt, Artificial Sequence
  Description of Artificial Sequence: Synthetic oligonucleotide
  Antisense strand to SEQ ID NO: 683446
aucugagaaaggcagauca

SEQ ID NO: 683448 - RNA, 19 nt, Artificial Sequence
  Description of Artificial Sequence: Synthetic oligonucleotide
  Sense strand starting at position 3195 of SEQ ID NO: 585988
gccuuucucagaugagaag

SEQ ID NO: 683449 - RNA, 19 nt, Artificial Sequence
  Description of Artificial Sequence: Synthetic oligonucleotide
  Antisense strand to SEQ ID NO: 683448
cuucucaucugagaaaggc

SEQ ID NO: 683450 - RNA, 19 nt, Artificial Sequence
  Description of Artificial Sequence: Synthetic oligonucleotide
  Sense strand starting at position 3412 of SEQ ID NO: 585988
uguugaugccuguggucuu

SEQ ID NO: 683451 - RNA, 19 nt, Artificial Sequence
  Description of Artificial Sequence: Synthetic oligonucleotide
  Antisense strand to SEQ ID NO: 683450
aagaccacaggcaucaaca

SEQ ID NO: 683452 - RNA, 19 nt, Artificial Sequence
  Description of Artificial Sequence: Synthetic oligonucleotide
  Sense strand starting at position 3496 of SEQ ID NO: 585988
gccuccuuauaauugggau

SEQ ID NO: 683453 - RNA, 19 nt, Artificial Sequence
  Description of Artificial Sequence: Synthetic oligonucleotide
  Antisense strand to SEQ ID NO: 683452
aucccaauuauaaggaggc

SEQ ID NO: 683454 - RNA, 19 nt, Artificial Sequence
  Description of Artificial Sequence: Synthetic oligonucleotide
  Sense strand starting at position 3654 of SEQ ID NO: 585988
cuuuaugacucagaggaga

SEQ ID NO: 683455 - RNA, 19 nt, Artificial Sequence
  Description of Artificial Sequence: Synthetic oligonucleotide
  Antisense strand to SEQ ID NO: 683454
ucuccucugagucauaaag

SEQ ID NO: 683456 - RNA, 19 nt, Artificial Sequence
  Description of Artificial Sequence: Synthetic oligonucleotide
  Sense strand starting at position 3782 of SEQ ID NO: 585988
cccugucuguuggcaaagu

SEQ ID NO: 683457 - RNA, 19 nt, Artificial Sequence
  Description of Artificial Sequence: Synthetic oligonucleotide
  Antisense strand to SEQ ID NO: 683456
acuuugccaacagacaggg

SEQ ID NO: 683458 - RNA, 19 nt, Artificial Sequence
  Description of Artificial Sequence: Synthetic oligonucleotide
  Sense strand starting at position 3899 of SEQ ID NO: 585988
cuggcuugucuuuaggcau

SEQ ID NO: 683459 - RNA, 19 nt, Artificial Sequence
  Description of Artificial Sequence: Synthetic oligonucleotide
  Antisense strand to SEQ ID NO: 683458
augccuaaagacaagccag

SEQ ID NO: 683460 - RNA, 19 nt, Artificial Sequence
  Description of Artificial Sequence: Synthetic oligonucleotide
  Sense strand starting at position 182 of SEQ ID NO: 585989
uuaaacaucugagugcuaa

SEQ ID NO: 683461 - RNA, 19 nt, Artificial Sequence
  Description of Artificial Sequence: Synthetic oligonucleotide
  Antisense strand to SEQ ID NO: 683460
uuagcacucagauguuuaa

SEQ ID NO: 683462 - RNA, 19 nt, Artificial Sequence
  Description of Artificial Sequence: Synthetic oligonucleotide
  Sense strand starting at position 194 of SEQ ID NO: 585989
gugcuaaaucuuuaugcca

SEQ ID NO: 683463 - RNA, 19 nt, Artificial Sequence
  Description of Artificial Sequence: Synthetic oligonucleotide
  Antisense strand to SEQ ID NO: 683462
uggcauaaagauuuagcac

SEQ ID NO: 683464 - RNA, 19 nt, Artificial Sequence
  Description of Artificial Sequence: Synthetic oligonucleotide
  Sense strand starting at position 300 of SEQ ID NO: 585989
cacagagguccagaagcuu

SEQ ID NO: 683465 - RNA, 19 nt, Artificial Sequence
  Description of Artificial Sequence: Synthetic oligonucleotide
  Antisense strand to SEQ ID NO: 683464
aagcuucuggaccucugug

SEQ ID NO: 683466 - RNA, 19 nt, Artificial Sequence
  Description of Artificial Sequence: Synthetic oligonucleotide
  Sense strand starting at position 332 of SEQ ID NO: 585989
ccgcccuagucaucauauu

SEQ ID NO: 683467 - RNA, 19 nt, Artificial Sequence
  Description of Artificial Sequence: Synthetic oligonucleotide
  Antisense strand to SEQ ID NO: 683466
aauaugaugacuagggcgg

SEQ ID NO: 683468 - RNA, 19 nt, Artificial Sequence
  Description of Artificial Sequence: Synthetic oligonucleotide
  Sense strand starting at position 333 of SEQ ID NO: 585989
cgcccuagucaucauauua

SEQ ID NO: 683469 - RNA, 19 nt, Artificial Sequence
  Description of Artificial Sequence: Synthetic oligonucleotide
  Antisense strand to SEQ ID NO: 683468
uaauaugaugacuagggcg

SEQ ID NO: 683470 - RNA, 19 nt, Artificial Sequence
  Description of Artificial Sequence: Synthetic oligonucleotide
  Sense strand starting at position 929 of SEQ ID NO: 585989
acucaauugcucugcugaa

SEQ ID NO: 683471 - RNA, 19 nt, Artificial Sequence
  Description of Artificial Sequence: Synthetic oligonucleotide
  Antisense strand to SEQ ID NO: 683470
uucagcagagcaauugagu

SEQ ID NO: 683472 - RNA, 19 nt, Artificial Sequence
  Description of Artificial Sequence: Synthetic oligonucleotide
  Sense strand starting at position 930 of SEQ ID NO: 585989
cucaauugcucugcugaau

SEQ ID NO: 683473 - RNA, 19 nt, Artificial Sequence
  Description of Artificial Sequence: Synthetic oligonucleotide
  Antisense strand to SEQ ID NO: 683472
auucagcagagcaauugag

SEQ ID NO: 683474 - RNA, 19 nt, Artificial Sequence
  Description of Artificial Sequence: Synthetic oligonucleotide
  Sense strand starting at position 944 of SEQ ID NO: 585989
ugaauuaugugcuucugga

SEQ ID NO: 683475 - RNA, 19 nt, Artificial Sequence
  Description of Artificial Sequence: Synthetic oligonucleotide
  Antisense strand to SEQ ID NO: 683474
uccagaagcacauaauuca

SEQ ID NO: 683476 - RNA, 19 nt, Artificial Sequence
  Description of Artificial Sequence: Synthetic oligonucleotide
  Sense strand starting at position 1006 of SEQ ID NO: 585989
cacugugugccuuaccaga

SEQ ID NO: 683477 - RNA, 19 nt, Artificial Sequence
  Description of Artificial Sequence: Synthetic oligonucleotide
  Antisense strand to SEQ ID NO: 683476
ucugguaaggcacacagug

SEQ ID NO: 683478 - RNA, 19 nt, Artificial Sequence
  Description of Artificial Sequence: Synthetic oligonucleotide
  Sense strand starting at position 1156 of SEQ ID NO: 585989
ggcauagcuguggagacau

SEQ ID NO: 683479 - RNA, 19 nt, Artificial Sequence
  Description of Artificial Sequence: Synthetic oligonucleotide
  Antisense strand to SEQ ID NO: 683478
augucuccacagcuaugcc

SEQ ID NO: 683480 - RNA, 19 nt, Artificial Sequence
  Description of Artificial Sequence: Synthetic oligonucleotide
  Sense strand starting at position 1195 of SEQ ID NO: 585989
ggaggagguuccguggcaa

SEQ ID NO: 683481 - RNA, 19 nt, Artificial Sequence
  Description of Artificial Sequence: Synthetic oligonucleotide
  Antisense strand to SEQ ID NO: 683480
uugccacggaaccuccucc

SEQ ID NO: 683482 - RNA, 19 nt, Artificial Sequence
  Description of Artificial Sequence: Synthetic oligonucleotide
  Sense strand starting at position 1216 of SEQ ID NO: 585989
ggaggaggcucucuggcau

SEQ ID NO: 683483 - RNA, 19 nt, Artificial Sequence
  Description of Artificial Sequence: Synthetic oligonucleotide
  Antisense strand to SEQ ID NO: 683482
augccagagagccuccucc

SEQ ID NO: 683484 - RNA, 19 nt, Artificial Sequence
  Description of Artificial Sequence: Synthetic oligonucleotide
  Sense strand starting at position 1247 of SEQ ID NO: 585989
auacccuugugggcugaaa

SEQ ID NO: 683485 - RNA, 19 nt, Artificial Sequence
  Description of Artificial Sequence: Synthetic oligonucleotide
  Antisense strand to SEQ ID NO: 683484
uuucagcccacaaggguau

SEQ ID NO: 683486 - RNA, 19 nt, Artificial Sequence
  Description of Artificial Sequence: Synthetic oligonucleotide
  Sense strand starting at position 1249 of SEQ ID NO: 585989
acccuugugggcugaaaug

SEQ ID NO: 683487 - RNA, 19 nt, Artificial Sequence
  Description of Artificial Sequence: Synthetic oligonucleotide
  Antisense strand to SEQ ID NO: 683486
cauuucagcccacaagggu

SEQ ID NO: 683488 - RNA, 19 nt, Artificial Sequence
  Description of Artificial Sequence: Synthetic oligonucleotide
  Sense strand starting at position 1270 of SEQ ID NO: 585989
ggcagauggguuuaggcau

SEQ ID NO: 683489 - RNA, 19 nt, Artificial Sequence
  Description of Artificial Sequence: Synthetic oligonucleotide
  Antisense strand to SEQ ID NO: 683488
augccuaaacccaucugcc

SEQ ID NO: 683490 - RNA, 19 nt, Artificial Sequence
  Description of Artificial Sequence: Synthetic oligonucleotide
  Sense strand starting at position 1277 of SEQ ID NO: 585989
ggguuuaggcaucauguaa

SEQ ID NO: 683491 - RNA, 19 nt, Artificial Sequence
  Description of Artificial Sequence: Synthetic oligonucleotide
  Antisense strand to SEQ ID NO: 683490
uuacaugaugccuaaaccc

SEQ ID NO: 683492 - RNA, 19 nt, Artificial Sequence
  Description of Artificial Sequence: Synthetic oligonucleotide
  Sense strand starting at position 1402 of SEQ ID NO: 585989
cauagaggguuucuuacuu

SEQ ID NO: 683493 - RNA, 19 nt, Artificial Sequence
  Description of Artificial Sequence: Synthetic oligonucleotide
  Antisense strand to SEQ ID NO: 683492
aaguaagaaacccucuaug

SEQ ID NO: 683494 - RNA, 19 nt, Artificial Sequence
  Description of Artificial Sequence: Synthetic oligonucleotide
  Sense strand starting at position 1474 of SEQ ID NO: 585989
ggccaauauaugggaguaa

SEQ ID NO: 683495 - RNA, 19 nt, Artificial Sequence
  Description of Artificial Sequence: Synthetic oligonucleotide
  Antisense strand to SEQ ID NO: 683494
uuacucccauauauuggcc

SEQ ID NO: 683496 - RNA, 19 nt, Artificial Sequence
  Description of Artificial Sequence: Synthetic oligonucleotide
  Sense strand starting at position 1475 of SEQ ID NO: 585989
gccaauauaugggaguaau

SEQ ID NO: 683497 - RNA, 19 nt, Artificial Sequence
  Description of Artificial Sequence: Synthetic oligonucleotide
  Antisense strand to SEQ ID NO: 683496
auuacucccauauauuggc

SEQ ID NO: 683498 - RNA, 19 nt, Artificial Sequence
  Description of Artificial Sequence: Synthetic oligonucleotide
  Sense strand starting at position 1485 of SEQ ID NO: 585989
gggaguaauucagauauag

SEQ ID NO: 683499 - RNA, 19 nt, Artificial Sequence
  Description of Artificial Sequence: Synthetic oligonucleotide
  Antisense strand to SEQ ID NO: 683498
cuauaucugaauuacuccc

SEQ ID NO: 683500 - RNA, 19 nt, Artificial Sequence
  Description of Artificial Sequence: Synthetic oligonucleotide
  Sense strand starting at position 1531 of SEQ ID NO: 585989
cagggccaugugugagaaa

SEQ ID NO: 683501 - RNA, 19 nt, Artificial Sequence
  Description of Artificial Sequence: Synthetic oligonucleotide
  Antisense strand to SEQ ID NO: 683500
uuucucacacauggcccug

SEQ ID NO: 683502 - RNA, 19 nt, Artificial Sequence
  Description of Artificial Sequence: Synthetic oligonucleotide
  Sense strand starting at position 1763 of SEQ ID NO: 585989
cagagaacaugcuagugau

SEQ ID NO: 683503 - RNA, 19 nt, Artificial Sequence
  Description of Artificial Sequence: Synthetic oligonucleotide
  Antisense strand to SEQ ID NO: 683502
aucacuagcauguucucug

SEQ ID NO: 683504 - RNA, 19 nt, Artificial Sequence
  Description of Artificial Sequence: Synthetic oligonucleotide
  Sense strand starting at position 2247 of SEQ ID NO: 585989
acaucugucccaggcuuau

SEQ ID NO: 683505 - RNA, 19 nt, Artificial Sequence
  Description of Artificial Sequence: Synthetic oligonucleotide
  Antisense strand to SEQ ID NO: 683504
auaagccugggacagaugu

SEQ ID NO: 683506 - RNA, 19 nt, Artificial Sequence
  Description of Artificial Sequence: Synthetic oligonucleotide
  Sense strand starting at position 2487 of SEQ ID NO: 585989
gaaacaacugccuggucuu

SEQ ID NO: 683507 - RNA, 19 nt, Artificial Sequence
  Description of Artificial Sequence: Synthetic oligonucleotide
  Antisense strand to SEQ ID NO: 683506
aagaccaggcaguuguuuc

SEQ ID NO: 683508 - RNA, 19 nt, Artificial Sequence
  Description of Artificial Sequence: Synthetic oligonucleotide
  Sense strand starting at position 2493 of SEQ ID NO: 585989
acugccuggucuuugauua

SEQ ID NO: 683509 - RNA, 19 nt, Artificial Sequence
  Description of Artificial Sequence: Synthetic oligonucleotide
  Antisense strand to SEQ ID NO: 683508
uaaucaaagaccaggcagu

SEQ ID NO: 683510 - RNA, 19 nt, Artificial Sequence
  Description of Artificial Sequence: Synthetic oligonucleotide
  Sense strand starting at position 2494 of SEQ ID NO: 585989
cugccuggucuuugauuaa

SEQ ID NO: 683511 - RNA, 19 nt, Artificial Sequence
  Description of Artificial Sequence: Synthetic oligonucleotide
  Antisense strand to SEQ ID NO: 683510
uuaaucaaagaccaggcag

SEQ ID NO: 683512 - RNA, 19 nt, Artificial Sequence
  Description of Artificial Sequence: Synthetic oligonucleotide
  Sense strand starting at position 2536 of SEQ ID NO: 585989
cuuugcaugucauuugcau

SEQ ID NO: 683513 - RNA, 19 nt, Artificial Sequence
  Description of Artificial Sequence: Synthetic oligonucleotide
  Antisense strand to SEQ ID NO: 683512
augcaaaugacaugcaaag

SEQ ID NO: 683514 - RNA, 19 nt, Artificial Sequence
  Description of Artificial Sequence: Synthetic oligonucleotide
  Sense strand starting at position 2542 of SEQ ID NO: 585989
augucauuugcauguggga

SEQ ID NO: 683515 - RNA, 19 nt, Artificial Sequence
  Description of Artificial Sequence: Synthetic oligonucleotide
  Antisense strand to SEQ ID NO: 683514
ucccacaugcaaaugacau

SEQ ID NO: 683516 - RNA, 19 nt, Artificial Sequence
  Description of Artificial Sequence: Synthetic oligonucleotide
  Sense strand starting at position 2544 of SEQ ID NO: 585989
gucauuugcaugugggaca

SEQ ID NO: 683517 - RNA, 19 nt, Artificial Sequence
  Description of Artificial Sequence: Synthetic oligonucleotide
  Antisense strand to SEQ ID NO: 683516
ugucccacaugcaaaugac

SEQ ID NO: 683518 - RNA, 19 nt, Artificial Sequence
  Description of Artificial Sequence: Synthetic oligonucleotide
  Sense strand starting at position 2696 of SEQ ID NO: 585989
aguauucuggacugacuau

SEQ ID NO: 683519 - RNA, 19 nt, Artificial Sequence
  Description of Artificial Sequence: Synthetic oligonucleotide
  Antisense strand to SEQ ID NO: 683518
auagucaguccagaauacu

SEQ ID NO: 683520 - RNA, 19 nt, Artificial Sequence
  Description of Artificial Sequence: Synthetic oligonucleotide
  Sense strand starting at position 3107 of SEQ ID NO: 585989
gcauauuucuacuugucuu

SEQ ID NO: 683521 - RNA, 19 nt, Artificial Sequence
  Description of Artificial Sequence: Synthetic oligonucleotide
  Antisense strand to SEQ ID NO: 683520
aagacaaguagaaauaugc

SEQ ID NO: 683522 - RNA, 19 nt, Artificial Sequence
  Description of Artificial Sequence: Synthetic oligonucleotide
  Sense strand starting at position 3178 of SEQ ID NO: 585989
auuucuguccaguggugga

SEQ ID NO: 683523 - RNA, 19 nt, Artificial Sequence
  Description of Artificial Sequence: Synthetic oligonucleotide
  Antisense strand to SEQ ID NO: 683522
uccaccacuggacagaaau

SEQ ID NO: 683524 - RNA, 19 nt, Artificial Sequence
  Description of Artificial Sequence: Synthetic oligonucleotide
  Sense strand starting at position 3326 of SEQ ID NO: 585989
ugacauaugauguguggaa

SEQ ID NO: 683525 - RNA, 19 nt, Artificial Sequence
  Description of Artificial Sequence: Synthetic oligonucleotide
  Antisense strand to SEQ ID NO: 683524
uuccacacaucauauguca

SEQ ID NO: 683526 - RNA, 19 nt, Artificial Sequence
  Description of Artificial Sequence: Synthetic oligonucleotide
  Sense strand starting at position 3327 of SEQ ID NO: 585989
gacauaugauguguggaag

SEQ ID NO: 683527 - RNA, 19 nt, Artificial Sequence
  Description of Artificial Sequence: Synthetic oligonucleotide
  Antisense strand to SEQ ID NO: 683526
cuuccacacaucauauguc

SEQ ID NO: 683528 - RNA, 19 nt, Artificial Sequence
  Description of Artificial Sequence: Synthetic oligonucleotide
  Sense strand starting at position 3330 of SEQ ID NO: 585989
auaugauguguggaaggca

SEQ ID NO: 683529 - RNA, 19 nt, Artificial Sequence
  Description of Artificial Sequence: Synthetic oligonucleotide
  Antisense strand to SEQ ID NO: 683528
ugccuuccacacaucauau

SEQ ID NO: 683530 - RNA, 19 nt, Artificial Sequence
  Description of Artificial Sequence: Synthetic oligonucleotide
  Sense strand starting at position 3409 of SEQ ID NO: 585989
ugaucugccuuucucagau

SEQ ID NO: 683531 - RNA, 19 nt, Artificial Sequence
  Description of Artificial Sequence: Synthetic oligonucleotide
  Antisense strand to SEQ ID NO: 683530
aucugagaaaggcagauca

SEQ ID NO: 683532 - RNA, 19 nt, Artificial Sequence
  Description of Artificial Sequence: Synthetic oligonucleotide
  Sense strand starting at position 3415 of SEQ ID NO: 585989
gccuuucucagaugagaag

SEQ ID NO: 683533 - RNA, 19 nt, Artificial Sequence
  Description of Artificial Sequence: Synthetic oligonucleotide
  Antisense strand to SEQ ID NO: 683532
cuucucaucugagaaaggc

SEQ ID NO: 683534 - RNA, 19 nt, Artificial Sequence
  Description of Artificial Sequence: Synthetic oligonucleotide
  Sense strand starting at position 3632 of SEQ ID NO: 585989
uguugaugccuguggucuu

SEQ ID NO: 683535 - RNA, 19 nt, Artificial Sequence
  Description of Artificial Sequence: Synthetic oligonucleotide
  Antisense strand to SEQ ID NO: 683534
aagaccacaggcaucaaca

SEQ ID NO: 683536 - RNA, 19 nt, Artificial Sequence
  Description of Artificial Sequence: Synthetic oligonucleotide
  Sense strand starting at position 3716 of SEQ ID NO: 585989
gccuccuuauaauugggau

SEQ ID NO: 683537 - RNA, 19 nt, Artificial Sequence
  Description of Artificial Sequence: Synthetic oligonucleotide
  Antisense strand to SEQ ID NO: 683536
aucccaauuauaaggaggc

SEQ ID NO: 683538 - RNA, 19 nt, Artificial Sequence
  Description of Artificial Sequence: Synthetic oligonucleotide
  Sense strand starting at position 3874 of SEQ ID NO: 585989
cuuuaugacucagaggaga

SEQ ID NO: 683539 - RNA, 19 nt, Artificial Sequence
  Description of Artificial Sequence: Synthetic oligonucleotide
  Antisense strand to SEQ ID NO: 683538
ucuccucugagucauaaag

SEQ ID NO: 683540 - RNA, 19 nt, Artificial Sequence
  Description of Artificial Sequence: Synthetic oligonucleotide
  Sense strand starting at position 128 of SEQ ID NO: 585990
guaucauuugcuuggcuua

SEQ ID NO: 683541 - RNA, 19 nt, Artificial Sequence
  Description of Artificial Sequence: Synthetic oligonucleotide
  Antisense strand to SEQ ID NO: 683540
uaagccaagcaaaugauac

SEQ ID NO: 683542 - RNA, 19 nt, Artificial Sequence
  Description of Artificial Sequence: Synthetic oligonucleotide
  Sense strand starting at position 130 of SEQ ID NO: 585990
aucauuugcuuggcuuaca

SEQ ID NO: 683543 - RNA, 19 nt, Artificial Sequence
  Description of Artificial Sequence: Synthetic oligonucleotide
  Antisense strand to SEQ ID NO: 683542
uguaagccaagcaaaugau

SEQ ID NO: 683544 - RNA, 19 nt, Artificial Sequence
  Description of Artificial Sequence: Synthetic oligonucleotide
  Sense strand starting at position 131 of SEQ ID NO: 585990
ucauuugcuuggcuuacaa

SEQ ID NO: 683545 - RNA, 19 nt, Artificial Sequence
  Description of Artificial Sequence: Synthetic oligonucleotide
  Antisense strand to SEQ ID NO: 683544
uuguaagccaagcaaauga

SEQ ID NO: 683546 - RNA, 19 nt, Artificial Sequence
  Description of Artificial Sequence: Synthetic oligonucleotide
  Sense strand starting at position 144 of SEQ ID NO: 585990
uuacaaguagugugaagga

SEQ ID NO: 683547 - RNA, 19 nt, Artificial Sequence
  Description of Artificial Sequence: Synthetic oligonucleotide
  Antisense strand to SEQ ID NO: 683546
uccuucacacuacuuguaa

SEQ ID NO: 683548 - RNA, 19 nt, Artificial Sequence
  Description of Artificial Sequence: Synthetic oligonucleotide
  Sense strand starting at position 157 of SEQ ID NO: 585990
gaaggaugaccucguagca

SEQ ID NO: 683549 - RNA, 19 nt, Artificial Sequence
  Description of Artificial Sequence: Synthetic oligonucleotide
  Antisense strand to SEQ ID NO: 683548
ugcuacgaggucauccuuc

SEQ ID NO: 683550 - RNA, 19 nt, Artificial Sequence
  Description of Artificial Sequence: Synthetic oligonucleotide
  Sense strand starting at position 176 of SEQ ID NO: 585990
ugugauauuccagaacagc

SEQ ID NO: 683551 - RNA, 19 nt, Artificial Sequence
  Description of Artificial Sequence: Synthetic oligonucleotide
  Antisense strand to SEQ ID NO: 683550
gcuguucuggaauaucaca

SEQ ID NO: 683552 - RNA, 19 nt, Artificial Sequence
  Description of Artificial Sequence: Synthetic oligonucleotide
  Sense strand starting at position 367 of SEQ ID NO: 585990
gaccuugugcaggaguauu

SEQ ID NO: 683553 - RNA, 19 nt, Artificial Sequence
  Description of Artificial Sequence: Synthetic oligonucleotide
  Antisense strand to SEQ ID NO: 683552
aauacuccugcacaagguc

SEQ ID NO: 683554 - RNA, 19 nt, Artificial Sequence
  Description of Artificial Sequence: Synthetic oligonucleotide
  Sense strand starting at position 379 of SEQ ID NO: 585990
gaguauucccaagggcaaa

SEQ ID NO: 683555 - RNA, 19 nt, Artificial Sequence
  Description of Artificial Sequence: Synthetic oligonucleotide
  Antisense strand to SEQ ID NO: 683554
uuugcccuugggaauacuc

SEQ ID NO: 683556 - RNA, 19 nt, Artificial Sequence
  Description of Artificial Sequence: Synthetic oligonucleotide
  Sense strand starting at position 392 of SEQ ID NO: 585990
ggcaaauguuaaccagacu

SEQ ID NO: 683557 - RNA, 19 nt, Artificial Sequence
  Description of Artificial Sequence: Synthetic oligonucleotide
  Antisense strand to SEQ ID NO: 683556
agucugguuaacauuugcc

SEQ ID NO: 683558 - RNA, 19 nt, Artificial Sequence
  Description of Artificial Sequence: Synthetic oligonucleotide
  Sense strand starting at position 490 of SEQ ID NO: 585990
guaguauugcaguggauuu

SEQ ID NO: 683559 - RNA, 19 nt, Artificial Sequence
  Description of Artificial Sequence: Synthetic oligonucleotide
  Antisense strand to SEQ ID NO: 683558
aaauccacugcaauacuac

SEQ ID NO: 683560 - RNA, 19 nt, Artificial Sequence
  Description of Artificial Sequence: Synthetic oligonucleotide
  Sense strand starting at position 509 of SEQ ID NO: 585990
ggccacagauccucuuuaa

SEQ ID NO: 683561 - RNA, 19 nt, Artificial Sequence
  Description of Artificial Sequence: Synthetic oligonucleotide
  Antisense strand to SEQ ID NO: 683560
uuaaagaggaucuguggcc

SEQ ID NO: 683562 - RNA, 19 nt, Artificial Sequence
  Description of Artificial Sequence: Synthetic oligonucleotide
  Sense strand starting at position 679 of SEQ ID NO: 585990
ggaggaucuuaccucauau

SEQ ID NO: 683563 - RNA, 19 nt, Artificial Sequence
  Description of Artificial Sequence: Synthetic oligonucleotide
  Antisense strand to SEQ ID NO: 683562
auaugagguaagauccucc

SEQ ID NO: 683564 - RNA, 19 nt, Artificial Sequence
  Description of Artificial Sequence: Synthetic oligonucleotide
  Sense strand starting at position 790 of SEQ ID NO: 585990
cucuaaauugguuauguac

SEQ ID NO: 683565 - RNA, 19 nt, Artificial Sequence
  Description of Artificial Sequence: Synthetic oligonucleotide
  Antisense strand to SEQ ID NO: 683564
guacauaaccaauuuagag

SEQ ID NO: 683566 - RNA, 19 nt, Artificial Sequence
  Description of Artificial Sequence: Synthetic oligonucleotide
  Sense strand starting at position 799 of SEQ ID NO: 585990
gguuauguaccuuaacauc

SEQ ID NO: 683567 - RNA, 19 nt, Artificial Sequence
  Description of Artificial Sequence: Synthetic oligonucleotide
  Antisense strand to SEQ ID NO: 683566
gauguuaagguacauaacc

SEQ ID NO: 683568 - RNA, 19 nt, Artificial Sequence
  Description of Artificial Sequence: Synthetic oligonucleotide
  Sense strand starting at position 876 of SEQ ID NO: 585990
uccagaagcccgggauauu

SEQ ID NO: 683569 - RNA, 19 nt, Artificial Sequence
  Description of Artificial Sequence: Synthetic oligonucleotide
  Antisense strand to SEQ ID NO: 683568
aauaucccgggcuucugga

SEQ ID NO: 683570 - RNA, 19 nt, Artificial Sequence
  Description of Artificial Sequence: Synthetic oligonucleotide
  Sense strand starting at position 888 of SEQ ID NO: 585990
ggauauucugaaugaugua

SEQ ID NO: 683571 - RNA, 19 nt, Artificial Sequence
  Description of Artificial Sequence: Synthetic oligonucleotide
  Antisense strand to SEQ ID NO: 683570
uacaucauucagaauaucc

SEQ ID NO: 683572 - RNA, 19 nt, Artificial Sequence
  Description of Artificial Sequence: Synthetic oligonucleotide
  Sense strand starting at position 1424 of SEQ ID NO: 585990
ccggcuuugaucgccacau

SEQ ID NO: 683573 - RNA, 19 nt, Artificial Sequence
  Description of Artificial Sequence: Synthetic oligonucleotide
  Antisense strand to SEQ ID NO: 683572
auguggcgaucaaagccgg

SEQ ID NO: 683574 - RNA, 19 nt, Artificial Sequence
  Description of Artificial Sequence: Synthetic oligonucleotide
  Sense strand starting at position 1638 of SEQ ID NO: 585990
ucgggacuuggucagaaau

SEQ ID NO: 683575 - RNA, 19 nt, Artificial Sequence
  Description of Artificial Sequence: Synthetic oligonucleotide
  Antisense strand to SEQ ID NO: 683574
auuucugaccaagucccga

SEQ ID NO: 683576 - RNA, 19 nt, Artificial Sequence
  Description of Artificial Sequence: Synthetic oligonucleotide
  Sense strand starting at position 1922 of SEQ ID NO: 585990
ggcuuuauuucugugaauu

SEQ ID NO: 683577 - RNA, 19 nt, Artificial Sequence
  Description of Artificial Sequence: Synthetic oligonucleotide
  Antisense strand to SEQ ID NO: 683576
aauucacagaaauaaagcc

SEQ ID NO: 683578 - RNA, 19 nt, Artificial Sequence
  Description of Artificial Sequence: Synthetic oligonucleotide
  Sense strand starting at position 2305 of SEQ ID NO: 585990
acuaaagcgaugcauagua

SEQ ID NO: 683579 - RNA, 19 nt, Artificial Sequence
  Description of Artificial Sequence: Synthetic oligonucleotide
  Antisense strand to SEQ ID NO: 683578
uacuaugcaucgcuuuagu

SEQ ID NO: 683580 - RNA, 19 nt, Artificial Sequence
  Description of Artificial Sequence: Synthetic oligonucleotide
  Sense strand starting at position 2376 of SEQ ID NO: 585990
auaguaucgguagaaauua

SEQ ID NO: 683581 - RNA, 19 nt, Artificial Sequence
  Description of Artificial Sequence: Synthetic oligonucleotide
  Antisense strand to SEQ ID NO: 683580
uaauuucuaccgauacuau

SEQ ID NO: 683582 - RNA, 19 nt, Artificial Sequence
  Description of Artificial Sequence: Synthetic oligonucleotide
  Sense strand starting at position 2398 of SEQ ID NO: 585990
caggaucaguuugcuaaau

SEQ ID NO: 683583 - RNA, 19 nt, Artificial Sequence
  Description of Artificial Sequence: Synthetic oligonucleotide
  Antisense strand to SEQ ID NO: 683582
auuuagcaaacugauccug

SEQ ID NO: 683584 - RNA, 19 nt, Artificial Sequence
  Description of Artificial Sequence: Synthetic oligonucleotide
  Sense strand starting at position 2497 of SEQ ID NO: 585990
uuauguaagauaggaaugu

SEQ ID NO: 683585 - RNA, 19 nt, Artificial Sequence
  Description of Artificial Sequence: Synthetic oligonucleotide
  Antisense strand to SEQ ID NO: 683584
acauuccuaucuuacauaa

SEQ ID NO: 683586 - RNA, 19 nt, Artificial Sequence
  Description of Artificial Sequence: Synthetic oligonucleotide
  Sense strand starting at position 2507 of SEQ ID NO: 585990
uaggaauguuuggcucuaa

SEQ ID NO: 683587 - RNA, 19 nt, Artificial Sequence
  Description of Artificial Sequence: Synthetic oligonucleotide
  Antisense strand to SEQ ID NO: 683586
uuagagccaaacauuccua

SEQ ID NO: 683588 - RNA, 19 nt, Artificial Sequence
  Description of Artificial Sequence: Synthetic oligonucleotide
  Sense strand starting at position 2508 of SEQ ID NO: 585990
aggaauguuuggcucuaac

SEQ ID NO: 683589 - RNA, 19 nt, Artificial Sequence
  Description of Artificial Sequence: Synthetic oligonucleotide
  Antisense strand to SEQ ID NO: 683588
guuagagccaaacauuccu

SEQ ID NO: 683590 - RNA, 19 nt, Artificial Sequence
  Description of Artificial Sequence: Synthetic oligonucleotide
  Sense strand starting at position 2511 of SEQ ID NO: 585990
aauguuuggcucuaacgaa

SEQ ID NO: 683591 - RNA, 19 nt, Artificial Sequence
  Description of Artificial Sequence: Synthetic oligonucleotide
  Antisense strand to SEQ ID NO: 683590
uucguuagagccaaacauu

SEQ ID NO: 683592 - RNA, 19 nt, Artificial Sequence
  Description of Artificial Sequence: Synthetic oligonucleotide
  Sense strand starting at position 2605 of SEQ ID NO: 585990
ugacuugugaguuaaacug

SEQ ID NO: 683593 - RNA, 19 nt, Artificial Sequence
  Description of Artificial Sequence: Synthetic oligonucleotide
  Antisense strand to SEQ ID NO: 683592
caguuuaacucacaaguca

SEQ ID NO: 683594 - RNA, 19 nt, Artificial Sequence
  Description of Artificial Sequence: Synthetic oligonucleotide
  Sense strand starting at position 2639 of SEQ ID NO: 585990
gcuacaaggccucagagaa

SEQ ID NO: 683595 - RNA, 19 nt, Artificial Sequence
  Description of Artificial Sequence: Synthetic oligonucleotide
  Antisense strand to SEQ ID NO: 683594
uucucugaggccuuguagc

SEQ ID NO: 683596 - RNA, 19 nt, Artificial Sequence
  Description of Artificial Sequence: Synthetic oligonucleotide
  Sense strand starting at position 2719 of SEQ ID NO: 585990
cuaagauggccuugaagua

SEQ ID NO: 683597 - RNA, 19 nt, Artificial Sequence
  Description of Artificial Sequence: Synthetic oligonucleotide
  Antisense strand to SEQ ID NO: 683596
uacuucaaggccaucuuag

SEQ ID NO: 683598 - RNA, 19 nt, Artificial Sequence
  Description of Artificial Sequence: Synthetic oligonucleotide
  Sense strand starting at position 2881 of SEQ ID NO: 585990
ggacuucgcagauaugauu

SEQ ID NO: 683599 - RNA, 19 nt, Artificial Sequence
  Description of Artificial Sequence: Synthetic oligonucleotide
  Antisense strand to SEQ ID NO: 683598
aaucauaucugcgaagucc

SEQ ID NO: 683600 - RNA, 19 nt, Artificial Sequence
  Description of Artificial Sequence: Synthetic oligonucleotide
  Sense strand starting at position 2887 of SEQ ID NO: 585990
cgcagauaugauuaaguua

SEQ ID NO: 683601 - RNA, 19 nt, Artificial Sequence
  Description of Artificial Sequence: Synthetic oligonucleotide
  Antisense strand to SEQ ID NO: 683600
uaacuuaaucauaucugcg

SEQ ID NO: 683602 - RNA, 19 nt, Artificial Sequence
  Description of Artificial Sequence: Synthetic oligonucleotide
  Sense strand starting at position 3067 of SEQ ID NO: 585990
aagggaaaucgcuauguug

SEQ ID NO: 683603 - RNA, 19 nt, Artificial Sequence
  Description of Artificial Sequence: Synthetic oligonucleotide
  Antisense strand to SEQ ID NO: 683602
caacauagcgauuucccuu

SEQ ID NO: 683604 - RNA, 19 nt, Artificial Sequence
  Description of Artificial Sequence: Synthetic oligonucleotide
  Sense strand starting at position 3190 of SEQ ID NO: 585990
augacaacaccuugagguu

SEQ ID NO: 683605 - RNA, 19 nt, Artificial Sequence
  Description of Artificial Sequence: Synthetic oligonucleotide
  Antisense strand to SEQ ID NO: 683604
aaccucaagguguugucau

SEQ ID NO: 683606 - RNA, 19 nt, Artificial Sequence
  Description of Artificial Sequence: Synthetic oligonucleotide
  Sense strand starting at position 3202 of SEQ ID NO: 585990
ugagguuauuaccucuaaa

SEQ ID NO: 683607 - RNA, 19 nt, Artificial Sequence
  Description of Artificial Sequence: Synthetic oligonucleotide
  Antisense strand to SEQ ID NO: 683606
uuuagagguaauaaccuca

SEQ ID NO: 683608 - RNA, 19 nt, Artificial Sequence
  Description of Artificial Sequence: Synthetic oligonucleotide
  Sense strand starting at position 3452 of SEQ ID NO: 585990
ccagaaauauacuuaggca

SEQ ID NO: 683609 - RNA, 19 nt, Artificial Sequence
  Description of Artificial Sequence: Synthetic oligonucleotide
  Antisense strand to SEQ ID NO: 683608
ugccuaaguauauuucugg

SEQ ID NO: 683610 - RNA, 19 nt, Artificial Sequence
  Description of Artificial Sequence: Synthetic oligonucleotide
  Sense strand starting at position 3758 of SEQ ID NO: 585990
ugcucuauucuauauagua

SEQ ID NO: 683611 - RNA, 19 nt, Artificial Sequence
  Description of Artificial Sequence: Synthetic oligonucleotide
  Antisense strand to SEQ ID NO: 683610
uacuauauagaauagagca

SEQ ID NO: 683612 - RNA, 19 nt, Artificial Sequence
  Description of Artificial Sequence: Synthetic oligonucleotide
  Sense strand starting at position 3873 of SEQ ID NO: 585990
auuuaaguuugugugguca

SEQ ID NO: 683613 - RNA, 19 nt, Artificial Sequence
  Description of Artificial Sequence: Synthetic oligonucleotide
  Antisense strand to SEQ ID NO: 683612
ugaccacacaaacuuaaau

SEQ ID NO: 683614 - RNA, 19 nt, Artificial Sequence
  Description of Artificial Sequence: Synthetic oligonucleotide
  Sense strand starting at position 3885 of SEQ ID NO: 585990
guggucacacuguaugaca

SEQ ID NO: 683615 - RNA, 19 nt, Artificial Sequence
  Description of Artificial Sequence: Synthetic oligonucleotide
  Antisense strand to SEQ ID NO: 683614
ugucauacagugugaccac

SEQ ID NO: 683616 - RNA, 19 nt, Artificial Sequence
  Description of Artificial Sequence: Synthetic oligonucleotide
  Sense strand starting at position 3887 of SEQ ID NO: 585990
ggucacacuguaugacaaa

SEQ ID NO: 683617 - RNA, 19 nt, Artificial Sequence
  Description of Artificial Sequence: Synthetic oligonucleotide
  Antisense strand to SEQ ID NO: 683616
uuugucauacagugugacc

SEQ ID NO: 683618 - RNA, 19 nt, Artificial Sequence
  Description of Artificial Sequence: Synthetic oligonucleotide
  Sense strand starting at position 3944 of SEQ ID NO: 585990
auaucaaagccucggacua

SEQ ID NO: 683619 - RNA, 19 nt, Artificial Sequence
  Description of Artificial Sequence: Synthetic oligonucleotide
  Antisense strand to SEQ ID NO: 683618
uaguccgaggcuuugauau

SEQ ID NO: 683620 - RNA, 19 nt, Artificial Sequence
  Description of Artificial Sequence: Synthetic oligonucleotide
  Sense strand starting at position 137 of SEQ ID NO: 585991
gguagucuggaauguccaa

SEQ ID NO: 683621 - RNA, 19 nt, Artificial Sequence
  Description of Artificial Sequence: Synthetic oligonucleotide
  Antisense strand to SEQ ID NO: 683620
uuggacauuccagacuacc

SEQ ID NO: 683622 - RNA, 19 nt, Artificial Sequence
  Description of Artificial Sequence: Synthetic oligonucleotide
  Sense strand starting at position 290 of SEQ ID NO: 585991
uaucaagauucuuuguggu

SEQ ID NO: 683623 - RNA, 19 nt, Artificial Sequence
  Description of Artificial Sequence: Synthetic oligonucleotide
  Antisense strand to SEQ ID NO: 683622
accacaaagaaucuugaua

SEQ ID NO: 683624 - RNA, 19 nt, Artificial Sequence
  Description of Artificial Sequence: Synthetic oligonucleotide
  Sense strand starting at position 292 of SEQ ID NO: 585991
ucaagauucuuugugguac

SEQ ID NO: 683625 - RNA, 19 nt, Artificial Sequence
  Description of Artificial Sequence: Synthetic oligonucleotide
  Antisense strand to SEQ ID NO: 683624
guaccacaaagaaucuuga

SEQ ID NO: 683626 - RNA, 19 nt, Artificial Sequence
  Description of Artificial Sequence: Synthetic oligonucleotide
  Sense strand starting at position 316 of SEQ ID NO: 585991
cacuuaaauugggagaaga

SEQ ID NO: 683627 - RNA, 19 nt, Artificial Sequence
  Description of Artificial Sequence: Synthetic oligonucleotide
  Antisense strand to SEQ ID NO: 683626
ucuucucccaauuuaagug

SEQ ID NO: 683628 - RNA, 19 nt, Artificial Sequence
  Description of Artificial Sequence: Synthetic oligonucleotide
  Sense strand starting at position 372 of SEQ ID NO: 585991
ggcaguaugguacacuaua

SEQ ID NO: 683629 - RNA, 19 nt, Artificial Sequence
  Description of Artificial Sequence: Synthetic oligonucleotide
  Antisense strand to SEQ ID NO: 683628
uauaguguaccauacugcc

SEQ ID NO: 683630 - RNA, 19 nt, Artificial Sequence
  Description of Artificial Sequence: Synthetic oligonucleotide
  Sense strand starting at position 380 of SEQ ID NO: 585991
gguacacuauaucuauagu

SEQ ID NO: 683631 - RNA, 19 nt, Artificial Sequence
  Description of Artificial Sequence: Synthetic oligonucleotide
  Antisense strand to SEQ ID NO: 683630
acuauagauauaguguacc

SEQ ID NO: 683632 - RNA, 19 nt, Artificial Sequence
  Description of Artificial Sequence: Synthetic oligonucleotide
  Sense strand starting at position 428 of SEQ ID NO: 585991
ggccaugcacuugaaacau

SEQ ID NO: 683633 - RNA, 19 nt, Artificial Sequence
  Description of Artificial Sequence: Synthetic oligonucleotide
  Antisense strand to SEQ ID NO: 683632
auguuucaagugcauggcc

SEQ ID NO: 683634 - RNA, 19 nt, Artificial Sequence
  Description of Artificial Sequence: Synthetic oligonucleotide
  Sense strand starting at position 445 of SEQ ID NO: 585991
auguuaacacaaugcagaa

SEQ ID NO: 683635 - RNA, 19 nt, Artificial Sequence
  Description of Artificial Sequence: Synthetic oligonucleotide
  Antisense strand to SEQ ID NO: 683634
uucugcauuguguuaacau

SEQ ID NO: 683636 - RNA, 19 nt, Artificial Sequence
  Description of Artificial Sequence: Synthetic oligonucleotide
  Sense strand starting at position 513 of SEQ ID NO: 585991
cuugcaaccgauuacugaa

SEQ ID NO: 683637 - RNA, 19 nt, Artificial Sequence
  Description of Artificial Sequence: Synthetic oligonucleotide
  Antisense strand to SEQ ID NO: 683636
uucaguaaucgguugcaag

SEQ ID NO: 683638 - RNA, 19 nt, Artificial Sequence
  Description of Artificial Sequence: Synthetic oligonucleotide
  Sense strand starting at position 632 of SEQ ID NO: 585991
gaaacuugugcagaagcuu

SEQ ID NO: 683639 - RNA, 19 nt, Artificial Sequence
  Description of Artificial Sequence: Synthetic oligonucleotide
  Antisense strand to SEQ ID NO: 683638
aagcuucugcacaaguuuc

SEQ ID NO: 683640 - RNA, 19 nt, Artificial Sequence
  Description of Artificial Sequence: Synthetic oligonucleotide
  Sense strand starting at position 658 of SEQ ID NO: 585991
gacagagauuagccagacu

SEQ ID NO: 683641 - RNA, 19 nt, Artificial Sequence
  Description of Artificial Sequence: Synthetic oligonucleotide
  Antisense strand to SEQ ID NO: 683640
agucuggcuaaucucuguc

SEQ ID NO: 683642 - RNA, 19 nt, Artificial Sequence
  Description of Artificial Sequence: Synthetic oligonucleotide
  Sense strand starting at position 809 of SEQ ID NO: 585991
ugucgaauucuagaaggcu

SEQ ID NO: 683643 - RNA, 19 nt, Artificial Sequence
  Description of Artificial Sequence: Synthetic oligonucleotide
  Antisense strand to SEQ ID NO: 683642
agccuucuagaauucgaca

SEQ ID NO: 683644 - RNA, 19 nt, Artificial Sequence
  Description of Artificial Sequence: Synthetic oligonucleotide
  Sense strand starting at position 873 of SEQ ID NO: 585991
ccgguuucuguggauauga

SEQ ID NO: 683645 - RNA, 19 nt, Artificial Sequence
  Description of Artificial Sequence: Synthetic oligonucleotide
  Antisense strand to SEQ ID NO: 683644
ucauauccacagaaaccgg

SEQ ID NO: 683646 - RNA, 19 nt, Artificial Sequence
  Description of Artificial Sequence: Synthetic oligonucleotide
  Sense strand starting at position 1127 of SEQ ID NO: 585991
ggugguuucgaaaggcagu

SEQ ID NO: 683647 - RNA, 19 nt, Artificial Sequence
  Description of Artificial Sequence: Synthetic oligonucleotide
  Antisense strand to SEQ ID NO: 683646
acugccuuucgaaaccacc

SEQ ID NO: 683648 - RNA, 19 nt, Artificial Sequence
  Description of Artificial Sequence: Synthetic oligonucleotide
  Sense strand starting at position 1140 of SEQ ID NO: 585991
ggcaguaacccagaaaccu

SEQ ID NO: 683649 - RNA, 19 nt, Artificial Sequence
  Description of Artificial Sequence: Synthetic oligonucleotide
  Antisense strand to SEQ ID NO: 683648
agguuucuggguuacugcc

SEQ ID NO: 683650 - RNA, 19 nt, Artificial Sequence
  Description of Artificial Sequence: Synthetic oligonucleotide
  Sense strand starting at position 1254 of SEQ ID NO: 585991
ggcauuuacguuugacaac

SEQ ID NO: 683651 - RNA, 19 nt, Artificial Sequence
  Description of Artificial Sequence: Synthetic oligonucleotide
  Antisense strand to SEQ ID NO: 683650
guugucaaacguaaaugcc

SEQ ID NO: 683652 - RNA, 19 nt, Artificial Sequence
  Description of Artificial Sequence: Synthetic oligonucleotide
  Sense strand starting at position 1265 of SEQ ID NO: 585991
uugacaacucuugaucgau

SEQ ID NO: 683653 - RNA, 19 nt, Artificial Sequence
  Description of Artificial Sequence: Synthetic oligonucleotide
  Antisense strand to SEQ ID NO: 683652
aucgaucaagaguugucaa

SEQ ID NO: 683654 - RNA, 19 nt, Artificial Sequence
  Description of Artificial Sequence: Synthetic oligonucleotide
  Sense strand starting at position 1825 of SEQ ID NO: 585991
uccggaucuccugaggcau

SEQ ID NO: 683655 - RNA, 19 nt, Artificial Sequence
  Description of Artificial Sequence: Synthetic oligonucleotide
  Antisense strand to SEQ ID NO: 683654
augccucaggagauccgga

SEQ ID NO: 683656 - RNA, 19 nt, Artificial Sequence
  Description of Artificial Sequence: Synthetic oligonucleotide
  Sense strand starting at position 1963 of SEQ ID NO: 585991
ggccgagcucugcccgaaa

SEQ ID NO: 683657 - RNA, 19 nt, Artificial Sequence
  Description of Artificial Sequence: Synthetic oligonucleotide
  Antisense strand to SEQ ID NO: 683656
uuucgggcagagcucggcc

SEQ ID NO: 683658 - RNA, 19 nt, Artificial Sequence
  Description of Artificial Sequence: Synthetic oligonucleotide
  Sense strand starting at position 2042 of SEQ ID NO: 585991
ggcgguagcgucguaacau

SEQ ID NO: 683659 - RNA, 19 nt, Artificial Sequence
  Description of Artificial Sequence: Synthetic oligonucleotide
  Antisense strand to SEQ ID NO: 683658
auguuacgacgcuaccgcc

SEQ ID NO: 683660 - RNA, 19 nt, Artificial Sequence
  Description of Artificial Sequence: Synthetic oligonucleotide
  Sense strand starting at position 2052 of SEQ ID NO: 585991
ucguaacaucgcgcgagaa

SEQ ID NO: 683661 - RNA, 19 nt, Artificial Sequence
  Description of Artificial Sequence: Synthetic oligonucleotide
  Antisense strand to SEQ ID NO: 683660
uucucgcgcgauguuacga

SEQ ID NO: 683662 - RNA, 19 nt, Artificial Sequence
  Description of Artificial Sequence: Synthetic oligonucleotide
  Sense strand starting at position 2082 of SEQ ID NO: 585991
guugacuacgcuuaucaau

SEQ ID NO: 683663 - RNA, 19 nt, Artificial Sequence
  Description of Artificial Sequence: Synthetic oligonucleotide
  Antisense strand to SEQ ID NO: 683662
auugauaagcguagucaac

SEQ ID NO: 683664 - RNA, 19 nt, Artificial Sequence
  Description of Artificial Sequence: Synthetic oligonucleotide
  Sense strand starting at position 2185 of SEQ ID NO: 585991
cagacucaagcauguaaga

SEQ ID NO: 683665 - RNA, 19 nt, Artificial Sequence
  Description of Artificial Sequence: Synthetic oligonucleotide
  Antisense strand to SEQ ID NO: 683664
ucuuacaugcuugagucug

SEQ ID NO: 683666 - RNA, 19 nt, Artificial Sequence
  Description of Artificial Sequence: Synthetic oligonucleotide
  Sense strand starting at position 2196 of SEQ ID NO: 585991
auguaagaacuguguuaau

SEQ ID NO: 683667 - RNA, 19 nt, Artificial Sequence
  Description of Artificial Sequence: Synthetic oligonucleotide
  Antisense strand to SEQ ID NO: 683666
auuaacacaguucuuacau

SEQ ID NO: 683668 - RNA, 19 nt, Artificial Sequence
  Description of Artificial Sequence: Synthetic oligonucleotide
  Sense strand starting at position 2220 of SEQ ID NO: 585991
uuucuaagccucugaauga

SEQ ID NO: 683669 - RNA, 19 nt, Artificial Sequence
  Description of Artificial Sequence: Synthetic oligonucleotide
  Antisense strand to SEQ ID NO: 683668
ucauucagaggcuuagaaa

SEQ ID NO: 683670 - RNA, 19 nt, Artificial Sequence
  Description of Artificial Sequence: Synthetic oligonucleotide
  Sense strand starting at position 2318 of SEQ ID NO: 585991
ggcuucuccugaguaggaa

SEQ ID NO: 683671 - RNA, 19 nt, Artificial Sequence
  Description of Artificial Sequence: Synthetic oligonucleotide
  Antisense strand to SEQ ID NO: 683670
uuccuacucaggagaagcc

SEQ ID NO: 683672 - RNA, 19 nt, Artificial Sequence
  Description of Artificial Sequence: Synthetic oligonucleotide
  Sense strand starting at position 2319 of SEQ ID NO: 585991
gcuucuccugaguaggaaa

SEQ ID NO: 683673 - RNA, 19 nt, Artificial Sequence
  Description of Artificial Sequence: Synthetic oligonucleotide
  Antisense strand to SEQ ID NO: 683672
uuuccuacucaggagaagc

SEQ ID NO: 683674 - RNA, 19 nt, Artificial Sequence
  Description of Artificial Sequence: Synthetic oligonucleotide
  Sense strand starting at position 2434 of SEQ ID NO: 585991
aguguugcuguguuguuau

SEQ ID NO: 683675 - RNA, 19 nt, Artificial Sequence
  Description of Artificial Sequence: Synthetic oligonucleotide
  Antisense strand to SEQ ID NO: 683674
auaacaacacagcaacacu

SEQ ID NO: 683676 - RNA, 19 nt, Artificial Sequence
  Description of Artificial Sequence: Synthetic oligonucleotide
  Sense strand starting at position 2774 of SEQ ID NO: 585991
ucauaaugccuguggacau

SEQ ID NO: 683677 - RNA, 19 nt, Artificial Sequence
  Description of Artificial Sequence: Synthetic oligonucleotide
  Antisense strand to SEQ ID NO: 683676
auguccacaggcauuauga

SEQ ID NO: 683678 - RNA, 19 nt, Artificial Sequence
  Description of Artificial Sequence: Synthetic oligonucleotide
  Sense strand starting at position 2847 of SEQ ID NO: 585991
gagcaauaaucagcuaugu

SEQ ID NO: 683679 - RNA, 19 nt, Artificial Sequence
  Description of Artificial Sequence: Synthetic oligonucleotide
  Antisense strand to SEQ ID NO: 683678
acauagcugauuauugcuc

SEQ ID NO: 683680 - RNA, 19 nt, Artificial Sequence
  Description of Artificial Sequence: Synthetic oligonucleotide
  Sense strand starting at position 2911 of SEQ ID NO: 585991
uuaguuauugucuauucga

SEQ ID NO: 683681 - RNA, 19 nt, Artificial Sequence
  Description of Artificial Sequence: Synthetic oligonucleotide
  Antisense strand to SEQ ID NO: 683680
ucgaauagacaauaacuaa

SEQ ID NO: 683682 - RNA, 19 nt, Artificial Sequence
  Description of Artificial Sequence: Synthetic oligonucleotide
  Sense strand starting at position 2952 of SEQ ID NO: 585991
uuugauagugauuaucagu

SEQ ID NO: 683683 - RNA, 19 nt, Artificial Sequence
  Description of Artificial Sequence: Synthetic oligonucleotide
  Antisense strand to SEQ ID NO: 683682
acugauaaucacuaucaaa

SEQ ID NO: 683684 - RNA, 19 nt, Artificial Sequence
  Description of Artificial Sequence: Synthetic oligonucleotide
  Sense strand starting at position 2983 of SEQ ID NO: 585991
uuuguuggagugugagaau

SEQ ID NO: 683685 - RNA, 19 nt, Artificial Sequence
  Description of Artificial Sequence: Synthetic oligonucleotide
  Antisense strand to SEQ ID NO: 683684
auucucacacuccaacaaa

SEQ ID NO: 683686 - RNA, 19 nt, Artificial Sequence
  Description of Artificial Sequence: Synthetic oligonucleotide
  Sense strand starting at position 3004 of SEQ ID NO: 585991
ugguguuaauccuuagaaa

SEQ ID NO: 683687 - RNA, 19 nt, Artificial Sequence
  Description of Artificial Sequence: Synthetic oligonucleotide
  Antisense strand to SEQ ID NO: 683686
uuucuaaggauuaacacca

SEQ ID NO: 683688 - RNA, 19 nt, Artificial Sequence
  Description of Artificial Sequence: Synthetic oligonucleotide
  Sense strand starting at position 3090 of SEQ ID NO: 585991
aacgguuaugauuauaacu

SEQ ID NO: 683689 - RNA, 19 nt, Artificial Sequence
  Description of Artificial Sequence: Synthetic oligonucleotide
  Antisense strand to SEQ ID NO: 683688
aguuauaaucauaaccguu

SEQ ID NO: 683690 - RNA, 19 nt, Artificial Sequence
  Description of Artificial Sequence: Synthetic oligonucleotide
  Sense strand starting at position 3281 of SEQ ID NO: 585991
augaaaggucacuggcaga

SEQ ID NO: 683691 - RNA, 19 nt, Artificial Sequence
  Description of Artificial Sequence: Synthetic oligonucleotide
  Antisense strand to SEQ ID NO: 683690
ucugccagugaccuuucau

SEQ ID NO: 683692 - RNA, 19 nt, Artificial Sequence
  Description of Artificial Sequence: Synthetic oligonucleotide
  Sense strand starting at position 3358 of SEQ ID NO: 585991
aggacaauguguccagaau

SEQ ID NO: 683693 - RNA, 19 nt, Artificial Sequence
  Description of Artificial Sequence: Synthetic oligonucleotide
  Antisense strand to SEQ ID NO: 683692
auucuggacacauuguccu

SEQ ID NO: 683694 - RNA, 19 nt, Artificial Sequence
  Description of Artificial Sequence: Synthetic oligonucleotide
  Sense strand starting at position 3553 of SEQ ID NO: 585991
aacagcgugcuauaauuga

SEQ ID NO: 683695 - RNA, 19 nt, Artificial Sequence
  Description of Artificial Sequence: Synthetic oligonucleotide
  Antisense strand to SEQ ID NO: 683694
ucaauuauagcacgcuguu

SEQ ID NO: 683696 - RNA, 19 nt, Artificial Sequence
  Description of Artificial Sequence: Synthetic oligonucleotide
  Sense strand starting at position 3564 of SEQ ID NO: 585991
auaauugacuuugugacuu

SEQ ID NO: 683697 - RNA, 19 nt, Artificial Sequence
  Description of Artificial Sequence: Synthetic oligonucleotide
  Antisense strand to SEQ ID NO: 683696
aagucacaaagucaauuau

SEQ ID NO: 683698 - RNA, 19 nt, Artificial Sequence
  Description of Artificial Sequence: Synthetic oligonucleotide
  Sense strand starting at position 3568 of SEQ ID NO: 585991
uugacuuugugacuuugaa

SEQ ID NO: 683699 - RNA, 19 nt, Artificial Sequence
  Description of Artificial Sequence: Synthetic oligonucleotide
  Antisense strand to SEQ ID NO: 683698
uucaaagucacaaagucaa

SEQ ID NO: 683700 - RNA, 19 nt, Artificial Sequence
  Description of Artificial Sequence: Synthetic oligonucleotide
  Sense strand starting at position 109 of SEQ ID NO: 585992
gucugccuucccuagaaau

SEQ ID NO: 683701 - RNA, 19 nt, Artificial Sequence
  Description of Artificial Sequence: Synthetic oligonucleotide
  Antisense strand to SEQ ID NO: 683700
auuucuagggaaggcagac

SEQ ID NO: 683702 - RNA, 19 nt, Artificial Sequence
  Description of Artificial Sequence: Synthetic oligonucleotide
  Sense strand starting at position 493 of SEQ ID NO: 585992
agucccagagcucaauaaa

SEQ ID NO: 683703 - RNA, 19 nt, Artificial Sequence
  Description of Artificial Sequence: Synthetic oligonucleotide
  Antisense strand to SEQ ID NO: 683702
uuuauugagcucugggacu

SEQ ID NO: 683704 - RNA, 19 nt, Artificial Sequence
  Description of Artificial Sequence: Synthetic oligonucleotide
  Sense strand starting at position 1098 of SEQ ID NO: 585992
gccagacucuguuucuuaa

SEQ ID NO: 683705 - RNA, 19 nt, Artificial Sequence
  Description of Artificial Sequence: Synthetic oligonucleotide
  Antisense strand to SEQ ID NO: 683704
uuaagaaacagagucuggc

SEQ ID NO: 683706 - RNA, 19 nt, Artificial Sequence
  Description of Artificial Sequence: Synthetic oligonucleotide
  Sense strand starting at position 1318 of SEQ ID NO: 585992
cuuugaguucuagacccaa

SEQ ID NO: 683707 - RNA, 19 nt, Artificial Sequence
  Description of Artificial Sequence: Synthetic oligonucleotide
  Antisense strand to SEQ ID NO: 683706
uugggucuagaacucaaag

SEQ ID NO: 683708 - RNA, 19 nt, Artificial Sequence
  Description of Artificial Sequence: Synthetic oligonucleotide
  Sense strand starting at position 1410 of SEQ ID NO: 585992
guucuaacacguuauaguu

SEQ ID NO: 683709 - RNA, 19 nt, Artificial Sequence
  Description of Artificial Sequence: Synthetic oligonucleotide
  Antisense strand to SEQ ID NO: 683708
aacuauaacguguuagaac

SEQ ID NO: 683710 - RNA, 19 nt, Artificial Sequence
  Description of Artificial Sequence: Synthetic oligonucleotide
  Sense strand starting at position 1463 of SEQ ID NO: 585992
ucuguagcgggucacaaau

SEQ ID NO: 683711 - RNA, 19 nt, Artificial Sequence
  Description of Artificial Sequence: Synthetic oligonucleotide
  Antisense strand to SEQ ID NO: 683710
auuugugacccgcuacaga

SEQ ID NO: 683712 - RNA, 19 nt, Artificial Sequence
  Description of Artificial Sequence: Synthetic oligonucleotide
  Sense strand starting at position 1570 of SEQ ID NO: 585992
ucauguauugcucagucaa

SEQ ID NO: 683713 - RNA, 19 nt, Artificial Sequence
  Description of Artificial Sequence: Synthetic oligonucleotide
  Antisense strand to SEQ ID NO: 683712
uugacugagcaauacauga

SEQ ID NO: 683714 - RNA, 19 nt, Artificial Sequence
  Description of Artificial Sequence: Synthetic oligonucleotide
  Sense strand starting at position 1724 of SEQ ID NO: 585992
ccaagagugaugggucuga

SEQ ID NO: 683715 - RNA, 19 nt, Artificial Sequence
  Description of Artificial Sequence: Synthetic oligonucleotide
  Antisense strand to SEQ ID NO: 683714
ucagacccaucacucuugg

SEQ ID NO: 683716 - RNA, 19 nt, Artificial Sequence
  Description of Artificial Sequence: Synthetic oligonucleotide
  Sense strand starting at position 1728 of SEQ ID NO: 585992
gagugaugggucugacuuu

SEQ ID NO: 683717 - RNA, 19 nt, Artificial Sequence
  Description of Artificial Sequence: Synthetic oligonucleotide
  Antisense strand to SEQ ID NO: 683716
aaagucagacccaucacuc

SEQ ID NO: 683718 - RNA, 19 nt, Artificial Sequence
  Description of Artificial Sequence: Synthetic oligonucleotide
  Sense strand starting at position 2057 of SEQ ID NO: 585992
uguaauuacugcuuugaaa

SEQ ID NO: 683719 - RNA, 19 nt, Artificial Sequence
  Description of Artificial Sequence: Synthetic oligonucleotide
  Antisense strand to SEQ ID NO: 683718
uuucaaagcaguaauuaca

SEQ ID NO: 683720 - RNA, 19 nt, Artificial Sequence
  Description of Artificial Sequence: Synthetic oligonucleotide
  Sense strand starting at position 2095 of SEQ ID NO: 585992
gaaacuacggguuaugcuu

SEQ ID NO: 683721 - RNA, 19 nt, Artificial Sequence
  Description of Artificial Sequence: Synthetic oligonucleotide
  Antisense strand to SEQ ID NO: 683720
aagcauaacccguaguuuc

SEQ ID NO: 683722 - RNA, 19 nt, Artificial Sequence
  Description of Artificial Sequence: Synthetic oligonucleotide
  Sense strand starting at position 2305 of SEQ ID NO: 585992
ucugauagcuggcucaacu

SEQ ID NO: 683723 - RNA, 19 nt, Artificial Sequence
  Description of Artificial Sequence: Synthetic oligonucleotide
  Antisense strand to SEQ ID NO: 683722
aguugagccagcuaucaga

SEQ ID NO: 683724 - RNA, 19 nt, Artificial Sequence
  Description of Artificial Sequence: Synthetic oligonucleotide
  Sense strand starting at position 2316 of SEQ ID NO: 585992
gcucaacugauguaggcau

SEQ ID NO: 683725 - RNA, 19 nt, Artificial Sequence
  Description of Artificial Sequence: Synthetic oligonucleotide
  Antisense strand to SEQ ID NO: 683724
augccuacaucaguugagc

SEQ ID NO: 683726 - RNA, 19 nt, Artificial Sequence
  Description of Artificial Sequence: Synthetic oligonucleotide
  Sense strand starting at position 2318 of SEQ ID NO: 585992
ucaacugauguaggcauua

SEQ ID NO: 683727 - RNA, 19 nt, Artificial Sequence
  Description of Artificial Sequence: Synthetic oligonucleotide
  Antisense strand to SEQ ID NO: 683726
uaaugccuacaucaguuga

SEQ ID NO: 683728 - RNA, 19 nt, Artificial Sequence
  Description of Artificial Sequence: Synthetic oligonucleotide
  Sense strand starting at position 2356 of SEQ ID NO: 585992
ucuuuccuccacgaauuga

SEQ ID NO: 683729 - RNA, 19 nt, Artificial Sequence
  Description of Artificial Sequence: Synthetic oligonucleotide
  Antisense strand to SEQ ID NO: 683728
ucaauucguggaggaaaga

SEQ ID NO: 683730 - RNA, 19 nt, Artificial Sequence
  Description of Artificial Sequence: Synthetic oligonucleotide
  Sense strand starting at position 2366 of SEQ ID NO: 585992
acgaauugaugauauuuga

SEQ ID NO: 683731 - RNA, 19 nt, Artificial Sequence
  Description of Artificial Sequence: Synthetic oligonucleotide
  Antisense strand to SEQ ID NO: 683730
ucaaauaucaucaauucgu

SEQ ID NO: 683732 - RNA, 19 nt, Artificial Sequence
  Description of Artificial Sequence: Synthetic oligonucleotide
  Sense strand starting at position 2397 of SEQ ID NO: 585992
caggguuauguccaacuau

SEQ ID NO: 683733 - RNA, 19 nt, Artificial Sequence
  Description of Artificial Sequence: Synthetic oligonucleotide
  Antisense strand to SEQ ID NO: 683732
auaguuggacauaacccug

SEQ ID NO: 683734 - RNA, 19 nt, Artificial Sequence
  Description of Artificial Sequence: Synthetic oligonucleotide
  Sense strand starting at position 2516 of SEQ ID NO: 585992
gaagucucacuuggcuaaa

SEQ ID NO: 683735 - RNA, 19 nt, Artificial Sequence
  Description of Artificial Sequence: Synthetic oligonucleotide
  Antisense strand to SEQ ID NO: 683734
uuuagccaagugagacuuc

SEQ ID NO: 683736 - RNA, 19 nt, Artificial Sequence
  Description of Artificial Sequence: Synthetic oligonucleotide
  Sense strand starting at position 2560 of SEQ ID NO: 585992
ucuucugagcuccagagua

SEQ ID NO: 683737 - RNA, 19 nt, Artificial Sequence
  Description of Artificial Sequence: Synthetic oligonucleotide
  Antisense strand to SEQ ID NO: 683736
uacucuggagcucagaaga

SEQ ID NO: 683738 - RNA, 19 nt, Artificial Sequence
  Description of Artificial Sequence: Synthetic oligonucleotide
  Sense strand starting at position 2565 of SEQ ID NO: 585992
ugagcuccagaguagaauu

SEQ ID NO: 683739 - RNA, 19 nt, Artificial Sequence
  Description of Artificial Sequence: Synthetic oligonucleotide
  Antisense strand to SEQ ID NO: 683738
aauucuacucuggagcuca

SEQ ID NO: 683740 - RNA, 19 nt, Artificial Sequence
  Description of Artificial Sequence: Synthetic oligonucleotide
  Sense strand starting at position 2819 of SEQ ID NO: 585992
uuaaucacaucuucgaagu

SEQ ID NO: 683741 - RNA, 19 nt, Artificial Sequence
  Description of Artificial Sequence: Synthetic oligonucleotide
  Antisense strand to SEQ ID NO: 683740
acuucgaagaugugauuaa

SEQ ID NO: 683742 - RNA, 19 nt, Artificial Sequence
  Description of Artificial Sequence: Synthetic oligonucleotide
  Sense strand starting at position 2965 of SEQ ID NO: 585992
ucagguugguucccaaaca

SEQ ID NO: 683743 - RNA, 19 nt, Artificial Sequence
  Description of Artificial Sequence: Synthetic oligonucleotide
  Antisense strand to SEQ ID NO: 683742
uguuugggaaccaaccuga

SEQ ID NO: 683744 - RNA, 19 nt, Artificial Sequence
  Description of Artificial Sequence: Synthetic oligonucleotide
  Sense strand starting at position 3132 of SEQ ID NO: 585992
cugugaucagccugaguga

SEQ ID NO: 683745 - RNA, 19 nt, Artificial Sequence
  Description of Artificial Sequence: Synthetic oligonucleotide
  Antisense strand to SEQ ID NO: 683744
ucacucaggcugaucacag

SEQ ID NO: 683746 - RNA, 19 nt, Artificial Sequence
  Description of Artificial Sequence: Synthetic oligonucleotide
  Sense strand starting at position 3209 of SEQ ID NO: 585992
uaaaguguauguccaagga

SEQ ID NO: 683747 - RNA, 19 nt, Artificial Sequence
  Description of Artificial Sequence: Synthetic oligonucleotide
  Antisense strand to SEQ ID NO: 683746
uccuuggacauacacuuua

SEQ ID NO: 683748 - RNA, 19 nt, Artificial Sequence
  Description of Artificial Sequence: Synthetic oligonucleotide
  Sense strand starting at position 3213 of SEQ ID NO: 585992
guguauguccaaggaauca

SEQ ID NO: 683749 - RNA, 19 nt, Artificial Sequence
  Description of Artificial Sequence: Synthetic oligonucleotide
  Antisense strand to SEQ ID NO: 683748
ugauuccuuggacauacac

SEQ ID NO: 683750 - RNA, 19 nt, Artificial Sequence
  Description of Artificial Sequence: Synthetic oligonucleotide
  Sense strand starting at position 3334 of SEQ ID NO: 585992
ccaaauaauuuggagcuua

SEQ ID NO: 683751 - RNA, 19 nt, Artificial Sequence
  Description of Artificial Sequence: Synthetic oligonucleotide
  Antisense strand to SEQ ID NO: 683750
uaagcuccaaauuauuugg

SEQ ID NO: 683752 - RNA, 19 nt, Artificial Sequence
  Description of Artificial Sequence: Synthetic oligonucleotide
  Sense strand starting at position 3434 of SEQ ID NO: 585992
guggcauccucauucuaaa

SEQ ID NO: 683753 - RNA, 19 nt, Artificial Sequence
  Description of Artificial Sequence: Synthetic oligonucleotide
  Antisense strand to SEQ ID NO: 683752
uuuagaaugaggaugccac

SEQ ID NO: 683754 - RNA, 19 nt, Artificial Sequence
  Description of Artificial Sequence: Synthetic oligonucleotide
  Sense strand starting at position 3507 of SEQ ID NO: 585992
ggccucacugaauaauauu

SEQ ID NO: 683755 - RNA, 19 nt, Artificial Sequence
  Description of Artificial Sequence: Synthetic oligonucleotide
  Antisense strand to SEQ ID NO: 683754
aauauuauucagugaggcc

SEQ ID NO: 683756 - RNA, 19 nt, Artificial Sequence
  Description of Artificial Sequence: Synthetic oligonucleotide
  Sense strand starting at position 3720 of SEQ ID NO: 585992
agagguucuugaucauugu

SEQ ID NO: 683757 - RNA, 19 nt, Artificial Sequence
  Description of Artificial Sequence: Synthetic oligonucleotide
  Antisense strand to SEQ ID NO: 683756
acaaugaucaagaaccucu

SEQ ID NO: 683758 - RNA, 19 nt, Artificial Sequence
  Description of Artificial Sequence: Synthetic oligonucleotide
  Sense strand starting at position 3721 of SEQ ID NO: 585992
gagguucuugaucauuguu

SEQ ID NO: 683759 - RNA, 19 nt, Artificial Sequence
  Description of Artificial Sequence: Synthetic oligonucleotide
  Antisense strand to SEQ ID NO: 683758
aacaaugaucaagaaccuc

SEQ ID NO: 683760 - RNA, 19 nt, Artificial Sequence
  Description of Artificial Sequence: Synthetic oligonucleotide
  Sense strand starting at position 3729 of SEQ ID NO: 585992
ugaucauuguuccuaguua

SEQ ID NO: 683761 - RNA, 19 nt, Artificial Sequence
  Description of Artificial Sequence: Synthetic oligonucleotide
  Antisense strand to SEQ ID NO: 683760
uaacuaggaacaaugauca

SEQ ID NO: 683762 - RNA, 19 nt, Artificial Sequence
  Description of Artificial Sequence: Synthetic oligonucleotide
  Sense strand starting at position 3736 of SEQ ID NO: 585992
uguuccuaguuaucuugau

SEQ ID NO: 683763 - RNA, 19 nt, Artificial Sequence
  Description of Artificial Sequence: Synthetic oligonucleotide
  Antisense strand to SEQ ID NO: 683762
aucaagauaacuaggaaca

SEQ ID NO: 683764 - RNA, 19 nt, Artificial Sequence
  Description of Artificial Sequence: Synthetic oligonucleotide
  Sense strand starting at position 3740 of SEQ ID NO: 585992
ccuaguuaucuugaucauu

SEQ ID NO: 683765 - RNA, 19 nt, Artificial Sequence
  Description of Artificial Sequence: Synthetic oligonucleotide
  Antisense strand to SEQ ID NO: 683764
aaugaucaagauaacuagg

SEQ ID NO: 683766 - RNA, 19 nt, Artificial Sequence
  Description of Artificial Sequence: Synthetic oligonucleotide
  Sense strand starting at position 3752 of SEQ ID NO: 585992
gaucauuguguccaaguua

SEQ ID NO: 683767 - RNA, 19 nt, Artificial Sequence
  Description of Artificial Sequence: Synthetic oligonucleotide
  Antisense strand to SEQ ID NO: 683766
uaacuuggacacaaugauc

SEQ ID NO: 683768 - RNA, 19 nt, Artificial Sequence
  Description of Artificial Sequence: Synthetic oligonucleotide
  Sense strand starting at position 3760 of SEQ ID NO: 585992
uguccaaguuauuccauca

SEQ ID NO: 683769 - RNA, 19 nt, Artificial Sequence
  Description of Artificial Sequence: Synthetic oligonucleotide
  Antisense strand to SEQ ID NO: 683768
ugauggaauaacuuggaca

SEQ ID NO: 683770 - RNA, 19 nt, Artificial Sequence
  Description of Artificial Sequence: Synthetic oligonucleotide
  Sense strand starting at position 3767 of SEQ ID NO: 585992
guuauuccaucauuguuaa

SEQ ID NO: 683771 - RNA, 19 nt, Artificial Sequence
  Description of Artificial Sequence: Synthetic oligonucleotide
  Antisense strand to SEQ ID NO: 683770
uuaacaaugauggaauaac

SEQ ID NO: 683772 - RNA, 19 nt, Artificial Sequence
  Description of Artificial Sequence: Synthetic oligonucleotide
  Sense strand starting at position 3770 of SEQ ID NO: 585992
auuccaucauuguuaagga

SEQ ID NO: 683773 - RNA, 19 nt, Artificial Sequence
  Description of Artificial Sequence: Synthetic oligonucleotide
  Antisense strand to SEQ ID NO: 683772
uccuuaacaaugauggaau

SEQ ID NO: 683774 - RNA, 19 nt, Artificial Sequence
  Description of Artificial Sequence: Synthetic oligonucleotide
  Sense strand starting at position 3854 of SEQ ID NO: 585992
uuuacuagugcugaguuga

SEQ ID NO: 683775 - RNA, 19 nt, Artificial Sequence
  Description of Artificial Sequence: Synthetic oligonucleotide
  Antisense strand to SEQ ID NO: 683774
ucaacucagcacuaguaaa

SEQ ID NO: 683776 - RNA, 19 nt, Artificial Sequence
  Description of Artificial Sequence: Synthetic oligonucleotide
  Sense strand starting at position 3859 of SEQ ID NO: 585992
uagugcugaguugauauga

SEQ ID NO: 683777 - RNA, 19 nt, Artificial Sequence
  Description of Artificial Sequence: Synthetic oligonucleotide
  Antisense strand to SEQ ID NO: 683776
ucauaucaacucagcacua

SEQ ID NO: 683778 - RNA, 19 nt, Artificial Sequence
  Description of Artificial Sequence: Synthetic oligonucleotide
  Sense strand starting at position 3918 of SEQ ID NO: 585992
acucauguguuagugaaag

SEQ ID NO: 683779 - RNA, 19 nt, Artificial Sequence
  Description of Artificial Sequence: Synthetic oligonucleotide
  Antisense strand to SEQ ID NO: 683778
cuuucacuaacacaugagu

SEQ ID NO: 683780 - RNA, 19 nt, Artificial Sequence
  Description of Artificial Sequence: Synthetic oligonucleotide
  Sense strand starting at position 59 of SEQ ID NO: 585993
acaugacuuucugagauuu

SEQ ID NO: 683781 - RNA, 19 nt, Artificial Sequence
  Description of Artificial Sequence: Synthetic oligonucleotide
  Antisense strand to SEQ ID NO: 683780
aaaucucagaaagucaugu

SEQ ID NO: 683782 - RNA, 19 nt, Artificial Sequence
  Description of Artificial Sequence: Synthetic oligonucleotide
  Sense strand starting at position 70 of SEQ ID NO: 585993
ugagauuucugccaaccca

SEQ ID NO: 683783 - RNA, 19 nt, Artificial Sequence
  Description of Artificial Sequence: Synthetic oligonucleotide
  Antisense strand to SEQ ID NO: 683782
uggguuggcagaaaucuca

SEQ ID NO: 683784 - RNA, 19 nt, Artificial Sequence
  Description of Artificial Sequence: Synthetic oligonucleotide
  Sense strand starting at position 246 of SEQ ID NO: 585993
gguggcuaaagagauguau

SEQ ID NO: 683785 - RNA, 19 nt, Artificial Sequence
  Description of Artificial Sequence: Synthetic oligonucleotide
  Antisense strand to SEQ ID NO: 683784
auacaucucuuuagccacc

SEQ ID NO: 683786 - RNA, 19 nt, Artificial Sequence
  Description of Artificial Sequence: Synthetic oligonucleotide
  Sense strand starting at position 289 of SEQ ID NO: 585993
ccaccuuuccuugggauga

SEQ ID NO: 683787 - RNA, 19 nt, Artificial Sequence
  Description of Artificial Sequence: Synthetic oligonucleotide
  Antisense strand to SEQ ID NO: 683786
ucaucccaaggaaaggugg

SEQ ID NO: 683788 - RNA, 19 nt, Artificial Sequence
  Description of Artificial Sequence: Synthetic oligonucleotide
  Sense strand starting at position 293 of SEQ ID NO: 585993
cuuuccuugggaugaaaua

SEQ ID NO: 683789 - RNA, 19 nt, Artificial Sequence
  Description of Artificial Sequence: Synthetic oligonucleotide
  Antisense strand to SEQ ID NO: 683788
uauuucaucccaaggaaag

SEQ ID NO: 683790 - RNA, 19 nt, Artificial Sequence
  Description of Artificial Sequence: Synthetic oligonucleotide
  Sense strand starting at position 472 of SEQ ID NO: 585993
ugacuaagcugagcuguuu

SEQ ID NO: 683791 - RNA, 19 nt, Artificial Sequence
  Description of Artificial Sequence: Synthetic oligonucleotide
  Antisense strand to SEQ ID NO: 683790
aaacagcucagcuuaguca

SEQ ID NO: 683792 - RNA, 19 nt, Artificial Sequence
  Description of Artificial Sequence: Synthetic oligonucleotide
  Sense strand starting at position 480 of SEQ ID NO: 585993
cugagcuguuuccuccaau

SEQ ID NO: 683793 - RNA, 19 nt, Artificial Sequence
  Description of Artificial Sequence: Synthetic oligonucleotide
  Antisense strand to SEQ ID NO: 683792
auuggaggaaacagcucag

SEQ ID NO: 683794 - RNA, 19 nt, Artificial Sequence
  Description of Artificial Sequence: Synthetic oligonucleotide
  Sense strand starting at position 481 of SEQ ID NO: 585993
ugagcuguuuccuccaauc

SEQ ID NO: 683795 - RNA, 19 nt, Artificial Sequence
  Description of Artificial Sequence: Synthetic oligonucleotide
  Antisense strand to SEQ ID NO: 683794
gauuggaggaaacagcuca

SEQ ID NO: 683796 - RNA, 19 nt, Artificial Sequence
  Description of Artificial Sequence: Synthetic oligonucleotide
  Sense strand starting at position 722 of SEQ ID NO: 585993
uuuccaguccugggacagu

SEQ ID NO: 683797 - RNA, 19 nt, Artificial Sequence
  Description of Artificial Sequence: Synthetic oligonucleotide
  Antisense strand to SEQ ID NO: 683796
acugucccaggacuggaaa

SEQ ID NO: 683798 - RNA, 19 nt, Artificial Sequence
  Description of Artificial Sequence: Synthetic oligonucleotide
  Sense strand starting at position 740 of SEQ ID NO: 585993
uggaucuguuagguugaua

SEQ ID NO: 683799 - RNA, 19 nt, Artificial Sequence
  Description of Artificial Sequence: Synthetic oligonucleotide
  Antisense strand to SEQ ID NO: 683798
uaucaaccuaacagaucca

SEQ ID NO: 683800 - RNA, 19 nt, Artificial Sequence
  Description of Artificial Sequence: Synthetic oligonucleotide
  Sense strand starting at position 902 of SEQ ID NO: 585993
ggacuaugcucagcugaga

SEQ ID NO: 683801 - RNA, 19 nt, Artificial Sequence
  Description of Artificial Sequence: Synthetic oligonucleotide
  Antisense strand to SEQ ID NO: 683800
ucucagcugagcauagucc

SEQ ID NO: 683802 - RNA, 19 nt, Artificial Sequence
  Description of Artificial Sequence: Synthetic oligonucleotide
  Sense strand starting at position 1011 of SEQ ID NO: 585993
agggcuuaugcaggaguuu

SEQ ID NO: 683803 - RNA, 19 nt, Artificial Sequence
  Description of Artificial Sequence: Synthetic oligonucleotide
  Antisense strand to SEQ ID NO: 683802
aaacuccugcauaagcccu

SEQ ID NO: 683804 - RNA, 19 nt, Artificial Sequence
  Description of Artificial Sequence: Synthetic oligonucleotide
  Sense strand starting at position 1030 of SEQ ID NO: 585993
guaugaauaucugucagag

SEQ ID NO: 683805 - RNA, 19 nt, Artificial Sequence
  Description of Artificial Sequence: Synthetic oligonucleotide
  Antisense strand to SEQ ID NO: 683804
cucugacagauauucauac

SEQ ID NO: 683806 - RNA, 19 nt, Artificial Sequence
  Description of Artificial Sequence: Synthetic oligonucleotide
  Sense strand starting at position 1036 of SEQ ID NO: 585993
auaucugucagagagugca

SEQ ID NO: 683807 - RNA, 19 nt, Artificial Sequence
  Description of Artificial Sequence: Synthetic oligonucleotide
  Antisense strand to SEQ ID NO: 683806
ugcacucucugacagauau

SEQ ID NO: 683808 - RNA, 19 nt, Artificial Sequence
  Description of Artificial Sequence: Synthetic oligonucleotide
  Sense strand starting at position 1111 of SEQ ID NO: 585993
cucaucauggccugugaau

SEQ ID NO: 683809 - RNA, 19 nt, Artificial Sequence
  Description of Artificial Sequence: Synthetic oligonucleotide
  Antisense strand to SEQ ID NO: 683808
auucacaggccaugaugag

SEQ ID NO: 683810 - RNA, 19 nt, Artificial Sequence
  Description of Artificial Sequence: Synthetic oligonucleotide
  Sense strand starting at position 1113 of SEQ ID NO: 585993
caucauggccugugaauac

SEQ ID NO: 683811 - RNA, 19 nt, Artificial Sequence
  Description of Artificial Sequence: Synthetic oligonucleotide
  Antisense strand to SEQ ID NO: 683810
guauucacaggccaugaug

SEQ ID NO: 683812 - RNA, 19 nt, Artificial Sequence
  Description of Artificial Sequence: Synthetic oligonucleotide
  Sense strand starting at position 1123 of SEQ ID NO: 585993
ugugaauacaaguguugau

SEQ ID NO: 683813 - RNA, 19 nt, Artificial Sequence
  Description of Artificial Sequence: Synthetic oligonucleotide
  Antisense strand to SEQ ID NO: 683812
aucaacacuuguauucaca

SEQ ID NO: 683814 - RNA, 19 nt, Artificial Sequence
  Description of Artificial Sequence: Synthetic oligonucleotide
  Sense strand starting at position 1133 of SEQ ID NO: 585993
aguguugauguguaacucu

SEQ ID NO: 683815 - RNA, 19 nt, Artificial Sequence
  Description of Artificial Sequence: Synthetic oligonucleotide
  Antisense strand to SEQ ID NO: 683814
agaguuacacaucaacacu

SEQ ID NO: 683816 - RNA, 19 nt, Artificial Sequence
  Description of Artificial Sequence: Synthetic oligonucleotide
  Sense strand starting at position 1140 of SEQ ID NO: 585993
auguguaacucugcaaggu

SEQ ID NO: 683817 - RNA, 19 nt, Artificial Sequence
  Description of Artificial Sequence: Synthetic oligonucleotide
  Antisense strand to SEQ ID NO: 683816
accuugcagaguuacacau

SEQ ID NO: 683818 - RNA, 19 nt, Artificial Sequence
  Description of Artificial Sequence: Synthetic oligonucleotide
  Sense strand starting at position 1313 of SEQ ID NO: 585993
gauagagacccgugagaga

SEQ ID NO: 683819 - RNA, 19 nt, Artificial Sequence
  Description of Artificial Sequence: Synthetic oligonucleotide
  Antisense strand to SEQ ID NO: 683818
ucucucacgggucucuauc

SEQ ID NO: 683820 - RNA, 19 nt, Artificial Sequence
  Description of Artificial Sequence: Synthetic oligonucleotide
  Sense strand starting at position 1467 of SEQ ID NO: 585993
ccgaaugauucgucaggga

SEQ ID NO: 683821 - RNA, 19 nt, Artificial Sequence
  Description of Artificial Sequence: Synthetic oligonucleotide
  Antisense strand to SEQ ID NO: 683820
ucccugacgaaucauucgg

SEQ ID NO: 683822 - RNA, 19 nt, Artificial Sequence
  Description of Artificial Sequence: Synthetic oligonucleotide
  Sense strand starting at position 1471 of SEQ ID NO: 585993
augauucgucagggaugac

SEQ ID NO: 683823 - RNA, 19 nt, Artificial Sequence
  Description of Artificial Sequence: Synthetic oligonucleotide
  Antisense strand to SEQ ID NO: 683822
gucaucccugacgaaucau

SEQ ID NO: 683824 - RNA, 19 nt, Artificial Sequence
  Description of Artificial Sequence: Synthetic oligonucleotide
  Sense strand starting at position 1472 of SEQ ID NO: 585993
ugauucgucagggaugaca

SEQ ID NO: 683825 - RNA, 19 nt, Artificial Sequence
  Description of Artificial Sequence: Synthetic oligonucleotide
  Antisense strand to SEQ ID NO: 683824
ugucaucccugacgaauca

SEQ ID NO: 683826 - RNA, 19 nt, Artificial Sequence
  Description of Artificial Sequence: Synthetic oligonucleotide
  Sense strand starting at position 2535 of SEQ ID NO: 585993
guggacaaacucugccauu

SEQ ID NO: 683827 - RNA, 19 nt, Artificial Sequence
  Description of Artificial Sequence: Synthetic oligonucleotide
  Antisense strand to SEQ ID NO: 683826
aauggcagaguuuguccac

SEQ ID NO: 683828 - RNA, 19 nt, Artificial Sequence
  Description of Artificial Sequence: Synthetic oligonucleotide
  Sense strand starting at position 2577 of SEQ ID NO: 585993
gauggacacucuuuacugu

SEQ ID NO: 683829 - RNA, 19 nt, Artificial Sequence
  Description of Artificial Sequence: Synthetic oligonucleotide
  Antisense strand to SEQ ID NO: 683828
acaguaaagaguguccauc

SEQ ID NO: 683830 - RNA, 19 nt, Artificial Sequence
  Description of Artificial Sequence: Synthetic oligonucleotide
  Sense strand starting at position 2799 of SEQ ID NO: 585993
ggcacagucucaguuuauu

SEQ ID NO: 683831 - RNA, 19 nt, Artificial Sequence
  Description of Artificial Sequence: Synthetic oligonucleotide
  Antisense strand to SEQ ID NO: 683830
aauaaacugagacugugcc

SEQ ID NO: 683832 - RNA, 19 nt, Artificial Sequence
  Description of Artificial Sequence: Synthetic oligonucleotide
  Sense strand starting at position 3474 of SEQ ID NO: 585993
ugcuuuaauccugaugaca

SEQ ID NO: 683833 - RNA, 19 nt, Artificial Sequence
  Description of Artificial Sequence: Synthetic oligonucleotide
  Antisense strand to SEQ ID NO: 683832
ugucaucaggauuaaagca

SEQ ID NO: 683834 - RNA, 19 nt, Artificial Sequence
  Description of Artificial Sequence: Synthetic oligonucleotide
  Sense strand starting at position 3559 of SEQ ID NO: 585993
gguuaaguaauaugcauug

SEQ ID NO: 683835 - RNA, 19 nt, Artificial Sequence
  Description of Artificial Sequence: Synthetic oligonucleotide
  Antisense strand to SEQ ID NO: 683834
caaugcauauuacuuaacc

SEQ ID NO: 683836 - RNA, 19 nt, Artificial Sequence
  Description of Artificial Sequence: Synthetic oligonucleotide
  Sense strand starting at position 3564 of SEQ ID NO: 585993
aguaauaugcauuggguua

SEQ ID NO: 683837 - RNA, 19 nt, Artificial Sequence
  Description of Artificial Sequence: Synthetic oligonucleotide
  Antisense strand to SEQ ID NO: 683836
uaacccaaugcauauuacu

SEQ ID NO: 683838 - RNA, 19 nt, Artificial Sequence
  Description of Artificial Sequence: Synthetic oligonucleotide
  Sense strand starting at position 3565 of SEQ ID NO: 585993
guaauaugcauuggguuac

SEQ ID NO: 683839 - RNA, 19 nt, Artificial Sequence
  Description of Artificial Sequence: Synthetic oligonucleotide
  Antisense strand to SEQ ID NO: 683838
guaacccaaugcauauuac

SEQ ID NO: 683840 - RNA, 19 nt, Artificial Sequence
  Description of Artificial Sequence: Synthetic oligonucleotide
  Sense strand starting at position 3623 of SEQ ID NO: 585993
ucuggaguccaugguucua

SEQ ID NO: 683841 - RNA, 19 nt, Artificial Sequence
  Description of Artificial Sequence: Synthetic oligonucleotide
  Antisense strand to SEQ ID NO: 683840
uagaaccauggacuccaga

SEQ ID NO: 683842 - RNA, 19 nt, Artificial Sequence
  Description of Artificial Sequence: Synthetic oligonucleotide
  Sense strand starting at position 3625 of SEQ ID NO: 585993
uggaguccaugguucuaau

SEQ ID NO: 683843 - RNA, 19 nt, Artificial Sequence
  Description of Artificial Sequence: Synthetic oligonucleotide
  Antisense strand to SEQ ID NO: 683842
auuagaaccauggacucca

SEQ ID NO: 683844 - RNA, 19 nt, Artificial Sequence
  Description of Artificial Sequence: Synthetic oligonucleotide
  Sense strand starting at position 3662 of SEQ ID NO: 585993
gaucauugagccugcaaga

SEQ ID NO: 683845 - RNA, 19 nt, Artificial Sequence
  Description of Artificial Sequence: Synthetic oligonucleotide
  Antisense strand to SEQ ID NO: 683844
ucuugcaggcucaaugauc

SEQ ID NO: 683846 - RNA, 19 nt, Artificial Sequence
  Description of Artificial Sequence: Synthetic oligonucleotide
  Sense strand starting at position 3717 of SEQ ID NO: 585993
acuguaauuugaggaauua

SEQ ID NO: 683847 - RNA, 19 nt, Artificial Sequence
  Description of Artificial Sequence: Synthetic oligonucleotide
  Antisense strand to SEQ ID NO: 683846
uaauuccucaaauuacagu

SEQ ID NO: 683848 - RNA, 19 nt, Artificial Sequence
  Description of Artificial Sequence: Synthetic oligonucleotide
  Sense strand starting at position 3736 of SEQ ID NO: 585993
guagaauuaguagaaguuu

SEQ ID NO: 683849 - RNA, 19 nt, Artificial Sequence
  Description of Artificial Sequence: Synthetic oligonucleotide
  Antisense strand to SEQ ID NO: 683848
aaacuucuacuaauucuac

SEQ ID NO: 683850 - RNA, 19 nt, Artificial Sequence
  Description of Artificial Sequence: Synthetic oligonucleotide
  Sense strand starting at position 3946 of SEQ ID NO: 585993
uccagaauguaggugcuua

SEQ ID NO: 683851 - RNA, 19 nt, Artificial Sequence
  Description of Artificial Sequence: Synthetic oligonucleotide
  Antisense strand to SEQ ID NO: 683850
uaagcaccuacauucugga

SEQ ID NO: 683852 - RNA, 19 nt, Artificial Sequence
  Description of Artificial Sequence: Synthetic oligonucleotide
  Sense strand starting at position 3947 of SEQ ID NO: 585993
ccagaauguaggugcuuau

SEQ ID NO: 683853 - RNA, 19 nt, Artificial Sequence
  Description of Artificial Sequence: Synthetic oligonucleotide
  Antisense strand to SEQ ID NO: 683852
auaagcaccuacauucugg

SEQ ID NO: 683854 - RNA, 19 nt, Artificial Sequence
  Description of Artificial Sequence: Synthetic oligonucleotide
  Sense strand starting at position 3950 of SEQ ID NO: 585993
gaauguaggugcuuauucu

SEQ ID NO: 683855 - RNA, 19 nt, Artificial Sequence
  Description of Artificial Sequence: Synthetic oligonucleotide
  Antisense strand to SEQ ID NO: 683854
agaauaagcaccuacauuc

SEQ ID NO: 683856 - RNA, 19 nt, Artificial Sequence
  Description of Artificial Sequence: Synthetic oligonucleotide
  Sense strand starting at position 3956 of SEQ ID NO: 585993
aggugcuuauucucccaga

SEQ ID NO: 683857 - RNA, 19 nt, Artificial Sequence
  Description of Artificial Sequence: Synthetic oligonucleotide
  Antisense strand to SEQ ID NO: 683856
ucugggagaauaagcaccu

SEQ ID NO: 683858 - RNA, 19 nt, Artificial Sequence
  Description of Artificial Sequence: Synthetic oligonucleotide
  Sense strand starting at position 3957 of SEQ ID NO: 585993
ggugcuuauucucccagau

SEQ ID NO: 683859 - RNA, 19 nt, Artificial Sequence
  Description of Artificial Sequence: Synthetic oligonucleotide
  Antisense strand to SEQ ID NO: 683858
aucugggagaauaagcacc

SEQ ID NO: 683860 - RNA, 19 nt, Artificial Sequence
  Description of Artificial Sequence: Synthetic oligonucleotide
  Sense strand starting at position 78 of SEQ ID NO: 585994
acucaauugccuugaugua

SEQ ID NO: 683861 - RNA, 19 nt, Artificial Sequence
  Description of Artificial Sequence: Synthetic oligonucleotide
  Antisense strand to SEQ ID NO: 683860
uacaucaaggcaauugagu

SEQ ID NO: 683862 - RNA, 19 nt, Artificial Sequence
  Description of Artificial Sequence: Synthetic oligonucleotide
  Sense strand starting at position 191 of SEQ ID NO: 585994
acagucagccaccaugauu

SEQ ID NO: 683863 - RNA, 19 nt, Artificial Sequence
  Description of Artificial Sequence: Synthetic oligonucleotide
  Antisense strand to SEQ ID NO: 683862
aaucaugguggcugacugu

SEQ ID NO: 683864 - RNA, 19 nt, Artificial Sequence
  Description of Artificial Sequence: Synthetic oligonucleotide
  Sense strand starting at position 330 of SEQ ID NO: 585994
ucaggcuucugagcuaaua

SEQ ID NO: 683865 - RNA, 19 nt, Artificial Sequence
  Description of Artificial Sequence: Synthetic oligonucleotide
  Antisense strand to SEQ ID NO: 683864
uauuagcucagaagccuga

SEQ ID NO: 683866 - RNA, 19 nt, Artificial Sequence
  Description of Artificial Sequence: Synthetic oligonucleotide
  Sense strand starting at position 365 of SEQ ID NO: 585994
aguauuaaacucugggcau

SEQ ID NO: 683867 - RNA, 19 nt, Artificial Sequence
  Description of Artificial Sequence: Synthetic oligonucleotide
  Antisense strand to SEQ ID NO: 683866
augcccagaguuuaauacu

SEQ ID NO: 683868 - RNA, 19 nt, Artificial Sequence
  Description of Artificial Sequence: Synthetic oligonucleotide
  Sense strand starting at position 885 of SEQ ID NO: 585994
cuauuauuaggcuaguauu

SEQ ID NO: 683869 - RNA, 19 nt, Artificial Sequence
  Description of Artificial Sequence: Synthetic oligonucleotide
  Antisense strand to SEQ ID NO: 683868
aauacuagccuaauaauag

SEQ ID NO: 683870 - RNA, 19 nt, Artificial Sequence
  Description of Artificial Sequence: Synthetic oligonucleotide
  Sense strand starting at position 895 of SEQ ID NO: 585994
gcuaguauuaauggaggua

SEQ ID NO: 683871 - RNA, 19 nt, Artificial Sequence
  Description of Artificial Sequence: Synthetic oligonucleotide
  Antisense strand to SEQ ID NO: 683870
uaccuccauuaauacuagc

SEQ ID NO: 683872 - RNA, 19 nt, Artificial Sequence
  Description of Artificial Sequence: Synthetic oligonucleotide
  Sense strand starting at position 898 of SEQ ID NO: 585994
aguauuaauggagguaagu

SEQ ID NO: 683873 - RNA, 19 nt, Artificial Sequence
  Description of Artificial Sequence: Synthetic oligonucleotide
  Antisense strand to SEQ ID NO: 683872
acuuaccuccauuaauacu

SEQ ID NO: 683874 - RNA, 19 nt, Artificial Sequence
  Description of Artificial Sequence: Synthetic oligonucleotide
  Sense strand starting at position 928 of SEQ ID NO: 585994
agguacacaucuuuguaau

SEQ ID NO: 683875 - RNA, 19 nt, Artificial Sequence
  Description of Artificial Sequence: Synthetic oligonucleotide
  Antisense strand to SEQ ID NO: 683874
auuacaaagauguguaccu

SEQ ID NO: 683876 - RNA, 19 nt, Artificial Sequence
  Description of Artificial Sequence: Synthetic oligonucleotide
  Sense strand starting at position 929 of SEQ ID NO: 585994
gguacacaucuuuguaauu

SEQ ID NO: 683877 - RNA, 19 nt, Artificial Sequence
  Description of Artificial Sequence: Synthetic oligonucleotide
  Antisense strand to SEQ ID NO: 683876
aauuacaaagauguguacc

SEQ ID NO: 683878 - RNA, 19 nt, Artificial Sequence
  Description of Artificial Sequence: Synthetic oligonucleotide
  Sense strand starting at position 1003 of SEQ ID NO: 585994
gacgucacacuguagaaau

SEQ ID NO: 683879 - RNA, 19 nt, Artificial Sequence
  Description of Artificial Sequence: Synthetic oligonucleotide
  Antisense strand to SEQ ID NO: 683878
auuucuacagugugacguc

SEQ ID NO: 683880 - RNA, 19 nt, Artificial Sequence
  Description of Artificial Sequence: Synthetic oligonucleotide
  Sense strand starting at position 1053 of SEQ ID NO: 585994
gauagaguguuugcuugga

SEQ ID NO: 683881 - RNA, 19 nt, Artificial Sequence
  Description of Artificial Sequence: Synthetic oligonucleotide
  Antisense strand to SEQ ID NO: 683880
uccaagcaaacacucuauc

SEQ ID NO: 683882 - RNA, 19 nt, Artificial Sequence
  Description of Artificial Sequence: Synthetic oligonucleotide
  Sense strand starting at position 1089 of SEQ ID NO: 585994
acauaaagauugcuuggau

SEQ ID NO: 683883 - RNA, 19 nt, Artificial Sequence
  Description of Artificial Sequence: Synthetic oligonucleotide
  Antisense strand to SEQ ID NO: 683882
auccaagcaaucuuuaugu

SEQ ID NO: 683884 - RNA, 19 nt, Artificial Sequence
  Description of Artificial Sequence: Synthetic oligonucleotide
  Sense strand starting at position 1128 of SEQ ID NO: 585994
aaagaauucguuuggcaau

SEQ ID NO: 683885 - RNA, 19 nt, Artificial Sequence
  Description of Artificial Sequence: Synthetic oligonucleotide
  Antisense strand to SEQ ID NO: 683884
auugccaaacgaauucuuu

SEQ ID NO: 683886 - RNA, 19 nt, Artificial Sequence
  Description of Artificial Sequence: Synthetic oligonucleotide
  Sense strand starting at position 1135 of SEQ ID NO: 585994
ucguuuggcaaugggaaua

SEQ ID NO: 683887 - RNA, 19 nt, Artificial Sequence
  Description of Artificial Sequence: Synthetic oligonucleotide
  Antisense strand to SEQ ID NO: 683886
uauucccauugccaaacga

SEQ ID NO: 683888 - RNA, 19 nt, Artificial Sequence
  Description of Artificial Sequence: Synthetic oligonucleotide
  Sense strand starting at position 1170 of SEQ ID NO: 585994
ccugcuuuacuugaguaaa

SEQ ID NO: 683889 - RNA, 19 nt, Artificial Sequence
  Description of Artificial Sequence: Synthetic oligonucleotide
  Antisense strand to SEQ ID NO: 683888
uuuacucaaguaaagcagg

SEQ ID NO: 683890 - RNA, 19 nt, Artificial Sequence
  Description of Artificial Sequence: Synthetic oligonucleotide
  Sense strand starting at position 1172 of SEQ ID NO: 585994
ugcuuuacuugaguaaauc

SEQ ID NO: 683891 - RNA, 19 nt, Artificial Sequence
  Description of Artificial Sequence: Synthetic oligonucleotide
  Antisense strand to SEQ ID NO: 683890
gauuuacucaaguaaagca

SEQ ID NO: 683892 - RNA, 19 nt, Artificial Sequence
  Description of Artificial Sequence: Synthetic oligonucleotide
  Sense strand starting at position 1173 of SEQ ID NO: 585994
gcuuuacuugaguaaaucu

SEQ ID NO: 683893 - RNA, 19 nt, Artificial Sequence
  Description of Artificial Sequence: Synthetic oligonucleotide
  Antisense strand to SEQ ID NO: 683892
agauuuacucaaguaaagc

SEQ ID NO: 683894 - RNA, 19 nt, Artificial Sequence
  Description of Artificial Sequence: Synthetic oligonucleotide
  Sense strand starting at position 1180 of SEQ ID NO: 585994
uugaguaaaucuuccagug

SEQ ID NO: 683895 - RNA, 19 nt, Artificial Sequence
  Description of Artificial Sequence: Synthetic oligonucleotide
  Antisense strand to SEQ ID NO: 683894
cacuggaagauuuacucaa

SEQ ID NO: 683896 - RNA, 19 nt, Artificial Sequence
  Description of Artificial Sequence: Synthetic oligonucleotide
  Sense strand starting at position 1258 of SEQ ID NO: 585994
gcagauuuauucuugugca

SEQ ID NO: 683897 - RNA, 19 nt, Artificial Sequence
  Description of Artificial Sequence: Synthetic oligonucleotide
  Antisense strand to SEQ ID NO: 683896
ugcacaagaauaaaucugc

SEQ ID NO: 683898 - RNA, 19 nt, Artificial Sequence
  Description of Artificial Sequence: Synthetic oligonucleotide
  Sense strand starting at position 1366 of SEQ ID NO: 585994
guguuuguucaauaaagug

SEQ ID NO: 683899 - RNA, 19 nt, Artificial Sequence
  Description of Artificial Sequence: Synthetic oligonucleotide
  Antisense strand to SEQ ID NO: 683898
cacuuuauugaacaaacac

SEQ ID NO: 683900 - RNA, 19 nt, Artificial Sequence
  Description of Artificial Sequence: Synthetic oligonucleotide
  Sense strand starting at position 1406 of SEQ ID NO: 585994
guaucuuugugacucucaa

SEQ ID NO: 683901 - RNA, 19 nt, Artificial Sequence
  Description of Artificial Sequence: Synthetic oligonucleotide
  Antisense strand to SEQ ID NO: 683900
uugagagucacaaagauac

SEQ ID NO: 683902 - RNA, 19 nt, Artificial Sequence
  Description of Artificial Sequence: Synthetic oligonucleotide
  Sense strand starting at position 1521 of SEQ ID NO: 585994
uuaagucagguuugaaaga

SEQ ID NO: 683903 - RNA, 19 nt, Artificial Sequence
  Description of Artificial Sequence: Synthetic oligonucleotide
  Antisense strand to SEQ ID NO: 683902
ucuuucaaaccugacuuaa

SEQ ID NO: 683904 - RNA, 19 nt, Artificial Sequence
  Description of Artificial Sequence: Synthetic oligonucleotide
  Sense strand starting at position 1594 of SEQ ID NO: 585994
gagagacuguccuuuggaa

SEQ ID NO: 683905 - RNA, 19 nt, Artificial Sequence
  Description of Artificial Sequence: Synthetic oligonucleotide
  Antisense strand to SEQ ID NO: 683904
uuccaaaggacagucucuc

SEQ ID NO: 683906 - RNA, 19 nt, Artificial Sequence
  Description of Artificial Sequence: Synthetic oligonucleotide
  Sense strand starting at position 2765 of SEQ ID NO: 585994
ucuguugugccagcauuau

SEQ ID NO: 683907 - RNA, 19 nt, Artificial Sequence
  Description of Artificial Sequence: Synthetic oligonucleotide
  Antisense strand to SEQ ID NO: 683906
auaaugcuggcacaacaga

SEQ ID NO: 683908 - RNA, 19 nt, Artificial Sequence
  Description of Artificial Sequence: Synthetic oligonucleotide
  Sense strand starting at position 2784 of SEQ ID NO: 585994
gacauauauucugugguag

SEQ ID NO: 683909 - RNA, 19 nt, Artificial Sequence
  Description of Artificial Sequence: Synthetic oligonucleotide
  Antisense strand to SEQ ID NO: 683908
cuaccacagaauauauguc

SEQ ID NO: 683910 - RNA, 19 nt, Artificial Sequence
  Description of Artificial Sequence: Synthetic oligonucleotide
  Sense strand starting at position 2816 of SEQ ID NO: 585994
uguguauguauaggaaacu

SEQ ID NO: 683911 - RNA, 19 nt, Artificial Sequence
  Description of Artificial Sequence: Synthetic oligonucleotide
  Antisense strand to SEQ ID NO: 683910
aguuuccuauacauacaca

SEQ ID NO: 683912 - RNA, 19 nt, Artificial Sequence
  Description of Artificial Sequence: Synthetic oligonucleotide
  Sense strand starting at position 2845 of SEQ ID NO: 585994
gucacuuguuaacuccaaa

SEQ ID NO: 683913 - RNA, 19 nt, Artificial Sequence
  Description of Artificial Sequence: Synthetic oligonucleotide
  Antisense strand to SEQ ID NO: 683912
uuuggaguuaacaagugac

SEQ ID NO: 683914 - RNA, 19 nt, Artificial Sequence
  Description of Artificial Sequence: Synthetic oligonucleotide
  Sense strand starting at position 2949 of SEQ ID NO: 585994
cugugucagcuagcuagua

SEQ ID NO: 683915 - RNA, 19 nt, Artificial Sequence
  Description of Artificial Sequence: Synthetic oligonucleotide
  Antisense strand to SEQ ID NO: 683914
uacuagcuagcugacacag

SEQ ID NO: 683916 - RNA, 19 nt, Artificial Sequence
  Description of Artificial Sequence: Synthetic oligonucleotide
  Sense strand starting at position 3004 of SEQ ID NO: 585994
augguuggcuaaucacuua

SEQ ID NO: 683917 - RNA, 19 nt, Artificial Sequence
  Description of Artificial Sequence: Synthetic oligonucleotide
  Antisense strand to SEQ ID NO: 683916
uaagugauuagccaaccau

SEQ ID NO: 683918 - RNA, 19 nt, Artificial Sequence
  Description of Artificial Sequence: Synthetic oligonucleotide
  Sense strand starting at position 3042 of SEQ ID NO: 585994
aaugcuucugccuggaaag

SEQ ID NO: 683919 - RNA, 19 nt, Artificial Sequence
  Description of Artificial Sequence: Synthetic oligonucleotide
  Antisense strand to SEQ ID NO: 683918
cuuuccaggcagaagcauu

SEQ ID NO: 683920 - RNA, 19 nt, Artificial Sequence
  Description of Artificial Sequence: Synthetic oligonucleotide
  Sense strand starting at position 3043 of SEQ ID NO: 585994
augcuucugccuggaaaga

SEQ ID NO: 683921 - RNA, 19 nt, Artificial Sequence
  Description of Artificial Sequence: Synthetic oligonucleotide
  Antisense strand to SEQ ID NO: 683920
ucuuuccaggcagaagcau

SEQ ID NO: 683922 - RNA, 19 nt, Artificial Sequence
  Description of Artificial Sequence: Synthetic oligonucleotide
  Sense strand starting at position 3219 of SEQ ID NO: 585994
auauguugauggcucccaa

SEQ ID NO: 683923 - RNA, 19 nt, Artificial Sequence
  Description of Artificial Sequence: Synthetic oligonucleotide
  Antisense strand to SEQ ID NO: 683922
uugggagccaucaacauau

SEQ ID NO: 683924 - RNA, 19 nt, Artificial Sequence
  Description of Artificial Sequence: Synthetic oligonucleotide
  Sense strand starting at position 3231 of SEQ ID NO: 585994
cucccaaauguguaucauu

SEQ ID NO: 683925 - RNA, 19 nt, Artificial Sequence
  Description of Artificial Sequence: Synthetic oligonucleotide
  Antisense strand to SEQ ID NO: 683924
aaugauacacauuugggag

SEQ ID NO: 683926 - RNA, 19 nt, Artificial Sequence
  Description of Artificial Sequence: Synthetic oligonucleotide
  Sense strand starting at position 3446 of SEQ ID NO: 585994
ugucaucccugaucccuua

SEQ ID NO: 683927 - RNA, 19 nt, Artificial Sequence
  Description of Artificial Sequence: Synthetic oligonucleotide
  Antisense strand to SEQ ID NO: 683926
uaagggaucagggaugaca

SEQ ID NO: 683928 - RNA, 19 nt, Artificial Sequence
  Description of Artificial Sequence: Synthetic oligonucleotide
  Sense strand starting at position 3558 of SEQ ID NO: 585994
aggcaucugcaucacuuaa

SEQ ID NO: 683929 - RNA, 19 nt, Artificial Sequence
  Description of Artificial Sequence: Synthetic oligonucleotide
  Antisense strand to SEQ ID NO: 683928
uuaagugaugcagaugccu

SEQ ID NO: 683930 - RNA, 19 nt, Artificial Sequence
  Description of Artificial Sequence: Synthetic oligonucleotide
  Sense strand starting at position 3673 of SEQ ID NO: 585994
agauuaugucacuacuuug

SEQ ID NO: 683931 - RNA, 19 nt, Artificial Sequence
  Description of Artificial Sequence: Synthetic oligonucleotide
  Antisense strand to SEQ ID NO: 683930
caaaguagugacauaaucu

SEQ ID NO: 683932 - RNA, 19 nt, Artificial Sequence
  Description of Artificial Sequence: Synthetic oligonucleotide
  Sense strand starting at position 3712 of SEQ ID NO: 585994
ccuuucuagcucggaauaa

SEQ ID NO: 683933 - RNA, 19 nt, Artificial Sequence
  Description of Artificial Sequence: Synthetic oligonucleotide
  Antisense strand to SEQ ID NO: 683932
uuauuccgagcuagaaagg

SEQ ID NO: 683934 - RNA, 19 nt, Artificial Sequence
  Description of Artificial Sequence: Synthetic oligonucleotide
  Sense strand starting at position 3747 of SEQ ID NO: 585994
gauggucugugacuauuga

SEQ ID NO: 683935 - RNA, 19 nt, Artificial Sequence
  Description of Artificial Sequence: Synthetic oligonucleotide
  Antisense strand to SEQ ID NO: 683934
ucaauagucacagaccauc

SEQ ID NO: 683936 - RNA, 19 nt, Artificial Sequence
  Description of Artificial Sequence: Synthetic oligonucleotide
  Sense strand starting at position 3931 of SEQ ID NO: 585994
ucaugaauuuauuggaaga

SEQ ID NO: 683937 - RNA, 19 nt, Artificial Sequence
  Description of Artificial Sequence: Synthetic oligonucleotide
  Antisense strand to SEQ ID NO: 683936
ucuuccaauaaauucauga

SEQ ID NO: 683938 - RNA, 19 nt, Artificial Sequence
  Description of Artificial Sequence: Synthetic oligonucleotide
  Sense strand starting at position 3933 of SEQ ID NO: 585994
augaauuuauuggaagacu

SEQ ID NO: 683939 - RNA, 19 nt, Artificial Sequence
  Description of Artificial Sequence: Synthetic oligonucleotide
  Antisense strand to SEQ ID NO: 683938
agucuuccaauaaauucau

SEQ ID NO: 683940 - RNA, 19 nt, Artificial Sequence
  Description of Artificial Sequence: Synthetic oligonucleotide
  Sense strand starting at position 189 of SEQ ID NO: 585995
uucuuaaaugauugagacu

SEQ ID NO: 683941 - RNA, 19 nt, Artificial Sequence
  Description of Artificial Sequence: Synthetic oligonucleotide
  Antisense strand to SEQ ID NO: 683940
agucucaaucauuuaagaa

SEQ ID NO: 683942 - RNA, 19 nt, Artificial Sequence
  Description of Artificial Sequence: Synthetic oligonucleotide
  Sense strand starting at position 489 of SEQ ID NO: 585995
caccuuuauuggguaggaa

SEQ ID NO: 683943 - RNA, 19 nt, Artificial Sequence
  Description of Artificial Sequence: Synthetic oligonucleotide
  Antisense strand to SEQ ID NO: 683942
uuccuacccaauaaaggug

SEQ ID NO: 683944 - RNA, 19 nt, Artificial Sequence
  Description of Artificial Sequence: Synthetic oligonucleotide
  Sense strand starting at position 533 of SEQ ID NO: 585995
gugauuguucuaggucauu

SEQ ID NO: 683945 - RNA, 19 nt, Artificial Sequence
  Description of Artificial Sequence: Synthetic oligonucleotide
  Antisense strand to SEQ ID NO: 683944
aaugaccuagaacaaucac

SEQ ID NO: 683946 - RNA, 19 nt, Artificial Sequence
  Description of Artificial Sequence: Synthetic oligonucleotide
  Sense strand starting at position 536 of SEQ ID NO: 585995
auuguucuaggucauugaa

SEQ ID NO: 683947 - RNA, 19 nt, Artificial Sequence
  Description of Artificial Sequence: Synthetic oligonucleotide
  Antisense strand to SEQ ID NO: 683946
uucaaugaccuagaacaau

SEQ ID NO: 683948 - RNA, 19 nt, Artificial Sequence
  Description of Artificial Sequence: Synthetic oligonucleotide
  Sense strand starting at position 564 of SEQ ID NO: 585995
ggagaucagucacccucaa

SEQ ID NO: 683949 - RNA, 19 nt, Artificial Sequence
  Description of Artificial Sequence: Synthetic oligonucleotide
  Antisense strand to SEQ ID NO: 683948
uugagggugacugaucucc

SEQ ID NO: 683950 - RNA, 19 nt, Artificial Sequence
  Description of Artificial Sequence: Synthetic oligonucleotide
  Sense strand starting at position 581 of SEQ ID NO: 585995
aagcacuuggccuguaaau

SEQ ID NO: 683951 - RNA, 19 nt, Artificial Sequence
  Description of Artificial Sequence: Synthetic oligonucleotide
  Antisense strand to SEQ ID NO: 683950
auuuacaggccaagugcuu

SEQ ID NO: 683952 - RNA, 19 nt, Artificial Sequence
  Description of Artificial Sequence: Synthetic oligonucleotide
  Sense strand starting at position 590 of SEQ ID NO: 585995
gccuguaaaugguccacau

SEQ ID NO: 683953 - RNA, 19 nt, Artificial Sequence
  Description of Artificial Sequence: Synthetic oligonucleotide
  Antisense strand to SEQ ID NO: 683952
auguggaccauuuacaggc

SEQ ID NO: 683954 - RNA, 19 nt, Artificial Sequence
  Description of Artificial Sequence: Synthetic oligonucleotide
  Sense strand starting at position 622 of SEQ ID NO: 585995
uuuccugaugcauaguuga

SEQ ID NO: 683955 - RNA, 19 nt, Artificial Sequence
  Description of Artificial Sequence: Synthetic oligonucleotide
  Antisense strand to SEQ ID NO: 683954
ucaacuaugcaucaggaaa

SEQ ID NO: 683956 - RNA, 19 nt, Artificial Sequence
  Description of Artificial Sequence: Synthetic oligonucleotide
  Sense strand starting at position 640 of SEQ ID NO: 585995
auagcuguggcuuauaguu

SEQ ID NO: 683957 - RNA, 19 nt, Artificial Sequence
  Description of Artificial Sequence: Synthetic oligonucleotide
  Antisense strand to SEQ ID NO: 683956
aacuauaagccacagcuau

SEQ ID NO: 683958 - RNA, 19 nt, Artificial Sequence
  Description of Artificial Sequence: Synthetic oligonucleotide
  Sense strand starting at position 645 of SEQ ID NO: 585995
uguggcuuauaguuuauau

SEQ ID NO: 683959 - RNA, 19 nt, Artificial Sequence
  Description of Artificial Sequence: Synthetic oligonucleotide
  Antisense strand to SEQ ID NO: 683958
auauaaacuauaagccaca

SEQ ID NO: 683960 - RNA, 19 nt, Artificial Sequence
  Description of Artificial Sequence: Synthetic oligonucleotide
  Sense strand starting at position 656 of SEQ ID NO: 585995
guuuauauggaauguagaa

SEQ ID NO: 683961 - RNA, 19 nt, Artificial Sequence
  Description of Artificial Sequence: Synthetic oligonucleotide
  Antisense strand to SEQ ID NO: 683960
uucuacauuccauauaaac

SEQ ID NO: 683962 - RNA, 19 nt, Artificial Sequence
  Description of Artificial Sequence: Synthetic oligonucleotide
  Sense strand starting at position 768 of SEQ ID NO: 585995
uuuguauugcuugaaacac

SEQ ID NO: 683963 - RNA, 19 nt, Artificial Sequence
  Description of Artificial Sequence: Synthetic oligonucleotide
  Antisense strand to SEQ ID NO: 683962
guguuucaagcaauacaaa

SEQ ID NO: 683964 - RNA, 19 nt, Artificial Sequence
  Description of Artificial Sequence: Synthetic oligonucleotide
  Sense strand starting at position 831 of SEQ ID NO: 585995
uucuguuaauuaucaggaa

SEQ ID NO: 683965 - RNA, 19 nt, Artificial Sequence
  Description of Artificial Sequence: Synthetic oligonucleotide
  Antisense strand to SEQ ID NO: 683964
uuccugauaauuaacagaa

SEQ ID NO: 683966 - RNA, 19 nt, Artificial Sequence
  Description of Artificial Sequence: Synthetic oligonucleotide
  Sense strand starting at position 877 of SEQ ID NO: 585995
ggucgcagaggucaaagau

SEQ ID NO: 683967 - RNA, 19 nt, Artificial Sequence
  Description of Artificial Sequence: Synthetic oligonucleotide
  Antisense strand to SEQ ID NO: 683966
aucuuugaccucugcgacc

SEQ ID NO: 683968 - RNA, 19 nt, Artificial Sequence
  Description of Artificial Sequence: Synthetic oligonucleotide
  Sense strand starting at position 893 of SEQ ID NO: 585995
gaucaagucccauguguac

SEQ ID NO: 683969 - RNA, 19 nt, Artificial Sequence
  Description of Artificial Sequence: Synthetic oligonucleotide
  Antisense strand to SEQ ID NO: 683968
guacacaugggacuugauc

SEQ ID NO: 683970 - RNA, 19 nt, Artificial Sequence
  Description of Artificial Sequence: Synthetic oligonucleotide
  Sense strand starting at position 1049 of SEQ ID NO: 585995
ugugaucucuucccucauc

SEQ ID NO: 683971 - RNA, 19 nt, Artificial Sequence
  Description of Artificial Sequence: Synthetic oligonucleotide
  Antisense strand to SEQ ID NO: 683970
gaugagggaagagaucaca

SEQ ID NO: 683972 - RNA, 19 nt, Artificial Sequence
  Description of Artificial Sequence: Synthetic oligonucleotide
  Sense strand starting at position 1050 of SEQ ID NO: 585995
gugaucucuucccucauca

SEQ ID NO: 683973 - RNA, 19 nt, Artificial Sequence
  Description of Artificial Sequence: Synthetic oligonucleotide
  Antisense strand to SEQ ID NO: 683972
ugaugagggaagagaucac

SEQ ID NO: 683974 - RNA, 19 nt, Artificial Sequence
  Description of Artificial Sequence: Synthetic oligonucleotide
  Sense strand starting at position 1233 of SEQ ID NO: 585995
cccugaguuucugcugaug

SEQ ID NO: 683975 - RNA, 19 nt, Artificial Sequence
  Description of Artificial Sequence: Synthetic oligonucleotide
  Antisense strand to SEQ ID NO: 683974
caucagcagaaacucaggg

SEQ ID NO: 683976 - RNA, 19 nt, Artificial Sequence
  Description of Artificial Sequence: Synthetic oligonucleotide
  Sense strand starting at position 1267 of SEQ ID NO: 585995
caggaagcccagcaugaau

SEQ ID NO: 683977 - RNA, 19 nt, Artificial Sequence
  Description of Artificial Sequence: Synthetic oligonucleotide
  Antisense strand to SEQ ID NO: 683976
auucaugcugggcuuccug

SEQ ID NO: 683978 - RNA, 19 nt, Artificial Sequence
  Description of Artificial Sequence: Synthetic oligonucleotide
  Sense strand starting at position 1396 of SEQ ID NO: 585995
gaauuacaaccaugugugu

SEQ ID NO: 683979 - RNA, 19 nt, Artificial Sequence
  Description of Artificial Sequence: Synthetic oligonucleotide
  Antisense strand to SEQ ID NO: 683978
acacacaugguuguaauuc

SEQ ID NO: 683980 - RNA, 19 nt, Artificial Sequence
  Description of Artificial Sequence: Synthetic oligonucleotide
  Sense strand starting at position 1487 of SEQ ID NO: 585995
ucggcuuugguugaauuca

SEQ ID NO: 683981 - RNA, 19 nt, Artificial Sequence
  Description of Artificial Sequence: Synthetic oligonucleotide
  Antisense strand to SEQ ID NO: 683980
ugaauucaaccaaagccga

SEQ ID NO: 683982 - RNA, 19 nt, Artificial Sequence
  Description of Artificial Sequence: Synthetic oligonucleotide
  Sense strand starting at position 1527 of SEQ ID NO: 585995
augggaugcaguuaacuua

SEQ ID NO: 683983 - RNA, 19 nt, Artificial Sequence
  Description of Artificial Sequence: Synthetic oligonucleotide
  Antisense strand to SEQ ID NO: 683982
uaaguuaacugcaucccau

SEQ ID NO: 683984 - RNA, 19 nt, Artificial Sequence
  Description of Artificial Sequence: Synthetic oligonucleotide
  Sense strand starting at position 2380 of SEQ ID NO: 585995
agauaaucgaguugaaauc

SEQ ID NO: 683985 - RNA, 19 nt, Artificial Sequence
  Description of Artificial Sequence: Synthetic oligonucleotide
  Antisense strand to SEQ ID NO: 683984
gauuucaacucgauuaucu

SEQ ID NO: 683986 - RNA, 19 nt, Artificial Sequence
  Description of Artificial Sequence: Synthetic oligonucleotide
  Sense strand starting at position 2648 of SEQ ID NO: 585995
guuuaagccauguuugugu

SEQ ID NO: 683987 - RNA, 19 nt, Artificial Sequence
  Description of Artificial Sequence: Synthetic oligonucleotide
  Antisense strand to SEQ ID NO: 683986
acacaaacauggcuuaaac

SEQ ID NO: 683988 - RNA, 19 nt, Artificial Sequence
  Description of Artificial Sequence: Synthetic oligonucleotide
  Sense strand starting at position 2659 of SEQ ID NO: 585995
guuugugucagagauccca

SEQ ID NO: 683989 - RNA, 19 nt, Artificial Sequence
  Description of Artificial Sequence: Synthetic oligonucleotide
  Antisense strand to SEQ ID NO: 683988
ugggaucucugacacaaac

SEQ ID NO: 683990 - RNA, 19 nt, Artificial Sequence
  Description of Artificial Sequence: Synthetic oligonucleotide
  Sense strand starting at position 2701 of SEQ ID NO: 585995
ggcuguguccucgcuaauc

SEQ ID NO: 683991 - RNA, 19 nt, Artificial Sequence
  Description of Artificial Sequence: Synthetic oligonucleotide
  Antisense strand to SEQ ID NO: 683990
gauuagcgaggacacagcc

SEQ ID NO: 683992 - RNA, 19 nt, Artificial Sequence
  Description of Artificial Sequence: Synthetic oligonucleotide
  Sense strand starting at position 2849 of SEQ ID NO: 585995
augacaguugaaugcuuua

SEQ ID NO: 683993 - RNA, 19 nt, Artificial Sequence
  Description of Artificial Sequence: Synthetic oligonucleotide
  Antisense strand to SEQ ID NO: 683992
uaaagcauucaacugucau

SEQ ID NO: 683994 - RNA, 19 nt, Artificial Sequence
  Description of Artificial Sequence: Synthetic oligonucleotide
  Sense strand starting at position 2867 of SEQ ID NO: 585995
auugccaucuauucgauua

SEQ ID NO: 683995 - RNA, 19 nt, Artificial Sequence
  Description of Artificial Sequence: Synthetic oligonucleotide
  Antisense strand to SEQ ID NO: 683994
uaaucgaauagauggcaau

SEQ ID NO: 683996 - RNA, 19 nt, Artificial Sequence
  Description of Artificial Sequence: Synthetic oligonucleotide
  Sense strand starting at position 3286 of SEQ ID NO: 585995
agaucacuggugugucgau

SEQ ID NO: 683997 - RNA, 19 nt, Artificial Sequence
  Description of Artificial Sequence: Synthetic oligonucleotide
  Antisense strand to SEQ ID NO: 683996
aucgacacaccagugaucu

SEQ ID NO: 683998 - RNA, 19 nt, Artificial Sequence
  Description of Artificial Sequence: Synthetic oligonucleotide
  Sense strand starting at position 3295 of SEQ ID NO: 585995
gugugucgauuuguaaauc

SEQ ID NO: 683999 - RNA, 19 nt, Artificial Sequence
  Description of Artificial Sequence: Synthetic oligonucleotide
  Antisense strand to SEQ ID NO: 683998
gauuuacaaaucgacacac

SEQ ID NO: 684000 - RNA, 19 nt, Artificial Sequence
  Description of Artificial Sequence: Synthetic oligonucleotide
  Sense strand starting at position 3315 of SEQ ID NO: 585995
ugcauuuacucagccaugu

SEQ ID NO: 684001 - RNA, 19 nt, Artificial Sequence
  Description of Artificial Sequence: Synthetic oligonucleotide
  Antisense strand to SEQ ID NO: 684000
acauggcugaguaaaugca

SEQ ID NO: 684002 - RNA, 19 nt, Artificial Sequence
  Description of Artificial Sequence: Synthetic oligonucleotide
  Sense strand starting at position 3340 of SEQ ID NO: 585995
ugucccuuccauuggagau

SEQ ID NO: 684003 - RNA, 19 nt, Artificial Sequence
  Description of Artificial Sequence: Synthetic oligonucleotide
  Antisense strand to SEQ ID NO: 684002
aucuccaauggaagggaca

SEQ ID NO: 684004 - RNA, 19 nt, Artificial Sequence
  Description of Artificial Sequence: Synthetic oligonucleotide
  Sense strand starting at position 3344 of SEQ ID NO: 585995
ccuuccauuggagauguua

SEQ ID NO: 684005 - RNA, 19 nt, Artificial Sequence
  Description of Artificial Sequence: Synthetic oligonucleotide
  Antisense strand to SEQ ID NO: 684004
uaacaucuccaauggaagg

SEQ ID NO: 684006 - RNA, 19 nt, Artificial Sequence
  Description of Artificial Sequence: Synthetic oligonucleotide
  Sense strand starting at position 3508 of SEQ ID NO: 585995
gucugaagugagcacuaga

SEQ ID NO: 684007 - RNA, 19 nt, Artificial Sequence
  Description of Artificial Sequence: Synthetic oligonucleotide
  Antisense strand to SEQ ID NO: 684006
ucuagugcucacuucagac

SEQ ID NO: 684008 - RNA, 19 nt, Artificial Sequence
  Description of Artificial Sequence: Synthetic oligonucleotide
  Sense strand starting at position 3549 of SEQ ID NO: 585995
auuuguuguucccuuugau

SEQ ID NO: 684009 - RNA, 19 nt, Artificial Sequence
  Description of Artificial Sequence: Synthetic oligonucleotide
  Antisense strand to SEQ ID NO: 684008
aucaaagggaacaacaaau

SEQ ID NO: 684010 - RNA, 19 nt, Artificial Sequence
  Description of Artificial Sequence: Synthetic oligonucleotide
  Sense strand starting at position 3641 of SEQ ID NO: 585995
uauggaaaggcuuggagau

SEQ ID NO: 684011 - RNA, 19 nt, Artificial Sequence
  Description of Artificial Sequence: Synthetic oligonucleotide
  Antisense strand to SEQ ID NO: 684010
aucuccaagccuuuccaua

SEQ ID NO: 684012 - RNA, 19 nt, Artificial Sequence
  Description of Artificial Sequence: Synthetic oligonucleotide
  Sense strand starting at position 3816 of SEQ ID NO: 585995
uucuguuguguggaacuca

SEQ ID NO: 684013 - RNA, 19 nt, Artificial Sequence
  Description of Artificial Sequence: Synthetic oligonucleotide
  Antisense strand to SEQ ID NO: 684012
ugaguuccacacaacagaa

SEQ ID NO: 684014 - RNA, 19 nt, Artificial Sequence
  Description of Artificial Sequence: Synthetic oligonucleotide
  Sense strand starting at position 3876 of SEQ ID NO: 585995
cacuguuggcaccagaaca

SEQ ID NO: 684015 - RNA, 19 nt, Artificial Sequence
  Description of Artificial Sequence: Synthetic oligonucleotide
  Antisense strand to SEQ ID NO: 684014
uguucuggugccaacagug

SEQ ID NO: 684016 - RNA, 19 nt, Artificial Sequence
  Description of Artificial Sequence: Synthetic oligonucleotide
  Sense strand starting at position 3917 of SEQ ID NO: 585995
guggaaucaagaggagguu

SEQ ID NO: 684017 - RNA, 19 nt, Artificial Sequence
  Description of Artificial Sequence: Synthetic oligonucleotide
  Antisense strand to SEQ ID NO: 684016
aaccuccucuugauuccac

SEQ ID NO: 684018 - RNA, 19 nt, Artificial Sequence
  Description of Artificial Sequence: Synthetic oligonucleotide
  Sense strand starting at position 3940 of SEQ ID NO: 585995
ucauuaugauguuuacauc

SEQ ID NO: 684019 - RNA, 19 nt, Artificial Sequence
  Description of Artificial Sequence: Synthetic oligonucleotide
  Antisense strand to SEQ ID NO: 684018
gauguaaacaucauaauga

SEQ ID NO: 684020 - RNA, 19 nt, Artificial Sequence
  Description of Artificial Sequence: Synthetic oligonucleotide
  Sense strand starting at position 258 of SEQ ID NO: 585996
acaugauguuuccaucuuu

SEQ ID NO: 684021 - RNA, 19 nt, Artificial Sequence
  Description of Artificial Sequence: Synthetic oligonucleotide
  Antisense strand to SEQ ID NO: 684020
aaagauggaaacaucaugu

SEQ ID NO: 684022 - RNA, 19 nt, Artificial Sequence
  Description of Artificial Sequence: Synthetic oligonucleotide
  Sense strand starting at position 284 of SEQ ID NO: 585996
ucaaauaauucccucggau

SEQ ID NO: 684023 - RNA, 19 nt, Artificial Sequence
  Description of Artificial Sequence: Synthetic oligonucleotide
  Antisense strand to SEQ ID NO: 684022
auccgagggaauuauuuga

SEQ ID NO: 684024 - RNA, 19 nt, Artificial Sequence
  Description of Artificial Sequence: Synthetic oligonucleotide
  Sense strand starting at position 286 of SEQ ID NO: 585996
aaauaauucccucggaugu

SEQ ID NO: 684025 - RNA, 19 nt, Artificial Sequence
  Description of Artificial Sequence: Synthetic oligonucleotide
  Antisense strand to SEQ ID NO: 684024
acauccgagggaauuauuu

SEQ ID NO: 684026 - RNA, 19 nt, Artificial Sequence
  Description of Artificial Sequence: Synthetic oligonucleotide
  Sense strand starting at position 287 of SEQ ID NO: 585996
aauaauucccucggaugua

SEQ ID NO: 684027 - RNA, 19 nt, Artificial Sequence
  Description of Artificial Sequence: Synthetic oligonucleotide
  Antisense strand to SEQ ID NO: 684026
uacauccgagggaauuauu

SEQ ID NO: 684028 - RNA, 19 nt, Artificial Sequence
  Description of Artificial Sequence: Synthetic oligonucleotide
  Sense strand starting at position 288 of SEQ ID NO: 585996
auaauucccucggauguau

SEQ ID NO: 684029 - RNA, 19 nt, Artificial Sequence
  Description of Artificial Sequence: Synthetic oligonucleotide
  Antisense strand to SEQ ID NO: 684028
auacauccgagggaauuau

SEQ ID NO: 684030 - RNA, 19 nt, Artificial Sequence
  Description of Artificial Sequence: Synthetic oligonucleotide
  Sense strand starting at position 377 of SEQ ID NO: 585996
ccucuacccuccguuagau

SEQ ID NO: 684031 - RNA, 19 nt, Artificial Sequence
  Description of Artificial Sequence: Synthetic oligonucleotide
  Antisense strand to SEQ ID NO: 684030
aucuaacggaggguagagg

SEQ ID NO: 684032 - RNA, 19 nt, Artificial Sequence
  Description of Artificial Sequence: Synthetic oligonucleotide
  Sense strand starting at position 473 of SEQ ID NO: 585996
aguugaacacgaugguaua

SEQ ID NO: 684033 - RNA, 19 nt, Artificial Sequence
  Description of Artificial Sequence: Synthetic oligonucleotide
  Antisense strand to SEQ ID NO: 684032
uauaccaucguguucaacu

SEQ ID NO: 684034 - RNA, 19 nt, Artificial Sequence
  Description of Artificial Sequence: Synthetic oligonucleotide
  Sense strand starting at position 474 of SEQ ID NO: 585996
guugaacacgaugguauau

SEQ ID NO: 684035 - RNA, 19 nt, Artificial Sequence
  Description of Artificial Sequence: Synthetic oligonucleotide
  Antisense strand to SEQ ID NO: 684034
auauaccaucguguucaac

SEQ ID NO: 684036 - RNA, 19 nt, Artificial Sequence
  Description of Artificial Sequence: Synthetic oligonucleotide
  Sense strand starting at position 483 of SEQ ID NO: 585996
gaugguauaucaucugcua

SEQ ID NO: 684037 - RNA, 19 nt, Artificial Sequence
  Description of Artificial Sequence: Synthetic oligonucleotide
  Antisense strand to SEQ ID NO: 684036
uagcagaugauauaccauc

SEQ ID NO: 684038 - RNA, 19 nt, Artificial Sequence
  Description of Artificial Sequence: Synthetic oligonucleotide
  Sense strand starting at position 486 of SEQ ID NO: 585996
gguauaucaucugcuaaua

SEQ ID NO: 684039 - RNA, 19 nt, Artificial Sequence
  Description of Artificial Sequence: Synthetic oligonucleotide
  Antisense strand to SEQ ID NO: 684038
uauuagcagaugauauacc

SEQ ID NO: 684040 - RNA, 19 nt, Artificial Sequence
  Description of Artificial Sequence: Synthetic oligonucleotide
  Sense strand starting at position 646 of SEQ ID NO: 585996
aguuaagagcugugaaauc

SEQ ID NO: 684041 - RNA, 19 nt, Artificial Sequence
  Description of Artificial Sequence: Synthetic oligonucleotide
  Antisense strand to SEQ ID NO: 684040
gauuucacagcucuuaacu

SEQ ID NO: 684042 - RNA, 19 nt, Artificial Sequence
  Description of Artificial Sequence: Synthetic oligonucleotide
  Sense strand starting at position 653 of SEQ ID NO: 585996
agcugugaaaucuggcaga

SEQ ID NO: 684043 - RNA, 19 nt, Artificial Sequence
  Description of Artificial Sequence: Synthetic oligonucleotide
  Antisense strand to SEQ ID NO: 684042
ucugccagauuucacagcu

SEQ ID NO: 684044 - RNA, 19 nt, Artificial Sequence
  Description of Artificial Sequence: Synthetic oligonucleotide
  Sense strand starting at position 672 of SEQ ID NO: 585996
agggaagguuuauagauau

SEQ ID NO: 684045 - RNA, 19 nt, Artificial Sequence
  Description of Artificial Sequence: Synthetic oligonucleotide
  Antisense strand to SEQ ID NO: 684044
auaucuauaaaccuucccu

SEQ ID NO: 684046 - RNA, 19 nt, Artificial Sequence
  Description of Artificial Sequence: Synthetic oligonucleotide
  Sense strand starting at position 712 of SEQ ID NO: 585996
ggaucagagacuugucauu

SEQ ID NO: 684047 - RNA, 19 nt, Artificial Sequence
  Description of Artificial Sequence: Synthetic oligonucleotide
  Antisense strand to SEQ ID NO: 684046
aaugacaagucucugaucc

SEQ ID NO: 684048 - RNA, 19 nt, Artificial Sequence
  Description of Artificial Sequence: Synthetic oligonucleotide
  Sense strand starting at position 1377 of SEQ ID NO: 585996
gcgcccagcuucuucuaau

SEQ ID NO: 684049 - RNA, 19 nt, Artificial Sequence
  Description of Artificial Sequence: Synthetic oligonucleotide
  Antisense strand to SEQ ID NO: 684048
auuagaagaagcugggcgc

SEQ ID NO: 684050 - RNA, 19 nt, Artificial Sequence
  Description of Artificial Sequence: Synthetic oligonucleotide
  Sense strand starting at position 1378 of SEQ ID NO: 585996
cgcccagcuucuucuaauu

SEQ ID NO: 684051 - RNA, 19 nt, Artificial Sequence
  Description of Artificial Sequence: Synthetic oligonucleotide
  Antisense strand to SEQ ID NO: 684050
aauuagaagaagcugggcg

SEQ ID NO: 684052 - RNA, 19 nt, Artificial Sequence
  Description of Artificial Sequence: Synthetic oligonucleotide
  Sense strand starting at position 1438 of SEQ ID NO: 585996
ggugcaaucacggaugacu

SEQ ID NO: 684053 - RNA, 19 nt, Artificial Sequence
  Description of Artificial Sequence: Synthetic oligonucleotide
  Antisense strand to SEQ ID NO: 684052
agucauccgugauugcacc

SEQ ID NO: 684054 - RNA, 19 nt, Artificial Sequence
  Description of Artificial Sequence: Synthetic oligonucleotide
  Sense strand starting at position 2287 of SEQ ID NO: 585996
cccauuaaguccugaggga

SEQ ID NO: 684055 - RNA, 19 nt, Artificial Sequence
  Description of Artificial Sequence: Synthetic oligonucleotide
  Antisense strand to SEQ ID NO: 684054
ucccucaggacuuaauggg

SEQ ID NO: 684056 - RNA, 19 nt, Artificial Sequence
  Description of Artificial Sequence: Synthetic oligonucleotide
  Sense strand starting at position 2689 of SEQ ID NO: 585996
cgguucucggaccguuaga

SEQ ID NO: 684057 - RNA, 19 nt, Artificial Sequence
  Description of Artificial Sequence: Synthetic oligonucleotide
  Antisense strand to SEQ ID NO: 684056
ucuaacgguccgagaaccg

SEQ ID NO: 684058 - RNA, 19 nt, Artificial Sequence
  Description of Artificial Sequence: Synthetic oligonucleotide
  Sense strand starting at position 2725 of SEQ ID NO: 585996
ucuuauaaguccucggucu

SEQ ID NO: 684059 - RNA, 19 nt, Artificial Sequence
  Description of Artificial Sequence: Synthetic oligonucleotide
  Antisense strand to SEQ ID NO: 684058
agaccgaggacuuauaaga

SEQ ID NO: 684060 - RNA, 19 nt, Artificial Sequence
  Description of Artificial Sequence: Synthetic oligonucleotide
  Sense strand starting at position 2726 of SEQ ID NO: 585996
cuuauaaguccucggucuu

SEQ ID NO: 684061 - RNA, 19 nt, Artificial Sequence
  Description of Artificial Sequence: Synthetic oligonucleotide
  Antisense strand to SEQ ID NO: 684060
aagaccgaggacuuauaag

SEQ ID NO: 684062 - RNA, 19 nt, Artificial Sequence
  Description of Artificial Sequence: Synthetic oligonucleotide
  Sense strand starting at position 2727 of SEQ ID NO: 585996
uuauaaguccucggucuuc

SEQ ID NO: 684063 - RNA, 19 nt, Artificial Sequence
  Description of Artificial Sequence: Synthetic oligonucleotide
  Antisense strand to SEQ ID NO: 684062
gaagaccgaggacuuauaa

SEQ ID NO: 684064 - RNA, 19 nt, Artificial Sequence
  Description of Artificial Sequence: Synthetic oligonucleotide
  Sense strand starting at position 2826 of SEQ ID NO: 585996
ggcaaaugcuagcuacaau

SEQ ID NO: 684065 - RNA, 19 nt, Artificial Sequence
  Description of Artificial Sequence: Synthetic oligonucleotide
  Antisense strand to SEQ ID NO: 684064
auuguagcuagcauuugcc

SEQ ID NO: 684066 - RNA, 19 nt, Artificial Sequence
  Description of Artificial Sequence: Synthetic oligonucleotide
  Sense strand starting at position 2878 of SEQ ID NO: 585996
ggcaaaucuugauuaagga

SEQ ID NO: 684067 - RNA, 19 nt, Artificial Sequence
  Description of Artificial Sequence: Synthetic oligonucleotide
  Antisense strand to SEQ ID NO: 684066
uccuuaaucaagauuugcc

SEQ ID NO: 684068 - RNA, 19 nt, Artificial Sequence
  Description of Artificial Sequence: Synthetic oligonucleotide
  Sense strand starting at position 2892 of SEQ ID NO: 585996
aaggauagcgggugcaaau

SEQ ID NO: 684069 - RNA, 19 nt, Artificial Sequence
  Description of Artificial Sequence: Synthetic oligonucleotide
  Antisense strand to SEQ ID NO: 684068
auuugcacccgcuauccuu

SEQ ID NO: 684070 - RNA, 19 nt, Artificial Sequence
  Description of Artificial Sequence: Synthetic oligonucleotide
  Sense strand starting at position 3384 of SEQ ID NO: 585996
cgcaguccucuuugggagu

SEQ ID NO: 684071 - RNA, 19 nt, Artificial Sequence
  Description of Artificial Sequence: Synthetic oligonucleotide
  Antisense strand to SEQ ID NO: 684070
acucccaaagaggacugcg

SEQ ID NO: 684072 - RNA, 19 nt, Artificial Sequence
  Description of Artificial Sequence: Synthetic oligonucleotide
  Sense strand starting at position 3385 of SEQ ID NO: 585996
gcaguccucuuugggaguu

SEQ ID NO: 684073 - RNA, 19 nt, Artificial Sequence
  Description of Artificial Sequence: Synthetic oligonucleotide
  Antisense strand to SEQ ID NO: 684072
aacucccaaagaggacugc

SEQ ID NO: 684074 - RNA, 19 nt, Artificial Sequence
  Description of Artificial Sequence: Synthetic oligonucleotide
  Sense strand starting at position 3413 of SEQ ID NO: 585996
uauuguuguccaugcugca

SEQ ID NO: 684075 - RNA, 19 nt, Artificial Sequence
  Description of Artificial Sequence: Synthetic oligonucleotide
  Antisense strand to SEQ ID NO: 684074
ugcagcauggacaacaaua

SEQ ID NO: 684076 - RNA, 19 nt, Artificial Sequence
  Description of Artificial Sequence: Synthetic oligonucleotide
  Sense strand starting at position 3497 of SEQ ID NO: 585996
aacgaccuugcgcaagauu

SEQ ID NO: 684077 - RNA, 19 nt, Artificial Sequence
  Description of Artificial Sequence: Synthetic oligonucleotide
  Antisense strand to SEQ ID NO: 684076
aaucuugcgcaaggucguu

SEQ ID NO: 684078 - RNA, 19 nt, Artificial Sequence
  Description of Artificial Sequence: Synthetic oligonucleotide
  Sense strand starting at position 3506 of SEQ ID NO: 585996
gcgcaagauuccuuuccuc

SEQ ID NO: 684079 - RNA, 19 nt, Artificial Sequence
  Description of Artificial Sequence: Synthetic oligonucleotide
  Antisense strand to SEQ ID NO: 684078
gaggaaaggaaucuugcgc

SEQ ID NO: 684080 - RNA, 19 nt, Artificial Sequence
  Description of Artificial Sequence: Synthetic oligonucleotide
  Sense strand starting at position 3519 of SEQ ID NO: 585996
uuccucuaugccugagguu

SEQ ID NO: 684081 - RNA, 19 nt, Artificial Sequence
  Description of Artificial Sequence: Synthetic oligonucleotide
  Antisense strand to SEQ ID NO: 684080
aaccucaggcauagaggaa

SEQ ID NO: 684082 - RNA, 19 nt, Artificial Sequence
  Description of Artificial Sequence: Synthetic oligonucleotide
  Sense strand starting at position 3520 of SEQ ID NO: 585996
uccucuaugccugagguuu

SEQ ID NO: 684083 - RNA, 19 nt, Artificial Sequence
  Description of Artificial Sequence: Synthetic oligonucleotide
  Antisense strand to SEQ ID NO: 684082
aaaccucaggcauagagga

SEQ ID NO: 684084 - RNA, 19 nt, Artificial Sequence
  Description of Artificial Sequence: Synthetic oligonucleotide
  Sense strand starting at position 3654 of SEQ ID NO: 585996
gagaaaggauugcuuaguu

SEQ ID NO: 684085 - RNA, 19 nt, Artificial Sequence
  Description of Artificial Sequence: Synthetic oligonucleotide
  Antisense strand to SEQ ID NO: 684084
aacuaagcaauccuuucuc

SEQ ID NO: 684086 - RNA, 19 nt, Artificial Sequence
  Description of Artificial Sequence: Synthetic oligonucleotide
  Sense strand starting at position 3795 of SEQ ID NO: 585996
gcuauuuccuuggaaauuu

SEQ ID NO: 684087 - RNA, 19 nt, Artificial Sequence
  Description of Artificial Sequence: Synthetic oligonucleotide
  Antisense strand to SEQ ID NO: 684086
aaauuuccaaggaaauagc

SEQ ID NO: 684088 - RNA, 19 nt, Artificial Sequence
  Description of Artificial Sequence: Synthetic oligonucleotide
  Sense strand starting at position 3866 of SEQ ID NO: 585996
uagcgauguugucuggaga

SEQ ID NO: 684089 - RNA, 19 nt, Artificial Sequence
  Description of Artificial Sequence: Synthetic oligonucleotide
  Antisense strand to SEQ ID NO: 684088
ucuccagacaacaucgcua

SEQ ID NO: 684090 - RNA, 19 nt, Artificial Sequence
  Description of Artificial Sequence: Synthetic oligonucleotide
  Sense strand starting at position 3867 of SEQ ID NO: 585996
agcgauguugucuggagag

SEQ ID NO: 684091 - RNA, 19 nt, Artificial Sequence
  Description of Artificial Sequence: Synthetic oligonucleotide
  Antisense strand to SEQ ID NO: 684090
cucuccagacaacaucgcu

SEQ ID NO: 684092 - RNA, 19 nt, Artificial Sequence
  Description of Artificial Sequence: Synthetic oligonucleotide
  Sense strand starting at position 3868 of SEQ ID NO: 585996
gcgauguugucuggagagu

SEQ ID NO: 684093 - RNA, 19 nt, Artificial Sequence
  Description of Artificial Sequence: Synthetic oligonucleotide
  Antisense strand to SEQ ID NO: 684092
acucuccagacaacaucgc

SEQ ID NO: 684094 - RNA, 19 nt, Artificial Sequence
  Description of Artificial Sequence: Synthetic oligonucleotide
  Sense strand starting at position 3869 of SEQ ID NO: 585996
cgauguugucuggagagua

SEQ ID NO: 684095 - RNA, 19 nt, Artificial Sequence
  Description of Artificial Sequence: Synthetic oligonucleotide
  Antisense strand to SEQ ID NO: 684094
uacucuccagacaacaucg

SEQ ID NO: 684096 - RNA, 19 nt, Artificial Sequence
  Description of Artificial Sequence: Synthetic oligonucleotide
  Sense strand starting at position 3872 of SEQ ID NO: 585996
uguugucuggagaguaugu

SEQ ID NO: 684097 - RNA, 19 nt, Artificial Sequence
  Description of Artificial Sequence: Synthetic oligonucleotide
  Antisense strand to SEQ ID NO: 684096
acauacucuccagacaaca

SEQ ID NO: 684098 - RNA, 19 nt, Artificial Sequence
  Description of Artificial Sequence: Synthetic oligonucleotide
  Sense strand starting at position 3879 of SEQ ID NO: 585996
uggagaguauguucaaaga

SEQ ID NO: 684099 - RNA, 19 nt, Artificial Sequence
  Description of Artificial Sequence: Synthetic oligonucleotide
  Antisense strand to SEQ ID NO: 684098
ucuuugaacauacucucca

SEQ ID NO: 684100 - RNA, 19 nt, Artificial Sequence
  Description of Artificial Sequence: Synthetic oligonucleotide
  Sense strand starting at position 30 of SEQ ID NO: 585997
cgcccagcuucuucuaauu

SEQ ID NO: 684101 - RNA, 19 nt, Artificial Sequence
  Description of Artificial Sequence: Synthetic oligonucleotide
  Antisense strand to SEQ ID NO: 684100
aauuagaagaagcugggcg

SEQ ID NO: 684102 - RNA, 19 nt, Artificial Sequence
  Description of Artificial Sequence: Synthetic oligonucleotide
  Sense strand starting at position 90 of SEQ ID NO: 585997
ggugcaaucacggaugacu

SEQ ID NO: 684103 - RNA, 19 nt, Artificial Sequence
  Description of Artificial Sequence: Synthetic oligonucleotide
  Antisense strand to SEQ ID NO: 684102
agucauccgugauugcacc

SEQ ID NO: 684104 - RNA, 19 nt, Artificial Sequence
  Description of Artificial Sequence: Synthetic oligonucleotide
  Sense strand starting at position 1341 of SEQ ID NO: 585997
cgguucucggaccguuaga

SEQ ID NO: 684105 - RNA, 19 nt, Artificial Sequence
  Description of Artificial Sequence: Synthetic oligonucleotide
  Antisense strand to SEQ ID NO: 684104
ucuaacgguccgagaaccg

SEQ ID NO: 684106 - RNA, 19 nt, Artificial Sequence
  Description of Artificial Sequence: Synthetic oligonucleotide
  Sense strand starting at position 1377 of SEQ ID NO: 585997
ucuuauaaguccucggucu

SEQ ID NO: 684107 - RNA, 19 nt, Artificial Sequence
  Description of Artificial Sequence: Synthetic oligonucleotide
  Antisense strand to SEQ ID NO: 684106
agaccgaggacuuauaaga

SEQ ID NO: 684108 - RNA, 19 nt, Artificial Sequence
  Description of Artificial Sequence: Synthetic oligonucleotide
  Sense strand starting at position 1378 of SEQ ID NO: 585997
cuuauaaguccucggucuu

SEQ ID NO: 684109 - RNA, 19 nt, Artificial Sequence
  Description of Artificial Sequence: Synthetic oligonucleotide
  Antisense strand to SEQ ID NO: 684108
aagaccgaggacuuauaag

SEQ ID NO: 684110 - RNA, 19 nt, Artificial Sequence
  Description of Artificial Sequence: Synthetic oligonucleotide
  Sense strand starting at position 1379 of SEQ ID NO: 585997
uuauaaguccucggucuuc

SEQ ID NO: 684111 - RNA, 19 nt, Artificial Sequence
  Description of Artificial Sequence: Synthetic oligonucleotide
  Antisense strand to SEQ ID NO: 684110
gaagaccgaggacuuauaa

SEQ ID NO: 684112 - RNA, 19 nt, Artificial Sequence
  Description of Artificial Sequence: Synthetic oligonucleotide
  Sense strand starting at position 1478 of SEQ ID NO: 585997
ggcaaaugcuagcuacaau

SEQ ID NO: 684113 - RNA, 19 nt, Artificial Sequence
  Description of Artificial Sequence: Synthetic oligonucleotide
  Antisense strand to SEQ ID NO: 684112
auuguagcuagcauuugcc

SEQ ID NO: 684114 - RNA, 19 nt, Artificial Sequence
  Description of Artificial Sequence: Synthetic oligonucleotide
  Sense strand starting at position 1530 of SEQ ID NO: 585997
ggcaaaucuugauuaagga

SEQ ID NO: 684115 - RNA, 19 nt, Artificial Sequence
  Description of Artificial Sequence: Synthetic oligonucleotide
  Antisense strand to SEQ ID NO: 684114
uccuuaaucaagauuugcc

SEQ ID NO: 684116 - RNA, 19 nt, Artificial Sequence
  Description of Artificial Sequence: Synthetic oligonucleotide
  Sense strand starting at position 1544 of SEQ ID NO: 585997
aaggauagcgggugcaaau

SEQ ID NO: 684117 - RNA, 19 nt, Artificial Sequence
  Description of Artificial Sequence: Synthetic oligonucleotide
  Antisense strand to SEQ ID NO: 684116
auuugcacccgcuauccuu

SEQ ID NO: 684118 - RNA, 19 nt, Artificial Sequence
  Description of Artificial Sequence: Synthetic oligonucleotide
  Sense strand starting at position 2036 of SEQ ID NO: 585997
cgcaguccucuuugggagu

SEQ ID NO: 684119 - RNA, 19 nt, Artificial Sequence
  Description of Artificial Sequence: Synthetic oligonucleotide
  Antisense strand to SEQ ID NO: 684118
acucccaaagaggacugcg

SEQ ID NO: 684120 - RNA, 19 nt, Artificial Sequence
  Description of Artificial Sequence: Synthetic oligonucleotide
  Sense strand starting at position 2149 of SEQ ID NO: 585997
aacgaccuugcgcaagauu

SEQ ID NO: 684121 - RNA, 19 nt, Artificial Sequence
  Description of Artificial Sequence: Synthetic oligonucleotide
  Antisense strand to SEQ ID NO: 684120
aaucuugcgcaaggucguu

SEQ ID NO: 684122 - RNA, 19 nt, Artificial Sequence
  Description of Artificial Sequence: Synthetic oligonucleotide
  Sense strand starting at position 2158 of SEQ ID NO: 585997
gcgcaagauuccuuuccuc

SEQ ID NO: 684123 - RNA, 19 nt, Artificial Sequence
  Description of Artificial Sequence: Synthetic oligonucleotide
  Antisense strand to SEQ ID NO: 684122
gaggaaaggaaucuugcgc

SEQ ID NO: 684124 - RNA, 19 nt, Artificial Sequence
  Description of Artificial Sequence: Synthetic oligonucleotide
  Sense strand starting at position 2171 of SEQ ID NO: 585997
uuccucuaugccugagguu

SEQ ID NO: 684125 - RNA, 19 nt, Artificial Sequence
  Description of Artificial Sequence: Synthetic oligonucleotide
  Antisense strand to SEQ ID NO: 684124
aaccucaggcauagaggaa

SEQ ID NO: 684126 - RNA, 19 nt, Artificial Sequence
  Description of Artificial Sequence: Synthetic oligonucleotide
  Sense strand starting at position 2172 of SEQ ID NO: 585997
uccucuaugccugagguuu

SEQ ID NO: 684127 - RNA, 19 nt, Artificial Sequence
  Description of Artificial Sequence: Synthetic oligonucleotide
  Antisense strand to SEQ ID NO: 684126
aaaccucaggcauagagga

SEQ ID NO: 684128 - RNA, 19 nt, Artificial Sequence
  Description of Artificial Sequence: Synthetic oligonucleotide
  Sense strand starting at position 2306 of SEQ ID NO: 585997
gagaaaggauugcuuaguu

SEQ ID NO: 684129 - RNA, 19 nt, Artificial Sequence
  Description of Artificial Sequence: Synthetic oligonucleotide
  Antisense strand to SEQ ID NO: 684128
aacuaagcaauccuuucuc

SEQ ID NO: 684130 - RNA, 19 nt, Artificial Sequence
  Description of Artificial Sequence: Synthetic oligonucleotide
  Sense strand starting at position 2447 of SEQ ID NO: 585997
gcuauuuccuuggaaauuu

SEQ ID NO: 684131 - RNA, 19 nt, Artificial Sequence
  Description of Artificial Sequence: Synthetic oligonucleotide
  Antisense strand to SEQ ID NO: 684130
aaauuuccaaggaaauagc

SEQ ID NO: 684132 - RNA, 19 nt, Artificial Sequence
  Description of Artificial Sequence: Synthetic oligonucleotide
  Sense strand starting at position 2518 of SEQ ID NO: 585997
uagcgauguugucuggaga

SEQ ID NO: 684133 - RNA, 19 nt, Artificial Sequence
  Description of Artificial Sequence: Synthetic oligonucleotide
  Antisense strand to SEQ ID NO: 684132
ucuccagacaacaucgcua

SEQ ID NO: 684134 - RNA, 19 nt, Artificial Sequence
  Description of Artificial Sequence: Synthetic oligonucleotide
  Sense strand starting at position 2519 of SEQ ID NO: 585997
agcgauguugucuggagag

SEQ ID NO: 684135 - RNA, 19 nt, Artificial Sequence
  Description of Artificial Sequence: Synthetic oligonucleotide
  Antisense strand to SEQ ID NO: 684134
cucuccagacaacaucgcu

SEQ ID NO: 684136 - RNA, 19 nt, Artificial Sequence
  Description of Artificial Sequence: Synthetic oligonucleotide
  Sense strand starting at position 2521 of SEQ ID NO: 585997
cgauguugucuggagagua

SEQ ID NO: 684137 - RNA, 19 nt, Artificial Sequence
  Description of Artificial Sequence: Synthetic oligonucleotide
  Antisense strand to SEQ ID NO: 684136
uacucuccagacaacaucg

SEQ ID NO: 684138 - RNA, 19 nt, Artificial Sequence
  Description of Artificial Sequence: Synthetic oligonucleotide
  Sense strand starting at position 2524 of SEQ ID NO: 585997
uguugucuggagaguaugu

SEQ ID NO: 684139 - RNA, 19 nt, Artificial Sequence
  Description of Artificial Sequence: Synthetic oligonucleotide
  Antisense strand to SEQ ID NO: 684138
acauacucuccagacaaca

SEQ ID NO: 684140 - RNA, 19 nt, Artificial Sequence
  Description of Artificial Sequence: Synthetic oligonucleotide
  Sense strand starting at position 2531 of SEQ ID NO: 585997
uggagaguauguucaaaga

SEQ ID NO: 684141 - RNA, 19 nt, Artificial Sequence
  Description of Artificial Sequence: Synthetic oligonucleotide
  Antisense strand to SEQ ID NO: 684140
ucuuugaacauacucucca

SEQ ID NO: 684142 - RNA, 19 nt, Artificial Sequence
  Description of Artificial Sequence: Synthetic oligonucleotide
  Sense strand starting at position 2649 of SEQ ID NO: 585997
uuggucuucuugucaaaca

SEQ ID NO: 684143 - RNA, 19 nt, Artificial Sequence
  Description of Artificial Sequence: Synthetic oligonucleotide
  Antisense strand to SEQ ID NO: 684142
uguuugacaagaagaccaa

SEQ ID NO: 684144 - RNA, 19 nt, Artificial Sequence
  Description of Artificial Sequence: Synthetic oligonucleotide
  Sense strand starting at position 2681 of SEQ ID NO: 585997
ugagaugccugauagauuu

SEQ ID NO: 684145 - RNA, 19 nt, Artificial Sequence
  Description of Artificial Sequence: Synthetic oligonucleotide
  Antisense strand to SEQ ID NO: 684144
aaaucuaucaggcaucuca

SEQ ID NO: 684146 - RNA, 19 nt, Artificial Sequence
  Description of Artificial Sequence: Synthetic oligonucleotide
  Sense strand starting at position 2785 of SEQ ID NO: 585997
acugcaacucugcaagaga

SEQ ID NO: 684147 - RNA, 19 nt, Artificial Sequence
  Description of Artificial Sequence: Synthetic oligonucleotide
  Antisense strand to SEQ ID NO: 684146
ucucuugcagaguugcagu

SEQ ID NO: 684148 - RNA, 19 nt, Artificial Sequence
  Description of Artificial Sequence: Synthetic oligonucleotide
  Sense strand starting at position 2899 of SEQ ID NO: 585997
ucacuuauuugauaguuac

SEQ ID NO: 684149 - RNA, 19 nt, Artificial Sequence
  Description of Artificial Sequence: Synthetic oligonucleotide
  Antisense strand to SEQ ID NO: 684148
guaacuaucaaauaaguga

SEQ ID NO: 684150 - RNA, 19 nt, Artificial Sequence
  Description of Artificial Sequence: Synthetic oligonucleotide
  Sense strand starting at position 2913 of SEQ ID NO: 585997
guuacuauguauccaccaa

SEQ ID NO: 684151 - RNA, 19 nt, Artificial Sequence
  Description of Artificial Sequence: Synthetic oligonucleotide
  Antisense strand to SEQ ID NO: 684150
uugguggauacauaguaac

SEQ ID NO: 684152 - RNA, 19 nt, Artificial Sequence
  Description of Artificial Sequence: Synthetic oligonucleotide
  Sense strand starting at position 3024 of SEQ ID NO: 585997
gguaaccacucagaaaugu

SEQ ID NO: 684153 - RNA, 19 nt, Artificial Sequence
  Description of Artificial Sequence: Synthetic oligonucleotide
  Antisense strand to SEQ ID NO: 684152
acauuucugagugguuacc

SEQ ID NO: 684154 - RNA, 19 nt, Artificial Sequence
  Description of Artificial Sequence: Synthetic oligonucleotide
  Sense strand starting at position 3033 of SEQ ID NO: 585997
ucagaaauguaguaucaag

SEQ ID NO: 684155 - RNA, 19 nt, Artificial Sequence
  Description of Artificial Sequence: Synthetic oligonucleotide
  Antisense strand to SEQ ID NO: 684154
cuugauacuacauuucuga

SEQ ID NO: 684156 - RNA, 19 nt, Artificial Sequence
  Description of Artificial Sequence: Synthetic oligonucleotide
  Sense strand starting at position 3044 of SEQ ID NO: 585997
guaucaagucaacgucauu

SEQ ID NO: 684157 - RNA, 19 nt, Artificial Sequence
  Description of Artificial Sequence: Synthetic oligonucleotide
  Antisense strand to SEQ ID NO: 684156
aaugacguugacuugauac

SEQ ID NO: 684158 - RNA, 19 nt, Artificial Sequence
  Description of Artificial Sequence: Synthetic oligonucleotide
  Sense strand starting at position 3049 of SEQ ID NO: 585997
aagucaacgucauuguuaa

SEQ ID NO: 684159 - RNA, 19 nt, Artificial Sequence
  Description of Artificial Sequence: Synthetic oligonucleotide
  Antisense strand to SEQ ID NO: 684158
uuaacaaugacguugacuu

SEQ ID NO: 684160 - RNA, 19 nt, Artificial Sequence
  Description of Artificial Sequence: Synthetic oligonucleotide
  Sense strand starting at position 3050 of SEQ ID NO: 585997
agucaacgucauuguuaau

SEQ ID NO: 684161 - RNA, 19 nt, Artificial Sequence
  Description of Artificial Sequence: Synthetic oligonucleotide
  Antisense strand to SEQ ID NO: 684160
auuaacaaugacguugacu

SEQ ID NO: 684162 - RNA, 19 nt, Artificial Sequence
  Description of Artificial Sequence: Synthetic oligonucleotide
  Sense strand starting at position 3258 of SEQ ID NO: 585997
uugccuucuaaaugaggga

SEQ ID NO: 684163 - RNA, 19 nt, Artificial Sequence
  Description of Artificial Sequence: Synthetic oligonucleotide
  Antisense strand to SEQ ID NO: 684162
ucccucauuuagaaggcaa

SEQ ID NO: 684164 - RNA, 19 nt, Artificial Sequence
  Description of Artificial Sequence: Synthetic oligonucleotide
  Sense strand starting at position 3410 of SEQ ID NO: 585997
cuauauuagcuguaggauc

SEQ ID NO: 684165 - RNA, 19 nt, Artificial Sequence
  Description of Artificial Sequence: Synthetic oligonucleotide
  Antisense strand to SEQ ID NO: 684164
gauccuacagcuaauauag

SEQ ID NO: 684166 - RNA, 19 nt, Artificial Sequence
  Description of Artificial Sequence: Synthetic oligonucleotide
  Sense strand starting at position 3418 of SEQ ID NO: 585997
gcuguaggauccuaggaaa

SEQ ID NO: 684167 - RNA, 19 nt, Artificial Sequence
  Description of Artificial Sequence: Synthetic oligonucleotide
  Antisense strand to SEQ ID NO: 684166
uuuccuaggauccuacagc

SEQ ID NO: 684168 - RNA, 19 nt, Artificial Sequence
  Description of Artificial Sequence: Synthetic oligonucleotide
  Sense strand starting at position 3421 of SEQ ID NO: 585997
guaggauccuaggaaaguc

SEQ ID NO: 684169 - RNA, 19 nt, Artificial Sequence
  Description of Artificial Sequence: Synthetic oligonucleotide
  Antisense strand to SEQ ID NO: 684168
gacuuuccuaggauccuac

SEQ ID NO: 684170 - RNA, 19 nt, Artificial Sequence
  Description of Artificial Sequence: Synthetic oligonucleotide
  Sense strand starting at position 3429 of SEQ ID NO: 585997
cuaggaaaguccuuuaacu

SEQ ID NO: 684171 - RNA, 19 nt, Artificial Sequence
  Description of Artificial Sequence: Synthetic oligonucleotide
  Antisense strand to SEQ ID NO: 684170
aguuaaaggacuuuccuag

SEQ ID NO: 684172 - RNA, 19 nt, Artificial Sequence
  Description of Artificial Sequence: Synthetic oligonucleotide
  Sense strand starting at position 3457 of SEQ ID NO: 585997
uccagcuccucguuuguaa

SEQ ID NO: 684173 - RNA, 19 nt, Artificial Sequence
  Description of Artificial Sequence: Synthetic oligonucleotide
  Antisense strand to SEQ ID NO: 684172
uuacaaacgaggagcugga

SEQ ID NO: 684174 - RNA, 19 nt, Artificial Sequence
  Description of Artificial Sequence: Synthetic oligonucleotide
  Sense strand starting at position 3487 of SEQ ID NO: 585997
uugacuguugugcacagaa

SEQ ID NO: 684175 - RNA, 19 nt, Artificial Sequence
  Description of Artificial Sequence: Synthetic oligonucleotide
  Antisense strand to SEQ ID NO: 684174
uucugugcacaacagucaa

SEQ ID NO: 684176 - RNA, 19 nt, Artificial Sequence
  Description of Artificial Sequence: Synthetic oligonucleotide
  Sense strand starting at position 3489 of SEQ ID NO: 585997
gacuguugugcacagaauu

SEQ ID NO: 684177 - RNA, 19 nt, Artificial Sequence
  Description of Artificial Sequence: Synthetic oligonucleotide
  Antisense strand to SEQ ID NO: 684176
aauucugugcacaacaguc

SEQ ID NO: 684178 - RNA, 19 nt, Artificial Sequence
  Description of Artificial Sequence: Synthetic oligonucleotide
  Sense strand starting at position 3495 of SEQ ID NO: 585997
ugugcacagaauugagaua

SEQ ID NO: 684179 - RNA, 19 nt, Artificial Sequence
  Description of Artificial Sequence: Synthetic oligonucleotide
  Antisense strand to SEQ ID NO: 684178
uaucucaauucugugcaca

SEQ ID NO: 684180 - RNA, 19 nt, Artificial Sequence
  Description of Artificial Sequence: Synthetic oligonucleotide
  Sense strand starting at position 8 of SEQ ID NO: 585998
gugcuuugcagggcuguua

SEQ ID NO: 684181 - RNA, 19 nt, Artificial Sequence
  Description of Artificial Sequence: Synthetic oligonucleotide
  Antisense strand to SEQ ID NO: 684180
uaacagcccugcaaagcac

SEQ ID NO: 684182 - RNA, 19 nt, Artificial Sequence
  Description of Artificial Sequence: Synthetic oligonucleotide
  Sense strand starting at position 83 of SEQ ID NO: 585998
gaaguugucuggucugaag

SEQ ID NO: 684183 - RNA, 19 nt, Artificial Sequence
  Description of Artificial Sequence: Synthetic oligonucleotide
  Antisense strand to SEQ ID NO: 684182
cuucagaccagacaacuuc

SEQ ID NO: 684184 - RNA, 19 nt, Artificial Sequence
  Description of Artificial Sequence: Synthetic oligonucleotide
  Sense strand starting at position 85 of SEQ ID NO: 585998
aguugucuggucugaagau

SEQ ID NO: 684185 - RNA, 19 nt, Artificial Sequence
  Description of Artificial Sequence: Synthetic oligonucleotide
  Antisense strand to SEQ ID NO: 684184
aucuucagaccagacaacu

SEQ ID NO: 684186 - RNA, 19 nt, Artificial Sequence
  Description of Artificial Sequence: Synthetic oligonucleotide
  Sense strand starting at position 180 of SEQ ID NO: 585998
uuguuaccugcaggaaaua

SEQ ID NO: 684187 - RNA, 19 nt, Artificial Sequence
  Description of Artificial Sequence: Synthetic oligonucleotide
  Antisense strand to SEQ ID NO: 684186
uauuuccugcagguaacaa

SEQ ID NO: 684188 - RNA, 19 nt, Artificial Sequence
  Description of Artificial Sequence: Synthetic oligonucleotide
  Sense strand starting at position 312 of SEQ ID NO: 585998
gugugcuuagccguggcaa

SEQ ID NO: 684189 - RNA, 19 nt, Artificial Sequence
  Description of Artificial Sequence: Synthetic oligonucleotide
  Antisense strand to SEQ ID NO: 684188
uugccacggcuaagcacac

SEQ ID NO: 684190 - RNA, 19 nt, Artificial Sequence
  Description of Artificial Sequence: Synthetic oligonucleotide
  Sense strand starting at position 639 of SEQ ID NO: 585998
uccugaaugucacuaagga

SEQ ID NO: 684191 - RNA, 19 nt, Artificial Sequence
  Description of Artificial Sequence: Synthetic oligonucleotide
  Antisense strand to SEQ ID NO: 684190
uccuuagugacauucagga

SEQ ID NO: 684192 - RNA, 19 nt, Artificial Sequence
  Description of Artificial Sequence: Synthetic oligonucleotide
  Sense strand starting at position 1307 of SEQ ID NO: 585998
cacacagcggucgguaauu

SEQ ID NO: 684193 - RNA, 19 nt, Artificial Sequence
  Description of Artificial Sequence: Synthetic oligonucleotide
  Antisense strand to SEQ ID NO: 684192
aauuaccgaccgcugugug

SEQ ID NO: 684194 - RNA, 19 nt, Artificial Sequence
  Description of Artificial Sequence: Synthetic oligonucleotide
  Sense strand starting at position 1380 of SEQ ID NO: 585998
ucgcguuguaugucaucau

SEQ ID NO: 684195 - RNA, 19 nt, Artificial Sequence
  Description of Artificial Sequence: Synthetic oligonucleotide
  Antisense strand to SEQ ID NO: 684194
augaugacauacaacgcga

SEQ ID NO: 684196 - RNA, 19 nt, Artificial Sequence
  Description of Artificial Sequence: Synthetic oligonucleotide
  Sense strand starting at position 1384 of SEQ ID NO: 585998
guuguaugucaucauguca

SEQ ID NO: 684197 - RNA, 19 nt, Artificial Sequence
  Description of Artificial Sequence: Synthetic oligonucleotide
  Antisense strand to SEQ ID NO: 684196
ugacaugaugacauacaac

SEQ ID NO: 684198 - RNA, 19 nt, Artificial Sequence
  Description of Artificial Sequence: Synthetic oligonucleotide
  Sense strand starting at position 1455 of SEQ ID NO: 585998
aagggacgccucuguuaca

SEQ ID NO: 684199 - RNA, 19 nt, Artificial Sequence
  Description of Artificial Sequence: Synthetic oligonucleotide
  Antisense strand to SEQ ID NO: 684198
uguaacagaggcgucccuu

SEQ ID NO: 684200 - RNA, 19 nt, Artificial Sequence
  Description of Artificial Sequence: Synthetic oligonucleotide
  Sense strand starting at position 1577 of SEQ ID NO: 585998
acccaaguuucugagacaa

SEQ ID NO: 684201 - RNA, 19 nt, Artificial Sequence
  Description of Artificial Sequence: Synthetic oligonucleotide
  Antisense strand to SEQ ID NO: 684200
uugucucagaaacuugggu

SEQ ID NO: 684202 - RNA, 19 nt, Artificial Sequence
  Description of Artificial Sequence: Synthetic oligonucleotide
  Sense strand starting at position 1579 of SEQ ID NO: 585998
ccaaguuucugagacaaau

SEQ ID NO: 684203 - RNA, 19 nt, Artificial Sequence
  Description of Artificial Sequence: Synthetic oligonucleotide
  Antisense strand to SEQ ID NO: 684202
auuugucucagaaacuugg

SEQ ID NO: 684204 - RNA, 19 nt, Artificial Sequence
  Description of Artificial Sequence: Synthetic oligonucleotide
  Sense strand starting at position 1633 of SEQ ID NO: 585998
ggcugugucccagggaaau

SEQ ID NO: 684205 - RNA, 19 nt, Artificial Sequence
  Description of Artificial Sequence: Synthetic oligonucleotide
  Antisense strand to SEQ ID NO: 684204
auuucccugggacacagcc

SEQ ID NO: 684206 - RNA, 19 nt, Artificial Sequence
  Description of Artificial Sequence: Synthetic oligonucleotide
  Sense strand starting at position 2423 of SEQ ID NO: 585998
ucgaguacccuuuggagua

SEQ ID NO: 684207 - RNA, 19 nt, Artificial Sequence
  Description of Artificial Sequence: Synthetic oligonucleotide
  Antisense strand to SEQ ID NO: 684206
uacuccaaaggguacucga

SEQ ID NO: 684208 - RNA, 19 nt, Artificial Sequence
  Description of Artificial Sequence: Synthetic oligonucleotide
  Sense strand starting at position 2721 of SEQ ID NO: 585998
ggcuccugcguccuuguaa

SEQ ID NO: 684209 - RNA, 19 nt, Artificial Sequence
  Description of Artificial Sequence: Synthetic oligonucleotide
  Antisense strand to SEQ ID NO: 684208
uuacaaggacgcaggagcc

SEQ ID NO: 684210 - RNA, 19 nt, Artificial Sequence
  Description of Artificial Sequence: Synthetic oligonucleotide
  Sense strand starting at position 2801 of SEQ ID NO: 585998
gugugucagagaggaaaga

SEQ ID NO: 684211 - RNA, 19 nt, Artificial Sequence
  Description of Artificial Sequence: Synthetic oligonucleotide
  Antisense strand to SEQ ID NO: 684210
ucuuuccucucugacacac

SEQ ID NO: 684212 - RNA, 19 nt, Artificial Sequence
  Description of Artificial Sequence: Synthetic oligonucleotide
  Sense strand starting at position 2824 of SEQ ID NO: 585998
aggaauauaucugccacgu

SEQ ID NO: 684213 - RNA, 19 nt, Artificial Sequence
  Description of Artificial Sequence: Synthetic oligonucleotide
  Antisense strand to SEQ ID NO: 684212
acguggcagauauauuccu

SEQ ID NO: 684214 - RNA, 19 nt, Artificial Sequence
  Description of Artificial Sequence: Synthetic oligonucleotide
  Sense strand starting at position 2828 of SEQ ID NO: 585998
auauaucugccacguugau

SEQ ID NO: 684215 - RNA, 19 nt, Artificial Sequence
  Description of Artificial Sequence: Synthetic oligonucleotide
  Antisense strand to SEQ ID NO: 684214
aucaacguggcagauauau

SEQ ID NO: 684216 - RNA, 19 nt, Artificial Sequence
  Description of Artificial Sequence: Synthetic oligonucleotide
  Sense strand starting at position 2841 of SEQ ID NO: 585998
guugaugugucagcugaug

SEQ ID NO: 684217 - RNA, 19 nt, Artificial Sequence
  Description of Artificial Sequence: Synthetic oligonucleotide
  Antisense strand to SEQ ID NO: 684216
caucagcugacacaucaac

SEQ ID NO: 684218 - RNA, 19 nt, Artificial Sequence
  Description of Artificial Sequence: Synthetic oligonucleotide
  Sense strand starting at position 2883 of SEQ ID NO: 585998
gucgccugauccucacaga

SEQ ID NO: 684219 - RNA, 19 nt, Artificial Sequence
  Description of Artificial Sequence: Synthetic oligonucleotide
  Antisense strand to SEQ ID NO: 684218
ucugugaggaucaggcgac

SEQ ID NO: 684220 - RNA, 19 nt, Artificial Sequence
  Description of Artificial Sequence: Synthetic oligonucleotide
  Sense strand starting at position 2884 of SEQ ID NO: 585998
ucgccugauccucacagaa

SEQ ID NO: 684221 - RNA, 19 nt, Artificial Sequence
  Description of Artificial Sequence: Synthetic oligonucleotide
  Antisense strand to SEQ ID NO: 684220
uucugugaggaucaggcga

SEQ ID NO: 684222 - RNA, 19 nt, Artificial Sequence
  Description of Artificial Sequence: Synthetic oligonucleotide
  Sense strand starting at position 2956 of SEQ ID NO: 585998
agcauugaaacguagguaa

SEQ ID NO: 684223 - RNA, 19 nt, Artificial Sequence
  Description of Artificial Sequence: Synthetic oligonucleotide
  Antisense strand to SEQ ID NO: 684222
uuaccuacguuucaaugcu

SEQ ID NO: 684224 - RNA, 19 nt, Artificial Sequence
  Description of Artificial Sequence: Synthetic oligonucleotide
  Sense strand starting at position 2958 of SEQ ID NO: 585998
cauugaaacguagguaauc

SEQ ID NO: 684225 - RNA, 19 nt, Artificial Sequence
  Description of Artificial Sequence: Synthetic oligonucleotide
  Antisense strand to SEQ ID NO: 684224
gauuaccuacguuucaaug

SEQ ID NO: 684226 - RNA, 19 nt, Artificial Sequence
  Description of Artificial Sequence: Synthetic oligonucleotide
  Sense strand starting at position 2989 of SEQ ID NO: 585998
ggcuguuaagugugaagaa

SEQ ID NO: 684227 - RNA, 19 nt, Artificial Sequence
  Description of Artificial Sequence: Synthetic oligonucleotide
  Antisense strand to SEQ ID NO: 684226
uucuucacacuuaacagcc

SEQ ID NO: 684228 - RNA, 19 nt, Artificial Sequence
  Description of Artificial Sequence: Synthetic oligonucleotide
  Sense strand starting at position 3103 of SEQ ID NO: 585998
uggauacauuguguuaaau

SEQ ID NO: 684229 - RNA, 19 nt, Artificial Sequence
  Description of Artificial Sequence: Synthetic oligonucleotide
  Antisense strand to SEQ ID NO: 684228
auuuaacacaauguaucca

SEQ ID NO: 684230 - RNA, 19 nt, Artificial Sequence
  Description of Artificial Sequence: Synthetic oligonucleotide
  Sense strand starting at position 3105 of SEQ ID NO: 585998
gauacauuguguuaaauga

SEQ ID NO: 684231 - RNA, 19 nt, Artificial Sequence
  Description of Artificial Sequence: Synthetic oligonucleotide
  Antisense strand to SEQ ID NO: 684230
ucauuuaacacaauguauc

SEQ ID NO: 684232 - RNA, 19 nt, Artificial Sequence
  Description of Artificial Sequence: Synthetic oligonucleotide
  Sense strand starting at position 3112 of SEQ ID NO: 585998
uguguuaaaugacuuguuu

SEQ ID NO: 684233 - RNA, 19 nt, Artificial Sequence
  Description of Artificial Sequence: Synthetic oligonucleotide
  Antisense strand to SEQ ID NO: 684232
aaacaagucauuuaacaca

SEQ ID NO: 684234 - RNA, 19 nt, Artificial Sequence
  Description of Artificial Sequence: Synthetic oligonucleotide
  Sense strand starting at position 3208 of SEQ ID NO: 585998
ggcuucugguaagcauuau

SEQ ID NO: 684235 - RNA, 19 nt, Artificial Sequence
  Description of Artificial Sequence: Synthetic oligonucleotide
  Antisense strand to SEQ ID NO: 684234
auaaugcuuaccagaagcc

SEQ ID NO: 684236 - RNA, 19 nt, Artificial Sequence
  Description of Artificial Sequence: Synthetic oligonucleotide
  Sense strand starting at position 3212 of SEQ ID NO: 585998
ucugguaagcauuauuacu

SEQ ID NO: 684237 - RNA, 19 nt, Artificial Sequence
  Description of Artificial Sequence: Synthetic oligonucleotide
  Antisense strand to SEQ ID NO: 684236
aguaauaaugcuuaccaga

SEQ ID NO: 684238 - RNA, 19 nt, Artificial Sequence
  Description of Artificial Sequence: Synthetic oligonucleotide
  Sense strand starting at position 3358 of SEQ ID NO: 585998
gugguaaggaccugacuua

SEQ ID NO: 684239 - RNA, 19 nt, Artificial Sequence
  Description of Artificial Sequence: Synthetic oligonucleotide
  Antisense strand to SEQ ID NO: 684238
uaagucagguccuuaccac

SEQ ID NO: 684240 - RNA, 19 nt, Artificial Sequence
  Description of Artificial Sequence: Synthetic oligonucleotide
  Sense strand starting at position 3486 of SEQ ID NO: 585998
uggagcuggcuuuguggua

SEQ ID NO: 684241 - RNA, 19 nt, Artificial Sequence
  Description of Artificial Sequence: Synthetic oligonucleotide
  Antisense strand to SEQ ID NO: 684240
uaccacaaagccagcucca

SEQ ID NO: 684242 - RNA, 19 nt, Artificial Sequence
  Description of Artificial Sequence: Synthetic oligonucleotide
  Sense strand starting at position 3493 of SEQ ID NO: 585998
ggcuuugugguaggagaug

SEQ ID NO: 684243 - RNA, 19 nt, Artificial Sequence
  Description of Artificial Sequence: Synthetic oligonucleotide
  Antisense strand to SEQ ID NO: 684242
caucuccuaccacaaagcc

SEQ ID NO: 684244 - RNA, 19 nt, Artificial Sequence
  Description of Artificial Sequence: Synthetic oligonucleotide
  Sense strand starting at position 3523 of SEQ ID NO: 585998
augaaagcacauugaguuu

SEQ ID NO: 684245 - RNA, 19 nt, Artificial Sequence
  Description of Artificial Sequence: Synthetic oligonucleotide
  Antisense strand to SEQ ID NO: 684244
aaacucaaugugcuuucau

SEQ ID NO: 684246 - RNA, 19 nt, Artificial Sequence
  Description of Artificial Sequence: Synthetic oligonucleotide
  Sense strand starting at position 3926 of SEQ ID NO: 585998
ccucaauaguuggucugua

SEQ ID NO: 684247 - RNA, 19 nt, Artificial Sequence
  Description of Artificial Sequence: Synthetic oligonucleotide
  Antisense strand to SEQ ID NO: 684246
uacagaccaacuauugagg

SEQ ID NO: 684248 - RNA, 19 nt, Artificial Sequence
  Description of Artificial Sequence: Synthetic oligonucleotide
  Sense strand starting at position 3927 of SEQ ID NO: 585998
cucaauaguuggucuguau

SEQ ID NO: 684249 - RNA, 19 nt, Artificial Sequence
  Description of Artificial Sequence: Synthetic oligonucleotide
  Antisense strand to SEQ ID NO: 684248
auacagaccaacuauugag

SEQ ID NO: 684250 - RNA, 19 nt, Artificial Sequence
  Description of Artificial Sequence: Synthetic oligonucleotide
  Sense strand starting at position 3931 of SEQ ID NO: 585998
auaguuggucuguaucgga

SEQ ID NO: 684251 - RNA, 19 nt, Artificial Sequence
  Description of Artificial Sequence: Synthetic oligonucleotide
  Antisense strand to SEQ ID NO: 684250
uccgauacagaccaacuau

SEQ ID NO: 684252 - RNA, 19 nt, Artificial Sequence
  Description of Artificial Sequence: Synthetic oligonucleotide
  Sense strand starting at position 3938 of SEQ ID NO: 585998
gucuguaucggagguggaa

SEQ ID NO: 684253 - RNA, 19 nt, Artificial Sequence
  Description of Artificial Sequence: Synthetic oligonucleotide
  Antisense strand to SEQ ID NO: 684252
uuccaccuccgauacagac

SEQ ID NO: 684254 - RNA, 19 nt, Artificial Sequence
  Description of Artificial Sequence: Synthetic oligonucleotide
  Sense strand starting at position 3961 of SEQ ID NO: 585998
aagccagaugucugugagu

SEQ ID NO: 684255 - RNA, 19 nt, Artificial Sequence
  Description of Artificial Sequence: Synthetic oligonucleotide
  Antisense strand to SEQ ID NO: 684254
acucacagacaucuggcuu

SEQ ID NO: 684256 - RNA, 19 nt, Artificial Sequence
  Description of Artificial Sequence: Synthetic oligonucleotide
  Sense strand starting at position 3963 of SEQ ID NO: 585998
gccagaugucugugaguag

SEQ ID NO: 684257 - RNA, 19 nt, Artificial Sequence
  Description of Artificial Sequence: Synthetic oligonucleotide
  Antisense strand to SEQ ID NO: 684256
cuacucacagacaucuggc

SEQ ID NO: 684258 - RNA, 19 nt, Artificial Sequence
  Description of Artificial Sequence: Synthetic oligonucleotide
  Sense strand starting at position 3970 of SEQ ID NO: 585998
gucugugaguagccucuua

SEQ ID NO: 684259 - RNA, 19 nt, Artificial Sequence
  Description of Artificial Sequence: Synthetic oligonucleotide
  Antisense strand to SEQ ID NO: 684258
uaagaggcuacucacagac

SEQ ID NO: 684260 - RNA, 19 nt, Artificial Sequence
  Description of Artificial Sequence: Synthetic oligonucleotide
  Sense strand starting at position 96 of SEQ ID NO: 585999
aaucuuaagucaccgguga

SEQ ID NO: 684261 - RNA, 19 nt, Artificial Sequence
  Description of Artificial Sequence: Synthetic oligonucleotide
  Antisense strand to SEQ ID NO: 684260
ucaccggugacuuaagauu

SEQ ID NO: 684262 - RNA, 19 nt, Artificial Sequence
  Description of Artificial Sequence: Synthetic oligonucleotide
  Sense strand starting at position 97 of SEQ ID NO: 585999
aucuuaagucaccggugau

SEQ ID NO: 684263 - RNA, 19 nt, Artificial Sequence
  Description of Artificial Sequence: Synthetic oligonucleotide
  Antisense strand to SEQ ID NO: 684262
aucaccggugacuuaagau

SEQ ID NO: 684264 - RNA, 19 nt, Artificial Sequence
  Description of Artificial Sequence: Synthetic oligonucleotide
  Sense strand starting at position 98 of SEQ ID NO: 585999
ucuuaagucaccggugauu

SEQ ID NO: 684265 - RNA, 19 nt, Artificial Sequence
  Description of Artificial Sequence: Synthetic oligonucleotide
  Antisense strand to SEQ ID NO: 684264
aaucaccggugacuuaaga

SEQ ID NO: 684266 - RNA, 19 nt, Artificial Sequence
  Description of Artificial Sequence: Synthetic oligonucleotide
  Sense strand starting at position 100 of SEQ ID NO: 585999
uuaagucaccggugauugu

SEQ ID NO: 684267 - RNA, 19 nt, Artificial Sequence
  Description of Artificial Sequence: Synthetic oligonucleotide
  Antisense strand to SEQ ID NO: 684266
acaaucaccggugacuuaa

SEQ ID NO: 684268 - RNA, 19 nt, Artificial Sequence
  Description of Artificial Sequence: Synthetic oligonucleotide
  Sense strand starting at position 101 of SEQ ID NO: 585999
uaagucaccggugauugua

SEQ ID NO: 684269 - RNA, 19 nt, Artificial Sequence
  Description of Artificial Sequence: Synthetic oligonucleotide
  Antisense strand to SEQ ID NO: 684268
uacaaucaccggugacuua

SEQ ID NO: 684270 - RNA, 19 nt, Artificial Sequence
  Description of Artificial Sequence: Synthetic oligonucleotide
  Sense strand starting at position 109 of SEQ ID NO: 585999
cggugauuguacuaaauac

SEQ ID NO: 684271 - RNA, 19 nt, Artificial Sequence
  Description of Artificial Sequence: Synthetic oligonucleotide
  Antisense strand to SEQ ID NO: 684270
guauuuaguacaaucaccg

SEQ ID NO: 684272 - RNA, 19 nt, Artificial Sequence
  Description of Artificial Sequence: Synthetic oligonucleotide
  Sense strand starting at position 145 of SEQ ID NO: 585999
aauauagaucagugaguca

SEQ ID NO: 684273 - RNA, 19 nt, Artificial Sequence
  Description of Artificial Sequence: Synthetic oligonucleotide
  Antisense strand to SEQ ID NO: 684272
ugacucacugaucuauauu

SEQ ID NO: 684274 - RNA, 19 nt, Artificial Sequence
  Description of Artificial Sequence: Synthetic oligonucleotide
  Sense strand starting at position 156 of SEQ ID NO: 585999
gugagucaaugcucagaua

SEQ ID NO: 684275 - RNA, 19 nt, Artificial Sequence
  Description of Artificial Sequence: Synthetic oligonucleotide
  Antisense strand to SEQ ID NO: 684274
uaucugagcauugacucac

SEQ ID NO: 684276 - RNA, 19 nt, Artificial Sequence
  Description of Artificial Sequence: Synthetic oligonucleotide
  Sense strand starting at position 157 of SEQ ID NO: 585999
ugagucaaugcucagauaa

SEQ ID NO: 684277 - RNA, 19 nt, Artificial Sequence
  Description of Artificial Sequence: Synthetic oligonucleotide
  Antisense strand to SEQ ID NO: 684276
uuaucugagcauugacuca

SEQ ID NO: 684278 - RNA, 19 nt, Artificial Sequence
  Description of Artificial Sequence: Synthetic oligonucleotide
  Sense strand starting at position 159 of SEQ ID NO: 585999
agucaaugcucagauaaga

SEQ ID NO: 684279 - RNA, 19 nt, Artificial Sequence
  Description of Artificial Sequence: Synthetic oligonucleotide
  Antisense strand to SEQ ID NO: 684278
ucuuaucugagcauugacu

SEQ ID NO: 684280 - RNA, 19 nt, Artificial Sequence
  Description of Artificial Sequence: Synthetic oligonucleotide
  Sense strand starting at position 322 of SEQ ID NO: 585999
gcggauguucuucaugcuu

SEQ ID NO: 684281 - RNA, 19 nt, Artificial Sequence
  Description of Artificial Sequence: Synthetic oligonucleotide
  Antisense strand to SEQ ID NO: 684280
aagcaugaagaacauccgc

SEQ ID NO: 684282 - RNA, 19 nt, Artificial Sequence
  Description of Artificial Sequence: Synthetic oligonucleotide
  Sense strand starting at position 335 of SEQ ID NO: 585999
augcuuucccucuggcaau

SEQ ID NO: 684283 - RNA, 19 nt, Artificial Sequence
  Description of Artificial Sequence: Synthetic oligonucleotide
  Antisense strand to SEQ ID NO: 684282
auugccagagggaaagcau

SEQ ID NO: 684284 - RNA, 19 nt, Artificial Sequence
  Description of Artificial Sequence: Synthetic oligonucleotide
  Sense strand starting at position 428 of SEQ ID NO: 585999
acacgaaauugucuggucu

SEQ ID NO: 684285 - RNA, 19 nt, Artificial Sequence
  Description of Artificial Sequence: Synthetic oligonucleotide
  Antisense strand to SEQ ID NO: 684284
agaccagacaauuucgugu

SEQ ID NO: 684286 - RNA, 19 nt, Artificial Sequence
  Description of Artificial Sequence: Synthetic oligonucleotide
  Sense strand starting at position 429 of SEQ ID NO: 585999
cacgaaauugucuggucug

SEQ ID NO: 684287 - RNA, 19 nt, Artificial Sequence
  Description of Artificial Sequence: Synthetic oligonucleotide
  Antisense strand to SEQ ID NO: 684286
cagaccagacaauuucgug

SEQ ID NO: 684288 - RNA, 19 nt, Artificial Sequence
  Description of Artificial Sequence: Synthetic oligonucleotide
  Sense strand starting at position 432 of SEQ ID NO: 585999
gaaauugucuggucugaag

SEQ ID NO: 684289 - RNA, 19 nt, Artificial Sequence
  Description of Artificial Sequence: Synthetic oligonucleotide
  Antisense strand to SEQ ID NO: 684288
cuucagaccagacaauuuc

SEQ ID NO: 684290 - RNA, 19 nt, Artificial Sequence
  Description of Artificial Sequence: Synthetic oligonucleotide
  Sense strand starting at position 434 of SEQ ID NO: 585999
aauugucuggucugaagau

SEQ ID NO: 684291 - RNA, 19 nt, Artificial Sequence
  Description of Artificial Sequence: Synthetic oligonucleotide
  Antisense strand to SEQ ID NO: 684290
aucuucagaccagacaauu

SEQ ID NO: 684292 - RNA, 19 nt, Artificial Sequence
  Description of Artificial Sequence: Synthetic oligonucleotide
  Sense strand starting at position 447 of SEQ ID NO: 585999
gaagaucuggccgaauggu

SEQ ID NO: 684293 - RNA, 19 nt, Artificial Sequence
  Description of Artificial Sequence: Synthetic oligonucleotide
  Antisense strand to SEQ ID NO: 684292
accauucggccagaucuuc

SEQ ID NO: 684294 - RNA, 19 nt, Artificial Sequence
  Description of Artificial Sequence: Synthetic oligonucleotide
  Sense strand starting at position 457 of SEQ ID NO: 585999
ccgaaugguccagaccuaa

SEQ ID NO: 684295 - RNA, 19 nt, Artificial Sequence
  Description of Artificial Sequence: Synthetic oligonucleotide
  Antisense strand to SEQ ID NO: 684294
uuaggucuggaccauucgg

SEQ ID NO: 684296 - RNA, 19 nt, Artificial Sequence
  Description of Artificial Sequence: Synthetic oligonucleotide
  Sense strand starting at position 494 of SEQ ID NO: 585999
gcuccagauccacgaggau

SEQ ID NO: 684297 - RNA, 19 nt, Artificial Sequence
  Description of Artificial Sequence: Synthetic oligonucleotide
  Antisense strand to SEQ ID NO: 684296
auccucguggaucuggagc

SEQ ID NO: 684298 - RNA, 19 nt, Artificial Sequence
  Description of Artificial Sequence: Synthetic oligonucleotide
  Sense strand starting at position 657 of SEQ ID NO: 585999
aagggcucuguuggcauaa

SEQ ID NO: 684299 - RNA, 19 nt, Artificial Sequence
  Description of Artificial Sequence: Synthetic oligonucleotide
  Antisense strand to SEQ ID NO: 684298
uuaugccaacagagcccuu

SEQ ID NO: 684300 - RNA, 19 nt, Artificial Sequence
  Description of Artificial Sequence: Synthetic oligonucleotide
  Sense strand starting at position 839 of SEQ ID NO: 585999
uguaguaaacauugauucu

SEQ ID NO: 684301 - RNA, 19 nt, Artificial Sequence
  Description of Artificial Sequence: Synthetic oligonucleotide
  Antisense strand to SEQ ID NO: 684300
agaaucaauguuuacuaca

SEQ ID NO: 684302 - RNA, 19 nt, Artificial Sequence
  Description of Artificial Sequence: Synthetic oligonucleotide
  Sense strand starting at position 898 of SEQ ID NO: 585999
gggucaaucccaugcucau

SEQ ID NO: 684303 - RNA, 19 nt, Artificial Sequence
  Description of Artificial Sequence: Synthetic oligonucleotide
  Antisense strand to SEQ ID NO: 684302
augagcaugggauugaccc

SEQ ID NO: 684304 - RNA, 19 nt, Artificial Sequence
  Description of Artificial Sequence: Synthetic oligonucleotide
  Sense strand starting at position 948 of SEQ ID NO: 585999
ggcugcauuuagccaugaa

SEQ ID NO: 684305 - RNA, 19 nt, Artificial Sequence
  Description of Artificial Sequence: Synthetic oligonucleotide
  Antisense strand to SEQ ID NO: 684304
uucauggcuaaaugcagcc

SEQ ID NO: 684306 - RNA, 19 nt, Artificial Sequence
  Description of Artificial Sequence: Synthetic oligonucleotide
  Sense strand starting at position 951 of SEQ ID NO: 585999
ugcauuuagccaugaacga

SEQ ID NO: 684307 - RNA, 19 nt, Artificial Sequence
  Description of Artificial Sequence: Synthetic oligonucleotide
  Antisense strand to SEQ ID NO: 684306
ucguucauggcuaaaugca

SEQ ID NO: 684308 - RNA, 19 nt, Artificial Sequence
  Description of Artificial Sequence: Synthetic oligonucleotide
  Sense strand starting at position 1117 of SEQ ID NO: 585999
gggcguuucccaggcaaac

SEQ ID NO: 684309 - RNA, 19 nt, Artificial Sequence
  Description of Artificial Sequence: Synthetic oligonucleotide
  Antisense strand to SEQ ID NO: 684308
guuugccugggaaacgccc

SEQ ID NO: 684310 - RNA, 19 nt, Artificial Sequence
  Description of Artificial Sequence: Synthetic oligonucleotide
  Sense strand starting at position 1392 of SEQ ID NO: 585999
gguucaagcgaguacaauu

SEQ ID NO: 684311 - RNA, 19 nt, Artificial Sequence
  Description of Artificial Sequence: Synthetic oligonucleotide
  Antisense strand to SEQ ID NO: 684310
aauuguacucgcuugaacc

SEQ ID NO: 684312 - RNA, 19 nt, Artificial Sequence
  Description of Artificial Sequence: Synthetic oligonucleotide
  Sense strand starting at position 1542 of SEQ ID NO: 585999
ccaaaugaguuacagcaga

SEQ ID NO: 684313 - RNA, 19 nt, Artificial Sequence
  Description of Artificial Sequence: Synthetic oligonucleotide
  Antisense strand to SEQ ID NO: 684312
ucugcuguaacucauuugg

SEQ ID NO: 684314 - RNA, 19 nt, Artificial Sequence
  Description of Artificial Sequence: Synthetic oligonucleotide
  Sense strand starting at position 1585 of SEQ ID NO: 585999
ccgcgaaagucaccuccua

SEQ ID NO: 684315 - RNA, 19 nt, Artificial Sequence
  Description of Artificial Sequence: Synthetic oligonucleotide
  Antisense strand to SEQ ID NO: 684314
uaggaggugacuuucgcgg

SEQ ID NO: 684316 - RNA, 19 nt, Artificial Sequence
  Description of Artificial Sequence: Synthetic oligonucleotide
  Sense strand starting at position 2785 of SEQ ID NO: 585999
uuuguugcucgcuagugau

SEQ ID NO: 684317 - RNA, 19 nt, Artificial Sequence
  Description of Artificial Sequence: Synthetic oligonucleotide
  Antisense strand to SEQ ID NO: 684316
aucacuagcgagcaacaaa

SEQ ID NO: 684318 - RNA, 19 nt, Artificial Sequence
  Description of Artificial Sequence: Synthetic oligonucleotide
  Sense strand starting at position 2874 of SEQ ID NO: 585999
gggcugucggcggaacaaa

SEQ ID NO: 684319 - RNA, 19 nt, Artificial Sequence
  Description of Artificial Sequence: Synthetic oligonucleotide
  Antisense strand to SEQ ID NO: 684318
uuuguuccgccgacagccc

SEQ ID NO: 684320 - RNA, 19 nt, Artificial Sequence
  Description of Artificial Sequence: Synthetic oligonucleotide
  Sense strand starting at position 2896 of SEQ ID NO: 585999
cucucagaaacgugggaua

SEQ ID NO: 684321 - RNA, 19 nt, Artificial Sequence
  Description of Artificial Sequence: Synthetic oligonucleotide
  Antisense strand to SEQ ID NO: 684320
uaucccacguuucugagag

SEQ ID NO: 684322 - RNA, 19 nt, Artificial Sequence
  Description of Artificial Sequence: Synthetic oligonucleotide
  Sense strand starting at position 2906 of SEQ ID NO: 585999
cgugggauacgcuguguaa

SEQ ID NO: 684323 - RNA, 19 nt, Artificial Sequence
  Description of Artificial Sequence: Synthetic oligonucleotide
  Antisense strand to SEQ ID NO: 684322
uuacacagcguaucccacg

SEQ ID NO: 684324 - RNA, 19 nt, Artificial Sequence
  Description of Artificial Sequence: Synthetic oligonucleotide
  Sense strand starting at position 2915 of SEQ ID NO: 585999
cgcuguguaacccaguauu

SEQ ID NO: 684325 - RNA, 19 nt, Artificial Sequence
  Description of Artificial Sequence: Synthetic oligonucleotide
  Antisense strand to SEQ ID NO: 684324
aauacuggguuacacagcg

SEQ ID NO: 684326 - RNA, 19 nt, Artificial Sequence
  Description of Artificial Sequence: Synthetic oligonucleotide
  Sense strand starting at position 3240 of SEQ ID NO: 585999
acuggucucuuuguuacuu

SEQ ID NO: 684327 - RNA, 19 nt, Artificial Sequence
  Description of Artificial Sequence: Synthetic oligonucleotide
  Antisense strand to SEQ ID NO: 684326
aaguaacaaagagaccagu

SEQ ID NO: 684328 - RNA, 19 nt, Artificial Sequence
  Description of Artificial Sequence: Synthetic oligonucleotide
  Sense strand starting at position 3349 of SEQ ID NO: 585999
gggaaagggugucagaaac

SEQ ID NO: 684329 - RNA, 19 nt, Artificial Sequence
  Description of Artificial Sequence: Synthetic oligonucleotide
  Antisense strand to SEQ ID NO: 684328
guuucugacacccuuuccc

SEQ ID NO: 684330 - RNA, 19 nt, Artificial Sequence
  Description of Artificial Sequence: Synthetic oligonucleotide
  Sense strand starting at position 3388 of SEQ ID NO: 585999
ccugcaauucgaugacuga

SEQ ID NO: 684331 - RNA, 19 nt, Artificial Sequence
  Description of Artificial Sequence: Synthetic oligonucleotide
  Antisense strand to SEQ ID NO: 684330
ucagucaucgaauugcagg

SEQ ID NO: 684332 - RNA, 19 nt, Artificial Sequence
  Description of Artificial Sequence: Synthetic oligonucleotide
  Sense strand starting at position 3389 of SEQ ID NO: 585999
cugcaauucgaugacugaa

SEQ ID NO: 684333 - RNA, 19 nt, Artificial Sequence
  Description of Artificial Sequence: Synthetic oligonucleotide
  Antisense strand to SEQ ID NO: 684332
uucagucaucgaauugcag

SEQ ID NO: 684334 - RNA, 19 nt, Artificial Sequence
  Description of Artificial Sequence: Synthetic oligonucleotide
  Sense strand starting at position 3603 of SEQ ID NO: 585999
agucgauuccaauguacaa

SEQ ID NO: 684335 - RNA, 19 nt, Artificial Sequence
  Description of Artificial Sequence: Synthetic oligonucleotide
  Antisense strand to SEQ ID NO: 684334
uuguacauuggaaucgacu

SEQ ID NO: 684336 - RNA, 19 nt, Artificial Sequence
  Description of Artificial Sequence: Synthetic oligonucleotide
  Sense strand starting at position 3813 of SEQ ID NO: 585999
ccgaguuucuaauccagau

SEQ ID NO: 684337 - RNA, 19 nt, Artificial Sequence
  Description of Artificial Sequence: Synthetic oligonucleotide
  Antisense strand to SEQ ID NO: 684336
aucuggauuagaaacucgg

SEQ ID NO: 684338 - RNA, 19 nt, Artificial Sequence
  Description of Artificial Sequence: Synthetic oligonucleotide
  Sense strand starting at position 3859 of SEQ ID NO: 585999
agcaauucccaaggucaua

SEQ ID NO: 684339 - RNA, 19 nt, Artificial Sequence
  Description of Artificial Sequence: Synthetic oligonucleotide
  Antisense strand to SEQ ID NO: 684338
uaugaccuugggaauugcu

SEQ ID NO: 684340 - RNA, 19 nt, Artificial Sequence
  Description of Artificial Sequence: Synthetic oligonucleotide
  Sense strand starting at position 27 of SEQ ID NO: 586000
gaggauauugugggcuaca

SEQ ID NO: 684341 - RNA, 19 nt, Artificial Sequence
  Description of Artificial Sequence: Synthetic oligonucleotide
  Antisense strand to SEQ ID NO: 684340
uguagcccacaauauccuc

SEQ ID NO: 684342 - RNA, 19 nt, Artificial Sequence
  Description of Artificial Sequence: Synthetic oligonucleotide
  Sense strand starting at position 28 of SEQ ID NO: 586000
aggauauugugggcuacaa

SEQ ID NO: 684343 - RNA, 19 nt, Artificial Sequence
  Description of Artificial Sequence: Synthetic oligonucleotide
  Antisense strand to SEQ ID NO: 684342
uuguagcccacaauauccu

SEQ ID NO: 684344 - RNA, 19 nt, Artificial Sequence
  Description of Artificial Sequence: Synthetic oligonucleotide
  Sense strand starting at position 30 of SEQ ID NO: 586000
gauauugugggcuacaaau

SEQ ID NO: 684345 - RNA, 19 nt, Artificial Sequence
  Description of Artificial Sequence: Synthetic oligonucleotide
  Antisense strand to SEQ ID NO: 684344
auuuguagcccacaauauc

SEQ ID NO: 684346 - RNA, 19 nt, Artificial Sequence
  Description of Artificial Sequence: Synthetic oligonucleotide
  Sense strand starting at position 53 of SEQ ID NO: 586000
gggaaucuauagucuauau

SEQ ID NO: 684347 - RNA, 19 nt, Artificial Sequence
  Description of Artificial Sequence: Synthetic oligonucleotide
  Antisense strand to SEQ ID NO: 684346
auauagacuauagauuccc

SEQ ID NO: 684348 - RNA, 19 nt, Artificial Sequence
  Description of Artificial Sequence: Synthetic oligonucleotide
  Sense strand starting at position 208 of SEQ ID NO: 586000
aaguaaugugccuaugaaa

SEQ ID NO: 684349 - RNA, 19 nt, Artificial Sequence
  Description of Artificial Sequence: Synthetic oligonucleotide
  Antisense strand to SEQ ID NO: 684348
uuucauaggcacauuacuu

SEQ ID NO: 684350 - RNA, 19 nt, Artificial Sequence
  Description of Artificial Sequence: Synthetic oligonucleotide
  Sense strand starting at position 365 of SEQ ID NO: 586000
gcuuucucugaagauaacu

SEQ ID NO: 684351 - RNA, 19 nt, Artificial Sequence
  Description of Artificial Sequence: Synthetic oligonucleotide
  Antisense strand to SEQ ID NO: 684350
aguuaucuucagagaaagc

SEQ ID NO: 684352 - RNA, 19 nt, Artificial Sequence
  Description of Artificial Sequence: Synthetic oligonucleotide
  Sense strand starting at position 715 of SEQ ID NO: 586000
uaguuauuacaggaugcau

SEQ ID NO: 684353 - RNA, 19 nt, Artificial Sequence
  Description of Artificial Sequence: Synthetic oligonucleotide
  Antisense strand to SEQ ID NO: 684352
augcauccuguaauaacua

SEQ ID NO: 684354 - RNA, 19 nt, Artificial Sequence
  Description of Artificial Sequence: Synthetic oligonucleotide
  Sense strand starting at position 737 of SEQ ID NO: 586000
caagaugcccucugggaaa

SEQ ID NO: 684355 - RNA, 19 nt, Artificial Sequence
  Description of Artificial Sequence: Synthetic oligonucleotide
  Antisense strand to SEQ ID NO: 684354
uuucccagagggcaucuug

SEQ ID NO: 684356 - RNA, 19 nt, Artificial Sequence
  Description of Artificial Sequence: Synthetic oligonucleotide
  Sense strand starting at position 927 of SEQ ID NO: 586000
uuuauuguccuuugaagaa

SEQ ID NO: 684357 - RNA, 19 nt, Artificial Sequence
  Description of Artificial Sequence: Synthetic oligonucleotide
  Antisense strand to SEQ ID NO: 684356
uucuucaaaggacaauaaa

SEQ ID NO: 684358 - RNA, 19 nt, Artificial Sequence
  Description of Artificial Sequence: Synthetic oligonucleotide
  Sense strand starting at position 931 of SEQ ID NO: 586000
uuguccuuugaagaauucu

SEQ ID NO: 684359 - RNA, 19 nt, Artificial Sequence
  Description of Artificial Sequence: Synthetic oligonucleotide
  Antisense strand to SEQ ID NO: 684358
agaauucuucaaaggacaa

SEQ ID NO: 684360 - RNA, 19 nt, Artificial Sequence
  Description of Artificial Sequence: Synthetic oligonucleotide
  Sense strand starting at position 972 of SEQ ID NO: 586000
aguaucacacugugacaga

SEQ ID NO: 684361 - RNA, 19 nt, Artificial Sequence
  Description of Artificial Sequence: Synthetic oligonucleotide
  Antisense strand to SEQ ID NO: 684360
ucugucacagugugauacu

SEQ ID NO: 684362 - RNA, 19 nt, Artificial Sequence
  Description of Artificial Sequence: Synthetic oligonucleotide
  Sense strand starting at position 1226 of SEQ ID NO: 586000
gaguaaaugccagaucuac

SEQ ID NO: 684363 - RNA, 19 nt, Artificial Sequence
  Description of Artificial Sequence: Synthetic oligonucleotide
  Antisense strand to SEQ ID NO: 684362
guagaucuggcauuuacuc

SEQ ID NO: 684364 - RNA, 19 nt, Artificial Sequence
  Description of Artificial Sequence: Synthetic oligonucleotide
  Sense strand starting at position 1349 of SEQ ID NO: 586000
aaagcugacugguuaaauu

SEQ ID NO: 684365 - RNA, 19 nt, Artificial Sequence
  Description of Artificial Sequence: Synthetic oligonucleotide
  Antisense strand to SEQ ID NO: 684364
aauuuaaccagucagcuuu

SEQ ID NO: 684366 - RNA, 19 nt, Artificial Sequence
  Description of Artificial Sequence: Synthetic oligonucleotide
  Sense strand starting at position 1382 of SEQ ID NO: 586000
ccacacguguuaucuauuu

SEQ ID NO: 684367 - RNA, 19 nt, Artificial Sequence
  Description of Artificial Sequence: Synthetic oligonucleotide
  Antisense strand to SEQ ID NO: 684366
aaauagauaacacgugugg

SEQ ID NO: 684368 - RNA, 19 nt, Artificial Sequence
  Description of Artificial Sequence: Synthetic oligonucleotide
  Sense strand starting at position 1557 of SEQ ID NO: 586000
acguucuuuacugggaaga

SEQ ID NO: 684369 - RNA, 19 nt, Artificial Sequence
  Description of Artificial Sequence: Synthetic oligonucleotide
  Antisense strand to SEQ ID NO: 684368
ucuucccaguaaagaacgu

SEQ ID NO: 684370 - RNA, 19 nt, Artificial Sequence
  Description of Artificial Sequence: Synthetic oligonucleotide
  Sense strand starting at position 1603 of SEQ ID NO: 586000
aaagcucaagucgauuauu

SEQ ID NO: 684371 - RNA, 19 nt, Artificial Sequence
  Description of Artificial Sequence: Synthetic oligonucleotide
  Antisense strand to SEQ ID NO: 684370
aauaaucgacuugagcuuu

SEQ ID NO: 684372 - RNA, 19 nt, Artificial Sequence
  Description of Artificial Sequence: Synthetic oligonucleotide
  Sense strand starting at position 1780 of SEQ ID NO: 586000
gaaagagaauaggacauua

SEQ ID NO: 684373 - RNA, 19 nt, Artificial Sequence
  Description of Artificial Sequence: Synthetic oligonucleotide
  Antisense strand to SEQ ID NO: 684372
uaauguccuauucucuuuc

SEQ ID NO: 684374 - RNA, 19 nt, Artificial Sequence
  Description of Artificial Sequence: Synthetic oligonucleotide
  Sense strand starting at position 2179 of SEQ ID NO: 586000
aggcuuuggagugguauuu

SEQ ID NO: 684375 - RNA, 19 nt, Artificial Sequence
  Description of Artificial Sequence: Synthetic oligonucleotide
  Antisense strand to SEQ ID NO: 684374
aaauaccacuccaaagccu

SEQ ID NO: 684376 - RNA, 19 nt, Artificial Sequence
  Description of Artificial Sequence: Synthetic oligonucleotide
  Sense strand starting at position 2470 of SEQ ID NO: 586000
ccaguauuuguugaacgcu

SEQ ID NO: 684377 - RNA, 19 nt, Artificial Sequence
  Description of Artificial Sequence: Synthetic oligonucleotide
  Antisense strand to SEQ ID NO: 684376
agcguucaacaaauacugg

SEQ ID NO: 684378 - RNA, 19 nt, Artificial Sequence
  Description of Artificial Sequence: Synthetic oligonucleotide
  Sense strand starting at position 2519 of SEQ ID NO: 586000
cugggaagauuagaaagaa

SEQ ID NO: 684379 - RNA, 19 nt, Artificial Sequence
  Description of Artificial Sequence: Synthetic oligonucleotide
  Antisense strand to SEQ ID NO: 684378
uucuuucuaaucuucccag

SEQ ID NO: 684380 - RNA, 19 nt, Artificial Sequence
  Description of Artificial Sequence: Synthetic oligonucleotide
  Sense strand starting at position 2579 of SEQ ID NO: 586000
ugaagacauacacgcgaaa

SEQ ID NO: 684381 - RNA, 19 nt, Artificial Sequence
  Description of Artificial Sequence: Synthetic oligonucleotide
  Antisense strand to SEQ ID NO: 684380
uuucgcguguaugucuuca

SEQ ID NO: 684382 - RNA, 19 nt, Artificial Sequence
  Description of Artificial Sequence: Synthetic oligonucleotide
  Sense strand starting at position 2623 of SEQ ID NO: 586000
cuauaagugcaauaggauu

SEQ ID NO: 684383 - RNA, 19 nt, Artificial Sequence
  Description of Artificial Sequence: Synthetic oligonucleotide
  Antisense strand to SEQ ID NO: 684382
aauccuauugcacuuauag

SEQ ID NO: 684384 - RNA, 19 nt, Artificial Sequence
  Description of Artificial Sequence: Synthetic oligonucleotide
  Sense strand starting at position 2636 of SEQ ID NO: 586000
aggauucagugguugagga

SEQ ID NO: 684385 - RNA, 19 nt, Artificial Sequence
  Description of Artificial Sequence: Synthetic oligonucleotide
  Antisense strand to SEQ ID NO: 684384
uccucaaccacugaauccu

SEQ ID NO: 684386 - RNA, 19 nt, Artificial Sequence
  Description of Artificial Sequence: Synthetic oligonucleotide
  Sense strand starting at position 2637 of SEQ ID NO: 586000
ggauucagugguugaggau

SEQ ID NO: 684387 - RNA, 19 nt, Artificial Sequence
  Description of Artificial Sequence: Synthetic oligonucleotide
  Antisense strand to SEQ ID NO: 684386
auccucaaccacugaaucc

SEQ ID NO: 684388 - RNA, 19 nt, Artificial Sequence
  Description of Artificial Sequence: Synthetic oligonucleotide
  Sense strand starting at position 2643 of SEQ ID NO: 586000
agugguugaggauguagau

SEQ ID NO: 684389 - RNA, 19 nt, Artificial Sequence
  Description of Artificial Sequence: Synthetic oligonucleotide
  Antisense strand to SEQ ID NO: 684388
aucuacauccucaaccacu

SEQ ID NO: 684390 - RNA, 19 nt, Artificial Sequence
  Description of Artificial Sequence: Synthetic oligonucleotide
  Sense strand starting at position 2649 of SEQ ID NO: 586000
ugaggauguagaugaguau

SEQ ID NO: 684391 - RNA, 19 nt, Artificial Sequence
  Description of Artificial Sequence: Synthetic oligonucleotide
  Antisense strand to SEQ ID NO: 684390
auacucaucuacauccuca

SEQ ID NO: 684392 - RNA, 19 nt, Artificial Sequence
  Description of Artificial Sequence: Synthetic oligonucleotide
  Sense strand starting at position 2652 of SEQ ID NO: 586000
ggauguagaugaguaugua

SEQ ID NO: 684393 - RNA, 19 nt, Artificial Sequence
  Description of Artificial Sequence: Synthetic oligonucleotide
  Antisense strand to SEQ ID NO: 684392
uacauacucaucuacaucc

SEQ ID NO: 684394 - RNA, 19 nt, Artificial Sequence
  Description of Artificial Sequence: Synthetic oligonucleotide
  Sense strand starting at position 2653 of SEQ ID NO: 586000
gauguagaugaguauguag

SEQ ID NO: 684395 - RNA, 19 nt, Artificial Sequence
  Description of Artificial Sequence: Synthetic oligonucleotide
  Antisense strand to SEQ ID NO: 684394
cuacauacucaucuacauc

SEQ ID NO: 684396 - RNA, 19 nt, Artificial Sequence
  Description of Artificial Sequence: Synthetic oligonucleotide
  Sense strand starting at position 2655 of SEQ ID NO: 586000
uguagaugaguauguagaa

SEQ ID NO: 684397 - RNA, 19 nt, Artificial Sequence
  Description of Artificial Sequence: Synthetic oligonucleotide
  Antisense strand to SEQ ID NO: 684396
uucuacauacucaucuaca

SEQ ID NO: 684398 - RNA, 19 nt, Artificial Sequence
  Description of Artificial Sequence: Synthetic oligonucleotide
  Sense strand starting at position 2665 of SEQ ID NO: 586000
uauguagaagucugauaga

SEQ ID NO: 684399 - RNA, 19 nt, Artificial Sequence
  Description of Artificial Sequence: Synthetic oligonucleotide
  Antisense strand to SEQ ID NO: 684398
ucuaucagacuucuacaua

SEQ ID NO: 684400 - RNA, 19 nt, Artificial Sequence
  Description of Artificial Sequence: Synthetic oligonucleotide
  Sense strand starting at position 2689 of SEQ ID NO: 586000
cgagauuaacacuaggcau

SEQ ID NO: 684401 - RNA, 19 nt, Artificial Sequence
  Description of Artificial Sequence: Synthetic oligonucleotide
  Antisense strand to SEQ ID NO: 684400
augccuaguguuaaucucg

SEQ ID NO: 684402 - RNA, 19 nt, Artificial Sequence
  Description of Artificial Sequence: Synthetic oligonucleotide
  Sense strand starting at position 2951 of SEQ ID NO: 586000
cuaugaauaugugcuaaua

SEQ ID NO: 684403 - RNA, 19 nt, Artificial Sequence
  Description of Artificial Sequence: Synthetic oligonucleotide
  Antisense strand to SEQ ID NO: 684402
uauuagcacauauucauag

SEQ ID NO: 684404 - RNA, 19 nt, Artificial Sequence
  Description of Artificial Sequence: Synthetic oligonucleotide
  Sense strand starting at position 3100 of SEQ ID NO: 586000
gcuuucggucaguaaauuu

SEQ ID NO: 684405 - RNA, 19 nt, Artificial Sequence
  Description of Artificial Sequence: Synthetic oligonucleotide
  Antisense strand to SEQ ID NO: 684404
aaauuuacugaccgaaagc

SEQ ID NO: 684406 - RNA, 19 nt, Artificial Sequence
  Description of Artificial Sequence: Synthetic oligonucleotide
  Sense strand starting at position 3158 of SEQ ID NO: 586000
gggucagugguagagguaa

SEQ ID NO: 684407 - RNA, 19 nt, Artificial Sequence
  Description of Artificial Sequence: Synthetic oligonucleotide
  Antisense strand to SEQ ID NO: 684406
uuaccucuaccacugaccc

SEQ ID NO: 684408 - RNA, 19 nt, Artificial Sequence
  Description of Artificial Sequence: Synthetic oligonucleotide
  Sense strand starting at position 3258 of SEQ ID NO: 586000
cagugaugugaauaggucu

SEQ ID NO: 684409 - RNA, 19 nt, Artificial Sequence
  Description of Artificial Sequence: Synthetic oligonucleotide
  Antisense strand to SEQ ID NO: 684408
agaccuauucacaucacug

SEQ ID NO: 684410 - RNA, 19 nt, Artificial Sequence
  Description of Artificial Sequence: Synthetic oligonucleotide
  Sense strand starting at position 3266 of SEQ ID NO: 586000
ugaauaggucuguaucagu

SEQ ID NO: 684411 - RNA, 19 nt, Artificial Sequence
  Description of Artificial Sequence: Synthetic oligonucleotide
  Antisense strand to SEQ ID NO: 684410
acugauacagaccuauuca

SEQ ID NO: 684412 - RNA, 19 nt, Artificial Sequence
  Description of Artificial Sequence: Synthetic oligonucleotide
  Sense strand starting at position 3427 of SEQ ID NO: 586000
agagacaguucugcuuaag

SEQ ID NO: 684413 - RNA, 19 nt, Artificial Sequence
  Description of Artificial Sequence: Synthetic oligonucleotide
  Antisense strand to SEQ ID NO: 684412
cuuaagcagaacugucucu

SEQ ID NO: 684414 - RNA, 19 nt, Artificial Sequence
  Description of Artificial Sequence: Synthetic oligonucleotide
  Sense strand starting at position 3617 of SEQ ID NO: 586000
agugauagcugaccaacau

SEQ ID NO: 684415 - RNA, 19 nt, Artificial Sequence
  Description of Artificial Sequence: Synthetic oligonucleotide
  Antisense strand to SEQ ID NO: 684414
auguuggucagcuaucacu

SEQ ID NO: 684416 - RNA, 19 nt, Artificial Sequence
  Description of Artificial Sequence: Synthetic oligonucleotide
  Sense strand starting at position 3618 of SEQ ID NO: 586000
gugauagcugaccaacaua

SEQ ID NO: 684417 - RNA, 19 nt, Artificial Sequence
  Description of Artificial Sequence: Synthetic oligonucleotide
  Antisense strand to SEQ ID NO: 684416
uauguuggucagcuaucac

SEQ ID NO: 684418 - RNA, 19 nt, Artificial Sequence
  Description of Artificial Sequence: Synthetic oligonucleotide
  Sense strand starting at position 3694 of SEQ ID NO: 586000
uugggaauccuauggacuc

SEQ ID NO: 684419 - RNA, 19 nt, Artificial Sequence
  Description of Artificial Sequence: Synthetic oligonucleotide
  Antisense strand to SEQ ID NO: 684418
gaguccauaggauucccaa

SEQ ID NO: 684420 - RNA, 19 nt, Artificial Sequence
  Description of Artificial Sequence: Synthetic oligonucleotide
  Sense strand starting at position 444 of SEQ ID NO: 586001
uguuucugaccuugaguca

SEQ ID NO: 684421 - RNA, 19 nt, Artificial Sequence
  Description of Artificial Sequence: Synthetic oligonucleotide
  Antisense strand to SEQ ID NO: 684420
ugacucaaggucagaaaca

SEQ ID NO: 684422 - RNA, 19 nt, Artificial Sequence
  Description of Artificial Sequence: Synthetic oligonucleotide
  Sense strand starting at position 451 of SEQ ID NO: 586001
gaccuugagucagacccau

SEQ ID NO: 684423 - RNA, 19 nt, Artificial Sequence
  Description of Artificial Sequence: Synthetic oligonucleotide
  Antisense strand to SEQ ID NO: 684422
augggucugacucaagguc

SEQ ID NO: 684424 - RNA, 19 nt, Artificial Sequence
  Description of Artificial Sequence: Synthetic oligonucleotide
  Sense strand starting at position 473 of SEQ ID NO: 586001
ggcuacuucuggcuccuaa

SEQ ID NO: 684425 - RNA, 19 nt, Artificial Sequence
  Description of Artificial Sequence: Synthetic oligonucleotide
  Antisense strand to SEQ ID NO: 684424
uuaggagccagaaguagcc

SEQ ID NO: 684426 - RNA, 19 nt, Artificial Sequence
  Description of Artificial Sequence: Synthetic oligonucleotide
  Sense strand starting at position 484 of SEQ ID NO: 586001
gcuccuaacugcugguuaa

SEQ ID NO: 684427 - RNA, 19 nt, Artificial Sequence
  Description of Artificial Sequence: Synthetic oligonucleotide
  Antisense strand to SEQ ID NO: 684426
uuaaccagcaguuaggagc

SEQ ID NO: 684428 - RNA, 19 nt, Artificial Sequence
  Description of Artificial Sequence: Synthetic oligonucleotide
  Sense strand starting at position 512 of SEQ ID NO: 586001
ccuuaacggcucuaugacu

SEQ ID NO: 684429 - RNA, 19 nt, Artificial Sequence
  Description of Artificial Sequence: Synthetic oligonucleotide
  Antisense strand to SEQ ID NO: 684428
agucauagagccguuaagg

SEQ ID NO: 684430 - RNA, 19 nt, Artificial Sequence
  Description of Artificial Sequence: Synthetic oligonucleotide
  Sense strand starting at position 576 of SEQ ID NO: 586001
cucucauaguuggugcuua

SEQ ID NO: 684431 - RNA, 19 nt, Artificial Sequence
  Description of Artificial Sequence: Synthetic oligonucleotide
  Antisense strand to SEQ ID NO: 684430
uaagcaccaacuaugagag

SEQ ID NO: 684432 - RNA, 19 nt, Artificial Sequence
  Description of Artificial Sequence: Synthetic oligonucleotide
  Sense strand starting at position 584 of SEQ ID NO: 586001
guuggugcuuagcacaaua

SEQ ID NO: 684433 - RNA, 19 nt, Artificial Sequence
  Description of Artificial Sequence: Synthetic oligonucleotide
  Antisense strand to SEQ ID NO: 684432
uauugugcuaagcaccaac

SEQ ID NO: 684434 - RNA, 19 nt, Artificial Sequence
  Description of Artificial Sequence: Synthetic oligonucleotide
  Sense strand starting at position 1533 of SEQ ID NO: 586001
ggccauauccaaugcucca

SEQ ID NO: 684435 - RNA, 19 nt, Artificial Sequence
  Description of Artificial Sequence: Synthetic oligonucleotide
  Antisense strand to SEQ ID NO: 684434
uggagcauuggauauggcc

SEQ ID NO: 684436 - RNA, 19 nt, Artificial Sequence
  Description of Artificial Sequence: Synthetic oligonucleotide
  Sense strand starting at position 2015 of SEQ ID NO: 586001
cugcuaaucucggcucaac

SEQ ID NO: 684437 - RNA, 19 nt, Artificial Sequence
  Description of Artificial Sequence: Synthetic oligonucleotide
  Antisense strand to SEQ ID NO: 684436
guugagccgagauuagcag

SEQ ID NO: 684438 - RNA, 19 nt, Artificial Sequence
  Description of Artificial Sequence: Synthetic oligonucleotide
  Sense strand starting at position 2235 of SEQ ID NO: 586001
gccgauuagucauuuguca

SEQ ID NO: 684439 - RNA, 19 nt, Artificial Sequence
  Description of Artificial Sequence: Synthetic oligonucleotide
  Antisense strand to SEQ ID NO: 684438
ugacaaaugacuaaucggc

SEQ ID NO: 684440 - RNA, 19 nt, Artificial Sequence
  Description of Artificial Sequence: Synthetic oligonucleotide
  Sense strand starting at position 2248 of SEQ ID NO: 586001
uugucaaugggauguggaa

SEQ ID NO: 684441 - RNA, 19 nt, Artificial Sequence
  Description of Artificial Sequence: Synthetic oligonucleotide
  Antisense strand to SEQ ID NO: 684440
uuccacaucccauugacaa

SEQ ID NO: 684442 - RNA, 19 nt, Artificial Sequence
  Description of Artificial Sequence: Synthetic oligonucleotide
  Sense strand starting at position 2275 of SEQ ID NO: 586001
uagacuggauccuguauuu

SEQ ID NO: 684443 - RNA, 19 nt, Artificial Sequence
  Description of Artificial Sequence: Synthetic oligonucleotide
  Antisense strand to SEQ ID NO: 684442
aaauacaggauccagucua

SEQ ID NO: 684444 - RNA, 19 nt, Artificial Sequence
  Description of Artificial Sequence: Synthetic oligonucleotide
  Sense strand starting at position 2934 of SEQ ID NO: 586001
aaagaauaugucuguauug

SEQ ID NO: 684445 - RNA, 19 nt, Artificial Sequence
  Description of Artificial Sequence: Synthetic oligonucleotide
  Antisense strand to SEQ ID NO: 684444
caauacagacauauucuuu

SEQ ID NO: 684446 - RNA, 19 nt, Artificial Sequence
  Description of Artificial Sequence: Synthetic oligonucleotide
  Sense strand starting at position 2940 of SEQ ID NO: 586001
uaugucuguauuggaggua

SEQ ID NO: 684447 - RNA, 19 nt, Artificial Sequence
  Description of Artificial Sequence: Synthetic oligonucleotide
  Antisense strand to SEQ ID NO: 684446
uaccuccaauacagacaua

SEQ ID NO: 684448 - RNA, 19 nt, Artificial Sequence
  Description of Artificial Sequence: Synthetic oligonucleotide
  Sense strand starting at position 2941 of SEQ ID NO: 586001
augucuguauuggagguau

SEQ ID NO: 684449 - RNA, 19 nt, Artificial Sequence
  Description of Artificial Sequence: Synthetic oligonucleotide
  Antisense strand to SEQ ID NO: 684448
auaccuccaauacagacau

SEQ ID NO: 684450 - RNA, 19 nt, Artificial Sequence
  Description of Artificial Sequence: Synthetic oligonucleotide
  Sense strand starting at position 2943 of SEQ ID NO: 586001
gucuguauuggagguauac

SEQ ID NO: 684451 - RNA, 19 nt, Artificial Sequence
  Description of Artificial Sequence: Synthetic oligonucleotide
  Antisense strand to SEQ ID NO: 684450
guauaccuccaauacagac

SEQ ID NO: 684452 - RNA, 19 nt, Artificial Sequence
  Description of Artificial Sequence: Synthetic oligonucleotide
  Sense strand starting at position 3069 of SEQ ID NO: 586001
gcacgauccuggcuaauua

SEQ ID NO: 684453 - RNA, 19 nt, Artificial Sequence
  Description of Artificial Sequence: Synthetic oligonucleotide
  Antisense strand to SEQ ID NO: 684452
uaauuagccaggaucgugc

SEQ ID NO: 684454 - RNA, 19 nt, Artificial Sequence
  Description of Artificial Sequence: Synthetic oligonucleotide
  Sense strand starting at position 3122 of SEQ ID NO: 586001
acuauuucuucgguugcca

SEQ ID NO: 684455 - RNA, 19 nt, Artificial Sequence
  Description of Artificial Sequence: Synthetic oligonucleotide
  Antisense strand to SEQ ID NO: 684454
uggcaaccgaagaaauagu

SEQ ID NO: 684456 - RNA, 19 nt, Artificial Sequence
  Description of Artificial Sequence: Synthetic oligonucleotide
  Sense strand starting at position 3168 of SEQ ID NO: 586001
ccuacugccuaaggauuaa

SEQ ID NO: 684457 - RNA, 19 nt, Artificial Sequence
  Description of Artificial Sequence: Synthetic oligonucleotide
  Antisense strand to SEQ ID NO: 684456
uuaauccuuaggcaguagg

SEQ ID NO: 684458 - RNA, 19 nt, Artificial Sequence
  Description of Artificial Sequence: Synthetic oligonucleotide
  Sense strand starting at position 3172 of SEQ ID NO: 586001
cugccuaaggauuaaguuu

SEQ ID NO: 684459 - RNA, 19 nt, Artificial Sequence
  Description of Artificial Sequence: Synthetic oligonucleotide
  Antisense strand to SEQ ID NO: 684458
aaacuuaauccuuaggcag

SEQ ID NO: 684460 - RNA, 19 nt, Artificial Sequence
  Description of Artificial Sequence: Synthetic oligonucleotide
  Sense strand starting at position 3187 of SEQ ID NO: 586001
guuuaaauguguuggguug

SEQ ID NO: 684461 - RNA, 19 nt, Artificial Sequence
  Description of Artificial Sequence: Synthetic oligonucleotide
  Antisense strand to SEQ ID NO: 684460
caacccaacacauuuaaac

SEQ ID NO: 684462 - RNA, 19 nt, Artificial Sequence
  Description of Artificial Sequence: Synthetic oligonucleotide
  Sense strand starting at position 3188 of SEQ ID NO: 586001
uuuaaauguguuggguuga

SEQ ID NO: 684463 - RNA, 19 nt, Artificial Sequence
  Description of Artificial Sequence: Synthetic oligonucleotide
  Antisense strand to SEQ ID NO: 684462
ucaacccaacacauuuaaa

SEQ ID NO: 684464 - RNA, 19 nt, Artificial Sequence
  Description of Artificial Sequence: Synthetic oligonucleotide
  Sense strand starting at position 3430 of SEQ ID NO: 586001
ucaguuggcucugaccaua

SEQ ID NO: 684465 - RNA, 19 nt, Artificial Sequence
  Description of Artificial Sequence: Synthetic oligonucleotide
  Antisense strand to SEQ ID NO: 684464
uauggucagagccaacuga

SEQ ID NO: 684466 - RNA, 19 nt, Artificial Sequence
  Description of Artificial Sequence: Synthetic oligonucleotide
  Sense strand starting at position 3433 of SEQ ID NO: 586001
guuggcucugaccauauaa

SEQ ID NO: 684467 - RNA, 19 nt, Artificial Sequence
  Description of Artificial Sequence: Synthetic oligonucleotide
  Antisense strand to SEQ ID NO: 684466
uuauauggucagagccaac

SEQ ID NO: 684468 - RNA, 19 nt, Artificial Sequence
  Description of Artificial Sequence: Synthetic oligonucleotide
  Sense strand starting at position 3435 of SEQ ID NO: 586001
uggcucugaccauauaaua

SEQ ID NO: 684469 - RNA, 19 nt, Artificial Sequence
  Description of Artificial Sequence: Synthetic oligonucleotide
  Antisense strand to SEQ ID NO: 684468
uauuauauggucagagcca

SEQ ID NO: 684470 - RNA, 19 nt, Artificial Sequence
  Description of Artificial Sequence: Synthetic oligonucleotide
  Sense strand starting at position 3672 of SEQ ID NO: 586001
uuagcugagcaauguggua

SEQ ID NO: 684471 - RNA, 19 nt, Artificial Sequence
  Description of Artificial Sequence: Synthetic oligonucleotide
  Antisense strand to SEQ ID NO: 684470
uaccacauugcucagcuaa

SEQ ID NO: 684472 - RNA, 19 nt, Artificial Sequence
  Description of Artificial Sequence: Synthetic oligonucleotide
  Sense strand starting at position 3866 of SEQ ID NO: 586001
uauuaaaggugaggaaacu

SEQ ID NO: 684473 - RNA, 19 nt, Artificial Sequence
  Description of Artificial Sequence: Synthetic oligonucleotide
  Antisense strand to SEQ ID NO: 684472
aguuuccucaccuuuaaua

SEQ ID NO: 684474 - RNA, 19 nt, Artificial Sequence
  Description of Artificial Sequence: Synthetic oligonucleotide
  Sense strand starting at position 3888 of SEQ ID NO: 586001
agcugagugucagucaaca

SEQ ID NO: 684475 - RNA, 19 nt, Artificial Sequence
  Description of Artificial Sequence: Synthetic oligonucleotide
  Antisense strand to SEQ ID NO: 684474
uguugacugacacucagcu

SEQ ID NO: 684476 - RNA, 19 nt, Artificial Sequence
  Description of Artificial Sequence: Synthetic oligonucleotide
  Sense strand starting at position 3890 of SEQ ID NO: 586001
cugagugucagucaacaag

SEQ ID NO: 684477 - RNA, 19 nt, Artificial Sequence
  Description of Artificial Sequence: Synthetic oligonucleotide
  Antisense strand to SEQ ID NO: 684476
cuuguugacugacacucag

SEQ ID NO: 684478 - RNA, 19 nt, Artificial Sequence
  Description of Artificial Sequence: Synthetic oligonucleotide
  Sense strand starting at position 3893 of SEQ ID NO: 586001
agugucagucaacaaguau

SEQ ID NO: 684479 - RNA, 19 nt, Artificial Sequence
  Description of Artificial Sequence: Synthetic oligonucleotide
  Antisense strand to SEQ ID NO: 684478
auacuuguugacugacacu

SEQ ID NO: 684480 - RNA, 19 nt, Artificial Sequence
  Description of Artificial Sequence: Synthetic oligonucleotide
  Sense strand starting at position 3931 of SEQ ID NO: 586001
ugccaagcgcuaugcuaaa

SEQ ID NO: 684481 - RNA, 19 nt, Artificial Sequence
  Description of Artificial Sequence: Synthetic oligonucleotide
  Antisense strand to SEQ ID NO: 684480
uuuagcauagcgcuuggca

SEQ ID NO: 684482 - RNA, 19 nt, Artificial Sequence
  Description of Artificial Sequence: Synthetic oligonucleotide
  Sense strand starting at position 3944 of SEQ ID NO: 586001
gcuaaauaauggucauaca

SEQ ID NO: 684483 - RNA, 19 nt, Artificial Sequence
  Description of Artificial Sequence: Synthetic oligonucleotide
  Antisense strand to SEQ ID NO: 684482
uguaugaccauuauuuagc

SEQ ID NO: 684484 - RNA, 19 nt, Artificial Sequence
  Description of Artificial Sequence: Synthetic oligonucleotide
  Sense strand starting at position 3947 of SEQ ID NO: 586001
aaauaauggucauacagag

SEQ ID NO: 684485 - RNA, 19 nt, Artificial Sequence
  Description of Artificial Sequence: Synthetic oligonucleotide
  Antisense strand to SEQ ID NO: 684484
cucuguaugaccauuauuu

SEQ ID NO: 684486 - RNA, 19 nt, Artificial Sequence
  Description of Artificial Sequence: Synthetic oligonucleotide
  Sense strand starting at position 11 of SEQ ID NO: 586002
gguaacucuuugccaugua

SEQ ID NO: 684487 - RNA, 19 nt, Artificial Sequence
  Description of Artificial Sequence: Synthetic oligonucleotide
  Antisense strand to SEQ ID NO: 684486
uacauggcaaagaguuacc

SEQ ID NO: 684488 - RNA, 19 nt, Artificial Sequence
  Description of Artificial Sequence: Synthetic oligonucleotide
  Sense strand starting at position 27 of SEQ ID NO: 586002
guagacuuggagcacgaaa

SEQ ID NO: 684489 - RNA, 19 nt, Artificial Sequence
  Description of Artificial Sequence: Synthetic oligonucleotide
  Antisense strand to SEQ ID NO: 684488
uuucgugcuccaagucuac

SEQ ID NO: 684490 - RNA, 19 nt, Artificial Sequence
  Description of Artificial Sequence: Synthetic oligonucleotide
  Sense strand starting at position 47 of SEQ ID NO: 586002
guugguuaggaucaucuaa

SEQ ID NO: 684491 - RNA, 19 nt, Artificial Sequence
  Description of Artificial Sequence: Synthetic oligonucleotide
  Antisense strand to SEQ ID NO: 684490
uuagaugauccuaaccaac

SEQ ID NO: 684492 - RNA, 19 nt, Artificial Sequence
  Description of Artificial Sequence: Synthetic oligonucleotide
  Sense strand starting at position 49 of SEQ ID NO: 586002
ugguuaggaucaucuaauu

SEQ ID NO: 684493 - RNA, 19 nt, Artificial Sequence
  Description of Artificial Sequence: Synthetic oligonucleotide
  Antisense strand to SEQ ID NO: 684492
aauuagaugauccuaacca

SEQ ID NO: 684494 - RNA, 19 nt, Artificial Sequence
  Description of Artificial Sequence: Synthetic oligonucleotide
  Sense strand starting at position 214 of SEQ ID NO: 586002
ugugaacuauguccaucuu

SEQ ID NO: 684495 - RNA, 19 nt, Artificial Sequence
  Description of Artificial Sequence: Synthetic oligonucleotide
  Antisense strand to SEQ ID NO: 684494
aagauggacauaguucaca

SEQ ID NO: 684496 - RNA, 19 nt, Artificial Sequence
  Description of Artificial Sequence: Synthetic oligonucleotide
  Sense strand starting at position 215 of SEQ ID NO: 586002
gugaacuauguccaucuua

SEQ ID NO: 684497 - RNA, 19 nt, Artificial Sequence
  Description of Artificial Sequence: Synthetic oligonucleotide
  Antisense strand to SEQ ID NO: 684496
uaagauggacauaguucac

SEQ ID NO: 684498 - RNA, 19 nt, Artificial Sequence
  Description of Artificial Sequence: Synthetic oligonucleotide
  Sense strand starting at position 275 of SEQ ID NO: 586002
ugggaagucucacuaggca

SEQ ID NO: 684499 - RNA, 19 nt, Artificial Sequence
  Description of Artificial Sequence: Synthetic oligonucleotide
  Antisense strand to SEQ ID NO: 684498
ugccuagugagacuuccca

SEQ ID NO: 684500 - RNA, 19 nt, Artificial Sequence
  Description of Artificial Sequence: Synthetic oligonucleotide
  Sense strand starting at position 291 of SEQ ID NO: 586002
gcagcaagucuaugaaacu

SEQ ID NO: 684501 - RNA, 19 nt, Artificial Sequence
  Description of Artificial Sequence: Synthetic oligonucleotide
  Antisense strand to SEQ ID NO: 684500
aguuucauagacuugcugc

SEQ ID NO: 684502 - RNA, 19 nt, Artificial Sequence
  Description of Artificial Sequence: Synthetic oligonucleotide
  Sense strand starting at position 2174 of SEQ ID NO: 586002
cugugugagccgcugcaau

SEQ ID NO: 684503 - RNA, 19 nt, Artificial Sequence
  Description of Artificial Sequence: Synthetic oligonucleotide
  Antisense strand to SEQ ID NO: 684502
auugcagcggcucacacag

SEQ ID NO: 684504 - RNA, 19 nt, Artificial Sequence
  Description of Artificial Sequence: Synthetic oligonucleotide
  Sense strand starting at position 2182 of SEQ ID NO: 586002
gccgcugcaauguuugaaa

SEQ ID NO: 684505 - RNA, 19 nt, Artificial Sequence
  Description of Artificial Sequence: Synthetic oligonucleotide
  Antisense strand to SEQ ID NO: 684504
uuucaaacauugcagcggc

SEQ ID NO: 684506 - RNA, 19 nt, Artificial Sequence
  Description of Artificial Sequence: Synthetic oligonucleotide
  Sense strand starting at position 2217 of SEQ ID NO: 586002
gucaccuucucacuuaguu

SEQ ID NO: 684507 - RNA, 19 nt, Artificial Sequence
  Description of Artificial Sequence: Synthetic oligonucleotide
  Antisense strand to SEQ ID NO: 684506
aacuaagugagaaggugac

SEQ ID NO: 684508 - RNA, 19 nt, Artificial Sequence
  Description of Artificial Sequence: Synthetic oligonucleotide
  Sense strand starting at position 2265 of SEQ ID NO: 586002
guuuaaucugcgcaaauuu

SEQ ID NO: 684509 - RNA, 19 nt, Artificial Sequence
  Description of Artificial Sequence: Synthetic oligonucleotide
  Antisense strand to SEQ ID NO: 684508
aaauuugcgcagauuaaac

SEQ ID NO: 684510 - RNA, 19 nt, Artificial Sequence
  Description of Artificial Sequence: Synthetic oligonucleotide
  Sense strand starting at position 2335 of SEQ ID NO: 586002
cuggccauuagugauguau

SEQ ID NO: 684511 - RNA, 19 nt, Artificial Sequence
  Description of Artificial Sequence: Synthetic oligonucleotide
  Antisense strand to SEQ ID NO: 684510
auacaucacuaauggccag

SEQ ID NO: 684512 - RNA, 19 nt, Artificial Sequence
  Description of Artificial Sequence: Synthetic oligonucleotide
  Sense strand starting at position 2447 of SEQ ID NO: 586002
caagaaugagccugucuuc

SEQ ID NO: 684513 - RNA, 19 nt, Artificial Sequence
  Description of Artificial Sequence: Synthetic oligonucleotide
  Antisense strand to SEQ ID NO: 684512
gaagacaggcucauucuug

SEQ ID NO: 684514 - RNA, 19 nt, Artificial Sequence
  Description of Artificial Sequence: Synthetic oligonucleotide
  Sense strand starting at position 2456 of SEQ ID NO: 586002
gccugucuucccgugugaa

SEQ ID NO: 684515 - RNA, 19 nt, Artificial Sequence
  Description of Artificial Sequence: Synthetic oligonucleotide
  Antisense strand to SEQ ID NO: 684514
uucacacgggaagacaggc

SEQ ID NO: 684516 - RNA, 19 nt, Artificial Sequence
  Description of Artificial Sequence: Synthetic oligonucleotide
  Sense strand starting at position 2470 of SEQ ID NO: 586002
gugaauguguaaguacaga

SEQ ID NO: 684517 - RNA, 19 nt, Artificial Sequence
  Description of Artificial Sequence: Synthetic oligonucleotide
  Antisense strand to SEQ ID NO: 684516
ucuguacuuacacauucac

SEQ ID NO: 684518 - RNA, 19 nt, Artificial Sequence
  Description of Artificial Sequence: Synthetic oligonucleotide
  Sense strand starting at position 2738 of SEQ ID NO: 586002
gacugcacugaaugguaaa

SEQ ID NO: 684519 - RNA, 19 nt, Artificial Sequence
  Description of Artificial Sequence: Synthetic oligonucleotide
  Antisense strand to SEQ ID NO: 684518
uuuaccauucagugcaguc

SEQ ID NO: 684520 - RNA, 19 nt, Artificial Sequence
  Description of Artificial Sequence: Synthetic oligonucleotide
  Sense strand starting at position 2810 of SEQ ID NO: 586002
gagaguucugccugccacu

SEQ ID NO: 684521 - RNA, 19 nt, Artificial Sequence
  Description of Artificial Sequence: Synthetic oligonucleotide
  Antisense strand to SEQ ID NO: 684520
aguggcaggcagaacucuc

SEQ ID NO: 684522 - RNA, 19 nt, Artificial Sequence
  Description of Artificial Sequence: Synthetic oligonucleotide
  Sense strand starting at position 2858 of SEQ ID NO: 586002
ggcacaucugaaugaaauc

SEQ ID NO: 684523 - RNA, 19 nt, Artificial Sequence
  Description of Artificial Sequence: Synthetic oligonucleotide
  Antisense strand to SEQ ID NO: 684522
gauuucauucagaugugcc

SEQ ID NO: 684524 - RNA, 19 nt, Artificial Sequence
  Description of Artificial Sequence: Synthetic oligonucleotide
  Sense strand starting at position 2919 of SEQ ID NO: 586002
cugaacuccgaaugugaga

SEQ ID NO: 684525 - RNA, 19 nt, Artificial Sequence
  Description of Artificial Sequence: Synthetic oligonucleotide
  Antisense strand to SEQ ID NO: 684524
ucucacauucggaguucag

SEQ ID NO: 684526 - RNA, 19 nt, Artificial Sequence
  Description of Artificial Sequence: Synthetic oligonucleotide
  Sense strand starting at position 2952 of SEQ ID NO: 586002
agaccauggucgcuguuua

SEQ ID NO: 684527 - RNA, 19 nt, Artificial Sequence
  Description of Artificial Sequence: Synthetic oligonucleotide
  Antisense strand to SEQ ID NO: 684526
uaaacagcgaccauggucu

SEQ ID NO: 684528 - RNA, 19 nt, Artificial Sequence
  Description of Artificial Sequence: Synthetic oligonucleotide
  Sense strand starting at position 2953 of SEQ ID NO: 586002
gaccauggucgcuguuuaa

SEQ ID NO: 684529 - RNA, 19 nt, Artificial Sequence
  Description of Artificial Sequence: Synthetic oligonucleotide
  Antisense strand to SEQ ID NO: 684528
uuaaacagcgaccaugguc

SEQ ID NO: 684530 - RNA, 19 nt, Artificial Sequence
  Description of Artificial Sequence: Synthetic oligonucleotide
  Sense strand starting at position 3004 of SEQ ID NO: 586002
ucaggcaaguuaucuggau

SEQ ID NO: 684531 - RNA, 19 nt, Artificial Sequence
  Description of Artificial Sequence: Synthetic oligonucleotide
  Antisense strand to SEQ ID NO: 684530
auccagauaacuugccuga

SEQ ID NO: 684532 - RNA, 19 nt, Artificial Sequence
  Description of Artificial Sequence: Synthetic oligonucleotide
  Sense strand starting at position 3005 of SEQ ID NO: 586002
caggcaaguuaucuggauu

SEQ ID NO: 684533 - RNA, 19 nt, Artificial Sequence
  Description of Artificial Sequence: Synthetic oligonucleotide
  Antisense strand to SEQ ID NO: 684532
aauccagauaacuugccug

SEQ ID NO: 684534 - RNA, 19 nt, Artificial Sequence
  Description of Artificial Sequence: Synthetic oligonucleotide
  Sense strand starting at position 3006 of SEQ ID NO: 586002
aggcaaguuaucuggauug

SEQ ID NO: 684535 - RNA, 19 nt, Artificial Sequence
  Description of Artificial Sequence: Synthetic oligonucleotide
  Antisense strand to SEQ ID NO: 684534
caauccagauaacuugccu

SEQ ID NO: 684536 - RNA, 19 nt, Artificial Sequence
  Description of Artificial Sequence: Synthetic oligonucleotide
  Sense strand starting at position 3008 of SEQ ID NO: 586002
gcaaguuaucuggauugau

SEQ ID NO: 684537 - RNA, 19 nt, Artificial Sequence
  Description of Artificial Sequence: Synthetic oligonucleotide
  Antisense strand to SEQ ID NO: 684536
aucaauccagauaacuugc

SEQ ID NO: 684538 - RNA, 19 nt, Artificial Sequence
  Description of Artificial Sequence: Synthetic oligonucleotide
  Sense strand starting at position 3149 of SEQ ID NO: 586002
guggucuaccagcaauaaa

SEQ ID NO: 684539 - RNA, 19 nt, Artificial Sequence
  Description of Artificial Sequence: Synthetic oligonucleotide
  Antisense strand to SEQ ID NO: 684538
uuuauugcugguagaccac

SEQ ID NO: 684540 - RNA, 19 nt, Artificial Sequence
  Description of Artificial Sequence: Synthetic oligonucleotide
  Sense strand starting at position 3152 of SEQ ID NO: 586002
gucuaccagcaauaaaguu

SEQ ID NO: 684541 - RNA, 19 nt, Artificial Sequence
  Description of Artificial Sequence: Synthetic oligonucleotide
  Antisense strand to SEQ ID NO: 684540
aacuuuauugcugguagac

SEQ ID NO: 684542 - RNA, 19 nt, Artificial Sequence
  Description of Artificial Sequence: Synthetic oligonucleotide
  Sense strand starting at position 3174 of SEQ ID NO: 586002
gagaaucugucucuagcaa

SEQ ID NO: 684543 - RNA, 19 nt, Artificial Sequence
  Description of Artificial Sequence: Synthetic oligonucleotide
  Antisense strand to SEQ ID NO: 684542
uugcuagagacagauucuc

SEQ ID NO: 684544 - RNA, 19 nt, Artificial Sequence
  Description of Artificial Sequence: Synthetic oligonucleotide
  Sense strand starting at position 3175 of SEQ ID NO: 586002
agaaucugucucuagcaaa

SEQ ID NO: 684545 - RNA, 19 nt, Artificial Sequence
  Description of Artificial Sequence: Synthetic oligonucleotide
  Antisense strand to SEQ ID NO: 684544
uuugcuagagacagauucu

SEQ ID NO: 684546 - RNA, 19 nt, Artificial Sequence
  Description of Artificial Sequence: Synthetic oligonucleotide
  Sense strand starting at position 3253 of SEQ ID NO: 586002
cgagaacacucugucccua

SEQ ID NO: 684547 - RNA, 19 nt, Artificial Sequence
  Description of Artificial Sequence: Synthetic oligonucleotide
  Antisense strand to SEQ ID NO: 684546
uagggacagaguguucucg

SEQ ID NO: 684548 - RNA, 19 nt, Artificial Sequence
  Description of Artificial Sequence: Synthetic oligonucleotide
  Sense strand starting at position 3303 of SEQ ID NO: 586002
ccaguccuuccagaaagca

SEQ ID NO: 684549 - RNA, 19 nt, Artificial Sequence
  Description of Artificial Sequence: Synthetic oligonucleotide
  Antisense strand to SEQ ID NO: 684548
ugcuuucuggaaggacugg

SEQ ID NO: 684550 - RNA, 19 nt, Artificial Sequence
  Description of Artificial Sequence: Synthetic oligonucleotide
  Sense strand starting at position 3431 of SEQ ID NO: 586002
guguucgcauuucuaauaa

SEQ ID NO: 684551 - RNA, 19 nt, Artificial Sequence
  Description of Artificial Sequence: Synthetic oligonucleotide
  Antisense strand to SEQ ID NO: 684550
uuauuagaaaugcgaacac

SEQ ID NO: 684552 - RNA, 19 nt, Artificial Sequence
  Description of Artificial Sequence: Synthetic oligonucleotide
  Sense strand starting at position 3584 of SEQ ID NO: 586002
auuuguacccauggugcaa

SEQ ID NO: 684553 - RNA, 19 nt, Artificial Sequence
  Description of Artificial Sequence: Synthetic oligonucleotide
  Antisense strand to SEQ ID NO: 684552
uugcaccauggguacaaau

SEQ ID NO: 684554 - RNA, 19 nt, Artificial Sequence
  Description of Artificial Sequence: Synthetic oligonucleotide
  Sense strand starting at position 3760 of SEQ ID NO: 586002
auaucagcccuugaguaca

SEQ ID NO: 684555 - RNA, 19 nt, Artificial Sequence
  Description of Artificial Sequence: Synthetic oligonucleotide
  Antisense strand to SEQ ID NO: 684554
uguacucaagggcugauau

SEQ ID NO: 684556 - RNA, 19 nt, Artificial Sequence
  Description of Artificial Sequence: Synthetic oligonucleotide
  Sense strand starting at position 3820 of SEQ ID NO: 586002
uaaaguacuucuguggacu

SEQ ID NO: 684557 - RNA, 19 nt, Artificial Sequence
  Description of Artificial Sequence: Synthetic oligonucleotide
  Antisense strand to SEQ ID NO: 684556
aguccacagaaguacuuua

SEQ ID NO: 684558 - RNA, 19 nt, Artificial Sequence
  Description of Artificial Sequence: Synthetic oligonucleotide
  Sense strand starting at position 3821 of SEQ ID NO: 586002
aaaguacuucuguggacua

SEQ ID NO: 684559 - RNA, 19 nt, Artificial Sequence
  Description of Artificial Sequence: Synthetic oligonucleotide
  Antisense strand to SEQ ID NO: 684558
uaguccacagaaguacuuu

SEQ ID NO: 684560 - RNA, 19 nt, Artificial Sequence
  Description of Artificial Sequence: Synthetic oligonucleotide
  Sense strand starting at position 3916 of SEQ ID NO: 586002
cauggaauaccaugugaca

SEQ ID NO: 684561 - RNA, 19 nt, Artificial Sequence
  Description of Artificial Sequence: Synthetic oligonucleotide
  Antisense strand to SEQ ID NO: 684560
ugucacaugguauuccaug

SEQ ID NO: 684562 - RNA, 19 nt, Artificial Sequence
  Description of Artificial Sequence: Synthetic oligonucleotide
  Sense strand starting at position 3918 of SEQ ID NO: 586002
uggaauaccaugugacaug

SEQ ID NO: 684563 - RNA, 19 nt, Artificial Sequence
  Description of Artificial Sequence: Synthetic oligonucleotide
  Antisense strand to SEQ ID NO: 684562
caugucacaugguauucca

SEQ ID NO: 684564 - RNA, 19 nt, Artificial Sequence
  Description of Artificial Sequence: Synthetic oligonucleotide
  Sense strand starting at position 3928 of SEQ ID NO: 586002
ugugacaugguuugaaugu

SEQ ID NO: 684565 - RNA, 19 nt, Artificial Sequence
  Description of Artificial Sequence: Synthetic oligonucleotide
  Antisense strand to SEQ ID NO: 684564
acauucaaaccaugucaca

SEQ ID NO: 684566 - RNA, 19 nt, Artificial Sequence
  Description of Artificial Sequence: Synthetic oligonucleotide
  Sense strand starting at position 329 of SEQ ID NO: 586003
gcaugaugauacuuauaac

SEQ ID NO: 684567 - RNA, 19 nt, Artificial Sequence
  Description of Artificial Sequence: Synthetic oligonucleotide
  Antisense strand to SEQ ID NO: 684566
guuauaaguaucaucaugc

SEQ ID NO: 684568 - RNA, 19 nt, Artificial Sequence
  Description of Artificial Sequence: Synthetic oligonucleotide
  Sense strand starting at position 572 of SEQ ID NO: 586003
cagagauuccaggguuucu

SEQ ID NO: 684569 - RNA, 19 nt, Artificial Sequence
  Description of Artificial Sequence: Synthetic oligonucleotide
  Antisense strand to SEQ ID NO: 684568
agaaacccuggaaucucug

SEQ ID NO: 684570 - RNA, 19 nt, Artificial Sequence
  Description of Artificial Sequence: Synthetic oligonucleotide
  Sense strand starting at position 581 of SEQ ID NO: 586003
caggguuucugacuauuac

SEQ ID NO: 684571 - RNA, 19 nt, Artificial Sequence
  Description of Artificial Sequence: Synthetic oligonucleotide
  Antisense strand to SEQ ID NO: 684570
guaauagucagaaacccug

SEQ ID NO: 684572 - RNA, 19 nt, Artificial Sequence
  Description of Artificial Sequence: Synthetic oligonucleotide
  Sense strand starting at position 624 of SEQ ID NO: 586003
gguuuaggccuuuaaguua

SEQ ID NO: 684573 - RNA, 19 nt, Artificial Sequence
  Description of Artificial Sequence: Synthetic oligonucleotide
  Antisense strand to SEQ ID NO: 684572
uaacuuaaaggccuaaacc

SEQ ID NO: 684574 - RNA, 19 nt, Artificial Sequence
  Description of Artificial Sequence: Synthetic oligonucleotide
  Sense strand starting at position 704 of SEQ ID NO: 586003
guggcaagauccucauaau

SEQ ID NO: 684575 - RNA, 19 nt, Artificial Sequence
  Description of Artificial Sequence: Synthetic oligonucleotide
  Antisense strand to SEQ ID NO: 684574
auuaugaggaucuugccac

SEQ ID NO: 684576 - RNA, 19 nt, Artificial Sequence
  Description of Artificial Sequence: Synthetic oligonucleotide
  Sense strand starting at position 807 of SEQ ID NO: 586003
cagggcaguagaugucaau

SEQ ID NO: 684577 - RNA, 19 nt, Artificial Sequence
  Description of Artificial Sequence: Synthetic oligonucleotide
  Antisense strand to SEQ ID NO: 684576
auugacaucuacugcccug

SEQ ID NO: 684578 - RNA, 19 nt, Artificial Sequence
  Description of Artificial Sequence: Synthetic oligonucleotide
  Sense strand starting at position 821 of SEQ ID NO: 586003
ucaauugaaugcucagaca

SEQ ID NO: 684579 - RNA, 19 nt, Artificial Sequence
  Description of Artificial Sequence: Synthetic oligonucleotide
  Antisense strand to SEQ ID NO: 684578
ugucugagcauucaauuga

SEQ ID NO: 684580 - RNA, 19 nt, Artificial Sequence
  Description of Artificial Sequence: Synthetic oligonucleotide
  Sense strand starting at position 881 of SEQ ID NO: 586003
acuugugaugcucaccaaa

SEQ ID NO: 684581 - RNA, 19 nt, Artificial Sequence
  Description of Artificial Sequence: Synthetic oligonucleotide
  Antisense strand to SEQ ID NO: 684580
uuuggugagcaucacaagu

SEQ ID NO: 684582 - RNA, 19 nt, Artificial Sequence
  Description of Artificial Sequence: Synthetic oligonucleotide
  Sense strand starting at position 883 of SEQ ID NO: 586003
uugugaugcucaccaaaca

SEQ ID NO: 684583 - RNA, 19 nt, Artificial Sequence
  Description of Artificial Sequence: Synthetic oligonucleotide
  Antisense strand to SEQ ID NO: 684582
uguuuggugagcaucacaa

SEQ ID NO: 684584 - RNA, 19 nt, Artificial Sequence
  Description of Artificial Sequence: Synthetic oligonucleotide
  Sense strand starting at position 1125 of SEQ ID NO: 586003
ugagucaugccguuuagca

SEQ ID NO: 684585 - RNA, 19 nt, Artificial Sequence
  Description of Artificial Sequence: Synthetic oligonucleotide
  Antisense strand to SEQ ID NO: 684584
ugcuaaacggcaugacuca

SEQ ID NO: 684586 - RNA, 19 nt, Artificial Sequence
  Description of Artificial Sequence: Synthetic oligonucleotide
  Sense strand starting at position 1126 of SEQ ID NO: 586003
gagucaugccguuuagcac

SEQ ID NO: 684587 - RNA, 19 nt, Artificial Sequence
  Description of Artificial Sequence: Synthetic oligonucleotide
  Antisense strand to SEQ ID NO: 684586
gugcuaaacggcaugacuc

SEQ ID NO: 684588 - RNA, 19 nt, Artificial Sequence
  Description of Artificial Sequence: Synthetic oligonucleotide
  Sense strand starting at position 1301 of SEQ ID NO: 586003
auaagcuguccauaggagu

SEQ ID NO: 684589 - RNA, 19 nt, Artificial Sequence
  Description of Artificial Sequence: Synthetic oligonucleotide
  Antisense strand to SEQ ID NO: 684588
acuccuauggacagcuuau

SEQ ID NO: 684590 - RNA, 19 nt, Artificial Sequence
  Description of Artificial Sequence: Synthetic oligonucleotide
  Sense strand starting at position 1466 of SEQ ID NO: 586003
uuauaaagcccaggacaau

SEQ ID NO: 684591 - RNA, 19 nt, Artificial Sequence
  Description of Artificial Sequence: Synthetic oligonucleotide
  Antisense strand to SEQ ID NO: 684590
auuguccugggcuuuauaa

SEQ ID NO: 684592 - RNA, 19 nt, Artificial Sequence
  Description of Artificial Sequence: Synthetic oligonucleotide
  Sense strand starting at position 1537 of SEQ ID NO: 586003
gucagagaacuuuguuacu

SEQ ID NO: 684593 - RNA, 19 nt, Artificial Sequence
  Description of Artificial Sequence: Synthetic oligonucleotide
  Antisense strand to SEQ ID NO: 684592
aguaacaaaguucucugac

SEQ ID NO: 684594 - RNA, 19 nt, Artificial Sequence
  Description of Artificial Sequence: Synthetic oligonucleotide
  Sense strand starting at position 1778 of SEQ ID NO: 586003
gcaaguuucgaacaccaca

SEQ ID NO: 684595 - RNA, 19 nt, Artificial Sequence
  Description of Artificial Sequence: Synthetic oligonucleotide
  Antisense strand to SEQ ID NO: 684594
ugugguguucgaaacuugc

SEQ ID NO: 684596 - RNA, 19 nt, Artificial Sequence
  Description of Artificial Sequence: Synthetic oligonucleotide
  Sense strand starting at position 1837 of SEQ ID NO: 586003
uugucauacuuaccagaag

SEQ ID NO: 684597 - RNA, 19 nt, Artificial Sequence
  Description of Artificial Sequence: Synthetic oligonucleotide
  Antisense strand to SEQ ID NO: 684596
cuucugguaaguaugacaa

SEQ ID NO: 684598 - RNA, 19 nt, Artificial Sequence
  Description of Artificial Sequence: Synthetic oligonucleotide
  Sense strand starting at position 2186 of SEQ ID NO: 586003
ucauuagacucuccauguu

SEQ ID NO: 684599 - RNA, 19 nt, Artificial Sequence
  Description of Artificial Sequence: Synthetic oligonucleotide
  Antisense strand to SEQ ID NO: 684598
aacauggagagucuaauga

SEQ ID NO: 684600 - RNA, 19 nt, Artificial Sequence
  Description of Artificial Sequence: Synthetic oligonucleotide
  Sense strand starting at position 2302 of SEQ ID NO: 586003
uucuuacuucuuggguuau

SEQ ID NO: 684601 - RNA, 19 nt, Artificial Sequence
  Description of Artificial Sequence: Synthetic oligonucleotide
  Antisense strand to SEQ ID NO: 684600
auaacccaagaaguaagaa

SEQ ID NO: 684602 - RNA, 19 nt, Artificial Sequence
  Description of Artificial Sequence: Synthetic oligonucleotide
  Sense strand starting at position 2304 of SEQ ID NO: 586003
cuuacuucuuggguuaucu

SEQ ID NO: 684603 - RNA, 19 nt, Artificial Sequence
  Description of Artificial Sequence: Synthetic oligonucleotide
  Antisense strand to SEQ ID NO: 684602
agauaacccaagaaguaag

SEQ ID NO: 684604 - RNA, 19 nt, Artificial Sequence
  Description of Artificial Sequence: Synthetic oligonucleotide
  Sense strand starting at position 2322 of SEQ ID NO: 586003
uccagugugguggaagauu

SEQ ID NO: 684605 - RNA, 19 nt, Artificial Sequence
  Description of Artificial Sequence: Synthetic oligonucleotide
  Antisense strand to SEQ ID NO: 684604
aaucuuccaccacacugga

SEQ ID NO: 684606 - RNA, 19 nt, Artificial Sequence
  Description of Artificial Sequence: Synthetic oligonucleotide
  Sense strand starting at position 2497 of SEQ ID NO: 586003
aaacauguagauggugauu

SEQ ID NO: 684607 - RNA, 19 nt, Artificial Sequence
  Description of Artificial Sequence: Synthetic oligonucleotide
  Antisense strand to SEQ ID NO: 684606
aaucaccaucuacauguuu

SEQ ID NO: 684608 - RNA, 19 nt, Artificial Sequence
  Description of Artificial Sequence: Synthetic oligonucleotide
  Sense strand starting at position 2520 of SEQ ID NO: 586003
agcugaacugaguauaauc

SEQ ID NO: 684609 - RNA, 19 nt, Artificial Sequence
  Description of Artificial Sequence: Synthetic oligonucleotide
  Antisense strand to SEQ ID NO: 684608
gauuauacucaguucagcu

SEQ ID NO: 684610 - RNA, 19 nt, Artificial Sequence
  Description of Artificial Sequence: Synthetic oligonucleotide
  Sense strand starting at position 2784 of SEQ ID NO: 586003
guguucccauacuuccaaa

SEQ ID NO: 684611 - RNA, 19 nt, Artificial Sequence
  Description of Artificial Sequence: Synthetic oligonucleotide
  Antisense strand to SEQ ID NO: 684610
uuuggaaguaugggaacac

SEQ ID NO: 684612 - RNA, 19 nt, Artificial Sequence
  Description of Artificial Sequence: Synthetic oligonucleotide
  Sense strand starting at position 2802 of SEQ ID NO: 586003
agcagauuccuccaucggu

SEQ ID NO: 684613 - RNA, 19 nt, Artificial Sequence
  Description of Artificial Sequence: Synthetic oligonucleotide
  Antisense strand to SEQ ID NO: 684612
accgauggaggaaucugcu

SEQ ID NO: 684614 - RNA, 19 nt, Artificial Sequence
  Description of Artificial Sequence: Synthetic oligonucleotide
  Sense strand starting at position 2914 of SEQ ID NO: 586003
cugugaauauguuucuuua

SEQ ID NO: 684615 - RNA, 19 nt, Artificial Sequence
  Description of Artificial Sequence: Synthetic oligonucleotide
  Antisense strand to SEQ ID NO: 684614
uaaagaaacauauucacag

SEQ ID NO: 684616 - RNA, 19 nt, Artificial Sequence
  Description of Artificial Sequence: Synthetic oligonucleotide
  Sense strand starting at position 2916 of SEQ ID NO: 586003
gugaauauguuucuuuaca

SEQ ID NO: 684617 - RNA, 19 nt, Artificial Sequence
  Description of Artificial Sequence: Synthetic oligonucleotide
  Antisense strand to SEQ ID NO: 684616
uguaaagaaacauauucac

SEQ ID NO: 684618 - RNA, 19 nt, Artificial Sequence
  Description of Artificial Sequence: Synthetic oligonucleotide
  Sense strand starting at position 2976 of SEQ ID NO: 586003
uagggagguuaucuugaac

SEQ ID NO: 684619 - RNA, 19 nt, Artificial Sequence
  Description of Artificial Sequence: Synthetic oligonucleotide
  Antisense strand to SEQ ID NO: 684618
guucaagauaaccucccua

SEQ ID NO: 684620 - RNA, 19 nt, Artificial Sequence
  Description of Artificial Sequence: Synthetic oligonucleotide
  Sense strand starting at position 3319 of SEQ ID NO: 586003
ucauaagggucuuuauaaa

SEQ ID NO: 684621 - RNA, 19 nt, Artificial Sequence
  Description of Artificial Sequence: Synthetic oligonucleotide
  Antisense strand to SEQ ID NO: 684620
uuuauaaagacccuuauga

SEQ ID NO: 684622 - RNA, 19 nt, Artificial Sequence
  Description of Artificial Sequence: Synthetic oligonucleotide
  Sense strand starting at position 3464 of SEQ ID NO: 586003
gcaauccugcgacauugau

SEQ ID NO: 684623 - RNA, 19 nt, Artificial Sequence
  Description of Artificial Sequence: Synthetic oligonucleotide
  Antisense strand to SEQ ID NO: 684622
aucaaugucgcaggauugc

SEQ ID NO: 684624 - RNA, 19 nt, Artificial Sequence
  Description of Artificial Sequence: Synthetic oligonucleotide
  Sense strand starting at position 3470 of SEQ ID NO: 586003
cugcgacauugaucuuaga

SEQ ID NO: 684625 - RNA, 19 nt, Artificial Sequence
  Description of Artificial Sequence: Synthetic oligonucleotide
  Antisense strand to SEQ ID NO: 684624
ucuaagaucaaugucgcag

SEQ ID NO: 684626 - RNA, 19 nt, Artificial Sequence
  Description of Artificial Sequence: Synthetic oligonucleotide
  Sense strand starting at position 3558 of SEQ ID NO: 586003
ugcuaaauuugugauaaga

SEQ ID NO: 684627 - RNA, 19 nt, Artificial Sequence
  Description of Artificial Sequence: Synthetic oligonucleotide
  Antisense strand to SEQ ID NO: 684626
ucuuaucacaaauuuagca

SEQ ID NO: 684628 - RNA, 19 nt, Artificial Sequence
  Description of Artificial Sequence: Synthetic oligonucleotide
  Sense strand starting at position 3560 of SEQ ID NO: 586003
cuaaauuugugauaagaug

SEQ ID NO: 684629 - RNA, 19 nt, Artificial Sequence
  Description of Artificial Sequence: Synthetic oligonucleotide
  Antisense strand to SEQ ID NO: 684628
caucuuaucacaaauuuag

SEQ ID NO: 684630 - RNA, 19 nt, Artificial Sequence
  Description of Artificial Sequence: Synthetic oligonucleotide
  Sense strand starting at position 3623 of SEQ ID NO: 586003
uccuacuuauucucugagu

SEQ ID NO: 684631 - RNA, 19 nt, Artificial Sequence
  Description of Artificial Sequence: Synthetic oligonucleotide
  Antisense strand to SEQ ID NO: 684630
acucagagaauaaguagga

SEQ ID NO: 684632 - RNA, 19 nt, Artificial Sequence
  Description of Artificial Sequence: Synthetic oligonucleotide
  Sense strand starting at position 3624 of SEQ ID NO: 586003
ccuacuuauucucugaguu

SEQ ID NO: 684633 - RNA, 19 nt, Artificial Sequence
  Description of Artificial Sequence: Synthetic oligonucleotide
  Antisense strand to SEQ ID NO: 684632
aacucagagaauaaguagg

SEQ ID NO: 684634 - RNA, 19 nt, Artificial Sequence
  Description of Artificial Sequence: Synthetic oligonucleotide
  Sense strand starting at position 3625 of SEQ ID NO: 586003
cuacuuauucucugaguuu

SEQ ID NO: 684635 - RNA, 19 nt, Artificial Sequence
  Description of Artificial Sequence: Synthetic oligonucleotide
  Antisense strand to SEQ ID NO: 684634
aaacucagagaauaaguag

SEQ ID NO: 684636 - RNA, 19 nt, Artificial Sequence
  Description of Artificial Sequence: Synthetic oligonucleotide
  Sense strand starting at position 3700 of SEQ ID NO: 586003
aagaaauuccaguguugaa

SEQ ID NO: 684637 - RNA, 19 nt, Artificial Sequence
  Description of Artificial Sequence: Synthetic oligonucleotide
  Antisense strand to SEQ ID NO: 684636
uucaacacuggaauuucuu

SEQ ID NO: 684638 - RNA, 19 nt, Artificial Sequence
  Description of Artificial Sequence: Synthetic oligonucleotide
  Sense strand starting at position 3803 of SEQ ID NO: 586003
uaaugaauacuuggugagu

SEQ ID NO: 684639 - RNA, 19 nt, Artificial Sequence
  Description of Artificial Sequence: Synthetic oligonucleotide
  Antisense strand to SEQ ID NO: 684638
acucaccaaguauucauua

SEQ ID NO: 684640 - RNA, 19 nt, Artificial Sequence
  Description of Artificial Sequence: Synthetic oligonucleotide
  Sense strand starting at position 3814 of SEQ ID NO: 586003
uggugagugccacaaauug

SEQ ID NO: 684641 - RNA, 19 nt, Artificial Sequence
  Description of Artificial Sequence: Synthetic oligonucleotide
  Antisense strand to SEQ ID NO: 684640
caauuuguggcacucacca

SEQ ID NO: 684642 - RNA, 19 nt, Artificial Sequence
  Description of Artificial Sequence: Synthetic oligonucleotide
  Sense strand starting at position 3823 of SEQ ID NO: 586003
ccacaaauuggguggcauu

SEQ ID NO: 684643 - RNA, 19 nt, Artificial Sequence
  Description of Artificial Sequence: Synthetic oligonucleotide
  Antisense strand to SEQ ID NO: 684642
aaugccacccaauuugugg

SEQ ID NO: 684644 - RNA, 19 nt, Artificial Sequence
  Description of Artificial Sequence: Synthetic oligonucleotide
  Sense strand starting at position 3867 of SEQ ID NO: 586003
ccgaucacaucucuuagua

SEQ ID NO: 684645 - RNA, 19 nt, Artificial Sequence
  Description of Artificial Sequence: Synthetic oligonucleotide
  Antisense strand to SEQ ID NO: 684644
uacuaagagaugugaucgg

SEQ ID NO: 684646 - RNA, 19 nt, Artificial Sequence
  Description of Artificial Sequence: Synthetic oligonucleotide
  Sense strand starting at position 242 of SEQ ID NO: 586004
cuaauuauucuggaagcau

SEQ ID NO: 684647 - RNA, 19 nt, Artificial Sequence
  Description of Artificial Sequence: Synthetic oligonucleotide
  Antisense strand to SEQ ID NO: 684646
augcuuccagaauaauuag

SEQ ID NO: 684648 - RNA, 19 nt, Artificial Sequence
  Description of Artificial Sequence: Synthetic oligonucleotide
  Sense strand starting at position 264 of SEQ ID NO: 586004
gcuaaaugucuacaagcca

SEQ ID NO: 684649 - RNA, 19 nt, Artificial Sequence
  Description of Artificial Sequence: Synthetic oligonucleotide
  Antisense strand to SEQ ID NO: 684648
uggcuuguagacauuuagc

SEQ ID NO: 684650 - RNA, 19 nt, Artificial Sequence
  Description of Artificial Sequence: Synthetic oligonucleotide
  Sense strand starting at position 351 of SEQ ID NO: 586004
aggacuagcugguauuuau

SEQ ID NO: 684651 - RNA, 19 nt, Artificial Sequence
  Description of Artificial Sequence: Synthetic oligonucleotide
  Antisense strand to SEQ ID NO: 684650
auaaauaccagcuaguccu

SEQ ID NO: 684652 - RNA, 19 nt, Artificial Sequence
  Description of Artificial Sequence: Synthetic oligonucleotide
  Sense strand starting at position 360 of SEQ ID NO: 586004
ugguauuuauugcaaagau

SEQ ID NO: 684653 - RNA, 19 nt, Artificial Sequence
  Description of Artificial Sequence: Synthetic oligonucleotide
  Antisense strand to SEQ ID NO: 684652
aucuuugcaauaaauacca

SEQ ID NO: 684654 - RNA, 19 nt, Artificial Sequence
  Description of Artificial Sequence: Synthetic oligonucleotide
  Sense strand starting at position 413 of SEQ ID NO: 586004
uuauuacaucugcauguca

SEQ ID NO: 684655 - RNA, 19 nt, Artificial Sequence
  Description of Artificial Sequence: Synthetic oligonucleotide
  Antisense strand to SEQ ID NO: 684654
ugacaugcagauguaauaa

SEQ ID NO: 684656 - RNA, 19 nt, Artificial Sequence
  Description of Artificial Sequence: Synthetic oligonucleotide
  Sense strand starting at position 415 of SEQ ID NO: 586004
auuacaucugcaugucagu

SEQ ID NO: 684657 - RNA, 19 nt, Artificial Sequence
  Description of Artificial Sequence: Synthetic oligonucleotide
  Antisense strand to SEQ ID NO: 684656
acugacaugcagauguaau

SEQ ID NO: 684658 - RNA, 19 nt, Artificial Sequence
  Description of Artificial Sequence: Synthetic oligonucleotide
  Sense strand starting at position 723 of SEQ ID NO: 586004
cugguuucaggcuggguaa

SEQ ID NO: 684659 - RNA, 19 nt, Artificial Sequence
  Description of Artificial Sequence: Synthetic oligonucleotide
  Antisense strand to SEQ ID NO: 684658
uuacccagccugaaaccag

SEQ ID NO: 684660 - RNA, 19 nt, Artificial Sequence
  Description of Artificial Sequence: Synthetic oligonucleotide
  Sense strand starting at position 851 of SEQ ID NO: 586004
uugaaauaguugcugagaa

SEQ ID NO: 684661 - RNA, 19 nt, Artificial Sequence
  Description of Artificial Sequence: Synthetic oligonucleotide
  Antisense strand to SEQ ID NO: 684660
uucucagcaacuauuucaa

SEQ ID NO: 684662 - RNA, 19 nt, Artificial Sequence
  Description of Artificial Sequence: Synthetic oligonucleotide
  Sense strand starting at position 861 of SEQ ID NO: 586004
ugcugagaauacucccgaa

SEQ ID NO: 684663 - RNA, 19 nt, Artificial Sequence
  Description of Artificial Sequence: Synthetic oligonucleotide
  Antisense strand to SEQ ID NO: 684662
uucgggaguauucucagca

SEQ ID NO: 684664 - RNA, 19 nt, Artificial Sequence
  Description of Artificial Sequence: Synthetic oligonucleotide
  Sense strand starting at position 891 of SEQ ID NO: 586004
uguuaauacugccugauug

SEQ ID NO: 684665 - RNA, 19 nt, Artificial Sequence
  Description of Artificial Sequence: Synthetic oligonucleotide
  Antisense strand to SEQ ID NO: 684664
caaucaggcaguauuaaca

SEQ ID NO: 684666 - RNA, 19 nt, Artificial Sequence
  Description of Artificial Sequence: Synthetic oligonucleotide
  Sense strand starting at position 893 of SEQ ID NO: 586004
uuaauacugccugauuguu

SEQ ID NO: 684667 - RNA, 19 nt, Artificial Sequence
  Description of Artificial Sequence: Synthetic oligonucleotide
  Antisense strand to SEQ ID NO: 684666
aacaaucaggcaguauuaa

SEQ ID NO: 684668 - RNA, 19 nt, Artificial Sequence
  Description of Artificial Sequence: Synthetic oligonucleotide
  Sense strand starting at position 928 of SEQ ID NO: 586004
uuucuaaaccauuggaguu

SEQ ID NO: 684669 - RNA, 19 nt, Artificial Sequence
  Description of Artificial Sequence: Synthetic oligonucleotide
  Antisense strand to SEQ ID NO: 684668
aacuccaaugguuuagaaa

SEQ ID NO: 684670 - RNA, 19 nt, Artificial Sequence
  Description of Artificial Sequence: Synthetic oligonucleotide
  Sense strand starting at position 959 of SEQ ID NO: 586004
gucaguugguucuuaggaa

SEQ ID NO: 684671 - RNA, 19 nt, Artificial Sequence
  Description of Artificial Sequence: Synthetic oligonucleotide
  Antisense strand to SEQ ID NO: 684670
uuccuaagaaccaacugac

SEQ ID NO: 684672 - RNA, 19 nt, Artificial Sequence
  Description of Artificial Sequence: Synthetic oligonucleotide
  Sense strand starting at position 966 of SEQ ID NO: 586004
gguucuuaggaaugugaaa

SEQ ID NO: 684673 - RNA, 19 nt, Artificial Sequence
  Description of Artificial Sequence: Synthetic oligonucleotide
  Antisense strand to SEQ ID NO: 684672
uuucacauuccuaagaacc

SEQ ID NO: 684674 - RNA, 19 nt, Artificial Sequence
  Description of Artificial Sequence: Synthetic oligonucleotide
  Sense strand starting at position 1053 of SEQ ID NO: 586004
ugaacugaaacgcaguaau

SEQ ID NO: 684675 - RNA, 19 nt, Artificial Sequence
  Description of Artificial Sequence: Synthetic oligonucleotide
  Antisense strand to SEQ ID NO: 684674
auuacugcguuucaguuca

SEQ ID NO: 684676 - RNA, 19 nt, Artificial Sequence
  Description of Artificial Sequence: Synthetic oligonucleotide
  Sense strand starting at position 1064 of SEQ ID NO: 586004
gcaguaauagccugaauac

SEQ ID NO: 684677 - RNA, 19 nt, Artificial Sequence
  Description of Artificial Sequence: Synthetic oligonucleotide
  Antisense strand to SEQ ID NO: 684676
guauucaggcuauuacugc

SEQ ID NO: 684678 - RNA, 19 nt, Artificial Sequence
  Description of Artificial Sequence: Synthetic oligonucleotide
  Sense strand starting at position 1073 of SEQ ID NO: 586004
gccugaauacaagguuaag

SEQ ID NO: 684679 - RNA, 19 nt, Artificial Sequence
  Description of Artificial Sequence: Synthetic oligonucleotide
  Antisense strand to SEQ ID NO: 684678
cuuaaccuuguauucaggc

SEQ ID NO: 684680 - RNA, 19 nt, Artificial Sequence
  Description of Artificial Sequence: Synthetic oligonucleotide
  Sense strand starting at position 1375 of SEQ ID NO: 586004
ggaagcucuuccgugggau

SEQ ID NO: 684681 - RNA, 19 nt, Artificial Sequence
  Description of Artificial Sequence: Synthetic oligonucleotide
  Antisense strand to SEQ ID NO: 684680
aucccacggaagagcuucc

SEQ ID NO: 684682 - RNA, 19 nt, Artificial Sequence
  Description of Artificial Sequence: Synthetic oligonucleotide
  Sense strand starting at position 1376 of SEQ ID NO: 586004
gaagcucuuccgugggaug

SEQ ID NO: 684683 - RNA, 19 nt, Artificial Sequence
  Description of Artificial Sequence: Synthetic oligonucleotide
  Antisense strand to SEQ ID NO: 684682
caucccacggaagagcuuc

SEQ ID NO: 684684 - RNA, 19 nt, Artificial Sequence
  Description of Artificial Sequence: Synthetic oligonucleotide
  Sense strand starting at position 1377 of SEQ ID NO: 586004
aagcucuuccgugggauga

SEQ ID NO: 684685 - RNA, 19 nt, Artificial Sequence
  Description of Artificial Sequence: Synthetic oligonucleotide
  Antisense strand to SEQ ID NO: 684684
ucaucccacggaagagcuu

SEQ ID NO: 684686 - RNA, 19 nt, Artificial Sequence
  Description of Artificial Sequence: Synthetic oligonucleotide
  Sense strand starting at position 1575 of SEQ ID NO: 586004
gugggcuccguucagagau

SEQ ID NO: 684687 - RNA, 19 nt, Artificial Sequence
  Description of Artificial Sequence: Synthetic oligonucleotide
  Antisense strand to SEQ ID NO: 684686
aucucugaacggagcccac

SEQ ID NO: 684688 - RNA, 19 nt, Artificial Sequence
  Description of Artificial Sequence: Synthetic oligonucleotide
  Sense strand starting at position 1983 of SEQ ID NO: 586004
gcaagaggcgguugaauuc

SEQ ID NO: 684689 - RNA, 19 nt, Artificial Sequence
  Description of Artificial Sequence: Synthetic oligonucleotide
  Antisense strand to SEQ ID NO: 684688
gaauucaaccgccucuugc

SEQ ID NO: 684690 - RNA, 19 nt, Artificial Sequence
  Description of Artificial Sequence: Synthetic oligonucleotide
  Sense strand starting at position 2486 of SEQ ID NO: 586004
ugaacaugucggccgugua

SEQ ID NO: 684691 - RNA, 19 nt, Artificial Sequence
  Description of Artificial Sequence: Synthetic oligonucleotide
  Antisense strand to SEQ ID NO: 684690
uacacggccgacauguuca

SEQ ID NO: 684692 - RNA, 19 nt, Artificial Sequence
  Description of Artificial Sequence: Synthetic oligonucleotide
  Sense strand starting at position 3132 of SEQ ID NO: 586004
agcugcugucagcagaaua

SEQ ID NO: 684693 - RNA, 19 nt, Artificial Sequence
  Description of Artificial Sequence: Synthetic oligonucleotide
  Antisense strand to SEQ ID NO: 684692
uauucugcugacagcagcu

SEQ ID NO: 684694 - RNA, 19 nt, Artificial Sequence
  Description of Artificial Sequence: Synthetic oligonucleotide
  Sense strand starting at position 3175 of SEQ ID NO: 586004
ggguuugcaccugaauuag

SEQ ID NO: 684695 - RNA, 19 nt, Artificial Sequence
  Description of Artificial Sequence: Synthetic oligonucleotide
  Antisense strand to SEQ ID NO: 684694
cuaauucaggugcaaaccc

SEQ ID NO: 684696 - RNA, 19 nt, Artificial Sequence
  Description of Artificial Sequence: Synthetic oligonucleotide
  Sense strand starting at position 3181 of SEQ ID NO: 586004
gcaccugaauuaguuagau

SEQ ID NO: 684697 - RNA, 19 nt, Artificial Sequence
  Description of Artificial Sequence: Synthetic oligonucleotide
  Antisense strand to SEQ ID NO: 684696
aucuaacuaauucaggugc

SEQ ID NO: 684698 - RNA, 19 nt, Artificial Sequence
  Description of Artificial Sequence: Synthetic oligonucleotide
  Sense strand starting at position 3190 of SEQ ID NO: 586004
uuaguuagauucuuggcca

SEQ ID NO: 684699 - RNA, 19 nt, Artificial Sequence
  Description of Artificial Sequence: Synthetic oligonucleotide
  Antisense strand to SEQ ID NO: 684698
uggccaagaaucuaacuaa

SEQ ID NO: 684700 - RNA, 19 nt, Artificial Sequence
  Description of Artificial Sequence: Synthetic oligonucleotide
  Sense strand starting at position 3193 of SEQ ID NO: 586004
guuagauucuuggccagag

SEQ ID NO: 684701 - RNA, 19 nt, Artificial Sequence
  Description of Artificial Sequence: Synthetic oligonucleotide
  Antisense strand to SEQ ID NO: 684700
cucuggccaagaaucuaac

SEQ ID NO: 684702 - RNA, 19 nt, Artificial Sequence
  Description of Artificial Sequence: Synthetic oligonucleotide
  Sense strand starting at position 3197 of SEQ ID NO: 586004
gauucuuggccagagcuca

SEQ ID NO: 684703 - RNA, 19 nt, Artificial Sequence
  Description of Artificial Sequence: Synthetic oligonucleotide
  Antisense strand to SEQ ID NO: 684702
ugagcucuggccaagaauc

SEQ ID NO: 684704 - RNA, 19 nt, Artificial Sequence
  Description of Artificial Sequence: Synthetic oligonucleotide
  Sense strand starting at position 3208 of SEQ ID NO: 586004
agagcucaacugugauucu

SEQ ID NO: 684705 - RNA, 19 nt, Artificial Sequence
  Description of Artificial Sequence: Synthetic oligonucleotide
  Antisense strand to SEQ ID NO: 684704
agaaucacaguugagcucu

SEQ ID NO: 684706 - RNA, 19 nt, Artificial Sequence
  Description of Artificial Sequence: Synthetic oligonucleotide
  Sense strand starting at position 3211 of SEQ ID NO: 586004
gcucaacugugauucucga

SEQ ID NO: 684707 - RNA, 19 nt, Artificial Sequence
  Description of Artificial Sequence: Synthetic oligonucleotide
  Antisense strand to SEQ ID NO: 684706
ucgagaaucacaguugagc

SEQ ID NO: 684708 - RNA, 19 nt, Artificial Sequence
  Description of Artificial Sequence: Synthetic oligonucleotide
  Sense strand starting at position 3295 of SEQ ID NO: 586004
gccucaacucagggaugaa

SEQ ID NO: 684709 - RNA, 19 nt, Artificial Sequence
  Description of Artificial Sequence: Synthetic oligonucleotide
  Antisense strand to SEQ ID NO: 684708
uucaucccugaguugaggc

SEQ ID NO: 684710 - RNA, 19 nt, Artificial Sequence
  Description of Artificial Sequence: Synthetic oligonucleotide
  Sense strand starting at position 3332 of SEQ ID NO: 586004
cggccucuucuagacaaga

SEQ ID NO: 684711 - RNA, 19 nt, Artificial Sequence
  Description of Artificial Sequence: Synthetic oligonucleotide
  Antisense strand to SEQ ID NO: 684710
ucuugucuagaagaggccg

SEQ ID NO: 684712 - RNA, 19 nt, Artificial Sequence
  Description of Artificial Sequence: Synthetic oligonucleotide
  Sense strand starting at position 3388 of SEQ ID NO: 586004
cucauuuaugccgguuacu

SEQ ID NO: 684713 - RNA, 19 nt, Artificial Sequence
  Description of Artificial Sequence: Synthetic oligonucleotide
  Antisense strand to SEQ ID NO: 684712
aguaaccggcauaaaugag

SEQ ID NO: 684714 - RNA, 19 nt, Artificial Sequence
  Description of Artificial Sequence: Synthetic oligonucleotide
  Sense strand starting at position 3560 of SEQ ID NO: 586004
aaauuagaaucaccggguu

SEQ ID NO: 684715 - RNA, 19 nt, Artificial Sequence
  Description of Artificial Sequence: Synthetic oligonucleotide
  Antisense strand to SEQ ID NO: 684714
aacccggugauucuaauuu

SEQ ID NO: 684716 - RNA, 19 nt, Artificial Sequence
  Description of Artificial Sequence: Synthetic oligonucleotide
  Sense strand starting at position 3784 of SEQ ID NO: 586004
gccacuuaagcuugaaaca

SEQ ID NO: 684717 - RNA, 19 nt, Artificial Sequence
  Description of Artificial Sequence: Synthetic oligonucleotide
  Antisense strand to SEQ ID NO: 684716
uguuucaagcuuaaguggc

SEQ ID NO: 684718 - RNA, 19 nt, Artificial Sequence
  Description of Artificial Sequence: Synthetic oligonucleotide
  Sense strand starting at position 3813 of SEQ ID NO: 586004
cuuguauugcucgcucuuu

SEQ ID NO: 684719 - RNA, 19 nt, Artificial Sequence
  Description of Artificial Sequence: Synthetic oligonucleotide
  Antisense strand to SEQ ID NO: 684718
aaagagcgagcaauacaag

SEQ ID NO: 684720 - RNA, 19 nt, Artificial Sequence
  Description of Artificial Sequence: Synthetic oligonucleotide
  Sense strand starting at position 3854 of SEQ ID NO: 586004
ccgcauuuccuguaaccau

SEQ ID NO: 684721 - RNA, 19 nt, Artificial Sequence
  Description of Artificial Sequence: Synthetic oligonucleotide
  Antisense strand to SEQ ID NO: 684720
augguuacaggaaaugcgg

SEQ ID NO: 684722 - RNA, 19 nt, Artificial Sequence
  Description of Artificial Sequence: Synthetic oligonucleotide
  Sense strand starting at position 3912 of SEQ ID NO: 586004
gagacuaagccuggccuau

SEQ ID NO: 684723 - RNA, 19 nt, Artificial Sequence
  Description of Artificial Sequence: Synthetic oligonucleotide
  Antisense strand to SEQ ID NO: 684722
auaggccaggcuuagucuc

SEQ ID NO: 684724 - RNA, 19 nt, Artificial Sequence
  Description of Artificial Sequence: Synthetic oligonucleotide
  Sense strand starting at position 3931 of SEQ ID NO: 586004
ugcaguagcuuucuaagag

SEQ ID NO: 684725 - RNA, 19 nt, Artificial Sequence
  Description of Artificial Sequence: Synthetic oligonucleotide
  Antisense strand to SEQ ID NO: 684724
cucuuagaaagcuacugca

SEQ ID NO: 684726 - RNA, 19 nt, Artificial Sequence
  Description of Artificial Sequence: Synthetic oligonucleotide
  Sense strand starting at position 114 of SEQ ID NO: 586005
uugaaauaguugcugagaa

SEQ ID NO: 684727 - RNA, 19 nt, Artificial Sequence
  Description of Artificial Sequence: Synthetic oligonucleotide
  Antisense strand to SEQ ID NO: 684726
uucucagcaacuauuucaa

SEQ ID NO: 684728 - RNA, 19 nt, Artificial Sequence
  Description of Artificial Sequence: Synthetic oligonucleotide
  Sense strand starting at position 124 of SEQ ID NO: 586005
ugcugagaauacucccgaa

SEQ ID NO: 684729 - RNA, 19 nt, Artificial Sequence
  Description of Artificial Sequence: Synthetic oligonucleotide
  Antisense strand to SEQ ID NO: 684728
uucgggaguauucucagca

SEQ ID NO: 684730 - RNA, 19 nt, Artificial Sequence
  Description of Artificial Sequence: Synthetic oligonucleotide
  Sense strand starting at position 154 of SEQ ID NO: 586005
uguuaauacugccugauug

SEQ ID NO: 684731 - RNA, 19 nt, Artificial Sequence
  Description of Artificial Sequence: Synthetic oligonucleotide
  Antisense strand to SEQ ID NO: 684730
caaucaggcaguauuaaca

SEQ ID NO: 684732 - RNA, 19 nt, Artificial Sequence
  Description of Artificial Sequence: Synthetic oligonucleotide
  Sense strand starting at position 155 of SEQ ID NO: 586005
guuaauacugccugauugu

SEQ ID NO: 684733 - RNA, 19 nt, Artificial Sequence
  Description of Artificial Sequence: Synthetic oligonucleotide
  Antisense strand to SEQ ID NO: 684732
acaaucaggcaguauuaac

SEQ ID NO: 684734 - RNA, 19 nt, Artificial Sequence
  Description of Artificial Sequence: Synthetic oligonucleotide
  Sense strand starting at position 156 of SEQ ID NO: 586005
uuaauacugccugauuguu

SEQ ID NO: 684735 - RNA, 19 nt, Artificial Sequence
  Description of Artificial Sequence: Synthetic oligonucleotide
  Antisense strand to SEQ ID NO: 684734
aacaaucaggcaguauuaa

SEQ ID NO: 684736 - RNA, 19 nt, Artificial Sequence
  Description of Artificial Sequence: Synthetic oligonucleotide
  Sense strand starting at position 191 of SEQ ID NO: 586005
uuucuaaaccauuggaguu

SEQ ID NO: 684737 - RNA, 19 nt, Artificial Sequence
  Description of Artificial Sequence: Synthetic oligonucleotide
  Antisense strand to SEQ ID NO: 684736
aacuccaaugguuuagaaa

SEQ ID NO: 684738 - RNA, 19 nt, Artificial Sequence
  Description of Artificial Sequence: Synthetic oligonucleotide
  Sense strand starting at position 222 of SEQ ID NO: 586005
gucaguugguucuuaggaa

SEQ ID NO: 684739 - RNA, 19 nt, Artificial Sequence
  Description of Artificial Sequence: Synthetic oligonucleotide
  Antisense strand to SEQ ID NO: 684738
uuccuaagaaccaacugac

SEQ ID NO: 684740 - RNA, 19 nt, Artificial Sequence
  Description of Artificial Sequence: Synthetic oligonucleotide
  Sense strand starting at position 229 of SEQ ID NO: 586005
gguucuuaggaaugugaaa

SEQ ID NO: 684741 - RNA, 19 nt, Artificial Sequence
  Description of Artificial Sequence: Synthetic oligonucleotide
  Antisense strand to SEQ ID NO: 684740
uuucacauuccuaagaacc

SEQ ID NO: 684742 - RNA, 19 nt, Artificial Sequence
  Description of Artificial Sequence: Synthetic oligonucleotide
  Sense strand starting at position 316 of SEQ ID NO: 586005
ugaacugaaacgcaguaau

SEQ ID NO: 684743 - RNA, 19 nt, Artificial Sequence
  Description of Artificial Sequence: Synthetic oligonucleotide
  Antisense strand to SEQ ID NO: 684742
auuacugcguuucaguuca

SEQ ID NO: 684744 - RNA, 19 nt, Artificial Sequence
  Description of Artificial Sequence: Synthetic oligonucleotide
  Sense strand starting at position 327 of SEQ ID NO: 586005
gcaguaauagccugaauac

SEQ ID NO: 684745 - RNA, 19 nt, Artificial Sequence
  Description of Artificial Sequence: Synthetic oligonucleotide
  Antisense strand to SEQ ID NO: 684744
guauucaggcuauuacugc

SEQ ID NO: 684746 - RNA, 19 nt, Artificial Sequence
  Description of Artificial Sequence: Synthetic oligonucleotide
  Sense strand starting at position 336 of SEQ ID NO: 586005
gccugaauacaagguuaag

SEQ ID NO: 684747 - RNA, 19 nt, Artificial Sequence
  Description of Artificial Sequence: Synthetic oligonucleotide
  Antisense strand to SEQ ID NO: 684746
cuuaaccuuguauucaggc

SEQ ID NO: 684748 - RNA, 19 nt, Artificial Sequence
  Description of Artificial Sequence: Synthetic oligonucleotide
  Sense strand starting at position 603 of SEQ ID NO: 586005
gcaggaaagcugugcacau

SEQ ID NO: 684749 - RNA, 19 nt, Artificial Sequence
  Description of Artificial Sequence: Synthetic oligonucleotide
  Antisense strand to SEQ ID NO: 684748
augugcacagcuuuccugc

SEQ ID NO: 684750 - RNA, 19 nt, Artificial Sequence
  Description of Artificial Sequence: Synthetic oligonucleotide
  Sense strand starting at position 638 of SEQ ID NO: 586005
ggaagcucuuccgugggau

SEQ ID NO: 684751 - RNA, 19 nt, Artificial Sequence
  Description of Artificial Sequence: Synthetic oligonucleotide
  Antisense strand to SEQ ID NO: 684750
aucccacggaagagcuucc

SEQ ID NO: 684752 - RNA, 19 nt, Artificial Sequence
  Description of Artificial Sequence: Synthetic oligonucleotide
  Sense strand starting at position 639 of SEQ ID NO: 586005
gaagcucuuccgugggaug

SEQ ID NO: 684753 - RNA, 19 nt, Artificial Sequence
  Description of Artificial Sequence: Synthetic oligonucleotide
  Antisense strand to SEQ ID NO: 684752
caucccacggaagagcuuc

SEQ ID NO: 684754 - RNA, 19 nt, Artificial Sequence
  Description of Artificial Sequence: Synthetic oligonucleotide
  Sense strand starting at position 640 of SEQ ID NO: 586005
aagcucuuccgugggauga

SEQ ID NO: 684755 - RNA, 19 nt, Artificial Sequence
  Description of Artificial Sequence: Synthetic oligonucleotide
  Antisense strand to SEQ ID NO: 684754
ucaucccacggaagagcuu

SEQ ID NO: 684756 - RNA, 19 nt, Artificial Sequence
  Description of Artificial Sequence: Synthetic oligonucleotide
  Sense strand starting at position 838 of SEQ ID NO: 586005
gugggcuccguucagagau

SEQ ID NO: 684757 - RNA, 19 nt, Artificial Sequence
  Description of Artificial Sequence: Synthetic oligonucleotide
  Antisense strand to SEQ ID NO: 684756
aucucugaacggagcccac

SEQ ID NO: 684758 - RNA, 19 nt, Artificial Sequence
  Description of Artificial Sequence: Synthetic oligonucleotide
  Sense strand starting at position 1246 of SEQ ID NO: 586005
gcaagaggcgguugaauuc

SEQ ID NO: 684759 - RNA, 19 nt, Artificial Sequence
  Description of Artificial Sequence: Synthetic oligonucleotide
  Antisense strand to SEQ ID NO: 684758
gaauucaaccgccucuugc

SEQ ID NO: 684760 - RNA, 19 nt, Artificial Sequence
  Description of Artificial Sequence: Synthetic oligonucleotide
  Sense strand starting at position 1749 of SEQ ID NO: 586005
ugaacaugucggccgugua

SEQ ID NO: 684761 - RNA, 19 nt, Artificial Sequence
  Description of Artificial Sequence: Synthetic oligonucleotide
  Antisense strand to SEQ ID NO: 684760
uacacggccgacauguuca

SEQ ID NO: 684762 - RNA, 19 nt, Artificial Sequence
  Description of Artificial Sequence: Synthetic oligonucleotide
  Sense strand starting at position 2395 of SEQ ID NO: 586005
agcugcugucagcagaaua

SEQ ID NO: 684763 - RNA, 19 nt, Artificial Sequence
  Description of Artificial Sequence: Synthetic oligonucleotide
  Antisense strand to SEQ ID NO: 684762
uauucugcugacagcagcu

SEQ ID NO: 684764 - RNA, 19 nt, Artificial Sequence
  Description of Artificial Sequence: Synthetic oligonucleotide
  Sense strand starting at position 2438 of SEQ ID NO: 586005
ggguuugcaccugaauuag

SEQ ID NO: 684765 - RNA, 19 nt, Artificial Sequence
  Description of Artificial Sequence: Synthetic oligonucleotide
  Antisense strand to SEQ ID NO: 684764
cuaauucaggugcaaaccc

SEQ ID NO: 684766 - RNA, 19 nt, Artificial Sequence
  Description of Artificial Sequence: Synthetic oligonucleotide
  Sense strand starting at position 2444 of SEQ ID NO: 586005
gcaccugaauuaguuagau

SEQ ID NO: 684767 - RNA, 19 nt, Artificial Sequence
  Description of Artificial Sequence: Synthetic oligonucleotide
  Antisense strand to SEQ ID NO: 684766
aucuaacuaauucaggugc

SEQ ID NO: 684768 - RNA, 19 nt, Artificial Sequence
  Description of Artificial Sequence: Synthetic oligonucleotide
  Sense strand starting at position 2453 of SEQ ID NO: 586005
uuaguuagauucuuggcca

SEQ ID NO: 684769 - RNA, 19 nt, Artificial Sequence
  Description of Artificial Sequence: Synthetic oligonucleotide
  Antisense strand to SEQ ID NO: 684768
uggccaagaaucuaacuaa

SEQ ID NO: 684770 - RNA, 19 nt, Artificial Sequence
  Description of Artificial Sequence: Synthetic oligonucleotide
  Sense strand starting at position 2456 of SEQ ID NO: 586005
guuagauucuuggccagag

SEQ ID NO: 684771 - RNA, 19 nt, Artificial Sequence
  Description of Artificial Sequence: Synthetic oligonucleotide
  Antisense strand to SEQ ID NO: 684770
cucuggccaagaaucuaac

SEQ ID NO: 684772 - RNA, 19 nt, Artificial Sequence
  Description of Artificial Sequence: Synthetic oligonucleotide
  Sense strand starting at position 2460 of SEQ ID NO: 586005
gauucuuggccagagcuca

SEQ ID NO: 684773 - RNA, 19 nt, Artificial Sequence
  Description of Artificial Sequence: Synthetic oligonucleotide
  Antisense strand to SEQ ID NO: 684772
ugagcucuggccaagaauc

SEQ ID NO: 684774 - RNA, 19 nt, Artificial Sequence
  Description of Artificial Sequence: Synthetic oligonucleotide
  Sense strand starting at position 2471 of SEQ ID NO: 586005
agagcucaacugugauucu

SEQ ID NO: 684775 - RNA, 19 nt, Artificial Sequence
  Description of Artificial Sequence: Synthetic oligonucleotide
  Antisense strand to SEQ ID NO: 684774
agaaucacaguugagcucu

SEQ ID NO: 684776 - RNA, 19 nt, Artificial Sequence
  Description of Artificial Sequence: Synthetic oligonucleotide
  Sense strand starting at position 2474 of SEQ ID NO: 586005
gcucaacugugauucucga

SEQ ID NO: 684777 - RNA, 19 nt, Artificial Sequence
  Description of Artificial Sequence: Synthetic oligonucleotide
  Antisense strand to SEQ ID NO: 684776
ucgagaaucacaguugagc

SEQ ID NO: 684778 - RNA, 19 nt, Artificial Sequence
  Description of Artificial Sequence: Synthetic oligonucleotide
  Sense strand starting at position 2558 of SEQ ID NO: 586005
gccucaacucagggaugaa

SEQ ID NO: 684779 - RNA, 19 nt, Artificial Sequence
  Description of Artificial Sequence: Synthetic oligonucleotide
  Antisense strand to SEQ ID NO: 684778
uucaucccugaguugaggc

SEQ ID NO: 684780 - RNA, 19 nt, Artificial Sequence
  Description of Artificial Sequence: Synthetic oligonucleotide
  Sense strand starting at position 2595 of SEQ ID NO: 586005
cggccucuucuagacaaga

SEQ ID NO: 684781 - RNA, 19 nt, Artificial Sequence
  Description of Artificial Sequence: Synthetic oligonucleotide
  Antisense strand to SEQ ID NO: 684780
ucuugucuagaagaggccg

SEQ ID NO: 684782 - RNA, 19 nt, Artificial Sequence
  Description of Artificial Sequence: Synthetic oligonucleotide
  Sense strand starting at position 2651 of SEQ ID NO: 586005
cucauuuaugccgguuacu

SEQ ID NO: 684783 - RNA, 19 nt, Artificial Sequence
  Description of Artificial Sequence: Synthetic oligonucleotide
  Antisense strand to SEQ ID NO: 684782
aguaaccggcauaaaugag

SEQ ID NO: 684784 - RNA, 19 nt, Artificial Sequence
  Description of Artificial Sequence: Synthetic oligonucleotide
  Sense strand starting at position 2823 of SEQ ID NO: 586005
aaauuagaaucaccggguu

SEQ ID NO: 684785 - RNA, 19 nt, Artificial Sequence
  Description of Artificial Sequence: Synthetic oligonucleotide
  Antisense strand to SEQ ID NO: 684784
aacccggugauucuaauuu

SEQ ID NO: 684786 - RNA, 19 nt, Artificial Sequence
  Description of Artificial Sequence: Synthetic oligonucleotide
  Sense strand starting at position 3047 of SEQ ID NO: 586005
gccacuuaagcuugaaaca

SEQ ID NO: 684787 - RNA, 19 nt, Artificial Sequence
  Description of Artificial Sequence: Synthetic oligonucleotide
  Antisense strand to SEQ ID NO: 684786
uguuucaagcuuaaguggc

SEQ ID NO: 684788 - RNA, 19 nt, Artificial Sequence
  Description of Artificial Sequence: Synthetic oligonucleotide
  Sense strand starting at position 3076 of SEQ ID NO: 586005
cuuguauugcucgcucuuu

SEQ ID NO: 684789 - RNA, 19 nt, Artificial Sequence
  Description of Artificial Sequence: Synthetic oligonucleotide
  Antisense strand to SEQ ID NO: 684788
aaagagcgagcaauacaag

SEQ ID NO: 684790 - RNA, 19 nt, Artificial Sequence
  Description of Artificial Sequence: Synthetic oligonucleotide
  Sense strand starting at position 3117 of SEQ ID NO: 586005
ccgcauuuccuguaaccau

SEQ ID NO: 684791 - RNA, 19 nt, Artificial Sequence
  Description of Artificial Sequence: Synthetic oligonucleotide
  Antisense strand to SEQ ID NO: 684790
augguuacaggaaaugcgg

SEQ ID NO: 684792 - RNA, 19 nt, Artificial Sequence
  Description of Artificial Sequence: Synthetic oligonucleotide
  Sense strand starting at position 3175 of SEQ ID NO: 586005
gagacuaagccuggccuau

SEQ ID NO: 684793 - RNA, 19 nt, Artificial Sequence
  Description of Artificial Sequence: Synthetic oligonucleotide
  Antisense strand to SEQ ID NO: 684792
auaggccaggcuuagucuc

SEQ ID NO: 684794 - RNA, 19 nt, Artificial Sequence
  Description of Artificial Sequence: Synthetic oligonucleotide
  Sense strand starting at position 3194 of SEQ ID NO: 586005
ugcaguagcuuucuaagag

SEQ ID NO: 684795 - RNA, 19 nt, Artificial Sequence
  Description of Artificial Sequence: Synthetic oligonucleotide
  Antisense strand to SEQ ID NO: 684794
cucuuagaaagcuacugca

SEQ ID NO: 684796 - RNA, 19 nt, Artificial Sequence
  Description of Artificial Sequence: Synthetic oligonucleotide
  Sense strand starting at position 3278 of SEQ ID NO: 586005
cugcuuaaacuuggaccaa

SEQ ID NO: 684797 - RNA, 19 nt, Artificial Sequence
  Description of Artificial Sequence: Synthetic oligonucleotide
  Antisense strand to SEQ ID NO: 684796
uugguccaaguuuaagcag

SEQ ID NO: 684798 - RNA, 19 nt, Artificial Sequence
  Description of Artificial Sequence: Synthetic oligonucleotide
  Sense strand starting at position 3331 of SEQ ID NO: 586005
gggugaaauagucaugccu

SEQ ID NO: 684799 - RNA, 19 nt, Artificial Sequence
  Description of Artificial Sequence: Synthetic oligonucleotide
  Antisense strand to SEQ ID NO: 684798
aggcaugacuauuucaccc

SEQ ID NO: 684800 - RNA, 19 nt, Artificial Sequence
  Description of Artificial Sequence: Synthetic oligonucleotide
  Sense strand starting at position 3468 of SEQ ID NO: 586005
aucccuguguucuccaaca

SEQ ID NO: 684801 - RNA, 19 nt, Artificial Sequence
  Description of Artificial Sequence: Synthetic oligonucleotide
  Antisense strand to SEQ ID NO: 684800
uguuggagaacacagggau

SEQ ID NO: 684802 - RNA, 19 nt, Artificial Sequence
  Description of Artificial Sequence: Synthetic oligonucleotide
  Sense strand starting at position 3509 of SEQ ID NO: 586005
cacggugcuguugggaaau

SEQ ID NO: 684803 - RNA, 19 nt, Artificial Sequence
  Description of Artificial Sequence: Synthetic oligonucleotide
  Antisense strand to SEQ ID NO: 684802
auuucccaacagcaccgug

SEQ ID NO: 684804 - RNA, 19 nt, Artificial Sequence
  Description of Artificial Sequence: Synthetic oligonucleotide
  Sense strand starting at position 3725 of SEQ ID NO: 586005
aauugaugccacugggcau

SEQ ID NO: 684805 - RNA, 19 nt, Artificial Sequence
  Description of Artificial Sequence: Synthetic oligonucleotide
  Antisense strand to SEQ ID NO: 684804
augcccaguggcaucaauu

SEQ ID NO: 684806 - RNA, 19 nt, Artificial Sequence
  Description of Artificial Sequence: Synthetic oligonucleotide
  Sense strand starting at position 113 of SEQ ID NO: 586006
aggauacccucugucaaua

SEQ ID NO: 684807 - RNA, 19 nt, Artificial Sequence
  Description of Artificial Sequence: Synthetic oligonucleotide
  Antisense strand to SEQ ID NO: 684806
uauugacagaggguauccu

SEQ ID NO: 684808 - RNA, 19 nt, Artificial Sequence
  Description of Artificial Sequence: Synthetic oligonucleotide
  Sense strand starting at position 218 of SEQ ID NO: 586006
acauacuaccgugacacua

SEQ ID NO: 684809 - RNA, 19 nt, Artificial Sequence
  Description of Artificial Sequence: Synthetic oligonucleotide
  Antisense strand to SEQ ID NO: 684808
uagugucacgguaguaugu

SEQ ID NO: 684810 - RNA, 19 nt, Artificial Sequence
  Description of Artificial Sequence: Synthetic oligonucleotide
  Sense strand starting at position 645 of SEQ ID NO: 586006
gugagcuuucgcuugccau

SEQ ID NO: 684811 - RNA, 19 nt, Artificial Sequence
  Description of Artificial Sequence: Synthetic oligonucleotide
  Antisense strand to SEQ ID NO: 684810
auggcaagcgaaagcucac

SEQ ID NO: 684812 - RNA, 19 nt, Artificial Sequence
  Description of Artificial Sequence: Synthetic oligonucleotide
  Sense strand starting at position 778 of SEQ ID NO: 586006
gggcuaaaggcguaccauu

SEQ ID NO: 684813 - RNA, 19 nt, Artificial Sequence
  Description of Artificial Sequence: Synthetic oligonucleotide
  Antisense strand to SEQ ID NO: 684812
aaugguacgccuuuagccc

SEQ ID NO: 684814 - RNA, 19 nt, Artificial Sequence
  Description of Artificial Sequence: Synthetic oligonucleotide
  Sense strand starting at position 885 of SEQ ID NO: 586006
cuaauagagcuguaacaac

SEQ ID NO: 684815 - RNA, 19 nt, Artificial Sequence
  Description of Artificial Sequence: Synthetic oligonucleotide
  Antisense strand to SEQ ID NO: 684814
guuguuacagcucuauuag

SEQ ID NO: 684816 - RNA, 19 nt, Artificial Sequence
  Description of Artificial Sequence: Synthetic oligonucleotide
  Sense strand starting at position 1076 of SEQ ID NO: 586006
ugugaucuccuuugauaag

SEQ ID NO: 684817 - RNA, 19 nt, Artificial Sequence
  Description of Artificial Sequence: Synthetic oligonucleotide
  Antisense strand to SEQ ID NO: 684816
cuuaucaaaggagaucaca

SEQ ID NO: 684818 - RNA, 19 nt, Artificial Sequence
  Description of Artificial Sequence: Synthetic oligonucleotide
  Sense strand starting at position 1269 of SEQ ID NO: 586006
acuggaagaucuguguuaa

SEQ ID NO: 684819 - RNA, 19 nt, Artificial Sequence
  Description of Artificial Sequence: Synthetic oligonucleotide
  Antisense strand to SEQ ID NO: 684818
uuaacacagaucuuccagu

SEQ ID NO: 684820 - RNA, 19 nt, Artificial Sequence
  Description of Artificial Sequence: Synthetic oligonucleotide
  Sense strand starting at position 1270 of SEQ ID NO: 586006
cuggaagaucuguguuaag

SEQ ID NO: 684821 - RNA, 19 nt, Artificial Sequence
  Description of Artificial Sequence: Synthetic oligonucleotide
  Antisense strand to SEQ ID NO: 684820
cuuaacacagaucuuccag

SEQ ID NO: 684822 - RNA, 19 nt, Artificial Sequence
  Description of Artificial Sequence: Synthetic oligonucleotide
  Sense strand starting at position 1299 of SEQ ID NO: 586006
auuccagguucucuccaua

SEQ ID NO: 684823 - RNA, 19 nt, Artificial Sequence
  Description of Artificial Sequence: Synthetic oligonucleotide
  Antisense strand to SEQ ID NO: 684822
uauggagagaaccuggaau

SEQ ID NO: 684824 - RNA, 19 nt, Artificial Sequence
  Description of Artificial Sequence: Synthetic oligonucleotide
  Sense strand starting at position 1343 of SEQ ID NO: 586006
uguguuagaucauuaacaa

SEQ ID NO: 684825 - RNA, 19 nt, Artificial Sequence
  Description of Artificial Sequence: Synthetic oligonucleotide
  Antisense strand to SEQ ID NO: 684824
uuguuaaugaucuaacaca

SEQ ID NO: 684826 - RNA, 19 nt, Artificial Sequence
  Description of Artificial Sequence: Synthetic oligonucleotide
  Sense strand starting at position 1344 of SEQ ID NO: 586006
guguuagaucauuaacaac

SEQ ID NO: 684827 - RNA, 19 nt, Artificial Sequence
  Description of Artificial Sequence: Synthetic oligonucleotide
  Antisense strand to SEQ ID NO: 684826
guuguuaaugaucuaacac

SEQ ID NO: 684828 - RNA, 19 nt, Artificial Sequence
  Description of Artificial Sequence: Synthetic oligonucleotide
  Sense strand starting at position 1513 of SEQ ID NO: 586006
aagaguagcuaguccaaug

SEQ ID NO: 684829 - RNA, 19 nt, Artificial Sequence
  Description of Artificial Sequence: Synthetic oligonucleotide
  Antisense strand to SEQ ID NO: 684828
cauuggacuagcuacucuu

SEQ ID NO: 684830 - RNA, 19 nt, Artificial Sequence
  Description of Artificial Sequence: Synthetic oligonucleotide
  Sense strand starting at position 1616 of SEQ ID NO: 586006
gccucuucuccugaaggau

SEQ ID NO: 684831 - RNA, 19 nt, Artificial Sequence
  Description of Artificial Sequence: Synthetic oligonucleotide
  Antisense strand to SEQ ID NO: 684830
auccuucaggagaagaggc

SEQ ID NO: 684832 - RNA, 19 nt, Artificial Sequence
  Description of Artificial Sequence: Synthetic oligonucleotide
  Sense strand starting at position 1769 of SEQ ID NO: 586006
ggagccaucucugcagaca

SEQ ID NO: 684833 - RNA, 19 nt, Artificial Sequence
  Description of Artificial Sequence: Synthetic oligonucleotide
  Antisense strand to SEQ ID NO: 684832
ugucugcagagauggcucc

SEQ ID NO: 684834 - RNA, 19 nt, Artificial Sequence
  Description of Artificial Sequence: Synthetic oligonucleotide
  Sense strand starting at position 1815 of SEQ ID NO: 586006
ggacuuugcaugcagcuua

SEQ ID NO: 684835 - RNA, 19 nt, Artificial Sequence
  Description of Artificial Sequence: Synthetic oligonucleotide
  Antisense strand to SEQ ID NO: 684834
uaagcugcaugcaaagucc

SEQ ID NO: 684836 - RNA, 19 nt, Artificial Sequence
  Description of Artificial Sequence: Synthetic oligonucleotide
  Sense strand starting at position 1829 of SEQ ID NO: 586006
gcuuauauaccagaguuga

SEQ ID NO: 684837 - RNA, 19 nt, Artificial Sequence
  Description of Artificial Sequence: Synthetic oligonucleotide
  Antisense strand to SEQ ID NO: 684836
ucaacucugguauauaagc

SEQ ID NO: 684838 - RNA, 19 nt, Artificial Sequence
  Description of Artificial Sequence: Synthetic oligonucleotide
  Sense strand starting at position 1839 of SEQ ID NO: 586006
cagaguugaguuggaaauc

SEQ ID NO: 684839 - RNA, 19 nt, Artificial Sequence
  Description of Artificial Sequence: Synthetic oligonucleotide
  Antisense strand to SEQ ID NO: 684838
gauuuccaacucaacucug

SEQ ID NO: 684840 - RNA, 19 nt, Artificial Sequence
  Description of Artificial Sequence: Synthetic oligonucleotide
  Sense strand starting at position 2064 of SEQ ID NO: 586006
caggaaagaucuuugucug

SEQ ID NO: 684841 - RNA, 19 nt, Artificial Sequence
  Description of Artificial Sequence: Synthetic oligonucleotide
  Antisense strand to SEQ ID NO: 684840
cagacaaagaucuuuccug

SEQ ID NO: 684842 - RNA, 19 nt, Artificial Sequence
  Description of Artificial Sequence: Synthetic oligonucleotide
  Sense strand starting at position 2065 of SEQ ID NO: 586006
aggaaagaucuuugucugu

SEQ ID NO: 684843 - RNA, 19 nt, Artificial Sequence
  Description of Artificial Sequence: Synthetic oligonucleotide
  Antisense strand to SEQ ID NO: 684842
acagacaaagaucuuuccu

SEQ ID NO: 684844 - RNA, 19 nt, Artificial Sequence
  Description of Artificial Sequence: Synthetic oligonucleotide
  Sense strand starting at position 2067 of SEQ ID NO: 586006
gaaagaucuuugucuguug

SEQ ID NO: 684845 - RNA, 19 nt, Artificial Sequence
  Description of Artificial Sequence: Synthetic oligonucleotide
  Antisense strand to SEQ ID NO: 684844
caacagacaaagaucuuuc

SEQ ID NO: 684846 - RNA, 19 nt, Artificial Sequence
  Description of Artificial Sequence: Synthetic oligonucleotide
  Sense strand starting at position 2068 of SEQ ID NO: 586006
aaagaucuuugucuguuga

SEQ ID NO: 684847 - RNA, 19 nt, Artificial Sequence
  Description of Artificial Sequence: Synthetic oligonucleotide
  Antisense strand to SEQ ID NO: 684846
ucaacagacaaagaucuuu

SEQ ID NO: 684848 - RNA, 19 nt, Artificial Sequence
  Description of Artificial Sequence: Synthetic oligonucleotide
  Sense strand starting at position 2069 of SEQ ID NO: 586006
aagaucuuugucuguugaa

SEQ ID NO: 684849 - RNA, 19 nt, Artificial Sequence
  Description of Artificial Sequence: Synthetic oligonucleotide
  Antisense strand to SEQ ID NO: 684848
uucaacagacaaagaucuu

SEQ ID NO: 684850 - RNA, 19 nt, Artificial Sequence
  Description of Artificial Sequence: Synthetic oligonucleotide
  Sense strand starting at position 2070 of SEQ ID NO: 586006
agaucuuugucuguugaag

SEQ ID NO: 684851 - RNA, 19 nt, Artificial Sequence
  Description of Artificial Sequence: Synthetic oligonucleotide
  Antisense strand to SEQ ID NO: 684850
cuucaacagacaaagaucu

SEQ ID NO: 684852 - RNA, 19 nt, Artificial Sequence
  Description of Artificial Sequence: Synthetic oligonucleotide
  Sense strand starting at position 2124 of SEQ ID NO: 586006
ugcagaucucuaugucuag

SEQ ID NO: 684853 - RNA, 19 nt, Artificial Sequence
  Description of Artificial Sequence: Synthetic oligonucleotide
  Antisense strand to SEQ ID NO: 684852
cuagacauagagaucugca

SEQ ID NO: 684854 - RNA, 19 nt, Artificial Sequence
  Description of Artificial Sequence: Synthetic oligonucleotide
  Sense strand starting at position 2158 of SEQ ID NO: 586006
ugggaauucucguuccuug

SEQ ID NO: 684855 - RNA, 19 nt, Artificial Sequence
  Description of Artificial Sequence: Synthetic oligonucleotide
  Antisense strand to SEQ ID NO: 684854
caaggaacgagaauuccca

SEQ ID NO: 684856 - RNA, 19 nt, Artificial Sequence
  Description of Artificial Sequence: Synthetic oligonucleotide
  Sense strand starting at position 2161 of SEQ ID NO: 586006
gaauucucguuccuugaau

SEQ ID NO: 684857 - RNA, 19 nt, Artificial Sequence
  Description of Artificial Sequence: Synthetic oligonucleotide
  Antisense strand to SEQ ID NO: 684856
auucaaggaacgagaauuc

SEQ ID NO: 684858 - RNA, 19 nt, Artificial Sequence
  Description of Artificial Sequence: Synthetic oligonucleotide
  Sense strand starting at position 2181 of SEQ ID NO: 586006
cccggcauauccuugaaca

SEQ ID NO: 684859 - RNA, 19 nt, Artificial Sequence
  Description of Artificial Sequence: Synthetic oligonucleotide
  Antisense strand to SEQ ID NO: 684858
uguucaaggauaugccggg

SEQ ID NO: 684860 - RNA, 19 nt, Artificial Sequence
  Description of Artificial Sequence: Synthetic oligonucleotide
  Sense strand starting at position 2182 of SEQ ID NO: 586006
ccggcauauccuugaacac

SEQ ID NO: 684861 - RNA, 19 nt, Artificial Sequence
  Description of Artificial Sequence: Synthetic oligonucleotide
  Antisense strand to SEQ ID NO: 684860
guguucaaggauaugccgg

SEQ ID NO: 684862 - RNA, 19 nt, Artificial Sequence
  Description of Artificial Sequence: Synthetic oligonucleotide
  Sense strand starting at position 2342 of SEQ ID NO: 586006
ggguuauguguccaucuuc

SEQ ID NO: 684863 - RNA, 19 nt, Artificial Sequence
  Description of Artificial Sequence: Synthetic oligonucleotide
  Antisense strand to SEQ ID NO: 684862
gaagauggacacauaaccc

SEQ ID NO: 684864 - RNA, 19 nt, Artificial Sequence
  Description of Artificial Sequence: Synthetic oligonucleotide
  Sense strand starting at position 2613 of SEQ ID NO: 586006
uuuggugaguacuuaaauu

SEQ ID NO: 684865 - RNA, 19 nt, Artificial Sequence
  Description of Artificial Sequence: Synthetic oligonucleotide
  Antisense strand to SEQ ID NO: 684864
aauuuaaguacucaccaaa

SEQ ID NO: 684866 - RNA, 19 nt, Artificial Sequence
  Description of Artificial Sequence: Synthetic oligonucleotide
  Sense strand starting at position 2724 of SEQ ID NO: 586006
ggguuacaucccuguaaac

SEQ ID NO: 684867 - RNA, 19 nt, Artificial Sequence
  Description of Artificial Sequence: Synthetic oligonucleotide
  Antisense strand to SEQ ID NO: 684866
guuuacagggauguaaccc

SEQ ID NO: 684868 - RNA, 19 nt, Artificial Sequence
  Description of Artificial Sequence: Synthetic oligonucleotide
  Sense strand starting at position 2894 of SEQ ID NO: 586006
acuacugaagugugaaaua

SEQ ID NO: 684869 - RNA, 19 nt, Artificial Sequence
  Description of Artificial Sequence: Synthetic oligonucleotide
  Antisense strand to SEQ ID NO: 684868
uauuucacacuucaguagu

SEQ ID NO: 684870 - RNA, 19 nt, Artificial Sequence
  Description of Artificial Sequence: Synthetic oligonucleotide
  Sense strand starting at position 2973 of SEQ ID NO: 586006
ugaaguagguuucuacuga

SEQ ID NO: 684871 - RNA, 19 nt, Artificial Sequence
  Description of Artificial Sequence: Synthetic oligonucleotide
  Antisense strand to SEQ ID NO: 684870
ucaguagaaaccuacuuca

SEQ ID NO: 684872 - RNA, 19 nt, Artificial Sequence
  Description of Artificial Sequence: Synthetic oligonucleotide
  Sense strand starting at position 2980 of SEQ ID NO: 586006
gguuucuacugaguaugua

SEQ ID NO: 684873 - RNA, 19 nt, Artificial Sequence
  Description of Artificial Sequence: Synthetic oligonucleotide
  Antisense strand to SEQ ID NO: 684872
uacauacucaguagaaacc

SEQ ID NO: 684874 - RNA, 19 nt, Artificial Sequence
  Description of Artificial Sequence: Synthetic oligonucleotide
  Sense strand starting at position 2981 of SEQ ID NO: 586006
guuucuacugaguauguau

SEQ ID NO: 684875 - RNA, 19 nt, Artificial Sequence
  Description of Artificial Sequence: Synthetic oligonucleotide
  Antisense strand to SEQ ID NO: 684874
auacauacucaguagaaac

SEQ ID NO: 684876 - RNA, 19 nt, Artificial Sequence
  Description of Artificial Sequence: Synthetic oligonucleotide
  Sense strand starting at position 3248 of SEQ ID NO: 586006
gguuacugugagggcaaau

SEQ ID NO: 684877 - RNA, 19 nt, Artificial Sequence
  Description of Artificial Sequence: Synthetic oligonucleotide
  Antisense strand to SEQ ID NO: 684876
auuugcccucacaguaacc

SEQ ID NO: 684878 - RNA, 19 nt, Artificial Sequence
  Description of Artificial Sequence: Synthetic oligonucleotide
  Sense strand starting at position 3401 of SEQ ID NO: 586006
cuucccuuccuaugggaaa

SEQ ID NO: 684879 - RNA, 19 nt, Artificial Sequence
  Description of Artificial Sequence: Synthetic oligonucleotide
  Antisense strand to SEQ ID NO: 684878
uuucccauaggaagggaag

SEQ ID NO: 684880 - RNA, 19 nt, Artificial Sequence
  Description of Artificial Sequence: Synthetic oligonucleotide
  Sense strand starting at position 3520 of SEQ ID NO: 586006
cuucuuacccagugucaau

SEQ ID NO: 684881 - RNA, 19 nt, Artificial Sequence
  Description of Artificial Sequence: Synthetic oligonucleotide
  Antisense strand to SEQ ID NO: 684880
auugacacuggguaagaag

SEQ ID NO: 684882 - RNA, 19 nt, Artificial Sequence
  Description of Artificial Sequence: Synthetic oligonucleotide
  Sense strand starting at position 3851 of SEQ ID NO: 586006
ucucuugugagcuaaugga

SEQ ID NO: 684883 - RNA, 19 nt, Artificial Sequence
  Description of Artificial Sequence: Synthetic oligonucleotide
  Antisense strand to SEQ ID NO: 684882
uccauuagcucacaagaga

SEQ ID NO: 684884 - RNA, 19 nt, Artificial Sequence
  Description of Artificial Sequence: Synthetic oligonucleotide
  Sense strand starting at position 3857 of SEQ ID NO: 586006
gugagcuaauggagugaga

SEQ ID NO: 684885 - RNA, 19 nt, Artificial Sequence
  Description of Artificial Sequence: Synthetic oligonucleotide
  Antisense strand to SEQ ID NO: 684884
ucucacuccauuagcucac

SEQ ID NO: 684886 - RNA, 19 nt, Artificial Sequence
  Description of Artificial Sequence: Synthetic oligonucleotide
  Sense strand starting at position 508 of SEQ ID NO: 586007
ugaccaguucuacacacuu

SEQ ID NO: 684887 - RNA, 19 nt, Artificial Sequence
  Description of Artificial Sequence: Synthetic oligonucleotide
  Antisense strand to SEQ ID NO: 684886
aaguguguagaacugguca

SEQ ID NO: 684888 - RNA, 19 nt, Artificial Sequence
  Description of Artificial Sequence: Synthetic oligonucleotide
  Sense strand starting at position 653 of SEQ ID NO: 586007
agugucaacucuuuccaca

SEQ ID NO: 684889 - RNA, 19 nt, Artificial Sequence
  Description of Artificial Sequence: Synthetic oligonucleotide
  Antisense strand to SEQ ID NO: 684888
uguggaaagaguugacacu

SEQ ID NO: 684890 - RNA, 19 nt, Artificial Sequence
  Description of Artificial Sequence: Synthetic oligonucleotide
  Sense strand starting at position 772 of SEQ ID NO: 586007
guuuaucaugcagaguuaa

SEQ ID NO: 684891 - RNA, 19 nt, Artificial Sequence
  Description of Artificial Sequence: Synthetic oligonucleotide
  Antisense strand to SEQ ID NO: 684890
uuaacucugcaugauaaac

SEQ ID NO: 684892 - RNA, 19 nt, Artificial Sequence
  Description of Artificial Sequence: Synthetic oligonucleotide
  Sense strand starting at position 782 of SEQ ID NO: 586007
cagaguuaacuguggaguu

SEQ ID NO: 684893 - RNA, 19 nt, Artificial Sequence
  Description of Artificial Sequence: Synthetic oligonucleotide
  Antisense strand to SEQ ID NO: 684892
aacuccacaguuaacucug

SEQ ID NO: 684894 - RNA, 19 nt, Artificial Sequence
  Description of Artificial Sequence: Synthetic oligonucleotide
  Sense strand starting at position 784 of SEQ ID NO: 586007
gaguuaacuguggaguuuc

SEQ ID NO: 684895 - RNA, 19 nt, Artificial Sequence
  Description of Artificial Sequence: Synthetic oligonucleotide
  Antisense strand to SEQ ID NO: 684894
gaaacuccacaguuaacuc

SEQ ID NO: 684896 - RNA, 19 nt, Artificial Sequence
  Description of Artificial Sequence: Synthetic oligonucleotide
  Sense strand starting at position 891 of SEQ ID NO: 586007
ugagaaagcuaguugcuua

SEQ ID NO: 684897 - RNA, 19 nt, Artificial Sequence
  Description of Artificial Sequence: Synthetic oligonucleotide
  Antisense strand to SEQ ID NO: 684896
uaagcaacuagcuuucuca

SEQ ID NO: 684898 - RNA, 19 nt, Artificial Sequence
  Description of Artificial Sequence: Synthetic oligonucleotide
  Sense strand starting at position 894 of SEQ ID NO: 586007
gaaagcuaguugcuuaucu

SEQ ID NO: 684899 - RNA, 19 nt, Artificial Sequence
  Description of Artificial Sequence: Synthetic oligonucleotide
  Antisense strand to SEQ ID NO: 684898
agauaagcaacuagcuuuc

SEQ ID NO: 684900 - RNA, 19 nt, Artificial Sequence
  Description of Artificial Sequence: Synthetic oligonucleotide
  Sense strand starting at position 899 of SEQ ID NO: 586007
cuaguugcuuaucuuuaua

SEQ ID NO: 684901 - RNA, 19 nt, Artificial Sequence
  Description of Artificial Sequence: Synthetic oligonucleotide
  Antisense strand to SEQ ID NO: 684900
uauaaagauaagcaacuag

SEQ ID NO: 684902 - RNA, 19 nt, Artificial Sequence
  Description of Artificial Sequence: Synthetic oligonucleotide
  Sense strand starting at position 902 of SEQ ID NO: 586007
guugcuuaucuuuauaaug

SEQ ID NO: 684903 - RNA, 19 nt, Artificial Sequence
  Description of Artificial Sequence: Synthetic oligonucleotide
  Antisense strand to SEQ ID NO: 684902
cauuauaaagauaagcaac

SEQ ID NO: 684904 - RNA, 19 nt, Artificial Sequence
  Description of Artificial Sequence: Synthetic oligonucleotide
  Sense strand starting at position 952 of SEQ ID NO: 586007
gggacugcuuguguaaaua

SEQ ID NO: 684905 - RNA, 19 nt, Artificial Sequence
  Description of Artificial Sequence: Synthetic oligonucleotide
  Antisense strand to SEQ ID NO: 684904
uauuuacacaagcaguccc

SEQ ID NO: 684906 - RNA, 19 nt, Artificial Sequence
  Description of Artificial Sequence: Synthetic oligonucleotide
  Sense strand starting at position 996 of SEQ ID NO: 586007
aaggaaucgcuacgacuga

SEQ ID NO: 684907 - RNA, 19 nt, Artificial Sequence
  Description of Artificial Sequence: Synthetic oligonucleotide
  Antisense strand to SEQ ID NO: 684906
ucagucguagcgauuccuu

SEQ ID NO: 684908 - RNA, 19 nt, Artificial Sequence
  Description of Artificial Sequence: Synthetic oligonucleotide
  Sense strand starting at position 1112 of SEQ ID NO: 586007
gcuuuagcucuauaguuaa

SEQ ID NO: 684909 - RNA, 19 nt, Artificial Sequence
  Description of Artificial Sequence: Synthetic oligonucleotide
  Antisense strand to SEQ ID NO: 684908
uuaacuauagagcuaaagc

SEQ ID NO: 684910 - RNA, 19 nt, Artificial Sequence
  Description of Artificial Sequence: Synthetic oligonucleotide
  Sense strand starting at position 1123 of SEQ ID NO: 586007
auaguuaacugguuuaguu

SEQ ID NO: 684911 - RNA, 19 nt, Artificial Sequence
  Description of Artificial Sequence: Synthetic oligonucleotide
  Antisense strand to SEQ ID NO: 684910
aacuaaaccaguuaacuau

SEQ ID NO: 684912 - RNA, 19 nt, Artificial Sequence
  Description of Artificial Sequence: Synthetic oligonucleotide
  Sense strand starting at position 1150 of SEQ ID NO: 586007
uuuccuuuaugucuguaau

SEQ ID NO: 684913 - RNA, 19 nt, Artificial Sequence
  Description of Artificial Sequence: Synthetic oligonucleotide
  Antisense strand to SEQ ID NO: 684912
auuacagacauaaaggaaa

SEQ ID NO: 684914 - RNA, 19 nt, Artificial Sequence
  Description of Artificial Sequence: Synthetic oligonucleotide
  Sense strand starting at position 1151 of SEQ ID NO: 586007
uuccuuuaugucuguaauu

SEQ ID NO: 684915 - RNA, 19 nt, Artificial Sequence
  Description of Artificial Sequence: Synthetic oligonucleotide
  Antisense strand to SEQ ID NO: 684914
aauuacagacauaaaggaa

SEQ ID NO: 684916 - RNA, 19 nt, Artificial Sequence
  Description of Artificial Sequence: Synthetic oligonucleotide
  Sense strand starting at position 1152 of SEQ ID NO: 586007
uccuuuaugucuguaauug

SEQ ID NO: 684917 - RNA, 19 nt, Artificial Sequence
  Description of Artificial Sequence: Synthetic oligonucleotide
  Antisense strand to SEQ ID NO: 684916
caauuacagacauaaagga

SEQ ID NO: 684918 - RNA, 19 nt, Artificial Sequence
  Description of Artificial Sequence: Synthetic oligonucleotide
  Sense strand starting at position 1153 of SEQ ID NO: 586007
ccuuuaugucuguaauugu

SEQ ID NO: 684919 - RNA, 19 nt, Artificial Sequence
  Description of Artificial Sequence: Synthetic oligonucleotide
  Antisense strand to SEQ ID NO: 684918
acaauuacagacauaaagg

SEQ ID NO: 684920 - RNA, 19 nt, Artificial Sequence
  Description of Artificial Sequence: Synthetic oligonucleotide
  Sense strand starting at position 1205 of SEQ ID NO: 586007
cgaccaacuccucaaaugu

SEQ ID NO: 684921 - RNA, 19 nt, Artificial Sequence
  Description of Artificial Sequence: Synthetic oligonucleotide
  Antisense strand to SEQ ID NO: 684920
acauuugaggaguuggucg

SEQ ID NO: 684922 - RNA, 19 nt, Artificial Sequence
  Description of Artificial Sequence: Synthetic oligonucleotide
  Sense strand starting at position 1214 of SEQ ID NO: 586007
ccucaaaugugaguaaauc

SEQ ID NO: 684923 - RNA, 19 nt, Artificial Sequence
  Description of Artificial Sequence: Synthetic oligonucleotide
  Antisense strand to SEQ ID NO: 684922
gauuuacucacauuugagg

SEQ ID NO: 684924 - RNA, 19 nt, Artificial Sequence
  Description of Artificial Sequence: Synthetic oligonucleotide
  Sense strand starting at position 1344 of SEQ ID NO: 586007
accuguucucagggaugag

SEQ ID NO: 684925 - RNA, 19 nt, Artificial Sequence
  Description of Artificial Sequence: Synthetic oligonucleotide
  Antisense strand to SEQ ID NO: 684924
cucaucccugagaacaggu

SEQ ID NO: 684926 - RNA, 19 nt, Artificial Sequence
  Description of Artificial Sequence: Synthetic oligonucleotide
  Sense strand starting at position 1345 of SEQ ID NO: 586007
ccuguucucagggaugagu

SEQ ID NO: 684927 - RNA, 19 nt, Artificial Sequence
  Description of Artificial Sequence: Synthetic oligonucleotide
  Antisense strand to SEQ ID NO: 684926
acucaucccugagaacagg

SEQ ID NO: 684928 - RNA, 19 nt, Artificial Sequence
  Description of Artificial Sequence: Synthetic oligonucleotide
  Sense strand starting at position 2807 of SEQ ID NO: 586007
uacauuuaaugugagggaa

SEQ ID NO: 684929 - RNA, 19 nt, Artificial Sequence
  Description of Artificial Sequence: Synthetic oligonucleotide
  Antisense strand to SEQ ID NO: 684928
uucccucacauuaaaugua

SEQ ID NO: 684930 - RNA, 19 nt, Artificial Sequence
  Description of Artificial Sequence: Synthetic oligonucleotide
  Sense strand starting at position 2809 of SEQ ID NO: 586007
cauuuaaugugagggaaag

SEQ ID NO: 684931 - RNA, 19 nt, Artificial Sequence
  Description of Artificial Sequence: Synthetic oligonucleotide
  Antisense strand to SEQ ID NO: 684930
cuuucccucacauuaaaug

SEQ ID NO: 684932 - RNA, 19 nt, Artificial Sequence
  Description of Artificial Sequence: Synthetic oligonucleotide
  Sense strand starting at position 2878 of SEQ ID NO: 586007
guccaaugugugggaucga

SEQ ID NO: 684933 - RNA, 19 nt, Artificial Sequence
  Description of Artificial Sequence: Synthetic oligonucleotide
  Antisense strand to SEQ ID NO: 684932
ucgaucccacacauuggac

SEQ ID NO: 684934 - RNA, 19 nt, Artificial Sequence
  Description of Artificial Sequence: Synthetic oligonucleotide
  Sense strand starting at position 2984 of SEQ ID NO: 586007
gguuaaucagguugggcaa

SEQ ID NO: 684935 - RNA, 19 nt, Artificial Sequence
  Description of Artificial Sequence: Synthetic oligonucleotide
  Antisense strand to SEQ ID NO: 684934
uugcccaaccugauuaacc

SEQ ID NO: 684936 - RNA, 19 nt, Artificial Sequence
  Description of Artificial Sequence: Synthetic oligonucleotide
  Sense strand starting at position 3069 of SEQ ID NO: 586007
cuaaaucugugaguuucuu

SEQ ID NO: 684937 - RNA, 19 nt, Artificial Sequence
  Description of Artificial Sequence: Synthetic oligonucleotide
  Antisense strand to SEQ ID NO: 684936
aagaaacucacagauuuag

SEQ ID NO: 684938 - RNA, 19 nt, Artificial Sequence
  Description of Artificial Sequence: Synthetic oligonucleotide
  Sense strand starting at position 3073 of SEQ ID NO: 586007
aucugugaguuucuugaug

SEQ ID NO: 684939 - RNA, 19 nt, Artificial Sequence
  Description of Artificial Sequence: Synthetic oligonucleotide
  Antisense strand to SEQ ID NO: 684938
caucaagaaacucacagau

SEQ ID NO: 684940 - RNA, 19 nt, Artificial Sequence
  Description of Artificial Sequence: Synthetic oligonucleotide
  Sense strand starting at position 3084 of SEQ ID NO: 586007
ucuugaugaaauugggagu

SEQ ID NO: 684941 - RNA, 19 nt, Artificial Sequence
  Description of Artificial Sequence: Synthetic oligonucleotide
  Antisense strand to SEQ ID NO: 684940
acucccaauuucaucaaga

SEQ ID NO: 684942 - RNA, 19 nt, Artificial Sequence
  Description of Artificial Sequence: Synthetic oligonucleotide
  Sense strand starting at position 3087 of SEQ ID NO: 586007
ugaugaaauugggaguaaa

SEQ ID NO: 684943 - RNA, 19 nt, Artificial Sequence
  Description of Artificial Sequence: Synthetic oligonucleotide
  Antisense strand to SEQ ID NO: 684942
uuuacucccaauuucauca

SEQ ID NO: 684944 - RNA, 19 nt, Artificial Sequence
  Description of Artificial Sequence: Synthetic oligonucleotide
  Sense strand starting at position 3172 of SEQ ID NO: 586007
guaaacugauaaucugacu

SEQ ID NO: 684945 - RNA, 19 nt, Artificial Sequence
  Description of Artificial Sequence: Synthetic oligonucleotide
  Antisense strand to SEQ ID NO: 684944
agucagauuaucaguuuac

SEQ ID NO: 684946 - RNA, 19 nt, Artificial Sequence
  Description of Artificial Sequence: Synthetic oligonucleotide
  Sense strand starting at position 3177 of SEQ ID NO: 586007
cugauaaucugacugacug

SEQ ID NO: 684947 - RNA, 19 nt, Artificial Sequence
  Description of Artificial Sequence: Synthetic oligonucleotide
  Antisense strand to SEQ ID NO: 684946
cagucagucagauuaucag

SEQ ID NO: 684948 - RNA, 19 nt, Artificial Sequence
  Description of Artificial Sequence: Synthetic oligonucleotide
  Sense strand starting at position 3347 of SEQ ID NO: 586007
gcaggugcuguauauaaug

SEQ ID NO: 684949 - RNA, 19 nt, Artificial Sequence
  Description of Artificial Sequence: Synthetic oligonucleotide
  Antisense strand to SEQ ID NO: 684948
cauuauauacagcaccugc

SEQ ID NO: 684950 - RNA, 19 nt, Artificial Sequence
  Description of Artificial Sequence: Synthetic oligonucleotide
  Sense strand starting at position 3363 of SEQ ID NO: 586007
augcguuccuauuugauag

SEQ ID NO: 684951 - RNA, 19 nt, Artificial Sequence
  Description of Artificial Sequence: Synthetic oligonucleotide
  Antisense strand to SEQ ID NO: 684950
cuaucaaauaggaacgcau

SEQ ID NO: 684952 - RNA, 19 nt, Artificial Sequence
  Description of Artificial Sequence: Synthetic oligonucleotide
  Sense strand starting at position 3375 of SEQ ID NO: 586007
uugauagcugaguacuaga

SEQ ID NO: 684953 - RNA, 19 nt, Artificial Sequence
  Description of Artificial Sequence: Synthetic oligonucleotide
  Antisense strand to SEQ ID NO: 684952
ucuaguacucagcuaucaa

SEQ ID NO: 684954 - RNA, 19 nt, Artificial Sequence
  Description of Artificial Sequence: Synthetic oligonucleotide
  Sense strand starting at position 3492 of SEQ ID NO: 586007
gcucuucucccauaggacu

SEQ ID NO: 684955 - RNA, 19 nt, Artificial Sequence
  Description of Artificial Sequence: Synthetic oligonucleotide
  Antisense strand to SEQ ID NO: 684954
aguccuaugggagaagagc

SEQ ID NO: 684956 - RNA, 19 nt, Artificial Sequence
  Description of Artificial Sequence: Synthetic oligonucleotide
  Sense strand starting at position 3505 of SEQ ID NO: 586007
aggacugguucaguaggaa

SEQ ID NO: 684957 - RNA, 19 nt, Artificial Sequence
  Description of Artificial Sequence: Synthetic oligonucleotide
  Antisense strand to SEQ ID NO: 684956
uuccuacugaaccaguccu

SEQ ID NO: 684958 - RNA, 19 nt, Artificial Sequence
  Description of Artificial Sequence: Synthetic oligonucleotide
  Sense strand starting at position 3560 of SEQ ID NO: 586007
acaauuuauuguggacaug

SEQ ID NO: 684959 - RNA, 19 nt, Artificial Sequence
  Description of Artificial Sequence: Synthetic oligonucleotide
  Antisense strand to SEQ ID NO: 684958
cauguccacaauaaauugu

SEQ ID NO: 684960 - RNA, 19 nt, Artificial Sequence
  Description of Artificial Sequence: Synthetic oligonucleotide
  Sense strand starting at position 3571 of SEQ ID NO: 586007
uggacaugugcccauaaca

SEQ ID NO: 684961 - RNA, 19 nt, Artificial Sequence
  Description of Artificial Sequence: Synthetic oligonucleotide
  Antisense strand to SEQ ID NO: 684960
uguuaugggcacaugucca

SEQ ID NO: 684962 - RNA, 19 nt, Artificial Sequence
  Description of Artificial Sequence: Synthetic oligonucleotide
  Sense strand starting at position 3591 of SEQ ID NO: 586007
uuuaauuaugggcacauau

SEQ ID NO: 684963 - RNA, 19 nt, Artificial Sequence
  Description of Artificial Sequence: Synthetic oligonucleotide
  Antisense strand to SEQ ID NO: 684962
auaugugcccauaauuaaa

SEQ ID NO: 684964 - RNA, 19 nt, Artificial Sequence
  Description of Artificial Sequence: Synthetic oligonucleotide
  Sense strand starting at position 3657 of SEQ ID NO: 586007
uuucucucagcagagacau

SEQ ID NO: 684965 - RNA, 19 nt, Artificial Sequence
  Description of Artificial Sequence: Synthetic oligonucleotide
  Antisense strand to SEQ ID NO: 684964
augucucugcugagagaaa

SEQ ID NO: 684966 - RNA, 19 nt, Artificial Sequence
  Description of Artificial Sequence: Synthetic oligonucleotide
  Sense strand starting at position 99 of SEQ ID NO: 586008
uuuauacaacaguguuaug

SEQ ID NO: 684967 - RNA, 19 nt, Artificial Sequence
  Description of Artificial Sequence: Synthetic oligonucleotide
  Antisense strand to SEQ ID NO: 684966
cauaacacuguuguauaaa

SEQ ID NO: 684968 - RNA, 19 nt, Artificial Sequence
  Description of Artificial Sequence: Synthetic oligonucleotide
  Sense strand starting at position 179 of SEQ ID NO: 586008
agauaaaugaauuguggua

SEQ ID NO: 684969 - RNA, 19 nt, Artificial Sequence
  Description of Artificial Sequence: Synthetic oligonucleotide
  Antisense strand to SEQ ID NO: 684968
uaccacaauucauuuaucu

SEQ ID NO: 684970 - RNA, 19 nt, Artificial Sequence
  Description of Artificial Sequence: Synthetic oligonucleotide
  Sense strand starting at position 691 of SEQ ID NO: 586008
ggguaccuugccuaaacaa

SEQ ID NO: 684971 - RNA, 19 nt, Artificial Sequence
  Description of Artificial Sequence: Synthetic oligonucleotide
  Antisense strand to SEQ ID NO: 684970
uuguuuaggcaagguaccc

SEQ ID NO: 684972 - RNA, 19 nt, Artificial Sequence
  Description of Artificial Sequence: Synthetic oligonucleotide
  Sense strand starting at position 713 of SEQ ID NO: 586008
agaguaguccaagggaacu

SEQ ID NO: 684973 - RNA, 19 nt, Artificial Sequence
  Description of Artificial Sequence: Synthetic oligonucleotide
  Antisense strand to SEQ ID NO: 684972
aguucccuuggacuacucu

SEQ ID NO: 684974 - RNA, 19 nt, Artificial Sequence
  Description of Artificial Sequence: Synthetic oligonucleotide
  Sense strand starting at position 719 of SEQ ID NO: 586008
guccaagggaacugugaaa

SEQ ID NO: 684975 - RNA, 19 nt, Artificial Sequence
  Description of Artificial Sequence: Synthetic oligonucleotide
  Antisense strand to SEQ ID NO: 684974
uuucacaguucccuuggac

SEQ ID NO: 684976 - RNA, 19 nt, Artificial Sequence
  Description of Artificial Sequence: Synthetic oligonucleotide
  Sense strand starting at position 801 of SEQ ID NO: 586008
ggguuuggguuccuaauua

SEQ ID NO: 684977 - RNA, 19 nt, Artificial Sequence
  Description of Artificial Sequence: Synthetic oligonucleotide
  Antisense strand to SEQ ID NO: 684976
uaauuaggaacccaaaccc

SEQ ID NO: 684978 - RNA, 19 nt, Artificial Sequence
  Description of Artificial Sequence: Synthetic oligonucleotide
  Sense strand starting at position 894 of SEQ ID NO: 586008
agaguacuauuauucccau

SEQ ID NO: 684979 - RNA, 19 nt, Artificial Sequence
  Description of Artificial Sequence: Synthetic oligonucleotide
  Antisense strand to SEQ ID NO: 684978
augggaauaauaguacucu

SEQ ID NO: 684980 - RNA, 19 nt, Artificial Sequence
  Description of Artificial Sequence: Synthetic oligonucleotide
  Sense strand starting at position 951 of SEQ ID NO: 586008
ucgugaggaagcuagcauu

SEQ ID NO: 684981 - RNA, 19 nt, Artificial Sequence
  Description of Artificial Sequence: Synthetic oligonucleotide
  Antisense strand to SEQ ID NO: 684980
aaugcuagcuuccucacga

SEQ ID NO: 684982 - RNA, 19 nt, Artificial Sequence
  Description of Artificial Sequence: Synthetic oligonucleotide
  Sense strand starting at position 1007 of SEQ ID NO: 586008
ccagauaucuggcagauuu

SEQ ID NO: 684983 - RNA, 19 nt, Artificial Sequence
  Description of Artificial Sequence: Synthetic oligonucleotide
  Antisense strand to SEQ ID NO: 684982
aaaucugccagauaucugg

SEQ ID NO: 684984 - RNA, 19 nt, Artificial Sequence
  Description of Artificial Sequence: Synthetic oligonucleotide
  Sense strand starting at position 1015 of SEQ ID NO: 586008
cuggcagauuuagggaaga

SEQ ID NO: 684985 - RNA, 19 nt, Artificial Sequence
  Description of Artificial Sequence: Synthetic oligonucleotide
  Antisense strand to SEQ ID NO: 684984
ucuucccuaaaucugccag

SEQ ID NO: 684986 - RNA, 19 nt, Artificial Sequence
  Description of Artificial Sequence: Synthetic oligonucleotide
  Sense strand starting at position 1070 of SEQ ID NO: 586008
guaauaccauucucaggau

SEQ ID NO: 684987 - RNA, 19 nt, Artificial Sequence
  Description of Artificial Sequence: Synthetic oligonucleotide
  Antisense strand to SEQ ID NO: 684986
auccugagaaugguauuac

SEQ ID NO: 684988 - RNA, 19 nt, Artificial Sequence
  Description of Artificial Sequence: Synthetic oligonucleotide
  Sense strand starting at position 1196 of SEQ ID NO: 586008
aaaguuauuuguguagcga

SEQ ID NO: 684989 - RNA, 19 nt, Artificial Sequence
  Description of Artificial Sequence: Synthetic oligonucleotide
  Antisense strand to SEQ ID NO: 684988
ucgcuacacaaauaacuuu

SEQ ID NO: 684990 - RNA, 19 nt, Artificial Sequence
  Description of Artificial Sequence: Synthetic oligonucleotide
  Sense strand starting at position 1197 of SEQ ID NO: 586008
aaguuauuuguguagcgaa

SEQ ID NO: 684991 - RNA, 19 nt, Artificial Sequence
  Description of Artificial Sequence: Synthetic oligonucleotide
  Antisense strand to SEQ ID NO: 684990
uucgcuacacaaauaacuu

SEQ ID NO: 684992 - RNA, 19 nt, Artificial Sequence
  Description of Artificial Sequence: Synthetic oligonucleotide
  Sense strand starting at position 1213 of SEQ ID NO: 586008
gaauaacaaguuugacguu

SEQ ID NO: 684993 - RNA, 19 nt, Artificial Sequence
  Description of Artificial Sequence: Synthetic oligonucleotide
  Antisense strand to SEQ ID NO: 684992
aacgucaaacuuguuauuc

SEQ ID NO: 684994 - RNA, 19 nt, Artificial Sequence
  Description of Artificial Sequence: Synthetic oligonucleotide
  Sense strand starting at position 1226 of SEQ ID NO: 586008
gacguucucacuggaagga

SEQ ID NO: 684995 - RNA, 19 nt, Artificial Sequence
  Description of Artificial Sequence: Synthetic oligonucleotide
  Antisense strand to SEQ ID NO: 684994
uccuuccagugagaacguc

SEQ ID NO: 684996 - RNA, 19 nt, Artificial Sequence
  Description of Artificial Sequence: Synthetic oligonucleotide
  Sense strand starting at position 1331 of SEQ ID NO: 586008
gugguuucucugcaaagag

SEQ ID NO: 684997 - RNA, 19 nt, Artificial Sequence
  Description of Artificial Sequence: Synthetic oligonucleotide
  Antisense strand to SEQ ID NO: 684996
cucuuugcagagaaaccac

SEQ ID NO: 684998 - RNA, 19 nt, Artificial Sequence
  Description of Artificial Sequence: Synthetic oligonucleotide
  Sense strand starting at position 1676 of SEQ ID NO: 586008
cacuuugagugaucgagag

SEQ ID NO: 684999 - RNA, 19 nt, Artificial Sequence
  Description of Artificial Sequence: Synthetic oligonucleotide
  Antisense strand to SEQ ID NO: 684998
cucucgaucacucaaagug

SEQ ID NO: 685000 - RNA, 19 nt, Artificial Sequence
  Description of Artificial Sequence: Synthetic oligonucleotide
  Sense strand starting at position 1682 of SEQ ID NO: 586008
gagugaucgagaggcucua

SEQ ID NO: 685001 - RNA, 19 nt, Artificial Sequence
  Description of Artificial Sequence: Synthetic oligonucleotide
  Antisense strand to SEQ ID NO: 685000
uagagccucucgaucacuc

SEQ ID NO: 685002 - RNA, 19 nt, Artificial Sequence
  Description of Artificial Sequence: Synthetic oligonucleotide
  Sense strand starting at position 2210 of SEQ ID NO: 586008
ugacuuggcgcguuagcau

SEQ ID NO: 685003 - RNA, 19 nt, Artificial Sequence
  Description of Artificial Sequence: Synthetic oligonucleotide
  Antisense strand to SEQ ID NO: 685002
augcuaacgcgccaaguca

SEQ ID NO: 685004 - RNA, 19 nt, Artificial Sequence
  Description of Artificial Sequence: Synthetic oligonucleotide
  Sense strand starting at position 2218 of SEQ ID NO: 586008
cgcguuagcaucccuggaa

SEQ ID NO: 685005 - RNA, 19 nt, Artificial Sequence
  Description of Artificial Sequence: Synthetic oligonucleotide
  Antisense strand to SEQ ID NO: 685004
uuccagggaugcuaacgcg

SEQ ID NO: 685006 - RNA, 19 nt, Artificial Sequence
  Description of Artificial Sequence: Synthetic oligonucleotide
  Sense strand starting at position 2221 of SEQ ID NO: 586008
guuagcaucccuggaaaug

SEQ ID NO: 685007 - RNA, 19 nt, Artificial Sequence
  Description of Artificial Sequence: Synthetic oligonucleotide
  Antisense strand to SEQ ID NO: 685006
cauuuccagggaugcuaac

SEQ ID NO: 685008 - RNA, 19 nt, Artificial Sequence
  Description of Artificial Sequence: Synthetic oligonucleotide
  Sense strand starting at position 2296 of SEQ ID NO: 586008
gauggaggcaaguguuaca

SEQ ID NO: 685009 - RNA, 19 nt, Artificial Sequence
  Description of Artificial Sequence: Synthetic oligonucleotide
  Antisense strand to SEQ ID NO: 685008
uguaacacuugccuccauc

SEQ ID NO: 685010 - RNA, 19 nt, Artificial Sequence
  Description of Artificial Sequence: Synthetic oligonucleotide
  Sense strand starting at position 2503 of SEQ ID NO: 586008
uaaggaaguucuuuguuac

SEQ ID NO: 685011 - RNA, 19 nt, Artificial Sequence
  Description of Artificial Sequence: Synthetic oligonucleotide
  Antisense strand to SEQ ID NO: 685010
guaacaaagaacuuccuua

SEQ ID NO: 685012 - RNA, 19 nt, Artificial Sequence
  Description of Artificial Sequence: Synthetic oligonucleotide
  Sense strand starting at position 2506 of SEQ ID NO: 586008
ggaaguucuuuguuaccua

SEQ ID NO: 685013 - RNA, 19 nt, Artificial Sequence
  Description of Artificial Sequence: Synthetic oligonucleotide
  Antisense strand to SEQ ID NO: 685012
uagguaacaaagaacuucc

SEQ ID NO: 685014 - RNA, 19 nt, Artificial Sequence
  Description of Artificial Sequence: Synthetic oligonucleotide
  Sense strand starting at position 2518 of SEQ ID NO: 586008
uuaccuaaugcagaagagu

SEQ ID NO: 685015 - RNA, 19 nt, Artificial Sequence
  Description of Artificial Sequence: Synthetic oligonucleotide
  Antisense strand to SEQ ID NO: 685014
acucuucugcauuagguaa

SEQ ID NO: 685016 - RNA, 19 nt, Artificial Sequence
  Description of Artificial Sequence: Synthetic oligonucleotide
  Sense strand starting at position 2529 of SEQ ID NO: 586008
agaagaguguggcugaagu

SEQ ID NO: 685017 - RNA, 19 nt, Artificial Sequence
  Description of Artificial Sequence: Synthetic oligonucleotide
  Antisense strand to SEQ ID NO: 685016
acuucagccacacucuucu

SEQ ID NO: 685018 - RNA, 19 nt, Artificial Sequence
  Description of Artificial Sequence: Synthetic oligonucleotide
  Sense strand starting at position 2580 of SEQ ID NO: 586008
aaaggaagaugagaaugau

SEQ ID NO: 685019 - RNA, 19 nt, Artificial Sequence
  Description of Artificial Sequence: Synthetic oligonucleotide
  Antisense strand to SEQ ID NO: 685018
aucauucucaucuuccuuu

SEQ ID NO: 685020 - RNA, 19 nt, Artificial Sequence
  Description of Artificial Sequence: Synthetic oligonucleotide
  Sense strand starting at position 2586 of SEQ ID NO: 586008
agaugagaaugauuacgua

SEQ ID NO: 685021 - RNA, 19 nt, Artificial Sequence
  Description of Artificial Sequence: Synthetic oligonucleotide
  Antisense strand to SEQ ID NO: 685020
uacguaaucauucucaucu

SEQ ID NO: 685022 - RNA, 19 nt, Artificial Sequence
  Description of Artificial Sequence: Synthetic oligonucleotide
  Sense strand starting at position 2590 of SEQ ID NO: 586008
gagaaugauuacguaugua

SEQ ID NO: 685023 - RNA, 19 nt, Artificial Sequence
  Description of Artificial Sequence: Synthetic oligonucleotide
  Antisense strand to SEQ ID NO: 685022
uacauacguaaucauucuc

SEQ ID NO: 685024 - RNA, 19 nt, Artificial Sequence
  Description of Artificial Sequence: Synthetic oligonucleotide
  Sense strand starting at position 2593 of SEQ ID NO: 586008
aaugauuacguauguacag

SEQ ID NO: 685025 - RNA, 19 nt, Artificial Sequence
  Description of Artificial Sequence: Synthetic oligonucleotide
  Antisense strand to SEQ ID NO: 685024
cuguacauacguaaucauu

SEQ ID NO: 685026 - RNA, 19 nt, Artificial Sequence
  Description of Artificial Sequence: Synthetic oligonucleotide
  Sense strand starting at position 2697 of SEQ ID NO: 586008
aguaaagaaccugguauaa

SEQ ID NO: 685027 - RNA, 19 nt, Artificial Sequence
  Description of Artificial Sequence: Synthetic oligonucleotide
  Antisense strand to SEQ ID NO: 685026
uuauaccagguucuuuacu

SEQ ID NO: 685028 - RNA, 19 nt, Artificial Sequence
  Description of Artificial Sequence: Synthetic oligonucleotide
  Sense strand starting at position 3088 of SEQ ID NO: 586008
uuaagauaauagcuugaca

SEQ ID NO: 685029 - RNA, 19 nt, Artificial Sequence
  Description of Artificial Sequence: Synthetic oligonucleotide
  Antisense strand to SEQ ID NO: 685028
ugucaagcuauuaucuuaa

SEQ ID NO: 685030 - RNA, 19 nt, Artificial Sequence
  Description of Artificial Sequence: Synthetic oligonucleotide
  Sense strand starting at position 3186 of SEQ ID NO: 586008
gaaguuauagauggaagca

SEQ ID NO: 685031 - RNA, 19 nt, Artificial Sequence
  Description of Artificial Sequence: Synthetic oligonucleotide
  Antisense strand to SEQ ID NO: 685030
ugcuuccaucuauaacuuc

SEQ ID NO: 685032 - RNA, 19 nt, Artificial Sequence
  Description of Artificial Sequence: Synthetic oligonucleotide
  Sense strand starting at position 3298 of SEQ ID NO: 586008
ccuuuaguacccgaggcua

SEQ ID NO: 685033 - RNA, 19 nt, Artificial Sequence
  Description of Artificial Sequence: Synthetic oligonucleotide
  Antisense strand to SEQ ID NO: 685032
uagccucggguacuaaagg

SEQ ID NO: 685034 - RNA, 19 nt, Artificial Sequence
  Description of Artificial Sequence: Synthetic oligonucleotide
  Sense strand starting at position 3310 of SEQ ID NO: 586008
gaggcuauugaaugcuuaa

SEQ ID NO: 685035 - RNA, 19 nt, Artificial Sequence
  Description of Artificial Sequence: Synthetic oligonucleotide
  Antisense strand to SEQ ID NO: 685034
uuaagcauucaauagccuc

SEQ ID NO: 685036 - RNA, 19 nt, Artificial Sequence
  Description of Artificial Sequence: Synthetic oligonucleotide
  Sense strand starting at position 3313 of SEQ ID NO: 586008
gcuauugaaugcuuaaaua

SEQ ID NO: 685037 - RNA, 19 nt, Artificial Sequence
  Description of Artificial Sequence: Synthetic oligonucleotide
  Antisense strand to SEQ ID NO: 685036
uauuuaagcauucaauagc

SEQ ID NO: 685038 - RNA, 19 nt, Artificial Sequence
  Description of Artificial Sequence: Synthetic oligonucleotide
  Sense strand starting at position 3505 of SEQ ID NO: 586008
uugauagagcucuagacuc

SEQ ID NO: 685039 - RNA, 19 nt, Artificial Sequence
  Description of Artificial Sequence: Synthetic oligonucleotide
  Antisense strand to SEQ ID NO: 685038
gagucuagagcucuaucaa

SEQ ID NO: 685040 - RNA, 19 nt, Artificial Sequence
  Description of Artificial Sequence: Synthetic oligonucleotide
  Sense strand starting at position 3574 of SEQ ID NO: 586008
cuccuaaccucucugggau

SEQ ID NO: 685041 - RNA, 19 nt, Artificial Sequence
  Description of Artificial Sequence: Synthetic oligonucleotide
  Antisense strand to SEQ ID NO: 685040
aucccagagagguuaggag

SEQ ID NO: 685042 - RNA, 19 nt, Artificial Sequence
  Description of Artificial Sequence: Synthetic oligonucleotide
  Sense strand starting at position 3589 of SEQ ID NO: 586008
ggaugcagguuacucauau

SEQ ID NO: 685043 - RNA, 19 nt, Artificial Sequence
  Description of Artificial Sequence: Synthetic oligonucleotide
  Antisense strand to SEQ ID NO: 685042
auaugaguaaccugcaucc

SEQ ID NO: 685044 - RNA, 19 nt, Artificial Sequence
  Description of Artificial Sequence: Synthetic oligonucleotide
  Sense strand starting at position 3590 of SEQ ID NO: 586008
gaugcagguuacucauaug

SEQ ID NO: 685045 - RNA, 19 nt, Artificial Sequence
  Description of Artificial Sequence: Synthetic oligonucleotide
  Antisense strand to SEQ ID NO: 685044
cauaugaguaaccugcauc

SEQ ID NO: 685046 - RNA, 19 nt, Artificial Sequence
  Description of Artificial Sequence: Synthetic oligonucleotide
  Sense strand starting at position 72 of SEQ ID NO: 586009
cagaaauuccuugaguugu

SEQ ID NO: 685047 - RNA, 19 nt, Artificial Sequence
  Description of Artificial Sequence: Synthetic oligonucleotide
  Antisense strand to SEQ ID NO: 685046
acaacucaaggaauuucug

SEQ ID NO: 685048 - RNA, 19 nt, Artificial Sequence
  Description of Artificial Sequence: Synthetic oligonucleotide
  Sense strand starting at position 74 of SEQ ID NO: 586009
gaaauuccuugaguuguac

SEQ ID NO: 685049 - RNA, 19 nt, Artificial Sequence
  Description of Artificial Sequence: Synthetic oligonucleotide
  Antisense strand to SEQ ID NO: 685048
guacaacucaaggaauuuc

SEQ ID NO: 685050 - RNA, 19 nt, Artificial Sequence
  Description of Artificial Sequence: Synthetic oligonucleotide
  Sense strand starting at position 80 of SEQ ID NO: 586009
ccuugaguuguacaacauu

SEQ ID NO: 685051 - RNA, 19 nt, Artificial Sequence
  Description of Artificial Sequence: Synthetic oligonucleotide
  Antisense strand to SEQ ID NO: 685050
aauguuguacaacucaagg

SEQ ID NO: 685052 - RNA, 19 nt, Artificial Sequence
  Description of Artificial Sequence: Synthetic oligonucleotide
  Sense strand starting at position 133 of SEQ ID NO: 586009
acaaguaaguagguuuaaa

SEQ ID NO: 685053 - RNA, 19 nt, Artificial Sequence
  Description of Artificial Sequence: Synthetic oligonucleotide
  Antisense strand to SEQ ID NO: 685052
uuuaaaccuacuuacuugu

SEQ ID NO: 685054 - RNA, 19 nt, Artificial Sequence
  Description of Artificial Sequence: Synthetic oligonucleotide
  Sense strand starting at position 544 of SEQ ID NO: 586009
uucuuucuacccggacuua

SEQ ID NO: 685055 - RNA, 19 nt, Artificial Sequence
  Description of Artificial Sequence: Synthetic oligonucleotide
  Antisense strand to SEQ ID NO: 685054
uaaguccggguagaaagaa

SEQ ID NO: 685056 - RNA, 19 nt, Artificial Sequence
  Description of Artificial Sequence: Synthetic oligonucleotide
  Sense strand starting at position 545 of SEQ ID NO: 586009
ucuuucuacccggacuuaa

SEQ ID NO: 685057 - RNA, 19 nt, Artificial Sequence
  Description of Artificial Sequence: Synthetic oligonucleotide
  Antisense strand to SEQ ID NO: 685056
uuaaguccggguagaaaga

SEQ ID NO: 685058 - RNA, 19 nt, Artificial Sequence
  Description of Artificial Sequence: Synthetic oligonucleotide
  Sense strand starting at position 741 of SEQ ID NO: 586009
ucauaaucauucucggcaa

SEQ ID NO: 685059 - RNA, 19 nt, Artificial Sequence
  Description of Artificial Sequence: Synthetic oligonucleotide
  Antisense strand to SEQ ID NO: 685058
uugccgagaaugauuauga

SEQ ID NO: 685060 - RNA, 19 nt, Artificial Sequence
  Description of Artificial Sequence: Synthetic oligonucleotide
  Sense strand starting at position 753 of SEQ ID NO: 586009
ucggcaaucucuucuaaug

SEQ ID NO: 685061 - RNA, 19 nt, Artificial Sequence
  Description of Artificial Sequence: Synthetic oligonucleotide
  Antisense strand to SEQ ID NO: 685060
cauuagaagagauugccga

SEQ ID NO: 685062 - RNA, 19 nt, Artificial Sequence
  Description of Artificial Sequence: Synthetic oligonucleotide
  Sense strand starting at position 765 of SEQ ID NO: 586009
ucuaauggguguuccuaca

SEQ ID NO: 685063 - RNA, 19 nt, Artificial Sequence
  Description of Artificial Sequence: Synthetic oligonucleotide
  Antisense strand to SEQ ID NO: 685062
uguaggaacacccauuaga

SEQ ID NO: 685064 - RNA, 19 nt, Artificial Sequence
  Description of Artificial Sequence: Synthetic oligonucleotide
  Sense strand starting at position 826 of SEQ ID NO: 586009
gcaauagugcguuugaacg

SEQ ID NO: 685065 - RNA, 19 nt, Artificial Sequence
  Description of Artificial Sequence: Synthetic oligonucleotide
  Antisense strand to SEQ ID NO: 685064
cguucaaacgcacuauugc

SEQ ID NO: 685066 - RNA, 19 nt, Artificial Sequence
  Description of Artificial Sequence: Synthetic oligonucleotide
  Sense strand starting at position 848 of SEQ ID NO: 586009
uuacguuuggaauauaacu

SEQ ID NO: 685067 - RNA, 19 nt, Artificial Sequence
  Description of Artificial Sequence: Synthetic oligonucleotide
  Antisense strand to SEQ ID NO: 685066
aguuauauuccaaacguaa

SEQ ID NO: 685068 - RNA, 19 nt, Artificial Sequence
  Description of Artificial Sequence: Synthetic oligonucleotide
  Sense strand starting at position 1184 of SEQ ID NO: 586009
gcauguuuagucggaggag

SEQ ID NO: 685069 - RNA, 19 nt, Artificial Sequence
  Description of Artificial Sequence: Synthetic oligonucleotide
  Antisense strand to SEQ ID NO: 685068
cuccuccgacuaaacaugc

SEQ ID NO: 685070 - RNA, 19 nt, Artificial Sequence
  Description of Artificial Sequence: Synthetic oligonucleotide
  Sense strand starting at position 1241 of SEQ ID NO: 586009
gauaaacuagggcgauuau

SEQ ID NO: 685071 - RNA, 19 nt, Artificial Sequence
  Description of Artificial Sequence: Synthetic oligonucleotide
  Antisense strand to SEQ ID NO: 685070
auaaucgcccuaguuuauc

SEQ ID NO: 685072 - RNA, 19 nt, Artificial Sequence
  Description of Artificial Sequence: Synthetic oligonucleotide
  Sense strand starting at position 1378 of SEQ ID NO: 586009
uggguucuccugggcagaa

SEQ ID NO: 685073 - RNA, 19 nt, Artificial Sequence
  Description of Artificial Sequence: Synthetic oligonucleotide
  Antisense strand to SEQ ID NO: 685072
uucugcccaggagaaccca

SEQ ID NO: 685074 - RNA, 19 nt, Artificial Sequence
  Description of Artificial Sequence: Synthetic oligonucleotide
  Sense strand starting at position 1379 of SEQ ID NO: 586009
ggguucuccugggcagaaa

SEQ ID NO: 685075 - RNA, 19 nt, Artificial Sequence
  Description of Artificial Sequence: Synthetic oligonucleotide
  Antisense strand to SEQ ID NO: 685074
uuucugcccaggagaaccc

SEQ ID NO: 685076 - RNA, 19 nt, Artificial Sequence
  Description of Artificial Sequence: Synthetic oligonucleotide
  Sense strand starting at position 2042 of SEQ ID NO: 586009
gagcuuucuggguacugua

SEQ ID NO: 685077 - RNA, 19 nt, Artificial Sequence
  Description of Artificial Sequence: Synthetic oligonucleotide
  Antisense strand to SEQ ID NO: 685076
uacaguacccagaaagcuc

SEQ ID NO: 685078 - RNA, 19 nt, Artificial Sequence
  Description of Artificial Sequence: Synthetic oligonucleotide
  Sense strand starting at position 2120 of SEQ ID NO: 586009
ccucgaaugcauuguggga

SEQ ID NO: 685079 - RNA, 19 nt, Artificial Sequence
  Description of Artificial Sequence: Synthetic oligonucleotide
  Antisense strand to SEQ ID NO: 685078
ucccacaaugcauucgagg

SEQ ID NO: 685080 - RNA, 19 nt, Artificial Sequence
  Description of Artificial Sequence: Synthetic oligonucleotide
  Sense strand starting at position 2206 of SEQ ID NO: 586009
cgagaaucaugggaagaca

SEQ ID NO: 685081 - RNA, 19 nt, Artificial Sequence
  Description of Artificial Sequence: Synthetic oligonucleotide
  Antisense strand to SEQ ID NO: 685080
ugucuucccaugauucucg

SEQ ID NO: 685082 - RNA, 19 nt, Artificial Sequence
  Description of Artificial Sequence: Synthetic oligonucleotide
  Sense strand starting at position 2482 of SEQ ID NO: 586009
gaguaauggaggugaacau

SEQ ID NO: 685083 - RNA, 19 nt, Artificial Sequence
  Description of Artificial Sequence: Synthetic oligonucleotide
  Antisense strand to SEQ ID NO: 685082
auguucaccuccauuacuc

SEQ ID NO: 685084 - RNA, 19 nt, Artificial Sequence
  Description of Artificial Sequence: Synthetic oligonucleotide
  Sense strand starting at position 2552 of SEQ ID NO: 586009
uuuagugaugaccacuuau

SEQ ID NO: 685085 - RNA, 19 nt, Artificial Sequence
  Description of Artificial Sequence: Synthetic oligonucleotide
  Antisense strand to SEQ ID NO: 685084
auaaguggucaucacuaaa

SEQ ID NO: 685086 - RNA, 19 nt, Artificial Sequence
  Description of Artificial Sequence: Synthetic oligonucleotide
  Sense strand starting at position 2604 of SEQ ID NO: 586009
agagucuauuaggccaauu

SEQ ID NO: 685087 - RNA, 19 nt, Artificial Sequence
  Description of Artificial Sequence: Synthetic oligonucleotide
  Antisense strand to SEQ ID NO: 685086
aauuggccuaauagacucu

SEQ ID NO: 685088 - RNA, 19 nt, Artificial Sequence
  Description of Artificial Sequence: Synthetic oligonucleotide
  Sense strand starting at position 2606 of SEQ ID NO: 586009
agucuauuaggccaauuaa

SEQ ID NO: 685089 - RNA, 19 nt, Artificial Sequence
  Description of Artificial Sequence: Synthetic oligonucleotide
  Antisense strand to SEQ ID NO: 685088
uuaauuggccuaauagacu

SEQ ID NO: 685090 - RNA, 19 nt, Artificial Sequence
  Description of Artificial Sequence: Synthetic oligonucleotide
  Sense strand starting at position 2975 of SEQ ID NO: 586009
auagguaaacauuguuaga

SEQ ID NO: 685091 - RNA, 19 nt, Artificial Sequence
  Description of Artificial Sequence: Synthetic oligonucleotide
  Antisense strand to SEQ ID NO: 685090
ucuaacaauguuuaccuau

SEQ ID NO: 685092 - RNA, 19 nt, Artificial Sequence
  Description of Artificial Sequence: Synthetic oligonucleotide
  Sense strand starting at position 2977 of SEQ ID NO: 586009
agguaaacauuguuagacu

SEQ ID NO: 685093 - RNA, 19 nt, Artificial Sequence
  Description of Artificial Sequence: Synthetic oligonucleotide
  Antisense strand to SEQ ID NO: 685092
agucuaacaauguuuaccu

SEQ ID NO: 685094 - RNA, 19 nt, Artificial Sequence
  Description of Artificial Sequence: Synthetic oligonucleotide
  Sense strand starting at position 2986 of SEQ ID NO: 586009
uuguuagacuagcuaucaa

SEQ ID NO: 685095 - RNA, 19 nt, Artificial Sequence
  Description of Artificial Sequence: Synthetic oligonucleotide
  Antisense strand to SEQ ID NO: 685094
uugauagcuagucuaacaa

SEQ ID NO: 685096 - RNA, 19 nt, Artificial Sequence
  Description of Artificial Sequence: Synthetic oligonucleotide
  Sense strand starting at position 3019 of SEQ ID NO: 586009
aguuaaagguaauuagacu

SEQ ID NO: 685097 - RNA, 19 nt, Artificial Sequence
  Description of Artificial Sequence: Synthetic oligonucleotide
  Antisense strand to SEQ ID NO: 685096
agucuaauuaccuuuaacu

SEQ ID NO: 685098 - RNA, 19 nt, Artificial Sequence
  Description of Artificial Sequence: Synthetic oligonucleotide
  Sense strand starting at position 3080 of SEQ ID NO: 586009
gucucuagaguuugucaga

SEQ ID NO: 685099 - RNA, 19 nt, Artificial Sequence
  Description of Artificial Sequence: Synthetic oligonucleotide
  Antisense strand to SEQ ID NO: 685098
ucugacaaacucuagagac

SEQ ID NO: 685100 - RNA, 19 nt, Artificial Sequence
  Description of Artificial Sequence: Synthetic oligonucleotide
  Sense strand starting at position 3081 of SEQ ID NO: 586009
ucucuagaguuugucagaa

SEQ ID NO: 685101 - RNA, 19 nt, Artificial Sequence
  Description of Artificial Sequence: Synthetic oligonucleotide
  Antisense strand to SEQ ID NO: 685100
uucugacaaacucuagaga

SEQ ID NO: 685102 - RNA, 19 nt, Artificial Sequence
  Description of Artificial Sequence: Synthetic oligonucleotide
  Sense strand starting at position 3138 of SEQ ID NO: 586009
ccagaaguagguuguaaau

SEQ ID NO: 685103 - RNA, 19 nt, Artificial Sequence
  Description of Artificial Sequence: Synthetic oligonucleotide
  Antisense strand to SEQ ID NO: 685102
auuuacaaccuacuucugg

SEQ ID NO: 685104 - RNA, 19 nt, Artificial Sequence
  Description of Artificial Sequence: Synthetic oligonucleotide
  Sense strand starting at position 3190 of SEQ ID NO: 586009
agguuuaggacauguuuau

SEQ ID NO: 685105 - RNA, 19 nt, Artificial Sequence
  Description of Artificial Sequence: Synthetic oligonucleotide
  Antisense strand to SEQ ID NO: 685104
auaaacauguccuaaaccu

SEQ ID NO: 685106 - RNA, 19 nt, Artificial Sequence
  Description of Artificial Sequence: Synthetic oligonucleotide
  Sense strand starting at position 3194 of SEQ ID NO: 586009
uuaggacauguuuauguuu

SEQ ID NO: 685107 - RNA, 19 nt, Artificial Sequence
  Description of Artificial Sequence: Synthetic oligonucleotide
  Antisense strand to SEQ ID NO: 685106
aaacauaaacauguccuaa

SEQ ID NO: 685108 - RNA, 19 nt, Artificial Sequence
  Description of Artificial Sequence: Synthetic oligonucleotide
  Sense strand starting at position 3197 of SEQ ID NO: 586009
ggacauguuuauguuuaug

SEQ ID NO: 685109 - RNA, 19 nt, Artificial Sequence
  Description of Artificial Sequence: Synthetic oligonucleotide
  Antisense strand to SEQ ID NO: 685108
cauaaacauaaacaugucc

SEQ ID NO: 685110 - RNA, 19 nt, Artificial Sequence
  Description of Artificial Sequence: Synthetic oligonucleotide
  Sense strand starting at position 3474 of SEQ ID NO: 586009
ucuuaugagucuguccaga

SEQ ID NO: 685111 - RNA, 19 nt, Artificial Sequence
  Description of Artificial Sequence: Synthetic oligonucleotide
  Antisense strand to SEQ ID NO: 685110
ucuggacagacucauaaga

SEQ ID NO: 685112 - RNA, 19 nt, Artificial Sequence
  Description of Artificial Sequence: Synthetic oligonucleotide
  Sense strand starting at position 3476 of SEQ ID NO: 586009
uuaugagucuguccagaaa

SEQ ID NO: 685113 - RNA, 19 nt, Artificial Sequence
  Description of Artificial Sequence: Synthetic oligonucleotide
  Antisense strand to SEQ ID NO: 685112
uuucuggacagacucauaa

SEQ ID NO: 685114 - RNA, 19 nt, Artificial Sequence
  Description of Artificial Sequence: Synthetic oligonucleotide
  Sense strand starting at position 3500 of SEQ ID NO: 586009
augcacauaucuguacaga

SEQ ID NO: 685115 - RNA, 19 nt, Artificial Sequence
  Description of Artificial Sequence: Synthetic oligonucleotide
  Antisense strand to SEQ ID NO: 685114
ucuguacagauaugugcau

SEQ ID NO: 685116 - RNA, 19 nt, Artificial Sequence
  Description of Artificial Sequence: Synthetic oligonucleotide
  Sense strand starting at position 3501 of SEQ ID NO: 586009
ugcacauaucuguacagau

SEQ ID NO: 685117 - RNA, 19 nt, Artificial Sequence
  Description of Artificial Sequence: Synthetic oligonucleotide
  Antisense strand to SEQ ID NO: 685116
aucuguacagauaugugca

SEQ ID NO: 685118 - RNA, 19 nt, Artificial Sequence
  Description of Artificial Sequence: Synthetic oligonucleotide
  Sense strand starting at position 3602 of SEQ ID NO: 586009
agagucaacuuggaagaaa

SEQ ID NO: 685119 - RNA, 19 nt, Artificial Sequence
  Description of Artificial Sequence: Synthetic oligonucleotide
  Antisense strand to SEQ ID NO: 685118
uuucuuccaaguugacucu

SEQ ID NO: 685120 - RNA, 19 nt, Artificial Sequence
  Description of Artificial Sequence: Synthetic oligonucleotide
  Sense strand starting at position 3687 of SEQ ID NO: 586009
ucguuaauagacuguaaag

SEQ ID NO: 685121 - RNA, 19 nt, Artificial Sequence
  Description of Artificial Sequence: Synthetic oligonucleotide
  Antisense strand to SEQ ID NO: 685120
cuuuacagucuauuaacga

SEQ ID NO: 685122 - RNA, 19 nt, Artificial Sequence
  Description of Artificial Sequence: Synthetic oligonucleotide
  Sense strand starting at position 3705 of SEQ ID NO: 586009
ggcaauuucuguucuuaac

SEQ ID NO: 685123 - RNA, 19 nt, Artificial Sequence
  Description of Artificial Sequence: Synthetic oligonucleotide
  Antisense strand to SEQ ID NO: 685122
guuaagaacagaaauugcc

SEQ ID NO: 685124 - RNA, 19 nt, Artificial Sequence
  Description of Artificial Sequence: Synthetic oligonucleotide
  Sense strand starting at position 3975 of SEQ ID NO: 586009
ccuguagugagcuaugacu

SEQ ID NO: 685125 - RNA, 19 nt, Artificial Sequence
  Description of Artificial Sequence: Synthetic oligonucleotide
  Antisense strand to SEQ ID NO: 685124
agucauagcucacuacagg

SEQ ID NO: 685126 - RNA, 19 nt, Artificial Sequence
  Description of Artificial Sequence: Synthetic oligonucleotide
  Sense strand starting at position 96 of SEQ ID NO: 586010
accacacuggauugaguua

SEQ ID NO: 685127 - RNA, 19 nt, Artificial Sequence
  Description of Artificial Sequence: Synthetic oligonucleotide
  Antisense strand to SEQ ID NO: 685126
uaacucaauccaguguggu

SEQ ID NO: 685128 - RNA, 19 nt, Artificial Sequence
  Description of Artificial Sequence: Synthetic oligonucleotide
  Sense strand starting at position 103 of SEQ ID NO: 586010
uggauugaguuaccuaauu

SEQ ID NO: 685129 - RNA, 19 nt, Artificial Sequence
  Description of Artificial Sequence: Synthetic oligonucleotide
  Antisense strand to SEQ ID NO: 685128
aauuagguaacucaaucca

SEQ ID NO: 685130 - RNA, 19 nt, Artificial Sequence
  Description of Artificial Sequence: Synthetic oligonucleotide
  Sense strand starting at position 229 of SEQ ID NO: 586010
ugaauacccuucccugagu

SEQ ID NO: 685131 - RNA, 19 nt, Artificial Sequence
  Description of Artificial Sequence: Synthetic oligonucleotide
  Antisense strand to SEQ ID NO: 685130
acucagggaaggguauuca

SEQ ID NO: 685132 - RNA, 19 nt, Artificial Sequence
  Description of Artificial Sequence: Synthetic oligonucleotide
  Sense strand starting at position 232 of SEQ ID NO: 586010
auacccuucccugagucau

SEQ ID NO: 685133 - RNA, 19 nt, Artificial Sequence
  Description of Artificial Sequence: Synthetic oligonucleotide
  Antisense strand to SEQ ID NO: 685132
augacucagggaaggguau

SEQ ID NO: 685134 - RNA, 19 nt, Artificial Sequence
  Description of Artificial Sequence: Synthetic oligonucleotide
  Sense strand starting at position 243 of SEQ ID NO: 586010
ugagucaugcaauaaauua

SEQ ID NO: 685135 - RNA, 19 nt, Artificial Sequence
  Description of Artificial Sequence: Synthetic oligonucleotide
  Antisense strand to SEQ ID NO: 685134
uaauuuauugcaugacuca

SEQ ID NO: 685136 - RNA, 19 nt, Artificial Sequence
  Description of Artificial Sequence: Synthetic oligonucleotide
  Sense strand starting at position 363 of SEQ ID NO: 586010
ccauguuugcaugaaccca

SEQ ID NO: 685137 - RNA, 19 nt, Artificial Sequence
  Description of Artificial Sequence: Synthetic oligonucleotide
  Antisense strand to SEQ ID NO: 685136
uggguucaugcaaacaugg

SEQ ID NO: 685138 - RNA, 19 nt, Artificial Sequence
  Description of Artificial Sequence: Synthetic oligonucleotide
  Sense strand starting at position 722 of SEQ ID NO: 586010
gacauuggcgcucaauaaa

SEQ ID NO: 685139 - RNA, 19 nt, Artificial Sequence
  Description of Artificial Sequence: Synthetic oligonucleotide
  Antisense strand to SEQ ID NO: 685138
uuuauugagcgccaauguc

SEQ ID NO: 685140 - RNA, 19 nt, Artificial Sequence
  Description of Artificial Sequence: Synthetic oligonucleotide
  Sense strand starting at position 777 of SEQ ID NO: 586010
uuguuuagucacuaacuuc

SEQ ID NO: 685141 - RNA, 19 nt, Artificial Sequence
  Description of Artificial Sequence: Synthetic oligonucleotide
  Antisense strand to SEQ ID NO: 685140
gaaguuagugacuaaacaa

SEQ ID NO: 685142 - RNA, 19 nt, Artificial Sequence
  Description of Artificial Sequence: Synthetic oligonucleotide
  Sense strand starting at position 854 of SEQ ID NO: 586010
cagaguaaguagguuuaca

SEQ ID NO: 685143 - RNA, 19 nt, Artificial Sequence
  Description of Artificial Sequence: Synthetic oligonucleotide
  Antisense strand to SEQ ID NO: 685142
uguaaaccuacuuacucug

SEQ ID NO: 685144 - RNA, 19 nt, Artificial Sequence
  Description of Artificial Sequence: Synthetic oligonucleotide
  Sense strand starting at position 864 of SEQ ID NO: 586010
agguuuacauaugcuuaaa

SEQ ID NO: 685145 - RNA, 19 nt, Artificial Sequence
  Description of Artificial Sequence: Synthetic oligonucleotide
  Antisense strand to SEQ ID NO: 685144
uuuaagcauauguaaaccu

SEQ ID NO: 685146 - RNA, 19 nt, Artificial Sequence
  Description of Artificial Sequence: Synthetic oligonucleotide
  Sense strand starting at position 1169 of SEQ ID NO: 586010
ugcaguuacgaguuugcua

SEQ ID NO: 685147 - RNA, 19 nt, Artificial Sequence
  Description of Artificial Sequence: Synthetic oligonucleotide
  Antisense strand to SEQ ID NO: 685146
uagcaaacucguaacugca

SEQ ID NO: 685148 - RNA, 19 nt, Artificial Sequence
  Description of Artificial Sequence: Synthetic oligonucleotide
  Sense strand starting at position 1170 of SEQ ID NO: 586010
gcaguuacgaguuugcuau

SEQ ID NO: 685149 - RNA, 19 nt, Artificial Sequence
  Description of Artificial Sequence: Synthetic oligonucleotide
  Antisense strand to SEQ ID NO: 685148
auagcaaacucguaacugc

SEQ ID NO: 685150 - RNA, 19 nt, Artificial Sequence
  Description of Artificial Sequence: Synthetic oligonucleotide
  Sense strand starting at position 1218 of SEQ ID NO: 586010
ugcugucuuccggcucaaa

SEQ ID NO: 685151 - RNA, 19 nt, Artificial Sequence
  Description of Artificial Sequence: Synthetic oligonucleotide
  Antisense strand to SEQ ID NO: 685150
uuugagccggaagacagca

SEQ ID NO: 685152 - RNA, 19 nt, Artificial Sequence
  Description of Artificial Sequence: Synthetic oligonucleotide
  Sense strand starting at position 1251 of SEQ ID NO: 586010
gcagguaggaaguagucaa

SEQ ID NO: 685153 - RNA, 19 nt, Artificial Sequence
  Description of Artificial Sequence: Synthetic oligonucleotide
  Antisense strand to SEQ ID NO: 685152
uugacuacuuccuaccugc

SEQ ID NO: 685154 - RNA, 19 nt, Artificial Sequence
  Description of Artificial Sequence: Synthetic oligonucleotide
  Sense strand starting at position 1521 of SEQ ID NO: 586010
aguguauaauagccaagau

SEQ ID NO: 685155 - RNA, 19 nt, Artificial Sequence
  Description of Artificial Sequence: Synthetic oligonucleotide
  Antisense strand to SEQ ID NO: 685154
aucuuggcuauuauacacu

SEQ ID NO: 685156 - RNA, 19 nt, Artificial Sequence
  Description of Artificial Sequence: Synthetic oligonucleotide
  Sense strand starting at position 1522 of SEQ ID NO: 586010
guguauaauagccaagaug

SEQ ID NO: 685157 - RNA, 19 nt, Artificial Sequence
  Description of Artificial Sequence: Synthetic oligonucleotide
  Antisense strand to SEQ ID NO: 685156
caucuuggcuauuauacac

SEQ ID NO: 685158 - RNA, 19 nt, Artificial Sequence
  Description of Artificial Sequence: Synthetic oligonucleotide
  Sense strand starting at position 1544 of SEQ ID NO: 586010
cagugauuuggugguuggu

SEQ ID NO: 685159 - RNA, 19 nt, Artificial Sequence
  Description of Artificial Sequence: Synthetic oligonucleotide
  Antisense strand to SEQ ID NO: 685158
accaaccaccaaaucacug

SEQ ID NO: 685160 - RNA, 19 nt, Artificial Sequence
  Description of Artificial Sequence: Synthetic oligonucleotide
  Sense strand starting at position 1573 of SEQ ID NO: 586010
gggucaaagaaaugcucaa

SEQ ID NO: 685161 - RNA, 19 nt, Artificial Sequence
  Description of Artificial Sequence: Synthetic oligonucleotide
  Antisense strand to SEQ ID NO: 685160
uugagcauuucuuugaccc

SEQ ID NO: 685162 - RNA, 19 nt, Artificial Sequence
  Description of Artificial Sequence: Synthetic oligonucleotide
  Sense strand starting at position 2219 of SEQ ID NO: 586010
ggaugcagggcucaguaaa

SEQ ID NO: 685163 - RNA, 19 nt, Artificial Sequence
  Description of Artificial Sequence: Synthetic oligonucleotide
  Antisense strand to SEQ ID NO: 685162
uuuacugagcccugcaucc

SEQ ID NO: 685164 - RNA, 19 nt, Artificial Sequence
  Description of Artificial Sequence: Synthetic oligonucleotide
  Sense strand starting at position 2268 of SEQ ID NO: 586010
ccuaauauuuccguagagu

SEQ ID NO: 685165 - RNA, 19 nt, Artificial Sequence
  Description of Artificial Sequence: Synthetic oligonucleotide
  Antisense strand to SEQ ID NO: 685164
acucuacggaaauauuagg

SEQ ID NO: 685166 - RNA, 19 nt, Artificial Sequence
  Description of Artificial Sequence: Synthetic oligonucleotide
  Sense strand starting at position 2356 of SEQ ID NO: 586010
uaagccugugucuaagauu

SEQ ID NO: 685167 - RNA, 19 nt, Artificial Sequence
  Description of Artificial Sequence: Synthetic oligonucleotide
  Antisense strand to SEQ ID NO: 685166
aaucuuagacacaggcuua

SEQ ID NO: 685168 - RNA, 19 nt, Artificial Sequence
  Description of Artificial Sequence: Synthetic oligonucleotide
  Sense strand starting at position 2521 of SEQ ID NO: 586010
gaauaaauuugcgugucau

SEQ ID NO: 685169 - RNA, 19 nt, Artificial Sequence
  Description of Artificial Sequence: Synthetic oligonucleotide
  Antisense strand to SEQ ID NO: 685168
augacacgcaaauuuauuc

SEQ ID NO: 685170 - RNA, 19 nt, Artificial Sequence
  Description of Artificial Sequence: Synthetic oligonucleotide
  Sense strand starting at position 2522 of SEQ ID NO: 586010
aauaaauuugcgugucaua

SEQ ID NO: 685171 - RNA, 19 nt, Artificial Sequence
  Description of Artificial Sequence: Synthetic oligonucleotide
  Antisense strand to SEQ ID NO: 685170
uaugacacgcaaauuuauu

SEQ ID NO: 685172 - RNA, 19 nt, Artificial Sequence
  Description of Artificial Sequence: Synthetic oligonucleotide
  Sense strand starting at position 2546 of SEQ ID NO: 586010
uguauaauugcuuucgugu

SEQ ID NO: 685173 - RNA, 19 nt, Artificial Sequence
  Description of Artificial Sequence: Synthetic oligonucleotide
  Antisense strand to SEQ ID NO: 685172
acacgaaagcaauuauaca

SEQ ID NO: 685174 - RNA, 19 nt, Artificial Sequence
  Description of Artificial Sequence: Synthetic oligonucleotide
  Sense strand starting at position 2547 of SEQ ID NO: 586010
guauaauugcuuucguguc

SEQ ID NO: 685175 - RNA, 19 nt, Artificial Sequence
  Description of Artificial Sequence: Synthetic oligonucleotide
  Antisense strand to SEQ ID NO: 685174
gacacgaaagcaauuauac

SEQ ID NO: 685176 - RNA, 19 nt, Artificial Sequence
  Description of Artificial Sequence: Synthetic oligonucleotide
  Sense strand starting at position 2564 of SEQ ID NO: 586010
ucuagaguucuagagucuu

SEQ ID NO: 685177 - RNA, 19 nt, Artificial Sequence
  Description of Artificial Sequence: Synthetic oligonucleotide
  Antisense strand to SEQ ID NO: 685176
aagacucuagaacucuaga

SEQ ID NO: 685178 - RNA, 19 nt, Artificial Sequence
  Description of Artificial Sequence: Synthetic oligonucleotide
  Sense strand starting at position 2692 of SEQ ID NO: 586010
uucccuguugaguagauau

SEQ ID NO: 685179 - RNA, 19 nt, Artificial Sequence
  Description of Artificial Sequence: Synthetic oligonucleotide
  Antisense strand to SEQ ID NO: 685178
auaucuacucaacagggaa

SEQ ID NO: 685180 - RNA, 19 nt, Artificial Sequence
  Description of Artificial Sequence: Synthetic oligonucleotide
  Sense strand starting at position 2825 of SEQ ID NO: 586010
agggaauccugccucccau

SEQ ID NO: 685181 - RNA, 19 nt, Artificial Sequence
  Description of Artificial Sequence: Synthetic oligonucleotide
  Antisense strand to SEQ ID NO: 685180
augggaggcaggauucccu

SEQ ID NO: 685182 - RNA, 19 nt, Artificial Sequence
  Description of Artificial Sequence: Synthetic oligonucleotide
  Sense strand starting at position 2883 of SEQ ID NO: 586010
augucugauugccucauuu

SEQ ID NO: 685183 - RNA, 19 nt, Artificial Sequence
  Description of Artificial Sequence: Synthetic oligonucleotide
  Antisense strand to SEQ ID NO: 685182
aaaugaggcaaucagacau

SEQ ID NO: 685184 - RNA, 19 nt, Artificial Sequence
  Description of Artificial Sequence: Synthetic oligonucleotide
  Sense strand starting at position 2987 of SEQ ID NO: 586010
agaucagaccaauguuuau

SEQ ID NO: 685185 - RNA, 19 nt, Artificial Sequence
  Description of Artificial Sequence: Synthetic oligonucleotide
  Antisense strand to SEQ ID NO: 685184
auaaacauuggucugaucu

SEQ ID NO: 685186 - RNA, 19 nt, Artificial Sequence
  Description of Artificial Sequence: Synthetic oligonucleotide
  Sense strand starting at position 3098 of SEQ ID NO: 586010
ugccaugucauggaugcaa

SEQ ID NO: 685187 - RNA, 19 nt, Artificial Sequence
  Description of Artificial Sequence: Synthetic oligonucleotide
  Antisense strand to SEQ ID NO: 685186
uugcauccaugacauggca

SEQ ID NO: 685188 - RNA, 19 nt, Artificial Sequence
  Description of Artificial Sequence: Synthetic oligonucleotide
  Sense strand starting at position 3356 of SEQ ID NO: 586010
ccaggagguuagucacaga

SEQ ID NO: 685189 - RNA, 19 nt, Artificial Sequence
  Description of Artificial Sequence: Synthetic oligonucleotide
  Antisense strand to SEQ ID NO: 685188
ucugugacuaaccuccugg

SEQ ID NO: 685190 - RNA, 19 nt, Artificial Sequence
  Description of Artificial Sequence: Synthetic oligonucleotide
  Sense strand starting at position 3361 of SEQ ID NO: 586010
agguuagucacagagugag

SEQ ID NO: 685191 - RNA, 19 nt, Artificial Sequence
  Description of Artificial Sequence: Synthetic oligonucleotide
  Antisense strand to SEQ ID NO: 685190
cucacucugugacuaaccu

SEQ ID NO: 685192 - RNA, 19 nt, Artificial Sequence
  Description of Artificial Sequence: Synthetic oligonucleotide
  Sense strand starting at position 3364 of SEQ ID NO: 586010
uuagucacagagugagaua

SEQ ID NO: 685193 - RNA, 19 nt, Artificial Sequence
  Description of Artificial Sequence: Synthetic oligonucleotide
  Antisense strand to SEQ ID NO: 685192
uaucucacucugugacuaa

SEQ ID NO: 685194 - RNA, 19 nt, Artificial Sequence
  Description of Artificial Sequence: Synthetic oligonucleotide
  Sense strand starting at position 3634 of SEQ ID NO: 586010
acucucagcccugggaauu

SEQ ID NO: 685195 - RNA, 19 nt, Artificial Sequence
  Description of Artificial Sequence: Synthetic oligonucleotide
  Antisense strand to SEQ ID NO: 685194
aauucccagggcugagagu

SEQ ID NO: 685196 - RNA, 19 nt, Artificial Sequence
  Description of Artificial Sequence: Synthetic oligonucleotide
  Sense strand starting at position 3644 of SEQ ID NO: 586010
cugggaauugccuacaccu

SEQ ID NO: 685197 - RNA, 19 nt, Artificial Sequence
  Description of Artificial Sequence: Synthetic oligonucleotide
  Antisense strand to SEQ ID NO: 685196
agguguaggcaauucccag

SEQ ID NO: 685198 - RNA, 19 nt, Artificial Sequence
  Description of Artificial Sequence: Synthetic oligonucleotide
  Sense strand starting at position 3646 of SEQ ID NO: 586010
gggaauugccuacaccuuu

SEQ ID NO: 685199 - RNA, 19 nt, Artificial Sequence
  Description of Artificial Sequence: Synthetic oligonucleotide
  Antisense strand to SEQ ID NO: 685198
aaagguguaggcaauuccc

SEQ ID NO: 685200 - RNA, 19 nt, Artificial Sequence
  Description of Artificial Sequence: Synthetic oligonucleotide
  Sense strand starting at position 3940 of SEQ ID NO: 586010
acaaguggauuguuuguaa

SEQ ID NO: 685201 - RNA, 19 nt, Artificial Sequence
  Description of Artificial Sequence: Synthetic oligonucleotide
  Antisense strand to SEQ ID NO: 685200
uuacaaacaauccacuugu

SEQ ID NO: 685202 - RNA, 19 nt, Artificial Sequence
  Description of Artificial Sequence: Synthetic oligonucleotide
  Sense strand starting at position 3962 of SEQ ID NO: 586010
aaaggaaaugcuugaggua

SEQ ID NO: 685203 - RNA, 19 nt, Artificial Sequence
  Description of Artificial Sequence: Synthetic oligonucleotide
  Antisense strand to SEQ ID NO: 685202
uaccucaagcauuuccuuu

SEQ ID NO: 685204 - RNA, 19 nt, Artificial Sequence
  Description of Artificial Sequence: Synthetic oligonucleotide
  Sense strand starting at position 3977 of SEQ ID NO: 586010
gguaauggauaccacauuu

SEQ ID NO: 685205 - RNA, 19 nt, Artificial Sequence
  Description of Artificial Sequence: Synthetic oligonucleotide
  Antisense strand to SEQ ID NO: 685204
aaaugugguauccauuacc

SEQ ID NO: 685206 - RNA, 19 nt, Artificial Sequence
  Description of Artificial Sequence: Synthetic oligonucleotide
  Sense strand starting at position 105 of SEQ ID NO: 586011
aguagauacuguucuuauc

SEQ ID NO: 685207 - RNA, 19 nt, Artificial Sequence
  Description of Artificial Sequence: Synthetic oligonucleotide
  Antisense strand to SEQ ID NO: 685206
gauaagaacaguaucuacu

SEQ ID NO: 685208 - RNA, 19 nt, Artificial Sequence
  Description of Artificial Sequence: Synthetic oligonucleotide
  Sense strand starting at position 173 of SEQ ID NO: 586011
augcuaugauaggugagau

SEQ ID NO: 685209 - RNA, 19 nt, Artificial Sequence
  Description of Artificial Sequence: Synthetic oligonucleotide
  Antisense strand to SEQ ID NO: 685208
aucucaccuaucauagcau

SEQ ID NO: 685210 - RNA, 19 nt, Artificial Sequence
  Description of Artificial Sequence: Synthetic oligonucleotide
  Sense strand starting at position 174 of SEQ ID NO: 586011
ugcuaugauaggugagauc

SEQ ID NO: 685211 - RNA, 19 nt, Artificial Sequence
  Description of Artificial Sequence: Synthetic oligonucleotide
  Antisense strand to SEQ ID NO: 685210
gaucucaccuaucauagca

SEQ ID NO: 685212 - RNA, 19 nt, Artificial Sequence
  Description of Artificial Sequence: Synthetic oligonucleotide
  Sense strand starting at position 234 of SEQ ID NO: 586011
auucuccucugguuaaguu

SEQ ID NO: 685213 - RNA, 19 nt, Artificial Sequence
  Description of Artificial Sequence: Synthetic oligonucleotide
  Antisense strand to SEQ ID NO: 685212
aacuuaaccagaggagaau

SEQ ID NO: 685214 - RNA, 19 nt, Artificial Sequence
  Description of Artificial Sequence: Synthetic oligonucleotide
  Sense strand starting at position 235 of SEQ ID NO: 586011
uucuccucugguuaaguua

SEQ ID NO: 685215 - RNA, 19 nt, Artificial Sequence
  Description of Artificial Sequence: Synthetic oligonucleotide
  Antisense strand to SEQ ID NO: 685214
uaacuuaaccagaggagaa

SEQ ID NO: 685216 - RNA, 19 nt, Artificial Sequence
  Description of Artificial Sequence: Synthetic oligonucleotide
  Sense strand starting at position 244 of SEQ ID NO: 586011
gguuaaguuaucuguucca

SEQ ID NO: 685217 - RNA, 19 nt, Artificial Sequence
  Description of Artificial Sequence: Synthetic oligonucleotide
  Antisense strand to SEQ ID NO: 685216
uggaacagauaacuuaacc

SEQ ID NO: 685218 - RNA, 19 nt, Artificial Sequence
  Description of Artificial Sequence: Synthetic oligonucleotide
  Sense strand starting at position 357 of SEQ ID NO: 586011
auauuacguuaaucugagu

SEQ ID NO: 685219 - RNA, 19 nt, Artificial Sequence
  Description of Artificial Sequence: Synthetic oligonucleotide
  Antisense strand to SEQ ID NO: 685218
acucagauuaacguaauau

SEQ ID NO: 685220 - RNA, 19 nt, Artificial Sequence
  Description of Artificial Sequence: Synthetic oligonucleotide
  Sense strand starting at position 429 of SEQ ID NO: 586011
cuacguggugauuaaccaa

SEQ ID NO: 685221 - RNA, 19 nt, Artificial Sequence
  Description of Artificial Sequence: Synthetic oligonucleotide
  Antisense strand to SEQ ID NO: 685220
uugguuaaucaccacguag

SEQ ID NO: 685222 - RNA, 19 nt, Artificial Sequence
  Description of Artificial Sequence: Synthetic oligonucleotide
  Sense strand starting at position 458 of SEQ ID NO: 586011
ugggucuaauuacuaauua

SEQ ID NO: 685223 - RNA, 19 nt, Artificial Sequence
  Description of Artificial Sequence: Synthetic oligonucleotide
  Antisense strand to SEQ ID NO: 685222
uaauuaguaauuagaccca

SEQ ID NO: 685224 - RNA, 19 nt, Artificial Sequence
  Description of Artificial Sequence: Synthetic oligonucleotide
  Sense strand starting at position 670 of SEQ ID NO: 586011
gucacucucuacuugagau

SEQ ID NO: 685225 - RNA, 19 nt, Artificial Sequence
  Description of Artificial Sequence: Synthetic oligonucleotide
  Antisense strand to SEQ ID NO: 685224
aucucaaguagagagugac

SEQ ID NO: 685226 - RNA, 19 nt, Artificial Sequence
  Description of Artificial Sequence: Synthetic oligonucleotide
  Sense strand starting at position 718 of SEQ ID NO: 586011
ccaacuccagcauggaaua

SEQ ID NO: 685227 - RNA, 19 nt, Artificial Sequence
  Description of Artificial Sequence: Synthetic oligonucleotide
  Antisense strand to SEQ ID NO: 685226
uauuccaugcuggaguugg

SEQ ID NO: 685228 - RNA, 19 nt, Artificial Sequence
  Description of Artificial Sequence: Synthetic oligonucleotide
  Sense strand starting at position 870 of SEQ ID NO: 586011
ccaaauuacucagcgacau

SEQ ID NO: 685229 - RNA, 19 nt, Artificial Sequence
  Description of Artificial Sequence: Synthetic oligonucleotide
  Antisense strand to SEQ ID NO: 685228
augucgcugaguaauuugg

SEQ ID NO: 685230 - RNA, 19 nt, Artificial Sequence
  Description of Artificial Sequence: Synthetic oligonucleotide
  Sense strand starting at position 874 of SEQ ID NO: 586011
auuacucagcgacauaaca

SEQ ID NO: 685231 - RNA, 19 nt, Artificial Sequence
  Description of Artificial Sequence: Synthetic oligonucleotide
  Antisense strand to SEQ ID NO: 685230
uguuaugucgcugaguaau

SEQ ID NO: 685232 - RNA, 19 nt, Artificial Sequence
  Description of Artificial Sequence: Synthetic oligonucleotide
  Sense strand starting at position 882 of SEQ ID NO: 586011
gcgacauaacauugcuuaa

SEQ ID NO: 685233 - RNA, 19 nt, Artificial Sequence
  Description of Artificial Sequence: Synthetic oligonucleotide
  Antisense strand to SEQ ID NO: 685232
uuaagcaauguuaugucgc

SEQ ID NO: 685234 - RNA, 19 nt, Artificial Sequence
  Description of Artificial Sequence: Synthetic oligonucleotide
  Sense strand starting at position 1017 of SEQ ID NO: 586011
cuccaauuaggcuauguaa

SEQ ID NO: 685235 - RNA, 19 nt, Artificial Sequence
  Description of Artificial Sequence: Synthetic oligonucleotide
  Antisense strand to SEQ ID NO: 685234
uuacauagccuaauuggag

SEQ ID NO: 685236 - RNA, 19 nt, Artificial Sequence
  Description of Artificial Sequence: Synthetic oligonucleotide
  Sense strand starting at position 1019 of SEQ ID NO: 586011
ccaauuaggcuauguaaug

SEQ ID NO: 685237 - RNA, 19 nt, Artificial Sequence
  Description of Artificial Sequence: Synthetic oligonucleotide
  Antisense strand to SEQ ID NO: 685236
cauuacauagccuaauugg

SEQ ID NO: 685238 - RNA, 19 nt, Artificial Sequence
  Description of Artificial Sequence: Synthetic oligonucleotide
  Sense strand starting at position 1020 of SEQ ID NO: 586011
caauuaggcuauguaauga

SEQ ID NO: 685239 - RNA, 19 nt, Artificial Sequence
  Description of Artificial Sequence: Synthetic oligonucleotide
  Antisense strand to SEQ ID NO: 685238
ucauuacauagccuaauug

SEQ ID NO: 685240 - RNA, 19 nt, Artificial Sequence
  Description of Artificial Sequence: Synthetic oligonucleotide
  Sense strand starting at position 2163 of SEQ ID NO: 586011
cccggcagucgccuugaaa

SEQ ID NO: 685241 - RNA, 19 nt, Artificial Sequence
  Description of Artificial Sequence: Synthetic oligonucleotide
  Antisense strand to SEQ ID NO: 685240
uuucaaggcgacugccggg

SEQ ID NO: 685242 - RNA, 19 nt, Artificial Sequence
  Description of Artificial Sequence: Synthetic oligonucleotide
  Sense strand starting at position 2172 of SEQ ID NO: 586011
cgccuugaaaccuaggaga

SEQ ID NO: 685243 - RNA, 19 nt, Artificial Sequence
  Description of Artificial Sequence: Synthetic oligonucleotide
  Antisense strand to SEQ ID NO: 685242
ucuccuagguuucaaggcg

SEQ ID NO: 685244 - RNA, 19 nt, Artificial Sequence
  Description of Artificial Sequence: Synthetic oligonucleotide
  Sense strand starting at position 2211 of SEQ ID NO: 586011
uuugcagaaauucguuaga

SEQ ID NO: 685245 - RNA, 19 nt, Artificial Sequence
  Description of Artificial Sequence: Synthetic oligonucleotide
  Antisense strand to SEQ ID NO: 685244
ucuaacgaauuucugcaaa

SEQ ID NO: 685246 - RNA, 19 nt, Artificial Sequence
  Description of Artificial Sequence: Synthetic oligonucleotide
  Sense strand starting at position 2213 of SEQ ID NO: 586011
ugcagaaauucguuagauc

SEQ ID NO: 685247 - RNA, 19 nt, Artificial Sequence
  Description of Artificial Sequence: Synthetic oligonucleotide
  Antisense strand to SEQ ID NO: 685246
gaucuaacgaauuucugca

SEQ ID NO: 685248 - RNA, 19 nt, Artificial Sequence
  Description of Artificial Sequence: Synthetic oligonucleotide
  Sense strand starting at position 2214 of SEQ ID NO: 586011
gcagaaauucguuagauca

SEQ ID NO: 685249 - RNA, 19 nt, Artificial Sequence
  Description of Artificial Sequence: Synthetic oligonucleotide
  Antisense strand to SEQ ID NO: 685248
ugaucuaacgaauuucugc

SEQ ID NO: 685250 - RNA, 19 nt, Artificial Sequence
  Description of Artificial Sequence: Synthetic oligonucleotide
  Sense strand starting at position 2307 of SEQ ID NO: 586011
ccagcuguacuccagguau

SEQ ID NO: 685251 - RNA, 19 nt, Artificial Sequence
  Description of Artificial Sequence: Synthetic oligonucleotide
  Antisense strand to SEQ ID NO: 685250
auaccuggaguacagcugg

SEQ ID NO: 685252 - RNA, 19 nt, Artificial Sequence
  Description of Artificial Sequence: Synthetic oligonucleotide
  Sense strand starting at position 2564 of SEQ ID NO: 586011
aacugagacggucaauugu

SEQ ID NO: 685253 - RNA, 19 nt, Artificial Sequence
  Description of Artificial Sequence: Synthetic oligonucleotide
  Antisense strand to SEQ ID NO: 685252
acaauugaccgucucaguu

SEQ ID NO: 685254 - RNA, 19 nt, Artificial Sequence
  Description of Artificial Sequence: Synthetic oligonucleotide
  Sense strand starting at position 2634 of SEQ ID NO: 586011
aacggaagcccugggaaau

SEQ ID NO: 685255 - RNA, 19 nt, Artificial Sequence
  Description of Artificial Sequence: Synthetic oligonucleotide
  Antisense strand to SEQ ID NO: 685254
auuucccagggcuuccguu

SEQ ID NO: 685256 - RNA, 19 nt, Artificial Sequence
  Description of Artificial Sequence: Synthetic oligonucleotide
  Sense strand starting at position 2635 of SEQ ID NO: 586011
acggaagcccugggaaaua

SEQ ID NO: 685257 - RNA, 19 nt, Artificial Sequence
  Description of Artificial Sequence: Synthetic oligonucleotide
  Antisense strand to SEQ ID NO: 685256
uauuucccagggcuuccgu

SEQ ID NO: 685258 - RNA, 19 nt, Artificial Sequence
  Description of Artificial Sequence: Synthetic oligonucleotide
  Sense strand starting at position 2651 of SEQ ID NO: 586011
auaagagcuuucccaaggu

SEQ ID NO: 685259 - RNA, 19 nt, Artificial Sequence
  Description of Artificial Sequence: Synthetic oligonucleotide
  Antisense strand to SEQ ID NO: 685258
accuugggaaagcucuuau

SEQ ID NO: 685260 - RNA, 19 nt, Artificial Sequence
  Description of Artificial Sequence: Synthetic oligonucleotide
  Sense strand starting at position 2713 of SEQ ID NO: 586011
cucccagucaaguguuaga

SEQ ID NO: 685261 - RNA, 19 nt, Artificial Sequence
  Description of Artificial Sequence: Synthetic oligonucleotide
  Antisense strand to SEQ ID NO: 685260
ucuaacacuugacugggag

SEQ ID NO: 685262 - RNA, 19 nt, Artificial Sequence
  Description of Artificial Sequence: Synthetic oligonucleotide
  Sense strand starting at position 2812 of SEQ ID NO: 586011
ggugacaguucuccggacu

SEQ ID NO: 685263 - RNA, 19 nt, Artificial Sequence
  Description of Artificial Sequence: Synthetic oligonucleotide
  Antisense strand to SEQ ID NO: 685262
aguccggagaacugucacc

SEQ ID NO: 685264 - RNA, 19 nt, Artificial Sequence
  Description of Artificial Sequence: Synthetic oligonucleotide
  Sense strand starting at position 2815 of SEQ ID NO: 586011
gacaguucuccggacuuaa

SEQ ID NO: 685265 - RNA, 19 nt, Artificial Sequence
  Description of Artificial Sequence: Synthetic oligonucleotide
  Antisense strand to SEQ ID NO: 685264
uuaaguccggagaacuguc

SEQ ID NO: 685266 - RNA, 19 nt, Artificial Sequence
  Description of Artificial Sequence: Synthetic oligonucleotide
  Sense strand starting at position 3053 of SEQ ID NO: 586011
auagucuaagcacgguaaa

SEQ ID NO: 685267 - RNA, 19 nt, Artificial Sequence
  Description of Artificial Sequence: Synthetic oligonucleotide
  Antisense strand to SEQ ID NO: 685266
uuuaccgugcuuagacuau

SEQ ID NO: 685268 - RNA, 19 nt, Artificial Sequence
  Description of Artificial Sequence: Synthetic oligonucleotide
  Sense strand starting at position 3411 of SEQ ID NO: 586011
augccuaucccuuagucau

SEQ ID NO: 685269 - RNA, 19 nt, Artificial Sequence
  Description of Artificial Sequence: Synthetic oligonucleotide
  Antisense strand to SEQ ID NO: 685268
augacuaagggauaggcau

SEQ ID NO: 685270 - RNA, 19 nt, Artificial Sequence
  Description of Artificial Sequence: Synthetic oligonucleotide
  Sense strand starting at position 3414 of SEQ ID NO: 586011
ccuaucccuuagucauagu

SEQ ID NO: 685271 - RNA, 19 nt, Artificial Sequence
  Description of Artificial Sequence: Synthetic oligonucleotide
  Antisense strand to SEQ ID NO: 685270
acuaugacuaagggauagg

SEQ ID NO: 685272 - RNA, 19 nt, Artificial Sequence
  Description of Artificial Sequence: Synthetic oligonucleotide
  Sense strand starting at position 3527 of SEQ ID NO: 586011
aggacugaauaucauuaau

SEQ ID NO: 685273 - RNA, 19 nt, Artificial Sequence
  Description of Artificial Sequence: Synthetic oligonucleotide
  Antisense strand to SEQ ID NO: 685272
auuaaugauauucaguccu

SEQ ID NO: 685274 - RNA, 19 nt, Artificial Sequence
  Description of Artificial Sequence: Synthetic oligonucleotide
  Sense strand starting at position 3603 of SEQ ID NO: 586011
agaggagguuucuugccaa

SEQ ID NO: 685275 - RNA, 19 nt, Artificial Sequence
  Description of Artificial Sequence: Synthetic oligonucleotide
  Antisense strand to SEQ ID NO: 685274
uuggcaagaaaccuccucu

SEQ ID NO: 685276 - RNA, 19 nt, Artificial Sequence
  Description of Artificial Sequence: Synthetic oligonucleotide
  Sense strand starting at position 3606 of SEQ ID NO: 586011
ggagguuucuugccaaugu

SEQ ID NO: 685277 - RNA, 19 nt, Artificial Sequence
  Description of Artificial Sequence: Synthetic oligonucleotide
  Antisense strand to SEQ ID NO: 685276
acauuggcaagaaaccucc

SEQ ID NO: 685278 - RNA, 19 nt, Artificial Sequence
  Description of Artificial Sequence: Synthetic oligonucleotide
  Sense strand starting at position 3620 of SEQ ID NO: 586011
aauguuaucggcuauuauu

SEQ ID NO: 685279 - RNA, 19 nt, Artificial Sequence
  Description of Artificial Sequence: Synthetic oligonucleotide
  Antisense strand to SEQ ID NO: 685278
aauaauagccgauaacauu

SEQ ID NO: 685280 - RNA, 19 nt, Artificial Sequence
  Description of Artificial Sequence: Synthetic oligonucleotide
  Sense strand starting at position 3923 of SEQ ID NO: 586011
uguuuauccuuccuuguaa

SEQ ID NO: 685281 - RNA, 19 nt, Artificial Sequence
  Description of Artificial Sequence: Synthetic oligonucleotide
  Antisense strand to SEQ ID NO: 685280
uuacaaggaaggauaaaca

SEQ ID NO: 685282 - RNA, 19 nt, Artificial Sequence
  Description of Artificial Sequence: Synthetic oligonucleotide
  Sense strand starting at position 3924 of SEQ ID NO: 586011
guuuauccuuccuuguaau

SEQ ID NO: 685283 - RNA, 19 nt, Artificial Sequence
  Description of Artificial Sequence: Synthetic oligonucleotide
  Antisense strand to SEQ ID NO: 685282
auuacaaggaaggauaaac

SEQ ID NO: 685284 - RNA, 19 nt, Artificial Sequence
  Description of Artificial Sequence: Synthetic oligonucleotide
  Sense strand starting at position 3944 of SEQ ID NO: 586011
cuaagaaucugagacauau

SEQ ID NO: 685285 - RNA, 19 nt, Artificial Sequence
  Description of Artificial Sequence: Synthetic oligonucleotide
  Antisense strand to SEQ ID NO: 685284
auaugucucagauucuuag

SEQ ID NO: 685286 - RNA, 19 nt, Artificial Sequence
  Description of Artificial Sequence: Synthetic oligonucleotide
  Sense strand starting at position 338 of SEQ ID NO: 586012
ggaagcuuuguguggugaa

SEQ ID NO: 685287 - RNA, 19 nt, Artificial Sequence
  Description of Artificial Sequence: Synthetic oligonucleotide
  Antisense strand to SEQ ID NO: 685286
uucaccacacaaagcuucc

SEQ ID NO: 685288 - RNA, 19 nt, Artificial Sequence
  Description of Artificial Sequence: Synthetic oligonucleotide
  Sense strand starting at position 902 of SEQ ID NO: 586012
cggguagaccgcgauauuc

SEQ ID NO: 685289 - RNA, 19 nt, Artificial Sequence
  Description of Artificial Sequence: Synthetic oligonucleotide
  Antisense strand to SEQ ID NO: 685288
gaauaucgcggucuacccg

SEQ ID NO: 685290 - RNA, 19 nt, Artificial Sequence
  Description of Artificial Sequence: Synthetic oligonucleotide
  Sense strand starting at position 1749 of SEQ ID NO: 586012
cgcgauguucguucaggga

SEQ ID NO: 685291 - RNA, 19 nt, Artificial Sequence
  Description of Artificial Sequence: Synthetic oligonucleotide
  Antisense strand to SEQ ID NO: 685290
ucccugaacgaacaucgcg

SEQ ID NO: 685292 - RNA, 19 nt, Artificial Sequence
  Description of Artificial Sequence: Synthetic oligonucleotide
  Sense strand starting at position 2013 of SEQ ID NO: 586012
caccacggcuguuuauaaa

SEQ ID NO: 685293 - RNA, 19 nt, Artificial Sequence
  Description of Artificial Sequence: Synthetic oligonucleotide
  Antisense strand to SEQ ID NO: 685292
uuuauaaacagccguggug

SEQ ID NO: 685294 - RNA, 19 nt, Artificial Sequence
  Description of Artificial Sequence: Synthetic oligonucleotide
  Sense strand starting at position 2121 of SEQ ID NO: 586012
ccgggcucgucaucugaca

SEQ ID NO: 685295 - RNA, 19 nt, Artificial Sequence
  Description of Artificial Sequence: Synthetic oligonucleotide
  Antisense strand to SEQ ID NO: 685294
ugucagaugacgagcccgg

SEQ ID NO: 685296 - RNA, 19 nt, Artificial Sequence
  Description of Artificial Sequence: Synthetic oligonucleotide
  Sense strand starting at position 2289 of SEQ ID NO: 586012
caguguaaacacugaugca

SEQ ID NO: 685297 - RNA, 19 nt, Artificial Sequence
  Description of Artificial Sequence: Synthetic oligonucleotide
  Antisense strand to SEQ ID NO: 685296
ugcaucaguguuuacacug

SEQ ID NO: 685298 - RNA, 19 nt, Artificial Sequence
  Description of Artificial Sequence: Synthetic oligonucleotide
  Sense strand starting at position 2316 of SEQ ID NO: 586012
ugaagaaacuugcauagga

SEQ ID NO: 685299 - RNA, 19 nt, Artificial Sequence
  Description of Artificial Sequence: Synthetic oligonucleotide
  Antisense strand to SEQ ID NO: 685298
uccuaugcaaguuucuuca

SEQ ID NO: 685300 - RNA, 19 nt, Artificial Sequence
  Description of Artificial Sequence: Synthetic oligonucleotide
  Sense strand starting at position 2490 of SEQ ID NO: 586012
ugagguggucuuugaguau

SEQ ID NO: 685301 - RNA, 19 nt, Artificial Sequence
  Description of Artificial Sequence: Synthetic oligonucleotide
  Antisense strand to SEQ ID NO: 685300
auacucaaagaccaccuca

SEQ ID NO: 685302 - RNA, 19 nt, Artificial Sequence
  Description of Artificial Sequence: Synthetic oligonucleotide
  Sense strand starting at position 2493 of SEQ ID NO: 586012
gguggucuuugaguauauu

SEQ ID NO: 685303 - RNA, 19 nt, Artificial Sequence
  Description of Artificial Sequence: Synthetic oligonucleotide
  Antisense strand to SEQ ID NO: 685302
aauauacucaaagaccacc

SEQ ID NO: 685304 - RNA, 19 nt, Artificial Sequence
  Description of Artificial Sequence: Synthetic oligonucleotide
  Sense strand starting at position 2494 of SEQ ID NO: 586012
guggucuuugaguauauuc

SEQ ID NO: 685305 - RNA, 19 nt, Artificial Sequence
  Description of Artificial Sequence: Synthetic oligonucleotide
  Antisense strand to SEQ ID NO: 685304
gaauauacucaaagaccac

SEQ ID NO: 685306 - RNA, 19 nt, Artificial Sequence
  Description of Artificial Sequence: Synthetic oligonucleotide
  Sense strand starting at position 2496 of SEQ ID NO: 586012
ggucuuugaguauauucua

SEQ ID NO: 685307 - RNA, 19 nt, Artificial Sequence
  Description of Artificial Sequence: Synthetic oligonucleotide
  Antisense strand to SEQ ID NO: 685306
uagaauauacucaaagacc

SEQ ID NO: 685308 - RNA, 19 nt, Artificial Sequence
  Description of Artificial Sequence: Synthetic oligonucleotide
  Sense strand starting at position 2567 of SEQ ID NO: 586012
gagggcuaccgugaucaau

SEQ ID NO: 685309 - RNA, 19 nt, Artificial Sequence
  Description of Artificial Sequence: Synthetic oligonucleotide
  Antisense strand to SEQ ID NO: 685308
auugaucacgguagcccuc

SEQ ID NO: 685310 - RNA, 19 nt, Artificial Sequence
  Description of Artificial Sequence: Synthetic oligonucleotide
  Sense strand starting at position 2569 of SEQ ID NO: 586012
gggcuaccgugaucaauca

SEQ ID NO: 685311 - RNA, 19 nt, Artificial Sequence
  Description of Artificial Sequence: Synthetic oligonucleotide
  Antisense strand to SEQ ID NO: 685310
ugauugaucacgguagccc

SEQ ID NO: 685312 - RNA, 19 nt, Artificial Sequence
  Description of Artificial Sequence: Synthetic oligonucleotide
  Sense strand starting at position 2570 of SEQ ID NO: 586012
ggcuaccgugaucaaucau

SEQ ID NO: 685313 - RNA, 19 nt, Artificial Sequence
  Description of Artificial Sequence: Synthetic oligonucleotide
  Antisense strand to SEQ ID NO: 685312
augauugaucacgguagcc

SEQ ID NO: 685314 - RNA, 19 nt, Artificial Sequence
  Description of Artificial Sequence: Synthetic oligonucleotide
  Sense strand starting at position 2585 of SEQ ID NO: 586012
ucaugaugugaucaguugu

SEQ ID NO: 685315 - RNA, 19 nt, Artificial Sequence
  Description of Artificial Sequence: Synthetic oligonucleotide
  Antisense strand to SEQ ID NO: 685314
acaacugaucacaucauga

SEQ ID NO: 685316 - RNA, 19 nt, Artificial Sequence
  Description of Artificial Sequence: Synthetic oligonucleotide
  Sense strand starting at position 2592 of SEQ ID NO: 586012
gugaucaguuguguuucca

SEQ ID NO: 685317 - RNA, 19 nt, Artificial Sequence
  Description of Artificial Sequence: Synthetic oligonucleotide
  Antisense strand to SEQ ID NO: 685316
uggaaacacaacugaucac

SEQ ID NO: 685318 - RNA, 19 nt, Artificial Sequence
  Description of Artificial Sequence: Synthetic oligonucleotide
  Sense strand starting at position 2596 of SEQ ID NO: 586012
ucaguuguguuuccaugga

SEQ ID NO: 685319 - RNA, 19 nt, Artificial Sequence
  Description of Artificial Sequence: Synthetic oligonucleotide
  Antisense strand to SEQ ID NO: 685318
uccauggaaacacaacuga

SEQ ID NO: 685320 - RNA, 19 nt, Artificial Sequence
  Description of Artificial Sequence: Synthetic oligonucleotide
  Sense strand starting at position 2600 of SEQ ID NO: 586012
uuguguuuccauggagagc

SEQ ID NO: 685321 - RNA, 19 nt, Artificial Sequence
  Description of Artificial Sequence: Synthetic oligonucleotide
  Antisense strand to SEQ ID NO: 685320
gcucuccauggaaacacaa

SEQ ID NO: 685322 - RNA, 19 nt, Artificial Sequence
  Description of Artificial Sequence: Synthetic oligonucleotide
  Sense strand starting at position 2601 of SEQ ID NO: 586012
uguguuuccauggagagca

SEQ ID NO: 685323 - RNA, 19 nt, Artificial Sequence
  Description of Artificial Sequence: Synthetic oligonucleotide
  Antisense strand to SEQ ID NO: 685322
ugcucuccauggaaacaca

SEQ ID NO: 685324 - RNA, 19 nt, Artificial Sequence
  Description of Artificial Sequence: Synthetic oligonucleotide
  Sense strand starting at position 2626 of SEQ ID NO: 586012
gagggaagagucuacgcau

SEQ ID NO: 685325 - RNA, 19 nt, Artificial Sequence
  Description of Artificial Sequence: Synthetic oligonucleotide
  Antisense strand to SEQ ID NO: 685324
augcguagacucuucccuc

SEQ ID NO: 685326 - RNA, 19 nt, Artificial Sequence
  Description of Artificial Sequence: Synthetic oligonucleotide
  Sense strand starting at position 2668 of SEQ ID NO: 586012
acccuucugugucuaacaa

SEQ ID NO: 685327 - RNA, 19 nt, Artificial Sequence
  Description of Artificial Sequence: Synthetic oligonucleotide
  Antisense strand to SEQ ID NO: 685326
uuguuagacacagaagggu

SEQ ID NO: 685328 - RNA, 19 nt, Artificial Sequence
  Description of Artificial Sequence: Synthetic oligonucleotide
  Sense strand starting at position 2688 of SEQ ID NO: 586012
acccaaauccguggcugua

SEQ ID NO: 685329 - RNA, 19 nt, Artificial Sequence
  Description of Artificial Sequence: Synthetic oligonucleotide
  Antisense strand to SEQ ID NO: 685328
uacagccacggauuugggu

SEQ ID NO: 685330 - RNA, 19 nt, Artificial Sequence
  Description of Artificial Sequence: Synthetic oligonucleotide
  Sense strand starting at position 2766 of SEQ ID NO: 586012
agugcauccuccucugagu

SEQ ID NO: 685331 - RNA, 19 nt, Artificial Sequence
  Description of Artificial Sequence: Synthetic oligonucleotide
  Antisense strand to SEQ ID NO: 685330
acucagaggaggaugcacu

SEQ ID NO: 685332 - RNA, 19 nt, Artificial Sequence
  Description of Artificial Sequence: Synthetic oligonucleotide
  Sense strand starting at position 2775 of SEQ ID NO: 586012
uccucugagucaccaugaa

SEQ ID NO: 685333 - RNA, 19 nt, Artificial Sequence
  Description of Artificial Sequence: Synthetic oligonucleotide
  Antisense strand to SEQ ID NO: 685332
uucauggugacucagagga

SEQ ID NO: 685334 - RNA, 19 nt, Artificial Sequence
  Description of Artificial Sequence: Synthetic oligonucleotide
  Sense strand starting at position 2798 of SEQ ID NO: 586012
ucuagaucugcggguagaa

SEQ ID NO: 685335 - RNA, 19 nt, Artificial Sequence
  Description of Artificial Sequence: Synthetic oligonucleotide
  Antisense strand to SEQ ID NO: 685334
uucuacccgcagaucuaga

SEQ ID NO: 685336 - RNA, 19 nt, Artificial Sequence
  Description of Artificial Sequence: Synthetic oligonucleotide
  Sense strand starting at position 2859 of SEQ ID NO: 586012
gagggcuuagccugcagua

SEQ ID NO: 685337 - RNA, 19 nt, Artificial Sequence
  Description of Artificial Sequence: Synthetic oligonucleotide
  Antisense strand to SEQ ID NO: 685336
uacugcaggcuaagcccuc

SEQ ID NO: 685338 - RNA, 19 nt, Artificial Sequence
  Description of Artificial Sequence: Synthetic oligonucleotide
  Sense strand starting at position 3103 of SEQ ID NO: 586012
cagccaucucugugacuga

SEQ ID NO: 685339 - RNA, 19 nt, Artificial Sequence
  Description of Artificial Sequence: Synthetic oligonucleotide
  Antisense strand to SEQ ID NO: 685338
ucagucacagagauggcug

SEQ ID NO: 685340 - RNA, 19 nt, Artificial Sequence
  Description of Artificial Sequence: Synthetic oligonucleotide
  Sense strand starting at position 3141 of SEQ ID NO: 586012
aagguucuggccugaugca

SEQ ID NO: 685341 - RNA, 19 nt, Artificial Sequence
  Description of Artificial Sequence: Synthetic oligonucleotide
  Antisense strand to SEQ ID NO: 685340
ugcaucaggccagaaccuu

SEQ ID NO: 685342 - RNA, 19 nt, Artificial Sequence
  Description of Artificial Sequence: Synthetic oligonucleotide
  Sense strand starting at position 3223 of SEQ ID NO: 586012
gugggcaguucucagauuu

SEQ ID NO: 685343 - RNA, 19 nt, Artificial Sequence
  Description of Artificial Sequence: Synthetic oligonucleotide
  Antisense strand to SEQ ID NO: 685342
aaaucugagaacugcccac

SEQ ID NO: 685344 - RNA, 19 nt, Artificial Sequence
  Description of Artificial Sequence: Synthetic oligonucleotide
  Sense strand starting at position 3321 of SEQ ID NO: 586012
agguuaguccuaggaggag

SEQ ID NO: 685345 - RNA, 19 nt, Artificial Sequence
  Description of Artificial Sequence: Synthetic oligonucleotide
  Antisense strand to SEQ ID NO: 685344
cuccuccuaggacuaaccu

SEQ ID NO: 685346 - RNA, 19 nt, Artificial Sequence
  Description of Artificial Sequence: Synthetic oligonucleotide
  Sense strand starting at position 3564 of SEQ ID NO: 586012
gcccaaagguuauuguaau

SEQ ID NO: 685347 - RNA, 19 nt, Artificial Sequence
  Description of Artificial Sequence: Synthetic oligonucleotide
  Antisense strand to SEQ ID NO: 685346
auuacaauaaccuuugggc

SEQ ID NO: 685348 - RNA, 19 nt, Artificial Sequence
  Description of Artificial Sequence: Synthetic oligonucleotide
  Sense strand starting at position 3576 of SEQ ID NO: 586012
uuguaauggccgggaucua

SEQ ID NO: 685349 - RNA, 19 nt, Artificial Sequence
  Description of Artificial Sequence: Synthetic oligonucleotide
  Antisense strand to SEQ ID NO: 685348
uagaucccggccauuacaa

SEQ ID NO: 685350 - RNA, 19 nt, Artificial Sequence
  Description of Artificial Sequence: Synthetic oligonucleotide
  Sense strand starting at position 3624 of SEQ ID NO: 586012
cucauauuguggcugaaua

SEQ ID NO: 685351 - RNA, 19 nt, Artificial Sequence
  Description of Artificial Sequence: Synthetic oligonucleotide
  Antisense strand to SEQ ID NO: 685350
uauucagccacaauaugag

SEQ ID NO: 685352 - RNA, 19 nt, Artificial Sequence
  Description of Artificial Sequence: Synthetic oligonucleotide
  Sense strand starting at position 3625 of SEQ ID NO: 586012
ucauauuguggcugaauau

SEQ ID NO: 685353 - RNA, 19 nt, Artificial Sequence
  Description of Artificial Sequence: Synthetic oligonucleotide
  Antisense strand to SEQ ID NO: 685352
auauucagccacaauauga

SEQ ID NO: 685354 - RNA, 19 nt, Artificial Sequence
  Description of Artificial Sequence: Synthetic oligonucleotide
  Sense strand starting at position 3626 of SEQ ID NO: 586012
cauauuguggcugaauauu

SEQ ID NO: 685355 - RNA, 19 nt, Artificial Sequence
  Description of Artificial Sequence: Synthetic oligonucleotide
  Antisense strand to SEQ ID NO: 685354
aauauucagccacaauaug

SEQ ID NO: 685356 - RNA, 19 nt, Artificial Sequence
  Description of Artificial Sequence: Synthetic oligonucleotide
  Sense strand starting at position 3634 of SEQ ID NO: 586012
ggcugaauauuccugugca

SEQ ID NO: 685357 - RNA, 19 nt, Artificial Sequence
  Description of Artificial Sequence: Synthetic oligonucleotide
  Antisense strand to SEQ ID NO: 685356
ugcacaggaauauucagcc

SEQ ID NO: 685358 - RNA, 19 nt, Artificial Sequence
  Description of Artificial Sequence: Synthetic oligonucleotide
  Sense strand starting at position 3637 of SEQ ID NO: 586012
ugaauauuccugugcaagc

SEQ ID NO: 685359 - RNA, 19 nt, Artificial Sequence
  Description of Artificial Sequence: Synthetic oligonucleotide
  Antisense strand to SEQ ID NO: 685358
gcuugcacaggaauauuca

SEQ ID NO: 685360 - RNA, 19 nt, Artificial Sequence
  Description of Artificial Sequence: Synthetic oligonucleotide
  Sense strand starting at position 3638 of SEQ ID NO: 586012
gaauauuccugugcaagcu

SEQ ID NO: 685361 - RNA, 19 nt, Artificial Sequence
  Description of Artificial Sequence: Synthetic oligonucleotide
  Antisense strand to SEQ ID NO: 685360
agcuugcacaggaauauuc

SEQ ID NO: 685362 - RNA, 19 nt, Artificial Sequence
  Description of Artificial Sequence: Synthetic oligonucleotide
  Sense strand starting at position 3660 of SEQ ID NO: 586012
ucagcuuucugggugugga

SEQ ID NO: 685363 - RNA, 19 nt, Artificial Sequence
  Description of Artificial Sequence: Synthetic oligonucleotide
  Antisense strand to SEQ ID NO: 685362
uccacacccagaaagcuga

SEQ ID NO: 685364 - RNA, 19 nt, Artificial Sequence
  Description of Artificial Sequence: Synthetic oligonucleotide
  Sense strand starting at position 3661 of SEQ ID NO: 586012
cagcuuucuggguguggau

SEQ ID NO: 685365 - RNA, 19 nt, Artificial Sequence
  Description of Artificial Sequence: Synthetic oligonucleotide
  Antisense strand to SEQ ID NO: 685364
auccacacccagaaagcug

SEQ ID NO: 685366 - RNA, 19 nt, Artificial Sequence
  Description of Artificial Sequence: Synthetic oligonucleotide
  Sense strand starting at position 75 of SEQ ID NO: 586013
agguacauguggucacaau

SEQ ID NO: 685367 - RNA, 19 nt, Artificial Sequence
  Description of Artificial Sequence: Synthetic oligonucleotide
  Antisense strand to SEQ ID NO: 685366
auugugaccacauguaccu

SEQ ID NO: 685368 - RNA, 19 nt, Artificial Sequence
  Description of Artificial Sequence: Synthetic oligonucleotide
  Sense strand starting at position 76 of SEQ ID NO: 586013
gguacauguggucacaaug

SEQ ID NO: 685369 - RNA, 19 nt, Artificial Sequence
  Description of Artificial Sequence: Synthetic oligonucleotide
  Antisense strand to SEQ ID NO: 685368
cauugugaccacauguacc

SEQ ID NO: 685370 - RNA, 19 nt, Artificial Sequence
  Description of Artificial Sequence: Synthetic oligonucleotide
  Sense strand starting at position 88 of SEQ ID NO: 586013
cacaaugucuaauuggaga

SEQ ID NO: 685371 - RNA, 19 nt, Artificial Sequence
  Description of Artificial Sequence: Synthetic oligonucleotide
  Antisense strand to SEQ ID NO: 685370
ucuccaauuagacauugug

SEQ ID NO: 685372 - RNA, 19 nt, Artificial Sequence
  Description of Artificial Sequence: Synthetic oligonucleotide
  Sense strand starting at position 274 of SEQ ID NO: 586013
gaagcuuagggaugccuau

SEQ ID NO: 685373 - RNA, 19 nt, Artificial Sequence
  Description of Artificial Sequence: Synthetic oligonucleotide
  Antisense strand to SEQ ID NO: 685372
auaggcaucccuaagcuuc

SEQ ID NO: 685374 - RNA, 19 nt, Artificial Sequence
  Description of Artificial Sequence: Synthetic oligonucleotide
  Sense strand starting at position 303 of SEQ ID NO: 586013
cucagagcugcccauuacu

SEQ ID NO: 685375 - RNA, 19 nt, Artificial Sequence
  Description of Artificial Sequence: Synthetic oligonucleotide
  Antisense strand to SEQ ID NO: 685374
aguaaugggcagcucugag

SEQ ID NO: 685376 - RNA, 19 nt, Artificial Sequence
  Description of Artificial Sequence: Synthetic oligonucleotide
  Sense strand starting at position 335 of SEQ ID NO: 586013
cccucuaggucauuaggaa

SEQ ID NO: 685377 - RNA, 19 nt, Artificial Sequence
  Description of Artificial Sequence: Synthetic oligonucleotide
  Antisense strand to SEQ ID NO: 685376
uuccuaaugaccuagaggg

SEQ ID NO: 685378 - RNA, 19 nt, Artificial Sequence
  Description of Artificial Sequence: Synthetic oligonucleotide
  Sense strand starting at position 350 of SEQ ID NO: 586013
ggaaguuaggcccagcagu

SEQ ID NO: 685379 - RNA, 19 nt, Artificial Sequence
  Description of Artificial Sequence: Synthetic oligonucleotide
  Antisense strand to SEQ ID NO: 685378
acugcugggccuaacuucc

SEQ ID NO: 685380 - RNA, 19 nt, Artificial Sequence
  Description of Artificial Sequence: Synthetic oligonucleotide
  Sense strand starting at position 913 of SEQ ID NO: 586013
gacuauucucuaugacgcu

SEQ ID NO: 685381 - RNA, 19 nt, Artificial Sequence
  Description of Artificial Sequence: Synthetic oligonucleotide
  Antisense strand to SEQ ID NO: 685380
agcgucauagagaauaguc

SEQ ID NO: 685382 - RNA, 19 nt, Artificial Sequence
  Description of Artificial Sequence: Synthetic oligonucleotide
  Sense strand starting at position 984 of SEQ ID NO: 586013
gccucuacucaccagaguu

SEQ ID NO: 685383 - RNA, 19 nt, Artificial Sequence
  Description of Artificial Sequence: Synthetic oligonucleotide
  Antisense strand to SEQ ID NO: 685382
aacucuggugaguagaggc

SEQ ID NO: 685384 - RNA, 19 nt, Artificial Sequence
  Description of Artificial Sequence: Synthetic oligonucleotide
  Sense strand starting at position 996 of SEQ ID NO: 586013
cagaguucccagggucauc

SEQ ID NO: 685385 - RNA, 19 nt, Artificial Sequence
  Description of Artificial Sequence: Synthetic oligonucleotide
  Antisense strand to SEQ ID NO: 685384
gaugacccugggaacucug

SEQ ID NO: 685386 - RNA, 19 nt, Artificial Sequence
  Description of Artificial Sequence: Synthetic oligonucleotide
  Sense strand starting at position 1005 of SEQ ID NO: 586013
cagggucauccuggaggaa

SEQ ID NO: 685387 - RNA, 19 nt, Artificial Sequence
  Description of Artificial Sequence: Synthetic oligonucleotide
  Antisense strand to SEQ ID NO: 685386
uuccuccaggaugacccug

SEQ ID NO: 685388 - RNA, 19 nt, Artificial Sequence
  Description of Artificial Sequence: Synthetic oligonucleotide
  Sense strand starting at position 1008 of SEQ ID NO: 586013
ggucauccuggaggaaaug

SEQ ID NO: 685389 - RNA, 19 nt, Artificial Sequence
  Description of Artificial Sequence: Synthetic oligonucleotide
  Antisense strand to SEQ ID NO: 685388
cauuuccuccaggaugacc

SEQ ID NO: 685390 - RNA, 19 nt, Artificial Sequence
  Description of Artificial Sequence: Synthetic oligonucleotide
  Sense strand starting at position 1019 of SEQ ID NO: 586013
aggaaauggugcuucccau

SEQ ID NO: 685391 - RNA, 19 nt, Artificial Sequence
  Description of Artificial Sequence: Synthetic oligonucleotide
  Antisense strand to SEQ ID NO: 685390
augggaagcaccauuuccu

SEQ ID NO: 685392 - RNA, 19 nt, Artificial Sequence
  Description of Artificial Sequence: Synthetic oligonucleotide
  Sense strand starting at position 1082 of SEQ ID NO: 586013
ggguguguccucaggcaag

SEQ ID NO: 685393 - RNA, 19 nt, Artificial Sequence
  Description of Artificial Sequence: Synthetic oligonucleotide
  Antisense strand to SEQ ID NO: 685392
cuugccugaggacacaccc

SEQ ID NO: 685394 - RNA, 19 nt, Artificial Sequence
  Description of Artificial Sequence: Synthetic oligonucleotide
  Sense strand starting at position 1330 of SEQ ID NO: 586013
ggaggguuuguguggugga

SEQ ID NO: 685395 - RNA, 19 nt, Artificial Sequence
  Description of Artificial Sequence: Synthetic oligonucleotide
  Antisense strand to SEQ ID NO: 685394
uccaccacacaaacccucc

SEQ ID NO: 685396 - RNA, 19 nt, Artificial Sequence
  Description of Artificial Sequence: Synthetic oligonucleotide
  Sense strand starting at position 2004 of SEQ ID NO: 586013
cgucacgcggcuagaaaua

SEQ ID NO: 685397 - RNA, 19 nt, Artificial Sequence
  Description of Artificial Sequence: Synthetic oligonucleotide
  Antisense strand to SEQ ID NO: 685396
uauuucuagccgcgugacg

SEQ ID NO: 685398 - RNA, 19 nt, Artificial Sequence
  Description of Artificial Sequence: Synthetic oligonucleotide
  Sense strand starting at position 2009 of SEQ ID NO: 586013
cgcggcuagaaauaugauu

SEQ ID NO: 685399 - RNA, 19 nt, Artificial Sequence
  Description of Artificial Sequence: Synthetic oligonucleotide
  Antisense strand to SEQ ID NO: 685398
aaucauauuucuagccgcg

SEQ ID NO: 685400 - RNA, 19 nt, Artificial Sequence
  Description of Artificial Sequence: Synthetic oligonucleotide
  Sense strand starting at position 2130 of SEQ ID NO: 586013
cgguuccuuccacgacaga

SEQ ID NO: 685401 - RNA, 19 nt, Artificial Sequence
  Description of Artificial Sequence: Synthetic oligonucleotide
  Antisense strand to SEQ ID NO: 685400
ucugucguggaaggaaccg

SEQ ID NO: 685402 - RNA, 19 nt, Artificial Sequence
  Description of Artificial Sequence: Synthetic oligonucleotide
  Sense strand starting at position 2348 of SEQ ID NO: 586013
cccaguggacgugauuaca

SEQ ID NO: 685403 - RNA, 19 nt, Artificial Sequence
  Description of Artificial Sequence: Synthetic oligonucleotide
  Antisense strand to SEQ ID NO: 685402
uguaaucacguccacuggg

SEQ ID NO: 685404 - RNA, 19 nt, Artificial Sequence
  Description of Artificial Sequence: Synthetic oligonucleotide
  Sense strand starting at position 2729 of SEQ ID NO: 586013
caggguuccagagguuuaa

SEQ ID NO: 685405 - RNA, 19 nt, Artificial Sequence
  Description of Artificial Sequence: Synthetic oligonucleotide
  Antisense strand to SEQ ID NO: 685404
uuaaaccucuggaacccug

SEQ ID NO: 685406 - RNA, 19 nt, Artificial Sequence
  Description of Artificial Sequence: Synthetic oligonucleotide
  Sense strand starting at position 2771 of SEQ ID NO: 586013
acuggucaagaugguaaau

SEQ ID NO: 685407 - RNA, 19 nt, Artificial Sequence
  Description of Artificial Sequence: Synthetic oligonucleotide
  Antisense strand to SEQ ID NO: 685406
auuuaccaucuugaccagu

SEQ ID NO: 685408 - RNA, 19 nt, Artificial Sequence
  Description of Artificial Sequence: Synthetic oligonucleotide
  Sense strand starting at position 2964 of SEQ ID NO: 586013
uuagaaagcuccucagaga

SEQ ID NO: 685409 - RNA, 19 nt, Artificial Sequence
  Description of Artificial Sequence: Synthetic oligonucleotide
  Antisense strand to SEQ ID NO: 685408
ucucugaggagcuuucuaa

SEQ ID NO: 685410 - RNA, 19 nt, Artificial Sequence
  Description of Artificial Sequence: Synthetic oligonucleotide
  Sense strand starting at position 3065 of SEQ ID NO: 586013
gugaaaguuccuggugguu

SEQ ID NO: 685411 - RNA, 19 nt, Artificial Sequence
  Description of Artificial Sequence: Synthetic oligonucleotide
  Antisense strand to SEQ ID NO: 685410
aaccaccaggaacuuucac

SEQ ID NO: 685412 - RNA, 19 nt, Artificial Sequence
  Description of Artificial Sequence: Synthetic oligonucleotide
  Sense strand starting at position 3243 of SEQ ID NO: 586013
uccagaucucccuguguga

SEQ ID NO: 685413 - RNA, 19 nt, Artificial Sequence
  Description of Artificial Sequence: Synthetic oligonucleotide
  Antisense strand to SEQ ID NO: 685412
ucacacagggagaucugga

SEQ ID NO: 685414 - RNA, 19 nt, Artificial Sequence
  Description of Artificial Sequence: Synthetic oligonucleotide
  Sense strand starting at position 3245 of SEQ ID NO: 586013
cagaucucccugugugaca

SEQ ID NO: 685415 - RNA, 19 nt, Artificial Sequence
  Description of Artificial Sequence: Synthetic oligonucleotide
  Antisense strand to SEQ ID NO: 685414
ugucacacagggagaucug

SEQ ID NO: 685416 - RNA, 19 nt, Artificial Sequence
  Description of Artificial Sequence: Synthetic oligonucleotide
  Sense strand starting at position 3246 of SEQ ID NO: 586013
agaucucccugugugacaa

SEQ ID NO: 685417 - RNA, 19 nt, Artificial Sequence
  Description of Artificial Sequence: Synthetic oligonucleotide
  Antisense strand to SEQ ID NO: 685416
uugucacacagggagaucu

SEQ ID NO: 685418 - RNA, 19 nt, Artificial Sequence
  Description of Artificial Sequence: Synthetic oligonucleotide
  Sense strand starting at position 3257 of SEQ ID NO: 586013
ugugacaacugcucacaca

SEQ ID NO: 685419 - RNA, 19 nt, Artificial Sequence
  Description of Artificial Sequence: Synthetic oligonucleotide
  Antisense strand to SEQ ID NO: 685418
ugugugagcaguugucaca

SEQ ID NO: 685420 - RNA, 19 nt, Artificial Sequence
  Description of Artificial Sequence: Synthetic oligonucleotide
  Sense strand starting at position 3258 of SEQ ID NO: 586013
gugacaacugcucacacaa

SEQ ID NO: 685421 - RNA, 19 nt, Artificial Sequence
  Description of Artificial Sequence: Synthetic oligonucleotide
  Antisense strand to SEQ ID NO: 685420
uugugugagcaguugucac

SEQ ID NO: 685422 - RNA, 19 nt, Artificial Sequence
  Description of Artificial Sequence: Synthetic oligonucleotide
  Sense strand starting at position 3295 of SEQ ID NO: 586013
gcaugugugacagacucuu

SEQ ID NO: 685423 - RNA, 19 nt, Artificial Sequence
  Description of Artificial Sequence: Synthetic oligonucleotide
  Antisense strand to SEQ ID NO: 685422
aagagucugucacacaugc

SEQ ID NO: 685424 - RNA, 19 nt, Artificial Sequence
  Description of Artificial Sequence: Synthetic oligonucleotide
  Sense strand starting at position 3419 of SEQ ID NO: 586013
aagauagucugagccacua

SEQ ID NO: 685425 - RNA, 19 nt, Artificial Sequence
  Description of Artificial Sequence: Synthetic oligonucleotide
  Antisense strand to SEQ ID NO: 685424
uaguggcucagacuaucuu

SEQ ID NO: 685426 - RNA, 19 nt, Artificial Sequence
  Description of Artificial Sequence: Synthetic oligonucleotide
  Sense strand starting at position 3439 of SEQ ID NO: 586013
cugagccguccucuuguua

SEQ ID NO: 685427 - RNA, 19 nt, Artificial Sequence
  Description of Artificial Sequence: Synthetic oligonucleotide
  Antisense strand to SEQ ID NO: 685426
uaacaagaggacggcucag

SEQ ID NO: 685428 - RNA, 19 nt, Artificial Sequence
  Description of Artificial Sequence: Synthetic oligonucleotide
  Sense strand starting at position 3450 of SEQ ID NO: 586013
ucuuguuacuguuuccuau

SEQ ID NO: 685429 - RNA, 19 nt, Artificial Sequence
  Description of Artificial Sequence: Synthetic oligonucleotide
  Antisense strand to SEQ ID NO: 685428
auaggaaacaguaacaaga

SEQ ID NO: 685430 - RNA, 19 nt, Artificial Sequence
  Description of Artificial Sequence: Synthetic oligonucleotide
  Sense strand starting at position 3461 of SEQ ID NO: 586013
uuuccuaugcccuggcaga

SEQ ID NO: 685431 - RNA, 19 nt, Artificial Sequence
  Description of Artificial Sequence: Synthetic oligonucleotide
  Antisense strand to SEQ ID NO: 685430
ucugccagggcauaggaaa

SEQ ID NO: 685432 - RNA, 19 nt, Artificial Sequence
  Description of Artificial Sequence: Synthetic oligonucleotide
  Sense strand starting at position 3462 of SEQ ID NO: 586013
uuccuaugcccuggcagau

SEQ ID NO: 685433 - RNA, 19 nt, Artificial Sequence
  Description of Artificial Sequence: Synthetic oligonucleotide
  Antisense strand to SEQ ID NO: 685432
aucugccagggcauaggaa

SEQ ID NO: 685434 - RNA, 19 nt, Artificial Sequence
  Description of Artificial Sequence: Synthetic oligonucleotide
  Sense strand starting at position 3507 of SEQ ID NO: 586013
uaccaagcccuguguuaga

SEQ ID NO: 685435 - RNA, 19 nt, Artificial Sequence
  Description of Artificial Sequence: Synthetic oligonucleotide
  Antisense strand to SEQ ID NO: 685434
ucuaacacagggcuuggua

SEQ ID NO: 685436 - RNA, 19 nt, Artificial Sequence
  Description of Artificial Sequence: Synthetic oligonucleotide
  Sense strand starting at position 3570 of SEQ ID NO: 586013
gugaguuauucugccagga

SEQ ID NO: 685437 - RNA, 19 nt, Artificial Sequence
  Description of Artificial Sequence: Synthetic oligonucleotide
  Antisense strand to SEQ ID NO: 685436
uccuggcagaauaacucac

SEQ ID NO: 685438 - RNA, 19 nt, Artificial Sequence
  Description of Artificial Sequence: Synthetic oligonucleotide
  Sense strand starting at position 3585 of SEQ ID NO: 586013
aggauugggaacuguguua

SEQ ID NO: 685439 - RNA, 19 nt, Artificial Sequence
  Description of Artificial Sequence: Synthetic oligonucleotide
  Antisense strand to SEQ ID NO: 685438
uaacacaguucccaauccu

SEQ ID NO: 685440 - RNA, 19 nt, Artificial Sequence
  Description of Artificial Sequence: Synthetic oligonucleotide
  Sense strand starting at position 3592 of SEQ ID NO: 586013
ggaacuguguuacucagga

SEQ ID NO: 685441 - RNA, 19 nt, Artificial Sequence
  Description of Artificial Sequence: Synthetic oligonucleotide
  Antisense strand to SEQ ID NO: 685440
uccugaguaacacaguucc

SEQ ID NO: 685442 - RNA, 19 nt, Artificial Sequence
  Description of Artificial Sequence: Synthetic oligonucleotide
  Sense strand starting at position 3597 of SEQ ID NO: 586013
uguguuacucaggaaacuu

SEQ ID NO: 685443 - RNA, 19 nt, Artificial Sequence
  Description of Artificial Sequence: Synthetic oligonucleotide
  Antisense strand to SEQ ID NO: 685442
aaguuuccugaguaacaca

SEQ ID NO: 685444 - RNA, 19 nt, Artificial Sequence
  Description of Artificial Sequence: Synthetic oligonucleotide
  Sense strand starting at position 3782 of SEQ ID NO: 586013
acugcucucccaggaucau

SEQ ID NO: 685445 - RNA, 19 nt, Artificial Sequence
  Description of Artificial Sequence: Synthetic oligonucleotide
  Antisense strand to SEQ ID NO: 685444
augauccugggagagcagu

SEQ ID NO: 685446 - RNA, 19 nt, Artificial Sequence
  Description of Artificial Sequence: Synthetic oligonucleotide
  Sense strand starting at position 42 of SEQ ID NO: 586014
cccggauacuacuagauuu

SEQ ID NO: 685447 - RNA, 19 nt, Artificial Sequence
  Description of Artificial Sequence: Synthetic oligonucleotide
  Antisense strand to SEQ ID NO: 685446
aaaucuaguaguauccggg

SEQ ID NO: 685448 - RNA, 19 nt, Artificial Sequence
  Description of Artificial Sequence: Synthetic oligonucleotide
  Sense strand starting at position 177 of SEQ ID NO: 586014
cgcagaguccauuacuaga

SEQ ID NO: 685449 - RNA, 19 nt, Artificial Sequence
  Description of Artificial Sequence: Synthetic oligonucleotide
  Antisense strand to SEQ ID NO: 685448
ucuaguaauggacucugcg

SEQ ID NO: 685450 - RNA, 19 nt, Artificial Sequence
  Description of Artificial Sequence: Synthetic oligonucleotide
  Sense strand starting at position 355 of SEQ ID NO: 586014
gagcucuucccagggaugu

SEQ ID NO: 685451 - RNA, 19 nt, Artificial Sequence
  Description of Artificial Sequence: Synthetic oligonucleotide
  Antisense strand to SEQ ID NO: 685450
acaucccugggaagagcuc

SEQ ID NO: 685452 - RNA, 19 nt, Artificial Sequence
  Description of Artificial Sequence: Synthetic oligonucleotide
  Sense strand starting at position 357 of SEQ ID NO: 586014
gcucuucccagggauguga

SEQ ID NO: 685453 - RNA, 19 nt, Artificial Sequence
  Description of Artificial Sequence: Synthetic oligonucleotide
  Antisense strand to SEQ ID NO: 685452
ucacaucccugggaagagc

SEQ ID NO: 685454 - RNA, 19 nt, Artificial Sequence
  Description of Artificial Sequence: Synthetic oligonucleotide
  Sense strand starting at position 457 of SEQ ID NO: 586014
gagggaugugcuggguuca

SEQ ID NO: 685455 - RNA, 19 nt, Artificial Sequence
  Description of Artificial Sequence: Synthetic oligonucleotide
  Antisense strand to SEQ ID NO: 685454
ugaacccagcacaucccuc

SEQ ID NO: 685456 - RNA, 19 nt, Artificial Sequence
  Description of Artificial Sequence: Synthetic oligonucleotide
  Sense strand starting at position 458 of SEQ ID NO: 586014
agggaugugcuggguucau

SEQ ID NO: 685457 - RNA, 19 nt, Artificial Sequence
  Description of Artificial Sequence: Synthetic oligonucleotide
  Antisense strand to SEQ ID NO: 685456
augaacccagcacaucccu

SEQ ID NO: 685458 - RNA, 19 nt, Artificial Sequence
  Description of Artificial Sequence: Synthetic oligonucleotide
  Sense strand starting at position 560 of SEQ ID NO: 586014
guuugugcuggucauauga

SEQ ID NO: 685459 - RNA, 19 nt, Artificial Sequence
  Description of Artificial Sequence: Synthetic oligonucleotide
  Antisense strand to SEQ ID NO: 685458
ucauaugaccagcacaaac

SEQ ID NO: 685460 - RNA, 19 nt, Artificial Sequence
  Description of Artificial Sequence: Synthetic oligonucleotide
  Sense strand starting at position 604 of SEQ ID NO: 586014
cucuuauagcugggaugca

SEQ ID NO: 685461 - RNA, 19 nt, Artificial Sequence
  Description of Artificial Sequence: Synthetic oligonucleotide
  Antisense strand to SEQ ID NO: 685460
ugcaucccagcuauaagag

SEQ ID NO: 685462 - RNA, 19 nt, Artificial Sequence
  Description of Artificial Sequence: Synthetic oligonucleotide
  Sense strand starting at position 702 of SEQ ID NO: 586014
aagcaugugugguuggaaa

SEQ ID NO: 685463 - RNA, 19 nt, Artificial Sequence
  Description of Artificial Sequence: Synthetic oligonucleotide
  Antisense strand to SEQ ID NO: 685462
uuuccaaccacacaugcuu

SEQ ID NO: 685464 - RNA, 19 nt, Artificial Sequence
  Description of Artificial Sequence: Synthetic oligonucleotide
  Sense strand starting at position 1516 of SEQ ID NO: 586014
cugcuuagugacuauucua

SEQ ID NO: 685465 - RNA, 19 nt, Artificial Sequence
  Description of Artificial Sequence: Synthetic oligonucleotide
  Antisense strand to SEQ ID NO: 685464
uagaauagucacuaagcag

SEQ ID NO: 685466 - RNA, 19 nt, Artificial Sequence
  Description of Artificial Sequence: Synthetic oligonucleotide
  Sense strand starting at position 1519 of SEQ ID NO: 586014
cuuagugacuauucuauau

SEQ ID NO: 685467 - RNA, 19 nt, Artificial Sequence
  Description of Artificial Sequence: Synthetic oligonucleotide
  Antisense strand to SEQ ID NO: 685466
auauagaauagucacuaag

SEQ ID NO: 685468 - RNA, 19 nt, Artificial Sequence
  Description of Artificial Sequence: Synthetic oligonucleotide
  Sense strand starting at position 1523 of SEQ ID NO: 586014
gugacuauucuauaugacg

SEQ ID NO: 685469 - RNA, 19 nt, Artificial Sequence
  Description of Artificial Sequence: Synthetic oligonucleotide
  Antisense strand to SEQ ID NO: 685468
cgucauauagaauagucac

SEQ ID NO: 685470 - RNA, 19 nt, Artificial Sequence
  Description of Artificial Sequence: Synthetic oligonucleotide
  Sense strand starting at position 1828 of SEQ ID NO: 586014
aggcuucccuccucugaaa

SEQ ID NO: 685471 - RNA, 19 nt, Artificial Sequence
  Description of Artificial Sequence: Synthetic oligonucleotide
  Antisense strand to SEQ ID NO: 685470
uuucagaggagggaagccu

SEQ ID NO: 685472 - RNA, 19 nt, Artificial Sequence
  Description of Artificial Sequence: Synthetic oligonucleotide
  Sense strand starting at position 2041 of SEQ ID NO: 586014
uggagaccagcguaugaau

SEQ ID NO: 685473 - RNA, 19 nt, Artificial Sequence
  Description of Artificial Sequence: Synthetic oligonucleotide
  Antisense strand to SEQ ID NO: 685472
auucauacgcuggucucca

SEQ ID NO: 685474 - RNA, 19 nt, Artificial Sequence
  Description of Artificial Sequence: Synthetic oligonucleotide
  Sense strand starting at position 2043 of SEQ ID NO: 586014
gagaccagcguaugaauca

SEQ ID NO: 685475 - RNA, 19 nt, Artificial Sequence
  Description of Artificial Sequence: Synthetic oligonucleotide
  Antisense strand to SEQ ID NO: 685474
ugauucauacgcuggucuc

SEQ ID NO: 685476 - RNA, 19 nt, Artificial Sequence
  Description of Artificial Sequence: Synthetic oligonucleotide
  Sense strand starting at position 2335 of SEQ ID NO: 586014
ggacacgauuccuucuuga

SEQ ID NO: 685477 - RNA, 19 nt, Artificial Sequence
  Description of Artificial Sequence: Synthetic oligonucleotide
  Antisense strand to SEQ ID NO: 685476
ucaagaaggaaucgugucc

SEQ ID NO: 685478 - RNA, 19 nt, Artificial Sequence
  Description of Artificial Sequence: Synthetic oligonucleotide
  Sense strand starting at position 2350 of SEQ ID NO: 586014
uugaccgccucauuuaauu

SEQ ID NO: 685479 - RNA, 19 nt, Artificial Sequence
  Description of Artificial Sequence: Synthetic oligonucleotide
  Antisense strand to SEQ ID NO: 685478
aauuaaaugaggcggucaa

SEQ ID NO: 685480 - RNA, 19 nt, Artificial Sequence
  Description of Artificial Sequence: Synthetic oligonucleotide
  Sense strand starting at position 2395 of SEQ ID NO: 586014
caauguaagcacugaugca

SEQ ID NO: 685481 - RNA, 19 nt, Artificial Sequence
  Description of Artificial Sequence: Synthetic oligonucleotide
  Antisense strand to SEQ ID NO: 685480
ugcaucagugcuuacauug

SEQ ID NO: 685482 - RNA, 19 nt, Artificial Sequence
  Description of Artificial Sequence: Synthetic oligonucleotide
  Sense strand starting at position 2689 of SEQ ID NO: 586014
uaccgugaucagugaucaa

SEQ ID NO: 685483 - RNA, 19 nt, Artificial Sequence
  Description of Artificial Sequence: Synthetic oligonucleotide
  Antisense strand to SEQ ID NO: 685482
uugaucacugaucacggua

SEQ ID NO: 685484 - RNA, 19 nt, Artificial Sequence
  Description of Artificial Sequence: Synthetic oligonucleotide
  Sense strand starting at position 2692 of SEQ ID NO: 586014
cgugaucagugaucaaaug

SEQ ID NO: 685485 - RNA, 19 nt, Artificial Sequence
  Description of Artificial Sequence: Synthetic oligonucleotide
  Antisense strand to SEQ ID NO: 685484
cauuugaucacugaucacg

SEQ ID NO: 685486 - RNA, 19 nt, Artificial Sequence
  Description of Artificial Sequence: Synthetic oligonucleotide
  Sense strand starting at position 2708 of SEQ ID NO: 586014
augaucaauuguguuucca

SEQ ID NO: 685487 - RNA, 19 nt, Artificial Sequence
  Description of Artificial Sequence: Synthetic oligonucleotide
  Antisense strand to SEQ ID NO: 685486
uggaaacacaauugaucau

SEQ ID NO: 685488 - RNA, 19 nt, Artificial Sequence
  Description of Artificial Sequence: Synthetic oligonucleotide
  Sense strand starting at position 2894 of SEQ ID NO: 586014
cucagucaccauggaaaca

SEQ ID NO: 685489 - RNA, 19 nt, Artificial Sequence
  Description of Artificial Sequence: Synthetic oligonucleotide
  Antisense strand to SEQ ID NO: 685488
uguuuccauggugacugag

SEQ ID NO: 685490 - RNA, 19 nt, Artificial Sequence
  Description of Artificial Sequence: Synthetic oligonucleotide
  Sense strand starting at position 2976 of SEQ ID NO: 586014
gggcuuuagccugggauga

SEQ ID NO: 685491 - RNA, 19 nt, Artificial Sequence
  Description of Artificial Sequence: Synthetic oligonucleotide
  Antisense strand to SEQ ID NO: 685490
ucaucccaggcuaaagccc

SEQ ID NO: 685492 - RNA, 19 nt, Artificial Sequence
  Description of Artificial Sequence: Synthetic oligonucleotide
  Sense strand starting at position 3004 of SEQ ID NO: 586014
agagaucuugagugccacu

SEQ ID NO: 685493 - RNA, 19 nt, Artificial Sequence
  Description of Artificial Sequence: Synthetic oligonucleotide
  Antisense strand to SEQ ID NO: 685492
aguggcacucaagaucucu

SEQ ID NO: 685494 - RNA, 19 nt, Artificial Sequence
  Description of Artificial Sequence: Synthetic oligonucleotide
  Sense strand starting at position 3113 of SEQ ID NO: 586014
gcaccuggugaucaucaau

SEQ ID NO: 685495 - RNA, 19 nt, Artificial Sequence
  Description of Artificial Sequence: Synthetic oligonucleotide
  Antisense strand to SEQ ID NO: 685494
auugaugaucaccaggugc

SEQ ID NO: 685496 - RNA, 19 nt, Artificial Sequence
  Description of Artificial Sequence: Synthetic oligonucleotide
  Sense strand starting at position 3257 of SEQ ID NO: 586014
agaagauucuggccugaug

SEQ ID NO: 685497 - RNA, 19 nt, Artificial Sequence
  Description of Artificial Sequence: Synthetic oligonucleotide
  Antisense strand to SEQ ID NO: 685496
caucaggccagaaucuucu

SEQ ID NO: 685498 - RNA, 19 nt, Artificial Sequence
  Description of Artificial Sequence: Synthetic oligonucleotide
  Sense strand starting at position 3259 of SEQ ID NO: 586014
aagauucuggccugaugca

SEQ ID NO: 685499 - RNA, 19 nt, Artificial Sequence
  Description of Artificial Sequence: Synthetic oligonucleotide
  Antisense strand to SEQ ID NO: 685498
ugcaucaggccagaaucuu

SEQ ID NO: 685500 - RNA, 19 nt, Artificial Sequence
  Description of Artificial Sequence: Synthetic oligonucleotide
  Sense strand starting at position 3309 of SEQ ID NO: 586014
aggguaguuuggaggacaa

SEQ ID NO: 685501 - RNA, 19 nt, Artificial Sequence
  Description of Artificial Sequence: Synthetic oligonucleotide
  Antisense strand to SEQ ID NO: 685500
uuguccuccaaacuacccu

SEQ ID NO: 685502 - RNA, 19 nt, Artificial Sequence
  Description of Artificial Sequence: Synthetic oligonucleotide
  Sense strand starting at position 3438 of SEQ ID NO: 586014
cagguuaguccugggagga

SEQ ID NO: 685503 - RNA, 19 nt, Artificial Sequence
  Description of Artificial Sequence: Synthetic oligonucleotide
  Antisense strand to SEQ ID NO: 685502
uccucccaggacuaaccug

SEQ ID NO: 685504 - RNA, 19 nt, Artificial Sequence
  Description of Artificial Sequence: Synthetic oligonucleotide
  Sense strand starting at position 3439 of SEQ ID NO: 586014
agguuaguccugggaggag

SEQ ID NO: 685505 - RNA, 19 nt, Artificial Sequence
  Description of Artificial Sequence: Synthetic oligonucleotide
  Antisense strand to SEQ ID NO: 685504
cuccucccaggacuaaccu

SEQ ID NO: 685506 - RNA, 19 nt, Artificial Sequence
  Description of Artificial Sequence: Synthetic oligonucleotide
  Sense strand starting at position 3620 of SEQ ID NO: 586014
caggcaucuggccaacaga

SEQ ID NO: 685507 - RNA, 19 nt, Artificial Sequence
  Description of Artificial Sequence: Synthetic oligonucleotide
  Antisense strand to SEQ ID NO: 685506
ucuguuggccagaugccug

SEQ ID NO: 685508 - RNA, 19 nt, Artificial Sequence
  Description of Artificial Sequence: Synthetic oligonucleotide
  Sense strand starting at position 3661 of SEQ ID NO: 586014
auagaaguggcccaaaugu

SEQ ID NO: 685509 - RNA, 19 nt, Artificial Sequence
  Description of Artificial Sequence: Synthetic oligonucleotide
  Antisense strand to SEQ ID NO: 685508
acauuugggccacuucuau

SEQ ID NO: 685510 - RNA, 19 nt, Artificial Sequence
  Description of Artificial Sequence: Synthetic oligonucleotide
  Sense strand starting at position 3670 of SEQ ID NO: 586014
gcccaaauguuauuguaau

SEQ ID NO: 685511 - RNA, 19 nt, Artificial Sequence
  Description of Artificial Sequence: Synthetic oligonucleotide
  Antisense strand to SEQ ID NO: 685510
auuacaauaacauuugggc

SEQ ID NO: 685512 - RNA, 19 nt, Artificial Sequence
  Description of Artificial Sequence: Synthetic oligonucleotide
  Sense strand starting at position 3682 of SEQ ID NO: 586014
uuguaauggccgggaucua

SEQ ID NO: 685513 - RNA, 19 nt, Artificial Sequence
  Description of Artificial Sequence: Synthetic oligonucleotide
  Antisense strand to SEQ ID NO: 685512
uagaucccggccauuacaa

SEQ ID NO: 685514 - RNA, 19 nt, Artificial Sequence
  Description of Artificial Sequence: Synthetic oligonucleotide
  Sense strand starting at position 3730 of SEQ ID NO: 586014
cugauauuguggcugaaua

SEQ ID NO: 685515 - RNA, 19 nt, Artificial Sequence
  Description of Artificial Sequence: Synthetic oligonucleotide
  Antisense strand to SEQ ID NO: 685514
uauucagccacaauaucag

SEQ ID NO: 685516 - RNA, 19 nt, Artificial Sequence
  Description of Artificial Sequence: Synthetic oligonucleotide
  Sense strand starting at position 3731 of SEQ ID NO: 586014
ugauauuguggcugaauau

SEQ ID NO: 685517 - RNA, 19 nt, Artificial Sequence
  Description of Artificial Sequence: Synthetic oligonucleotide
  Antisense strand to SEQ ID NO: 685516
auauucagccacaauauca

SEQ ID NO: 685518 - RNA, 19 nt, Artificial Sequence
  Description of Artificial Sequence: Synthetic oligonucleotide
  Sense strand starting at position 3732 of SEQ ID NO: 586014
gauauuguggcugaauauu

SEQ ID NO: 685519 - RNA, 19 nt, Artificial Sequence
  Description of Artificial Sequence: Synthetic oligonucleotide
  Antisense strand to SEQ ID NO: 685518
aauauucagccacaauauc

SEQ ID NO: 685520 - RNA, 19 nt, Artificial Sequence
  Description of Artificial Sequence: Synthetic oligonucleotide
  Sense strand starting at position 3743 of SEQ ID NO: 586014
ugaauauuccugugcaagc

SEQ ID NO: 685521 - RNA, 19 nt, Artificial Sequence
  Description of Artificial Sequence: Synthetic oligonucleotide
  Antisense strand to SEQ ID NO: 685520
gcuugcacaggaauauuca

SEQ ID NO: 685522 - RNA, 19 nt, Artificial Sequence
  Description of Artificial Sequence: Synthetic oligonucleotide
  Sense strand starting at position 3744 of SEQ ID NO: 586014
gaauauuccugugcaagcu

SEQ ID NO: 685523 - RNA, 19 nt, Artificial Sequence
  Description of Artificial Sequence: Synthetic oligonucleotide
  Antisense strand to SEQ ID NO: 685522
agcuugcacaggaauauuc

SEQ ID NO: 685524 - RNA, 19 nt, Artificial Sequence
  Description of Artificial Sequence: Synthetic oligonucleotide
  Sense strand starting at position 3769 of SEQ ID NO: 586014
gcuuucuaggaauggaugu

SEQ ID NO: 685525 - RNA, 19 nt, Artificial Sequence
  Description of Artificial Sequence: Synthetic oligonucleotide
  Antisense strand to SEQ ID NO: 685524
acauccauuccuagaaagc

SEQ ID NO: 685526 - RNA, 19 nt, Artificial Sequence
  Description of Artificial Sequence: Synthetic oligonucleotide
  Sense strand starting at position 94 of SEQ ID NO: 586015
cgucuuauuccgcucucaa

SEQ ID NO: 685527 - RNA, 19 nt, Artificial Sequence
  Description of Artificial Sequence: Synthetic oligonucleotide
  Antisense strand to SEQ ID NO: 685526
uugagagcggaauaagacg

SEQ ID NO: 685528 - RNA, 19 nt, Artificial Sequence
  Description of Artificial Sequence: Synthetic oligonucleotide
  Sense strand starting at position 130 of SEQ ID NO: 586015
ggaauucauuggcuuggua

SEQ ID NO: 685529 - RNA, 19 nt, Artificial Sequence
  Description of Artificial Sequence: Synthetic oligonucleotide
  Antisense strand to SEQ ID NO: 685528
uaccaagccaaugaauucc

SEQ ID NO: 685530 - RNA, 19 nt, Artificial Sequence
  Description of Artificial Sequence: Synthetic oligonucleotide
  Sense strand starting at position 374 of SEQ ID NO: 586015
uccacuguauccucaggau

SEQ ID NO: 685531 - RNA, 19 nt, Artificial Sequence
  Description of Artificial Sequence: Synthetic oligonucleotide
  Antisense strand to SEQ ID NO: 685530
auccugaggauacagugga

SEQ ID NO: 685532 - RNA, 19 nt, Artificial Sequence
  Description of Artificial Sequence: Synthetic oligonucleotide
  Sense strand starting at position 420 of SEQ ID NO: 586015
ccauguccucacugaaagu

SEQ ID NO: 685533 - RNA, 19 nt, Artificial Sequence
  Description of Artificial Sequence: Synthetic oligonucleotide
  Antisense strand to SEQ ID NO: 685532
acuuucagugaggacaugg

SEQ ID NO: 685534 - RNA, 19 nt, Artificial Sequence
  Description of Artificial Sequence: Synthetic oligonucleotide
  Sense strand starting at position 465 of SEQ ID NO: 586015
guucucuuugccuaaagag

SEQ ID NO: 685535 - RNA, 19 nt, Artificial Sequence
  Description of Artificial Sequence: Synthetic oligonucleotide
  Antisense strand to SEQ ID NO: 685534
cucuuuaggcaaagagaac

SEQ ID NO: 685536 - RNA, 19 nt, Artificial Sequence
  Description of Artificial Sequence: Synthetic oligonucleotide
  Sense strand starting at position 538 of SEQ ID NO: 586015
acaggugaaucagugaauu

SEQ ID NO: 685537 - RNA, 19 nt, Artificial Sequence
  Description of Artificial Sequence: Synthetic oligonucleotide
  Antisense strand to SEQ ID NO: 685536
aauucacugauucaccugu

SEQ ID NO: 685538 - RNA, 19 nt, Artificial Sequence
  Description of Artificial Sequence: Synthetic oligonucleotide
  Sense strand starting at position 677 of SEQ ID NO: 586015
cuaacauucgcagagcuuu

SEQ ID NO: 685539 - RNA, 19 nt, Artificial Sequence
  Description of Artificial Sequence: Synthetic oligonucleotide
  Antisense strand to SEQ ID NO: 685538
aaagcucugcgaauguuag

SEQ ID NO: 685540 - RNA, 19 nt, Artificial Sequence
  Description of Artificial Sequence: Synthetic oligonucleotide
  Sense strand starting at position 683 of SEQ ID NO: 586015
uucgcagagcuuuacucaa

SEQ ID NO: 685541 - RNA, 19 nt, Artificial Sequence
  Description of Artificial Sequence: Synthetic oligonucleotide
  Antisense strand to SEQ ID NO: 685540
uugaguaaagcucugcgaa

SEQ ID NO: 685542 - RNA, 19 nt, Artificial Sequence
  Description of Artificial Sequence: Synthetic oligonucleotide
  Sense strand starting at position 755 of SEQ ID NO: 586015
gccuuaggagcgagguguu

SEQ ID NO: 685543 - RNA, 19 nt, Artificial Sequence
  Description of Artificial Sequence: Synthetic oligonucleotide
  Antisense strand to SEQ ID NO: 685542
aacaccucgcuccuaaggc

SEQ ID NO: 685544 - RNA, 19 nt, Artificial Sequence
  Description of Artificial Sequence: Synthetic oligonucleotide
  Sense strand starting at position 793 of SEQ ID NO: 586015
agauaaggaauccgagcuu

SEQ ID NO: 685545 - RNA, 19 nt, Artificial Sequence
  Description of Artificial Sequence: Synthetic oligonucleotide
  Antisense strand to SEQ ID NO: 685544
aagcucggauuccuuaucu

SEQ ID NO: 685546 - RNA, 19 nt, Artificial Sequence
  Description of Artificial Sequence: Synthetic oligonucleotide
  Sense strand starting at position 1021 of SEQ ID NO: 586015
uuuacauccucaguuaugu

SEQ ID NO: 685547 - RNA, 19 nt, Artificial Sequence
  Description of Artificial Sequence: Synthetic oligonucleotide
  Antisense strand to SEQ ID NO: 685546
acauaacugaggauguaaa

SEQ ID NO: 685548 - RNA, 19 nt, Artificial Sequence
  Description of Artificial Sequence: Synthetic oligonucleotide
  Sense strand starting at position 1026 of SEQ ID NO: 586015
auccucaguuaugugguaa

SEQ ID NO: 685549 - RNA, 19 nt, Artificial Sequence
  Description of Artificial Sequence: Synthetic oligonucleotide
  Antisense strand to SEQ ID NO: 685548
uuaccacauaacugaggau

SEQ ID NO: 685550 - RNA, 19 nt, Artificial Sequence
  Description of Artificial Sequence: Synthetic oligonucleotide
  Sense strand starting at position 1357 of SEQ ID NO: 586015
gggaaagguccggagucuu

SEQ ID NO: 685551 - RNA, 19 nt, Artificial Sequence
  Description of Artificial Sequence: Synthetic oligonucleotide
  Antisense strand to SEQ ID NO: 685550
aagacuccggaccuuuccc

SEQ ID NO: 685552 - RNA, 19 nt, Artificial Sequence
  Description of Artificial Sequence: Synthetic oligonucleotide
  Sense strand starting at position 1513 of SEQ ID NO: 586015
aaacgagaguccuuuagaa

SEQ ID NO: 685553 - RNA, 19 nt, Artificial Sequence
  Description of Artificial Sequence: Synthetic oligonucleotide
  Antisense strand to SEQ ID NO: 685552
uucuaaaggacucucguuu

SEQ ID NO: 685554 - RNA, 19 nt, Artificial Sequence
  Description of Artificial Sequence: Synthetic oligonucleotide
  Sense strand starting at position 1672 of SEQ ID NO: 586015
ccugauagauguccaguua

SEQ ID NO: 685555 - RNA, 19 nt, Artificial Sequence
  Description of Artificial Sequence: Synthetic oligonucleotide
  Antisense strand to SEQ ID NO: 685554
uaacuggacaucuaucagg

SEQ ID NO: 685556 - RNA, 19 nt, Artificial Sequence
  Description of Artificial Sequence: Synthetic oligonucleotide
  Sense strand starting at position 1673 of SEQ ID NO: 586015
cugauagauguccaguuac

SEQ ID NO: 685557 - RNA, 19 nt, Artificial Sequence
  Description of Artificial Sequence: Synthetic oligonucleotide
  Antisense strand to SEQ ID NO: 685556
guaacuggacaucuaucag

SEQ ID NO: 685558 - RNA, 19 nt, Artificial Sequence
  Description of Artificial Sequence: Synthetic oligonucleotide
  Sense strand starting at position 1684 of SEQ ID NO: 586015
ccaguuacugcagaacaua

SEQ ID NO: 685559 - RNA, 19 nt, Artificial Sequence
  Description of Artificial Sequence: Synthetic oligonucleotide
  Antisense strand to SEQ ID NO: 685558
uauguucugcaguaacugg

SEQ ID NO: 685560 - RNA, 19 nt, Artificial Sequence
  Description of Artificial Sequence: Synthetic oligonucleotide
  Sense strand starting at position 1730 of SEQ ID NO: 586015
ccaagucaugaauggcauu

SEQ ID NO: 685561 - RNA, 19 nt, Artificial Sequence
  Description of Artificial Sequence: Synthetic oligonucleotide
  Antisense strand to SEQ ID NO: 685560
aaugccauucaugacuugg

SEQ ID NO: 685562 - RNA, 19 nt, Artificial Sequence
  Description of Artificial Sequence: Synthetic oligonucleotide
  Sense strand starting at position 1781 of SEQ ID NO: 586015
gaaucaucccagugguccu

SEQ ID NO: 685563 - RNA, 19 nt, Artificial Sequence
  Description of Artificial Sequence: Synthetic oligonucleotide
  Antisense strand to SEQ ID NO: 685562
aggaccacugggaugauuc

SEQ ID NO: 685564 - RNA, 19 nt, Artificial Sequence
  Description of Artificial Sequence: Synthetic oligonucleotide
  Sense strand starting at position 1995 of SEQ ID NO: 586015
ccaguuccuucuccgagaa

SEQ ID NO: 685565 - RNA, 19 nt, Artificial Sequence
  Description of Artificial Sequence: Synthetic oligonucleotide
  Antisense strand to SEQ ID NO: 685564
uucucggagaaggaacugg

SEQ ID NO: 685566 - RNA, 19 nt, Artificial Sequence
  Description of Artificial Sequence: Synthetic oligonucleotide
  Sense strand starting at position 2138 of SEQ ID NO: 586015
gggagagugucccugucua

SEQ ID NO: 685567 - RNA, 19 nt, Artificial Sequence
  Description of Artificial Sequence: Synthetic oligonucleotide
  Antisense strand to SEQ ID NO: 685566
uagacagggacacucuccc

SEQ ID NO: 685568 - RNA, 19 nt, Artificial Sequence
  Description of Artificial Sequence: Synthetic oligonucleotide
  Sense strand starting at position 2196 of SEQ ID NO: 586015
cccagaagucagugaacuu

SEQ ID NO: 685569 - RNA, 19 nt, Artificial Sequence
  Description of Artificial Sequence: Synthetic oligonucleotide
  Antisense strand to SEQ ID NO: 685568
aaguucacugacuucuggg

SEQ ID NO: 685570 - RNA, 19 nt, Artificial Sequence
  Description of Artificial Sequence: Synthetic oligonucleotide
  Sense strand starting at position 2390 of SEQ ID NO: 586015
cuauaaugugcacaacagu

SEQ ID NO: 685571 - RNA, 19 nt, Artificial Sequence
  Description of Artificial Sequence: Synthetic oligonucleotide
  Antisense strand to SEQ ID NO: 685570
acuguugugcacauuauag

SEQ ID NO: 685572 - RNA, 19 nt, Artificial Sequence
  Description of Artificial Sequence: Synthetic oligonucleotide
  Sense strand starting at position 2584 of SEQ ID NO: 586015
cgguuaaugacucaccagu

SEQ ID NO: 685573 - RNA, 19 nt, Artificial Sequence
  Description of Artificial Sequence: Synthetic oligonucleotide
  Antisense strand to SEQ ID NO: 685572
acuggugagucauuaaccg

SEQ ID NO: 685574 - RNA, 19 nt, Artificial Sequence
  Description of Artificial Sequence: Synthetic oligonucleotide
  Sense strand starting at position 2821 of SEQ ID NO: 586015
ccugguacagccugauaga

SEQ ID NO: 685575 - RNA, 19 nt, Artificial Sequence
  Description of Artificial Sequence: Synthetic oligonucleotide
  Antisense strand to SEQ ID NO: 685574
ucuaucaggcuguaccagg

SEQ ID NO: 685576 - RNA, 19 nt, Artificial Sequence
  Description of Artificial Sequence: Synthetic oligonucleotide
  Sense strand starting at position 2822 of SEQ ID NO: 586015
cugguacagccugauagau

SEQ ID NO: 685577 - RNA, 19 nt, Artificial Sequence
  Description of Artificial Sequence: Synthetic oligonucleotide
  Antisense strand to SEQ ID NO: 685576
aucuaucaggcuguaccag

SEQ ID NO: 685578 - RNA, 19 nt, Artificial Sequence
  Description of Artificial Sequence: Synthetic oligonucleotide
  Sense strand starting at position 2955 of SEQ ID NO: 586015
auguaauauugggcaagcu

SEQ ID NO: 685579 - RNA, 19 nt, Artificial Sequence
  Description of Artificial Sequence: Synthetic oligonucleotide
  Antisense strand to SEQ ID NO: 685578
agcuugcccaauauuacau

SEQ ID NO: 685580 - RNA, 19 nt, Artificial Sequence
  Description of Artificial Sequence: Synthetic oligonucleotide
  Sense strand starting at position 2995 of SEQ ID NO: 586015
auucccuugucugucaaau

SEQ ID NO: 685581 - RNA, 19 nt, Artificial Sequence
  Description of Artificial Sequence: Synthetic oligonucleotide
  Antisense strand to SEQ ID NO: 685580
auuugacagacaagggaau

SEQ ID NO: 685582 - RNA, 19 nt, Artificial Sequence
  Description of Artificial Sequence: Synthetic oligonucleotide
  Sense strand starting at position 3022 of SEQ ID NO: 586015
gaauaucuaccuuguguga

SEQ ID NO: 685583 - RNA, 19 nt, Artificial Sequence
  Description of Artificial Sequence: Synthetic oligonucleotide
  Antisense strand to SEQ ID NO: 685582
ucacacaagguagauauuc

SEQ ID NO: 685584 - RNA, 19 nt, Artificial Sequence
  Description of Artificial Sequence: Synthetic oligonucleotide
  Sense strand starting at position 3025 of SEQ ID NO: 586015
uaucuaccuugugugagau

SEQ ID NO: 685585 - RNA, 19 nt, Artificial Sequence
  Description of Artificial Sequence: Synthetic oligonucleotide
  Antisense strand to SEQ ID NO: 685584
aucucacacaagguagaua

SEQ ID NO: 685586 - RNA, 19 nt, Artificial Sequence
  Description of Artificial Sequence: Synthetic oligonucleotide
  Sense strand starting at position 3026 of SEQ ID NO: 586015
aucuaccuugugugagaua

SEQ ID NO: 685587 - RNA, 19 nt, Artificial Sequence
  Description of Artificial Sequence: Synthetic oligonucleotide
  Antisense strand to SEQ ID NO: 685586
uaucucacacaagguagau

SEQ ID NO: 685588 - RNA, 19 nt, Artificial Sequence
  Description of Artificial Sequence: Synthetic oligonucleotide
  Sense strand starting at position 3037 of SEQ ID NO: 586015
gugagauaauaauugucau

SEQ ID NO: 685589 - RNA, 19 nt, Artificial Sequence
  Description of Artificial Sequence: Synthetic oligonucleotide
  Antisense strand to SEQ ID NO: 685588
augacaauuauuaucucac

SEQ ID NO: 685590 - RNA, 19 nt, Artificial Sequence
  Description of Artificial Sequence: Synthetic oligonucleotide
  Sense strand starting at position 3050 of SEQ ID NO: 586015
ugucauuauugagcuaaua

SEQ ID NO: 685591 - RNA, 19 nt, Artificial Sequence
  Description of Artificial Sequence: Synthetic oligonucleotide
  Antisense strand to SEQ ID NO: 685590
uauuagcucaauaaugaca

SEQ ID NO: 685592 - RNA, 19 nt, Artificial Sequence
  Description of Artificial Sequence: Synthetic oligonucleotide
  Sense strand starting at position 3085 of SEQ ID NO: 586015
cacagaauggguggucaau

SEQ ID NO: 685593 - RNA, 19 nt, Artificial Sequence
  Description of Artificial Sequence: Synthetic oligonucleotide
  Antisense strand to SEQ ID NO: 685592
auugaccacccauucugug

SEQ ID NO: 685594 - RNA, 19 nt, Artificial Sequence
  Description of Artificial Sequence: Synthetic oligonucleotide
  Sense strand starting at position 3087 of SEQ ID NO: 586015
cagaauggguggucaauag

SEQ ID NO: 685595 - RNA, 19 nt, Artificial Sequence
  Description of Artificial Sequence: Synthetic oligonucleotide
  Antisense strand to SEQ ID NO: 685594
cuauugaccacccauucug

SEQ ID NO: 685596 - RNA, 19 nt, Artificial Sequence
  Description of Artificial Sequence: Synthetic oligonucleotide
  Sense strand starting at position 3453 of SEQ ID NO: 586015
uuugucuuuguugaacaaa

SEQ ID NO: 685597 - RNA, 19 nt, Artificial Sequence
  Description of Artificial Sequence: Synthetic oligonucleotide
  Antisense strand to SEQ ID NO: 685596
uuuguucaacaaagacaaa

SEQ ID NO: 685598 - RNA, 19 nt, Artificial Sequence
  Description of Artificial Sequence: Synthetic oligonucleotide
  Sense strand starting at position 3464 of SEQ ID NO: 586015
ugaacaaagcucugucuga

SEQ ID NO: 685599 - RNA, 19 nt, Artificial Sequence
  Description of Artificial Sequence: Synthetic oligonucleotide
  Antisense strand to SEQ ID NO: 685598
ucagacagagcuuuguuca

SEQ ID NO: 685600 - RNA, 19 nt, Artificial Sequence
  Description of Artificial Sequence: Synthetic oligonucleotide
  Sense strand starting at position 3653 of SEQ ID NO: 586015
ggguuugugaaagaucugu

SEQ ID NO: 685601 - RNA, 19 nt, Artificial Sequence
  Description of Artificial Sequence: Synthetic oligonucleotide
  Antisense strand to SEQ ID NO: 685600
acagaucuuucacaaaccc

SEQ ID NO: 685602 - RNA, 19 nt, Artificial Sequence
  Description of Artificial Sequence: Synthetic oligonucleotide
  Sense strand starting at position 3657 of SEQ ID NO: 586015
uugugaaagaucugucaag

SEQ ID NO: 685603 - RNA, 19 nt, Artificial Sequence
  Description of Artificial Sequence: Synthetic oligonucleotide
  Antisense strand to SEQ ID NO: 685602
cuugacagaucuuucacaa

SEQ ID NO: 685604 - RNA, 19 nt, Artificial Sequence
  Description of Artificial Sequence: Synthetic oligonucleotide
  Sense strand starting at position 3878 of SEQ ID NO: 586015
aggcaucaacagcauuaua

SEQ ID NO: 685605 - RNA, 19 nt, Artificial Sequence
  Description of Artificial Sequence: Synthetic oligonucleotide
  Antisense strand to SEQ ID NO: 685604
uauaaugcuguugaugccu

SEQ ID NO: 685606 - RNA, 19 nt, Artificial Sequence
  Description of Artificial Sequence: Synthetic oligonucleotide
  Sense strand starting at position 141 of SEQ ID NO: 586016
uccagaugccaccaugagu

SEQ ID NO: 685607 - RNA, 19 nt, Artificial Sequence
  Description of Artificial Sequence: Synthetic oligonucleotide
  Antisense strand to SEQ ID NO: 685606
acucaugguggcaucugga

SEQ ID NO: 685608 - RNA, 19 nt, Artificial Sequence
  Description of Artificial Sequence: Synthetic oligonucleotide
  Sense strand starting at position 361 of SEQ ID NO: 586016
cagaacugguuccuaggaa

SEQ ID NO: 685609 - RNA, 19 nt, Artificial Sequence
  Description of Artificial Sequence: Synthetic oligonucleotide
  Antisense strand to SEQ ID NO: 685608
uuccuaggaaccaguucug

SEQ ID NO: 685610 - RNA, 19 nt, Artificial Sequence
  Description of Artificial Sequence: Synthetic oligonucleotide
  Sense strand starting at position 505 of SEQ ID NO: 586016
aguccacauccuugagacu

SEQ ID NO: 685611 - RNA, 19 nt, Artificial Sequence
  Description of Artificial Sequence: Synthetic oligonucleotide
  Antisense strand to SEQ ID NO: 685610
agucucaaggauguggacu

SEQ ID NO: 685612 - RNA, 19 nt, Artificial Sequence
  Description of Artificial Sequence: Synthetic oligonucleotide
  Sense strand starting at position 620 of SEQ ID NO: 586016
caaaguucugggcaaagca

SEQ ID NO: 685613 - RNA, 19 nt, Artificial Sequence
  Description of Artificial Sequence: Synthetic oligonucleotide
  Antisense strand to SEQ ID NO: 685612
ugcuuugcccagaacuuug

SEQ ID NO: 685614 - RNA, 19 nt, Artificial Sequence
  Description of Artificial Sequence: Synthetic oligonucleotide
  Sense strand starting at position 656 of SEQ ID NO: 586016
gaaccauugcggcaagaaa

SEQ ID NO: 685615 - RNA, 19 nt, Artificial Sequence
  Description of Artificial Sequence: Synthetic oligonucleotide
  Antisense strand to SEQ ID NO: 685614
uuucuugccgcaaugguuc

SEQ ID NO: 685616 - RNA, 19 nt, Artificial Sequence
  Description of Artificial Sequence: Synthetic oligonucleotide
  Sense strand starting at position 691 of SEQ ID NO: 586016
uccacuugacuuugagagu

SEQ ID NO: 685617 - RNA, 19 nt, Artificial Sequence
  Description of Artificial Sequence: Synthetic oligonucleotide
  Antisense strand to SEQ ID NO: 685616
acucucaaagucaagugga

SEQ ID NO: 685618 - RNA, 19 nt, Artificial Sequence
  Description of Artificial Sequence: Synthetic oligonucleotide
  Sense strand starting at position 732 of SEQ ID NO: 586016
cucuguaagccugaucaga

SEQ ID NO: 685619 - RNA, 19 nt, Artificial Sequence
  Description of Artificial Sequence: Synthetic oligonucleotide
  Antisense strand to SEQ ID NO: 685618
ucugaucaggcuuacagag

SEQ ID NO: 685620 - RNA, 19 nt, Artificial Sequence
  Description of Artificial Sequence: Synthetic oligonucleotide
  Sense strand starting at position 734 of SEQ ID NO: 586016
cuguaagccugaucagaaa

SEQ ID NO: 685621 - RNA, 19 nt, Artificial Sequence
  Description of Artificial Sequence: Synthetic oligonucleotide
  Antisense strand to SEQ ID NO: 685620
uuucugaucaggcuuacag

SEQ ID NO: 685622 - RNA, 19 nt, Artificial Sequence
  Description of Artificial Sequence: Synthetic oligonucleotide
  Sense strand starting at position 863 of SEQ ID NO: 586016
aggagaaaccucggauucu

SEQ ID NO: 685623 - RNA, 19 nt, Artificial Sequence
  Description of Artificial Sequence: Synthetic oligonucleotide
  Antisense strand to SEQ ID NO: 685622
agaauccgagguuucuccu

SEQ ID NO: 685624 - RNA, 19 nt, Artificial Sequence
  Description of Artificial Sequence: Synthetic oligonucleotide
  Sense strand starting at position 948 of SEQ ID NO: 586016
auugacgaaccauguaaga

SEQ ID NO: 685625 - RNA, 19 nt, Artificial Sequence
  Description of Artificial Sequence: Synthetic oligonucleotide
  Antisense strand to SEQ ID NO: 685624
ucuuacaugguucgucaau

SEQ ID NO: 685626 - RNA, 19 nt, Artificial Sequence
  Description of Artificial Sequence: Synthetic oligonucleotide
  Sense strand starting at position 1089 of SEQ ID NO: 586016
cuuggaauucccuggaauu

SEQ ID NO: 685627 - RNA, 19 nt, Artificial Sequence
  Description of Artificial Sequence: Synthetic oligonucleotide
  Antisense strand to SEQ ID NO: 685626
aauuccagggaauuccaag

SEQ ID NO: 685628 - RNA, 19 nt, Artificial Sequence
  Description of Artificial Sequence: Synthetic oligonucleotide
  Sense strand starting at position 1090 of SEQ ID NO: 586016
uuggaauucccuggaauuc

SEQ ID NO: 685629 - RNA, 19 nt, Artificial Sequence
  Description of Artificial Sequence: Synthetic oligonucleotide
  Antisense strand to SEQ ID NO: 685628
gaauuccagggaauuccaa

SEQ ID NO: 685630 - RNA, 19 nt, Artificial Sequence
  Description of Artificial Sequence: Synthetic oligonucleotide
  Sense strand starting at position 1141 of SEQ ID NO: 586016
auguaaccagcuugggaaa

SEQ ID NO: 685631 - RNA, 19 nt, Artificial Sequence
  Description of Artificial Sequence: Synthetic oligonucleotide
  Antisense strand to SEQ ID NO: 685630
uuucccaagcugguuacau

SEQ ID NO: 685632 - RNA, 19 nt, Artificial Sequence
  Description of Artificial Sequence: Synthetic oligonucleotide
  Sense strand starting at position 1177 of SEQ ID NO: 586016
cuaggugcacaugaugaau

SEQ ID NO: 685633 - RNA, 19 nt, Artificial Sequence
  Description of Artificial Sequence: Synthetic oligonucleotide
  Antisense strand to SEQ ID NO: 685632
auucaucaugugcaccuag

SEQ ID NO: 685634 - RNA, 19 nt, Artificial Sequence
  Description of Artificial Sequence: Synthetic oligonucleotide
  Sense strand starting at position 1306 of SEQ ID NO: 586016
cacaguuuagcuuagagua

SEQ ID NO: 685635 - RNA, 19 nt, Artificial Sequence
  Description of Artificial Sequence: Synthetic oligonucleotide
  Antisense strand to SEQ ID NO: 685634
uacucuaagcuaaacugug

SEQ ID NO: 685636 - RNA, 19 nt, Artificial Sequence
  Description of Artificial Sequence: Synthetic oligonucleotide
  Sense strand starting at position 1346 of SEQ ID NO: 586016
agugacauuugauaaauuc

SEQ ID NO: 685637 - RNA, 19 nt, Artificial Sequence
  Description of Artificial Sequence: Synthetic oligonucleotide
  Antisense strand to SEQ ID NO: 685636
gaauuuaucaaaugucacu

SEQ ID NO: 685638 - RNA, 19 nt, Artificial Sequence
  Description of Artificial Sequence: Synthetic oligonucleotide
  Sense strand starting at position 1527 of SEQ ID NO: 586016
gcuguugugcaauccuauu

SEQ ID NO: 685639 - RNA, 19 nt, Artificial Sequence
  Description of Artificial Sequence: Synthetic oligonucleotide
  Antisense strand to SEQ ID NO: 685638
aauaggauugcacaacagc

SEQ ID NO: 685640 - RNA, 19 nt, Artificial Sequence
  Description of Artificial Sequence: Synthetic oligonucleotide
  Sense strand starting at position 1558 of SEQ ID NO: 586016
ggaacugcucacuguagga

SEQ ID NO: 685641 - RNA, 19 nt, Artificial Sequence
  Description of Artificial Sequence: Synthetic oligonucleotide
  Antisense strand to SEQ ID NO: 685640
uccuacagugagcaguucc

SEQ ID NO: 685642 - RNA, 19 nt, Artificial Sequence
  Description of Artificial Sequence: Synthetic oligonucleotide
  Sense strand starting at position 1699 of SEQ ID NO: 586016
ggccaagaaguucagguaa

SEQ ID NO: 685643 - RNA, 19 nt, Artificial Sequence
  Description of Artificial Sequence: Synthetic oligonucleotide
  Antisense strand to SEQ ID NO: 685642
uuaccugaacuucuuggcc

SEQ ID NO: 685644 - RNA, 19 nt, Artificial Sequence
  Description of Artificial Sequence: Synthetic oligonucleotide
  Sense strand starting at position 1986 of SEQ ID NO: 586016
acugucacucguuaaugaa

SEQ ID NO: 685645 - RNA, 19 nt, Artificial Sequence
  Description of Artificial Sequence: Synthetic oligonucleotide
  Antisense strand to SEQ ID NO: 685644
uucauuaacgagugacagu

SEQ ID NO: 685646 - RNA, 19 nt, Artificial Sequence
  Description of Artificial Sequence: Synthetic oligonucleotide
  Sense strand starting at position 2001 of SEQ ID NO: 586016
ugaacuugguuaucacuga

SEQ ID NO: 685647 - RNA, 19 nt, Artificial Sequence
  Description of Artificial Sequence: Synthetic oligonucleotide
  Antisense strand to SEQ ID NO: 685646
ucagugauaaccaaguuca

SEQ ID NO: 685648 - RNA, 19 nt, Artificial Sequence
  Description of Artificial Sequence: Synthetic oligonucleotide
  Sense strand starting at position 2036 of SEQ ID NO: 586016
ggagcucuguuacucauuu

SEQ ID NO: 685649 - RNA, 19 nt, Artificial Sequence
  Description of Artificial Sequence: Synthetic oligonucleotide
  Antisense strand to SEQ ID NO: 685648
aaaugaguaacagagcucc

SEQ ID NO: 685650 - RNA, 19 nt, Artificial Sequence
  Description of Artificial Sequence: Synthetic oligonucleotide
  Sense strand starting at position 2060 of SEQ ID NO: 586016
cucugugauccacaauguc

SEQ ID NO: 685651 - RNA, 19 nt, Artificial Sequence
  Description of Artificial Sequence: Synthetic oligonucleotide
  Antisense strand to SEQ ID NO: 685650
gacauuguggaucacagag

SEQ ID NO: 685652 - RNA, 19 nt, Artificial Sequence
  Description of Artificial Sequence: Synthetic oligonucleotide
  Sense strand starting at position 2328 of SEQ ID NO: 586016
aagagcuaacgugauugua

SEQ ID NO: 685653 - RNA, 19 nt, Artificial Sequence
  Description of Artificial Sequence: Synthetic oligonucleotide
  Antisense strand to SEQ ID NO: 685652
uacaaucacguuagcucuu

SEQ ID NO: 685654 - RNA, 19 nt, Artificial Sequence
  Description of Artificial Sequence: Synthetic oligonucleotide
  Sense strand starting at position 2479 of SEQ ID NO: 586016
ucauguuaccaacaauagu

SEQ ID NO: 685655 - RNA, 19 nt, Artificial Sequence
  Description of Artificial Sequence: Synthetic oligonucleotide
  Antisense strand to SEQ ID NO: 685654
acuauuguugguaacauga

SEQ ID NO: 685656 - RNA, 19 nt, Artificial Sequence
  Description of Artificial Sequence: Synthetic oligonucleotide
  Sense strand starting at position 2502 of SEQ ID NO: 586016
ugcuaaugaucauuagaaa

SEQ ID NO: 685657 - RNA, 19 nt, Artificial Sequence
  Description of Artificial Sequence: Synthetic oligonucleotide
  Antisense strand to SEQ ID NO: 685656
uuucuaaugaucauuagca

SEQ ID NO: 685658 - RNA, 19 nt, Artificial Sequence
  Description of Artificial Sequence: Synthetic oligonucleotide
  Sense strand starting at position 2831 of SEQ ID NO: 586016
acuugaugucugcagauug

SEQ ID NO: 685659 - RNA, 19 nt, Artificial Sequence
  Description of Artificial Sequence: Synthetic oligonucleotide
  Antisense strand to SEQ ID NO: 685658
caaucugcagacaucaagu

SEQ ID NO: 685660 - RNA, 19 nt, Artificial Sequence
  Description of Artificial Sequence: Synthetic oligonucleotide
  Sense strand starting at position 2869 of SEQ ID NO: 586016
ucagccauuucugucuaga

SEQ ID NO: 685661 - RNA, 19 nt, Artificial Sequence
  Description of Artificial Sequence: Synthetic oligonucleotide
  Antisense strand to SEQ ID NO: 685660
ucuagacagaaauggcuga

SEQ ID NO: 685662 - RNA, 19 nt, Artificial Sequence
  Description of Artificial Sequence: Synthetic oligonucleotide
  Sense strand starting at position 2962 of SEQ ID NO: 586016
ucagaagaucagggccaau

SEQ ID NO: 685663 - RNA, 19 nt, Artificial Sequence
  Description of Artificial Sequence: Synthetic oligonucleotide
  Antisense strand to SEQ ID NO: 685662
auuggcccugaucuucuga

SEQ ID NO: 685664 - RNA, 19 nt, Artificial Sequence
  Description of Artificial Sequence: Synthetic oligonucleotide
  Sense strand starting at position 3071 of SEQ ID NO: 586016
ggacuaucaugcuuacaua

SEQ ID NO: 685665 - RNA, 19 nt, Artificial Sequence
  Description of Artificial Sequence: Synthetic oligonucleotide
  Antisense strand to SEQ ID NO: 685664
uauguaagcaugauagucc

SEQ ID NO: 685666 - RNA, 19 nt, Artificial Sequence
  Description of Artificial Sequence: Synthetic oligonucleotide
  Sense strand starting at position 3165 of SEQ ID NO: 586016
uccuguaauuuguuagcua

SEQ ID NO: 685667 - RNA, 19 nt, Artificial Sequence
  Description of Artificial Sequence: Synthetic oligonucleotide
  Antisense strand to SEQ ID NO: 685666
uagcuaacaaauuacagga

SEQ ID NO: 685668 - RNA, 19 nt, Artificial Sequence
  Description of Artificial Sequence: Synthetic oligonucleotide
  Sense strand starting at position 3168 of SEQ ID NO: 586016
uguaauuuguuagcuaggu

SEQ ID NO: 685669 - RNA, 19 nt, Artificial Sequence
  Description of Artificial Sequence: Synthetic oligonucleotide
  Antisense strand to SEQ ID NO: 685668
accuagcuaacaaauuaca

SEQ ID NO: 685670 - RNA, 19 nt, Artificial Sequence
  Description of Artificial Sequence: Synthetic oligonucleotide
  Sense strand starting at position 3172 of SEQ ID NO: 586016
auuuguuagcuaggugauc

SEQ ID NO: 685671 - RNA, 19 nt, Artificial Sequence
  Description of Artificial Sequence: Synthetic oligonucleotide
  Antisense strand to SEQ ID NO: 685670
gaucaccuagcuaacaaau

SEQ ID NO: 685672 - RNA, 19 nt, Artificial Sequence
  Description of Artificial Sequence: Synthetic oligonucleotide
  Sense strand starting at position 3280 of SEQ ID NO: 586016
agaacagcacccgauauau

SEQ ID NO: 685673 - RNA, 19 nt, Artificial Sequence
  Description of Artificial Sequence: Synthetic oligonucleotide
  Antisense strand to SEQ ID NO: 685672
auauaucgggugcuguucu

SEQ ID NO: 685674 - RNA, 19 nt, Artificial Sequence
  Description of Artificial Sequence: Synthetic oligonucleotide
  Sense strand starting at position 3350 of SEQ ID NO: 586016
uguuaucaccaauaaaugu

SEQ ID NO: 685675 - RNA, 19 nt, Artificial Sequence
  Description of Artificial Sequence: Synthetic oligonucleotide
  Antisense strand to SEQ ID NO: 685674
acauuuauuggugauaaca

SEQ ID NO: 685676 - RNA, 19 nt, Artificial Sequence
  Description of Artificial Sequence: Synthetic oligonucleotide
  Sense strand starting at position 3536 of SEQ ID NO: 586016
ucucauuaguucccaugga

SEQ ID NO: 685677 - RNA, 19 nt, Artificial Sequence
  Description of Artificial Sequence: Synthetic oligonucleotide
  Antisense strand to SEQ ID NO: 685676
uccaugggaacuaaugaga

SEQ ID NO: 685678 - RNA, 19 nt, Artificial Sequence
  Description of Artificial Sequence: Synthetic oligonucleotide
  Sense strand starting at position 3575 of SEQ ID NO: 586016
gaggaccuuccugauguuu

SEQ ID NO: 685679 - RNA, 19 nt, Artificial Sequence
  Description of Artificial Sequence: Synthetic oligonucleotide
  Antisense strand to SEQ ID NO: 685678
aaacaucaggaagguccuc

SEQ ID NO: 685680 - RNA, 19 nt, Artificial Sequence
  Description of Artificial Sequence: Synthetic oligonucleotide
  Sense strand starting at position 3804 of SEQ ID NO: 586016
gcacuucuacuaggauuga

SEQ ID NO: 685681 - RNA, 19 nt, Artificial Sequence
  Description of Artificial Sequence: Synthetic oligonucleotide
  Antisense strand to SEQ ID NO: 685680
ucaauccuaguagaagugc

SEQ ID NO: 685682 - RNA, 19 nt, Artificial Sequence
  Description of Artificial Sequence: Synthetic oligonucleotide
  Sense strand starting at position 3944 of SEQ ID NO: 586016
uucucuguagcagaauaaa

SEQ ID NO: 685683 - RNA, 19 nt, Artificial Sequence
  Description of Artificial Sequence: Synthetic oligonucleotide
  Antisense strand to SEQ ID NO: 685682
uuuauucugcuacagagaa

SEQ ID NO: 685684 - RNA, 19 nt, Artificial Sequence
  Description of Artificial Sequence: Synthetic oligonucleotide
  Sense strand starting at position 3965 of SEQ ID NO: 586016
gcuucucuuagaggagaua

SEQ ID NO: 685685 - RNA, 19 nt, Artificial Sequence
  Description of Artificial Sequence: Synthetic oligonucleotide
  Antisense strand to SEQ ID NO: 685684
uaucuccucuaagagaagc

SEQ ID NO: 685686 - RNA, 19 nt, Artificial Sequence
  Description of Artificial Sequence: Synthetic oligonucleotide
  Sense strand starting at position 43 of SEQ ID NO: 586017
uaacaagucuuggccaagu

SEQ ID NO: 685687 - RNA, 19 nt, Artificial Sequence
  Description of Artificial Sequence: Synthetic oligonucleotide
  Antisense strand to SEQ ID NO: 685686
acuuggccaagacuuguua

SEQ ID NO: 685688 - RNA, 19 nt, Artificial Sequence
  Description of Artificial Sequence: Synthetic oligonucleotide
  Sense strand starting at position 176 of SEQ ID NO: 586017
cuuggaaaucaguguacuu

SEQ ID NO: 685689 - RNA, 19 nt, Artificial Sequence
  Description of Artificial Sequence: Synthetic oligonucleotide
  Antisense strand to SEQ ID NO: 685688
aaguacacugauuuccaag

SEQ ID NO: 685690 - RNA, 19 nt, Artificial Sequence
  Description of Artificial Sequence: Synthetic oligonucleotide
  Sense strand starting at position 181 of SEQ ID NO: 586017
aaaucaguguacuuggcau

SEQ ID NO: 685691 - RNA, 19 nt, Artificial Sequence
  Description of Artificial Sequence: Synthetic oligonucleotide
  Antisense strand to SEQ ID NO: 685690
augccaaguacacugauuu

SEQ ID NO: 685692 - RNA, 19 nt, Artificial Sequence
  Description of Artificial Sequence: Synthetic oligonucleotide
  Sense strand starting at position 204 of SEQ ID NO: 586017
gguuuaaccugcuuaacac

SEQ ID NO: 685693 - RNA, 19 nt, Artificial Sequence
  Description of Artificial Sequence: Synthetic oligonucleotide
  Antisense strand to SEQ ID NO: 685692
guguuaagcagguuaaacc

SEQ ID NO: 685694 - RNA, 19 nt, Artificial Sequence
  Description of Artificial Sequence: Synthetic oligonucleotide
  Sense strand starting at position 220 of SEQ ID NO: 586017
caccgaacucgagauauuc

SEQ ID NO: 685695 - RNA, 19 nt, Artificial Sequence
  Description of Artificial Sequence: Synthetic oligonucleotide
  Antisense strand to SEQ ID NO: 685694
gaauaucucgaguucggug

SEQ ID NO: 685696 - RNA, 19 nt, Artificial Sequence
  Description of Artificial Sequence: Synthetic oligonucleotide
  Sense strand starting at position 222 of SEQ ID NO: 586017
ccgaacucgagauauucuu

SEQ ID NO: 685697 - RNA, 19 nt, Artificial Sequence
  Description of Artificial Sequence: Synthetic oligonucleotide
  Antisense strand to SEQ ID NO: 685696
aagaauaucucgaguucgg

SEQ ID NO: 685698 - RNA, 19 nt, Artificial Sequence
  Description of Artificial Sequence: Synthetic oligonucleotide
  Sense strand starting at position 228 of SEQ ID NO: 586017
ucgagauauucuuccuaca

SEQ ID NO: 685699 - RNA, 19 nt, Artificial Sequence
  Description of Artificial Sequence: Synthetic oligonucleotide
  Antisense strand to SEQ ID NO: 685698
uguaggaagaauaucucga

SEQ ID NO: 685700 - RNA, 19 nt, Artificial Sequence
  Description of Artificial Sequence: Synthetic oligonucleotide
  Sense strand starting at position 266 of SEQ ID NO: 586017
aguaaauggcaccaucuua

SEQ ID NO: 685701 - RNA, 19 nt, Artificial Sequence
  Description of Artificial Sequence: Synthetic oligonucleotide
  Antisense strand to SEQ ID NO: 685700
uaagauggugccauuuacu

SEQ ID NO: 685702 - RNA, 19 nt, Artificial Sequence
  Description of Artificial Sequence: Synthetic oligonucleotide
  Sense strand starting at position 366 of SEQ ID NO: 586017
gcaaguccugcugacucaa

SEQ ID NO: 685703 - RNA, 19 nt, Artificial Sequence
  Description of Artificial Sequence: Synthetic oligonucleotide
  Antisense strand to SEQ ID NO: 685702
uugagucagcaggacuugc

SEQ ID NO: 685704 - RNA, 19 nt, Artificial Sequence
  Description of Artificial Sequence: Synthetic oligonucleotide
  Sense strand starting at position 449 of SEQ ID NO: 586017
ccaucugucgcuuauagua

SEQ ID NO: 685705 - RNA, 19 nt, Artificial Sequence
  Description of Artificial Sequence: Synthetic oligonucleotide
  Antisense strand to SEQ ID NO: 685704
uacuauaagcgacagaugg

SEQ ID NO: 685706 - RNA, 19 nt, Artificial Sequence
  Description of Artificial Sequence: Synthetic oligonucleotide
  Sense strand starting at position 595 of SEQ ID NO: 586017
gugacuucucacuggccuu

SEQ ID NO: 685707 - RNA, 19 nt, Artificial Sequence
  Description of Artificial Sequence: Synthetic oligonucleotide
  Antisense strand to SEQ ID NO: 685706
aaggccagugagaagucac

SEQ ID NO: 685708 - RNA, 19 nt, Artificial Sequence
  Description of Artificial Sequence: Synthetic oligonucleotide
  Sense strand starting at position 613 of SEQ ID NO: 586017
uauaaugaggucuaaagcu

SEQ ID NO: 685709 - RNA, 19 nt, Artificial Sequence
  Description of Artificial Sequence: Synthetic oligonucleotide
  Antisense strand to SEQ ID NO: 685708
agcuuuagaccucauuaua

SEQ ID NO: 685710 - RNA, 19 nt, Artificial Sequence
  Description of Artificial Sequence: Synthetic oligonucleotide
  Sense strand starting at position 622 of SEQ ID NO: 586017
gucuaaagcuaaucagaac

SEQ ID NO: 685711 - RNA, 19 nt, Artificial Sequence
  Description of Artificial Sequence: Synthetic oligonucleotide
  Antisense strand to SEQ ID NO: 685710
guucugauuagcuuuagac

SEQ ID NO: 685712 - RNA, 19 nt, Artificial Sequence
  Description of Artificial Sequence: Synthetic oligonucleotide
  Sense strand starting at position 830 of SEQ ID NO: 586017
aggucucaccuauguguca

SEQ ID NO: 685713 - RNA, 19 nt, Artificial Sequence
  Description of Artificial Sequence: Synthetic oligonucleotide
  Antisense strand to SEQ ID NO: 685712
ugacacauaggugagaccu

SEQ ID NO: 685714 - RNA, 19 nt, Artificial Sequence
  Description of Artificial Sequence: Synthetic oligonucleotide
  Sense strand starting at position 831 of SEQ ID NO: 586017
ggucucaccuaugugucau

SEQ ID NO: 685715 - RNA, 19 nt, Artificial Sequence
  Description of Artificial Sequence: Synthetic oligonucleotide
  Antisense strand to SEQ ID NO: 685714
augacacauaggugagacc

SEQ ID NO: 685716 - RNA, 19 nt, Artificial Sequence
  Description of Artificial Sequence: Synthetic oligonucleotide
  Sense strand starting at position 842 of SEQ ID NO: 586017
ugugucaucuccucagaaa

SEQ ID NO: 685717 - RNA, 19 nt, Artificial Sequence
  Description of Artificial Sequence: Synthetic oligonucleotide
  Antisense strand to SEQ ID NO: 685716
uuucugaggagaugacaca

SEQ ID NO: 685718 - RNA, 19 nt, Artificial Sequence
  Description of Artificial Sequence: Synthetic oligonucleotide
  Sense strand starting at position 843 of SEQ ID NO: 586017
gugucaucuccucagaaag

SEQ ID NO: 685719 - RNA, 19 nt, Artificial Sequence
  Description of Artificial Sequence: Synthetic oligonucleotide
  Antisense strand to SEQ ID NO: 685718
cuuucugaggagaugacac

SEQ ID NO: 685720 - RNA, 19 nt, Artificial Sequence
  Description of Artificial Sequence: Synthetic oligonucleotide
  Sense strand starting at position 917 of SEQ ID NO: 586017
guacuuaucugucuuacgu

SEQ ID NO: 685721 - RNA, 19 nt, Artificial Sequence
  Description of Artificial Sequence: Synthetic oligonucleotide
  Antisense strand to SEQ ID NO: 685720
acguaagacagauaaguac

SEQ ID NO: 685722 - RNA, 19 nt, Artificial Sequence
  Description of Artificial Sequence: Synthetic oligonucleotide
  Sense strand starting at position 945 of SEQ ID NO: 586017
ugcuuauuguguccugaac

SEQ ID NO: 685723 - RNA, 19 nt, Artificial Sequence
  Description of Artificial Sequence: Synthetic oligonucleotide
  Antisense strand to SEQ ID NO: 685722
guucaggacacaauaagca

SEQ ID NO: 685724 - RNA, 19 nt, Artificial Sequence
  Description of Artificial Sequence: Synthetic oligonucleotide
  Sense strand starting at position 1056 of SEQ ID NO: 586017
auacgagcuauaugaauga

SEQ ID NO: 685725 - RNA, 19 nt, Artificial Sequence
  Description of Artificial Sequence: Synthetic oligonucleotide
  Antisense strand to SEQ ID NO: 685724
ucauucauauagcucguau

SEQ ID NO: 685726 - RNA, 19 nt, Artificial Sequence
  Description of Artificial Sequence: Synthetic oligonucleotide
  Sense strand starting at position 1233 of SEQ ID NO: 586017
gggauuagcucagucaaua

SEQ ID NO: 685727 - RNA, 19 nt, Artificial Sequence
  Description of Artificial Sequence: Synthetic oligonucleotide
  Antisense strand to SEQ ID NO: 685726
uauugacugagcuaauccc

SEQ ID NO: 685728 - RNA, 19 nt, Artificial Sequence
  Description of Artificial Sequence: Synthetic oligonucleotide
  Sense strand starting at position 1251 of SEQ ID NO: 586017
acacaacacugcgaaauaa

SEQ ID NO: 685729 - RNA, 19 nt, Artificial Sequence
  Description of Artificial Sequence: Synthetic oligonucleotide
  Antisense strand to SEQ ID NO: 685728
uuauuucgcaguguugugu

SEQ ID NO: 685730 - RNA, 19 nt, Artificial Sequence
  Description of Artificial Sequence: Synthetic oligonucleotide
  Sense strand starting at position 1259 of SEQ ID NO: 586017
cugcgaaauaaugagguaa

SEQ ID NO: 685731 - RNA, 19 nt, Artificial Sequence
  Description of Artificial Sequence: Synthetic oligonucleotide
  Antisense strand to SEQ ID NO: 685730
uuaccucauuauuucgcag

SEQ ID NO: 685732 - RNA, 19 nt, Artificial Sequence
  Description of Artificial Sequence: Synthetic oligonucleotide
  Sense strand starting at position 1411 of SEQ ID NO: 586017
gauucugcauuugaaguuu

SEQ ID NO: 685733 - RNA, 19 nt, Artificial Sequence
  Description of Artificial Sequence: Synthetic oligonucleotide
  Antisense strand to SEQ ID NO: 685732
aaacuucaaaugcagaauc

SEQ ID NO: 685734 - RNA, 19 nt, Artificial Sequence
  Description of Artificial Sequence: Synthetic oligonucleotide
  Sense strand starting at position 1478 of SEQ ID NO: 586017
gaggucauccugggcucaa

SEQ ID NO: 685735 - RNA, 19 nt, Artificial Sequence
  Description of Artificial Sequence: Synthetic oligonucleotide
  Antisense strand to SEQ ID NO: 685734
uugagcccaggaugaccuc

SEQ ID NO: 685736 - RNA, 19 nt, Artificial Sequence
  Description of Artificial Sequence: Synthetic oligonucleotide
  Sense strand starting at position 1814 of SEQ ID NO: 586017
ucccgaaaggccugugcua

SEQ ID NO: 685737 - RNA, 19 nt, Artificial Sequence
  Description of Artificial Sequence: Synthetic oligonucleotide
  Antisense strand to SEQ ID NO: 685736
uagcacaggccuuucggga

SEQ ID NO: 685738 - RNA, 19 nt, Artificial Sequence
  Description of Artificial Sequence: Synthetic oligonucleotide
  Sense strand starting at position 2044 of SEQ ID NO: 586017
gggcaugcgcgacuuugua

SEQ ID NO: 685739 - RNA, 19 nt, Artificial Sequence
  Description of Artificial Sequence: Synthetic oligonucleotide
  Antisense strand to SEQ ID NO: 685738
uacaaagucgcgcaugccc

SEQ ID NO: 685740 - RNA, 19 nt, Artificial Sequence
  Description of Artificial Sequence: Synthetic oligonucleotide
  Sense strand starting at position 2188 of SEQ ID NO: 586017
gacagcuuugcgucucuuu

SEQ ID NO: 685741 - RNA, 19 nt, Artificial Sequence
  Description of Artificial Sequence: Synthetic oligonucleotide
  Antisense strand to SEQ ID NO: 685740
aaagagacgcaaagcuguc

SEQ ID NO: 685742 - RNA, 19 nt, Artificial Sequence
  Description of Artificial Sequence: Synthetic oligonucleotide
  Sense strand starting at position 2217 of SEQ ID NO: 586017
gcacaagcuugagacuaaa

SEQ ID NO: 685743 - RNA, 19 nt, Artificial Sequence
  Description of Artificial Sequence: Synthetic oligonucleotide
  Antisense strand to SEQ ID NO: 685742
uuuagucucaagcuugugc

SEQ ID NO: 685744 - RNA, 19 nt, Artificial Sequence
  Description of Artificial Sequence: Synthetic oligonucleotide
  Sense strand starting at position 2346 of SEQ ID NO: 586017
cugucacuaucccuuggua

SEQ ID NO: 685745 - RNA, 19 nt, Artificial Sequence
  Description of Artificial Sequence: Synthetic oligonucleotide
  Antisense strand to SEQ ID NO: 685744
uaccaagggauagugacag

SEQ ID NO: 685746 - RNA, 19 nt, Artificial Sequence
  Description of Artificial Sequence: Synthetic oligonucleotide
  Sense strand starting at position 2348 of SEQ ID NO: 586017
gucacuaucccuugguacu

SEQ ID NO: 685747 - RNA, 19 nt, Artificial Sequence
  Description of Artificial Sequence: Synthetic oligonucleotide
  Antisense strand to SEQ ID NO: 685746
aguaccaagggauagugac

SEQ ID NO: 685748 - RNA, 19 nt, Artificial Sequence
  Description of Artificial Sequence: Synthetic oligonucleotide
  Sense strand starting at position 2799 of SEQ ID NO: 586017
caggcugguguucagugaa

SEQ ID NO: 685749 - RNA, 19 nt, Artificial Sequence
  Description of Artificial Sequence: Synthetic oligonucleotide
  Antisense strand to SEQ ID NO: 685748
uucacugaacaccagccug

SEQ ID NO: 685750 - RNA, 19 nt, Artificial Sequence
  Description of Artificial Sequence: Synthetic oligonucleotide
  Sense strand starting at position 3108 of SEQ ID NO: 586017
gcaccaucuccguaacucu

SEQ ID NO: 685751 - RNA, 19 nt, Artificial Sequence
  Description of Artificial Sequence: Synthetic oligonucleotide
  Antisense strand to SEQ ID NO: 685750
agaguuacggagauggugc

SEQ ID NO: 685752 - RNA, 19 nt, Artificial Sequence
  Description of Artificial Sequence: Synthetic oligonucleotide
  Sense strand starting at position 3363 of SEQ ID NO: 586017
gaguaauauuccguugcau

SEQ ID NO: 685753 - RNA, 19 nt, Artificial Sequence
  Description of Artificial Sequence: Synthetic oligonucleotide
  Antisense strand to SEQ ID NO: 685752
augcaacggaauauuacuc

SEQ ID NO: 685754 - RNA, 19 nt, Artificial Sequence
  Description of Artificial Sequence: Synthetic oligonucleotide
  Sense strand starting at position 3705 of SEQ ID NO: 586017
gggugagggcuguaucuca

SEQ ID NO: 685755 - RNA, 19 nt, Artificial Sequence
  Description of Artificial Sequence: Synthetic oligonucleotide
  Antisense strand to SEQ ID NO: 685754
ugagauacagcccucaccc

SEQ ID NO: 685756 - RNA, 19 nt, Artificial Sequence
  Description of Artificial Sequence: Synthetic oligonucleotide
  Sense strand starting at position 3713 of SEQ ID NO: 586017
gcuguaucucaauguagcu

SEQ ID NO: 685757 - RNA, 19 nt, Artificial Sequence
  Description of Artificial Sequence: Synthetic oligonucleotide
  Antisense strand to SEQ ID NO: 685756
agcuacauugagauacagc

SEQ ID NO: 685758 - RNA, 19 nt, Artificial Sequence
  Description of Artificial Sequence: Synthetic oligonucleotide
  Sense strand starting at position 3745 of SEQ ID NO: 586017
gucuaaugauuagugauau

SEQ ID NO: 685759 - RNA, 19 nt, Artificial Sequence
  Description of Artificial Sequence: Synthetic oligonucleotide
  Antisense strand to SEQ ID NO: 685758
auaucacuaaucauuagac

SEQ ID NO: 685760 - RNA, 19 nt, Artificial Sequence
  Description of Artificial Sequence: Synthetic oligonucleotide
  Sense strand starting at position 3885 of SEQ ID NO: 586017
uucucuguauauuccagau

SEQ ID NO: 685761 - RNA, 19 nt, Artificial Sequence
  Description of Artificial Sequence: Synthetic oligonucleotide
  Antisense strand to SEQ ID NO: 685760
aucuggaauauacagagaa

SEQ ID NO: 685762 - RNA, 19 nt, Artificial Sequence
  Description of Artificial Sequence: Synthetic oligonucleotide
  Sense strand starting at position 3977 of SEQ ID NO: 586017
ucuuauaugucucuagcua

SEQ ID NO: 685763 - RNA, 19 nt, Artificial Sequence
  Description of Artificial Sequence: Synthetic oligonucleotide
  Antisense strand to SEQ ID NO: 685762
uagcuagagacauauaaga

SEQ ID NO: 685764 - RNA, 19 nt, Artificial Sequence
  Description of Artificial Sequence: Synthetic oligonucleotide
  Sense strand starting at position 3978 of SEQ ID NO: 586017
cuuauaugucucuagcuac

SEQ ID NO: 685765 - RNA, 19 nt, Artificial Sequence
  Description of Artificial Sequence: Synthetic oligonucleotide
  Antisense strand to SEQ ID NO: 685764
guagcuagagacauauaag

SEQ ID NO: 685766 - RNA, 19 nt, Artificial Sequence
  Description of Artificial Sequence: Synthetic oligonucleotide
  Sense strand starting at position 42 of SEQ ID NO: 586018
cggcaaauuugaucuuucu

SEQ ID NO: 685767 - RNA, 19 nt, Artificial Sequence
  Description of Artificial Sequence: Synthetic oligonucleotide
  Antisense strand to SEQ ID NO: 685766
agaaagaucaaauuugccg

SEQ ID NO: 685768 - RNA, 19 nt, Artificial Sequence
  Description of Artificial Sequence: Synthetic oligonucleotide
  Sense strand starting at position 318 of SEQ ID NO: 586018
ugguaauguagaggcaauu

SEQ ID NO: 685769 - RNA, 19 nt, Artificial Sequence
  Description of Artificial Sequence: Synthetic oligonucleotide
  Antisense strand to SEQ ID NO: 685768
aauugccucuacauuacca

SEQ ID NO: 685770 - RNA, 19 nt, Artificial Sequence
  Description of Artificial Sequence: Synthetic oligonucleotide
  Sense strand starting at position 327 of SEQ ID NO: 586018
agaggcaauuucugaugau

SEQ ID NO: 685771 - RNA, 19 nt, Artificial Sequence
  Description of Artificial Sequence: Synthetic oligonucleotide
  Antisense strand to SEQ ID NO: 685770
aucaucagaaauugccucu

SEQ ID NO: 685772 - RNA, 19 nt, Artificial Sequence
  Description of Artificial Sequence: Synthetic oligonucleotide
  Sense strand starting at position 328 of SEQ ID NO: 586018
gaggcaauuucugaugauu

SEQ ID NO: 685773 - RNA, 19 nt, Artificial Sequence
  Description of Artificial Sequence: Synthetic oligonucleotide
  Antisense strand to SEQ ID NO: 685772
aaucaucagaaauugccuc

SEQ ID NO: 685774 - RNA, 19 nt, Artificial Sequence
  Description of Artificial Sequence: Synthetic oligonucleotide
  Sense strand starting at position 376 of SEQ ID NO: 586018
agaaucauuugguacagua

SEQ ID NO: 685775 - RNA, 19 nt, Artificial Sequence
  Description of Artificial Sequence: Synthetic oligonucleotide
  Antisense strand to SEQ ID NO: 685774
uacuguaccaaaugauucu

SEQ ID NO: 685776 - RNA, 19 nt, Artificial Sequence
  Description of Artificial Sequence: Synthetic oligonucleotide
  Sense strand starting at position 396 of SEQ ID NO: 586018
cccagaauucggcaauuau

SEQ ID NO: 685777 - RNA, 19 nt, Artificial Sequence
  Description of Artificial Sequence: Synthetic oligonucleotide
  Antisense strand to SEQ ID NO: 685776
auaauugccgaauucuggg

SEQ ID NO: 685778 - RNA, 19 nt, Artificial Sequence
  Description of Artificial Sequence: Synthetic oligonucleotide
  Sense strand starting at position 407 of SEQ ID NO: 586018
gcaauuauuuaucuguagu

SEQ ID NO: 685779 - RNA, 19 nt, Artificial Sequence
  Description of Artificial Sequence: Synthetic oligonucleotide
  Antisense strand to SEQ ID NO: 685778
acuacagauaaauaauugc

SEQ ID NO: 685780 - RNA, 19 nt, Artificial Sequence
  Description of Artificial Sequence: Synthetic oligonucleotide
  Sense strand starting at position 621 of SEQ ID NO: 586018
uaggaaauauauccucgua

SEQ ID NO: 685781 - RNA, 19 nt, Artificial Sequence
  Description of Artificial Sequence: Synthetic oligonucleotide
  Antisense strand to SEQ ID NO: 685780
uacgaggauauauuuccua

SEQ ID NO: 685782 - RNA, 19 nt, Artificial Sequence
  Description of Artificial Sequence: Synthetic oligonucleotide
  Sense strand starting at position 623 of SEQ ID NO: 586018
ggaaauauauccucguaaa

SEQ ID NO: 685783 - RNA, 19 nt, Artificial Sequence
  Description of Artificial Sequence: Synthetic oligonucleotide
  Antisense strand to SEQ ID NO: 685782
uuuacgaggauauauuucc

SEQ ID NO: 685784 - RNA, 19 nt, Artificial Sequence
  Description of Artificial Sequence: Synthetic oligonucleotide
  Sense strand starting at position 689 of SEQ ID NO: 586018
ggcugaggaucuccgugau

SEQ ID NO: 685785 - RNA, 19 nt, Artificial Sequence
  Description of Artificial Sequence: Synthetic oligonucleotide
  Antisense strand to SEQ ID NO: 685784
aucacggagauccucagcc

SEQ ID NO: 685786 - RNA, 19 nt, Artificial Sequence
  Description of Artificial Sequence: Synthetic oligonucleotide
  Sense strand starting at position 692 of SEQ ID NO: 586018
ugaggaucuccgugaucuc

SEQ ID NO: 685787 - RNA, 19 nt, Artificial Sequence
  Description of Artificial Sequence: Synthetic oligonucleotide
  Antisense strand to SEQ ID NO: 685786
gagaucacggagauccuca

SEQ ID NO: 685788 - RNA, 19 nt, Artificial Sequence
  Description of Artificial Sequence: Synthetic oligonucleotide
  Sense strand starting at position 721 of SEQ ID NO: 586018
agagcuuugauaggaugca

SEQ ID NO: 685789 - RNA, 19 nt, Artificial Sequence
  Description of Artificial Sequence: Synthetic oligonucleotide
  Antisense strand to SEQ ID NO: 685788
ugcauccuaucaaagcucu

SEQ ID NO: 685790 - RNA, 19 nt, Artificial Sequence
  Description of Artificial Sequence: Synthetic oligonucleotide
  Sense strand starting at position 740 of SEQ ID NO: 586018
cgggacucaacauauaguu

SEQ ID NO: 685791 - RNA, 19 nt, Artificial Sequence
  Description of Artificial Sequence: Synthetic oligonucleotide
  Antisense strand to SEQ ID NO: 685790
aacuauauguugagucccg

SEQ ID NO: 685792 - RNA, 19 nt, Artificial Sequence
  Description of Artificial Sequence: Synthetic oligonucleotide
  Sense strand starting at position 974 of SEQ ID NO: 586018
uuuacagaagcugguaauu

SEQ ID NO: 685793 - RNA, 19 nt, Artificial Sequence
  Description of Artificial Sequence: Synthetic oligonucleotide
  Antisense strand to SEQ ID NO: 685792
aauuaccagcuucuguaaa

SEQ ID NO: 685794 - RNA, 19 nt, Artificial Sequence
  Description of Artificial Sequence: Synthetic oligonucleotide
  Sense strand starting at position 1230 of SEQ ID NO: 586018
gcaacuaaguuguuuagaa

SEQ ID NO: 685795 - RNA, 19 nt, Artificial Sequence
  Description of Artificial Sequence: Synthetic oligonucleotide
  Antisense strand to SEQ ID NO: 685794
uucuaaacaacuuaguugc

SEQ ID NO: 685796 - RNA, 19 nt, Artificial Sequence
  Description of Artificial Sequence: Synthetic oligonucleotide
  Sense strand starting at position 1309 of SEQ ID NO: 586018
uuuccuacucuugggcaau

SEQ ID NO: 685797 - RNA, 19 nt, Artificial Sequence
  Description of Artificial Sequence: Synthetic oligonucleotide
  Antisense strand to SEQ ID NO: 685796
auugcccaagaguaggaaa

SEQ ID NO: 685798 - RNA, 19 nt, Artificial Sequence
  Description of Artificial Sequence: Synthetic oligonucleotide
  Sense strand starting at position 1311 of SEQ ID NO: 586018
uccuacucuugggcaauua

SEQ ID NO: 685799 - RNA, 19 nt, Artificial Sequence
  Description of Artificial Sequence: Synthetic oligonucleotide
  Antisense strand to SEQ ID NO: 685798
uaauugcccaagaguagga

SEQ ID NO: 685800 - RNA, 19 nt, Artificial Sequence
  Description of Artificial Sequence: Synthetic oligonucleotide
  Sense strand starting at position 1312 of SEQ ID NO: 586018
ccuacucuugggcaauuau

SEQ ID NO: 685801 - RNA, 19 nt, Artificial Sequence
  Description of Artificial Sequence: Synthetic oligonucleotide
  Antisense strand to SEQ ID NO: 685800
auaauugcccaagaguagg

SEQ ID NO: 685802 - RNA, 19 nt, Artificial Sequence
  Description of Artificial Sequence: Synthetic oligonucleotide
  Sense strand starting at position 1415 of SEQ ID NO: 586018
cuguguaucacgcucaguu

SEQ ID NO: 685803 - RNA, 19 nt, Artificial Sequence
  Description of Artificial Sequence: Synthetic oligonucleotide
  Antisense strand to SEQ ID NO: 685802
aacugagcgugauacacag

SEQ ID NO: 685804 - RNA, 19 nt, Artificial Sequence
  Description of Artificial Sequence: Synthetic oligonucleotide
  Sense strand starting at position 1482 of SEQ ID NO: 586018
ggagauaaguugcuauuau

SEQ ID NO: 685805 - RNA, 19 nt, Artificial Sequence
  Description of Artificial Sequence: Synthetic oligonucleotide
  Antisense strand to SEQ ID NO: 685804
auaauagcaacuuaucucc

SEQ ID NO: 685806 - RNA, 19 nt, Artificial Sequence
  Description of Artificial Sequence: Synthetic oligonucleotide
  Sense strand starting at position 2223 of SEQ ID NO: 586018
cccggagagucccugauaa

SEQ ID NO: 685807 - RNA, 19 nt, Artificial Sequence
  Description of Artificial Sequence: Synthetic oligonucleotide
  Antisense strand to SEQ ID NO: 685806
uuaucagggacucuccggg

SEQ ID NO: 685808 - RNA, 19 nt, Artificial Sequence
  Description of Artificial Sequence: Synthetic oligonucleotide
  Sense strand starting at position 2225 of SEQ ID NO: 586018
cggagagucccugauaauc

SEQ ID NO: 685809 - RNA, 19 nt, Artificial Sequence
  Description of Artificial Sequence: Synthetic oligonucleotide
  Antisense strand to SEQ ID NO: 685808
gauuaucagggacucuccg

SEQ ID NO: 685810 - RNA, 19 nt, Artificial Sequence
  Description of Artificial Sequence: Synthetic oligonucleotide
  Sense strand starting at position 2230 of SEQ ID NO: 586018
agucccugauaaucuaaga

SEQ ID NO: 685811 - RNA, 19 nt, Artificial Sequence
  Description of Artificial Sequence: Synthetic oligonucleotide
  Antisense strand to SEQ ID NO: 685810
ucuuagauuaucagggacu

SEQ ID NO: 685812 - RNA, 19 nt, Artificial Sequence
  Description of Artificial Sequence: Synthetic oligonucleotide
  Sense strand starting at position 2808 of SEQ ID NO: 586018
ucuuccuagcuagauagua

SEQ ID NO: 685813 - RNA, 19 nt, Artificial Sequence
  Description of Artificial Sequence: Synthetic oligonucleotide
  Antisense strand to SEQ ID NO: 685812
uacuaucuagcuaggaaga

SEQ ID NO: 685814 - RNA, 19 nt, Artificial Sequence
  Description of Artificial Sequence: Synthetic oligonucleotide
  Sense strand starting at position 2952 of SEQ ID NO: 586018
gccaacacugguuauggau

SEQ ID NO: 685815 - RNA, 19 nt, Artificial Sequence
  Description of Artificial Sequence: Synthetic oligonucleotide
  Antisense strand to SEQ ID NO: 685814
auccauaaccaguguuggc

SEQ ID NO: 685816 - RNA, 19 nt, Artificial Sequence
  Description of Artificial Sequence: Synthetic oligonucleotide
  Sense strand starting at position 2960 of SEQ ID NO: 586018
ugguuauggauagguucua

SEQ ID NO: 685817 - RNA, 19 nt, Artificial Sequence
  Description of Artificial Sequence: Synthetic oligonucleotide
  Antisense strand to SEQ ID NO: 685816
uagaaccuauccauaacca

SEQ ID NO: 685818 - RNA, 19 nt, Artificial Sequence
  Description of Artificial Sequence: Synthetic oligonucleotide
  Sense strand starting at position 2961 of SEQ ID NO: 586018
gguuauggauagguucuaa

SEQ ID NO: 685819 - RNA, 19 nt, Artificial Sequence
  Description of Artificial Sequence: Synthetic oligonucleotide
  Antisense strand to SEQ ID NO: 685818
uuagaaccuauccauaacc

SEQ ID NO: 685820 - RNA, 19 nt, Artificial Sequence
  Description of Artificial Sequence: Synthetic oligonucleotide
  Sense strand starting at position 3014 of SEQ ID NO: 586018
ggacaaauguggcuuuaag

SEQ ID NO: 685821 - RNA, 19 nt, Artificial Sequence
  Description of Artificial Sequence: Synthetic oligonucleotide
  Antisense strand to SEQ ID NO: 685820
cuuaaagccacauuugucc

SEQ ID NO: 685822 - RNA, 19 nt, Artificial Sequence
  Description of Artificial Sequence: Synthetic oligonucleotide
  Sense strand starting at position 3032 of SEQ ID NO: 586018
ggauaagagcauuggcgua

SEQ ID NO: 685823 - RNA, 19 nt, Artificial Sequence
  Description of Artificial Sequence: Synthetic oligonucleotide
  Antisense strand to SEQ ID NO: 685822
uacgccaaugcucuuaucc

SEQ ID NO: 685824 - RNA, 19 nt, Artificial Sequence
  Description of Artificial Sequence: Synthetic oligonucleotide
  Sense strand starting at position 3037 of SEQ ID NO: 586018
agagcauuggcguagaaau

SEQ ID NO: 685825 - RNA, 19 nt, Artificial Sequence
  Description of Artificial Sequence: Synthetic oligonucleotide
  Antisense strand to SEQ ID NO: 685824
auuucuacgccaaugcucu

SEQ ID NO: 685826 - RNA, 19 nt, Artificial Sequence
  Description of Artificial Sequence: Synthetic oligonucleotide
  Sense strand starting at position 3039 of SEQ ID NO: 586018
agcauuggcguagaaauca

SEQ ID NO: 685827 - RNA, 19 nt, Artificial Sequence
  Description of Artificial Sequence: Synthetic oligonucleotide
  Antisense strand to SEQ ID NO: 685826
ugauuucuacgccaaugcu

SEQ ID NO: 685828 - RNA, 19 nt, Artificial Sequence
  Description of Artificial Sequence: Synthetic oligonucleotide
  Sense strand starting at position 3137 of SEQ ID NO: 586018
ggcaaagaagguugauauu

SEQ ID NO: 685829 - RNA, 19 nt, Artificial Sequence
  Description of Artificial Sequence: Synthetic oligonucleotide
  Antisense strand to SEQ ID NO: 685828
aauaucaaccuucuuugcc

SEQ ID NO: 685830 - RNA, 19 nt, Artificial Sequence
  Description of Artificial Sequence: Synthetic oligonucleotide
  Sense strand starting at position 3147 of SEQ ID NO: 586018
guugauauuugcuuauauc

SEQ ID NO: 685831 - RNA, 19 nt, Artificial Sequence
  Description of Artificial Sequence: Synthetic oligonucleotide
  Antisense strand to SEQ ID NO: 685830
gauauaagcaaauaucaac

SEQ ID NO: 685832 - RNA, 19 nt, Artificial Sequence
  Description of Artificial Sequence: Synthetic oligonucleotide
  Sense strand starting at position 3221 of SEQ ID NO: 586018
ugcuguuacagguauagag

SEQ ID NO: 685833 - RNA, 19 nt, Artificial Sequence
  Description of Artificial Sequence: Synthetic oligonucleotide
  Antisense strand to SEQ ID NO: 685832
cucuauaccuguaacagca

SEQ ID NO: 685834 - RNA, 19 nt, Artificial Sequence
  Description of Artificial Sequence: Synthetic oligonucleotide
  Sense strand starting at position 3450 of SEQ ID NO: 586018
uuaauugugucacuguaaa

SEQ ID NO: 685835 - RNA, 19 nt, Artificial Sequence
  Description of Artificial Sequence: Synthetic oligonucleotide
  Antisense strand to SEQ ID NO: 685834
uuuacagugacacaauuaa

SEQ ID NO: 685836 - RNA, 19 nt, Artificial Sequence
  Description of Artificial Sequence: Synthetic oligonucleotide
  Sense strand starting at position 3522 of SEQ ID NO: 586018
gggauugaauuagauuaug

SEQ ID NO: 685837 - RNA, 19 nt, Artificial Sequence
  Description of Artificial Sequence: Synthetic oligonucleotide
  Antisense strand to SEQ ID NO: 685836
cauaaucuaauucaauccc

SEQ ID NO: 685838 - RNA, 19 nt, Artificial Sequence
  Description of Artificial Sequence: Synthetic oligonucleotide
  Sense strand starting at position 3796 of SEQ ID NO: 586018
uuacuacuugauggauuau

SEQ ID NO: 685839 - RNA, 19 nt, Artificial Sequence
  Description of Artificial Sequence: Synthetic oligonucleotide
  Antisense strand to SEQ ID NO: 685838
auaauccaucaaguaguaa

SEQ ID NO: 685840 - RNA, 19 nt, Artificial Sequence
  Description of Artificial Sequence: Synthetic oligonucleotide
  Sense strand starting at position 3863 of SEQ ID NO: 586018
gugcuauuacaaugacauu

SEQ ID NO: 685841 - RNA, 19 nt, Artificial Sequence
  Description of Artificial Sequence: Synthetic oligonucleotide
  Antisense strand to SEQ ID NO: 685840
aaugucauuguaauagcac

SEQ ID NO: 685842 - RNA, 19 nt, Artificial Sequence
  Description of Artificial Sequence: Synthetic oligonucleotide
  Sense strand starting at position 3968 of SEQ ID NO: 586018
ccaucauguucuguuugga

SEQ ID NO: 685843 - RNA, 19 nt, Artificial Sequence
  Description of Artificial Sequence: Synthetic oligonucleotide
  Antisense strand to SEQ ID NO: 685842
uccaaacagaacaugaugg

SEQ ID NO: 685844 - RNA, 19 nt, Artificial Sequence
  Description of Artificial Sequence: Synthetic oligonucleotide
  Sense strand starting at position 3971 of SEQ ID NO: 586018
ucauguucuguuuggaaau

SEQ ID NO: 685845 - RNA, 19 nt, Artificial Sequence
  Description of Artificial Sequence: Synthetic oligonucleotide
  Antisense strand to SEQ ID NO: 685844
auuuccaaacagaacauga

SEQ ID NO: 685846 - RNA, 19 nt, Artificial Sequence
  Description of Artificial Sequence: Synthetic oligonucleotide
  Sense strand starting at position 153 of SEQ ID NO: 586019
ugacauagcuaucuagaaa

SEQ ID NO: 685847 - RNA, 19 nt, Artificial Sequence
  Description of Artificial Sequence: Synthetic oligonucleotide
  Antisense strand to SEQ ID NO: 685846
uuucuagauagcuauguca

SEQ ID NO: 685848 - RNA, 19 nt, Artificial Sequence
  Description of Artificial Sequence: Synthetic oligonucleotide
  Sense strand starting at position 224 of SEQ ID NO: 586019
cuauguuaggcugaagaua

SEQ ID NO: 685849 - RNA, 19 nt, Artificial Sequence
  Description of Artificial Sequence: Synthetic oligonucleotide
  Antisense strand to SEQ ID NO: 685848
uaucuucagccuaacauag

SEQ ID NO: 685850 - RNA, 19 nt, Artificial Sequence
  Description of Artificial Sequence: Synthetic oligonucleotide
  Sense strand starting at position 235 of SEQ ID NO: 586019
ugaagauaguuguuuauuc

SEQ ID NO: 685851 - RNA, 19 nt, Artificial Sequence
  Description of Artificial Sequence: Synthetic oligonucleotide
  Antisense strand to SEQ ID NO: 685850
gaauaaacaacuaucuuca

SEQ ID NO: 685852 - RNA, 19 nt, Artificial Sequence
  Description of Artificial Sequence: Synthetic oligonucleotide
  Sense strand starting at position 403 of SEQ ID NO: 586019
caugguuaaccguaucuga

SEQ ID NO: 685853 - RNA, 19 nt, Artificial Sequence
  Description of Artificial Sequence: Synthetic oligonucleotide
  Antisense strand to SEQ ID NO: 685852
ucagauacgguuaaccaug

SEQ ID NO: 685854 - RNA, 19 nt, Artificial Sequence
  Description of Artificial Sequence: Synthetic oligonucleotide
  Sense strand starting at position 425 of SEQ ID NO: 586019
gguuuaacucuuggaaugu

SEQ ID NO: 685855 - RNA, 19 nt, Artificial Sequence
  Description of Artificial Sequence: Synthetic oligonucleotide
  Antisense strand to SEQ ID NO: 685854
acauuccaagaguuaaacc

SEQ ID NO: 685856 - RNA, 19 nt, Artificial Sequence
  Description of Artificial Sequence: Synthetic oligonucleotide
  Sense strand starting at position 615 of SEQ ID NO: 586019
ccuuauauccaaggaauug

SEQ ID NO: 685857 - RNA, 19 nt, Artificial Sequence
  Description of Artificial Sequence: Synthetic oligonucleotide
  Antisense strand to SEQ ID NO: 685856
caauuccuuggauauaagg

SEQ ID NO: 685858 - RNA, 19 nt, Artificial Sequence
  Description of Artificial Sequence: Synthetic oligonucleotide
  Sense strand starting at position 663 of SEQ ID NO: 586019
aguuaauagugacugguua

SEQ ID NO: 685859 - RNA, 19 nt, Artificial Sequence
  Description of Artificial Sequence: Synthetic oligonucleotide
  Antisense strand to SEQ ID NO: 685858
uaaccagucacuauuaacu

SEQ ID NO: 685860 - RNA, 19 nt, Artificial Sequence
  Description of Artificial Sequence: Synthetic oligonucleotide
  Sense strand starting at position 664 of SEQ ID NO: 586019
guuaauagugacugguuaa

SEQ ID NO: 685861 - RNA, 19 nt, Artificial Sequence
  Description of Artificial Sequence: Synthetic oligonucleotide
  Antisense strand to SEQ ID NO: 685860
uuaaccagucacuauuaac

SEQ ID NO: 685862 - RNA, 19 nt, Artificial Sequence
  Description of Artificial Sequence: Synthetic oligonucleotide
  Sense strand starting at position 782 of SEQ ID NO: 586019
cagguagaggauuguaguu

SEQ ID NO: 685863 - RNA, 19 nt, Artificial Sequence
  Description of Artificial Sequence: Synthetic oligonucleotide
  Antisense strand to SEQ ID NO: 685862
aacuacaauccucuaccug

SEQ ID NO: 685864 - RNA, 19 nt, Artificial Sequence
  Description of Artificial Sequence: Synthetic oligonucleotide
  Sense strand starting at position 787 of SEQ ID NO: 586019
agaggauuguaguuaucug

SEQ ID NO: 685865 - RNA, 19 nt, Artificial Sequence
  Description of Artificial Sequence: Synthetic oligonucleotide
  Antisense strand to SEQ ID NO: 685864
cagauaacuacaauccucu

SEQ ID NO: 685866 - RNA, 19 nt, Artificial Sequence
  Description of Artificial Sequence: Synthetic oligonucleotide
  Sense strand starting at position 788 of SEQ ID NO: 586019
gaggauuguaguuaucugu

SEQ ID NO: 685867 - RNA, 19 nt, Artificial Sequence
  Description of Artificial Sequence: Synthetic oligonucleotide
  Antisense strand to SEQ ID NO: 685866
acagauaacuacaauccuc

SEQ ID NO: 685868 - RNA, 19 nt, Artificial Sequence
  Description of Artificial Sequence: Synthetic oligonucleotide
  Sense strand starting at position 892 of SEQ ID NO: 586019
cugagcuuucuguagaauu

SEQ ID NO: 685869 - RNA, 19 nt, Artificial Sequence
  Description of Artificial Sequence: Synthetic oligonucleotide
  Antisense strand to SEQ ID NO: 685868
aauucuacagaaagcucag

SEQ ID NO: 685870 - RNA, 19 nt, Artificial Sequence
  Description of Artificial Sequence: Synthetic oligonucleotide
  Sense strand starting at position 894 of SEQ ID NO: 586019
gagcuuucuguagaauucu

SEQ ID NO: 685871 - RNA, 19 nt, Artificial Sequence
  Description of Artificial Sequence: Synthetic oligonucleotide
  Antisense strand to SEQ ID NO: 685870
agaauucuacagaaagcuc

SEQ ID NO: 685872 - RNA, 19 nt, Artificial Sequence
  Description of Artificial Sequence: Synthetic oligonucleotide
  Sense strand starting at position 1512 of SEQ ID NO: 586019
ucugcacuugcucaaauga

SEQ ID NO: 685873 - RNA, 19 nt, Artificial Sequence
  Description of Artificial Sequence: Synthetic oligonucleotide
  Antisense strand to SEQ ID NO: 685872
ucauuugagcaagugcaga

SEQ ID NO: 685874 - RNA, 19 nt, Artificial Sequence
  Description of Artificial Sequence: Synthetic oligonucleotide
  Sense strand starting at position 1565 of SEQ ID NO: 586019
acugacauauuuggagaaa

SEQ ID NO: 685875 - RNA, 19 nt, Artificial Sequence
  Description of Artificial Sequence: Synthetic oligonucleotide
  Antisense strand to SEQ ID NO: 685874
uuucuccaaauaugucagu

SEQ ID NO: 685876 - RNA, 19 nt, Artificial Sequence
  Description of Artificial Sequence: Synthetic oligonucleotide
  Sense strand starting at position 1591 of SEQ ID NO: 586019
gguagauaauuacucuuga

SEQ ID NO: 685877 - RNA, 19 nt, Artificial Sequence
  Description of Artificial Sequence: Synthetic oligonucleotide
  Antisense strand to SEQ ID NO: 685876
ucaagaguaauuaucuacc

SEQ ID NO: 685878 - RNA, 19 nt, Artificial Sequence
  Description of Artificial Sequence: Synthetic oligonucleotide
  Sense strand starting at position 1592 of SEQ ID NO: 586019
guagauaauuacucuugac

SEQ ID NO: 685879 - RNA, 19 nt, Artificial Sequence
  Description of Artificial Sequence: Synthetic oligonucleotide
  Antisense strand to SEQ ID NO: 685878
gucaagaguaauuaucuac

SEQ ID NO: 685880 - RNA, 19 nt, Artificial Sequence
  Description of Artificial Sequence: Synthetic oligonucleotide
  Sense strand starting at position 1962 of SEQ ID NO: 586019
auuccacagucauugguua

SEQ ID NO: 685881 - RNA, 19 nt, Artificial Sequence
  Description of Artificial Sequence: Synthetic oligonucleotide
  Antisense strand to SEQ ID NO: 685880
uaaccaaugacuguggaau

SEQ ID NO: 685882 - RNA, 19 nt, Artificial Sequence
  Description of Artificial Sequence: Synthetic oligonucleotide
  Sense strand starting at position 1967 of SEQ ID NO: 586019
acagucauugguuagguuu

SEQ ID NO: 685883 - RNA, 19 nt, Artificial Sequence
  Description of Artificial Sequence: Synthetic oligonucleotide
  Antisense strand to SEQ ID NO: 685882
aaaccuaaccaaugacugu

SEQ ID NO: 685884 - RNA, 19 nt, Artificial Sequence
  Description of Artificial Sequence: Synthetic oligonucleotide
  Sense strand starting at position 2017 of SEQ ID NO: 586019
aucuguaagauugggcuaa

SEQ ID NO: 685885 - RNA, 19 nt, Artificial Sequence
  Description of Artificial Sequence: Synthetic oligonucleotide
  Antisense strand to SEQ ID NO: 685884
uuagcccaaucuuacagau

SEQ ID NO: 685886 - RNA, 19 nt, Artificial Sequence
  Description of Artificial Sequence: Synthetic oligonucleotide
  Sense strand starting at position 2019 of SEQ ID NO: 586019
cuguaagauugggcuaaua

SEQ ID NO: 685887 - RNA, 19 nt, Artificial Sequence
  Description of Artificial Sequence: Synthetic oligonucleotide
  Antisense strand to SEQ ID NO: 685886
uauuagcccaaucuuacag

SEQ ID NO: 685888 - RNA, 19 nt, Artificial Sequence
  Description of Artificial Sequence: Synthetic oligonucleotide
  Sense strand starting at position 2029 of SEQ ID NO: 586019
gggcuaauacauggcaaga

SEQ ID NO: 685889 - RNA, 19 nt, Artificial Sequence
  Description of Artificial Sequence: Synthetic oligonucleotide
  Antisense strand to SEQ ID NO: 685888
ucuugccauguauuagccc

SEQ ID NO: 685890 - RNA, 19 nt, Artificial Sequence
  Description of Artificial Sequence: Synthetic oligonucleotide
  Sense strand starting at position 2184 of SEQ ID NO: 586019
accaaagagucagucacuu

SEQ ID NO: 685891 - RNA, 19 nt, Artificial Sequence
  Description of Artificial Sequence: Synthetic oligonucleotide
  Antisense strand to SEQ ID NO: 685890
aagugacugacucuuuggu

SEQ ID NO: 685892 - RNA, 19 nt, Artificial Sequence
  Description of Artificial Sequence: Synthetic oligonucleotide
  Sense strand starting at position 2190 of SEQ ID NO: 586019
gagucagucacuuaugggu

SEQ ID NO: 685893 - RNA, 19 nt, Artificial Sequence
  Description of Artificial Sequence: Synthetic oligonucleotide
  Antisense strand to SEQ ID NO: 685892
acccauaagugacugacuc

SEQ ID NO: 685894 - RNA, 19 nt, Artificial Sequence
  Description of Artificial Sequence: Synthetic oligonucleotide
  Sense strand starting at position 2195 of SEQ ID NO: 586019
agucacuuauggguagacu

SEQ ID NO: 685895 - RNA, 19 nt, Artificial Sequence
  Description of Artificial Sequence: Synthetic oligonucleotide
  Antisense strand to SEQ ID NO: 685894
agucuacccauaagugacu

SEQ ID NO: 685896 - RNA, 19 nt, Artificial Sequence
  Description of Artificial Sequence: Synthetic oligonucleotide
  Sense strand starting at position 2204 of SEQ ID NO: 586019
uggguagacugaucuacaa

SEQ ID NO: 685897 - RNA, 19 nt, Artificial Sequence
  Description of Artificial Sequence: Synthetic oligonucleotide
  Antisense strand to SEQ ID NO: 685896
uuguagaucagucuaccca

SEQ ID NO: 685898 - RNA, 19 nt, Artificial Sequence
  Description of Artificial Sequence: Synthetic oligonucleotide
  Sense strand starting at position 2225 of SEQ ID NO: 586019
ggaaguauuaaagguuuac

SEQ ID NO: 685899 - RNA, 19 nt, Artificial Sequence
  Description of Artificial Sequence: Synthetic oligonucleotide
  Antisense strand to SEQ ID NO: 685898
guaaaccuuuaauacuucc

SEQ ID NO: 685900 - RNA, 19 nt, Artificial Sequence
  Description of Artificial Sequence: Synthetic oligonucleotide
  Sense strand starting at position 2439 of SEQ ID NO: 586019
guggguuuaugaccuauau

SEQ ID NO: 685901 - RNA, 19 nt, Artificial Sequence
  Description of Artificial Sequence: Synthetic oligonucleotide
  Antisense strand to SEQ ID NO: 685900
auauaggucauaaacccac

SEQ ID NO: 685902 - RNA, 19 nt, Artificial Sequence
  Description of Artificial Sequence: Synthetic oligonucleotide
  Sense strand starting at position 2441 of SEQ ID NO: 586019
ggguuuaugaccuauaugu

SEQ ID NO: 685903 - RNA, 19 nt, Artificial Sequence
  Description of Artificial Sequence: Synthetic oligonucleotide
  Antisense strand to SEQ ID NO: 685902
acauauaggucauaaaccc

SEQ ID NO: 685904 - RNA, 19 nt, Artificial Sequence
  Description of Artificial Sequence: Synthetic oligonucleotide
  Sense strand starting at position 2443 of SEQ ID NO: 586019
guuuaugaccuauauguaa

SEQ ID NO: 685905 - RNA, 19 nt, Artificial Sequence
  Description of Artificial Sequence: Synthetic oligonucleotide
  Antisense strand to SEQ ID NO: 685904
uuacauauaggucauaaac

SEQ ID NO: 685906 - RNA, 19 nt, Artificial Sequence
  Description of Artificial Sequence: Synthetic oligonucleotide
  Sense strand starting at position 2483 of SEQ ID NO: 586019
gguauauauucuguacaca

SEQ ID NO: 685907 - RNA, 19 nt, Artificial Sequence
  Description of Artificial Sequence: Synthetic oligonucleotide
  Antisense strand to SEQ ID NO: 685906
uguguacagaauauauacc

SEQ ID NO: 685908 - RNA, 19 nt, Artificial Sequence
  Description of Artificial Sequence: Synthetic oligonucleotide
  Sense strand starting at position 2603 of SEQ ID NO: 586019
caguauuaagcuugagauc

SEQ ID NO: 685909 - RNA, 19 nt, Artificial Sequence
  Description of Artificial Sequence: Synthetic oligonucleotide
  Antisense strand to SEQ ID NO: 685908
gaucucaagcuuaauacug

SEQ ID NO: 685910 - RNA, 19 nt, Artificial Sequence
  Description of Artificial Sequence: Synthetic oligonucleotide
  Sense strand starting at position 2687 of SEQ ID NO: 586019
cagaguuccucuucgaaga

SEQ ID NO: 685911 - RNA, 19 nt, Artificial Sequence
  Description of Artificial Sequence: Synthetic oligonucleotide
  Antisense strand to SEQ ID NO: 685910
ucuucgaagaggaacucug

SEQ ID NO: 685912 - RNA, 19 nt, Artificial Sequence
  Description of Artificial Sequence: Synthetic oligonucleotide
  Sense strand starting at position 2688 of SEQ ID NO: 586019
agaguuccucuucgaagaa

SEQ ID NO: 685913 - RNA, 19 nt, Artificial Sequence
  Description of Artificial Sequence: Synthetic oligonucleotide
  Antisense strand to SEQ ID NO: 685912
uucuucgaagaggaacucu

SEQ ID NO: 685914 - RNA, 19 nt, Artificial Sequence
  Description of Artificial Sequence: Synthetic oligonucleotide
  Sense strand starting at position 2692 of SEQ ID NO: 586019
uuccucuucgaagaaacuu

SEQ ID NO: 685915 - RNA, 19 nt, Artificial Sequence
  Description of Artificial Sequence: Synthetic oligonucleotide
  Antisense strand to SEQ ID NO: 685914
aaguuucuucgaagaggaa

SEQ ID NO: 685916 - RNA, 19 nt, Artificial Sequence
  Description of Artificial Sequence: Synthetic oligonucleotide
  Sense strand starting at position 2853 of SEQ ID NO: 586019
uuguguguuaucuuucugu

SEQ ID NO: 685917 - RNA, 19 nt, Artificial Sequence
  Description of Artificial Sequence: Synthetic oligonucleotide
  Antisense strand to SEQ ID NO: 685916
acagaaagauaacacacaa

SEQ ID NO: 685918 - RNA, 19 nt, Artificial Sequence
  Description of Artificial Sequence: Synthetic oligonucleotide
  Sense strand starting at position 3376 of SEQ ID NO: 586019
cuagaacgguugucaagaa

SEQ ID NO: 685919 - RNA, 19 nt, Artificial Sequence
  Description of Artificial Sequence: Synthetic oligonucleotide
  Antisense strand to SEQ ID NO: 685918
uucuugacaaccguucuag

SEQ ID NO: 685920 - RNA, 19 nt, Artificial Sequence
  Description of Artificial Sequence: Synthetic oligonucleotide
  Sense strand starting at position 3394 of SEQ ID NO: 586019
aagggaaauugcucugcau

SEQ ID NO: 685921 - RNA, 19 nt, Artificial Sequence
  Description of Artificial Sequence: Synthetic oligonucleotide
  Antisense strand to SEQ ID NO: 685920
augcagagcaauuucccuu

SEQ ID NO: 685922 - RNA, 19 nt, Artificial Sequence
  Description of Artificial Sequence: Synthetic oligonucleotide
  Sense strand starting at position 3497 of SEQ ID NO: 586019
guuaguauaauggagcaga

SEQ ID NO: 685923 - RNA, 19 nt, Artificial Sequence
  Description of Artificial Sequence: Synthetic oligonucleotide
  Antisense strand to SEQ ID NO: 685922
ucugcuccauuauacuaac

SEQ ID NO: 685924 - RNA, 19 nt, Artificial Sequence
  Description of Artificial Sequence: Synthetic oligonucleotide
  Sense strand starting at position 3875 of SEQ ID NO: 586019
ggcaaccguauccaugaaa

SEQ ID NO: 685925 - RNA, 19 nt, Artificial Sequence
  Description of Artificial Sequence: Synthetic oligonucleotide
  Antisense strand to SEQ ID NO: 685924
uuucauggauacgguugcc

SEQ ID NO: 685926 - RNA, 19 nt, Artificial Sequence
  Description of Artificial Sequence: Synthetic oligonucleotide
  Sense strand starting at position 1 of SEQ ID NO: 586020
ucugccuuucucugaaaug

SEQ ID NO: 685927 - RNA, 19 nt, Artificial Sequence
  Description of Artificial Sequence: Synthetic oligonucleotide
  Antisense strand to SEQ ID NO: 685926
cauuucagagaaaggcaga

SEQ ID NO: 685928 - RNA, 19 nt, Artificial Sequence
  Description of Artificial Sequence: Synthetic oligonucleotide
  Sense strand starting at position 55 of SEQ ID NO: 586020
gcagaaaucugguugauua

SEQ ID NO: 685929 - RNA, 19 nt, Artificial Sequence
  Description of Artificial Sequence: Synthetic oligonucleotide
  Antisense strand to SEQ ID NO: 685928
uaaucaaccagauuucugc

SEQ ID NO: 685930 - RNA, 19 nt, Artificial Sequence
  Description of Artificial Sequence: Synthetic oligonucleotide
  Sense strand starting at position 56 of SEQ ID NO: 586020
cagaaaucugguugauuaa

SEQ ID NO: 685931 - RNA, 19 nt, Artificial Sequence
  Description of Artificial Sequence: Synthetic oligonucleotide
  Antisense strand to SEQ ID NO: 685930
uuaaucaaccagauuucug

SEQ ID NO: 685932 - RNA, 19 nt, Artificial Sequence
  Description of Artificial Sequence: Synthetic oligonucleotide
  Sense strand starting at position 114 of SEQ ID NO: 586020
cagugcguucuccauugaa

SEQ ID NO: 685933 - RNA, 19 nt, Artificial Sequence
  Description of Artificial Sequence: Synthetic oligonucleotide
  Antisense strand to SEQ ID NO: 685932
uucaauggagaacgcacug

SEQ ID NO: 685934 - RNA, 19 nt, Artificial Sequence
  Description of Artificial Sequence: Synthetic oligonucleotide
  Sense strand starting at position 261 of SEQ ID NO: 586020
uagugaaaugcagagguuu

SEQ ID NO: 685935 - RNA, 19 nt, Artificial Sequence
  Description of Artificial Sequence: Synthetic oligonucleotide
  Antisense strand to SEQ ID NO: 685934
aaaccucugcauuucacua

SEQ ID NO: 685936 - RNA, 19 nt, Artificial Sequence
  Description of Artificial Sequence: Synthetic oligonucleotide
  Sense strand starting at position 579 of SEQ ID NO: 586020
ccucgucuucugcaccaaa

SEQ ID NO: 685937 - RNA, 19 nt, Artificial Sequence
  Description of Artificial Sequence: Synthetic oligonucleotide
  Antisense strand to SEQ ID NO: 685936
uuuggugcagaagacgagg

SEQ ID NO: 685938 - RNA, 19 nt, Artificial Sequence
  Description of Artificial Sequence: Synthetic oligonucleotide
  Sense strand starting at position 899 of SEQ ID NO: 586020
cccaguuauccuuguccca

SEQ ID NO: 685939 - RNA, 19 nt, Artificial Sequence
  Description of Artificial Sequence: Synthetic oligonucleotide
  Antisense strand to SEQ ID NO: 685938
ugggacaaggauaacuggg

SEQ ID NO: 685940 - RNA, 19 nt, Artificial Sequence
  Description of Artificial Sequence: Synthetic oligonucleotide
  Sense strand starting at position 902 of SEQ ID NO: 586020
aguuauccuugucccagau

SEQ ID NO: 685941 - RNA, 19 nt, Artificial Sequence
  Description of Artificial Sequence: Synthetic oligonucleotide
  Antisense strand to SEQ ID NO: 685940
aucugggacaaggauaacu

SEQ ID NO: 685942 - RNA, 19 nt, Artificial Sequence
  Description of Artificial Sequence: Synthetic oligonucleotide
  Sense strand starting at position 969 of SEQ ID NO: 586020
gucccagaaucguccuaca

SEQ ID NO: 685943 - RNA, 19 nt, Artificial Sequence
  Description of Artificial Sequence: Synthetic oligonucleotide
  Antisense strand to SEQ ID NO: 685942
uguaggacgauucugggac

SEQ ID NO: 685944 - RNA, 19 nt, Artificial Sequence
  Description of Artificial Sequence: Synthetic oligonucleotide
  Sense strand starting at position 2220 of SEQ ID NO: 586020
uugugaauagcuggucgaa

SEQ ID NO: 685945 - RNA, 19 nt, Artificial Sequence
  Description of Artificial Sequence: Synthetic oligonucleotide
  Antisense strand to SEQ ID NO: 685944
uucgaccagcuauucacaa

SEQ ID NO: 685946 - RNA, 19 nt, Artificial Sequence
  Description of Artificial Sequence: Synthetic oligonucleotide
  Sense strand starting at position 2222 of SEQ ID NO: 586020
gugaauagcuggucgaagu

SEQ ID NO: 685947 - RNA, 19 nt, Artificial Sequence
  Description of Artificial Sequence: Synthetic oligonucleotide
  Antisense strand to SEQ ID NO: 685946
acuucgaccagcuauucac

SEQ ID NO: 685948 - RNA, 19 nt, Artificial Sequence
  Description of Artificial Sequence: Synthetic oligonucleotide
  Sense strand starting at position 2223 of SEQ ID NO: 586020
ugaauagcuggucgaaguu

SEQ ID NO: 685949 - RNA, 19 nt, Artificial Sequence
  Description of Artificial Sequence: Synthetic oligonucleotide
  Antisense strand to SEQ ID NO: 685948
aacuucgaccagcuauuca

SEQ ID NO: 685950 - RNA, 19 nt, Artificial Sequence
  Description of Artificial Sequence: Synthetic oligonucleotide
  Sense strand starting at position 2232 of SEQ ID NO: 586020
ggucgaaguuugguugaag

SEQ ID NO: 685951 - RNA, 19 nt, Artificial Sequence
  Description of Artificial Sequence: Synthetic oligonucleotide
  Antisense strand to SEQ ID NO: 685950
cuucaaccaaacuucgacc

SEQ ID NO: 685952 - RNA, 19 nt, Artificial Sequence
  Description of Artificial Sequence: Synthetic oligonucleotide
  Sense strand starting at position 2281 of SEQ ID NO: 586020
caaagagacucuuaaaggu

SEQ ID NO: 685953 - RNA, 19 nt, Artificial Sequence
  Description of Artificial Sequence: Synthetic oligonucleotide
  Antisense strand to SEQ ID NO: 685952
accuuuaagagucucuuug

SEQ ID NO: 685954 - RNA, 19 nt, Artificial Sequence
  Description of Artificial Sequence: Synthetic oligonucleotide
  Sense strand starting at position 2398 of SEQ ID NO: 586020
augaguuucccauacucuu

SEQ ID NO: 685955 - RNA, 19 nt, Artificial Sequence
  Description of Artificial Sequence: Synthetic oligonucleotide
  Antisense strand to SEQ ID NO: 685954
aagaguaugggaaacucau

SEQ ID NO: 685956 - RNA, 19 nt, Artificial Sequence
  Description of Artificial Sequence: Synthetic oligonucleotide
  Sense strand starting at position 2506 of SEQ ID NO: 586020
gacguuauuucuguguugu

SEQ ID NO: 685957 - RNA, 19 nt, Artificial Sequence
  Description of Artificial Sequence: Synthetic oligonucleotide
  Antisense strand to SEQ ID NO: 685956
acaacacagaaauaacguc

SEQ ID NO: 685958 - RNA, 19 nt, Artificial Sequence
  Description of Artificial Sequence: Synthetic oligonucleotide
  Sense strand starting at position 2507 of SEQ ID NO: 586020
acguuauuucuguguuguu

SEQ ID NO: 685959 - RNA, 19 nt, Artificial Sequence
  Description of Artificial Sequence: Synthetic oligonucleotide
  Antisense strand to SEQ ID NO: 685958
aacaacacagaaauaacgu

SEQ ID NO: 685960 - RNA, 19 nt, Artificial Sequence
  Description of Artificial Sequence: Synthetic oligonucleotide
  Sense strand starting at position 2508 of SEQ ID NO: 586020
cguuauuucuguguuguuc

SEQ ID NO: 685961 - RNA, 19 nt, Artificial Sequence
  Description of Artificial Sequence: Synthetic oligonucleotide
  Antisense strand to SEQ ID NO: 685960
gaacaacacagaaauaacg

SEQ ID NO: 685962 - RNA, 19 nt, Artificial Sequence
  Description of Artificial Sequence: Synthetic oligonucleotide
  Sense strand starting at position 2710 of SEQ ID NO: 586020
gauuguaaggcuugggaaa

SEQ ID NO: 685963 - RNA, 19 nt, Artificial Sequence
  Description of Artificial Sequence: Synthetic oligonucleotide
  Antisense strand to SEQ ID NO: 685962
uuucccaagccuuacaauc

SEQ ID NO: 685964 - RNA, 19 nt, Artificial Sequence
  Description of Artificial Sequence: Synthetic oligonucleotide
  Sense strand starting at position 2711 of SEQ ID NO: 586020
auuguaaggcuugggaaau

SEQ ID NO: 685965 - RNA, 19 nt, Artificial Sequence
  Description of Artificial Sequence: Synthetic oligonucleotide
  Antisense strand to SEQ ID NO: 685964
auuucccaagccuuacaau

SEQ ID NO: 685966 - RNA, 19 nt, Artificial Sequence
  Description of Artificial Sequence: Synthetic oligonucleotide
  Sense strand starting at position 2732 of SEQ ID NO: 586020
accagacugacuugguagu

SEQ ID NO: 685967 - RNA, 19 nt, Artificial Sequence
  Description of Artificial Sequence: Synthetic oligonucleotide
  Antisense strand to SEQ ID NO: 685966
acuaccaagucagucuggu

SEQ ID NO: 685968 - RNA, 19 nt, Artificial Sequence
  Description of Artificial Sequence: Synthetic oligonucleotide
  Sense strand starting at position 2813 of SEQ ID NO: 586020
gugcacugucuugaaacua

SEQ ID NO: 685969 - RNA, 19 nt, Artificial Sequence
  Description of Artificial Sequence: Synthetic oligonucleotide
  Antisense strand to SEQ ID NO: 685968
uaguuucaagacagugcac

SEQ ID NO: 685970 - RNA, 19 nt, Artificial Sequence
  Description of Artificial Sequence: Synthetic oligonucleotide
  Sense strand starting at position 2958 of SEQ ID NO: 586020
agacauuagcuauaguagu

SEQ ID NO: 685971 - RNA, 19 nt, Artificial Sequence
  Description of Artificial Sequence: Synthetic oligonucleotide
  Antisense strand to SEQ ID NO: 685970
acuacuauagcuaaugucu

SEQ ID NO: 685972 - RNA, 19 nt, Artificial Sequence
  Description of Artificial Sequence: Synthetic oligonucleotide
  Sense strand starting at position 2969 of SEQ ID NO: 586020
auaguaguggcucaaguua

SEQ ID NO: 685973 - RNA, 19 nt, Artificial Sequence
  Description of Artificial Sequence: Synthetic oligonucleotide
  Antisense strand to SEQ ID NO: 685972
uaacuugagccacuacuau

SEQ ID NO: 685974 - RNA, 19 nt, Artificial Sequence
  Description of Artificial Sequence: Synthetic oligonucleotide
  Sense strand starting at position 3139 of SEQ ID NO: 586020
gaggaaguggaguguuuca

SEQ ID NO: 685975 - RNA, 19 nt, Artificial Sequence
  Description of Artificial Sequence: Synthetic oligonucleotide
  Antisense strand to SEQ ID NO: 685974
ugaaacacuccacuuccuc

SEQ ID NO: 685976 - RNA, 19 nt, Artificial Sequence
  Description of Artificial Sequence: Synthetic oligonucleotide
  Sense strand starting at position 3144 of SEQ ID NO: 586020
aguggaguguuucaauuug

SEQ ID NO: 685977 - RNA, 19 nt, Artificial Sequence
  Description of Artificial Sequence: Synthetic oligonucleotide
  Antisense strand to SEQ ID NO: 685976
caaauugaaacacuccacu

SEQ ID NO: 685978 - RNA, 19 nt, Artificial Sequence
  Description of Artificial Sequence: Synthetic oligonucleotide
  Sense strand starting at position 3159 of SEQ ID NO: 586020
uuugguuuggucgggauuu

SEQ ID NO: 685979 - RNA, 19 nt, Artificial Sequence
  Description of Artificial Sequence: Synthetic oligonucleotide
  Antisense strand to SEQ ID NO: 685978
aaaucccgaccaaaccaaa

SEQ ID NO: 685980 - RNA, 19 nt, Artificial Sequence
  Description of Artificial Sequence: Synthetic oligonucleotide
  Sense strand starting at position 3223 of SEQ ID NO: 586020
cccuuugucguccaucaca

SEQ ID NO: 685981 - RNA, 19 nt, Artificial Sequence
  Description of Artificial Sequence: Synthetic oligonucleotide
  Antisense strand to SEQ ID NO: 685980
ugugauggacgacaaaggg

SEQ ID NO: 685982 - RNA, 19 nt, Artificial Sequence
  Description of Artificial Sequence: Synthetic oligonucleotide
  Sense strand starting at position 3358 of SEQ ID NO: 586020
auguuaguuccauaacaag

SEQ ID NO: 685983 - RNA, 19 nt, Artificial Sequence
  Description of Artificial Sequence: Synthetic oligonucleotide
  Antisense strand to SEQ ID NO: 685982
cuuguuauggaacuaacau

SEQ ID NO: 685984 - RNA, 19 nt, Artificial Sequence
  Description of Artificial Sequence: Synthetic oligonucleotide
  Sense strand starting at position 3459 of SEQ ID NO: 586020
aaaguuucucagugaugug

SEQ ID NO: 685985 - RNA, 19 nt, Artificial Sequence
  Description of Artificial Sequence: Synthetic oligonucleotide
  Antisense strand to SEQ ID NO: 685984
cacaucacugagaaacuuu

SEQ ID NO: 685986 - RNA, 19 nt, Artificial Sequence
  Description of Artificial Sequence: Synthetic oligonucleotide
  Sense strand starting at position 3468 of SEQ ID NO: 586020
cagugaugugagcauguau

SEQ ID NO: 685987 - RNA, 19 nt, Artificial Sequence
  Description of Artificial Sequence: Synthetic oligonucleotide
  Antisense strand to SEQ ID NO: 685986
auacaugcucacaucacug

SEQ ID NO: 685988 - RNA, 19 nt, Artificial Sequence
  Description of Artificial Sequence: Synthetic oligonucleotide
  Sense strand starting at position 3482 of SEQ ID NO: 586020
uguauuagaucaguguucu

SEQ ID NO: 685989 - RNA, 19 nt, Artificial Sequence
  Description of Artificial Sequence: Synthetic oligonucleotide
  Antisense strand to SEQ ID NO: 685988
agaacacugaucuaauaca

SEQ ID NO: 685990 - RNA, 19 nt, Artificial Sequence
  Description of Artificial Sequence: Synthetic oligonucleotide
  Sense strand starting at position 3483 of SEQ ID NO: 586020
guauuagaucaguguucuc

SEQ ID NO: 685991 - RNA, 19 nt, Artificial Sequence
  Description of Artificial Sequence: Synthetic oligonucleotide
  Antisense strand to SEQ ID NO: 685990
gagaacacugaucuaauac

SEQ ID NO: 685992 - RNA, 19 nt, Artificial Sequence
  Description of Artificial Sequence: Synthetic oligonucleotide
  Sense strand starting at position 3486 of SEQ ID NO: 586020
uuagaucaguguucucaaa

SEQ ID NO: 685993 - RNA, 19 nt, Artificial Sequence
  Description of Artificial Sequence: Synthetic oligonucleotide
  Antisense strand to SEQ ID NO: 685992
uuugagaacacugaucuaa

SEQ ID NO: 685994 - RNA, 19 nt, Artificial Sequence
  Description of Artificial Sequence: Synthetic oligonucleotide
  Sense strand starting at position 3913 of SEQ ID NO: 586020
ugagacauaucugcauugu

SEQ ID NO: 685995 - RNA, 19 nt, Artificial Sequence
  Description of Artificial Sequence: Synthetic oligonucleotide
  Antisense strand to SEQ ID NO: 685994
acaaugcagauaugucuca

SEQ ID NO: 685996 - RNA, 19 nt, Artificial Sequence
  Description of Artificial Sequence: Synthetic oligonucleotide
  Sense strand starting at position 3914 of SEQ ID NO: 586020
gagacauaucugcauuguc

SEQ ID NO: 685997 - RNA, 19 nt, Artificial Sequence
  Description of Artificial Sequence: Synthetic oligonucleotide
  Antisense strand to SEQ ID NO: 685996
gacaaugcagauaugucuc

SEQ ID NO: 685998 - RNA, 19 nt, Artificial Sequence
  Description of Artificial Sequence: Synthetic oligonucleotide
  Sense strand starting at position 3917 of SEQ ID NO: 586020
acauaucugcauugucacu

SEQ ID NO: 685999 - RNA, 19 nt, Artificial Sequence
  Description of Artificial Sequence: Synthetic oligonucleotide
  Antisense strand to SEQ ID NO: 685998
agugacaaugcagauaugu

SEQ ID NO: 686000 - RNA, 19 nt, Artificial Sequence
  Description of Artificial Sequence: Synthetic oligonucleotide
  Sense strand starting at position 3922 of SEQ ID NO: 586020
ucugcauugucacugugau

SEQ ID NO: 686001 - RNA, 19 nt, Artificial Sequence
  Description of Artificial Sequence: Synthetic oligonucleotide
  Antisense strand to SEQ ID NO: 686000
aucacagugacaaugcaga

SEQ ID NO: 686002 - RNA, 19 nt, Artificial Sequence
  Description of Artificial Sequence: Synthetic oligonucleotide
  Sense strand starting at position 3923 of SEQ ID NO: 586020
cugcauugucacugugaug

SEQ ID NO: 686003 - RNA, 19 nt, Artificial Sequence
  Description of Artificial Sequence: Synthetic oligonucleotide
  Antisense strand to SEQ ID NO: 686002
caucacagugacaaugcag

SEQ ID NO: 686004 - RNA, 19 nt, Artificial Sequence
  Description of Artificial Sequence: Synthetic oligonucleotide
  Sense strand starting at position 3937 of SEQ ID NO: 586020
ugaugauauuugcacaaug

SEQ ID NO: 686005 - RNA, 19 nt, Artificial Sequence
  Description of Artificial Sequence: Synthetic oligonucleotide
  Antisense strand to SEQ ID NO: 686004
cauugugcaaauaucauca

SEQ ID NO: 686006 - RNA, 19 nt, Artificial Sequence
  Description of Artificial Sequence: Synthetic oligonucleotide
  Sense strand starting at position 71 of SEQ ID NO: 586021
ugaggucuuguacaaggua

SEQ ID NO: 686007 - RNA, 19 nt, Artificial Sequence
  Description of Artificial Sequence: Synthetic oligonucleotide
  Antisense strand to SEQ ID NO: 686006
uaccuuguacaagaccuca

SEQ ID NO: 686008 - RNA, 19 nt, Artificial Sequence
  Description of Artificial Sequence: Synthetic oligonucleotide
  Sense strand starting at position 74 of SEQ ID NO: 586021
ggucuuguacaagguaaag

SEQ ID NO: 686009 - RNA, 19 nt, Artificial Sequence
  Description of Artificial Sequence: Synthetic oligonucleotide
  Antisense strand to SEQ ID NO: 686008
cuuuaccuuguacaagacc

SEQ ID NO: 686010 - RNA, 19 nt, Artificial Sequence
  Description of Artificial Sequence: Synthetic oligonucleotide
  Sense strand starting at position 257 of SEQ ID NO: 586021
ggcuucugccacgaaguga

SEQ ID NO: 686011 - RNA, 19 nt, Artificial Sequence
  Description of Artificial Sequence: Synthetic oligonucleotide
  Antisense strand to SEQ ID NO: 686010
ucacuucguggcagaagcc

SEQ ID NO: 686012 - RNA, 19 nt, Artificial Sequence
  Description of Artificial Sequence: Synthetic oligonucleotide
  Sense strand starting at position 399 of SEQ ID NO: 586021
uucggaugcuugcaagaag

SEQ ID NO: 686013 - RNA, 19 nt, Artificial Sequence
  Description of Artificial Sequence: Synthetic oligonucleotide
  Antisense strand to SEQ ID NO: 686012
cuucuugcaagcauccgaa

SEQ ID NO: 686014 - RNA, 19 nt, Artificial Sequence
  Description of Artificial Sequence: Synthetic oligonucleotide
  Sense strand starting at position 661 of SEQ ID NO: 586021
ggcggccucucuccuaaua

SEQ ID NO: 686015 - RNA, 19 nt, Artificial Sequence
  Description of Artificial Sequence: Synthetic oligonucleotide
  Antisense strand to SEQ ID NO: 686014
uauuaggagagaggccgcc

SEQ ID NO: 686016 - RNA, 19 nt, Artificial Sequence
  Description of Artificial Sequence: Synthetic oligonucleotide
  Sense strand starting at position 663 of SEQ ID NO: 586021
cggccucucuccuaauaaa

SEQ ID NO: 686017 - RNA, 19 nt, Artificial Sequence
  Description of Artificial Sequence: Synthetic oligonucleotide
  Antisense strand to SEQ ID NO: 686016
uuuauuaggagagaggccg

SEQ ID NO: 686018 - RNA, 19 nt, Artificial Sequence
  Description of Artificial Sequence: Synthetic oligonucleotide
  Sense strand starting at position 961 of SEQ ID NO: 586021
ggaucugcgggacagaauu

SEQ ID NO: 686019 - RNA, 19 nt, Artificial Sequence
  Description of Artificial Sequence: Synthetic oligonucleotide
  Antisense strand to SEQ ID NO: 686018
aauucugucccgcagaucc

SEQ ID NO: 686020 - RNA, 19 nt, Artificial Sequence
  Description of Artificial Sequence: Synthetic oligonucleotide
  Sense strand starting at position 972 of SEQ ID NO: 586021
acagaauucucagagcgga

SEQ ID NO: 686021 - RNA, 19 nt, Artificial Sequence
  Description of Artificial Sequence: Synthetic oligonucleotide
  Antisense strand to SEQ ID NO: 686020
uccgcucugagaauucugu

SEQ ID NO: 686022 - RNA, 19 nt, Artificial Sequence
  Description of Artificial Sequence: Synthetic oligonucleotide
  Sense strand starting at position 2307 of SEQ ID NO: 586021
cggcgauuauucgcaacaa

SEQ ID NO: 686023 - RNA, 19 nt, Artificial Sequence
  Description of Artificial Sequence: Synthetic oligonucleotide
  Antisense strand to SEQ ID NO: 686022
uuguugcgaauaaucgccg

SEQ ID NO: 686024 - RNA, 19 nt, Artificial Sequence
  Description of Artificial Sequence: Synthetic oligonucleotide
  Sense strand starting at position 2327 of SEQ ID NO: 586021
gaagaaaguuucugggugu

SEQ ID NO: 686025 - RNA, 19 nt, Artificial Sequence
  Description of Artificial Sequence: Synthetic oligonucleotide
  Antisense strand to SEQ ID NO: 686024
acacccagaaacuuucuuc

SEQ ID NO: 686026 - RNA, 19 nt, Artificial Sequence
  Description of Artificial Sequence: Synthetic oligonucleotide
  Sense strand starting at position 2328 of SEQ ID NO: 586021
aagaaaguuucuggguguu

SEQ ID NO: 686027 - RNA, 19 nt, Artificial Sequence
  Description of Artificial Sequence: Synthetic oligonucleotide
  Antisense strand to SEQ ID NO: 686026
aacacccagaaacuuucuu

SEQ ID NO: 686028 - RNA, 19 nt, Artificial Sequence
  Description of Artificial Sequence: Synthetic oligonucleotide
  Sense strand starting at position 2503 of SEQ ID NO: 586021
aguugauucuccuuauaua

SEQ ID NO: 686029 - RNA, 19 nt, Artificial Sequence
  Description of Artificial Sequence: Synthetic oligonucleotide
  Antisense strand to SEQ ID NO: 686028
uauauaaggagaaucaacu

SEQ ID NO: 686030 - RNA, 19 nt, Artificial Sequence
  Description of Artificial Sequence: Synthetic oligonucleotide
  Sense strand starting at position 2504 of SEQ ID NO: 586021
guugauucuccuuauauac

SEQ ID NO: 686031 - RNA, 19 nt, Artificial Sequence
  Description of Artificial Sequence: Synthetic oligonucleotide
  Antisense strand to SEQ ID NO: 686030
guauauaaggagaaucaac

SEQ ID NO: 686032 - RNA, 19 nt, Artificial Sequence
  Description of Artificial Sequence: Synthetic oligonucleotide
  Sense strand starting at position 2526 of SEQ ID NO: 586021
gugcgagcugcuuacccaa

SEQ ID NO: 686033 - RNA, 19 nt, Artificial Sequence
  Description of Artificial Sequence: Synthetic oligonucleotide
  Antisense strand to SEQ ID NO: 686032
uuggguaagcagcucgcac

SEQ ID NO: 686034 - RNA, 19 nt, Artificial Sequence
  Description of Artificial Sequence: Synthetic oligonucleotide
  Sense strand starting at position 2570 of SEQ ID NO: 586021
ggcucaagacuuugcugaa

SEQ ID NO: 686035 - RNA, 19 nt, Artificial Sequence
  Description of Artificial Sequence: Synthetic oligonucleotide
  Antisense strand to SEQ ID NO: 686034
uucagcaaagucuugagcc

SEQ ID NO: 686036 - RNA, 19 nt, Artificial Sequence
  Description of Artificial Sequence: Synthetic oligonucleotide
  Sense strand starting at position 2571 of SEQ ID NO: 586021
gcucaagacuuugcugaaa

SEQ ID NO: 686037 - RNA, 19 nt, Artificial Sequence
  Description of Artificial Sequence: Synthetic oligonucleotide
  Antisense strand to SEQ ID NO: 686036
uuucagcaaagucuugagc

SEQ ID NO: 686038 - RNA, 19 nt, Artificial Sequence
  Description of Artificial Sequence: Synthetic oligonucleotide
  Sense strand starting at position 2609 of SEQ ID NO: 586021
gcgaguuauggucaaacac

SEQ ID NO: 686039 - RNA, 19 nt, Artificial Sequence
  Description of Artificial Sequence: Synthetic oligonucleotide
  Antisense strand to SEQ ID NO: 686038
guguuugaccauaacucgc

SEQ ID NO: 686040 - RNA, 19 nt, Artificial Sequence
  Description of Artificial Sequence: Synthetic oligonucleotide
  Sense strand starting at position 2773 of SEQ ID NO: 586021
gucauugcccugcagacau

SEQ ID NO: 686041 - RNA, 19 nt, Artificial Sequence
  Description of Artificial Sequence: Synthetic oligonucleotide
  Antisense strand to SEQ ID NO: 686040
augucugcagggcaaugac

SEQ ID NO: 686042 - RNA, 19 nt, Artificial Sequence
  Description of Artificial Sequence: Synthetic oligonucleotide
  Sense strand starting at position 2858 of SEQ ID NO: 586021
agccucuggaccugaaaga

SEQ ID NO: 686043 - RNA, 19 nt, Artificial Sequence
  Description of Artificial Sequence: Synthetic oligonucleotide
  Antisense strand to SEQ ID NO: 686042
ucuuucagguccagaggcu

SEQ ID NO: 686044 - RNA, 19 nt, Artificial Sequence
  Description of Artificial Sequence: Synthetic oligonucleotide
  Sense strand starting at position 2959 of SEQ ID NO: 586021
gccacacuuuaaguaagaa

SEQ ID NO: 686045 - RNA, 19 nt, Artificial Sequence
  Description of Artificial Sequence: Synthetic oligonucleotide
  Antisense strand to SEQ ID NO: 686044
uucuuacuuaaaguguggc

SEQ ID NO: 686046 - RNA, 19 nt, Artificial Sequence
  Description of Artificial Sequence: Synthetic oligonucleotide
  Sense strand starting at position 3064 of SEQ ID NO: 586021
gggaguugcacucaaaucu

SEQ ID NO: 686047 - RNA, 19 nt, Artificial Sequence
  Description of Artificial Sequence: Synthetic oligonucleotide
  Antisense strand to SEQ ID NO: 686046
agauuugagugcaacuccc

SEQ ID NO: 686048 - RNA, 19 nt, Artificial Sequence
  Description of Artificial Sequence: Synthetic oligonucleotide
  Sense strand starting at position 3240 of SEQ ID NO: 586021
gcucccuacucauuuguau

SEQ ID NO: 686049 - RNA, 19 nt, Artificial Sequence
  Description of Artificial Sequence: Synthetic oligonucleotide
  Antisense strand to SEQ ID NO: 686048
auacaaaugaguagggagc

SEQ ID NO: 686050 - RNA, 19 nt, Artificial Sequence
  Description of Artificial Sequence: Synthetic oligonucleotide
  Sense strand starting at position 3254 of SEQ ID NO: 586021
uguauauuccaguaaugaa

SEQ ID NO: 686051 - RNA, 19 nt, Artificial Sequence
  Description of Artificial Sequence: Synthetic oligonucleotide
  Antisense strand to SEQ ID NO: 686050
uucauuacuggaauauaca

SEQ ID NO: 686052 - RNA, 19 nt, Artificial Sequence
  Description of Artificial Sequence: Synthetic oligonucleotide
  Sense strand starting at position 3359 of SEQ ID NO: 586021
ugaagaauauucuguggaa

SEQ ID NO: 686053 - RNA, 19 nt, Artificial Sequence
  Description of Artificial Sequence: Synthetic oligonucleotide
  Antisense strand to SEQ ID NO: 686052
uuccacagaauauucuuca

SEQ ID NO: 686054 - RNA, 19 nt, Artificial Sequence
  Description of Artificial Sequence: Synthetic oligonucleotide
  Sense strand starting at position 3403 of SEQ ID NO: 586021
agaacuuacucguuaagaa

SEQ ID NO: 686055 - RNA, 19 nt, Artificial Sequence
  Description of Artificial Sequence: Synthetic oligonucleotide
  Antisense strand to SEQ ID NO: 686054
uucuuaacgaguaaguucu

SEQ ID NO: 686056 - RNA, 19 nt, Artificial Sequence
  Description of Artificial Sequence: Synthetic oligonucleotide
  Sense strand starting at position 3413 of SEQ ID NO: 586021
cguuaagaauaugucuuaa

SEQ ID NO: 686057 - RNA, 19 nt, Artificial Sequence
  Description of Artificial Sequence: Synthetic oligonucleotide
  Antisense strand to SEQ ID NO: 686056
uuaagacauauucuuaacg

SEQ ID NO: 686058 - RNA, 19 nt, Artificial Sequence
  Description of Artificial Sequence: Synthetic oligonucleotide
  Sense strand starting at position 3619 of SEQ ID NO: 586021
auaugaaugucucugguuc

SEQ ID NO: 686059 - RNA, 19 nt, Artificial Sequence
  Description of Artificial Sequence: Synthetic oligonucleotide
  Antisense strand to SEQ ID NO: 686058
gaaccagagacauucauau

SEQ ID NO: 686060 - RNA, 19 nt, Artificial Sequence
  Description of Artificial Sequence: Synthetic oligonucleotide
  Sense strand starting at position 3649 of SEQ ID NO: 586021
cauauaucaugagcuagag

SEQ ID NO: 686061 - RNA, 19 nt, Artificial Sequence
  Description of Artificial Sequence: Synthetic oligonucleotide
  Antisense strand to SEQ ID NO: 686060
cucuagcucaugauauaug

SEQ ID NO: 686062 - RNA, 19 nt, Artificial Sequence
  Description of Artificial Sequence: Synthetic oligonucleotide
  Sense strand starting at position 3659 of SEQ ID NO: 586021
gagcuagagagauguguag

SEQ ID NO: 686063 - RNA, 19 nt, Artificial Sequence
  Description of Artificial Sequence: Synthetic oligonucleotide
  Antisense strand to SEQ ID NO: 686062
cuacacaucucucuagcuc

SEQ ID NO: 686064 - RNA, 19 nt, Artificial Sequence
  Description of Artificial Sequence: Synthetic oligonucleotide
  Sense strand starting at position 3661 of SEQ ID NO: 586021
gcuagagagauguguagau

SEQ ID NO: 686065 - RNA, 19 nt, Artificial Sequence
  Description of Artificial Sequence: Synthetic oligonucleotide
  Antisense strand to SEQ ID NO: 686064
aucuacacaucucucuagc

SEQ ID NO: 686066 - RNA, 19 nt, Artificial Sequence
  Description of Artificial Sequence: Synthetic oligonucleotide
  Sense strand starting at position 3758 of SEQ ID NO: 586021
cccacuuucuaagggauga

SEQ ID NO: 686067 - RNA, 19 nt, Artificial Sequence
  Description of Artificial Sequence: Synthetic oligonucleotide
  Antisense strand to SEQ ID NO: 686066
ucaucccuuagaaaguggg

SEQ ID NO: 686068 - RNA, 19 nt, Artificial Sequence
  Description of Artificial Sequence: Synthetic oligonucleotide
  Sense strand starting at position 3833 of SEQ ID NO: 586021
cccugaauagaguguuaau

SEQ ID NO: 686069 - RNA, 19 nt, Artificial Sequence
  Description of Artificial Sequence: Synthetic oligonucleotide
  Antisense strand to SEQ ID NO: 686068
auuaacacucuauucaggg

SEQ ID NO: 686070 - RNA, 19 nt, Artificial Sequence
  Description of Artificial Sequence: Synthetic oligonucleotide
  Sense strand starting at position 3836 of SEQ ID NO: 586021
ugaauagaguguuaaucau

SEQ ID NO: 686071 - RNA, 19 nt, Artificial Sequence
  Description of Artificial Sequence: Synthetic oligonucleotide
  Antisense strand to SEQ ID NO: 686070
augauuaacacucuauuca

SEQ ID NO: 686072 - RNA, 19 nt, Artificial Sequence
  Description of Artificial Sequence: Synthetic oligonucleotide
  Sense strand starting at position 3842 of SEQ ID NO: 586021
gaguguuaaucauuugcuu

SEQ ID NO: 686073 - RNA, 19 nt, Artificial Sequence
  Description of Artificial Sequence: Synthetic oligonucleotide
  Antisense strand to SEQ ID NO: 686072
aagcaaaugauuaacacuc

SEQ ID NO: 686074 - RNA, 19 nt, Artificial Sequence
  Description of Artificial Sequence: Synthetic oligonucleotide
  Sense strand starting at position 3890 of SEQ ID NO: 586021
uuggauuaauaugcacauu

SEQ ID NO: 686075 - RNA, 19 nt, Artificial Sequence
  Description of Artificial Sequence: Synthetic oligonucleotide
  Antisense strand to SEQ ID NO: 686074
aaugugcauauuaauccaa

SEQ ID NO: 686076 - RNA, 19 nt, Artificial Sequence
  Description of Artificial Sequence: Synthetic oligonucleotide
  Sense strand starting at position 3936 of SEQ ID NO: 586021
uugaguagaucagucauug

SEQ ID NO: 686077 - RNA, 19 nt, Artificial Sequence
  Description of Artificial Sequence: Synthetic oligonucleotide
  Antisense strand to SEQ ID NO: 686076
caaugacugaucuacucaa

SEQ ID NO: 686078 - RNA, 19 nt, Artificial Sequence
  Description of Artificial Sequence: Synthetic oligonucleotide
  Sense strand starting at position 3940 of SEQ ID NO: 586021
guagaucagucauugccca

SEQ ID NO: 686079 - RNA, 19 nt, Artificial Sequence
  Description of Artificial Sequence: Synthetic oligonucleotide
  Antisense strand to SEQ ID NO: 686078
ugggcaaugacugaucuac

SEQ ID NO: 686080 - RNA, 19 nt, Artificial Sequence
  Description of Artificial Sequence: Synthetic oligonucleotide
  Sense strand starting at position 3948 of SEQ ID NO: 586021
gucauugcccauuaaugug

SEQ ID NO: 686081 - RNA, 19 nt, Artificial Sequence
  Description of Artificial Sequence: Synthetic oligonucleotide
  Antisense strand to SEQ ID NO: 686080
cacauuaaugggcaaugac

SEQ ID NO: 686082 - RNA, 19 nt, Artificial Sequence
  Description of Artificial Sequence: Synthetic oligonucleotide
  Sense strand starting at position 3951 of SEQ ID NO: 586021
auugcccauuaaugugaau

SEQ ID NO: 686083 - RNA, 19 nt, Artificial Sequence
  Description of Artificial Sequence: Synthetic oligonucleotide
  Antisense strand to SEQ ID NO: 686082
auucacauuaaugggcaau

SEQ ID NO: 686084 - RNA, 19 nt, Artificial Sequence
  Description of Artificial Sequence: Synthetic oligonucleotide
  Sense strand starting at position 3954 of SEQ ID NO: 586021
gcccauuaaugugaauuac

SEQ ID NO: 686085 - RNA, 19 nt, Artificial Sequence
  Description of Artificial Sequence: Synthetic oligonucleotide
  Antisense strand to SEQ ID NO: 686084
guaauucacauuaaugggc

SEQ ID NO: 686086 - RNA, 19 nt, Artificial Sequence
  Description of Artificial Sequence: Synthetic oligonucleotide
  Sense strand starting at position 59 of SEQ ID NO: 586022
uucgaaauacuuugggaaa

SEQ ID NO: 686087 - RNA, 19 nt, Artificial Sequence
  Description of Artificial Sequence: Synthetic oligonucleotide
  Antisense strand to SEQ ID NO: 686086
uuucccaaaguauuucgaa

SEQ ID NO: 686088 - RNA, 19 nt, Artificial Sequence
  Description of Artificial Sequence: Synthetic oligonucleotide
  Sense strand starting at position 174 of SEQ ID NO: 586022
uuauguauugccuagggaa

SEQ ID NO: 686089 - RNA, 19 nt, Artificial Sequence
  Description of Artificial Sequence: Synthetic oligonucleotide
  Antisense strand to SEQ ID NO: 686088
uucccuaggcaauacauaa

SEQ ID NO: 686090 - RNA, 19 nt, Artificial Sequence
  Description of Artificial Sequence: Synthetic oligonucleotide
  Sense strand starting at position 956 of SEQ ID NO: 586022
agugacacuggauguaauu

SEQ ID NO: 686091 - RNA, 19 nt, Artificial Sequence
  Description of Artificial Sequence: Synthetic oligonucleotide
  Antisense strand to SEQ ID NO: 686090
aauuacauccagugucacu

SEQ ID NO: 686092 - RNA, 19 nt, Artificial Sequence
  Description of Artificial Sequence: Synthetic oligonucleotide
  Sense strand starting at position 1104 of SEQ ID NO: 586022
agaaucauauuugaagcuu

SEQ ID NO: 686093 - RNA, 19 nt, Artificial Sequence
  Description of Artificial Sequence: Synthetic oligonucleotide
  Antisense strand to SEQ ID NO: 686092
aagcuucaaauaugauucu

SEQ ID NO: 686094 - RNA, 19 nt, Artificial Sequence
  Description of Artificial Sequence: Synthetic oligonucleotide
  Sense strand starting at position 1225 of SEQ ID NO: 586022
aaagcacucgguuauauaa

SEQ ID NO: 686095 - RNA, 19 nt, Artificial Sequence
  Description of Artificial Sequence: Synthetic oligonucleotide
  Antisense strand to SEQ ID NO: 686094
uuauauaaccgagugcuuu

SEQ ID NO: 686096 - RNA, 19 nt, Artificial Sequence
  Description of Artificial Sequence: Synthetic oligonucleotide
  Sense strand starting at position 1280 of SEQ ID NO: 586022
aauuuaacuguucguguga

SEQ ID NO: 686097 - RNA, 19 nt, Artificial Sequence
  Description of Artificial Sequence: Synthetic oligonucleotide
  Antisense strand to SEQ ID NO: 686096
ucacacgaacaguuaaauu

SEQ ID NO: 686098 - RNA, 19 nt, Artificial Sequence
  Description of Artificial Sequence: Synthetic oligonucleotide
  Sense strand starting at position 1281 of SEQ ID NO: 586022
auuuaacuguucgugugaa

SEQ ID NO: 686099 - RNA, 19 nt, Artificial Sequence
  Description of Artificial Sequence: Synthetic oligonucleotide
  Antisense strand to SEQ ID NO: 686098
uucacacgaacaguuaaau

SEQ ID NO: 686100 - RNA, 19 nt, Artificial Sequence
  Description of Artificial Sequence: Synthetic oligonucleotide
  Sense strand starting at position 1314 of SEQ ID NO: 586022
cugagucugguuuauuaga

SEQ ID NO: 686101 - RNA, 19 nt, Artificial Sequence
  Description of Artificial Sequence: Synthetic oligonucleotide
  Antisense strand to SEQ ID NO: 686100
ucuaauaaaccagacucag

SEQ ID NO: 686102 - RNA, 19 nt, Artificial Sequence
  Description of Artificial Sequence: Synthetic oligonucleotide
  Sense strand starting at position 1316 of SEQ ID NO: 586022
gagucugguuuauuagauu

SEQ ID NO: 686103 - RNA, 19 nt, Artificial Sequence
  Description of Artificial Sequence: Synthetic oligonucleotide
  Antisense strand to SEQ ID NO: 686102
aaucuaauaaaccagacuc

SEQ ID NO: 686104 - RNA, 19 nt, Artificial Sequence
  Description of Artificial Sequence: Synthetic oligonucleotide
  Sense strand starting at position 1328 of SEQ ID NO: 586022
uuagauuaccuaggugaaa

SEQ ID NO: 686105 - RNA, 19 nt, Artificial Sequence
  Description of Artificial Sequence: Synthetic oligonucleotide
  Antisense strand to SEQ ID NO: 686104
uuucaccuagguaaucuaa

SEQ ID NO: 686106 - RNA, 19 nt, Artificial Sequence
  Description of Artificial Sequence: Synthetic oligonucleotide
  Sense strand starting at position 1397 of SEQ ID NO: 586022
gccuaucaauggcuaugaa

SEQ ID NO: 686107 - RNA, 19 nt, Artificial Sequence
  Description of Artificial Sequence: Synthetic oligonucleotide
  Antisense strand to SEQ ID NO: 686106
uucauagccauugauaggc

SEQ ID NO: 686108 - RNA, 19 nt, Artificial Sequence
  Description of Artificial Sequence: Synthetic oligonucleotide
  Sense strand starting at position 1744 of SEQ ID NO: 586022
uugcaagaacaaugcaaau

SEQ ID NO: 686109 - RNA, 19 nt, Artificial Sequence
  Description of Artificial Sequence: Synthetic oligonucleotide
  Antisense strand to SEQ ID NO: 686108
auuugcauuguucuugcaa

SEQ ID NO: 686110 - RNA, 19 nt, Artificial Sequence
  Description of Artificial Sequence: Synthetic oligonucleotide
  Sense strand starting at position 2132 of SEQ ID NO: 586022
ugguguuaugacuaugaac

SEQ ID NO: 686111 - RNA, 19 nt, Artificial Sequence
  Description of Artificial Sequence: Synthetic oligonucleotide
  Antisense strand to SEQ ID NO: 686110
guucauagucauaacacca

SEQ ID NO: 686112 - RNA, 19 nt, Artificial Sequence
  Description of Artificial Sequence: Synthetic oligonucleotide
  Sense strand starting at position 2134 of SEQ ID NO: 586022
guguuaugacuaugaacaa

SEQ ID NO: 686113 - RNA, 19 nt, Artificial Sequence
  Description of Artificial Sequence: Synthetic oligonucleotide
  Antisense strand to SEQ ID NO: 686112
uuguucauagucauaacac

SEQ ID NO: 686114 - RNA, 19 nt, Artificial Sequence
  Description of Artificial Sequence: Synthetic oligonucleotide
  Sense strand starting at position 2312 of SEQ ID NO: 586022
agagaaggcuuucuugaag

SEQ ID NO: 686115 - RNA, 19 nt, Artificial Sequence
  Description of Artificial Sequence: Synthetic oligonucleotide
  Antisense strand to SEQ ID NO: 686114
cuucaagaaagccuucucu

SEQ ID NO: 686116 - RNA, 19 nt, Artificial Sequence
  Description of Artificial Sequence: Synthetic oligonucleotide
  Sense strand starting at position 2404 of SEQ ID NO: 586022
aagagcuuccuaugugaag

SEQ ID NO: 686117 - RNA, 19 nt, Artificial Sequence
  Description of Artificial Sequence: Synthetic oligonucleotide
  Antisense strand to SEQ ID NO: 686116
cuucacauaggaagcucuu

SEQ ID NO: 686118 - RNA, 19 nt, Artificial Sequence
  Description of Artificial Sequence: Synthetic oligonucleotide
  Sense strand starting at position 2572 of SEQ ID NO: 586022
ugugucuuuaucugaagag

SEQ ID NO: 686119 - RNA, 19 nt, Artificial Sequence
  Description of Artificial Sequence: Synthetic oligonucleotide
  Antisense strand to SEQ ID NO: 686118
cucuucagauaaagacaca

SEQ ID NO: 686120 - RNA, 19 nt, Artificial Sequence
  Description of Artificial Sequence: Synthetic oligonucleotide
  Sense strand starting at position 3000 of SEQ ID NO: 586022
guagguagaccacaguaau

SEQ ID NO: 686121 - RNA, 19 nt, Artificial Sequence
  Description of Artificial Sequence: Synthetic oligonucleotide
  Antisense strand to SEQ ID NO: 686120
auuacuguggucuaccuac

SEQ ID NO: 686122 - RNA, 19 nt, Artificial Sequence
  Description of Artificial Sequence: Synthetic oligonucleotide
  Sense strand starting at position 3030 of SEQ ID NO: 586022
cagugaagacuauggcaga

SEQ ID NO: 686123 - RNA, 19 nt, Artificial Sequence
  Description of Artificial Sequence: Synthetic oligonucleotide
  Antisense strand to SEQ ID NO: 686122
ucugccauagucuucacug

SEQ ID NO: 686124 - RNA, 19 nt, Artificial Sequence
  Description of Artificial Sequence: Synthetic oligonucleotide
  Sense strand starting at position 3072 of SEQ ID NO: 586022
aaccuagcucauggguaua

SEQ ID NO: 686125 - RNA, 19 nt, Artificial Sequence
  Description of Artificial Sequence: Synthetic oligonucleotide
  Antisense strand to SEQ ID NO: 686124
uauacccaugagcuagguu

SEQ ID NO: 686126 - RNA, 19 nt, Artificial Sequence
  Description of Artificial Sequence: Synthetic oligonucleotide
  Sense strand starting at position 3075 of SEQ ID NO: 586022
cuagcucauggguauauga

SEQ ID NO: 686127 - RNA, 19 nt, Artificial Sequence
  Description of Artificial Sequence: Synthetic oligonucleotide
  Antisense strand to SEQ ID NO: 686126
ucauauacccaugagcuag

SEQ ID NO: 686128 - RNA, 19 nt, Artificial Sequence
  Description of Artificial Sequence: Synthetic oligonucleotide
  Sense strand starting at position 3077 of SEQ ID NO: 586022
agcucauggguauaugaau

SEQ ID NO: 686129 - RNA, 19 nt, Artificial Sequence
  Description of Artificial Sequence: Synthetic oligonucleotide
  Antisense strand to SEQ ID NO: 686128
auucauauacccaugagcu

SEQ ID NO: 686130 - RNA, 19 nt, Artificial Sequence
  Description of Artificial Sequence: Synthetic oligonucleotide
  Sense strand starting at position 3083 of SEQ ID NO: 586022
uggguauaugaaugcugaa

SEQ ID NO: 686131 - RNA, 19 nt, Artificial Sequence
  Description of Artificial Sequence: Synthetic oligonucleotide
  Antisense strand to SEQ ID NO: 686130
uucagcauucauauaccca

SEQ ID NO: 686132 - RNA, 19 nt, Artificial Sequence
  Description of Artificial Sequence: Synthetic oligonucleotide
  Sense strand starting at position 3266 of SEQ ID NO: 586022
caagauguugaacgugaau

SEQ ID NO: 686133 - RNA, 19 nt, Artificial Sequence
  Description of Artificial Sequence: Synthetic oligonucleotide
  Antisense strand to SEQ ID NO: 686132
auucacguucaacaucuug

SEQ ID NO: 686134 - RNA, 19 nt, Artificial Sequence
  Description of Artificial Sequence: Synthetic oligonucleotide
  Sense strand starting at position 3268 of SEQ ID NO: 586022
agauguugaacgugaaucu

SEQ ID NO: 686135 - RNA, 19 nt, Artificial Sequence
  Description of Artificial Sequence: Synthetic oligonucleotide
  Antisense strand to SEQ ID NO: 686134
agauucacguucaacaucu

SEQ ID NO: 686136 - RNA, 19 nt, Artificial Sequence
  Description of Artificial Sequence: Synthetic oligonucleotide
  Sense strand starting at position 3269 of SEQ ID NO: 586022
gauguugaacgugaaucuu

SEQ ID NO: 686137 - RNA, 19 nt, Artificial Sequence
  Description of Artificial Sequence: Synthetic oligonucleotide
  Antisense strand to SEQ ID NO: 686136
aagauucacguucaacauc

SEQ ID NO: 686138 - RNA, 19 nt, Artificial Sequence
  Description of Artificial Sequence: Synthetic oligonucleotide
  Sense strand starting at position 3275 of SEQ ID NO: 586022
gaacgugaaucuucucaug

SEQ ID NO: 686139 - RNA, 19 nt, Artificial Sequence
  Description of Artificial Sequence: Synthetic oligonucleotide
  Antisense strand to SEQ ID NO: 686138
caugagaagauucacguuc

SEQ ID NO: 686140 - RNA, 19 nt, Artificial Sequence
  Description of Artificial Sequence: Synthetic oligonucleotide
  Sense strand starting at position 3277 of SEQ ID NO: 586022
acgugaaucuucucaugag

SEQ ID NO: 686141 - RNA, 19 nt, Artificial Sequence
  Description of Artificial Sequence: Synthetic oligonucleotide
  Antisense strand to SEQ ID NO: 686140
cucaugagaagauucacgu

SEQ ID NO: 686142 - RNA, 19 nt, Artificial Sequence
  Description of Artificial Sequence: Synthetic oligonucleotide
  Sense strand starting at position 3326 of SEQ ID NO: 586022
aaagaaauggccugguuuc

SEQ ID NO: 686143 - RNA, 19 nt, Artificial Sequence
  Description of Artificial Sequence: Synthetic oligonucleotide
  Antisense strand to SEQ ID NO: 686142
gaaaccaggccauuucuuu

SEQ ID NO: 686144 - RNA, 19 nt, Artificial Sequence
  Description of Artificial Sequence: Synthetic oligonucleotide
  Sense strand starting at position 3327 of SEQ ID NO: 586022
aagaaauggccugguuucu

SEQ ID NO: 686145 - RNA, 19 nt, Artificial Sequence
  Description of Artificial Sequence: Synthetic oligonucleotide
  Antisense strand to SEQ ID NO: 686144
agaaaccaggccauuucuu

SEQ ID NO: 686146 - RNA, 19 nt, Artificial Sequence
  Description of Artificial Sequence: Synthetic oligonucleotide
  Sense strand starting at position 3437 of SEQ ID NO: 586022
guaaucuuugauugaauuc

SEQ ID NO: 686147 - RNA, 19 nt, Artificial Sequence
  Description of Artificial Sequence: Synthetic oligonucleotide
  Antisense strand to SEQ ID NO: 686146
gaauucaaucaaagauuac

SEQ ID NO: 686148 - RNA, 19 nt, Artificial Sequence
  Description of Artificial Sequence: Synthetic oligonucleotide
  Sense strand starting at position 3562 of SEQ ID NO: 586022
gguauuguugcaggagaau

SEQ ID NO: 686149 - RNA, 19 nt, Artificial Sequence
  Description of Artificial Sequence: Synthetic oligonucleotide
  Antisense strand to SEQ ID NO: 686148
auucuccugcaacaauacc

SEQ ID NO: 686150 - RNA, 19 nt, Artificial Sequence
  Description of Artificial Sequence: Synthetic oligonucleotide
  Sense strand starting at position 3571 of SEQ ID NO: 586022
gcaggagaaugucuuugau

SEQ ID NO: 686151 - RNA, 19 nt, Artificial Sequence
  Description of Artificial Sequence: Synthetic oligonucleotide
  Antisense strand to SEQ ID NO: 686150
aucaaagacauucuccugc

SEQ ID NO: 686152 - RNA, 19 nt, Artificial Sequence
  Description of Artificial Sequence: Synthetic oligonucleotide
  Sense strand starting at position 3573 of SEQ ID NO: 586022
aggagaaugucuuugauug

SEQ ID NO: 686153 - RNA, 19 nt, Artificial Sequence
  Description of Artificial Sequence: Synthetic oligonucleotide
  Antisense strand to SEQ ID NO: 686152
caaucaaagacauucuccu

SEQ ID NO: 686154 - RNA, 19 nt, Artificial Sequence
  Description of Artificial Sequence: Synthetic oligonucleotide
  Sense strand starting at position 3574 of SEQ ID NO: 586022
ggagaaugucuuugauugu

SEQ ID NO: 686155 - RNA, 19 nt, Artificial Sequence
  Description of Artificial Sequence: Synthetic oligonucleotide
  Antisense strand to SEQ ID NO: 686154
acaaucaaagacauucucc

SEQ ID NO: 686156 - RNA, 19 nt, Artificial Sequence
  Description of Artificial Sequence: Synthetic oligonucleotide
  Sense strand starting at position 3577 of SEQ ID NO: 586022
gaaugucuuugauuguaag

SEQ ID NO: 686157 - RNA, 19 nt, Artificial Sequence
  Description of Artificial Sequence: Synthetic oligonucleotide
  Antisense strand to SEQ ID NO: 686156
cuuacaaucaaagacauuc

SEQ ID NO: 686158 - RNA, 19 nt, Artificial Sequence
  Description of Artificial Sequence: Synthetic oligonucleotide
  Sense strand starting at position 3591 of SEQ ID NO: 586022
guaagagacauguggugaa

SEQ ID NO: 686159 - RNA, 19 nt, Artificial Sequence
  Description of Artificial Sequence: Synthetic oligonucleotide
  Antisense strand to SEQ ID NO: 686158
uucaccacaugucucuuac

SEQ ID NO: 686160 - RNA, 19 nt, Artificial Sequence
  Description of Artificial Sequence: Synthetic oligonucleotide
  Sense strand starting at position 3614 of SEQ ID NO: 586022
uuagcaaugaagugugaug

SEQ ID NO: 686161 - RNA, 19 nt, Artificial Sequence
  Description of Artificial Sequence: Synthetic oligonucleotide
  Antisense strand to SEQ ID NO: 686160
caucacacuucauugcuaa

SEQ ID NO: 686162 - RNA, 19 nt, Artificial Sequence
  Description of Artificial Sequence: Synthetic oligonucleotide
  Sense strand starting at position 3697 of SEQ ID NO: 586022
gguugauauauguauguag

SEQ ID NO: 686163 - RNA, 19 nt, Artificial Sequence
  Description of Artificial Sequence: Synthetic oligonucleotide
  Antisense strand to SEQ ID NO: 686162
cuacauacauauaucaacc

SEQ ID NO: 686164 - RNA, 19 nt, Artificial Sequence
  Description of Artificial Sequence: Synthetic oligonucleotide
  Sense strand starting at position 3700 of SEQ ID NO: 586022
ugauauauguauguagaug

SEQ ID NO: 686165 - RNA, 19 nt, Artificial Sequence
  Description of Artificial Sequence: Synthetic oligonucleotide
  Antisense strand to SEQ ID NO: 686164
caucuacauacauauauca

SEQ ID NO: 686166 - RNA, 19 nt, Artificial Sequence
  Description of Artificial Sequence: Synthetic oligonucleotide
  Sense strand starting at position 267 of SEQ ID NO: 586023
augcaaggacucuauugua

SEQ ID NO: 686167 - RNA, 19 nt, Artificial Sequence
  Description of Artificial Sequence: Synthetic oligonucleotide
  Antisense strand to SEQ ID NO: 686166
uacaauagaguccuugcau

SEQ ID NO: 686168 - RNA, 19 nt, Artificial Sequence
  Description of Artificial Sequence: Synthetic oligonucleotide
  Sense strand starting at position 433 of SEQ ID NO: 586023
gacugauaguuacaaucug

SEQ ID NO: 686169 - RNA, 19 nt, Artificial Sequence
  Description of Artificial Sequence: Synthetic oligonucleotide
  Antisense strand to SEQ ID NO: 686168
cagauuguaacuaucaguc

SEQ ID NO: 686170 - RNA, 19 nt, Artificial Sequence
  Description of Artificial Sequence: Synthetic oligonucleotide
  Sense strand starting at position 443 of SEQ ID NO: 586023
uacaaucuggcaggguuau

SEQ ID NO: 686171 - RNA, 19 nt, Artificial Sequence
  Description of Artificial Sequence: Synthetic oligonucleotide
  Antisense strand to SEQ ID NO: 686170
auaacccugccagauugua

SEQ ID NO: 686172 - RNA, 19 nt, Artificial Sequence
  Description of Artificial Sequence: Synthetic oligonucleotide
  Sense strand starting at position 454 of SEQ ID NO: 586023
aggguuaucucuccucuca

SEQ ID NO: 686173 - RNA, 19 nt, Artificial Sequence
  Description of Artificial Sequence: Synthetic oligonucleotide
  Antisense strand to SEQ ID NO: 686172
ugagaggagagauaacccu

SEQ ID NO: 686174 - RNA, 19 nt, Artificial Sequence
  Description of Artificial Sequence: Synthetic oligonucleotide
  Sense strand starting at position 456 of SEQ ID NO: 586023
gguuaucucuccucucacu

SEQ ID NO: 686175 - RNA, 19 nt, Artificial Sequence
  Description of Artificial Sequence: Synthetic oligonucleotide
  Antisense strand to SEQ ID NO: 686174
agugagaggagagauaacc

SEQ ID NO: 686176 - RNA, 19 nt, Artificial Sequence
  Description of Artificial Sequence: Synthetic oligonucleotide
  Sense strand starting at position 657 of SEQ ID NO: 586023
cuauuaacucagugaggca

SEQ ID NO: 686177 - RNA, 19 nt, Artificial Sequence
  Description of Artificial Sequence: Synthetic oligonucleotide
  Antisense strand to SEQ ID NO: 686176
ugccucacugaguuaauag

SEQ ID NO: 686178 - RNA, 19 nt, Artificial Sequence
  Description of Artificial Sequence: Synthetic oligonucleotide
  Sense strand starting at position 766 of SEQ ID NO: 586023
uuggcaaucugggauuuga

SEQ ID NO: 686179 - RNA, 19 nt, Artificial Sequence
  Description of Artificial Sequence: Synthetic oligonucleotide
  Antisense strand to SEQ ID NO: 686178
ucaaaucccagauugccaa

SEQ ID NO: 686180 - RNA, 19 nt, Artificial Sequence
  Description of Artificial Sequence: Synthetic oligonucleotide
  Sense strand starting at position 842 of SEQ ID NO: 586023
ucgcuucccuccucugaau

SEQ ID NO: 686181 - RNA, 19 nt, Artificial Sequence
  Description of Artificial Sequence: Synthetic oligonucleotide
  Antisense strand to SEQ ID NO: 686180
auucagaggagggaagcga

SEQ ID NO: 686182 - RNA, 19 nt, Artificial Sequence
  Description of Artificial Sequence: Synthetic oligonucleotide
  Sense strand starting at position 1276 of SEQ ID NO: 586023
uggacauaguuaugagaag

SEQ ID NO: 686183 - RNA, 19 nt, Artificial Sequence
  Description of Artificial Sequence: Synthetic oligonucleotide
  Antisense strand to SEQ ID NO: 686182
cuucucauaacuaugucca

SEQ ID NO: 686184 - RNA, 19 nt, Artificial Sequence
  Description of Artificial Sequence: Synthetic oligonucleotide
  Sense strand starting at position 1287 of SEQ ID NO: 586023
augagaagguccgaacgaa

SEQ ID NO: 686185 - RNA, 19 nt, Artificial Sequence
  Description of Artificial Sequence: Synthetic oligonucleotide
  Antisense strand to SEQ ID NO: 686184
uucguucggaccuucucau

SEQ ID NO: 686186 - RNA, 19 nt, Artificial Sequence
  Description of Artificial Sequence: Synthetic oligonucleotide
  Sense strand starting at position 1357 of SEQ ID NO: 586023
uggguccuauguuugagua

SEQ ID NO: 686187 - RNA, 19 nt, Artificial Sequence
  Description of Artificial Sequence: Synthetic oligonucleotide
  Antisense strand to SEQ ID NO: 686186
uacucaaacauaggaccca

SEQ ID NO: 686188 - RNA, 19 nt, Artificial Sequence
  Description of Artificial Sequence: Synthetic oligonucleotide
  Sense strand starting at position 1361 of SEQ ID NO: 586023
uccuauguuugaguagaga

SEQ ID NO: 686189 - RNA, 19 nt, Artificial Sequence
  Description of Artificial Sequence: Synthetic oligonucleotide
  Antisense strand to SEQ ID NO: 686188
ucucuacucaaacauagga

SEQ ID NO: 686190 - RNA, 19 nt, Artificial Sequence
  Description of Artificial Sequence: Synthetic oligonucleotide
  Sense strand starting at position 2210 of SEQ ID NO: 586023
agccucaucuccucaugua

SEQ ID NO: 686191 - RNA, 19 nt, Artificial Sequence
  Description of Artificial Sequence: Synthetic oligonucleotide
  Antisense strand to SEQ ID NO: 686190
uacaugaggagaugaggcu

SEQ ID NO: 686192 - RNA, 19 nt, Artificial Sequence
  Description of Artificial Sequence: Synthetic oligonucleotide
  Sense strand starting at position 2211 of SEQ ID NO: 586023
gccucaucuccucauguau

SEQ ID NO: 686193 - RNA, 19 nt, Artificial Sequence
  Description of Artificial Sequence: Synthetic oligonucleotide
  Antisense strand to SEQ ID NO: 686192
auacaugaggagaugaggc

SEQ ID NO: 686194 - RNA, 19 nt, Artificial Sequence
  Description of Artificial Sequence: Synthetic oligonucleotide
  Sense strand starting at position 2352 of SEQ ID NO: 586023
cccgucucacgccuguaau

SEQ ID NO: 686195 - RNA, 19 nt, Artificial Sequence
  Description of Artificial Sequence: Synthetic oligonucleotide
  Antisense strand to SEQ ID NO: 686194
auuacaggcgugagacggg

SEQ ID NO: 686196 - RNA, 19 nt, Artificial Sequence
  Description of Artificial Sequence: Synthetic oligonucleotide
  Sense strand starting at position 2597 of SEQ ID NO: 586023
gcgacagagcugcaguauu

SEQ ID NO: 686197 - RNA, 19 nt, Artificial Sequence
  Description of Artificial Sequence: Synthetic oligonucleotide
  Antisense strand to SEQ ID NO: 686196
aauacugcagcucugucgc

SEQ ID NO: 686198 - RNA, 19 nt, Artificial Sequence
  Description of Artificial Sequence: Synthetic oligonucleotide
  Sense strand starting at position 2710 of SEQ ID NO: 586023
ggcggagauugcagagcua

SEQ ID NO: 686199 - RNA, 19 nt, Artificial Sequence
  Description of Artificial Sequence: Synthetic oligonucleotide
  Antisense strand to SEQ ID NO: 686198
uagcucugcaaucuccgcc

SEQ ID NO: 686200 - RNA, 19 nt, Artificial Sequence
  Description of Artificial Sequence: Synthetic oligonucleotide
  Sense strand starting at position 2972 of SEQ ID NO: 586023
cuagauggucucuaagggu

SEQ ID NO: 686201 - RNA, 19 nt, Artificial Sequence
  Description of Artificial Sequence: Synthetic oligonucleotide
  Antisense strand to SEQ ID NO: 686200
acccuuagagaccaucuag

SEQ ID NO: 686202 - RNA, 19 nt, Artificial Sequence
  Description of Artificial Sequence: Synthetic oligonucleotide
  Sense strand starting at position 2989 of SEQ ID NO: 586023
gucccuuaaggcugagaag

SEQ ID NO: 686203 - RNA, 19 nt, Artificial Sequence
  Description of Artificial Sequence: Synthetic oligonucleotide
  Antisense strand to SEQ ID NO: 686202
cuucucagccuuaagggac

SEQ ID NO: 686204 - RNA, 19 nt, Artificial Sequence
  Description of Artificial Sequence: Synthetic oligonucleotide
  Sense strand starting at position 2990 of SEQ ID NO: 586023
ucccuuaaggcugagaagu

SEQ ID NO: 686205 - RNA, 19 nt, Artificial Sequence
  Description of Artificial Sequence: Synthetic oligonucleotide
  Antisense strand to SEQ ID NO: 686204
acuucucagccuuaaggga

SEQ ID NO: 686206 - RNA, 19 nt, Artificial Sequence
  Description of Artificial Sequence: Synthetic oligonucleotide
  Sense strand starting at position 3001 of SEQ ID NO: 586023
ugagaagucucaucuguau

SEQ ID NO: 686207 - RNA, 19 nt, Artificial Sequence
  Description of Artificial Sequence: Synthetic oligonucleotide
  Antisense strand to SEQ ID NO: 686206
auacagaugagacuucuca

SEQ ID NO: 686208 - RNA, 19 nt, Artificial Sequence
  Description of Artificial Sequence: Synthetic oligonucleotide
  Sense strand starting at position 3044 of SEQ ID NO: 586023
gugaaugaaguuuaguaau

SEQ ID NO: 686209 - RNA, 19 nt, Artificial Sequence
  Description of Artificial Sequence: Synthetic oligonucleotide
  Antisense strand to SEQ ID NO: 686208
auuacuaaacuucauucac

SEQ ID NO: 686210 - RNA, 19 nt, Artificial Sequence
  Description of Artificial Sequence: Synthetic oligonucleotide
  Sense strand starting at position 3046 of SEQ ID NO: 586023
gaaugaaguuuaguaauuc

SEQ ID NO: 686211 - RNA, 19 nt, Artificial Sequence
  Description of Artificial Sequence: Synthetic oligonucleotide
  Antisense strand to SEQ ID NO: 686210
gaauuacuaaacuucauuc

SEQ ID NO: 686212 - RNA, 19 nt, Artificial Sequence
  Description of Artificial Sequence: Synthetic oligonucleotide
  Sense strand starting at position 3159 of SEQ ID NO: 586023
gaagucugguagcaugaaa

SEQ ID NO: 686213 - RNA, 19 nt, Artificial Sequence
  Description of Artificial Sequence: Synthetic oligonucleotide
  Antisense strand to SEQ ID NO: 686212
uuucaugcuaccagacuuc

SEQ ID NO: 686214 - RNA, 19 nt, Artificial Sequence
  Description of Artificial Sequence: Synthetic oligonucleotide
  Sense strand starting at position 3166 of SEQ ID NO: 586023
gguagcaugaaauguaucu

SEQ ID NO: 686215 - RNA, 19 nt, Artificial Sequence
  Description of Artificial Sequence: Synthetic oligonucleotide
  Antisense strand to SEQ ID NO: 686214
agauacauuucaugcuacc

SEQ ID NO: 686216 - RNA, 19 nt, Artificial Sequence
  Description of Artificial Sequence: Synthetic oligonucleotide
  Sense strand starting at position 3173 of SEQ ID NO: 586023
ugaaauguaucuuaugaca

SEQ ID NO: 686217 - RNA, 19 nt, Artificial Sequence
  Description of Artificial Sequence: Synthetic oligonucleotide
  Antisense strand to SEQ ID NO: 686216
ugucauaagauacauuuca

SEQ ID NO: 686218 - RNA, 19 nt, Artificial Sequence
  Description of Artificial Sequence: Synthetic oligonucleotide
  Sense strand starting at position 3222 of SEQ ID NO: 586023
uccaguugcagguauggua

SEQ ID NO: 686219 - RNA, 19 nt, Artificial Sequence
  Description of Artificial Sequence: Synthetic oligonucleotide
  Antisense strand to SEQ ID NO: 686218
uaccauaccugcaacugga

SEQ ID NO: 686220 - RNA, 19 nt, Artificial Sequence
  Description of Artificial Sequence: Synthetic oligonucleotide
  Sense strand starting at position 3229 of SEQ ID NO: 586023
gcagguaugguauaagcaa

SEQ ID NO: 686221 - RNA, 19 nt, Artificial Sequence
  Description of Artificial Sequence: Synthetic oligonucleotide
  Antisense strand to SEQ ID NO: 686220
uugcuuauaccauaccugc

SEQ ID NO: 686222 - RNA, 19 nt, Artificial Sequence
  Description of Artificial Sequence: Synthetic oligonucleotide
  Sense strand starting at position 3317 of SEQ ID NO: 586023
gcuuuauaccaaggagagu

SEQ ID NO: 686223 - RNA, 19 nt, Artificial Sequence
  Description of Artificial Sequence: Synthetic oligonucleotide
  Antisense strand to SEQ ID NO: 686222
acucuccuugguauaaagc

SEQ ID NO: 686224 - RNA, 19 nt, Artificial Sequence
  Description of Artificial Sequence: Synthetic oligonucleotide
  Sense strand starting at position 3337 of SEQ ID NO: 586023
gugggaagcugaguuggau

SEQ ID NO: 686225 - RNA, 19 nt, Artificial Sequence
  Description of Artificial Sequence: Synthetic oligonucleotide
  Antisense strand to SEQ ID NO: 686224
auccaacucagcuucccac

SEQ ID NO: 686226 - RNA, 19 nt, Artificial Sequence
  Description of Artificial Sequence: Synthetic oligonucleotide
  Sense strand starting at position 3351 of SEQ ID NO: 586023
uggauucuuggcuggguua

SEQ ID NO: 686227 - RNA, 19 nt, Artificial Sequence
  Description of Artificial Sequence: Synthetic oligonucleotide
  Antisense strand to SEQ ID NO: 686226
uaacccagccaagaaucca

SEQ ID NO: 686228 - RNA, 19 nt, Artificial Sequence
  Description of Artificial Sequence: Synthetic oligonucleotide
  Sense strand starting at position 3352 of SEQ ID NO: 586023
ggauucuuggcuggguuaa

SEQ ID NO: 686229 - RNA, 19 nt, Artificial Sequence
  Description of Artificial Sequence: Synthetic oligonucleotide
  Antisense strand to SEQ ID NO: 686228
uuaacccagccaagaaucc

SEQ ID NO: 686230 - RNA, 19 nt, Artificial Sequence
  Description of Artificial Sequence: Synthetic oligonucleotide
  Sense strand starting at position 3353 of SEQ ID NO: 586023
gauucuuggcuggguuaac

SEQ ID NO: 686231 - RNA, 19 nt, Artificial Sequence
  Description of Artificial Sequence: Synthetic oligonucleotide
  Antisense strand to SEQ ID NO: 686230
guuaacccagccaagaauc

SEQ ID NO: 686232 - RNA, 19 nt, Artificial Sequence
  Description of Artificial Sequence: Synthetic oligonucleotide
  Sense strand starting at position 3387 of SEQ ID NO: 586023
cuuggaugaauucgacauc

SEQ ID NO: 686233 - RNA, 19 nt, Artificial Sequence
  Description of Artificial Sequence: Synthetic oligonucleotide
  Antisense strand to SEQ ID NO: 686232
gaugucgaauucauccaag

SEQ ID NO: 686234 - RNA, 19 nt, Artificial Sequence
  Description of Artificial Sequence: Synthetic oligonucleotide
  Sense strand starting at position 3520 of SEQ ID NO: 586023
acaugcugcccuggaaaga

SEQ ID NO: 686235 - RNA, 19 nt, Artificial Sequence
  Description of Artificial Sequence: Synthetic oligonucleotide
  Antisense strand to SEQ ID NO: 686234
ucuuuccagggcagcaugu

SEQ ID NO: 686236 - RNA, 19 nt, Artificial Sequence
  Description of Artificial Sequence: Synthetic oligonucleotide
  Sense strand starting at position 3596 of SEQ ID NO: 586023
cugggaaggcuuugaaguu

SEQ ID NO: 686237 - RNA, 19 nt, Artificial Sequence
  Description of Artificial Sequence: Synthetic oligonucleotide
  Antisense strand to SEQ ID NO: 686236
aacuucaaagccuucccag

SEQ ID NO: 686238 - RNA, 19 nt, Artificial Sequence
  Description of Artificial Sequence: Synthetic oligonucleotide
  Sense strand starting at position 3597 of SEQ ID NO: 586023
ugggaaggcuuugaaguuu

SEQ ID NO: 686239 - RNA, 19 nt, Artificial Sequence
  Description of Artificial Sequence: Synthetic oligonucleotide
  Antisense strand to SEQ ID NO: 686238
aaacuucaaagccuuccca

SEQ ID NO: 686240 - RNA, 19 nt, Artificial Sequence
  Description of Artificial Sequence: Synthetic oligonucleotide
  Sense strand starting at position 3646 of SEQ ID NO: 586023
gaggauagcuguucccuau

SEQ ID NO: 686241 - RNA, 19 nt, Artificial Sequence
  Description of Artificial Sequence: Synthetic oligonucleotide
  Antisense strand to SEQ ID NO: 686240
auagggaacagcuauccuc

SEQ ID NO: 686242 - RNA, 19 nt, Artificial Sequence
  Description of Artificial Sequence: Synthetic oligonucleotide
  Sense strand starting at position 3650 of SEQ ID NO: 586023
auagcuguucccuauuacu

SEQ ID NO: 686243 - RNA, 19 nt, Artificial Sequence
  Description of Artificial Sequence: Synthetic oligonucleotide
  Antisense strand to SEQ ID NO: 686242
aguaauagggaacagcuau

SEQ ID NO: 686244 - RNA, 19 nt, Artificial Sequence
  Description of Artificial Sequence: Synthetic oligonucleotide
  Sense strand starting at position 3774 of SEQ ID NO: 586023
gguuaugggucaccaauga

SEQ ID NO: 686245 - RNA, 19 nt, Artificial Sequence
  Description of Artificial Sequence: Synthetic oligonucleotide
  Antisense strand to SEQ ID NO: 686244
ucauuggugacccauaacc

SEQ ID NO: 686246 - RNA, 19 nt, Artificial Sequence
  Description of Artificial Sequence: Synthetic oligonucleotide
  Sense strand starting at position 154 of SEQ ID NO: 586024
agacauacuuguguagcaa

SEQ ID NO: 686247 - RNA, 19 nt, Artificial Sequence
  Description of Artificial Sequence: Synthetic oligonucleotide
  Antisense strand to SEQ ID NO: 686246
uugcuacacaaguaugucu

SEQ ID NO: 686248 - RNA, 19 nt, Artificial Sequence
  Description of Artificial Sequence: Synthetic oligonucleotide
  Sense strand starting at position 155 of SEQ ID NO: 586024
gacauacuuguguagcaau

SEQ ID NO: 686249 - RNA, 19 nt, Artificial Sequence
  Description of Artificial Sequence: Synthetic oligonucleotide
  Antisense strand to SEQ ID NO: 686248
auugcuacacaaguauguc

SEQ ID NO: 686250 - RNA, 19 nt, Artificial Sequence
  Description of Artificial Sequence: Synthetic oligonucleotide
  Sense strand starting at position 557 of SEQ ID NO: 586024
agaacuguccugcaaauaa

SEQ ID NO: 686251 - RNA, 19 nt, Artificial Sequence
  Description of Artificial Sequence: Synthetic oligonucleotide
  Antisense strand to SEQ ID NO: 686250
uuauuugcaggacaguucu

SEQ ID NO: 686252 - RNA, 19 nt, Artificial Sequence
  Description of Artificial Sequence: Synthetic oligonucleotide
  Sense strand starting at position 620 of SEQ ID NO: 586024
gagaaaucuuuggagacac

SEQ ID NO: 686253 - RNA, 19 nt, Artificial Sequence
  Description of Artificial Sequence: Synthetic oligonucleotide
  Antisense strand to SEQ ID NO: 686252
gugucuccaaagauuucuc

SEQ ID NO: 686254 - RNA, 19 nt, Artificial Sequence
  Description of Artificial Sequence: Synthetic oligonucleotide
  Sense strand starting at position 705 of SEQ ID NO: 586024
ccacucuguccuggagaca

SEQ ID NO: 686255 - RNA, 19 nt, Artificial Sequence
  Description of Artificial Sequence: Synthetic oligonucleotide
  Antisense strand to SEQ ID NO: 686254
ugucuccaggacagagugg

SEQ ID NO: 686256 - RNA, 19 nt, Artificial Sequence
  Description of Artificial Sequence: Synthetic oligonucleotide
  Sense strand starting at position 708 of SEQ ID NO: 586024
cucuguccuggagacaauu

SEQ ID NO: 686257 - RNA, 19 nt, Artificial Sequence
  Description of Artificial Sequence: Synthetic oligonucleotide
  Antisense strand to SEQ ID NO: 686256
aauugucuccaggacagag

SEQ ID NO: 686258 - RNA, 19 nt, Artificial Sequence
  Description of Artificial Sequence: Synthetic oligonucleotide
  Sense strand starting at position 741 of SEQ ID NO: 586024
gccagauacuaaccugaua

SEQ ID NO: 686259 - RNA, 19 nt, Artificial Sequence
  Description of Artificial Sequence: Synthetic oligonucleotide
  Antisense strand to SEQ ID NO: 686258
uaucagguuaguaucuggc

SEQ ID NO: 686260 - RNA, 19 nt, Artificial Sequence
  Description of Artificial Sequence: Synthetic oligonucleotide
  Sense strand starting at position 844 of SEQ ID NO: 586024
cccagagacaucugugaag

SEQ ID NO: 686261 - RNA, 19 nt, Artificial Sequence
  Description of Artificial Sequence: Synthetic oligonucleotide
  Antisense strand to SEQ ID NO: 686260
cuucacagaugucucuggg

SEQ ID NO: 686262 - RNA, 19 nt, Artificial Sequence
  Description of Artificial Sequence: Synthetic oligonucleotide
  Sense strand starting at position 847 of SEQ ID NO: 586024
agagacaucugugaaggca

SEQ ID NO: 686263 - RNA, 19 nt, Artificial Sequence
  Description of Artificial Sequence: Synthetic oligonucleotide
  Antisense strand to SEQ ID NO: 686262
ugccuucacagaugucucu

SEQ ID NO: 686264 - RNA, 19 nt, Artificial Sequence
  Description of Artificial Sequence: Synthetic oligonucleotide
  Sense strand starting at position 904 of SEQ ID NO: 586024
ugcauuucggcaggccaaa

SEQ ID NO: 686265 - RNA, 19 nt, Artificial Sequence
  Description of Artificial Sequence: Synthetic oligonucleotide
  Antisense strand to SEQ ID NO: 686264
uuuggccugccgaaaugca

SEQ ID NO: 686266 - RNA, 19 nt, Artificial Sequence
  Description of Artificial Sequence: Synthetic oligonucleotide
  Sense strand starting at position 924 of SEQ ID NO: 586024
gggcaacacauaugugaaa

SEQ ID NO: 686267 - RNA, 19 nt, Artificial Sequence
  Description of Artificial Sequence: Synthetic oligonucleotide
  Antisense strand to SEQ ID NO: 686266
uuucacauauguguugccc

SEQ ID NO: 686268 - RNA, 19 nt, Artificial Sequence
  Description of Artificial Sequence: Synthetic oligonucleotide
  Sense strand starting at position 1039 of SEQ ID NO: 586024
ggauucugcaggugacuga

SEQ ID NO: 686269 - RNA, 19 nt, Artificial Sequence
  Description of Artificial Sequence: Synthetic oligonucleotide
  Antisense strand to SEQ ID NO: 686268
ucagucaccugcagaaucc

SEQ ID NO: 686270 - RNA, 19 nt, Artificial Sequence
  Description of Artificial Sequence: Synthetic oligonucleotide
  Sense strand starting at position 1046 of SEQ ID NO: 586024
gcaggugacugagaagaga

SEQ ID NO: 686271 - RNA, 19 nt, Artificial Sequence
  Description of Artificial Sequence: Synthetic oligonucleotide
  Antisense strand to SEQ ID NO: 686270
ucucuucucagucaccugc

SEQ ID NO: 686272 - RNA, 19 nt, Artificial Sequence
  Description of Artificial Sequence: Synthetic oligonucleotide
  Sense strand starting at position 1073 of SEQ ID NO: 586024
gaggcugggauccaguaua

SEQ ID NO: 686273 - RNA, 19 nt, Artificial Sequence
  Description of Artificial Sequence: Synthetic oligonucleotide
  Antisense strand to SEQ ID NO: 686272
uauacuggaucccagccuc

SEQ ID NO: 686274 - RNA, 19 nt, Artificial Sequence
  Description of Artificial Sequence: Synthetic oligonucleotide
  Sense strand starting at position 1395 of SEQ ID NO: 586024
gagaucuguucuggauaga

SEQ ID NO: 686275 - RNA, 19 nt, Artificial Sequence
  Description of Artificial Sequence: Synthetic oligonucleotide
  Antisense strand to SEQ ID NO: 686274
ucuauccagaacagaucuc

SEQ ID NO: 686276 - RNA, 19 nt, Artificial Sequence
  Description of Artificial Sequence: Synthetic oligonucleotide
  Sense strand starting at position 1482 of SEQ ID NO: 586024
uuagcacaggucuguuauu

SEQ ID NO: 686277 - RNA, 19 nt, Artificial Sequence
  Description of Artificial Sequence: Synthetic oligonucleotide
  Antisense strand to SEQ ID NO: 686276
aauaacagaccugugcuaa

SEQ ID NO: 686278 - RNA, 19 nt, Artificial Sequence
  Description of Artificial Sequence: Synthetic oligonucleotide
  Sense strand starting at position 1488 of SEQ ID NO: 586024
caggucuguuauuccaagu

SEQ ID NO: 686279 - RNA, 19 nt, Artificial Sequence
  Description of Artificial Sequence: Synthetic oligonucleotide
  Antisense strand to SEQ ID NO: 686278
acuuggaauaacagaccug

SEQ ID NO: 686280 - RNA, 19 nt, Artificial Sequence
  Description of Artificial Sequence: Synthetic oligonucleotide
  Sense strand starting at position 2568 of SEQ ID NO: 586024
ucuuaacaccagugugauc

SEQ ID NO: 686281 - RNA, 19 nt, Artificial Sequence
  Description of Artificial Sequence: Synthetic oligonucleotide
  Antisense strand to SEQ ID NO: 686280
gaucacacugguguuaaga

SEQ ID NO: 686282 - RNA, 19 nt, Artificial Sequence
  Description of Artificial Sequence: Synthetic oligonucleotide
  Sense strand starting at position 2653 of SEQ ID NO: 586024
gugcauugauuugggacga

SEQ ID NO: 686283 - RNA, 19 nt, Artificial Sequence
  Description of Artificial Sequence: Synthetic oligonucleotide
  Antisense strand to SEQ ID NO: 686282
ucgucccaaaucaaugcac

SEQ ID NO: 686284 - RNA, 19 nt, Artificial Sequence
  Description of Artificial Sequence: Synthetic oligonucleotide
  Sense strand starting at position 2654 of SEQ ID NO: 586024
ugcauugauuugggacgau

SEQ ID NO: 686285 - RNA, 19 nt, Artificial Sequence
  Description of Artificial Sequence: Synthetic oligonucleotide
  Antisense strand to SEQ ID NO: 686284
aucgucccaaaucaaugca

SEQ ID NO: 686286 - RNA, 19 nt, Artificial Sequence
  Description of Artificial Sequence: Synthetic oligonucleotide
  Sense strand starting at position 2668 of SEQ ID NO: 586024
acgauuuguuuacuaccga

SEQ ID NO: 686287 - RNA, 19 nt, Artificial Sequence
  Description of Artificial Sequence: Synthetic oligonucleotide
  Antisense strand to SEQ ID NO: 686286
ucgguaguaaacaaaucgu

SEQ ID NO: 686288 - RNA, 19 nt, Artificial Sequence
  Description of Artificial Sequence: Synthetic oligonucleotide
  Sense strand starting at position 2727 of SEQ ID NO: 586024
ucuccuaguccaugaagua

SEQ ID NO: 686289 - RNA, 19 nt, Artificial Sequence
  Description of Artificial Sequence: Synthetic oligonucleotide
  Antisense strand to SEQ ID NO: 686288
uacuucauggacuaggaga

SEQ ID NO: 686290 - RNA, 19 nt, Artificial Sequence
  Description of Artificial Sequence: Synthetic oligonucleotide
  Sense strand starting at position 2728 of SEQ ID NO: 586024
cuccuaguccaugaaguaa

SEQ ID NO: 686291 - RNA, 19 nt, Artificial Sequence
  Description of Artificial Sequence: Synthetic oligonucleotide
  Antisense strand to SEQ ID NO: 686290
uuacuucauggacuaggag

SEQ ID NO: 686292 - RNA, 19 nt, Artificial Sequence
  Description of Artificial Sequence: Synthetic oligonucleotide
  Sense strand starting at position 2774 of SEQ ID NO: 586024
cccuuucucuggccaauga

SEQ ID NO: 686293 - RNA, 19 nt, Artificial Sequence
  Description of Artificial Sequence: Synthetic oligonucleotide
  Antisense strand to SEQ ID NO: 686292
ucauuggccagagaaaggg

SEQ ID NO: 686294 - RNA, 19 nt, Artificial Sequence
  Description of Artificial Sequence: Synthetic oligonucleotide
  Sense strand starting at position 2813 of SEQ ID NO: 586024
gcuacucacccucagugaa

SEQ ID NO: 686295 - RNA, 19 nt, Artificial Sequence
  Description of Artificial Sequence: Synthetic oligonucleotide
  Antisense strand to SEQ ID NO: 686294
uucacugagggugaguagc

SEQ ID NO: 686296 - RNA, 19 nt, Artificial Sequence
  Description of Artificial Sequence: Synthetic oligonucleotide
  Sense strand starting at position 3044 of SEQ ID NO: 586024
gucuauaccuguuugagca

SEQ ID NO: 686297 - RNA, 19 nt, Artificial Sequence
  Description of Artificial Sequence: Synthetic oligonucleotide
  Antisense strand to SEQ ID NO: 686296
ugcucaaacagguauagac

SEQ ID NO: 686298 - RNA, 19 nt, Artificial Sequence
  Description of Artificial Sequence: Synthetic oligonucleotide
  Sense strand starting at position 3045 of SEQ ID NO: 586024
ucuauaccuguuugagcau

SEQ ID NO: 686299 - RNA, 19 nt, Artificial Sequence
  Description of Artificial Sequence: Synthetic oligonucleotide
  Antisense strand to SEQ ID NO: 686298
augcucaaacagguauaga

SEQ ID NO: 686300 - RNA, 19 nt, Artificial Sequence
  Description of Artificial Sequence: Synthetic oligonucleotide
  Sense strand starting at position 3166 of SEQ ID NO: 586024
accuaaugucacuggaaca

SEQ ID NO: 686301 - RNA, 19 nt, Artificial Sequence
  Description of Artificial Sequence: Synthetic oligonucleotide
  Antisense strand to SEQ ID NO: 686300
uguuccagugacauuaggu

SEQ ID NO: 686302 - RNA, 19 nt, Artificial Sequence
  Description of Artificial Sequence: Synthetic oligonucleotide
  Sense strand starting at position 3176 of SEQ ID NO: 586024
acuggaacaucagcuuauu

SEQ ID NO: 686303 - RNA, 19 nt, Artificial Sequence
  Description of Artificial Sequence: Synthetic oligonucleotide
  Antisense strand to SEQ ID NO: 686302
aauaagcugauguuccagu

SEQ ID NO: 686304 - RNA, 19 nt, Artificial Sequence
  Description of Artificial Sequence: Synthetic oligonucleotide
  Sense strand starting at position 3179 of SEQ ID NO: 586024
ggaacaucagcuuauucua

SEQ ID NO: 686305 - RNA, 19 nt, Artificial Sequence
  Description of Artificial Sequence: Synthetic oligonucleotide
  Antisense strand to SEQ ID NO: 686304
uagaauaagcugauguucc

SEQ ID NO: 686306 - RNA, 19 nt, Artificial Sequence
  Description of Artificial Sequence: Synthetic oligonucleotide
  Sense strand starting at position 3241 of SEQ ID NO: 586024
gcuguuaucccacguugcu

SEQ ID NO: 686307 - RNA, 19 nt, Artificial Sequence
  Description of Artificial Sequence: Synthetic oligonucleotide
  Antisense strand to SEQ ID NO: 686306
agcaacgugggauaacagc

SEQ ID NO: 686308 - RNA, 19 nt, Artificial Sequence
  Description of Artificial Sequence: Synthetic oligonucleotide
  Sense strand starting at position 3263 of SEQ ID NO: 586024
cccagcaacgugggauauu

SEQ ID NO: 686309 - RNA, 19 nt, Artificial Sequence
  Description of Artificial Sequence: Synthetic oligonucleotide
  Antisense strand to SEQ ID NO: 686308
aauaucccacguugcuggg

SEQ ID NO: 686310 - RNA, 19 nt, Artificial Sequence
  Description of Artificial Sequence: Synthetic oligonucleotide
  Sense strand starting at position 3298 of SEQ ID NO: 586024
cgcccuuuccaguaauguu

SEQ ID NO: 686311 - RNA, 19 nt, Artificial Sequence
  Description of Artificial Sequence: Synthetic oligonucleotide
  Antisense strand to SEQ ID NO: 686310
aacauuacuggaaagggcg

SEQ ID NO: 686312 - RNA, 19 nt, Artificial Sequence
  Description of Artificial Sequence: Synthetic oligonucleotide
  Sense strand starting at position 3447 of SEQ ID NO: 586024
acugucauuuacuagauga

SEQ ID NO: 686313 - RNA, 19 nt, Artificial Sequence
  Description of Artificial Sequence: Synthetic oligonucleotide
  Antisense strand to SEQ ID NO: 686312
ucaucuaguaaaugacagu

SEQ ID NO: 686314 - RNA, 19 nt, Artificial Sequence
  Description of Artificial Sequence: Synthetic oligonucleotide
  Sense strand starting at position 3498 of SEQ ID NO: 586024
ugucuaguuuacgcaguua

SEQ ID NO: 686315 - RNA, 19 nt, Artificial Sequence
  Description of Artificial Sequence: Synthetic oligonucleotide
  Antisense strand to SEQ ID NO: 686314
uaacugcguaaacuagaca

SEQ ID NO: 686316 - RNA, 19 nt, Artificial Sequence
  Description of Artificial Sequence: Synthetic oligonucleotide
  Sense strand starting at position 3584 of SEQ ID NO: 586024
gggucuaccuauucucaca

SEQ ID NO: 686317 - RNA, 19 nt, Artificial Sequence
  Description of Artificial Sequence: Synthetic oligonucleotide
  Antisense strand to SEQ ID NO: 686316
ugugagaauagguagaccc

SEQ ID NO: 686318 - RNA, 19 nt, Artificial Sequence
  Description of Artificial Sequence: Synthetic oligonucleotide
  Sense strand starting at position 3953 of SEQ ID NO: 586024
ugucaugagaaaugucaga

SEQ ID NO: 686319 - RNA, 19 nt, Artificial Sequence
  Description of Artificial Sequence: Synthetic oligonucleotide
  Antisense strand to SEQ ID NO: 686318
ucugacauuucucaugaca

SEQ ID NO: 686320 - RNA, 19 nt, Artificial Sequence
  Description of Artificial Sequence: Synthetic oligonucleotide
  Sense strand starting at position 3958 of SEQ ID NO: 586024
ugagaaaugucagagagcu

SEQ ID NO: 686321 - RNA, 19 nt, Artificial Sequence
  Description of Artificial Sequence: Synthetic oligonucleotide
  Antisense strand to SEQ ID NO: 686320
agcucucugacauuucuca

SEQ ID NO: 686322 - RNA, 19 nt, Artificial Sequence
  Description of Artificial Sequence: Synthetic oligonucleotide
  Sense strand starting at position 3966 of SEQ ID NO: 586024
gucagagagcucuguagac

SEQ ID NO: 686323 - RNA, 19 nt, Artificial Sequence
  Description of Artificial Sequence: Synthetic oligonucleotide
  Antisense strand to SEQ ID NO: 686322
gucuacagagcucucugac

SEQ ID NO: 686324 - RNA, 19 nt, Artificial Sequence
  Description of Artificial Sequence: Synthetic oligonucleotide
  Sense strand starting at position 3968 of SEQ ID NO: 586024
cagagagcucuguagacug

SEQ ID NO: 686325 - RNA, 19 nt, Artificial Sequence
  Description of Artificial Sequence: Synthetic oligonucleotide
  Antisense strand to SEQ ID NO: 686324
cagucuacagagcucucug

SEQ ID NO: 686326 - RNA, 19 nt, Artificial Sequence
  Description of Artificial Sequence: Synthetic oligonucleotide
  Sense strand starting at position 2 of SEQ ID NO: 586025
acaagucaggagugauagu

SEQ ID NO: 686327 - RNA, 19 nt, Artificial Sequence
  Description of Artificial Sequence: Synthetic oligonucleotide
  Antisense strand to SEQ ID NO: 686326
acuaucacuccugacuugu

SEQ ID NO: 686328 - RNA, 19 nt, Artificial Sequence
  Description of Artificial Sequence: Synthetic oligonucleotide
  Sense strand starting at position 59 of SEQ ID NO: 586025
ccgaguccugcccaucaua

SEQ ID NO: 686329 - RNA, 19 nt, Artificial Sequence
  Description of Artificial Sequence: Synthetic oligonucleotide
  Antisense strand to SEQ ID NO: 686328
uaugaugggcaggacucgg

SEQ ID NO: 686330 - RNA, 19 nt, Artificial Sequence
  Description of Artificial Sequence: Synthetic oligonucleotide
  Sense strand starting at position 277 of SEQ ID NO: 586025
agacauacuuguguagcaa

SEQ ID NO: 686331 - RNA, 19 nt, Artificial Sequence
  Description of Artificial Sequence: Synthetic oligonucleotide
  Antisense strand to SEQ ID NO: 686330
uugcuacacaaguaugucu

SEQ ID NO: 686332 - RNA, 19 nt, Artificial Sequence
  Description of Artificial Sequence: Synthetic oligonucleotide
  Sense strand starting at position 278 of SEQ ID NO: 586025
gacauacuuguguagcaau

SEQ ID NO: 686333 - RNA, 19 nt, Artificial Sequence
  Description of Artificial Sequence: Synthetic oligonucleotide
  Antisense strand to SEQ ID NO: 686332
auugcuacacaaguauguc

SEQ ID NO: 686334 - RNA, 19 nt, Artificial Sequence
  Description of Artificial Sequence: Synthetic oligonucleotide
  Sense strand starting at position 680 of SEQ ID NO: 586025
agaacuguccugcaaauaa

SEQ ID NO: 686335 - RNA, 19 nt, Artificial Sequence
  Description of Artificial Sequence: Synthetic oligonucleotide
  Antisense strand to SEQ ID NO: 686334
uuauuugcaggacaguucu

SEQ ID NO: 686336 - RNA, 19 nt, Artificial Sequence
  Description of Artificial Sequence: Synthetic oligonucleotide
  Sense strand starting at position 743 of SEQ ID NO: 586025
gagaaaucuuuggagacac

SEQ ID NO: 686337 - RNA, 19 nt, Artificial Sequence
  Description of Artificial Sequence: Synthetic oligonucleotide
  Antisense strand to SEQ ID NO: 686336
gugucuccaaagauuucuc

SEQ ID NO: 686338 - RNA, 19 nt, Artificial Sequence
  Description of Artificial Sequence: Synthetic oligonucleotide
  Sense strand starting at position 828 of SEQ ID NO: 586025
ccacucuguccuggagaca

SEQ ID NO: 686339 - RNA, 19 nt, Artificial Sequence
  Description of Artificial Sequence: Synthetic oligonucleotide
  Antisense strand to SEQ ID NO: 686338
ugucuccaggacagagugg

SEQ ID NO: 686340 - RNA, 19 nt, Artificial Sequence
  Description of Artificial Sequence: Synthetic oligonucleotide
  Sense strand starting at position 831 of SEQ ID NO: 586025
cucuguccuggagacaauu

SEQ ID NO: 686341 - RNA, 19 nt, Artificial Sequence
  Description of Artificial Sequence: Synthetic oligonucleotide
  Antisense strand to SEQ ID NO: 686340
aauugucuccaggacagag

SEQ ID NO: 686342 - RNA, 19 nt, Artificial Sequence
  Description of Artificial Sequence: Synthetic oligonucleotide
  Sense strand starting at position 864 of SEQ ID NO: 586025
gccagauacuaaccugaua

SEQ ID NO: 686343 - RNA, 19 nt, Artificial Sequence
  Description of Artificial Sequence: Synthetic oligonucleotide
  Antisense strand to SEQ ID NO: 686342
uaucagguuaguaucuggc

SEQ ID NO: 686344 - RNA, 19 nt, Artificial Sequence
  Description of Artificial Sequence: Synthetic oligonucleotide
  Sense strand starting at position 967 of SEQ ID NO: 586025
cccagagacaucugugaag

SEQ ID NO: 686345 - RNA, 19 nt, Artificial Sequence
  Description of Artificial Sequence: Synthetic oligonucleotide
  Antisense strand to SEQ ID NO: 686344
cuucacagaugucucuggg

SEQ ID NO: 686346 - RNA, 19 nt, Artificial Sequence
  Description of Artificial Sequence: Synthetic oligonucleotide
  Sense strand starting at position 970 of SEQ ID NO: 586025
agagacaucugugaaggca

SEQ ID NO: 686347 - RNA, 19 nt, Artificial Sequence
  Description of Artificial Sequence: Synthetic oligonucleotide
  Antisense strand to SEQ ID NO: 686346
ugccuucacagaugucucu

SEQ ID NO: 686348 - RNA, 19 nt, Artificial Sequence
  Description of Artificial Sequence: Synthetic oligonucleotide
  Sense strand starting at position 1027 of SEQ ID NO: 586025
ugcauuucggcaggccaaa

SEQ ID NO: 686349 - RNA, 19 nt, Artificial Sequence
  Description of Artificial Sequence: Synthetic oligonucleotide
  Antisense strand to SEQ ID NO: 686348
uuuggccugccgaaaugca

SEQ ID NO: 686350 - RNA, 19 nt, Artificial Sequence
  Description of Artificial Sequence: Synthetic oligonucleotide
  Sense strand starting at position 1047 of SEQ ID NO: 586025
gggcaacacauaugugaaa

SEQ ID NO: 686351 - RNA, 19 nt, Artificial Sequence
  Description of Artificial Sequence: Synthetic oligonucleotide
  Antisense strand to SEQ ID NO: 686350
uuucacauauguguugccc

SEQ ID NO: 686352 - RNA, 19 nt, Artificial Sequence
  Description of Artificial Sequence: Synthetic oligonucleotide
  Sense strand starting at position 1162 of SEQ ID NO: 586025
ggauucugcaggugacuga

SEQ ID NO: 686353 - RNA, 19 nt, Artificial Sequence
  Description of Artificial Sequence: Synthetic oligonucleotide
  Antisense strand to SEQ ID NO: 686352
ucagucaccugcagaaucc

SEQ ID NO: 686354 - RNA, 19 nt, Artificial Sequence
  Description of Artificial Sequence: Synthetic oligonucleotide
  Sense strand starting at position 1169 of SEQ ID NO: 586025
gcaggugacugagaagaga

SEQ ID NO: 686355 - RNA, 19 nt, Artificial Sequence
  Description of Artificial Sequence: Synthetic oligonucleotide
  Antisense strand to SEQ ID NO: 686354
ucucuucucagucaccugc

SEQ ID NO: 686356 - RNA, 19 nt, Artificial Sequence
  Description of Artificial Sequence: Synthetic oligonucleotide
  Sense strand starting at position 1196 of SEQ ID NO: 586025
gaggcugggauccaguaua

SEQ ID NO: 686357 - RNA, 19 nt, Artificial Sequence
  Description of Artificial Sequence: Synthetic oligonucleotide
  Antisense strand to SEQ ID NO: 686356
uauacuggaucccagccuc

SEQ ID NO: 686358 - RNA, 19 nt, Artificial Sequence
  Description of Artificial Sequence: Synthetic oligonucleotide
  Sense strand starting at position 1517 of SEQ ID NO: 586025
cgagaucuguucuggauag

SEQ ID NO: 686359 - RNA, 19 nt, Artificial Sequence
  Description of Artificial Sequence: Synthetic oligonucleotide
  Antisense strand to SEQ ID NO: 686358
cuauccagaacagaucucg

SEQ ID NO: 686360 - RNA, 19 nt, Artificial Sequence
  Description of Artificial Sequence: Synthetic oligonucleotide
  Sense strand starting at position 1518 of SEQ ID NO: 586025
gagaucuguucuggauaga

SEQ ID NO: 686361 - RNA, 19 nt, Artificial Sequence
  Description of Artificial Sequence: Synthetic oligonucleotide
  Antisense strand to SEQ ID NO: 686360
ucuauccagaacagaucuc

SEQ ID NO: 686362 - RNA, 19 nt, Artificial Sequence
  Description of Artificial Sequence: Synthetic oligonucleotide
  Sense strand starting at position 1605 of SEQ ID NO: 586025
uuagcacaggucuguuauu

SEQ ID NO: 686363 - RNA, 19 nt, Artificial Sequence
  Description of Artificial Sequence: Synthetic oligonucleotide
  Antisense strand to SEQ ID NO: 686362
aauaacagaccugugcuaa

SEQ ID NO: 686364 - RNA, 19 nt, Artificial Sequence
  Description of Artificial Sequence: Synthetic oligonucleotide
  Sense strand starting at position 1611 of SEQ ID NO: 586025
caggucuguuauuccaagu

SEQ ID NO: 686365 - RNA, 19 nt, Artificial Sequence
  Description of Artificial Sequence: Synthetic oligonucleotide
  Antisense strand to SEQ ID NO: 686364
acuuggaauaacagaccug

SEQ ID NO: 686366 - RNA, 19 nt, Artificial Sequence
  Description of Artificial Sequence: Synthetic oligonucleotide
  Sense strand starting at position 2574 of SEQ ID NO: 586025
cggagcuccuauugggaau

SEQ ID NO: 686367 - RNA, 19 nt, Artificial Sequence
  Description of Artificial Sequence: Synthetic oligonucleotide
  Antisense strand to SEQ ID NO: 686366
auucccaauaggagcuccg

SEQ ID NO: 686368 - RNA, 19 nt, Artificial Sequence
  Description of Artificial Sequence: Synthetic oligonucleotide
  Sense strand starting at position 2691 of SEQ ID NO: 586025
ucuuaacaccagugugauc

SEQ ID NO: 686369 - RNA, 19 nt, Artificial Sequence
  Description of Artificial Sequence: Synthetic oligonucleotide
  Antisense strand to SEQ ID NO: 686368
gaucacacugguguuaaga

SEQ ID NO: 686370 - RNA, 19 nt, Artificial Sequence
  Description of Artificial Sequence: Synthetic oligonucleotide
  Sense strand starting at position 2776 of SEQ ID NO: 586025
gugcauugauuugggacga

SEQ ID NO: 686371 - RNA, 19 nt, Artificial Sequence
  Description of Artificial Sequence: Synthetic oligonucleotide
  Antisense strand to SEQ ID NO: 686370
ucgucccaaaucaaugcac

SEQ ID NO: 686372 - RNA, 19 nt, Artificial Sequence
  Description of Artificial Sequence: Synthetic oligonucleotide
  Sense strand starting at position 2777 of SEQ ID NO: 586025
ugcauugauuugggacgau

SEQ ID NO: 686373 - RNA, 19 nt, Artificial Sequence
  Description of Artificial Sequence: Synthetic oligonucleotide
  Antisense strand to SEQ ID NO: 686372
aucgucccaaaucaaugca

SEQ ID NO: 686374 - RNA, 19 nt, Artificial Sequence
  Description of Artificial Sequence: Synthetic oligonucleotide
  Sense strand starting at position 2791 of SEQ ID NO: 586025
acgauuuguuuacuaccga

SEQ ID NO: 686375 - RNA, 19 nt, Artificial Sequence
  Description of Artificial Sequence: Synthetic oligonucleotide
  Antisense strand to SEQ ID NO: 686374
ucgguaguaaacaaaucgu

SEQ ID NO: 686376 - RNA, 19 nt, Artificial Sequence
  Description of Artificial Sequence: Synthetic oligonucleotide
  Sense strand starting at position 2850 of SEQ ID NO: 586025
ucuccuaguccaugaagua

SEQ ID NO: 686377 - RNA, 19 nt, Artificial Sequence
  Description of Artificial Sequence: Synthetic oligonucleotide
  Antisense strand to SEQ ID NO: 686376
uacuucauggacuaggaga

SEQ ID NO: 686378 - RNA, 19 nt, Artificial Sequence
  Description of Artificial Sequence: Synthetic oligonucleotide
  Sense strand starting at position 2851 of SEQ ID NO: 586025
cuccuaguccaugaaguaa

SEQ ID NO: 686379 - RNA, 19 nt, Artificial Sequence
  Description of Artificial Sequence: Synthetic oligonucleotide
  Antisense strand to SEQ ID NO: 686378
uuacuucauggacuaggag

SEQ ID NO: 686380 - RNA, 19 nt, Artificial Sequence
  Description of Artificial Sequence: Synthetic oligonucleotide
  Sense strand starting at position 2897 of SEQ ID NO: 586025
cccuuucucuggccaauga

SEQ ID NO: 686381 - RNA, 19 nt, Artificial Sequence
  Description of Artificial Sequence: Synthetic oligonucleotide
  Antisense strand to SEQ ID NO: 686380
ucauuggccagagaaaggg

SEQ ID NO: 686382 - RNA, 19 nt, Artificial Sequence
  Description of Artificial Sequence: Synthetic oligonucleotide
  Sense strand starting at position 2936 of SEQ ID NO: 586025
gcuacucacccucagugaa

SEQ ID NO: 686383 - RNA, 19 nt, Artificial Sequence
  Description of Artificial Sequence: Synthetic oligonucleotide
  Antisense strand to SEQ ID NO: 686382
uucacugagggugaguagc

SEQ ID NO: 686384 - RNA, 19 nt, Artificial Sequence
  Description of Artificial Sequence: Synthetic oligonucleotide
  Sense strand starting at position 3167 of SEQ ID NO: 586025
gucuauaccuguuugagca

SEQ ID NO: 686385 - RNA, 19 nt, Artificial Sequence
  Description of Artificial Sequence: Synthetic oligonucleotide
  Antisense strand to SEQ ID NO: 686384
ugcucaaacagguauagac

SEQ ID NO: 686386 - RNA, 19 nt, Artificial Sequence
  Description of Artificial Sequence: Synthetic oligonucleotide
  Sense strand starting at position 3168 of SEQ ID NO: 586025
ucuauaccuguuugagcau

SEQ ID NO: 686387 - RNA, 19 nt, Artificial Sequence
  Description of Artificial Sequence: Synthetic oligonucleotide
  Antisense strand to SEQ ID NO: 686386
augcucaaacagguauaga

SEQ ID NO: 686388 - RNA, 19 nt, Artificial Sequence
  Description of Artificial Sequence: Synthetic oligonucleotide
  Sense strand starting at position 3289 of SEQ ID NO: 586025
accuaaugucacuggaaca

SEQ ID NO: 686389 - RNA, 19 nt, Artificial Sequence
  Description of Artificial Sequence: Synthetic oligonucleotide
  Antisense strand to SEQ ID NO: 686388
uguuccagugacauuaggu

SEQ ID NO: 686390 - RNA, 19 nt, Artificial Sequence
  Description of Artificial Sequence: Synthetic oligonucleotide
  Sense strand starting at position 3299 of SEQ ID NO: 586025
acuggaacaucagcuuauu

SEQ ID NO: 686391 - RNA, 19 nt, Artificial Sequence
  Description of Artificial Sequence: Synthetic oligonucleotide
  Antisense strand to SEQ ID NO: 686390
aauaagcugauguuccagu

SEQ ID NO: 686392 - RNA, 19 nt, Artificial Sequence
  Description of Artificial Sequence: Synthetic oligonucleotide
  Sense strand starting at position 3302 of SEQ ID NO: 586025
ggaacaucagcuuauucua

SEQ ID NO: 686393 - RNA, 19 nt, Artificial Sequence
  Description of Artificial Sequence: Synthetic oligonucleotide
  Antisense strand to SEQ ID NO: 686392
uagaauaagcugauguucc

SEQ ID NO: 686394 - RNA, 19 nt, Artificial Sequence
  Description of Artificial Sequence: Synthetic oligonucleotide
  Sense strand starting at position 3364 of SEQ ID NO: 586025
gcuguuaucccacguugcu

SEQ ID NO: 686395 - RNA, 19 nt, Artificial Sequence
  Description of Artificial Sequence: Synthetic oligonucleotide
  Antisense strand to SEQ ID NO: 686394
agcaacgugggauaacagc

SEQ ID NO: 686396 - RNA, 19 nt, Artificial Sequence
  Description of Artificial Sequence: Synthetic oligonucleotide
  Sense strand starting at position 3386 of SEQ ID NO: 586025
cccagcaacgugggauauu

SEQ ID NO: 686397 - RNA, 19 nt, Artificial Sequence
  Description of Artificial Sequence: Synthetic oligonucleotide
  Antisense strand to SEQ ID NO: 686396
aauaucccacguugcuggg

SEQ ID NO: 686398 - RNA, 19 nt, Artificial Sequence
  Description of Artificial Sequence: Synthetic oligonucleotide
  Sense strand starting at position 3421 of SEQ ID NO: 586025
cgcccuuuccaguaauguu

SEQ ID NO: 686399 - RNA, 19 nt, Artificial Sequence
  Description of Artificial Sequence: Synthetic oligonucleotide
  Antisense strand to SEQ ID NO: 686398
aacauuacuggaaagggcg

SEQ ID NO: 686400 - RNA, 19 nt, Artificial Sequence
  Description of Artificial Sequence: Synthetic oligonucleotide
  Sense strand starting at position 3570 of SEQ ID NO: 586025
acugucauuuacuagauga

SEQ ID NO: 686401 - RNA, 19 nt, Artificial Sequence
  Description of Artificial Sequence: Synthetic oligonucleotide
  Antisense strand to SEQ ID NO: 686400
ucaucuaguaaaugacagu

SEQ ID NO: 686402 - RNA, 19 nt, Artificial Sequence
  Description of Artificial Sequence: Synthetic oligonucleotide
  Sense strand starting at position 3621 of SEQ ID NO: 586025
ugucuaguuuacgcaguua

SEQ ID NO: 686403 - RNA, 19 nt, Artificial Sequence
  Description of Artificial Sequence: Synthetic oligonucleotide
  Antisense strand to SEQ ID NO: 686402
uaacugcguaaacuagaca

SEQ ID NO: 686404 - RNA, 19 nt, Artificial Sequence
  Description of Artificial Sequence: Synthetic oligonucleotide
  Sense strand starting at position 3707 of SEQ ID NO: 586025
gggucuaccuauucucaca

SEQ ID NO: 686405 - RNA, 19 nt, Artificial Sequence
  Description of Artificial Sequence: Synthetic oligonucleotide
  Antisense strand to SEQ ID NO: 686404
ugugagaauagguagaccc

SEQ ID NO: 686406 - RNA, 19 nt, Artificial Sequence
  Description of Artificial Sequence: Synthetic oligonucleotide
  Sense strand starting at position 19 of SEQ ID NO: 586026
ggaaauuccuccuagcacu

SEQ ID NO: 686407 - RNA, 19 nt, Artificial Sequence
  Description of Artificial Sequence: Synthetic oligonucleotide
  Antisense strand to SEQ ID NO: 686406
agugcuaggaggaauuucc

SEQ ID NO: 686408 - RNA, 19 nt, Artificial Sequence
  Description of Artificial Sequence: Synthetic oligonucleotide
  Sense strand starting at position 73 of SEQ ID NO: 586026
uagggaugguucucuggau

SEQ ID NO: 686409 - RNA, 19 nt, Artificial Sequence
  Description of Artificial Sequence: Synthetic oligonucleotide
  Antisense strand to SEQ ID NO: 686408
auccagagaaccaucccua

SEQ ID NO: 686410 - RNA, 19 nt, Artificial Sequence
  Description of Artificial Sequence: Synthetic oligonucleotide
  Sense strand starting at position 2240 of SEQ ID NO: 586026
cccggaaacucuguccaga

SEQ ID NO: 686411 - RNA, 19 nt, Artificial Sequence
  Description of Artificial Sequence: Synthetic oligonucleotide
  Antisense strand to SEQ ID NO: 686410
ucuggacagaguuuccggg

SEQ ID NO: 686412 - RNA, 19 nt, Artificial Sequence
  Description of Artificial Sequence: Synthetic oligonucleotide
  Sense strand starting at position 2242 of SEQ ID NO: 586026
cggaaacucuguccagaga

SEQ ID NO: 686413 - RNA, 19 nt, Artificial Sequence
  Description of Artificial Sequence: Synthetic oligonucleotide
  Antisense strand to SEQ ID NO: 686412
ucucuggacagaguuuccg

SEQ ID NO: 686414 - RNA, 19 nt, Artificial Sequence
  Description of Artificial Sequence: Synthetic oligonucleotide
  Sense strand starting at position 2333 of SEQ ID NO: 586026
uucccucuuugcuaggaau

SEQ ID NO: 686415 - RNA, 19 nt, Artificial Sequence
  Description of Artificial Sequence: Synthetic oligonucleotide
  Antisense strand to SEQ ID NO: 686414
auuccuagcaaagagggaa

SEQ ID NO: 686416 - RNA, 19 nt, Artificial Sequence
  Description of Artificial Sequence: Synthetic oligonucleotide
  Sense strand starting at position 2335 of SEQ ID NO: 586026
cccucuuugcuaggaauau

SEQ ID NO: 686417 - RNA, 19 nt, Artificial Sequence
  Description of Artificial Sequence: Synthetic oligonucleotide
  Antisense strand to SEQ ID NO: 686416
auauuccuagcaaagaggg

SEQ ID NO: 686418 - RNA, 19 nt, Artificial Sequence
  Description of Artificial Sequence: Synthetic oligonucleotide
  Sense strand starting at position 2336 of SEQ ID NO: 586026
ccucuuugcuaggaauauu

SEQ ID NO: 686419 - RNA, 19 nt, Artificial Sequence
  Description of Artificial Sequence: Synthetic oligonucleotide
  Antisense strand to SEQ ID NO: 686418
aauauuccuagcaaagagg

SEQ ID NO: 686420 - RNA, 19 nt, Artificial Sequence
  Description of Artificial Sequence: Synthetic oligonucleotide
  Sense strand starting at position 2700 of SEQ ID NO: 586026
ggaguugcuucauguacag

SEQ ID NO: 686421 - RNA, 19 nt, Artificial Sequence
  Description of Artificial Sequence: Synthetic oligonucleotide
  Antisense strand to SEQ ID NO: 686420
cuguacaugaagcaacucc

SEQ ID NO: 686422 - RNA, 19 nt, Artificial Sequence
  Description of Artificial Sequence: Synthetic oligonucleotide
  Sense strand starting at position 2748 of SEQ ID NO: 586026
gugugucccucugacaaug

SEQ ID NO: 686423 - RNA, 19 nt, Artificial Sequence
  Description of Artificial Sequence: Synthetic oligonucleotide
  Antisense strand to SEQ ID NO: 686422
cauugucagagggacacac

SEQ ID NO: 686424 - RNA, 19 nt, Artificial Sequence
  Description of Artificial Sequence: Synthetic oligonucleotide
  Sense strand starting at position 2782 of SEQ ID NO: 586026
ucaucuggccugcagacau

SEQ ID NO: 686425 - RNA, 19 nt, Artificial Sequence
  Description of Artificial Sequence: Synthetic oligonucleotide
  Antisense strand to SEQ ID NO: 686424
augucugcaggccagauga

SEQ ID NO: 686426 - RNA, 19 nt, Artificial Sequence
  Description of Artificial Sequence: Synthetic oligonucleotide
  Sense strand starting at position 2844 of SEQ ID NO: 586026
ugggaaguguccagggaug

SEQ ID NO: 686427 - RNA, 19 nt, Artificial Sequence
  Description of Artificial Sequence: Synthetic oligonucleotide
  Antisense strand to SEQ ID NO: 686426
caucccuggacacuuccca

SEQ ID NO: 686428 - RNA, 19 nt, Artificial Sequence
  Description of Artificial Sequence: Synthetic oligonucleotide
  Sense strand starting at position 2846 of SEQ ID NO: 586026
ggaaguguccagggaugcu

SEQ ID NO: 686429 - RNA, 19 nt, Artificial Sequence
  Description of Artificial Sequence: Synthetic oligonucleotide
  Antisense strand to SEQ ID NO: 686428
agcaucccuggacacuucc

SEQ ID NO: 686430 - RNA, 19 nt, Artificial Sequence
  Description of Artificial Sequence: Synthetic oligonucleotide
  Sense strand starting at position 2874 of SEQ ID NO: 586026
agaagaauuuggcaccaag

SEQ ID NO: 686431 - RNA, 19 nt, Artificial Sequence
  Description of Artificial Sequence: Synthetic oligonucleotide
  Antisense strand to SEQ ID NO: 686430
cuuggugccaaauucuucu

SEQ ID NO: 686432 - RNA, 19 nt, Artificial Sequence
  Description of Artificial Sequence: Synthetic oligonucleotide
  Sense strand starting at position 2979 of SEQ ID NO: 586026
cacuguggagucuggcaaa

SEQ ID NO: 686433 - RNA, 19 nt, Artificial Sequence
  Description of Artificial Sequence: Synthetic oligonucleotide
  Antisense strand to SEQ ID NO: 686432
uuugccagacuccacagug

SEQ ID NO: 686434 - RNA, 19 nt, Artificial Sequence
  Description of Artificial Sequence: Synthetic oligonucleotide
  Sense strand starting at position 3056 of SEQ ID NO: 586026
cccagauguugccagggaa

SEQ ID NO: 686435 - RNA, 19 nt, Artificial Sequence
  Description of Artificial Sequence: Synthetic oligonucleotide
  Antisense strand to SEQ ID NO: 686434
uucccuggcaacaucuggg

SEQ ID NO: 686436 - RNA, 19 nt, Artificial Sequence
  Description of Artificial Sequence: Synthetic oligonucleotide
  Sense strand starting at position 3110 of SEQ ID NO: 586026
cagggccugcgugaugauu

SEQ ID NO: 686437 - RNA, 19 nt, Artificial Sequence
  Description of Artificial Sequence: Synthetic oligonucleotide
  Antisense strand to SEQ ID NO: 686436
aaucaucacgcaggcccug

SEQ ID NO: 686438 - RNA, 19 nt, Artificial Sequence
  Description of Artificial Sequence: Synthetic oligonucleotide
  Sense strand starting at position 3112 of SEQ ID NO: 586026
gggccugcgugaugauuca

SEQ ID NO: 686439 - RNA, 19 nt, Artificial Sequence
  Description of Artificial Sequence: Synthetic oligonucleotide
  Antisense strand to SEQ ID NO: 686438
ugaaucaucacgcaggccc

SEQ ID NO: 686440 - RNA, 19 nt, Artificial Sequence
  Description of Artificial Sequence: Synthetic oligonucleotide
  Sense strand starting at position 3412 of SEQ ID NO: 586026
cccauucuugcauauagga

SEQ ID NO: 686441 - RNA, 19 nt, Artificial Sequence
  Description of Artificial Sequence: Synthetic oligonucleotide
  Antisense strand to SEQ ID NO: 686440
uccuauaugcaagaauggg

SEQ ID NO: 686442 - RNA, 19 nt, Artificial Sequence
  Description of Artificial Sequence: Synthetic oligonucleotide
  Sense strand starting at position 3454 of SEQ ID NO: 586026
ugguuucugaccuggcuau

SEQ ID NO: 686443 - RNA, 19 nt, Artificial Sequence
  Description of Artificial Sequence: Synthetic oligonucleotide
  Antisense strand to SEQ ID NO: 686442
auagccaggucagaaacca

SEQ ID NO: 686444 - RNA, 19 nt, Artificial Sequence
  Description of Artificial Sequence: Synthetic oligonucleotide
  Sense strand starting at position 3455 of SEQ ID NO: 586026
gguuucugaccuggcuauu

SEQ ID NO: 686445 - RNA, 19 nt, Artificial Sequence
  Description of Artificial Sequence: Synthetic oligonucleotide
  Antisense strand to SEQ ID NO: 686444
aauagccaggucagaaacc

SEQ ID NO: 686446 - RNA, 19 nt, Artificial Sequence
  Description of Artificial Sequence: Synthetic oligonucleotide
  Sense strand starting at position 3529 of SEQ ID NO: 586026
accagucagucugauuauc

SEQ ID NO: 686447 - RNA, 19 nt, Artificial Sequence
  Description of Artificial Sequence: Synthetic oligonucleotide
  Antisense strand to SEQ ID NO: 686446
gauaaucagacugacuggu

SEQ ID NO: 686448 - RNA, 19 nt, Artificial Sequence
  Description of Artificial Sequence: Synthetic oligonucleotide
  Sense strand starting at position 3809 of SEQ ID NO: 586026
uuccaucauucgugcacua

SEQ ID NO: 686449 - RNA, 19 nt, Artificial Sequence
  Description of Artificial Sequence: Synthetic oligonucleotide
  Antisense strand to SEQ ID NO: 686448
uagugcacgaaugauggaa

SEQ ID NO: 686450 - RNA, 19 nt, Artificial Sequence
  Description of Artificial Sequence: Synthetic oligonucleotide
  Sense strand starting at position 3811 of SEQ ID NO: 586026
ccaucauucgugcacuagu

SEQ ID NO: 686451 - RNA, 19 nt, Artificial Sequence
  Description of Artificial Sequence: Synthetic oligonucleotide
  Antisense strand to SEQ ID NO: 686450
acuagugcacgaaugaugg

SEQ ID NO: 686452 - RNA, 19 nt, Artificial Sequence
  Description of Artificial Sequence: Synthetic oligonucleotide
  Sense strand starting at position 3947 of SEQ ID NO: 586026
caugcucuaggcugaugaa

SEQ ID NO: 686453 - RNA, 19 nt, Artificial Sequence
  Description of Artificial Sequence: Synthetic oligonucleotide
  Antisense strand to SEQ ID NO: 686452
uucaucagccuagagcaug

SEQ ID NO: 686454 - RNA, 19 nt, Artificial Sequence
  Description of Artificial Sequence: Synthetic oligonucleotide
  Sense strand starting at position 95 of SEQ ID NO: 586027
uccugcugacaugacaaau

SEQ ID NO: 686455 - RNA, 19 nt, Artificial Sequence
  Description of Artificial Sequence: Synthetic oligonucleotide
  Antisense strand to SEQ ID NO: 686454
auuugucaugucagcagga

SEQ ID NO: 686456 - RNA, 19 nt, Artificial Sequence
  Description of Artificial Sequence: Synthetic oligonucleotide
  Sense strand starting at position 190 of SEQ ID NO: 586027
cucuucuaguccuuaggaa

SEQ ID NO: 686457 - RNA, 19 nt, Artificial Sequence
  Description of Artificial Sequence: Synthetic oligonucleotide
  Antisense strand to SEQ ID NO: 686456
uuccuaaggacuagaagag

SEQ ID NO: 686458 - RNA, 19 nt, Artificial Sequence
  Description of Artificial Sequence: Synthetic oligonucleotide
  Sense strand starting at position 191 of SEQ ID NO: 586027
ucuucuaguccuuaggaau

SEQ ID NO: 686459 - RNA, 19 nt, Artificial Sequence
  Description of Artificial Sequence: Synthetic oligonucleotide
  Antisense strand to SEQ ID NO: 686458
auuccuaaggacuagaaga

SEQ ID NO: 686460 - RNA, 19 nt, Artificial Sequence
  Description of Artificial Sequence: Synthetic oligonucleotide
  Sense strand starting at position 194 of SEQ ID NO: 586027
ucuaguccuuaggaauaac

SEQ ID NO: 686461 - RNA, 19 nt, Artificial Sequence
  Description of Artificial Sequence: Synthetic oligonucleotide
  Antisense strand to SEQ ID NO: 686460
guuauuccuaaggacuaga

SEQ ID NO: 686462 - RNA, 19 nt, Artificial Sequence
  Description of Artificial Sequence: Synthetic oligonucleotide
  Sense strand starting at position 224 of SEQ ID NO: 586027
acagguugcuuagagggua

SEQ ID NO: 686463 - RNA, 19 nt, Artificial Sequence
  Description of Artificial Sequence: Synthetic oligonucleotide
  Antisense strand to SEQ ID NO: 686462
uacccucuaagcaaccugu

SEQ ID NO: 686464 - RNA, 19 nt, Artificial Sequence
  Description of Artificial Sequence: Synthetic oligonucleotide
  Sense strand starting at position 958 of SEQ ID NO: 586027
ugacaauauucucccggga

SEQ ID NO: 686465 - RNA, 19 nt, Artificial Sequence
  Description of Artificial Sequence: Synthetic oligonucleotide
  Antisense strand to SEQ ID NO: 686464
ucccgggagaauauuguca

SEQ ID NO: 686466 - RNA, 19 nt, Artificial Sequence
  Description of Artificial Sequence: Synthetic oligonucleotide
  Sense strand starting at position 1187 of SEQ ID NO: 586027
ugaggaacuugcgguguua

SEQ ID NO: 686467 - RNA, 19 nt, Artificial Sequence
  Description of Artificial Sequence: Synthetic oligonucleotide
  Antisense strand to SEQ ID NO: 686466
uaacaccgcaaguuccuca

SEQ ID NO: 686468 - RNA, 19 nt, Artificial Sequence
  Description of Artificial Sequence: Synthetic oligonucleotide
  Sense strand starting at position 1237 of SEQ ID NO: 586027
ccuccucuccaagggaauu

SEQ ID NO: 686469 - RNA, 19 nt, Artificial Sequence
  Description of Artificial Sequence: Synthetic oligonucleotide
  Antisense strand to SEQ ID NO: 686468
aauucccuuggagaggagg

SEQ ID NO: 686470 - RNA, 19 nt, Artificial Sequence
  Description of Artificial Sequence: Synthetic oligonucleotide
  Sense strand starting at position 1249 of SEQ ID NO: 586027
gggaauucuggcugaggga

SEQ ID NO: 686471 - RNA, 19 nt, Artificial Sequence
  Description of Artificial Sequence: Synthetic oligonucleotide
  Antisense strand to SEQ ID NO: 686470
ucccucagccagaauuccc

SEQ ID NO: 686472 - RNA, 19 nt, Artificial Sequence
  Description of Artificial Sequence: Synthetic oligonucleotide
  Sense strand starting at position 1445 of SEQ ID NO: 586027
gcccgugucacagcaaauu

SEQ ID NO: 686473 - RNA, 19 nt, Artificial Sequence
  Description of Artificial Sequence: Synthetic oligonucleotide
  Antisense strand to SEQ ID NO: 686472
aauuugcugugacacgggc

SEQ ID NO: 686474 - RNA, 19 nt, Artificial Sequence
  Description of Artificial Sequence: Synthetic oligonucleotide
  Sense strand starting at position 1556 of SEQ ID NO: 586027
ggaacuguuggcgagggaa

SEQ ID NO: 686475 - RNA, 19 nt, Artificial Sequence
  Description of Artificial Sequence: Synthetic oligonucleotide
  Antisense strand to SEQ ID NO: 686474
uucccucgccaacaguucc

SEQ ID NO: 686476 - RNA, 19 nt, Artificial Sequence
  Description of Artificial Sequence: Synthetic oligonucleotide
  Sense strand starting at position 1596 of SEQ ID NO: 586027
ucgggacuuucgguggaau

SEQ ID NO: 686477 - RNA, 19 nt, Artificial Sequence
  Description of Artificial Sequence: Synthetic oligonucleotide
  Antisense strand to SEQ ID NO: 686476
auuccaccgaaagucccga

SEQ ID NO: 686478 - RNA, 19 nt, Artificial Sequence
  Description of Artificial Sequence: Synthetic oligonucleotide
  Sense strand starting at position 1597 of SEQ ID NO: 586027
cgggacuuucgguggaaug

SEQ ID NO: 686479 - RNA, 19 nt, Artificial Sequence
  Description of Artificial Sequence: Synthetic oligonucleotide
  Antisense strand to SEQ ID NO: 686478
cauuccaccgaaagucccg

SEQ ID NO: 686480 - RNA, 19 nt, Artificial Sequence
  Description of Artificial Sequence: Synthetic oligonucleotide
  Sense strand starting at position 1598 of SEQ ID NO: 586027
gggacuuucgguggaaugu

SEQ ID NO: 686481 - RNA, 19 nt, Artificial Sequence
  Description of Artificial Sequence: Synthetic oligonucleotide
  Antisense strand to SEQ ID NO: 686480
acauuccaccgaaaguccc

SEQ ID NO: 686482 - RNA, 19 nt, Artificial Sequence
  Description of Artificial Sequence: Synthetic oligonucleotide
  Sense strand starting at position 1604 of SEQ ID NO: 586027
uucgguggaaugugacaaa

SEQ ID NO: 686483 - RNA, 19 nt, Artificial Sequence
  Description of Artificial Sequence: Synthetic oligonucleotide
  Antisense strand to SEQ ID NO: 686482
uuugucacauuccaccgaa

SEQ ID NO: 686484 - RNA, 19 nt, Artificial Sequence
  Description of Artificial Sequence: Synthetic oligonucleotide
  Sense strand starting at position 1644 of SEQ ID NO: 586027
cacgacuucugacagugau

SEQ ID NO: 686485 - RNA, 19 nt, Artificial Sequence
  Description of Artificial Sequence: Synthetic oligonucleotide
  Antisense strand to SEQ ID NO: 686484
aucacugucagaagucgug

SEQ ID NO: 686486 - RNA, 19 nt, Artificial Sequence
  Description of Artificial Sequence: Synthetic oligonucleotide
  Sense strand starting at position 1647 of SEQ ID NO: 586027
gacuucugacagugaucau

SEQ ID NO: 686487 - RNA, 19 nt, Artificial Sequence
  Description of Artificial Sequence: Synthetic oligonucleotide
  Antisense strand to SEQ ID NO: 686486
augaucacugucagaaguc

SEQ ID NO: 686488 - RNA, 19 nt, Artificial Sequence
  Description of Artificial Sequence: Synthetic oligonucleotide
  Sense strand starting at position 1700 of SEQ ID NO: 586027
gauggaucuucuccgcaga

SEQ ID NO: 686489 - RNA, 19 nt, Artificial Sequence
  Description of Artificial Sequence: Synthetic oligonucleotide
  Antisense strand to SEQ ID NO: 686488
ucugcggagaagauccauc

SEQ ID NO: 686490 - RNA, 19 nt, Artificial Sequence
  Description of Artificial Sequence: Synthetic oligonucleotide
  Sense strand starting at position 1702 of SEQ ID NO: 586027
uggaucuucuccgcagaga

SEQ ID NO: 686491 - RNA, 19 nt, Artificial Sequence
  Description of Artificial Sequence: Synthetic oligonucleotide
  Antisense strand to SEQ ID NO: 686490
ucucugcggagaagaucca

SEQ ID NO: 686492 - RNA, 19 nt, Artificial Sequence
  Description of Artificial Sequence: Synthetic oligonucleotide
  Sense strand starting at position 1703 of SEQ ID NO: 586027
ggaucuucuccgcagagag

SEQ ID NO: 686493 - RNA, 19 nt, Artificial Sequence
  Description of Artificial Sequence: Synthetic oligonucleotide
  Antisense strand to SEQ ID NO: 686492
cucucugcggagaagaucc

SEQ ID NO: 686494 - RNA, 19 nt, Artificial Sequence
  Description of Artificial Sequence: Synthetic oligonucleotide
  Sense strand starting at position 1705 of SEQ ID NO: 586027
aucuucuccgcagagagaa

SEQ ID NO: 686495 - RNA, 19 nt, Artificial Sequence
  Description of Artificial Sequence: Synthetic oligonucleotide
  Antisense strand to SEQ ID NO: 686494
uucucucugcggagaagau

SEQ ID NO: 686496 - RNA, 19 nt, Artificial Sequence
  Description of Artificial Sequence: Synthetic oligonucleotide
  Sense strand starting at position 1747 of SEQ ID NO: 586027
ggcuucucuccaggcuaaa

SEQ ID NO: 686497 - RNA, 19 nt, Artificial Sequence
  Description of Artificial Sequence: Synthetic oligonucleotide
  Antisense strand to SEQ ID NO: 686496
uuuagccuggagagaagcc

SEQ ID NO: 686498 - RNA, 19 nt, Artificial Sequence
  Description of Artificial Sequence: Synthetic oligonucleotide
  Sense strand starting at position 1795 of SEQ ID NO: 586027
ggaaauuccuccuagcacu

SEQ ID NO: 686499 - RNA, 19 nt, Artificial Sequence
  Description of Artificial Sequence: Synthetic oligonucleotide
  Antisense strand to SEQ ID NO: 686498
agugcuaggaggaauuucc

SEQ ID NO: 686500 - RNA, 19 nt, Artificial Sequence
  Description of Artificial Sequence: Synthetic oligonucleotide
  Sense strand starting at position 1849 of SEQ ID NO: 586027
uagggaugguucucuggau

SEQ ID NO: 686501 - RNA, 19 nt, Artificial Sequence
  Description of Artificial Sequence: Synthetic oligonucleotide
  Antisense strand to SEQ ID NO: 686500
auccagagaaccaucccua

SEQ ID NO: 686502 - RNA, 19 nt, Artificial Sequence
  Description of Artificial Sequence: Synthetic oligonucleotide
  Sense strand starting at position 98 of SEQ ID NO: 586028
acgaaagaccaguggauua

SEQ ID NO: 686503 - RNA, 19 nt, Artificial Sequence
  Description of Artificial Sequence: Synthetic oligonucleotide
  Antisense strand to SEQ ID NO: 686502
uaauccacuggucuuucgu

SEQ ID NO: 686504 - RNA, 19 nt, Artificial Sequence
  Description of Artificial Sequence: Synthetic oligonucleotide
  Sense strand starting at position 305 of SEQ ID NO: 586028
gcauucugcaggcagagau

SEQ ID NO: 686505 - RNA, 19 nt, Artificial Sequence
  Description of Artificial Sequence: Synthetic oligonucleotide
  Antisense strand to SEQ ID NO: 686504
aucucugccugcagaaugc

SEQ ID NO: 686506 - RNA, 19 nt, Artificial Sequence
  Description of Artificial Sequence: Synthetic oligonucleotide
  Sense strand starting at position 317 of SEQ ID NO: 586028
cagagauggccuugaagag

SEQ ID NO: 686507 - RNA, 19 nt, Artificial Sequence
  Description of Artificial Sequence: Synthetic oligonucleotide
  Antisense strand to SEQ ID NO: 686506
cucuucaaggccaucucug

SEQ ID NO: 686508 - RNA, 19 nt, Artificial Sequence
  Description of Artificial Sequence: Synthetic oligonucleotide
  Sense strand starting at position 332 of SEQ ID NO: 586028
agaggcggcccgagucaua

SEQ ID NO: 686509 - RNA, 19 nt, Artificial Sequence
  Description of Artificial Sequence: Synthetic oligonucleotide
  Antisense strand to SEQ ID NO: 686508
uaugacucgggccgccucu

SEQ ID NO: 686510 - RNA, 19 nt, Artificial Sequence
  Description of Artificial Sequence: Synthetic oligonucleotide
  Sense strand starting at position 577 of SEQ ID NO: 586028
gaacucuggugauucuuaa

SEQ ID NO: 686511 - RNA, 19 nt, Artificial Sequence
  Description of Artificial Sequence: Synthetic oligonucleotide
  Antisense strand to SEQ ID NO: 686510
uuaagaaucaccagaguuc

SEQ ID NO: 686512 - RNA, 19 nt, Artificial Sequence
  Description of Artificial Sequence: Synthetic oligonucleotide
  Sense strand starting at position 686 of SEQ ID NO: 586028
ucauuaauuuaucgggaaa

SEQ ID NO: 686513 - RNA, 19 nt, Artificial Sequence
  Description of Artificial Sequence: Synthetic oligonucleotide
  Antisense strand to SEQ ID NO: 686512
uuucccgauaaauuaauga

SEQ ID NO: 686514 - RNA, 19 nt, Artificial Sequence
  Description of Artificial Sequence: Synthetic oligonucleotide
  Sense strand starting at position 971 of SEQ ID NO: 586028
acuugaagaguuugcagaa

SEQ ID NO: 686515 - RNA, 19 nt, Artificial Sequence
  Description of Artificial Sequence: Synthetic oligonucleotide
  Antisense strand to SEQ ID NO: 686514
uucugcaaacucuucaagu

SEQ ID NO: 686516 - RNA, 19 nt, Artificial Sequence
  Description of Artificial Sequence: Synthetic oligonucleotide
  Sense strand starting at position 972 of SEQ ID NO: 586028
cuugaagaguuugcagaac

SEQ ID NO: 686517 - RNA, 19 nt, Artificial Sequence
  Description of Artificial Sequence: Synthetic oligonucleotide
  Antisense strand to SEQ ID NO: 686516
guucugcaaacucuucaag

SEQ ID NO: 686518 - RNA, 19 nt, Artificial Sequence
  Description of Artificial Sequence: Synthetic oligonucleotide
  Sense strand starting at position 1007 of SEQ ID NO: 586028
ucuuaaaguguuuguugga

SEQ ID NO: 686519 - RNA, 19 nt, Artificial Sequence
  Description of Artificial Sequence: Synthetic oligonucleotide
  Antisense strand to SEQ ID NO: 686518
uccaacaaacacuuuaaga

SEQ ID NO: 686520 - RNA, 19 nt, Artificial Sequence
  Description of Artificial Sequence: Synthetic oligonucleotide
  Sense strand starting at position 1008 of SEQ ID NO: 586028
cuuaaaguguuuguuggaa

SEQ ID NO: 686521 - RNA, 19 nt, Artificial Sequence
  Description of Artificial Sequence: Synthetic oligonucleotide
  Antisense strand to SEQ ID NO: 686520
uuccaacaaacacuuuaag

SEQ ID NO: 686522 - RNA, 19 nt, Artificial Sequence
  Description of Artificial Sequence: Synthetic oligonucleotide
  Sense strand starting at position 1045 of SEQ ID NO: 586028
ccuacucaggcuggagaaa

SEQ ID NO: 686523 - RNA, 19 nt, Artificial Sequence
  Description of Artificial Sequence: Synthetic oligonucleotide
  Antisense strand to SEQ ID NO: 686522
uuucuccagccugaguagg

SEQ ID NO: 686524 - RNA, 19 nt, Artificial Sequence
  Description of Artificial Sequence: Synthetic oligonucleotide
  Sense strand starting at position 1064 of SEQ ID NO: 586028
ggcaaaguauugucuauca

SEQ ID NO: 686525 - RNA, 19 nt, Artificial Sequence
  Description of Artificial Sequence: Synthetic oligonucleotide
  Antisense strand to SEQ ID NO: 686524
ugauagacaauacuuugcc

SEQ ID NO: 686526 - RNA, 19 nt, Artificial Sequence
  Description of Artificial Sequence: Synthetic oligonucleotide
  Sense strand starting at position 1110 of SEQ ID NO: 586028
uccggauaaugcucccaga

SEQ ID NO: 686527 - RNA, 19 nt, Artificial Sequence
  Description of Artificial Sequence: Synthetic oligonucleotide
  Antisense strand to SEQ ID NO: 686526
ucugggagcauuauccgga

SEQ ID NO: 686528 - RNA, 19 nt, Artificial Sequence
  Description of Artificial Sequence: Synthetic oligonucleotide
  Sense strand starting at position 1200 of SEQ ID NO: 586028
ugcccuggucgccagagaa

SEQ ID NO: 686529 - RNA, 19 nt, Artificial Sequence
  Description of Artificial Sequence: Synthetic oligonucleotide
  Antisense strand to SEQ ID NO: 686528
uucucuggcgaccagggca

SEQ ID NO: 686530 - RNA, 19 nt, Artificial Sequence
  Description of Artificial Sequence: Synthetic oligonucleotide
  Sense strand starting at position 1361 of SEQ ID NO: 586028
gucagcuuugccugcauuu

SEQ ID NO: 686531 - RNA, 19 nt, Artificial Sequence
  Description of Artificial Sequence: Synthetic oligonucleotide
  Antisense strand to SEQ ID NO: 686530
aaaugcaggcaaagcugac

SEQ ID NO: 686532 - RNA, 19 nt, Artificial Sequence
  Description of Artificial Sequence: Synthetic oligonucleotide
  Sense strand starting at position 1503 of SEQ ID NO: 586028
gcugcuucccgagagcaaa

SEQ ID NO: 686533 - RNA, 19 nt, Artificial Sequence
  Description of Artificial Sequence: Synthetic oligonucleotide
  Antisense strand to SEQ ID NO: 686532
uuugcucucgggaagcagc

SEQ ID NO: 686534 - RNA, 19 nt, Artificial Sequence
  Description of Artificial Sequence: Synthetic oligonucleotide
  Sense strand starting at position 1536 of SEQ ID NO: 586028
ggguuagcuaauugcacua

SEQ ID NO: 686535 - RNA, 19 nt, Artificial Sequence
  Description of Artificial Sequence: Synthetic oligonucleotide
  Antisense strand to SEQ ID NO: 686534
uagugcaauuagcuaaccc

SEQ ID NO: 686536 - RNA, 19 nt, Artificial Sequence
  Description of Artificial Sequence: Synthetic oligonucleotide
  Sense strand starting at position 1675 of SEQ ID NO: 586028
gcgcgcacuccuucccaaa

SEQ ID NO: 686537 - RNA, 19 nt, Artificial Sequence
  Description of Artificial Sequence: Synthetic oligonucleotide
  Antisense strand to SEQ ID NO: 686536
uuugggaaggagugcgcgc

SEQ ID NO: 686538 - RNA, 19 nt, Artificial Sequence
  Description of Artificial Sequence: Synthetic oligonucleotide
  Sense strand starting at position 2316 of SEQ ID NO: 586028
ggcucauacacgcagagaa

SEQ ID NO: 686539 - RNA, 19 nt, Artificial Sequence
  Description of Artificial Sequence: Synthetic oligonucleotide
  Antisense strand to SEQ ID NO: 686538
uucucugcguguaugagcc

SEQ ID NO: 686540 - RNA, 19 nt, Artificial Sequence
  Description of Artificial Sequence: Synthetic oligonucleotide
  Sense strand starting at position 2357 of SEQ ID NO: 586028
uaggaaagcccuugucuca

SEQ ID NO: 686541 - RNA, 19 nt, Artificial Sequence
  Description of Artificial Sequence: Synthetic oligonucleotide
  Antisense strand to SEQ ID NO: 686540
ugagacaagggcuuuccua

SEQ ID NO: 686542 - RNA, 19 nt, Artificial Sequence
  Description of Artificial Sequence: Synthetic oligonucleotide
  Sense strand starting at position 2415 of SEQ ID NO: 586028
gggcaaauucucugcuuuc

SEQ ID NO: 686543 - RNA, 19 nt, Artificial Sequence
  Description of Artificial Sequence: Synthetic oligonucleotide
  Antisense strand to SEQ ID NO: 686542
gaaagcagagaauuugccc

SEQ ID NO: 686544 - RNA, 19 nt, Artificial Sequence
  Description of Artificial Sequence: Synthetic oligonucleotide
  Sense strand starting at position 2432 of SEQ ID NO: 586028
ucgguuccugaugauguau

SEQ ID NO: 686545 - RNA, 19 nt, Artificial Sequence
  Description of Artificial Sequence: Synthetic oligonucleotide
  Antisense strand to SEQ ID NO: 686544
auacaucaucaggaaccga

SEQ ID NO: 686546 - RNA, 19 nt, Artificial Sequence
  Description of Artificial Sequence: Synthetic oligonucleotide
  Sense strand starting at position 2786 of SEQ ID NO: 586028
gcugcuuucgaggagucca

SEQ ID NO: 686547 - RNA, 19 nt, Artificial Sequence
  Description of Artificial Sequence: Synthetic oligonucleotide
  Antisense strand to SEQ ID NO: 686546
uggacuccucgaaagcagc

SEQ ID NO: 686548 - RNA, 19 nt, Artificial Sequence
  Description of Artificial Sequence: Synthetic oligonucleotide
  Sense strand starting at position 2897 of SEQ ID NO: 586028
acucguuggcgcuaagaag

SEQ ID NO: 686549 - RNA, 19 nt, Artificial Sequence
  Description of Artificial Sequence: Synthetic oligonucleotide
  Antisense strand to SEQ ID NO: 686548
cuucuuagcgccaacgagu

SEQ ID NO: 686550 - RNA, 19 nt, Artificial Sequence
  Description of Artificial Sequence: Synthetic oligonucleotide
  Sense strand starting at position 2996 of SEQ ID NO: 586028
uuuggagagcuggaaguau

SEQ ID NO: 686551 - RNA, 19 nt, Artificial Sequence
  Description of Artificial Sequence: Synthetic oligonucleotide
  Antisense strand to SEQ ID NO: 686550
auacuuccagcucuccaaa

SEQ ID NO: 686552 - RNA, 19 nt, Artificial Sequence
  Description of Artificial Sequence: Synthetic oligonucleotide
  Sense strand starting at position 3149 of SEQ ID NO: 586028
gguguaacaguggagucuu

SEQ ID NO: 686553 - RNA, 19 nt, Artificial Sequence
  Description of Artificial Sequence: Synthetic oligonucleotide
  Antisense strand to SEQ ID NO: 686552
aagacuccacuguuacacc

SEQ ID NO: 686554 - RNA, 19 nt, Artificial Sequence
  Description of Artificial Sequence: Synthetic oligonucleotide
  Sense strand starting at position 3170 of SEQ ID NO: 586028
guucuauaaguuuaggaau

SEQ ID NO: 686555 - RNA, 19 nt, Artificial Sequence
  Description of Artificial Sequence: Synthetic oligonucleotide
  Antisense strand to SEQ ID NO: 686554
auuccuaaacuuauagaac

SEQ ID NO: 686556 - RNA, 19 nt, Artificial Sequence
  Description of Artificial Sequence: Synthetic oligonucleotide
  Sense strand starting at position 3181 of SEQ ID NO: 586028
uuaggaaugcauugagaca

SEQ ID NO: 686557 - RNA, 19 nt, Artificial Sequence
  Description of Artificial Sequence: Synthetic oligonucleotide
  Antisense strand to SEQ ID NO: 686556
ugucucaaugcauuccuaa

SEQ ID NO: 686558 - RNA, 19 nt, Artificial Sequence
  Description of Artificial Sequence: Synthetic oligonucleotide
  Sense strand starting at position 3292 of SEQ ID NO: 586028
gcauuaagagucuagacuc

SEQ ID NO: 686559 - RNA, 19 nt, Artificial Sequence
  Description of Artificial Sequence: Synthetic oligonucleotide
  Antisense strand to SEQ ID NO: 686558
gagucuagacucuuaaugc

SEQ ID NO: 686560 - RNA, 19 nt, Artificial Sequence
  Description of Artificial Sequence: Synthetic oligonucleotide
  Sense strand starting at position 3381 of SEQ ID NO: 586028
agucucaggcuauaagacu

SEQ ID NO: 686561 - RNA, 19 nt, Artificial Sequence
  Description of Artificial Sequence: Synthetic oligonucleotide
  Antisense strand to SEQ ID NO: 686560
agucuuauagccugagacu

SEQ ID NO: 686562 - RNA, 19 nt, Artificial Sequence
  Description of Artificial Sequence: Synthetic oligonucleotide
  Sense strand starting at position 3387 of SEQ ID NO: 586028
aggcuauaagacugugaau

SEQ ID NO: 686563 - RNA, 19 nt, Artificial Sequence
  Description of Artificial Sequence: Synthetic oligonucleotide
  Antisense strand to SEQ ID NO: 686562
auucacagucuuauagccu

SEQ ID NO: 686564 - RNA, 19 nt, Artificial Sequence
  Description of Artificial Sequence: Synthetic oligonucleotide
  Sense strand starting at position 3389 of SEQ ID NO: 586028
gcuauaagacugugaauaa

SEQ ID NO: 686565 - RNA, 19 nt, Artificial Sequence
  Description of Artificial Sequence: Synthetic oligonucleotide
  Antisense strand to SEQ ID NO: 686564
uuauucacagucuuauagc

SEQ ID NO: 686566 - RNA, 19 nt, Artificial Sequence
  Description of Artificial Sequence: Synthetic oligonucleotide
  Sense strand starting at position 3390 of SEQ ID NO: 586028
cuauaagacugugaauaaa

SEQ ID NO: 686567 - RNA, 19 nt, Artificial Sequence
  Description of Artificial Sequence: Synthetic oligonucleotide
  Antisense strand to SEQ ID NO: 686566
uuuauucacagucuuauag

SEQ ID NO: 686568 - RNA, 19 nt, Artificial Sequence
  Description of Artificial Sequence: Synthetic oligonucleotide
  Sense strand starting at position 3540 of SEQ ID NO: 586028
gagccaucuugagcgauuc

SEQ ID NO: 686569 - RNA, 19 nt, Artificial Sequence
  Description of Artificial Sequence: Synthetic oligonucleotide
  Antisense strand to SEQ ID NO: 686568
gaaucgcucaagauggcuc

SEQ ID NO: 686570 - RNA, 19 nt, Artificial Sequence
  Description of Artificial Sequence: Synthetic oligonucleotide
  Sense strand starting at position 3542 of SEQ ID NO: 586028
gccaucuugagcgauucga

SEQ ID NO: 686571 - RNA, 19 nt, Artificial Sequence
  Description of Artificial Sequence: Synthetic oligonucleotide
  Antisense strand to SEQ ID NO: 686570
ucgaaucgcucaagauggc

SEQ ID NO: 686572 - RNA, 19 nt, Artificial Sequence
  Description of Artificial Sequence: Synthetic oligonucleotide
  Sense strand starting at position 3546 of SEQ ID NO: 586028
ucuugagcgauucgacaau

SEQ ID NO: 686573 - RNA, 19 nt, Artificial Sequence
  Description of Artificial Sequence: Synthetic oligonucleotide
  Antisense strand to SEQ ID NO: 686572
auugucgaaucgcucaaga

SEQ ID NO: 686574 - RNA, 19 nt, Artificial Sequence
  Description of Artificial Sequence: Synthetic oligonucleotide
  Sense strand starting at position 3676 of SEQ ID NO: 586028
cugccuguuggaugaaauc

SEQ ID NO: 686575 - RNA, 19 nt, Artificial Sequence
  Description of Artificial Sequence: Synthetic oligonucleotide
  Antisense strand to SEQ ID NO: 686574
gauuucauccaacaggcag

SEQ ID NO: 686576 - RNA, 19 nt, Artificial Sequence
  Description of Artificial Sequence: Synthetic oligonucleotide
  Sense strand starting at position 3705 of SEQ ID NO: 586028
uggagcuucugauuaucca

SEQ ID NO: 686577 - RNA, 19 nt, Artificial Sequence
  Description of Artificial Sequence: Synthetic oligonucleotide
  Antisense strand to SEQ ID NO: 686576
uggauaaucagaagcucca

SEQ ID NO: 686578 - RNA, 19 nt, Artificial Sequence
  Description of Artificial Sequence: Synthetic oligonucleotide
  Sense strand starting at position 3712 of SEQ ID NO: 586028
ucugauuauccaggcgcaa

SEQ ID NO: 686579 - RNA, 19 nt, Artificial Sequence
  Description of Artificial Sequence: Synthetic oligonucleotide
  Antisense strand to SEQ ID NO: 686578
uugcgccuggauaaucaga

SEQ ID NO: 686580 - RNA, 19 nt, Artificial Sequence
  Description of Artificial Sequence: Synthetic oligonucleotide
  Sense strand starting at position 3780 of SEQ ID NO: 586028
ggcguuucugaagauaggu

SEQ ID NO: 686581 - RNA, 19 nt, Artificial Sequence
  Description of Artificial Sequence: Synthetic oligonucleotide
  Antisense strand to SEQ ID NO: 686580
accuaucuucagaaacgcc

SEQ ID NO: 686582 - RNA, 19 nt, Artificial Sequence
  Description of Artificial Sequence: Synthetic oligonucleotide
  Sense strand starting at position 33 of SEQ ID NO: 586029
ugacucugccuagauagau

SEQ ID NO: 686583 - RNA, 19 nt, Artificial Sequence
  Description of Artificial Sequence: Synthetic oligonucleotide
  Antisense strand to SEQ ID NO: 686582
aucuaucuaggcagaguca

SEQ ID NO: 686584 - RNA, 19 nt, Artificial Sequence
  Description of Artificial Sequence: Synthetic oligonucleotide
  Sense strand starting at position 133 of SEQ ID NO: 586029
acucaaaugugguuggcaa

SEQ ID NO: 686585 - RNA, 19 nt, Artificial Sequence
  Description of Artificial Sequence: Synthetic oligonucleotide
  Antisense strand to SEQ ID NO: 686584
uugccaaccacauuugagu

SEQ ID NO: 686586 - RNA, 19 nt, Artificial Sequence
  Description of Artificial Sequence: Synthetic oligonucleotide
  Sense strand starting at position 266 of SEQ ID NO: 586029
cauguuugggaaugugauc

SEQ ID NO: 686587 - RNA, 19 nt, Artificial Sequence
  Description of Artificial Sequence: Synthetic oligonucleotide
  Antisense strand to SEQ ID NO: 686586
gaucacauucccaaacaug

SEQ ID NO: 686588 - RNA, 19 nt, Artificial Sequence
  Description of Artificial Sequence: Synthetic oligonucleotide
  Sense strand starting at position 332 of SEQ ID NO: 586029
aagugaauuccaggacuca

SEQ ID NO: 686589 - RNA, 19 nt, Artificial Sequence
  Description of Artificial Sequence: Synthetic oligonucleotide
  Antisense strand to SEQ ID NO: 686588
ugaguccuggaauucacuu

SEQ ID NO: 686590 - RNA, 19 nt, Artificial Sequence
  Description of Artificial Sequence: Synthetic oligonucleotide
  Sense strand starting at position 451 of SEQ ID NO: 586029
auaggaaauucccauuuag

SEQ ID NO: 686591 - RNA, 19 nt, Artificial Sequence
  Description of Artificial Sequence: Synthetic oligonucleotide
  Antisense strand to SEQ ID NO: 686590
cuaaaugggaauuuccuau

SEQ ID NO: 686592 - RNA, 19 nt, Artificial Sequence
  Description of Artificial Sequence: Synthetic oligonucleotide
  Sense strand starting at position 462 of SEQ ID NO: 586029
ccauuuagaugaggaagga

SEQ ID NO: 686593 - RNA, 19 nt, Artificial Sequence
  Description of Artificial Sequence: Synthetic oligonucleotide
  Antisense strand to SEQ ID NO: 686592
uccuuccucaucuaaaugg

SEQ ID NO: 686594 - RNA, 19 nt, Artificial Sequence
  Description of Artificial Sequence: Synthetic oligonucleotide
  Sense strand starting at position 667 of SEQ ID NO: 586029
agaugucaccagcaaggua

SEQ ID NO: 686595 - RNA, 19 nt, Artificial Sequence
  Description of Artificial Sequence: Synthetic oligonucleotide
  Antisense strand to SEQ ID NO: 686594
uaccuugcuggugacaucu

SEQ ID NO: 686596 - RNA, 19 nt, Artificial Sequence
  Description of Artificial Sequence: Synthetic oligonucleotide
  Sense strand starting at position 675 of SEQ ID NO: 586029
ccagcaagguaauucugau

SEQ ID NO: 686597 - RNA, 19 nt, Artificial Sequence
  Description of Artificial Sequence: Synthetic oligonucleotide
  Antisense strand to SEQ ID NO: 686596
aucagaauuaccuugcugg

SEQ ID NO: 686598 - RNA, 19 nt, Artificial Sequence
  Description of Artificial Sequence: Synthetic oligonucleotide
  Sense strand starting at position 681 of SEQ ID NO: 586029
agguaauucugauugucua

SEQ ID NO: 686599 - RNA, 19 nt, Artificial Sequence
  Description of Artificial Sequence: Synthetic oligonucleotide
  Antisense strand to SEQ ID NO: 686598
uagacaaucagaauuaccu

SEQ ID NO: 686600 - RNA, 19 nt, Artificial Sequence
  Description of Artificial Sequence: Synthetic oligonucleotide
  Sense strand starting at position 682 of SEQ ID NO: 586029
gguaauucugauugucuag

SEQ ID NO: 686601 - RNA, 19 nt, Artificial Sequence
  Description of Artificial Sequence: Synthetic oligonucleotide
  Antisense strand to SEQ ID NO: 686600
cuagacaaucagaauuacc

SEQ ID NO: 686602 - RNA, 19 nt, Artificial Sequence
  Description of Artificial Sequence: Synthetic oligonucleotide
  Sense strand starting at position 804 of SEQ ID NO: 586029
agugacaggugcuugaaua

SEQ ID NO: 686603 - RNA, 19 nt, Artificial Sequence
  Description of Artificial Sequence: Synthetic oligonucleotide
  Antisense strand to SEQ ID NO: 686602
uauucaagcaccugucacu

SEQ ID NO: 686604 - RNA, 19 nt, Artificial Sequence
  Description of Artificial Sequence: Synthetic oligonucleotide
  Sense strand starting at position 805 of SEQ ID NO: 586029
gugacaggugcuugaauaa

SEQ ID NO: 686605 - RNA, 19 nt, Artificial Sequence
  Description of Artificial Sequence: Synthetic oligonucleotide
  Antisense strand to SEQ ID NO: 686604
uuauucaagcaccugucac

SEQ ID NO: 686606 - RNA, 19 nt, Artificial Sequence
  Description of Artificial Sequence: Synthetic oligonucleotide
  Sense strand starting at position 871 of SEQ ID NO: 586029
guaucuauugaaugccaua

SEQ ID NO: 686607 - RNA, 19 nt, Artificial Sequence
  Description of Artificial Sequence: Synthetic oligonucleotide
  Antisense strand to SEQ ID NO: 686606
uauggcauucaauagauac

SEQ ID NO: 686608 - RNA, 19 nt, Artificial Sequence
  Description of Artificial Sequence: Synthetic oligonucleotide
  Sense strand starting at position 891 of SEQ ID NO: 586029
uucuauagugcuggaaaua

SEQ ID NO: 686609 - RNA, 19 nt, Artificial Sequence
  Description of Artificial Sequence: Synthetic oligonucleotide
  Antisense strand to SEQ ID NO: 686608
uauuuccagcacuauagaa

SEQ ID NO: 686610 - RNA, 19 nt, Artificial Sequence
  Description of Artificial Sequence: Synthetic oligonucleotide
  Sense strand starting at position 892 of SEQ ID NO: 586029
ucuauagugcuggaaauaa

SEQ ID NO: 686611 - RNA, 19 nt, Artificial Sequence
  Description of Artificial Sequence: Synthetic oligonucleotide
  Antisense strand to SEQ ID NO: 686610
uuauuuccagcacuauaga

SEQ ID NO: 686612 - RNA, 19 nt, Artificial Sequence
  Description of Artificial Sequence: Synthetic oligonucleotide
  Sense strand starting at position 1205 of SEQ ID NO: 586029
cuucuuaacucaguaguga

SEQ ID NO: 686613 - RNA, 19 nt, Artificial Sequence
  Description of Artificial Sequence: Synthetic oligonucleotide
  Antisense strand to SEQ ID NO: 686612
ucacuacugaguuaagaag

SEQ ID NO: 686614 - RNA, 19 nt, Artificial Sequence
  Description of Artificial Sequence: Synthetic oligonucleotide
  Sense strand starting at position 1206 of SEQ ID NO: 586029
uucuuaacucaguagugaa

SEQ ID NO: 686615 - RNA, 19 nt, Artificial Sequence
  Description of Artificial Sequence: Synthetic oligonucleotide
  Antisense strand to SEQ ID NO: 686614
uucacuacugaguuaagaa

SEQ ID NO: 686616 - RNA, 19 nt, Artificial Sequence
  Description of Artificial Sequence: Synthetic oligonucleotide
  Sense strand starting at position 1213 of SEQ ID NO: 586029
cucaguagugaauauuaau

SEQ ID NO: 686617 - RNA, 19 nt, Artificial Sequence
  Description of Artificial Sequence: Synthetic oligonucleotide
  Antisense strand to SEQ ID NO: 686616
auuaauauucacuacugag

SEQ ID NO: 686618 - RNA, 19 nt, Artificial Sequence
  Description of Artificial Sequence: Synthetic oligonucleotide
  Sense strand starting at position 1559 of SEQ ID NO: 586029
aguaaacuuuacuugaaug

SEQ ID NO: 686619 - RNA, 19 nt, Artificial Sequence
  Description of Artificial Sequence: Synthetic oligonucleotide
  Antisense strand to SEQ ID NO: 686618
cauucaaguaaaguuuacu

SEQ ID NO: 686620 - RNA, 19 nt, Artificial Sequence
  Description of Artificial Sequence: Synthetic oligonucleotide
  Sense strand starting at position 2055 of SEQ ID NO: 586029
aucacaaagugcucugaaa

SEQ ID NO: 686621 - RNA, 19 nt, Artificial Sequence
  Description of Artificial Sequence: Synthetic oligonucleotide
  Antisense strand to SEQ ID NO: 686620
uuucagagcacuuugugau

SEQ ID NO: 686622 - RNA, 19 nt, Artificial Sequence
  Description of Artificial Sequence: Synthetic oligonucleotide
  Sense strand starting at position 2057 of SEQ ID NO: 586029
cacaaagugcucugaaaga

SEQ ID NO: 686623 - RNA, 19 nt, Artificial Sequence
  Description of Artificial Sequence: Synthetic oligonucleotide
  Antisense strand to SEQ ID NO: 686622
ucuuucagagcacuuugug

SEQ ID NO: 686624 - RNA, 19 nt, Artificial Sequence
  Description of Artificial Sequence: Synthetic oligonucleotide
  Sense strand starting at position 2067 of SEQ ID NO: 586029
ucugaaagacgucacagua

SEQ ID NO: 686625 - RNA, 19 nt, Artificial Sequence
  Description of Artificial Sequence: Synthetic oligonucleotide
  Antisense strand to SEQ ID NO: 686624
uacugugacgucuuucaga

SEQ ID NO: 686626 - RNA, 19 nt, Artificial Sequence
  Description of Artificial Sequence: Synthetic oligonucleotide
  Sense strand starting at position 2099 of SEQ ID NO: 586029
augaauagggcuugaaguu

SEQ ID NO: 686627 - RNA, 19 nt, Artificial Sequence
  Description of Artificial Sequence: Synthetic oligonucleotide
  Antisense strand to SEQ ID NO: 686626
aacuucaagcccuauucau

SEQ ID NO: 686628 - RNA, 19 nt, Artificial Sequence
  Description of Artificial Sequence: Synthetic oligonucleotide
  Sense strand starting at position 2219 of SEQ ID NO: 586029
gcaagcucaaugugaaaug

SEQ ID NO: 686629 - RNA, 19 nt, Artificial Sequence
  Description of Artificial Sequence: Synthetic oligonucleotide
  Antisense strand to SEQ ID NO: 686628
cauuucacauugagcuugc

SEQ ID NO: 686630 - RNA, 19 nt, Artificial Sequence
  Description of Artificial Sequence: Synthetic oligonucleotide
  Sense strand starting at position 2524 of SEQ ID NO: 586029
uacauuucgucuuuguuga

SEQ ID NO: 686631 - RNA, 19 nt, Artificial Sequence
  Description of Artificial Sequence: Synthetic oligonucleotide
  Antisense strand to SEQ ID NO: 686630
ucaacaaagacgaaaugua

SEQ ID NO: 686632 - RNA, 19 nt, Artificial Sequence
  Description of Artificial Sequence: Synthetic oligonucleotide
  Sense strand starting at position 2525 of SEQ ID NO: 586029
acauuucgucuuuguugaa

SEQ ID NO: 686633 - RNA, 19 nt, Artificial Sequence
  Description of Artificial Sequence: Synthetic oligonucleotide
  Antisense strand to SEQ ID NO: 686632
uucaacaaagacgaaaugu

SEQ ID NO: 686634 - RNA, 19 nt, Artificial Sequence
  Description of Artificial Sequence: Synthetic oligonucleotide
  Sense strand starting at position 2526 of SEQ ID NO: 586029
cauuucgucuuuguugaaa

SEQ ID NO: 686635 - RNA, 19 nt, Artificial Sequence
  Description of Artificial Sequence: Synthetic oligonucleotide
  Antisense strand to SEQ ID NO: 686634
uuucaacaaagacgaaaug

SEQ ID NO: 686636 - RNA, 19 nt, Artificial Sequence
  Description of Artificial Sequence: Synthetic oligonucleotide
  Sense strand starting at position 2668 of SEQ ID NO: 586029
uuacauacacugugucaaa

SEQ ID NO: 686637 - RNA, 19 nt, Artificial Sequence
  Description of Artificial Sequence: Synthetic oligonucleotide
  Antisense strand to SEQ ID NO: 686636
uuugacacaguguauguaa

SEQ ID NO: 686638 - RNA, 19 nt, Artificial Sequence
  Description of Artificial Sequence: Synthetic oligonucleotide
  Sense strand starting at position 3056 of SEQ ID NO: 586029
gcuuucugccauguguauu

SEQ ID NO: 686639 - RNA, 19 nt, Artificial Sequence
  Description of Artificial Sequence: Synthetic oligonucleotide
  Antisense strand to SEQ ID NO: 686638
aauacacauggcagaaagc

SEQ ID NO: 686640 - RNA, 19 nt, Artificial Sequence
  Description of Artificial Sequence: Synthetic oligonucleotide
  Sense strand starting at position 3134 of SEQ ID NO: 586029
cuacuuuaagauuguagua

SEQ ID NO: 686641 - RNA, 19 nt, Artificial Sequence
  Description of Artificial Sequence: Synthetic oligonucleotide
  Antisense strand to SEQ ID NO: 686640
uacuacaaucuuaaaguag

SEQ ID NO: 686642 - RNA, 19 nt, Artificial Sequence
  Description of Artificial Sequence: Synthetic oligonucleotide
  Sense strand starting at position 3170 of SEQ ID NO: 586029
aagucagacugauccagua

SEQ ID NO: 686643 - RNA, 19 nt, Artificial Sequence
  Description of Artificial Sequence: Synthetic oligonucleotide
  Antisense strand to SEQ ID NO: 686642
uacuggaucagucugacuu

SEQ ID NO: 686644 - RNA, 19 nt, Artificial Sequence
  Description of Artificial Sequence: Synthetic oligonucleotide
  Sense strand starting at position 3284 of SEQ ID NO: 586029
aguugacagcucugacuua

SEQ ID NO: 686645 - RNA, 19 nt, Artificial Sequence
  Description of Artificial Sequence: Synthetic oligonucleotide
  Antisense strand to SEQ ID NO: 686644
uaagucagagcugucaacu

SEQ ID NO: 686646 - RNA, 19 nt, Artificial Sequence
  Description of Artificial Sequence: Synthetic oligonucleotide
  Sense strand starting at position 3318 of SEQ ID NO: 586029
ggcuuaauuccaggaaauc

SEQ ID NO: 686647 - RNA, 19 nt, Artificial Sequence
  Description of Artificial Sequence: Synthetic oligonucleotide
  Antisense strand to SEQ ID NO: 686646
gauuuccuggaauuaagcc

SEQ ID NO: 686648 - RNA, 19 nt, Artificial Sequence
  Description of Artificial Sequence: Synthetic oligonucleotide
  Sense strand starting at position 3319 of SEQ ID NO: 586029
gcuuaauuccaggaaaucu

SEQ ID NO: 686649 - RNA, 19 nt, Artificial Sequence
  Description of Artificial Sequence: Synthetic oligonucleotide
  Antisense strand to SEQ ID NO: 686648
agauuuccuggaauuaagc

SEQ ID NO: 686650 - RNA, 19 nt, Artificial Sequence
  Description of Artificial Sequence: Synthetic oligonucleotide
  Sense strand starting at position 3366 of SEQ ID NO: 586029
uugaaacaguucucauaug

SEQ ID NO: 686651 - RNA, 19 nt, Artificial Sequence
  Description of Artificial Sequence: Synthetic oligonucleotide
  Antisense strand to SEQ ID NO: 686650
cauaugagaacuguuucaa

SEQ ID NO: 686652 - RNA, 19 nt, Artificial Sequence
  Description of Artificial Sequence: Synthetic oligonucleotide
  Sense strand starting at position 3461 of SEQ ID NO: 586029
aacuuaauugagggucaca

SEQ ID NO: 686653 - RNA, 19 nt, Artificial Sequence
  Description of Artificial Sequence: Synthetic oligonucleotide
  Antisense strand to SEQ ID NO: 686652
ugugacccucaauuaaguu

SEQ ID NO: 686654 - RNA, 19 nt, Artificial Sequence
  Description of Artificial Sequence: Synthetic oligonucleotide
  Sense strand starting at position 3525 of SEQ ID NO: 586029
agauguaaagcugaucauu

SEQ ID NO: 686655 - RNA, 19 nt, Artificial Sequence
  Description of Artificial Sequence: Synthetic oligonucleotide
  Antisense strand to SEQ ID NO: 686654
aaugaucagcuuuacaucu

SEQ ID NO: 686656 - RNA, 19 nt, Artificial Sequence
  Description of Artificial Sequence: Synthetic oligonucleotide
  Sense strand starting at position 3527 of SEQ ID NO: 586029
auguaaagcugaucauuau

SEQ ID NO: 686657 - RNA, 19 nt, Artificial Sequence
  Description of Artificial Sequence: Synthetic oligonucleotide
  Antisense strand to SEQ ID NO: 686656
auaaugaucagcuuuacau

SEQ ID NO: 686658 - RNA, 19 nt, Artificial Sequence
  Description of Artificial Sequence: Synthetic oligonucleotide
  Sense strand starting at position 3528 of SEQ ID NO: 586029
uguaaagcugaucauuauu

SEQ ID NO: 686659 - RNA, 19 nt, Artificial Sequence
  Description of Artificial Sequence: Synthetic oligonucleotide
  Antisense strand to SEQ ID NO: 686658
aauaaugaucagcuuuaca

SEQ ID NO: 686660 - RNA, 19 nt, Artificial Sequence
  Description of Artificial Sequence: Synthetic oligonucleotide
  Sense strand starting at position 3932 of SEQ ID NO: 586029
ugaauucucgguuaccaua

SEQ ID NO: 686661 - RNA, 19 nt, Artificial Sequence
  Description of Artificial Sequence: Synthetic oligonucleotide
  Antisense strand to SEQ ID NO: 686660
uaugguaaccgagaauuca

SEQ ID NO: 686662 - RNA, 19 nt, Artificial Sequence
  Description of Artificial Sequence: Synthetic oligonucleotide
  Sense strand starting at position 444 of SEQ ID NO: 586030
agucguuaacuauaaaccu

SEQ ID NO: 686663 - RNA, 19 nt, Artificial Sequence
  Description of Artificial Sequence: Synthetic oligonucleotide
  Antisense strand to SEQ ID NO: 686662
agguuuauaguuaacgacu

SEQ ID NO: 686664 - RNA, 19 nt, Artificial Sequence
  Description of Artificial Sequence: Synthetic oligonucleotide
  Sense strand starting at position 461 of SEQ ID NO: 586030
cuagcuuauccuggaacca

SEQ ID NO: 686665 - RNA, 19 nt, Artificial Sequence
  Description of Artificial Sequence: Synthetic oligonucleotide
  Antisense strand to SEQ ID NO: 686664
ugguuccaggauaagcuag

SEQ ID NO: 686666 - RNA, 19 nt, Artificial Sequence
  Description of Artificial Sequence: Synthetic oligonucleotide
  Sense strand starting at position 490 of SEQ ID NO: 586030
ugaacuuucgcugaugacu

SEQ ID NO: 686667 - RNA, 19 nt, Artificial Sequence
  Description of Artificial Sequence: Synthetic oligonucleotide
  Antisense strand to SEQ ID NO: 686666
agucaucagcgaaaguuca

SEQ ID NO: 686668 - RNA, 19 nt, Artificial Sequence
  Description of Artificial Sequence: Synthetic oligonucleotide
  Sense strand starting at position 513 of SEQ ID NO: 586030
cugugucaagacugauuaa

SEQ ID NO: 686669 - RNA, 19 nt, Artificial Sequence
  Description of Artificial Sequence: Synthetic oligonucleotide
  Antisense strand to SEQ ID NO: 686668
uuaaucagucuugacacag

SEQ ID NO: 686670 - RNA, 19 nt, Artificial Sequence
  Description of Artificial Sequence: Synthetic oligonucleotide
  Sense strand starting at position 648 of SEQ ID NO: 586030
caaguacugccugagcuaa

SEQ ID NO: 686671 - RNA, 19 nt, Artificial Sequence
  Description of Artificial Sequence: Synthetic oligonucleotide
  Antisense strand to SEQ ID NO: 686670
uuagcucaggcaguacuug

SEQ ID NO: 686672 - RNA, 19 nt, Artificial Sequence
  Description of Artificial Sequence: Synthetic oligonucleotide
  Sense strand starting at position 975 of SEQ ID NO: 586030
gagacuguagugggagaau

SEQ ID NO: 686673 - RNA, 19 nt, Artificial Sequence
  Description of Artificial Sequence: Synthetic oligonucleotide
  Antisense strand to SEQ ID NO: 686672
auucucccacuacagucuc

SEQ ID NO: 686674 - RNA, 19 nt, Artificial Sequence
  Description of Artificial Sequence: Synthetic oligonucleotide
  Sense strand starting at position 1027 of SEQ ID NO: 586030
acgugaucacaccacuaua

SEQ ID NO: 686675 - RNA, 19 nt, Artificial Sequence
  Description of Artificial Sequence: Synthetic oligonucleotide
  Antisense strand to SEQ ID NO: 686674
uauaguggugugaucacgu

SEQ ID NO: 686676 - RNA, 19 nt, Artificial Sequence
  Description of Artificial Sequence: Synthetic oligonucleotide
  Sense strand starting at position 1065 of SEQ ID NO: 586030
gugagaccuuaacucaaca

SEQ ID NO: 686677 - RNA, 19 nt, Artificial Sequence
  Description of Artificial Sequence: Synthetic oligonucleotide
  Antisense strand to SEQ ID NO: 686676
uguugaguuaaggucucac

SEQ ID NO: 686678 - RNA, 19 nt, Artificial Sequence
  Description of Artificial Sequence: Synthetic oligonucleotide
  Sense strand starting at position 1169 of SEQ ID NO: 586030
cuaaucgaucaauagcuuu

SEQ ID NO: 686679 - RNA, 19 nt, Artificial Sequence
  Description of Artificial Sequence: Synthetic oligonucleotide
  Antisense strand to SEQ ID NO: 686678
aaagcuauugaucgauuag

SEQ ID NO: 686680 - RNA, 19 nt, Artificial Sequence
  Description of Artificial Sequence: Synthetic oligonucleotide
  Sense strand starting at position 1292 of SEQ ID NO: 586030
uuguaauuagaaugaagug

SEQ ID NO: 686681 - RNA, 19 nt, Artificial Sequence
  Description of Artificial Sequence: Synthetic oligonucleotide
  Antisense strand to SEQ ID NO: 686680
cacuucauucuaauuacaa

SEQ ID NO: 686682 - RNA, 19 nt, Artificial Sequence
  Description of Artificial Sequence: Synthetic oligonucleotide
  Sense strand starting at position 1293 of SEQ ID NO: 586030
uguaauuagaaugaagugu

SEQ ID NO: 686683 - RNA, 19 nt, Artificial Sequence
  Description of Artificial Sequence: Synthetic oligonucleotide
  Antisense strand to SEQ ID NO: 686682
acacuucauucuaauuaca

SEQ ID NO: 686684 - RNA, 19 nt, Artificial Sequence
  Description of Artificial Sequence: Synthetic oligonucleotide
  Sense strand starting at position 1299 of SEQ ID NO: 586030
uagaaugaagugugaagua

SEQ ID NO: 686685 - RNA, 19 nt, Artificial Sequence
  Description of Artificial Sequence: Synthetic oligonucleotide
  Antisense strand to SEQ ID NO: 686684
uacuucacacuucauucua

SEQ ID NO: 686686 - RNA, 19 nt, Artificial Sequence
  Description of Artificial Sequence: Synthetic oligonucleotide
  Sense strand starting at position 1308 of SEQ ID NO: 586030
gugugaaguauauaaugca

SEQ ID NO: 686687 - RNA, 19 nt, Artificial Sequence
  Description of Artificial Sequence: Synthetic oligonucleotide
  Antisense strand to SEQ ID NO: 686686
ugcauuauauacuucacac

SEQ ID NO: 686688 - RNA, 19 nt, Artificial Sequence
  Description of Artificial Sequence: Synthetic oligonucleotide
  Sense strand starting at position 1392 of SEQ ID NO: 586030
gccuuaauagcacaugagu

SEQ ID NO: 686689 - RNA, 19 nt, Artificial Sequence
  Description of Artificial Sequence: Synthetic oligonucleotide
  Antisense strand to SEQ ID NO: 686688
acucaugugcuauuaaggc

SEQ ID NO: 686690 - RNA, 19 nt, Artificial Sequence
  Description of Artificial Sequence: Synthetic oligonucleotide
  Sense strand starting at position 1418 of SEQ ID NO: 586030
ggccacuaauacucugaaa

SEQ ID NO: 686691 - RNA, 19 nt, Artificial Sequence
  Description of Artificial Sequence: Synthetic oligonucleotide
  Antisense strand to SEQ ID NO: 686690
uuucagaguauuaguggcc

SEQ ID NO: 686692 - RNA, 19 nt, Artificial Sequence
  Description of Artificial Sequence: Synthetic oligonucleotide
  Sense strand starting at position 1514 of SEQ ID NO: 586030
uggccaguuccucaaaggu

SEQ ID NO: 686693 - RNA, 19 nt, Artificial Sequence
  Description of Artificial Sequence: Synthetic oligonucleotide
  Antisense strand to SEQ ID NO: 686692
accuuugaggaacuggcca

SEQ ID NO: 686694 - RNA, 19 nt, Artificial Sequence
  Description of Artificial Sequence: Synthetic oligonucleotide
  Sense strand starting at position 1541 of SEQ ID NO: 586030
ucuugauaaugagcaaauu

SEQ ID NO: 686695 - RNA, 19 nt, Artificial Sequence
  Description of Artificial Sequence: Synthetic oligonucleotide
  Antisense strand to SEQ ID NO: 686694
aauuugcucauuaucaaga

SEQ ID NO: 686696 - RNA, 19 nt, Artificial Sequence
  Description of Artificial Sequence: Synthetic oligonucleotide
  Sense strand starting at position 1621 of SEQ ID NO: 586030
guagaauucuaacuguaaa

SEQ ID NO: 686697 - RNA, 19 nt, Artificial Sequence
  Description of Artificial Sequence: Synthetic oligonucleotide
  Antisense strand to SEQ ID NO: 686696
uuuacaguuagaauucuac

SEQ ID NO: 686698 - RNA, 19 nt, Artificial Sequence
  Description of Artificial Sequence: Synthetic oligonucleotide
  Sense strand starting at position 1638 of SEQ ID NO: 586030
aaauaaagguucuuggcua

SEQ ID NO: 686699 - RNA, 19 nt, Artificial Sequence
  Description of Artificial Sequence: Synthetic oligonucleotide
  Antisense strand to SEQ ID NO: 686698
uagccaagaaccuuuauuu

SEQ ID NO: 686700 - RNA, 19 nt, Artificial Sequence
  Description of Artificial Sequence: Synthetic oligonucleotide
  Sense strand starting at position 1759 of SEQ ID NO: 586030
uagagaugguaccugaucu

SEQ ID NO: 686701 - RNA, 19 nt, Artificial Sequence
  Description of Artificial Sequence: Synthetic oligonucleotide
  Antisense strand to SEQ ID NO: 686700
agaucagguaccaucucua

SEQ ID NO: 686702 - RNA, 19 nt, Artificial Sequence
  Description of Artificial Sequence: Synthetic oligonucleotide
  Sense strand starting at position 1781 of SEQ ID NO: 586030
gcugaugugaucgcuccuu

SEQ ID NO: 686703 - RNA, 19 nt, Artificial Sequence
  Description of Artificial Sequence: Synthetic oligonucleotide
  Antisense strand to SEQ ID NO: 686702
aaggagcgaucacaucagc

SEQ ID NO: 686704 - RNA, 19 nt, Artificial Sequence
  Description of Artificial Sequence: Synthetic oligonucleotide
  Sense strand starting at position 1962 of SEQ ID NO: 586030
cuggcaacugaguagucau

SEQ ID NO: 686705 - RNA, 19 nt, Artificial Sequence
  Description of Artificial Sequence: Synthetic oligonucleotide
  Antisense strand to SEQ ID NO: 686704
augacuacucaguugccag

SEQ ID NO: 686706 - RNA, 19 nt, Artificial Sequence
  Description of Artificial Sequence: Synthetic oligonucleotide
  Sense strand starting at position 2008 of SEQ ID NO: 586030
agagcauguccugguauuu

SEQ ID NO: 686707 - RNA, 19 nt, Artificial Sequence
  Description of Artificial Sequence: Synthetic oligonucleotide
  Antisense strand to SEQ ID NO: 686706
aaauaccaggacaugcucu

SEQ ID NO: 686708 - RNA, 19 nt, Artificial Sequence
  Description of Artificial Sequence: Synthetic oligonucleotide
  Sense strand starting at position 2038 of SEQ ID NO: 586030
acacgugguguccagaacu

SEQ ID NO: 686709 - RNA, 19 nt, Artificial Sequence
  Description of Artificial Sequence: Synthetic oligonucleotide
  Antisense strand to SEQ ID NO: 686708
aguucuggacaccacgugu

SEQ ID NO: 686710 - RNA, 19 nt, Artificial Sequence
  Description of Artificial Sequence: Synthetic oligonucleotide
  Sense strand starting at position 2208 of SEQ ID NO: 586030
caauaaacuggguggugua

SEQ ID NO: 686711 - RNA, 19 nt, Artificial Sequence
  Description of Artificial Sequence: Synthetic oligonucleotide
  Antisense strand to SEQ ID NO: 686710
uacaccacccaguuuauug

SEQ ID NO: 686712 - RNA, 19 nt, Artificial Sequence
  Description of Artificial Sequence: Synthetic oligonucleotide
  Sense strand starting at position 2868 of SEQ ID NO: 586030
cgauuuagugcccacugua

SEQ ID NO: 686713 - RNA, 19 nt, Artificial Sequence
  Description of Artificial Sequence: Synthetic oligonucleotide
  Antisense strand to SEQ ID NO: 686712
uacagugggcacuaaaucg

SEQ ID NO: 686714 - RNA, 19 nt, Artificial Sequence
  Description of Artificial Sequence: Synthetic oligonucleotide
  Sense strand starting at position 2878 of SEQ ID NO: 586030
cccacuguacuccaguaua

SEQ ID NO: 686715 - RNA, 19 nt, Artificial Sequence
  Description of Artificial Sequence: Synthetic oligonucleotide
  Antisense strand to SEQ ID NO: 686714
uauacuggaguacaguggg

SEQ ID NO: 686716 - RNA, 19 nt, Artificial Sequence
  Description of Artificial Sequence: Synthetic oligonucleotide
  Sense strand starting at position 2881 of SEQ ID NO: 586030
acuguacuccaguauaacu

SEQ ID NO: 686717 - RNA, 19 nt, Artificial Sequence
  Description of Artificial Sequence: Synthetic oligonucleotide
  Antisense strand to SEQ ID NO: 686716
aguuauacuggaguacagu

SEQ ID NO: 686718 - RNA, 19 nt, Artificial Sequence
  Description of Artificial Sequence: Synthetic oligonucleotide
  Sense strand starting at position 3221 of SEQ ID NO: 586030
cuuucucugggucaggaau

SEQ ID NO: 686719 - RNA, 19 nt, Artificial Sequence
  Description of Artificial Sequence: Synthetic oligonucleotide
  Antisense strand to SEQ ID NO: 686718
auuccugacccagagaaag

SEQ ID NO: 686720 - RNA, 19 nt, Artificial Sequence
  Description of Artificial Sequence: Synthetic oligonucleotide
  Sense strand starting at position 3326 of SEQ ID NO: 586030
gcuugacuccaggaggauu

SEQ ID NO: 686721 - RNA, 19 nt, Artificial Sequence
  Description of Artificial Sequence: Synthetic oligonucleotide
  Antisense strand to SEQ ID NO: 686720
aauccuccuggagucaagc

SEQ ID NO: 686722 - RNA, 19 nt, Artificial Sequence
  Description of Artificial Sequence: Synthetic oligonucleotide
  Sense strand starting at position 3401 of SEQ ID NO: 586030
gguuguugcccagagacau

SEQ ID NO: 686723 - RNA, 19 nt, Artificial Sequence
  Description of Artificial Sequence: Synthetic oligonucleotide
  Antisense strand to SEQ ID NO: 686722
augucucugggcaacaacc

SEQ ID NO: 686724 - RNA, 19 nt, Artificial Sequence
  Description of Artificial Sequence: Synthetic oligonucleotide
  Sense strand starting at position 3414 of SEQ ID NO: 586030
agacaugaguuccuaguga

SEQ ID NO: 686725 - RNA, 19 nt, Artificial Sequence
  Description of Artificial Sequence: Synthetic oligonucleotide
  Antisense strand to SEQ ID NO: 686724
ucacuaggaacucaugucu

SEQ ID NO: 686726 - RNA, 19 nt, Artificial Sequence
  Description of Artificial Sequence: Synthetic oligonucleotide
  Sense strand starting at position 3419 of SEQ ID NO: 586030
ugaguuccuagugaugcaa

SEQ ID NO: 686727 - RNA, 19 nt, Artificial Sequence
  Description of Artificial Sequence: Synthetic oligonucleotide
  Antisense strand to SEQ ID NO: 686726
uugcaucacuaggaacuca

SEQ ID NO: 686728 - RNA, 19 nt, Artificial Sequence
  Description of Artificial Sequence: Synthetic oligonucleotide
  Sense strand starting at position 3458 of SEQ ID NO: 586030
gcauuaugguaucuggauu

SEQ ID NO: 686729 - RNA, 19 nt, Artificial Sequence
  Description of Artificial Sequence: Synthetic oligonucleotide
  Antisense strand to SEQ ID NO: 686728
aauccagauaccauaaugc

SEQ ID NO: 686730 - RNA, 19 nt, Artificial Sequence
  Description of Artificial Sequence: Synthetic oligonucleotide
  Sense strand starting at position 3466 of SEQ ID NO: 586030
guaucuggauucccuuaga

SEQ ID NO: 686731 - RNA, 19 nt, Artificial Sequence
  Description of Artificial Sequence: Synthetic oligonucleotide
  Antisense strand to SEQ ID NO: 686730
ucuaagggaauccagauac

SEQ ID NO: 686732 - RNA, 19 nt, Artificial Sequence
  Description of Artificial Sequence: Synthetic oligonucleotide
  Sense strand starting at position 3568 of SEQ ID NO: 586030
guuguauucuauccaauaa

SEQ ID NO: 686733 - RNA, 19 nt, Artificial Sequence
  Description of Artificial Sequence: Synthetic oligonucleotide
  Antisense strand to SEQ ID NO: 686732
uuauuggauagaauacaac

SEQ ID NO: 686734 - RNA, 19 nt, Artificial Sequence
  Description of Artificial Sequence: Synthetic oligonucleotide
  Sense strand starting at position 3623 of SEQ ID NO: 586030
aggcaacagagguguauaa

SEQ ID NO: 686735 - RNA, 19 nt, Artificial Sequence
  Description of Artificial Sequence: Synthetic oligonucleotide
  Antisense strand to SEQ ID NO: 686734
uuauacaccucuguugccu

SEQ ID NO: 686736 - RNA, 19 nt, Artificial Sequence
  Description of Artificial Sequence: Synthetic oligonucleotide
  Sense strand starting at position 3869 of SEQ ID NO: 586030
ugcaaacaggcauaucuaa

SEQ ID NO: 686737 - RNA, 19 nt, Artificial Sequence
  Description of Artificial Sequence: Synthetic oligonucleotide
  Antisense strand to SEQ ID NO: 686736
uuagauaugccuguuugca

SEQ ID NO: 686738 - RNA, 19 nt, Artificial Sequence
  Description of Artificial Sequence: Synthetic oligonucleotide
  Sense strand starting at position 3910 of SEQ ID NO: 586030
ugcauuuauucugcaauug

SEQ ID NO: 686739 - RNA, 19 nt, Artificial Sequence
  Description of Artificial Sequence: Synthetic oligonucleotide
  Antisense strand to SEQ ID NO: 686738
caauugcagaauaaaugca

SEQ ID NO: 686740 - RNA, 19 nt, Artificial Sequence
  Description of Artificial Sequence: Synthetic oligonucleotide
  Sense strand starting at position 3965 of SEQ ID NO: 586030
cugaguuuccgguaaacac

SEQ ID NO: 686741 - RNA, 19 nt, Artificial Sequence
  Description of Artificial Sequence: Synthetic oligonucleotide
  Antisense strand to SEQ ID NO: 686740
guguuuaccggaaacucag

SEQ ID NO: 686742 - RNA, 19 nt, Artificial Sequence
  Description of Artificial Sequence: Synthetic oligonucleotide
  Sense strand starting at position 10 of SEQ ID NO: 586031
acuggugugugaccaaauc

SEQ ID NO: 686743 - RNA, 19 nt, Artificial Sequence
  Description of Artificial Sequence: Synthetic oligonucleotide
  Antisense strand to SEQ ID NO: 686742
gauuuggucacacaccagu

SEQ ID NO: 686744 - RNA, 19 nt, Artificial Sequence
  Description of Artificial Sequence: Synthetic oligonucleotide
  Sense strand starting at position 115 of SEQ ID NO: 586031
aguggaacuuaaguuaaua

SEQ ID NO: 686745 - RNA, 19 nt, Artificial Sequence
  Description of Artificial Sequence: Synthetic oligonucleotide
  Antisense strand to SEQ ID NO: 686744
uauuaacuuaaguuccacu

SEQ ID NO: 686746 - RNA, 19 nt, Artificial Sequence
  Description of Artificial Sequence: Synthetic oligonucleotide
  Sense strand starting at position 192 of SEQ ID NO: 586031
gaaugcuucccacacggua

SEQ ID NO: 686747 - RNA, 19 nt, Artificial Sequence
  Description of Artificial Sequence: Synthetic oligonucleotide
  Antisense strand to SEQ ID NO: 686746
uaccgugugggaagcauuc

SEQ ID NO: 686748 - RNA, 19 nt, Artificial Sequence
  Description of Artificial Sequence: Synthetic oligonucleotide
  Sense strand starting at position 207 of SEQ ID NO: 586031
gguaucuauugcuccagaa

SEQ ID NO: 686749 - RNA, 19 nt, Artificial Sequence
  Description of Artificial Sequence: Synthetic oligonucleotide
  Antisense strand to SEQ ID NO: 686748
uucuggagcaauagauacc

SEQ ID NO: 686750 - RNA, 19 nt, Artificial Sequence
  Description of Artificial Sequence: Synthetic oligonucleotide
  Sense strand starting at position 753 of SEQ ID NO: 586031
ugaacucaucaugguguuu

SEQ ID NO: 686751 - RNA, 19 nt, Artificial Sequence
  Description of Artificial Sequence: Synthetic oligonucleotide
  Antisense strand to SEQ ID NO: 686750
aaacaccaugaugaguuca

SEQ ID NO: 686752 - RNA, 19 nt, Artificial Sequence
  Description of Artificial Sequence: Synthetic oligonucleotide
  Sense strand starting at position 765 of SEQ ID NO: 586031
gguguuuaacaccaucuau

SEQ ID NO: 686753 - RNA, 19 nt, Artificial Sequence
  Description of Artificial Sequence: Synthetic oligonucleotide
  Antisense strand to SEQ ID NO: 686752
auagaugguguuaaacacc

SEQ ID NO: 686754 - RNA, 19 nt, Artificial Sequence
  Description of Artificial Sequence: Synthetic oligonucleotide
  Sense strand starting at position 779 of SEQ ID NO: 586031
ucuauaugcugacauuuga

SEQ ID NO: 686755 - RNA, 19 nt, Artificial Sequence
  Description of Artificial Sequence: Synthetic oligonucleotide
  Antisense strand to SEQ ID NO: 686754
ucaaaugucagcauauaga

SEQ ID NO: 686756 - RNA, 19 nt, Artificial Sequence
  Description of Artificial Sequence: Synthetic oligonucleotide
  Sense strand starting at position 903 of SEQ ID NO: 586031
auuagaagguuucuagaua

SEQ ID NO: 686757 - RNA, 19 nt, Artificial Sequence
  Description of Artificial Sequence: Synthetic oligonucleotide
  Antisense strand to SEQ ID NO: 686756
uaucuagaaaccuucuaau

SEQ ID NO: 686758 - RNA, 19 nt, Artificial Sequence
  Description of Artificial Sequence: Synthetic oligonucleotide
  Sense strand starting at position 1012 of SEQ ID NO: 586031
agucuuucugccuaagaag

SEQ ID NO: 686759 - RNA, 19 nt, Artificial Sequence
  Description of Artificial Sequence: Synthetic oligonucleotide
  Antisense strand to SEQ ID NO: 686758
cuucuuaggcagaaagacu

SEQ ID NO: 686760 - RNA, 19 nt, Artificial Sequence
  Description of Artificial Sequence: Synthetic oligonucleotide
  Sense strand starting at position 1082 of SEQ ID NO: 586031
gaggcuuuggaauguauuc

SEQ ID NO: 686761 - RNA, 19 nt, Artificial Sequence
  Description of Artificial Sequence: Synthetic oligonucleotide
  Antisense strand to SEQ ID NO: 686760
gaauacauuccaaagccuc

SEQ ID NO: 686762 - RNA, 19 nt, Artificial Sequence
  Description of Artificial Sequence: Synthetic oligonucleotide
  Sense strand starting at position 1087 of SEQ ID NO: 586031
uuuggaauguauuccuaac

SEQ ID NO: 686763 - RNA, 19 nt, Artificial Sequence
  Description of Artificial Sequence: Synthetic oligonucleotide
  Antisense strand to SEQ ID NO: 686762
guuaggaauacauuccaaa

SEQ ID NO: 686764 - RNA, 19 nt, Artificial Sequence
  Description of Artificial Sequence: Synthetic oligonucleotide
  Sense strand starting at position 1130 of SEQ ID NO: 586031
uuaaguuacuacuuguauc

SEQ ID NO: 686765 - RNA, 19 nt, Artificial Sequence
  Description of Artificial Sequence: Synthetic oligonucleotide
  Antisense strand to SEQ ID NO: 686764
gauacaaguaguaacuuaa

SEQ ID NO: 686766 - RNA, 19 nt, Artificial Sequence
  Description of Artificial Sequence: Synthetic oligonucleotide
  Sense strand starting at position 1151 of SEQ ID NO: 586031
ugagaucucuucccuuagu

SEQ ID NO: 686767 - RNA, 19 nt, Artificial Sequence
  Description of Artificial Sequence: Synthetic oligonucleotide
  Antisense strand to SEQ ID NO: 686766
acuaagggaagagaucuca

SEQ ID NO: 686768 - RNA, 19 nt, Artificial Sequence
  Description of Artificial Sequence: Synthetic oligonucleotide
  Sense strand starting at position 1275 of SEQ ID NO: 586031
gacaaauguugagauaaau

SEQ ID NO: 686769 - RNA, 19 nt, Artificial Sequence
  Description of Artificial Sequence: Synthetic oligonucleotide
  Antisense strand to SEQ ID NO: 686768
auuuaucucaacauuuguc

SEQ ID NO: 686770 - RNA, 19 nt, Artificial Sequence
  Description of Artificial Sequence: Synthetic oligonucleotide
  Sense strand starting at position 1625 of SEQ ID NO: 586031
ccucguguacauuaugauu

SEQ ID NO: 686771 - RNA, 19 nt, Artificial Sequence
  Description of Artificial Sequence: Synthetic oligonucleotide
  Antisense strand to SEQ ID NO: 686770
aaucauaauguacacgagg

SEQ ID NO: 686772 - RNA, 19 nt, Artificial Sequence
  Description of Artificial Sequence: Synthetic oligonucleotide
  Sense strand starting at position 1681 of SEQ ID NO: 586031
gaucgcugucuccagaaug

SEQ ID NO: 686773 - RNA, 19 nt, Artificial Sequence
  Description of Artificial Sequence: Synthetic oligonucleotide
  Antisense strand to SEQ ID NO: 686772
cauucuggagacagcgauc

SEQ ID NO: 686774 - RNA, 19 nt, Artificial Sequence
  Description of Artificial Sequence: Synthetic oligonucleotide
  Sense strand starting at position 1733 of SEQ ID NO: 586031
uccugagaaacugguguuu

SEQ ID NO: 686775 - RNA, 19 nt, Artificial Sequence
  Description of Artificial Sequence: Synthetic oligonucleotide
  Antisense strand to SEQ ID NO: 686774
aaacaccaguuucucagga

SEQ ID NO: 686776 - RNA, 19 nt, Artificial Sequence
  Description of Artificial Sequence: Synthetic oligonucleotide
  Sense strand starting at position 1933 of SEQ ID NO: 586031
gggagaauguuugcauaac

SEQ ID NO: 686777 - RNA, 19 nt, Artificial Sequence
  Description of Artificial Sequence: Synthetic oligonucleotide
  Antisense strand to SEQ ID NO: 686776
guuaugcaaacauucuccc

SEQ ID NO: 686778 - RNA, 19 nt, Artificial Sequence
  Description of Artificial Sequence: Synthetic oligonucleotide
  Sense strand starting at position 2347 of SEQ ID NO: 586031
uuaagaacgcaauauaucu

SEQ ID NO: 686779 - RNA, 19 nt, Artificial Sequence
  Description of Artificial Sequence: Synthetic oligonucleotide
  Antisense strand to SEQ ID NO: 686778
agauauauugcguucuuaa

SEQ ID NO: 686780 - RNA, 19 nt, Artificial Sequence
  Description of Artificial Sequence: Synthetic oligonucleotide
  Sense strand starting at position 2400 of SEQ ID NO: 586031
uuaagacaaucagaaagua

SEQ ID NO: 686781 - RNA, 19 nt, Artificial Sequence
  Description of Artificial Sequence: Synthetic oligonucleotide
  Antisense strand to SEQ ID NO: 686780
uacuuucugauugucuuaa

SEQ ID NO: 686782 - RNA, 19 nt, Artificial Sequence
  Description of Artificial Sequence: Synthetic oligonucleotide
  Sense strand starting at position 2410 of SEQ ID NO: 586031
cagaaaguauuacagggau

SEQ ID NO: 686783 - RNA, 19 nt, Artificial Sequence
  Description of Artificial Sequence: Synthetic oligonucleotide
  Antisense strand to SEQ ID NO: 686782
aucccuguaauacuuucug

SEQ ID NO: 686784 - RNA, 19 nt, Artificial Sequence
  Description of Artificial Sequence: Synthetic oligonucleotide
  Sense strand starting at position 2426 of SEQ ID NO: 586031
gauugaacagcauguacua

SEQ ID NO: 686785 - RNA, 19 nt, Artificial Sequence
  Description of Artificial Sequence: Synthetic oligonucleotide
  Antisense strand to SEQ ID NO: 686784
uaguacaugcuguucaauc

SEQ ID NO: 686786 - RNA, 19 nt, Artificial Sequence
  Description of Artificial Sequence: Synthetic oligonucleotide
  Sense strand starting at position 2612 of SEQ ID NO: 586031
ucuguugagucacuuacau

SEQ ID NO: 686787 - RNA, 19 nt, Artificial Sequence
  Description of Artificial Sequence: Synthetic oligonucleotide
  Antisense strand to SEQ ID NO: 686786
auguaagugacucaacaga

SEQ ID NO: 686788 - RNA, 19 nt, Artificial Sequence
  Description of Artificial Sequence: Synthetic oligonucleotide
  Sense strand starting at position 2693 of SEQ ID NO: 586031
ggacaauauugauaacaaa

SEQ ID NO: 686789 - RNA, 19 nt, Artificial Sequence
  Description of Artificial Sequence: Synthetic oligonucleotide
  Antisense strand to SEQ ID NO: 686788
uuuguuaucaauauugucc

SEQ ID NO: 686790 - RNA, 19 nt, Artificial Sequence
  Description of Artificial Sequence: Synthetic oligonucleotide
  Sense strand starting at position 2812 of SEQ ID NO: 586031
auaguuagugccuacagca

SEQ ID NO: 686791 - RNA, 19 nt, Artificial Sequence
  Description of Artificial Sequence: Synthetic oligonucleotide
  Antisense strand to SEQ ID NO: 686790
ugcuguaggcacuaacuau

SEQ ID NO: 686792 - RNA, 19 nt, Artificial Sequence
  Description of Artificial Sequence: Synthetic oligonucleotide
  Sense strand starting at position 3038 of SEQ ID NO: 586031
gaguccaggauuggugaua

SEQ ID NO: 686793 - RNA, 19 nt, Artificial Sequence
  Description of Artificial Sequence: Synthetic oligonucleotide
  Antisense strand to SEQ ID NO: 686792
uaucaccaauccuggacuc

SEQ ID NO: 686794 - RNA, 19 nt, Artificial Sequence
  Description of Artificial Sequence: Synthetic oligonucleotide
  Sense strand starting at position 3039 of SEQ ID NO: 586031
aguccaggauuggugauaa

SEQ ID NO: 686795 - RNA, 19 nt, Artificial Sequence
  Description of Artificial Sequence: Synthetic oligonucleotide
  Antisense strand to SEQ ID NO: 686794
uuaucaccaauccuggacu

SEQ ID NO: 686796 - RNA, 19 nt, Artificial Sequence
  Description of Artificial Sequence: Synthetic oligonucleotide
  Sense strand starting at position 3043 of SEQ ID NO: 586031
caggauuggugauaaagau

SEQ ID NO: 686797 - RNA, 19 nt, Artificial Sequence
  Description of Artificial Sequence: Synthetic oligonucleotide
  Antisense strand to SEQ ID NO: 686796
aucuuuaucaccaauccug

SEQ ID NO: 686798 - RNA, 19 nt, Artificial Sequence
  Description of Artificial Sequence: Synthetic oligonucleotide
  Sense strand starting at position 3052 of SEQ ID NO: 586031
ugauaaagaucaucugugu

SEQ ID NO: 686799 - RNA, 19 nt, Artificial Sequence
  Description of Artificial Sequence: Synthetic oligonucleotide
  Antisense strand to SEQ ID NO: 686798
acacagaugaucuuuauca

SEQ ID NO: 686800 - RNA, 19 nt, Artificial Sequence
  Description of Artificial Sequence: Synthetic oligonucleotide
  Sense strand starting at position 3055 of SEQ ID NO: 586031
uaaagaucaucuguguugu

SEQ ID NO: 686801 - RNA, 19 nt, Artificial Sequence
  Description of Artificial Sequence: Synthetic oligonucleotide
  Antisense strand to SEQ ID NO: 686800
acaacacagaugaucuuua

SEQ ID NO: 686802 - RNA, 19 nt, Artificial Sequence
  Description of Artificial Sequence: Synthetic oligonucleotide
  Sense strand starting at position 3056 of SEQ ID NO: 586031
aaagaucaucuguguugua

SEQ ID NO: 686803 - RNA, 19 nt, Artificial Sequence
  Description of Artificial Sequence: Synthetic oligonucleotide
  Antisense strand to SEQ ID NO: 686802
uacaacacagaugaucuuu

SEQ ID NO: 686804 - RNA, 19 nt, Artificial Sequence
  Description of Artificial Sequence: Synthetic oligonucleotide
  Sense strand starting at position 3057 of SEQ ID NO: 586031
aagaucaucuguguuguaa

SEQ ID NO: 686805 - RNA, 19 nt, Artificial Sequence
  Description of Artificial Sequence: Synthetic oligonucleotide
  Antisense strand to SEQ ID NO: 686804
uuacaacacagaugaucuu

SEQ ID NO: 686806 - RNA, 19 nt, Artificial Sequence
  Description of Artificial Sequence: Synthetic oligonucleotide
  Sense strand starting at position 3717 of SEQ ID NO: 586031
uucugcuuugaauagaagu

SEQ ID NO: 686807 - RNA, 19 nt, Artificial Sequence
  Description of Artificial Sequence: Synthetic oligonucleotide
  Antisense strand to SEQ ID NO: 686806
acuucuauucaaagcagaa

SEQ ID NO: 686808 - RNA, 19 nt, Artificial Sequence
  Description of Artificial Sequence: Synthetic oligonucleotide
  Sense strand starting at position 3862 of SEQ ID NO: 586031
uguauaauagacuguuagu

SEQ ID NO: 686809 - RNA, 19 nt, Artificial Sequence
  Description of Artificial Sequence: Synthetic oligonucleotide
  Antisense strand to SEQ ID NO: 686808
acuaacagucuauuauaca

SEQ ID NO: 686810 - RNA, 19 nt, Artificial Sequence
  Description of Artificial Sequence: Synthetic oligonucleotide
  Sense strand starting at position 3875 of SEQ ID NO: 586031
guuaguauauaaccauacu

SEQ ID NO: 686811 - RNA, 19 nt, Artificial Sequence
  Description of Artificial Sequence: Synthetic oligonucleotide
  Antisense strand to SEQ ID NO: 686810
aguaugguuauauacuaac

SEQ ID NO: 686812 - RNA, 19 nt, Artificial Sequence
  Description of Artificial Sequence: Synthetic oligonucleotide
  Sense strand starting at position 3909 of SEQ ID NO: 586031
aguaaauuagcauagguga

SEQ ID NO: 686813 - RNA, 19 nt, Artificial Sequence
  Description of Artificial Sequence: Synthetic oligonucleotide
  Antisense strand to SEQ ID NO: 686812
ucaccuaugcuaauuuacu

SEQ ID NO: 686814 - RNA, 19 nt, Artificial Sequence
  Description of Artificial Sequence: Synthetic oligonucleotide
  Sense strand starting at position 3916 of SEQ ID NO: 586031
uagcauaggugauugguau

SEQ ID NO: 686815 - RNA, 19 nt, Artificial Sequence
  Description of Artificial Sequence: Synthetic oligonucleotide
  Antisense strand to SEQ ID NO: 686814
auaccaaucaccuaugcua

SEQ ID NO: 686816 - RNA, 19 nt, Artificial Sequence
  Description of Artificial Sequence: Synthetic oligonucleotide
  Sense strand starting at position 3917 of SEQ ID NO: 586031
agcauaggugauugguaua

SEQ ID NO: 686817 - RNA, 19 nt, Artificial Sequence
  Description of Artificial Sequence: Synthetic oligonucleotide
  Antisense strand to SEQ ID NO: 686816
uauaccaaucaccuaugcu

SEQ ID NO: 686818 - RNA, 19 nt, Artificial Sequence
  Description of Artificial Sequence: Synthetic oligonucleotide
  Sense strand starting at position 3938 of SEQ ID NO: 586031
auagauuaugagugcuguu

SEQ ID NO: 686819 - RNA, 19 nt, Artificial Sequence
  Description of Artificial Sequence: Synthetic oligonucleotide
  Antisense strand to SEQ ID NO: 686818
aacagcacucauaaucuau

SEQ ID NO: 686820 - RNA, 19 nt, Artificial Sequence
  Description of Artificial Sequence: Synthetic oligonucleotide
  Sense strand starting at position 3951 of SEQ ID NO: 586031
gcuguuagaguuuagaaau

SEQ ID NO: 686821 - RNA, 19 nt, Artificial Sequence
  Description of Artificial Sequence: Synthetic oligonucleotide
  Antisense strand to SEQ ID NO: 686820
auuucuaaacucuaacagc

SEQ ID NO: 686822 - RNA, 19 nt, Artificial Sequence
  Description of Artificial Sequence: Synthetic oligonucleotide
  Sense strand starting at position 260 of SEQ ID NO: 586032
uugugaaucugaucaucug

SEQ ID NO: 686823 - RNA, 19 nt, Artificial Sequence
  Description of Artificial Sequence: Synthetic oligonucleotide
  Antisense strand to SEQ ID NO: 686822
cagaugaucagauucacaa

SEQ ID NO: 686824 - RNA, 19 nt, Artificial Sequence
  Description of Artificial Sequence: Synthetic oligonucleotide
  Sense strand starting at position 261 of SEQ ID NO: 586032
ugugaaucugaucaucugu

SEQ ID NO: 686825 - RNA, 19 nt, Artificial Sequence
  Description of Artificial Sequence: Synthetic oligonucleotide
  Antisense strand to SEQ ID NO: 686824
acagaugaucagauucaca

SEQ ID NO: 686826 - RNA, 19 nt, Artificial Sequence
  Description of Artificial Sequence: Synthetic oligonucleotide
  Sense strand starting at position 263 of SEQ ID NO: 586032
ugaaucugaucaucuguua

SEQ ID NO: 686827 - RNA, 19 nt, Artificial Sequence
  Description of Artificial Sequence: Synthetic oligonucleotide
  Antisense strand to SEQ ID NO: 686826
uaacagaugaucagauuca

SEQ ID NO: 686828 - RNA, 19 nt, Artificial Sequence
  Description of Artificial Sequence: Synthetic oligonucleotide
  Sense strand starting at position 266 of SEQ ID NO: 586032
aucugaucaucuguuagaa

SEQ ID NO: 686829 - RNA, 19 nt, Artificial Sequence
  Description of Artificial Sequence: Synthetic oligonucleotide
  Antisense strand to SEQ ID NO: 686828
uucuaacagaugaucagau

SEQ ID NO: 686830 - RNA, 19 nt, Artificial Sequence
  Description of Artificial Sequence: Synthetic oligonucleotide
  Sense strand starting at position 344 of SEQ ID NO: 586032
cuuucucaagaguaagcau

SEQ ID NO: 686831 - RNA, 19 nt, Artificial Sequence
  Description of Artificial Sequence: Synthetic oligonucleotide
  Antisense strand to SEQ ID NO: 686830
augcuuacucuugagaaag

SEQ ID NO: 686832 - RNA, 19 nt, Artificial Sequence
  Description of Artificial Sequence: Synthetic oligonucleotide
  Sense strand starting at position 459 of SEQ ID NO: 586032
gaaaguccucuguaagacu

SEQ ID NO: 686833 - RNA, 19 nt, Artificial Sequence
  Description of Artificial Sequence: Synthetic oligonucleotide
  Antisense strand to SEQ ID NO: 686832
agucuuacagaggacuuuc

SEQ ID NO: 686834 - RNA, 19 nt, Artificial Sequence
  Description of Artificial Sequence: Synthetic oligonucleotide
  Sense strand starting at position 554 of SEQ ID NO: 586032
cauuguuaggcccacagaa

SEQ ID NO: 686835 - RNA, 19 nt, Artificial Sequence
  Description of Artificial Sequence: Synthetic oligonucleotide
  Antisense strand to SEQ ID NO: 686834
uucugugggccuaacaaug

SEQ ID NO: 686836 - RNA, 19 nt, Artificial Sequence
  Description of Artificial Sequence: Synthetic oligonucleotide
  Sense strand starting at position 597 of SEQ ID NO: 586032
agucuauuuggaugaccgu

SEQ ID NO: 686837 - RNA, 19 nt, Artificial Sequence
  Description of Artificial Sequence: Synthetic oligonucleotide
  Antisense strand to SEQ ID NO: 686836
acggucauccaaauagacu

SEQ ID NO: 686838 - RNA, 19 nt, Artificial Sequence
  Description of Artificial Sequence: Synthetic oligonucleotide
  Sense strand starting at position 1051 of SEQ ID NO: 586032
ucucuacaccauuggagua

SEQ ID NO: 686839 - RNA, 19 nt, Artificial Sequence
  Description of Artificial Sequence: Synthetic oligonucleotide
  Antisense strand to SEQ ID NO: 686838
uacuccaaugguguagaga

SEQ ID NO: 686840 - RNA, 19 nt, Artificial Sequence
  Description of Artificial Sequence: Synthetic oligonucleotide
  Sense strand starting at position 1063 of SEQ ID NO: 586032
uggaguauuacauauggcu

SEQ ID NO: 686841 - RNA, 19 nt, Artificial Sequence
  Description of Artificial Sequence: Synthetic oligonucleotide
  Antisense strand to SEQ ID NO: 686840
agccauauguaauacucca

SEQ ID NO: 686842 - RNA, 19 nt, Artificial Sequence
  Description of Artificial Sequence: Synthetic oligonucleotide
  Sense strand starting at position 1283 of SEQ ID NO: 586032
agccuuggauucucugaaa

SEQ ID NO: 686843 - RNA, 19 nt, Artificial Sequence
  Description of Artificial Sequence: Synthetic oligonucleotide
  Antisense strand to SEQ ID NO: 686842
uuucagagaauccaaggcu

SEQ ID NO: 686844 - RNA, 19 nt, Artificial Sequence
  Description of Artificial Sequence: Synthetic oligonucleotide
  Sense strand starting at position 1301 of SEQ ID NO: 586032
agcacugcuagauggaaau

SEQ ID NO: 686845 - RNA, 19 nt, Artificial Sequence
  Description of Artificial Sequence: Synthetic oligonucleotide
  Antisense strand to SEQ ID NO: 686844
auuuccaucuagcagugcu

SEQ ID NO: 686846 - RNA, 19 nt, Artificial Sequence
  Description of Artificial Sequence: Synthetic oligonucleotide
  Sense strand starting at position 1318 of SEQ ID NO: 586032
augcuugugcaacaugaaa

SEQ ID NO: 686847 - RNA, 19 nt, Artificial Sequence
  Description of Artificial Sequence: Synthetic oligonucleotide
  Antisense strand to SEQ ID NO: 686846
uuucauguugcacaagcau

SEQ ID NO: 686848 - RNA, 19 nt, Artificial Sequence
  Description of Artificial Sequence: Synthetic oligonucleotide
  Sense strand starting at position 1408 of SEQ ID NO: 586032
gucucagaaacuuaggguu

SEQ ID NO: 686849 - RNA, 19 nt, Artificial Sequence
  Description of Artificial Sequence: Synthetic oligonucleotide
  Antisense strand to SEQ ID NO: 686848
aacccuaaguuucugagac

SEQ ID NO: 686850 - RNA, 19 nt, Artificial Sequence
  Description of Artificial Sequence: Synthetic oligonucleotide
  Sense strand starting at position 1414 of SEQ ID NO: 586032
gaaacuuaggguugaaguu

SEQ ID NO: 686851 - RNA, 19 nt, Artificial Sequence
  Description of Artificial Sequence: Synthetic oligonucleotide
  Antisense strand to SEQ ID NO: 686850
aacuucaacccuaaguuuc

SEQ ID NO: 686852 - RNA, 19 nt, Artificial Sequence
  Description of Artificial Sequence: Synthetic oligonucleotide
  Sense strand starting at position 1629 of SEQ ID NO: 586032
ugguaaagucgggaugacu

SEQ ID NO: 686853 - RNA, 19 nt, Artificial Sequence
  Description of Artificial Sequence: Synthetic oligonucleotide
  Antisense strand to SEQ ID NO: 686852
agucaucccgacuuuacca

SEQ ID NO: 686854 - RNA, 19 nt, Artificial Sequence
  Description of Artificial Sequence: Synthetic oligonucleotide
  Sense strand starting at position 1640 of SEQ ID NO: 586032
ggaugacugucaccacaga

SEQ ID NO: 686855 - RNA, 19 nt, Artificial Sequence
  Description of Artificial Sequence: Synthetic oligonucleotide
  Antisense strand to SEQ ID NO: 686854
ucuguggugacagucaucc

SEQ ID NO: 686856 - RNA, 19 nt, Artificial Sequence
  Description of Artificial Sequence: Synthetic oligonucleotide
  Sense strand starting at position 1681 of SEQ ID NO: 586032
ccaagucacucguugauuu

SEQ ID NO: 686857 - RNA, 19 nt, Artificial Sequence
  Description of Artificial Sequence: Synthetic oligonucleotide
  Antisense strand to SEQ ID NO: 686856
aaaucaacgagugacuugg

SEQ ID NO: 686858 - RNA, 19 nt, Artificial Sequence
  Description of Artificial Sequence: Synthetic oligonucleotide
  Sense strand starting at position 1682 of SEQ ID NO: 586032
caagucacucguugauuua

SEQ ID NO: 686859 - RNA, 19 nt, Artificial Sequence
  Description of Artificial Sequence: Synthetic oligonucleotide
  Antisense strand to SEQ ID NO: 686858
uaaaucaacgagugacuug

SEQ ID NO: 686860 - RNA, 19 nt, Artificial Sequence
  Description of Artificial Sequence: Synthetic oligonucleotide
  Sense strand starting at position 1685 of SEQ ID NO: 586032
gucacucguugauuuaugu

SEQ ID NO: 686861 - RNA, 19 nt, Artificial Sequence
  Description of Artificial Sequence: Synthetic oligonucleotide
  Antisense strand to SEQ ID NO: 686860
acauaaaucaacgagugac

SEQ ID NO: 686862 - RNA, 19 nt, Artificial Sequence
  Description of Artificial Sequence: Synthetic oligonucleotide
  Sense strand starting at position 1693 of SEQ ID NO: 586032
uugauuuauguaggcaguu

SEQ ID NO: 686863 - RNA, 19 nt, Artificial Sequence
  Description of Artificial Sequence: Synthetic oligonucleotide
  Antisense strand to SEQ ID NO: 686862
aacugccuacauaaaucaa

SEQ ID NO: 686864 - RNA, 19 nt, Artificial Sequence
  Description of Artificial Sequence: Synthetic oligonucleotide
  Sense strand starting at position 1806 of SEQ ID NO: 586032
ugucuuauugaucaauaug

SEQ ID NO: 686865 - RNA, 19 nt, Artificial Sequence
  Description of Artificial Sequence: Synthetic oligonucleotide
  Antisense strand to SEQ ID NO: 686864
cauauugaucaauaagaca

SEQ ID NO: 686866 - RNA, 19 nt, Artificial Sequence
  Description of Artificial Sequence: Synthetic oligonucleotide
  Sense strand starting at position 1983 of SEQ ID NO: 586032
gccugugcuccuccaguca

SEQ ID NO: 686867 - RNA, 19 nt, Artificial Sequence
  Description of Artificial Sequence: Synthetic oligonucleotide
  Antisense strand to SEQ ID NO: 686866
ugacuggaggagcacaggc

SEQ ID NO: 686868 - RNA, 19 nt, Artificial Sequence
  Description of Artificial Sequence: Synthetic oligonucleotide
  Sense strand starting at position 2182 of SEQ ID NO: 586032
aguuguaugggccagauga

SEQ ID NO: 686869 - RNA, 19 nt, Artificial Sequence
  Description of Artificial Sequence: Synthetic oligonucleotide
  Antisense strand to SEQ ID NO: 686868
ucaucuggcccauacaacu

SEQ ID NO: 686870 - RNA, 19 nt, Artificial Sequence
  Description of Artificial Sequence: Synthetic oligonucleotide
  Sense strand starting at position 2184 of SEQ ID NO: 586032
uuguaugggccagaugaca

SEQ ID NO: 686871 - RNA, 19 nt, Artificial Sequence
  Description of Artificial Sequence: Synthetic oligonucleotide
  Antisense strand to SEQ ID NO: 686870
ugucaucuggcccauacaa

SEQ ID NO: 686872 - RNA, 19 nt, Artificial Sequence
  Description of Artificial Sequence: Synthetic oligonucleotide
  Sense strand starting at position 2419 of SEQ ID NO: 586032
ucuaguuauggagagcuuu

SEQ ID NO: 686873 - RNA, 19 nt, Artificial Sequence
  Description of Artificial Sequence: Synthetic oligonucleotide
  Antisense strand to SEQ ID NO: 686872
aaagcucuccauaacuaga

SEQ ID NO: 686874 - RNA, 19 nt, Artificial Sequence
  Description of Artificial Sequence: Synthetic oligonucleotide
  Sense strand starting at position 2447 of SEQ ID NO: 586032
guaaguuauaagggucaug

SEQ ID NO: 686875 - RNA, 19 nt, Artificial Sequence
  Description of Artificial Sequence: Synthetic oligonucleotide
  Antisense strand to SEQ ID NO: 686874
caugacccuuauaacuuac

SEQ ID NO: 686876 - RNA, 19 nt, Artificial Sequence
  Description of Artificial Sequence: Synthetic oligonucleotide
  Sense strand starting at position 2507 of SEQ ID NO: 586032
ccagaaugccugggauuga

SEQ ID NO: 686877 - RNA, 19 nt, Artificial Sequence
  Description of Artificial Sequence: Synthetic oligonucleotide
  Antisense strand to SEQ ID NO: 686876
ucaaucccaggcauucugg

SEQ ID NO: 686878 - RNA, 19 nt, Artificial Sequence
  Description of Artificial Sequence: Synthetic oligonucleotide
  Sense strand starting at position 2541 of SEQ ID NO: 586032
ugugacuaugagcaaguuu

SEQ ID NO: 686879 - RNA, 19 nt, Artificial Sequence
  Description of Artificial Sequence: Synthetic oligonucleotide
  Antisense strand to SEQ ID NO: 686878
aaacuugcucauagucaca

SEQ ID NO: 686880 - RNA, 19 nt, Artificial Sequence
  Description of Artificial Sequence: Synthetic oligonucleotide
  Sense strand starting at position 2661 of SEQ ID NO: 586032
gcccuauuacaagagccau

SEQ ID NO: 686881 - RNA, 19 nt, Artificial Sequence
  Description of Artificial Sequence: Synthetic oligonucleotide
  Antisense strand to SEQ ID NO: 686880
auggcucuuguaauagggc

SEQ ID NO: 686882 - RNA, 19 nt, Artificial Sequence
  Description of Artificial Sequence: Synthetic oligonucleotide
  Sense strand starting at position 2826 of SEQ ID NO: 586032
aggucaaccugaucugaau

SEQ ID NO: 686883 - RNA, 19 nt, Artificial Sequence
  Description of Artificial Sequence: Synthetic oligonucleotide
  Antisense strand to SEQ ID NO: 686882
auucagaucagguugaccu

SEQ ID NO: 686884 - RNA, 19 nt, Artificial Sequence
  Description of Artificial Sequence: Synthetic oligonucleotide
  Sense strand starting at position 2838 of SEQ ID NO: 586032
ucugaaugguuucuccuaa

SEQ ID NO: 686885 - RNA, 19 nt, Artificial Sequence
  Description of Artificial Sequence: Synthetic oligonucleotide
  Antisense strand to SEQ ID NO: 686884
uuaggagaaaccauucaga

SEQ ID NO: 686886 - RNA, 19 nt, Artificial Sequence
  Description of Artificial Sequence: Synthetic oligonucleotide
  Sense strand starting at position 2839 of SEQ ID NO: 586032
cugaaugguuucuccuaaa

SEQ ID NO: 686887 - RNA, 19 nt, Artificial Sequence
  Description of Artificial Sequence: Synthetic oligonucleotide
  Antisense strand to SEQ ID NO: 686886
uuuaggagaaaccauucag

SEQ ID NO: 686888 - RNA, 19 nt, Artificial Sequence
  Description of Artificial Sequence: Synthetic oligonucleotide
  Sense strand starting at position 3357 of SEQ ID NO: 586032
gugagucguaugccauagu

SEQ ID NO: 686889 - RNA, 19 nt, Artificial Sequence
  Description of Artificial Sequence: Synthetic oligonucleotide
  Antisense strand to SEQ ID NO: 686888
acuauggcauacgacucac

SEQ ID NO: 686890 - RNA, 19 nt, Artificial Sequence
  Description of Artificial Sequence: Synthetic oligonucleotide
  Sense strand starting at position 3373 of SEQ ID NO: 586032
aguucuacugaauggaguu

SEQ ID NO: 686891 - RNA, 19 nt, Artificial Sequence
  Description of Artificial Sequence: Synthetic oligonucleotide
  Antisense strand to SEQ ID NO: 686890
aacuccauucaguagaacu

SEQ ID NO: 686892 - RNA, 19 nt, Artificial Sequence
  Description of Artificial Sequence: Synthetic oligonucleotide
  Sense strand starting at position 3383 of SEQ ID NO: 586032
aauggaguuuguuuauaug

SEQ ID NO: 686893 - RNA, 19 nt, Artificial Sequence
  Description of Artificial Sequence: Synthetic oligonucleotide
  Antisense strand to SEQ ID NO: 686892
cauauaaacaaacuccauu

SEQ ID NO: 686894 - RNA, 19 nt, Artificial Sequence
  Description of Artificial Sequence: Synthetic oligonucleotide
  Sense strand starting at position 3620 of SEQ ID NO: 586032
gaagaaucugugggcagau

SEQ ID NO: 686895 - RNA, 19 nt, Artificial Sequence
  Description of Artificial Sequence: Synthetic oligonucleotide
  Antisense strand to SEQ ID NO: 686894
aucugcccacagauucuuc

SEQ ID NO: 686896 - RNA, 19 nt, Artificial Sequence
  Description of Artificial Sequence: Synthetic oligonucleotide
  Sense strand starting at position 3744 of SEQ ID NO: 586032
gucuuacugcaugagauga

SEQ ID NO: 686897 - RNA, 19 nt, Artificial Sequence
  Description of Artificial Sequence: Synthetic oligonucleotide
  Antisense strand to SEQ ID NO: 686896
ucaucucaugcaguaagac

SEQ ID NO: 686898 - RNA, 19 nt, Artificial Sequence
  Description of Artificial Sequence: Synthetic oligonucleotide
  Sense strand starting at position 3754 of SEQ ID NO: 586032
augagaugauugccuacuu

SEQ ID NO: 686899 - RNA, 19 nt, Artificial Sequence
  Description of Artificial Sequence: Synthetic oligonucleotide
  Antisense strand to SEQ ID NO: 686898
aaguaggcaaucaucucau

SEQ ID NO: 686900 - RNA, 19 nt, Artificial Sequence
  Description of Artificial Sequence: Synthetic oligonucleotide
  Sense strand starting at position 3802 of SEQ ID NO: 586032
aaucguguuccagaacuac

SEQ ID NO: 686901 - RNA, 19 nt, Artificial Sequence
  Description of Artificial Sequence: Synthetic oligonucleotide
  Antisense strand to SEQ ID NO: 686900
guaguucuggaacacgauu

SEQ ID NO: 686902 - RNA, 19 nt, Artificial Sequence
  Description of Artificial Sequence: Synthetic oligonucleotide
  Sense strand starting at position 199 of SEQ ID NO: 586033
uggaauaucuggcuagcca

SEQ ID NO: 686903 - RNA, 19 nt, Artificial Sequence
  Description of Artificial Sequence: Synthetic oligonucleotide
  Antisense strand to SEQ ID NO: 686902
uggcuagccagauauucca

SEQ ID NO: 686904 - RNA, 19 nt, Artificial Sequence
  Description of Artificial Sequence: Synthetic oligonucleotide
  Sense strand starting at position 200 of SEQ ID NO: 586033
ggaauaucuggcuagccau

SEQ ID NO: 686905 - RNA, 19 nt, Artificial Sequence
  Description of Artificial Sequence: Synthetic oligonucleotide
  Antisense strand to SEQ ID NO: 686904
auggcuagccagauauucc

SEQ ID NO: 686906 - RNA, 19 nt, Artificial Sequence
  Description of Artificial Sequence: Synthetic oligonucleotide
  Sense strand starting at position 1138 of SEQ ID NO: 586033
uugggaacucauggccaua

SEQ ID NO: 686907 - RNA, 19 nt, Artificial Sequence
  Description of Artificial Sequence: Synthetic oligonucleotide
  Antisense strand to SEQ ID NO: 686906
uauggccaugaguucccaa

SEQ ID NO: 686908 - RNA, 19 nt, Artificial Sequence
  Description of Artificial Sequence: Synthetic oligonucleotide
  Sense strand starting at position 1140 of SEQ ID NO: 586033
gggaacucauggccauaaa

SEQ ID NO: 686909 - RNA, 19 nt, Artificial Sequence
  Description of Artificial Sequence: Synthetic oligonucleotide
  Antisense strand to SEQ ID NO: 686908
uuuauggccaugaguuccc

SEQ ID NO: 686910 - RNA, 19 nt, Artificial Sequence
  Description of Artificial Sequence: Synthetic oligonucleotide
  Sense strand starting at position 1527 of SEQ ID NO: 586033
ucugguauauccucuagau

SEQ ID NO: 686911 - RNA, 19 nt, Artificial Sequence
  Description of Artificial Sequence: Synthetic oligonucleotide
  Antisense strand to SEQ ID NO: 686910
aucuagaggauauaccaga

SEQ ID NO: 686912 - RNA, 19 nt, Artificial Sequence
  Description of Artificial Sequence: Synthetic oligonucleotide
  Sense strand starting at position 1552 of SEQ ID NO: 586033
aaaugcucucccuggugaa

SEQ ID NO: 686913 - RNA, 19 nt, Artificial Sequence
  Description of Artificial Sequence: Synthetic oligonucleotide
  Antisense strand to SEQ ID NO: 686912
uucaccagggagagcauuu

SEQ ID NO: 686914 - RNA, 19 nt, Artificial Sequence
  Description of Artificial Sequence: Synthetic oligonucleotide
  Sense strand starting at position 1681 of SEQ ID NO: 586033
gcaagucuccuuuacaagu

SEQ ID NO: 686915 - RNA, 19 nt, Artificial Sequence
  Description of Artificial Sequence: Synthetic oligonucleotide
  Antisense strand to SEQ ID NO: 686914
acuuguaaaggagacuugc

SEQ ID NO: 686916 - RNA, 19 nt, Artificial Sequence
  Description of Artificial Sequence: Synthetic oligonucleotide
  Sense strand starting at position 1831 of SEQ ID NO: 586033
gcucauauacugcagcaau

SEQ ID NO: 686917 - RNA, 19 nt, Artificial Sequence
  Description of Artificial Sequence: Synthetic oligonucleotide
  Antisense strand to SEQ ID NO: 686916
auugcugcaguauaugagc

SEQ ID NO: 686918 - RNA, 19 nt, Artificial Sequence
  Description of Artificial Sequence: Synthetic oligonucleotide
  Sense strand starting at position 2057 of SEQ ID NO: 586033
agcauugagaaaggauguu

SEQ ID NO: 686919 - RNA, 19 nt, Artificial Sequence
  Description of Artificial Sequence: Synthetic oligonucleotide
  Antisense strand to SEQ ID NO: 686918
aacauccuuucucaaugcu

SEQ ID NO: 686920 - RNA, 19 nt, Artificial Sequence
  Description of Artificial Sequence: Synthetic oligonucleotide
  Sense strand starting at position 2066 of SEQ ID NO: 586033
aaaggauguugugcaagaa

SEQ ID NO: 686921 - RNA, 19 nt, Artificial Sequence
  Description of Artificial Sequence: Synthetic oligonucleotide
  Antisense strand to SEQ ID NO: 686920
uucuugcacaacauccuuu

SEQ ID NO: 686922 - RNA, 19 nt, Artificial Sequence
  Description of Artificial Sequence: Synthetic oligonucleotide
  Sense strand starting at position 2281 of SEQ ID NO: 586033
auuggaagguagucaucau

SEQ ID NO: 686923 - RNA, 19 nt, Artificial Sequence
  Description of Artificial Sequence: Synthetic oligonucleotide
  Antisense strand to SEQ ID NO: 686922
augaugacuaccuuccaau

SEQ ID NO: 686924 - RNA, 19 nt, Artificial Sequence
  Description of Artificial Sequence: Synthetic oligonucleotide
  Sense strand starting at position 2285 of SEQ ID NO: 586033
gaagguagucaucauagca

SEQ ID NO: 686925 - RNA, 19 nt, Artificial Sequence
  Description of Artificial Sequence: Synthetic oligonucleotide
  Antisense strand to SEQ ID NO: 686924
ugcuaugaugacuaccuuc

SEQ ID NO: 686926 - RNA, 19 nt, Artificial Sequence
  Description of Artificial Sequence: Synthetic oligonucleotide
  Sense strand starting at position 2418 of SEQ ID NO: 586033
aguccuaagugauauuucu

SEQ ID NO: 686927 - RNA, 19 nt, Artificial Sequence
  Description of Artificial Sequence: Synthetic oligonucleotide
  Antisense strand to SEQ ID NO: 686926
agaaauaucacuuaggacu

SEQ ID NO: 686928 - RNA, 19 nt, Artificial Sequence
  Description of Artificial Sequence: Synthetic oligonucleotide
  Sense strand starting at position 2702 of SEQ ID NO: 586033
augugugacagauggugaa

SEQ ID NO: 686929 - RNA, 19 nt, Artificial Sequence
  Description of Artificial Sequence: Synthetic oligonucleotide
  Antisense strand to SEQ ID NO: 686928
uucaccaucugucacacau

SEQ ID NO: 686930 - RNA, 19 nt, Artificial Sequence
  Description of Artificial Sequence: Synthetic oligonucleotide
  Sense strand starting at position 2806 of SEQ ID NO: 586033
agaacauucuuguuauuga

SEQ ID NO: 686931 - RNA, 19 nt, Artificial Sequence
  Description of Artificial Sequence: Synthetic oligonucleotide
  Antisense strand to SEQ ID NO: 686930
ucaauaacaagaauguucu

SEQ ID NO: 686932 - RNA, 19 nt, Artificial Sequence
  Description of Artificial Sequence: Synthetic oligonucleotide
  Sense strand starting at position 2809 of SEQ ID NO: 586033
acauucuuguuauugagau

SEQ ID NO: 686933 - RNA, 19 nt, Artificial Sequence
  Description of Artificial Sequence: Synthetic oligonucleotide
  Antisense strand to SEQ ID NO: 686932
aucucaauaacaagaaugu

SEQ ID NO: 686934 - RNA, 19 nt, Artificial Sequence
  Description of Artificial Sequence: Synthetic oligonucleotide
  Sense strand starting at position 2840 of SEQ ID NO: 586033
accugucuucuacaguuua

SEQ ID NO: 686935 - RNA, 19 nt, Artificial Sequence
  Description of Artificial Sequence: Synthetic oligonucleotide
  Antisense strand to SEQ ID NO: 686934
uaaacuguagaagacaggu

SEQ ID NO: 686936 - RNA, 19 nt, Artificial Sequence
  Description of Artificial Sequence: Synthetic oligonucleotide
  Sense strand starting at position 2897 of SEQ ID NO: 586033
aguguuaaguucuccuuua

SEQ ID NO: 686937 - RNA, 19 nt, Artificial Sequence
  Description of Artificial Sequence: Synthetic oligonucleotide
  Antisense strand to SEQ ID NO: 686936
uaaaggagaacuuaacacu

SEQ ID NO: 686938 - RNA, 19 nt, Artificial Sequence
  Description of Artificial Sequence: Synthetic oligonucleotide
  Sense strand starting at position 3009 of SEQ ID NO: 586033
ugcuaagcucuguaaaugu

SEQ ID NO: 686939 - RNA, 19 nt, Artificial Sequence
  Description of Artificial Sequence: Synthetic oligonucleotide
  Antisense strand to SEQ ID NO: 686938
acauuuacagagcuuagca

SEQ ID NO: 686940 - RNA, 19 nt, Artificial Sequence
  Description of Artificial Sequence: Synthetic oligonucleotide
  Sense strand starting at position 3065 of SEQ ID NO: 586033
uggauugaaucuccuuguu

SEQ ID NO: 686941 - RNA, 19 nt, Artificial Sequence
  Description of Artificial Sequence: Synthetic oligonucleotide
  Antisense strand to SEQ ID NO: 686940
aacaaggagauucaaucca

SEQ ID NO: 686942 - RNA, 19 nt, Artificial Sequence
  Description of Artificial Sequence: Synthetic oligonucleotide
  Sense strand starting at position 3067 of SEQ ID NO: 586033
gauugaaucuccuuguuug

SEQ ID NO: 686943 - RNA, 19 nt, Artificial Sequence
  Description of Artificial Sequence: Synthetic oligonucleotide
  Antisense strand to SEQ ID NO: 686942
caaacaaggagauucaauc

SEQ ID NO: 686944 - RNA, 19 nt, Artificial Sequence
  Description of Artificial Sequence: Synthetic oligonucleotide
  Sense strand starting at position 3068 of SEQ ID NO: 586033
auugaaucuccuuguuuga

SEQ ID NO: 686945 - RNA, 19 nt, Artificial Sequence
  Description of Artificial Sequence: Synthetic oligonucleotide
  Antisense strand to SEQ ID NO: 686944
ucaaacaaggagauucaau

SEQ ID NO: 686946 - RNA, 19 nt, Artificial Sequence
  Description of Artificial Sequence: Synthetic oligonucleotide
  Sense strand starting at position 3070 of SEQ ID NO: 586033
ugaaucuccuuguuugaau

SEQ ID NO: 686947 - RNA, 19 nt, Artificial Sequence
  Description of Artificial Sequence: Synthetic oligonucleotide
  Antisense strand to SEQ ID NO: 686946
auucaaacaaggagauuca

SEQ ID NO: 686948 - RNA, 19 nt, Artificial Sequence
  Description of Artificial Sequence: Synthetic oligonucleotide
  Sense strand starting at position 3121 of SEQ ID NO: 586033
agguuuaaaucucugauuc

SEQ ID NO: 686949 - RNA, 19 nt, Artificial Sequence
  Description of Artificial Sequence: Synthetic oligonucleotide
  Antisense strand to SEQ ID NO: 686948
gaaucagagauuuaaaccu

SEQ ID NO: 686950 - RNA, 19 nt, Artificial Sequence
  Description of Artificial Sequence: Synthetic oligonucleotide
  Sense strand starting at position 3122 of SEQ ID NO: 586033
gguuuaaaucucugauucu

SEQ ID NO: 686951 - RNA, 19 nt, Artificial Sequence
  Description of Artificial Sequence: Synthetic oligonucleotide
  Antisense strand to SEQ ID NO: 686950
agaaucagagauuuaaacc

SEQ ID NO: 686952 - RNA, 19 nt, Artificial Sequence
  Description of Artificial Sequence: Synthetic oligonucleotide
  Sense strand starting at position 3165 of SEQ ID NO: 586033
ucuugagauucuuucuaag

SEQ ID NO: 686953 - RNA, 19 nt, Artificial Sequence
  Description of Artificial Sequence: Synthetic oligonucleotide
  Antisense strand to SEQ ID NO: 686952
cuuagaaagaaucucaaga

SEQ ID NO: 686954 - RNA, 19 nt, Artificial Sequence
  Description of Artificial Sequence: Synthetic oligonucleotide
  Sense strand starting at position 3308 of SEQ ID NO: 586033
cccacaguguuuccauaug

SEQ ID NO: 686955 - RNA, 19 nt, Artificial Sequence
  Description of Artificial Sequence: Synthetic oligonucleotide
  Antisense strand to SEQ ID NO: 686954
cauauggaaacacuguggg

SEQ ID NO: 686956 - RNA, 19 nt, Artificial Sequence
  Description of Artificial Sequence: Synthetic oligonucleotide
  Sense strand starting at position 3324 of SEQ ID NO: 586033
auguccuuaugcccugaua

SEQ ID NO: 686957 - RNA, 19 nt, Artificial Sequence
  Description of Artificial Sequence: Synthetic oligonucleotide
  Antisense strand to SEQ ID NO: 686956
uaucagggcauaaggacau

SEQ ID NO: 686958 - RNA, 19 nt, Artificial Sequence
  Description of Artificial Sequence: Synthetic oligonucleotide
  Sense strand starting at position 3382 of SEQ ID NO: 586033
ccuaaauucugaguuuaug

SEQ ID NO: 686959 - RNA, 19 nt, Artificial Sequence
  Description of Artificial Sequence: Synthetic oligonucleotide
  Antisense strand to SEQ ID NO: 686958
cauaaacucagaauuuagg

SEQ ID NO: 686960 - RNA, 19 nt, Artificial Sequence
  Description of Artificial Sequence: Synthetic oligonucleotide
  Sense strand starting at position 3390 of SEQ ID NO: 586033
cugaguuuaugucugacau

SEQ ID NO: 686961 - RNA, 19 nt, Artificial Sequence
  Description of Artificial Sequence: Synthetic oligonucleotide
  Antisense strand to SEQ ID NO: 686960
augucagacauaaacucag

SEQ ID NO: 686962 - RNA, 19 nt, Artificial Sequence
  Description of Artificial Sequence: Synthetic oligonucleotide
  Sense strand starting at position 3391 of SEQ ID NO: 586033
ugaguuuaugucugacaua

SEQ ID NO: 686963 - RNA, 19 nt, Artificial Sequence
  Description of Artificial Sequence: Synthetic oligonucleotide
  Antisense strand to SEQ ID NO: 686962
uaugucagacauaaacuca

SEQ ID NO: 686964 - RNA, 19 nt, Artificial Sequence
  Description of Artificial Sequence: Synthetic oligonucleotide
  Sense strand starting at position 3585 of SEQ ID NO: 586033
aaggaaacauaugggaauu

SEQ ID NO: 686965 - RNA, 19 nt, Artificial Sequence
  Description of Artificial Sequence: Synthetic oligonucleotide
  Antisense strand to SEQ ID NO: 686964
aauucccauauguuuccuu

SEQ ID NO: 686966 - RNA, 19 nt, Artificial Sequence
  Description of Artificial Sequence: Synthetic oligonucleotide
  Sense strand starting at position 3654 of SEQ ID NO: 586033
guguguugaaaucaauaga

SEQ ID NO: 686967 - RNA, 19 nt, Artificial Sequence
  Description of Artificial Sequence: Synthetic oligonucleotide
  Antisense strand to SEQ ID NO: 686966
ucuauugauuucaacacac

SEQ ID NO: 686968 - RNA, 19 nt, Artificial Sequence
  Description of Artificial Sequence: Synthetic oligonucleotide
  Sense strand starting at position 3689 of SEQ ID NO: 586033
uugauuacccaauguuguu

SEQ ID NO: 686969 - RNA, 19 nt, Artificial Sequence
  Description of Artificial Sequence: Synthetic oligonucleotide
  Antisense strand to SEQ ID NO: 686968
aacaacauuggguaaucaa

SEQ ID NO: 686970 - RNA, 19 nt, Artificial Sequence
  Description of Artificial Sequence: Synthetic oligonucleotide
  Sense strand starting at position 3764 of SEQ ID NO: 586033
acuguauugguacauaauc

SEQ ID NO: 686971 - RNA, 19 nt, Artificial Sequence
  Description of Artificial Sequence: Synthetic oligonucleotide
  Antisense strand to SEQ ID NO: 686970
gauuauguaccaauacagu

SEQ ID NO: 686972 - RNA, 19 nt, Artificial Sequence
  Description of Artificial Sequence: Synthetic oligonucleotide
  Sense strand starting at position 3772 of SEQ ID NO: 586033
gguacauaauccuuaugac

SEQ ID NO: 686973 - RNA, 19 nt, Artificial Sequence
  Description of Artificial Sequence: Synthetic oligonucleotide
  Antisense strand to SEQ ID NO: 686972
gucauaaggauuauguacc

SEQ ID NO: 686974 - RNA, 19 nt, Artificial Sequence
  Description of Artificial Sequence: Synthetic oligonucleotide
  Sense strand starting at position 3789 of SEQ ID NO: 586033
acagucuggcauuauugua

SEQ ID NO: 686975 - RNA, 19 nt, Artificial Sequence
  Description of Artificial Sequence: Synthetic oligonucleotide
  Antisense strand to SEQ ID NO: 686974
uacaauaaugccagacugu

SEQ ID NO: 686976 - RNA, 19 nt, Artificial Sequence
  Description of Artificial Sequence: Synthetic oligonucleotide
  Sense strand starting at position 3796 of SEQ ID NO: 586033
ggcauuauuguaggauuaa

SEQ ID NO: 686977 - RNA, 19 nt, Artificial Sequence
  Description of Artificial Sequence: Synthetic oligonucleotide
  Antisense strand to SEQ ID NO: 686976
uuaauccuacaauaaugcc

SEQ ID NO: 686978 - RNA, 19 nt, Artificial Sequence
  Description of Artificial Sequence: Synthetic oligonucleotide
  Sense strand starting at position 3815 of SEQ ID NO: 586033
gaaguuuagagucagaagu

SEQ ID NO: 686979 - RNA, 19 nt, Artificial Sequence
  Description of Artificial Sequence: Synthetic oligonucleotide
  Antisense strand to SEQ ID NO: 686978
acuucugacucuaaacuuc

SEQ ID NO: 686980 - RNA, 19 nt, Artificial Sequence
  Description of Artificial Sequence: Synthetic oligonucleotide
  Sense strand starting at position 3874 of SEQ ID NO: 586033
agggacacaucuuaaagga

SEQ ID NO: 686981 - RNA, 19 nt, Artificial Sequence
  Description of Artificial Sequence: Synthetic oligonucleotide
  Antisense strand to SEQ ID NO: 686980
uccuuuaagaugugucccu

SEQ ID NO: 686982 - RNA, 19 nt, Artificial Sequence
  Description of Artificial Sequence: Synthetic oligonucleotide
  Sense strand starting at position 142 of SEQ ID NO: 586034
ugaguaucugcacaccaau

SEQ ID NO: 686983 - RNA, 19 nt, Artificial Sequence
  Description of Artificial Sequence: Synthetic oligonucleotide
  Antisense strand to SEQ ID NO: 686982
auuggugugcagauacuca

SEQ ID NO: 686984 - RNA, 19 nt, Artificial Sequence
  Description of Artificial Sequence: Synthetic oligonucleotide
  Sense strand starting at position 327 of SEQ ID NO: 586034
ggauaaguuaaugggagua

SEQ ID NO: 686985 - RNA, 19 nt, Artificial Sequence
  Description of Artificial Sequence: Synthetic oligonucleotide
  Antisense strand to SEQ ID NO: 686984
uacucccauuaacuuaucc

SEQ ID NO: 686986 - RNA, 19 nt, Artificial Sequence
  Description of Artificial Sequence: Synthetic oligonucleotide
  Sense strand starting at position 486 of SEQ ID NO: 586034
ugugcugauggguaaggaa

SEQ ID NO: 686987 - RNA, 19 nt, Artificial Sequence
  Description of Artificial Sequence: Synthetic oligonucleotide
  Antisense strand to SEQ ID NO: 686986
uuccuuacccaucagcaca

SEQ ID NO: 686988 - RNA, 19 nt, Artificial Sequence
  Description of Artificial Sequence: Synthetic oligonucleotide
  Sense strand starting at position 597 of SEQ ID NO: 586034
cgggaagauuguuugagga

SEQ ID NO: 686989 - RNA, 19 nt, Artificial Sequence
  Description of Artificial Sequence: Synthetic oligonucleotide
  Antisense strand to SEQ ID NO: 686988
uccucaaacaaucuucccg

SEQ ID NO: 686990 - RNA, 19 nt, Artificial Sequence
  Description of Artificial Sequence: Synthetic oligonucleotide
  Sense strand starting at position 1134 of SEQ ID NO: 586034
ccaggcuuucuagaaaugu

SEQ ID NO: 686991 - RNA, 19 nt, Artificial Sequence
  Description of Artificial Sequence: Synthetic oligonucleotide
  Antisense strand to SEQ ID NO: 686990
acauuucuagaaagccugg

SEQ ID NO: 686992 - RNA, 19 nt, Artificial Sequence
  Description of Artificial Sequence: Synthetic oligonucleotide
  Sense strand starting at position 1213 of SEQ ID NO: 586034
aacgacgauguauacaaua

SEQ ID NO: 686993 - RNA, 19 nt, Artificial Sequence
  Description of Artificial Sequence: Synthetic oligonucleotide
  Antisense strand to SEQ ID NO: 686992
uauuguauacaucgucguu

SEQ ID NO: 686994 - RNA, 19 nt, Artificial Sequence
  Description of Artificial Sequence: Synthetic oligonucleotide
  Sense strand starting at position 1245 of SEQ ID NO: 586034
ucaccuuaaaggugugaga

SEQ ID NO: 686995 - RNA, 19 nt, Artificial Sequence
  Description of Artificial Sequence: Synthetic oligonucleotide
  Antisense strand to SEQ ID NO: 686994
ucucacaccuuuaagguga

SEQ ID NO: 686996 - RNA, 19 nt, Artificial Sequence
  Description of Artificial Sequence: Synthetic oligonucleotide
  Sense strand starting at position 1247 of SEQ ID NO: 586034
accuuaaaggugugagaaa

SEQ ID NO: 686997 - RNA, 19 nt, Artificial Sequence
  Description of Artificial Sequence: Synthetic oligonucleotide
  Antisense strand to SEQ ID NO: 686996
uuucucacaccuuuaaggu

SEQ ID NO: 686998 - RNA, 19 nt, Artificial Sequence
  Description of Artificial Sequence: Synthetic oligonucleotide
  Sense strand starting at position 1310 of SEQ ID NO: 586034
guguaaguggcagagauag

SEQ ID NO: 686999 - RNA, 19 nt, Artificial Sequence
  Description of Artificial Sequence: Synthetic oligonucleotide
  Antisense strand to SEQ ID NO: 686998
cuaucucugccacuuacac

SEQ ID NO: 687000 - RNA, 19 nt, Artificial Sequence
  Description of Artificial Sequence: Synthetic oligonucleotide
  Sense strand starting at position 1376 of SEQ ID NO: 586034
auacuacuucgugacucua

SEQ ID NO: 687001 - RNA, 19 nt, Artificial Sequence
  Description of Artificial Sequence: Synthetic oligonucleotide
  Antisense strand to SEQ ID NO: 687000
uagagucacgaaguaguau

SEQ ID NO: 687002 - RNA, 19 nt, Artificial Sequence
  Description of Artificial Sequence: Synthetic oligonucleotide
  Sense strand starting at position 1787 of SEQ ID NO: 586034
gucuuccucagcgcgaaau

SEQ ID NO: 687003 - RNA, 19 nt, Artificial Sequence
  Description of Artificial Sequence: Synthetic oligonucleotide
  Antisense strand to SEQ ID NO: 687002
auuucgcgcugaggaagac

SEQ ID NO: 687004 - RNA, 19 nt, Artificial Sequence
  Description of Artificial Sequence: Synthetic oligonucleotide
  Sense strand starting at position 1797 of SEQ ID NO: 586034
gcgcgaaaucguucccaga

SEQ ID NO: 687005 - RNA, 19 nt, Artificial Sequence
  Description of Artificial Sequence: Synthetic oligonucleotide
  Antisense strand to SEQ ID NO: 687004
ucugggaacgauuucgcgc

SEQ ID NO: 687006 - RNA, 19 nt, Artificial Sequence
  Description of Artificial Sequence: Synthetic oligonucleotide
  Sense strand starting at position 2038 of SEQ ID NO: 586034
ggaagcacuucuccuagau

SEQ ID NO: 687007 - RNA, 19 nt, Artificial Sequence
  Description of Artificial Sequence: Synthetic oligonucleotide
  Antisense strand to SEQ ID NO: 687006
aucuaggagaagugcuucc

SEQ ID NO: 687008 - RNA, 19 nt, Artificial Sequence
  Description of Artificial Sequence: Synthetic oligonucleotide
  Sense strand starting at position 2505 of SEQ ID NO: 586034
guuugcucuguggugugaa

SEQ ID NO: 687009 - RNA, 19 nt, Artificial Sequence
  Description of Artificial Sequence: Synthetic oligonucleotide
  Antisense strand to SEQ ID NO: 687008
uucacaccacagagcaaac

SEQ ID NO: 687010 - RNA, 19 nt, Artificial Sequence
  Description of Artificial Sequence: Synthetic oligonucleotide
  Sense strand starting at position 2596 of SEQ ID NO: 586034
gccuuaucggccuuacugu

SEQ ID NO: 687011 - RNA, 19 nt, Artificial Sequence
  Description of Artificial Sequence: Synthetic oligonucleotide
  Antisense strand to SEQ ID NO: 687010
acaguaaggccgauaaggc

SEQ ID NO: 687012 - RNA, 19 nt, Artificial Sequence
  Description of Artificial Sequence: Synthetic oligonucleotide
  Sense strand starting at position 2620 of SEQ ID NO: 586034
aguuuacugugucugauuu

SEQ ID NO: 687013 - RNA, 19 nt, Artificial Sequence
  Description of Artificial Sequence: Synthetic oligonucleotide
  Antisense strand to SEQ ID NO: 687012
aaaucagacacaguaaacu

SEQ ID NO: 687014 - RNA, 19 nt, Artificial Sequence
  Description of Artificial Sequence: Synthetic oligonucleotide
  Sense strand starting at position 2655 of SEQ ID NO: 586034
ucaacuagucucuagugau

SEQ ID NO: 687015 - RNA, 19 nt, Artificial Sequence
  Description of Artificial Sequence: Synthetic oligonucleotide
  Antisense strand to SEQ ID NO: 687014
aucacuagagacuaguuga

SEQ ID NO: 687016 - RNA, 19 nt, Artificial Sequence
  Description of Artificial Sequence: Synthetic oligonucleotide
  Sense strand starting at position 2751 of SEQ ID NO: 586034
cugccauuaagguaaguga

SEQ ID NO: 687017 - RNA, 19 nt, Artificial Sequence
  Description of Artificial Sequence: Synthetic oligonucleotide
  Antisense strand to SEQ ID NO: 687016
ucacuuaccuuaauggcag

SEQ ID NO: 687018 - RNA, 19 nt, Artificial Sequence
  Description of Artificial Sequence: Synthetic oligonucleotide
  Sense strand starting at position 2754 of SEQ ID NO: 586034
ccauuaagguaagugaagu

SEQ ID NO: 687019 - RNA, 19 nt, Artificial Sequence
  Description of Artificial Sequence: Synthetic oligonucleotide
  Antisense strand to SEQ ID NO: 687018
acuucacuuaccuuaaugg

SEQ ID NO: 687020 - RNA, 19 nt, Artificial Sequence
  Description of Artificial Sequence: Synthetic oligonucleotide
  Sense strand starting at position 2797 of SEQ ID NO: 586034
ugagaauuggguugugaag

SEQ ID NO: 687021 - RNA, 19 nt, Artificial Sequence
  Description of Artificial Sequence: Synthetic oligonucleotide
  Antisense strand to SEQ ID NO: 687020
cuucacaacccaauucuca

SEQ ID NO: 687022 - RNA, 19 nt, Artificial Sequence
  Description of Artificial Sequence: Synthetic oligonucleotide
  Sense strand starting at position 2847 of SEQ ID NO: 586034
acuugagucucauccagau

SEQ ID NO: 687023 - RNA, 19 nt, Artificial Sequence
  Description of Artificial Sequence: Synthetic oligonucleotide
  Antisense strand to SEQ ID NO: 687022
aucuggaugagacucaagu

SEQ ID NO: 687024 - RNA, 19 nt, Artificial Sequence
  Description of Artificial Sequence: Synthetic oligonucleotide
  Sense strand starting at position 2868 of SEQ ID NO: 586034
ccuugacugcuggauuaag

SEQ ID NO: 687025 - RNA, 19 nt, Artificial Sequence
  Description of Artificial Sequence: Synthetic oligonucleotide
  Antisense strand to SEQ ID NO: 687024
cuuaauccagcagucaagg

SEQ ID NO: 687026 - RNA, 19 nt, Artificial Sequence
  Description of Artificial Sequence: Synthetic oligonucleotide
  Sense strand starting at position 2953 of SEQ ID NO: 586034
ccaagauaguggucuaagg

SEQ ID NO: 687027 - RNA, 19 nt, Artificial Sequence
  Description of Artificial Sequence: Synthetic oligonucleotide
  Antisense strand to SEQ ID NO: 687026
ccuuagaccacuaucuugg

SEQ ID NO: 687028 - RNA, 19 nt, Artificial Sequence
  Description of Artificial Sequence: Synthetic oligonucleotide
  Sense strand starting at position 2955 of SEQ ID NO: 586034
aagauaguggucuaagguc

SEQ ID NO: 687029 - RNA, 19 nt, Artificial Sequence
  Description of Artificial Sequence: Synthetic oligonucleotide
  Antisense strand to SEQ ID NO: 687028
gaccuuagaccacuaucuu

SEQ ID NO: 687030 - RNA, 19 nt, Artificial Sequence
  Description of Artificial Sequence: Synthetic oligonucleotide
  Sense strand starting at position 3022 of SEQ ID NO: 586034
acccgaauucgcuaagauu

SEQ ID NO: 687031 - RNA, 19 nt, Artificial Sequence
  Description of Artificial Sequence: Synthetic oligonucleotide
  Antisense strand to SEQ ID NO: 687030
aaucuuagcgaauucgggu

SEQ ID NO: 687032 - RNA, 19 nt, Artificial Sequence
  Description of Artificial Sequence: Synthetic oligonucleotide
  Sense strand starting at position 3147 of SEQ ID NO: 586034
gaggauuauugggcaucuu

SEQ ID NO: 687033 - RNA, 19 nt, Artificial Sequence
  Description of Artificial Sequence: Synthetic oligonucleotide
  Antisense strand to SEQ ID NO: 687032
aagaugcccaauaauccuc

SEQ ID NO: 687034 - RNA, 19 nt, Artificial Sequence
  Description of Artificial Sequence: Synthetic oligonucleotide
  Sense strand starting at position 3157 of SEQ ID NO: 586034
gggcaucuugagggauaag

SEQ ID NO: 687035 - RNA, 19 nt, Artificial Sequence
  Description of Artificial Sequence: Synthetic oligonucleotide
  Antisense strand to SEQ ID NO: 687034
cuuaucccucaagaugccc

SEQ ID NO: 687036 - RNA, 19 nt, Artificial Sequence
  Description of Artificial Sequence: Synthetic oligonucleotide
  Sense strand starting at position 3158 of SEQ ID NO: 586034
ggcaucuugagggauaagu

SEQ ID NO: 687037 - RNA, 19 nt, Artificial Sequence
  Description of Artificial Sequence: Synthetic oligonucleotide
  Antisense strand to SEQ ID NO: 687036
acuuaucccucaagaugcc

SEQ ID NO: 687038 - RNA, 19 nt, Artificial Sequence
  Description of Artificial Sequence: Synthetic oligonucleotide
  Sense strand starting at position 3226 of SEQ ID NO: 586034
gaagaagucugagugggac

SEQ ID NO: 687039 - RNA, 19 nt, Artificial Sequence
  Description of Artificial Sequence: Synthetic oligonucleotide
  Antisense strand to SEQ ID NO: 687038
gucccacucagacuucuuc

SEQ ID NO: 687040 - RNA, 19 nt, Artificial Sequence
  Description of Artificial Sequence: Synthetic oligonucleotide
  Sense strand starting at position 3228 of SEQ ID NO: 586034
agaagucugagugggacau

SEQ ID NO: 687041 - RNA, 19 nt, Artificial Sequence
  Description of Artificial Sequence: Synthetic oligonucleotide
  Antisense strand to SEQ ID NO: 687040
augucccacucagacuucu

SEQ ID NO: 687042 - RNA, 19 nt, Artificial Sequence
  Description of Artificial Sequence: Synthetic oligonucleotide
  Sense strand starting at position 3229 of SEQ ID NO: 586034
gaagucugagugggacauu

SEQ ID NO: 687043 - RNA, 19 nt, Artificial Sequence
  Description of Artificial Sequence: Synthetic oligonucleotide
  Antisense strand to SEQ ID NO: 687042
aaugucccacucagacuuc

SEQ ID NO: 687044 - RNA, 19 nt, Artificial Sequence
  Description of Artificial Sequence: Synthetic oligonucleotide
  Sense strand starting at position 3284 of SEQ ID NO: 586034
cgaagugugaaggaguaca

SEQ ID NO: 687045 - RNA, 19 nt, Artificial Sequence
  Description of Artificial Sequence: Synthetic oligonucleotide
  Antisense strand to SEQ ID NO: 687044
uguacuccuucacacuucg

SEQ ID NO: 687046 - RNA, 19 nt, Artificial Sequence
  Description of Artificial Sequence: Synthetic oligonucleotide
  Sense strand starting at position 3329 of SEQ ID NO: 586034
cgaaucaaugaaugcaaga

SEQ ID NO: 687047 - RNA, 19 nt, Artificial Sequence
  Description of Artificial Sequence: Synthetic oligonucleotide
  Antisense strand to SEQ ID NO: 687046
ucuugcauucauugauucg

SEQ ID NO: 687048 - RNA, 19 nt, Artificial Sequence
  Description of Artificial Sequence: Synthetic oligonucleotide
  Sense strand starting at position 3392 of SEQ ID NO: 586034
cuuggcuuucuagauacau

SEQ ID NO: 687049 - RNA, 19 nt, Artificial Sequence
  Description of Artificial Sequence: Synthetic oligonucleotide
  Antisense strand to SEQ ID NO: 687048
auguaucuagaaagccaag

SEQ ID NO: 687050 - RNA, 19 nt, Artificial Sequence
  Description of Artificial Sequence: Synthetic oligonucleotide
  Sense strand starting at position 3445 of SEQ ID NO: 586034
uaguuaguuguggaaauag

SEQ ID NO: 687051 - RNA, 19 nt, Artificial Sequence
  Description of Artificial Sequence: Synthetic oligonucleotide
  Antisense strand to SEQ ID NO: 687050
cuauuuccacaacuaacua

SEQ ID NO: 687052 - RNA, 19 nt, Artificial Sequence
  Description of Artificial Sequence: Synthetic oligonucleotide
  Sense strand starting at position 3454 of SEQ ID NO: 586034
guggaaauagccuaccagu

SEQ ID NO: 687053 - RNA, 19 nt, Artificial Sequence
  Description of Artificial Sequence: Synthetic oligonucleotide
  Antisense strand to SEQ ID NO: 687052
acugguaggcuauuuccac

SEQ ID NO: 687054 - RNA, 19 nt, Artificial Sequence
  Description of Artificial Sequence: Synthetic oligonucleotide
  Sense strand starting at position 3570 of SEQ ID NO: 586034
guuggcucuguugaggaau

SEQ ID NO: 687055 - RNA, 19 nt, Artificial Sequence
  Description of Artificial Sequence: Synthetic oligonucleotide
  Antisense strand to SEQ ID NO: 687054
auuccucaacagagccaac

SEQ ID NO: 687056 - RNA, 19 nt, Artificial Sequence
  Description of Artificial Sequence: Synthetic oligonucleotide
  Sense strand starting at position 3594 of SEQ ID NO: 586034
gagggaaauuccuucuguu

SEQ ID NO: 687057 - RNA, 19 nt, Artificial Sequence
  Description of Artificial Sequence: Synthetic oligonucleotide
  Antisense strand to SEQ ID NO: 687056
aacagaaggaauuucccuc

SEQ ID NO: 687058 - RNA, 19 nt, Artificial Sequence
  Description of Artificial Sequence: Synthetic oligonucleotide
  Sense strand starting at position 3628 of SEQ ID NO: 586034
cuaauaaggcagugugaaa

SEQ ID NO: 687059 - RNA, 19 nt, Artificial Sequence
  Description of Artificial Sequence: Synthetic oligonucleotide
  Antisense strand to SEQ ID NO: 687058
uuucacacugccuuauuag

SEQ ID NO: 687060 - RNA, 19 nt, Artificial Sequence
  Description of Artificial Sequence: Synthetic oligonucleotide
  Sense strand starting at position 3635 of SEQ ID NO: 586034
ggcagugugaaauacugua

SEQ ID NO: 687061 - RNA, 19 nt, Artificial Sequence
  Description of Artificial Sequence: Synthetic oligonucleotide
  Antisense strand to SEQ ID NO: 687060
uacaguauuucacacugcc

SEQ ID NO: 687062 - RNA, 19 nt, Artificial Sequence
  Description of Artificial Sequence: Synthetic oligonucleotide
  Sense strand starting at position 191 of SEQ ID NO: 586035
gaauuuccuuuagggauga

SEQ ID NO: 687063 - RNA, 19 nt, Artificial Sequence
  Description of Artificial Sequence: Synthetic oligonucleotide
  Antisense strand to SEQ ID NO: 687062
ucaucccuaaaggaaauuc

SEQ ID NO: 687064 - RNA, 19 nt, Artificial Sequence
  Description of Artificial Sequence: Synthetic oligonucleotide
  Sense strand starting at position 206 of SEQ ID NO: 586035
augagagauucuuugaccu

SEQ ID NO: 687065 - RNA, 19 nt, Artificial Sequence
  Description of Artificial Sequence: Synthetic oligonucleotide
  Antisense strand to SEQ ID NO: 687064
aggucaaagaaucucucau

SEQ ID NO: 687066 - RNA, 19 nt, Artificial Sequence
  Description of Artificial Sequence: Synthetic oligonucleotide
  Sense strand starting at position 322 of SEQ ID NO: 586035
ggagaauacucuuucccag

SEQ ID NO: 687067 - RNA, 19 nt, Artificial Sequence
  Description of Artificial Sequence: Synthetic oligonucleotide
  Antisense strand to SEQ ID NO: 687066
cugggaaagaguauucucc

SEQ ID NO: 687068 - RNA, 19 nt, Artificial Sequence
  Description of Artificial Sequence: Synthetic oligonucleotide
  Sense strand starting at position 392 of SEQ ID NO: 586035
ugaaguguuccugaccacu

SEQ ID NO: 687069 - RNA, 19 nt, Artificial Sequence
  Description of Artificial Sequence: Synthetic oligonucleotide
  Antisense strand to SEQ ID NO: 687068
aguggucaggaacacuuca

SEQ ID NO: 687070 - RNA, 19 nt, Artificial Sequence
  Description of Artificial Sequence: Synthetic oligonucleotide
  Sense strand starting at position 503 of SEQ ID NO: 586035
auacucuauguaugauaga

SEQ ID NO: 687071 - RNA, 19 nt, Artificial Sequence
  Description of Artificial Sequence: Synthetic oligonucleotide
  Antisense strand to SEQ ID NO: 687070
ucuaucauacauagaguau

SEQ ID NO: 687072 - RNA, 19 nt, Artificial Sequence
  Description of Artificial Sequence: Synthetic oligonucleotide
  Sense strand starting at position 777 of SEQ ID NO: 586035
gaaucaugaguuugccaag

SEQ ID NO: 687073 - RNA, 19 nt, Artificial Sequence
  Description of Artificial Sequence: Synthetic oligonucleotide
  Antisense strand to SEQ ID NO: 687072
cuuggcaaacucaugauuc

SEQ ID NO: 687074 - RNA, 19 nt, Artificial Sequence
  Description of Artificial Sequence: Synthetic oligonucleotide
  Sense strand starting at position 827 of SEQ ID NO: 586035
ggaagaugguaggucugaa

SEQ ID NO: 687075 - RNA, 19 nt, Artificial Sequence
  Description of Artificial Sequence: Synthetic oligonucleotide
  Antisense strand to SEQ ID NO: 687074
uucagaccuaccaucuucc

SEQ ID NO: 687076 - RNA, 19 nt, Artificial Sequence
  Description of Artificial Sequence: Synthetic oligonucleotide
  Sense strand starting at position 985 of SEQ ID NO: 586035
auuauaauuguccaguuac

SEQ ID NO: 687077 - RNA, 19 nt, Artificial Sequence
  Description of Artificial Sequence: Synthetic oligonucleotide
  Antisense strand to SEQ ID NO: 687076
guaacuggacaauuauaau

SEQ ID NO: 687078 - RNA, 19 nt, Artificial Sequence
  Description of Artificial Sequence: Synthetic oligonucleotide
  Sense strand starting at position 1086 of SEQ ID NO: 586035
caaguuugagcagaguuaa

SEQ ID NO: 687079 - RNA, 19 nt, Artificial Sequence
  Description of Artificial Sequence: Synthetic oligonucleotide
  Antisense strand to SEQ ID NO: 687078
uuaacucugcucaaacuug

SEQ ID NO: 687080 - RNA, 19 nt, Artificial Sequence
  Description of Artificial Sequence: Synthetic oligonucleotide
  Sense strand starting at position 1297 of SEQ ID NO: 586035
ccaaaugaguuucugauug

SEQ ID NO: 687081 - RNA, 19 nt, Artificial Sequence
  Description of Artificial Sequence: Synthetic oligonucleotide
  Antisense strand to SEQ ID NO: 687080
caaucagaaacucauuugg

SEQ ID NO: 687082 - RNA, 19 nt, Artificial Sequence
  Description of Artificial Sequence: Synthetic oligonucleotide
  Sense strand starting at position 1445 of SEQ ID NO: 586035
ggauuccuauuugagacaa

SEQ ID NO: 687083 - RNA, 19 nt, Artificial Sequence
  Description of Artificial Sequence: Synthetic oligonucleotide
  Antisense strand to SEQ ID NO: 687082
uugucucaaauaggaaucc

SEQ ID NO: 687084 - RNA, 19 nt, Artificial Sequence
  Description of Artificial Sequence: Synthetic oligonucleotide
  Sense strand starting at position 1447 of SEQ ID NO: 586035
auuccuauuugagacaaga

SEQ ID NO: 687085 - RNA, 19 nt, Artificial Sequence
  Description of Artificial Sequence: Synthetic oligonucleotide
  Antisense strand to SEQ ID NO: 687084
ucuugucucaaauaggaau

SEQ ID NO: 687086 - RNA, 19 nt, Artificial Sequence
  Description of Artificial Sequence: Synthetic oligonucleotide
  Sense strand starting at position 1532 of SEQ ID NO: 586035
uagucaguacuggagcauu

SEQ ID NO: 687087 - RNA, 19 nt, Artificial Sequence
  Description of Artificial Sequence: Synthetic oligonucleotide
  Antisense strand to SEQ ID NO: 687086
aaugcuccaguacugacua

SEQ ID NO: 687088 - RNA, 19 nt, Artificial Sequence
  Description of Artificial Sequence: Synthetic oligonucleotide
  Sense strand starting at position 1994 of SEQ ID NO: 586035
cgucaagucaacuacggau

SEQ ID NO: 687089 - RNA, 19 nt, Artificial Sequence
  Description of Artificial Sequence: Synthetic oligonucleotide
  Antisense strand to SEQ ID NO: 687088
auccguaguugacuugacg

SEQ ID NO: 687090 - RNA, 19 nt, Artificial Sequence
  Description of Artificial Sequence: Synthetic oligonucleotide
  Sense strand starting at position 2049 of SEQ ID NO: 586035
gcgguuagaacccacagaa

SEQ ID NO: 687091 - RNA, 19 nt, Artificial Sequence
  Description of Artificial Sequence: Synthetic oligonucleotide
  Antisense strand to SEQ ID NO: 687090
uucuguggguucuaaccgc

SEQ ID NO: 687092 - RNA, 19 nt, Artificial Sequence
  Description of Artificial Sequence: Synthetic oligonucleotide
  Sense strand starting at position 2212 of SEQ ID NO: 586035
auguauguugacugggaga

SEQ ID NO: 687093 - RNA, 19 nt, Artificial Sequence
  Description of Artificial Sequence: Synthetic oligonucleotide
  Antisense strand to SEQ ID NO: 687092
ucucccagucaacauacau

SEQ ID NO: 687094 - RNA, 19 nt, Artificial Sequence
  Description of Artificial Sequence: Synthetic oligonucleotide
  Sense strand starting at position 2214 of SEQ ID NO: 586035
guauguugacugggagaaa

SEQ ID NO: 687095 - RNA, 19 nt, Artificial Sequence
  Description of Artificial Sequence: Synthetic oligonucleotide
  Antisense strand to SEQ ID NO: 687094
uuucucccagucaacauac

SEQ ID NO: 687096 - RNA, 19 nt, Artificial Sequence
  Description of Artificial Sequence: Synthetic oligonucleotide
  Sense strand starting at position 2242 of SEQ ID NO: 586035
cgagaauugccuuuggcgu

SEQ ID NO: 687097 - RNA, 19 nt, Artificial Sequence
  Description of Artificial Sequence: Synthetic oligonucleotide
  Antisense strand to SEQ ID NO: 687096
acgccaaaggcaauucucg

SEQ ID NO: 687098 - RNA, 19 nt, Artificial Sequence
  Description of Artificial Sequence: Synthetic oligonucleotide
  Sense strand starting at position 2355 of SEQ ID NO: 586035
ucaauacuugcaugagaga

SEQ ID NO: 687099 - RNA, 19 nt, Artificial Sequence
  Description of Artificial Sequence: Synthetic oligonucleotide
  Antisense strand to SEQ ID NO: 687098
ucucucaugcaaguauuga

SEQ ID NO: 687100 - RNA, 19 nt, Artificial Sequence
  Description of Artificial Sequence: Synthetic oligonucleotide
  Sense strand starting at position 2431 of SEQ ID NO: 586035
uaaucagauuucgcgccaa

SEQ ID NO: 687101 - RNA, 19 nt, Artificial Sequence
  Description of Artificial Sequence: Synthetic oligonucleotide
  Antisense strand to SEQ ID NO: 687100
uuggcgcgaaaucugauua

SEQ ID NO: 687102 - RNA, 19 nt, Artificial Sequence
  Description of Artificial Sequence: Synthetic oligonucleotide
  Sense strand starting at position 2435 of SEQ ID NO: 586035
cagauuucgcgccaaauua

SEQ ID NO: 687103 - RNA, 19 nt, Artificial Sequence
  Description of Artificial Sequence: Synthetic oligonucleotide
  Antisense strand to SEQ ID NO: 687102
uaauuuggcgcgaaaucug

SEQ ID NO: 687104 - RNA, 19 nt, Artificial Sequence
  Description of Artificial Sequence: Synthetic oligonucleotide
  Sense strand starting at position 2556 of SEQ ID NO: 586035
gagagugauuaacaauuug

SEQ ID NO: 687105 - RNA, 19 nt, Artificial Sequence
  Description of Artificial Sequence: Synthetic oligonucleotide
  Antisense strand to SEQ ID NO: 687104
caaauuguuaaucacucuc

SEQ ID NO: 687106 - RNA, 19 nt, Artificial Sequence
  Description of Artificial Sequence: Synthetic oligonucleotide
  Sense strand starting at position 2928 of SEQ ID NO: 586035
gcuccauguccucauauua

SEQ ID NO: 687107 - RNA, 19 nt, Artificial Sequence
  Description of Artificial Sequence: Synthetic oligonucleotide
  Antisense strand to SEQ ID NO: 687106
uaauaugaggacauggagc

SEQ ID NO: 687108 - RNA, 19 nt, Artificial Sequence
  Description of Artificial Sequence: Synthetic oligonucleotide
  Sense strand starting at position 2958 of SEQ ID NO: 586035
auacguugccuagaccuau

SEQ ID NO: 687109 - RNA, 19 nt, Artificial Sequence
  Description of Artificial Sequence: Synthetic oligonucleotide
  Antisense strand to SEQ ID NO: 687108
auaggucuaggcaacguau

SEQ ID NO: 687110 - RNA, 19 nt, Artificial Sequence
  Description of Artificial Sequence: Synthetic oligonucleotide
  Sense strand starting at position 3078 of SEQ ID NO: 586035
gagaauguaugguuucuuu

SEQ ID NO: 687111 - RNA, 19 nt, Artificial Sequence
  Description of Artificial Sequence: Synthetic oligonucleotide
  Antisense strand to SEQ ID NO: 687110
aaagaaaccauacauucuc

SEQ ID NO: 687112 - RNA, 19 nt, Artificial Sequence
  Description of Artificial Sequence: Synthetic oligonucleotide
  Sense strand starting at position 3138 of SEQ ID NO: 586035
guugcuagauugguagaga

SEQ ID NO: 687113 - RNA, 19 nt, Artificial Sequence
  Description of Artificial Sequence: Synthetic oligonucleotide
  Antisense strand to SEQ ID NO: 687112
ucucuaccaaucuagcaac

SEQ ID NO: 687114 - RNA, 19 nt, Artificial Sequence
  Description of Artificial Sequence: Synthetic oligonucleotide
  Sense strand starting at position 3177 of SEQ ID NO: 586035
guuggauaaccauaacugu

SEQ ID NO: 687115 - RNA, 19 nt, Artificial Sequence
  Description of Artificial Sequence: Synthetic oligonucleotide
  Antisense strand to SEQ ID NO: 687114
acaguuaugguuauccaac

SEQ ID NO: 687116 - RNA, 19 nt, Artificial Sequence
  Description of Artificial Sequence: Synthetic oligonucleotide
  Sense strand starting at position 3306 of SEQ ID NO: 586035
uuaauuguucuagguggga

SEQ ID NO: 687117 - RNA, 19 nt, Artificial Sequence
  Description of Artificial Sequence: Synthetic oligonucleotide
  Antisense strand to SEQ ID NO: 687116
ucccaccuagaacaauuaa

SEQ ID NO: 687118 - RNA, 19 nt, Artificial Sequence
  Description of Artificial Sequence: Synthetic oligonucleotide
  Sense strand starting at position 3308 of SEQ ID NO: 586035
aauuguucuaggugggauc

SEQ ID NO: 687119 - RNA, 19 nt, Artificial Sequence
  Description of Artificial Sequence: Synthetic oligonucleotide
  Antisense strand to SEQ ID NO: 687118
gaucccaccuagaacaauu

SEQ ID NO: 687120 - RNA, 19 nt, Artificial Sequence
  Description of Artificial Sequence: Synthetic oligonucleotide
  Sense strand starting at position 3320 of SEQ ID NO: 586035
ugggauccuaaaugucagu

SEQ ID NO: 687121 - RNA, 19 nt, Artificial Sequence
  Description of Artificial Sequence: Synthetic oligonucleotide
  Antisense strand to SEQ ID NO: 687120
acugacauuuaggauccca

SEQ ID NO: 687122 - RNA, 19 nt, Artificial Sequence
  Description of Artificial Sequence: Synthetic oligonucleotide
  Sense strand starting at position 3326 of SEQ ID NO: 586035
ccuaaaugucaguaucuuu

SEQ ID NO: 687123 - RNA, 19 nt, Artificial Sequence
  Description of Artificial Sequence: Synthetic oligonucleotide
  Antisense strand to SEQ ID NO: 687122
aaagauacugacauuuagg

SEQ ID NO: 687124 - RNA, 19 nt, Artificial Sequence
  Description of Artificial Sequence: Synthetic oligonucleotide
  Sense strand starting at position 3569 of SEQ ID NO: 586035
agcauuugcugagcaucaa

SEQ ID NO: 687125 - RNA, 19 nt, Artificial Sequence
  Description of Artificial Sequence: Synthetic oligonucleotide
  Antisense strand to SEQ ID NO: 687124
uugaugcucagcaaaugcu

SEQ ID NO: 687126 - RNA, 19 nt, Artificial Sequence
  Description of Artificial Sequence: Synthetic oligonucleotide
  Sense strand starting at position 3604 of SEQ ID NO: 586035
uuucuagggucuuuauauu

SEQ ID NO: 687127 - RNA, 19 nt, Artificial Sequence
  Description of Artificial Sequence: Synthetic oligonucleotide
  Antisense strand to SEQ ID NO: 687126
aauauaaagacccuagaaa

SEQ ID NO: 687128 - RNA, 19 nt, Artificial Sequence
  Description of Artificial Sequence: Synthetic oligonucleotide
  Sense strand starting at position 3707 of SEQ ID NO: 586035
gauaacuugcacuagguca

SEQ ID NO: 687129 - RNA, 19 nt, Artificial Sequence
  Description of Artificial Sequence: Synthetic oligonucleotide
  Antisense strand to SEQ ID NO: 687128
ugaccuagugcaaguuauc

SEQ ID NO: 687130 - RNA, 19 nt, Artificial Sequence
  Description of Artificial Sequence: Synthetic oligonucleotide
  Sense strand starting at position 3734 of SEQ ID NO: 586035
aaggaugaguauuccacau

SEQ ID NO: 687131 - RNA, 19 nt, Artificial Sequence
  Description of Artificial Sequence: Synthetic oligonucleotide
  Antisense strand to SEQ ID NO: 687130
auguggaauacucauccuu

SEQ ID NO: 687132 - RNA, 19 nt, Artificial Sequence
  Description of Artificial Sequence: Synthetic oligonucleotide
  Sense strand starting at position 3804 of SEQ ID NO: 586035
ugacuaugaugucuuucua

SEQ ID NO: 687133 - RNA, 19 nt, Artificial Sequence
  Description of Artificial Sequence: Synthetic oligonucleotide
  Antisense strand to SEQ ID NO: 687132
uagaaagacaucauaguca

SEQ ID NO: 687134 - RNA, 19 nt, Artificial Sequence
  Description of Artificial Sequence: Synthetic oligonucleotide
  Sense strand starting at position 3852 of SEQ ID NO: 586035
aucaucuuaugucugagaa

SEQ ID NO: 687135 - RNA, 19 nt, Artificial Sequence
  Description of Artificial Sequence: Synthetic oligonucleotide
  Antisense strand to SEQ ID NO: 687134
uucucagacauaagaugau

SEQ ID NO: 687136 - RNA, 19 nt, Artificial Sequence
  Description of Artificial Sequence: Synthetic oligonucleotide
  Sense strand starting at position 3853 of SEQ ID NO: 586035
ucaucuuaugucugagaaa

SEQ ID NO: 687137 - RNA, 19 nt, Artificial Sequence
  Description of Artificial Sequence: Synthetic oligonucleotide
  Antisense strand to SEQ ID NO: 687136
uuucucagacauaagauga

SEQ ID NO: 687138 - RNA, 19 nt, Artificial Sequence
  Description of Artificial Sequence: Synthetic oligonucleotide
  Sense strand starting at position 3975 of SEQ ID NO: 586035
uguguacucuuauuugcau

SEQ ID NO: 687139 - RNA, 19 nt, Artificial Sequence
  Description of Artificial Sequence: Synthetic oligonucleotide
  Antisense strand to SEQ ID NO: 687138
augcaaauaagaguacaca

SEQ ID NO: 687140 - RNA, 19 nt, Artificial Sequence
  Description of Artificial Sequence: Synthetic oligonucleotide
  Sense strand starting at position 3976 of SEQ ID NO: 586035
guguacucuuauuugcaua

SEQ ID NO: 687141 - RNA, 19 nt, Artificial Sequence
  Description of Artificial Sequence: Synthetic oligonucleotide
  Antisense strand to SEQ ID NO: 687140
uaugcaaauaagaguacac

SEQ ID NO: 687142 - RNA, 19 nt, Artificial Sequence
  Description of Artificial Sequence: Synthetic oligonucleotide
  Sense strand starting at position 74 of SEQ ID NO: 586036
cccaguugcuaugacugua

SEQ ID NO: 687143 - RNA, 19 nt, Artificial Sequence
  Description of Artificial Sequence: Synthetic oligonucleotide
  Antisense strand to SEQ ID NO: 687142
uacagucauagcaacuggg

SEQ ID NO: 687144 - RNA, 19 nt, Artificial Sequence
  Description of Artificial Sequence: Synthetic oligonucleotide
  Sense strand starting at position 77 of SEQ ID NO: 586036
aguugcuaugacuguagaa

SEQ ID NO: 687145 - RNA, 19 nt, Artificial Sequence
  Description of Artificial Sequence: Synthetic oligonucleotide
  Antisense strand to SEQ ID NO: 687144
uucuacagucauagcaacu

SEQ ID NO: 687146 - RNA, 19 nt, Artificial Sequence
  Description of Artificial Sequence: Synthetic oligonucleotide
  Sense strand starting at position 79 of SEQ ID NO: 586036
uugcuaugacuguagaaau

SEQ ID NO: 687147 - RNA, 19 nt, Artificial Sequence
  Description of Artificial Sequence: Synthetic oligonucleotide
  Antisense strand to SEQ ID NO: 687146
auuucuacagucauagcaa

SEQ ID NO: 687148 - RNA, 19 nt, Artificial Sequence
  Description of Artificial Sequence: Synthetic oligonucleotide
  Sense strand starting at position 257 of SEQ ID NO: 586036
cuccauugcucagagcaga

SEQ ID NO: 687149 - RNA, 19 nt, Artificial Sequence
  Description of Artificial Sequence: Synthetic oligonucleotide
  Antisense strand to SEQ ID NO: 687148
ucugcucugagcaauggag

SEQ ID NO: 687150 - RNA, 19 nt, Artificial Sequence
  Description of Artificial Sequence: Synthetic oligonucleotide
  Sense strand starting at position 274 of SEQ ID NO: 586036
gagcuuugcccagguggaa

SEQ ID NO: 687151 - RNA, 19 nt, Artificial Sequence
  Description of Artificial Sequence: Synthetic oligonucleotide
  Antisense strand to SEQ ID NO: 687150
uuccaccugggcaaagcuc

SEQ ID NO: 687152 - RNA, 19 nt, Artificial Sequence
  Description of Artificial Sequence: Synthetic oligonucleotide
  Sense strand starting at position 775 of SEQ ID NO: 586036
gggucauuccuggaaguug

SEQ ID NO: 687153 - RNA, 19 nt, Artificial Sequence
  Description of Artificial Sequence: Synthetic oligonucleotide
  Antisense strand to SEQ ID NO: 687152
caacuuccaggaaugaccc

SEQ ID NO: 687154 - RNA, 19 nt, Artificial Sequence
  Description of Artificial Sequence: Synthetic oligonucleotide
  Sense strand starting at position 808 of SEQ ID NO: 586036
gcugcauuggcacgagaca

SEQ ID NO: 687155 - RNA, 19 nt, Artificial Sequence
  Description of Artificial Sequence: Synthetic oligonucleotide
  Antisense strand to SEQ ID NO: 687154
ugucucgugccaaugcagc

SEQ ID NO: 687156 - RNA, 19 nt, Artificial Sequence
  Description of Artificial Sequence: Synthetic oligonucleotide
  Sense strand starting at position 1075 of SEQ ID NO: 586036
gaccaagacuacuggguau

SEQ ID NO: 687157 - RNA, 19 nt, Artificial Sequence
  Description of Artificial Sequence: Synthetic oligonucleotide
  Antisense strand to SEQ ID NO: 687156
auacccaguagucuugguc

SEQ ID NO: 687158 - RNA, 19 nt, Artificial Sequence
  Description of Artificial Sequence: Synthetic oligonucleotide
  Sense strand starting at position 1077 of SEQ ID NO: 586036
ccaagacuacuggguauua

SEQ ID NO: 687159 - RNA, 19 nt, Artificial Sequence
  Description of Artificial Sequence: Synthetic oligonucleotide
  Antisense strand to SEQ ID NO: 687158
uaauacccaguagucuugg

SEQ ID NO: 687160 - RNA, 19 nt, Artificial Sequence
  Description of Artificial Sequence: Synthetic oligonucleotide
  Sense strand starting at position 1078 of SEQ ID NO: 586036
caagacuacuggguauuau

SEQ ID NO: 687161 - RNA, 19 nt, Artificial Sequence
  Description of Artificial Sequence: Synthetic oligonucleotide
  Antisense strand to SEQ ID NO: 687160
auaauacccaguagucuug

SEQ ID NO: 687162 - RNA, 19 nt, Artificial Sequence
  Description of Artificial Sequence: Synthetic oligonucleotide
  Sense strand starting at position 1202 of SEQ ID NO: 586036
cugggaugcucaccaggaa

SEQ ID NO: 687163 - RNA, 19 nt, Artificial Sequence
  Description of Artificial Sequence: Synthetic oligonucleotide
  Antisense strand to SEQ ID NO: 687162
uuccuggugagcaucccag

SEQ ID NO: 687164 - RNA, 19 nt, Artificial Sequence
  Description of Artificial Sequence: Synthetic oligonucleotide
  Sense strand starting at position 1252 of SEQ ID NO: 586036
gguggcugcuccaggaaga

SEQ ID NO: 687165 - RNA, 19 nt, Artificial Sequence
  Description of Artificial Sequence: Synthetic oligonucleotide
  Antisense strand to SEQ ID NO: 687164
ucuuccuggagcagccacc

SEQ ID NO: 687166 - RNA, 19 nt, Artificial Sequence
  Description of Artificial Sequence: Synthetic oligonucleotide
  Sense strand starting at position 1288 of SEQ ID NO: 586036
agcgcugccuccucaguua

SEQ ID NO: 687167 - RNA, 19 nt, Artificial Sequence
  Description of Artificial Sequence: Synthetic oligonucleotide
  Antisense strand to SEQ ID NO: 687166
uaacugaggaggcagcgcu

SEQ ID NO: 687168 - RNA, 19 nt, Artificial Sequence
  Description of Artificial Sequence: Synthetic oligonucleotide
  Sense strand starting at position 1303 of SEQ ID NO: 586036
guuaggucuugguggguga

SEQ ID NO: 687169 - RNA, 19 nt, Artificial Sequence
  Description of Artificial Sequence: Synthetic oligonucleotide
  Antisense strand to SEQ ID NO: 687168
ucacccaccaagaccuaac

SEQ ID NO: 687170 - RNA, 19 nt, Artificial Sequence
  Description of Artificial Sequence: Synthetic oligonucleotide
  Sense strand starting at position 1441 of SEQ ID NO: 586036
gggagcauggcugagacau

SEQ ID NO: 687171 - RNA, 19 nt, Artificial Sequence
  Description of Artificial Sequence: Synthetic oligonucleotide
  Antisense strand to SEQ ID NO: 687170
augucucagccaugcuccc

SEQ ID NO: 687172 - RNA, 19 nt, Artificial Sequence
  Description of Artificial Sequence: Synthetic oligonucleotide
  Sense strand starting at position 1826 of SEQ ID NO: 586036
gggcacuuaggucagaguu

SEQ ID NO: 687173 - RNA, 19 nt, Artificial Sequence
  Description of Artificial Sequence: Synthetic oligonucleotide
  Antisense strand to SEQ ID NO: 687172
aacucugaccuaagugccc

SEQ ID NO: 687174 - RNA, 19 nt, Artificial Sequence
  Description of Artificial Sequence: Synthetic oligonucleotide
  Sense strand starting at position 1828 of SEQ ID NO: 586036
gcacuuaggucagaguuau

SEQ ID NO: 687175 - RNA, 19 nt, Artificial Sequence
  Description of Artificial Sequence: Synthetic oligonucleotide
  Antisense strand to SEQ ID NO: 687174
auaacucugaccuaagugc

SEQ ID NO: 687176 - RNA, 19 nt, Artificial Sequence
  Description of Artificial Sequence: Synthetic oligonucleotide
  Sense strand starting at position 1834 of SEQ ID NO: 586036
aggucagaguuauaauuaa

SEQ ID NO: 687177 - RNA, 19 nt, Artificial Sequence
  Description of Artificial Sequence: Synthetic oligonucleotide
  Antisense strand to SEQ ID NO: 687176
uuaauuauaacucugaccu

SEQ ID NO: 687178 - RNA, 19 nt, Artificial Sequence
  Description of Artificial Sequence: Synthetic oligonucleotide
  Sense strand starting at position 1842 of SEQ ID NO: 586036
guuauaauuaaccgaggcu

SEQ ID NO: 687179 - RNA, 19 nt, Artificial Sequence
  Description of Artificial Sequence: Synthetic oligonucleotide
  Antisense strand to SEQ ID NO: 687178
agccucgguuaauuauaac

SEQ ID NO: 687180 - RNA, 19 nt, Artificial Sequence
  Description of Artificial Sequence: Synthetic oligonucleotide
  Sense strand starting at position 2397 of SEQ ID NO: 586036
acaacaaaguuggaaagau

SEQ ID NO: 687181 - RNA, 19 nt, Artificial Sequence
  Description of Artificial Sequence: Synthetic oligonucleotide
  Antisense strand to SEQ ID NO: 687180
aucuuuccaacuuuguugu

SEQ ID NO: 687182 - RNA, 19 nt, Artificial Sequence
  Description of Artificial Sequence: Synthetic oligonucleotide
  Sense strand starting at position 2845 of SEQ ID NO: 586036
cccaguaggcuugaaagua

SEQ ID NO: 687183 - RNA, 19 nt, Artificial Sequence
  Description of Artificial Sequence: Synthetic oligonucleotide
  Antisense strand to SEQ ID NO: 687182
uacuuucaagccuacuggg

SEQ ID NO: 687184 - RNA, 19 nt, Artificial Sequence
  Description of Artificial Sequence: Synthetic oligonucleotide
  Sense strand starting at position 2920 of SEQ ID NO: 586036
gcaugcagguuuccacauu

SEQ ID NO: 687185 - RNA, 19 nt, Artificial Sequence
  Description of Artificial Sequence: Synthetic oligonucleotide
  Antisense strand to SEQ ID NO: 687184
aauguggaaaccugcaugc

SEQ ID NO: 687186 - RNA, 19 nt, Artificial Sequence
  Description of Artificial Sequence: Synthetic oligonucleotide
  Sense strand starting at position 2962 of SEQ ID NO: 586036
agggucuggcugggagaua

SEQ ID NO: 687187 - RNA, 19 nt, Artificial Sequence
  Description of Artificial Sequence: Synthetic oligonucleotide
  Antisense strand to SEQ ID NO: 687186
uaucucccagccagacccu

SEQ ID NO: 687188 - RNA, 19 nt, Artificial Sequence
  Description of Artificial Sequence: Synthetic oligonucleotide
  Sense strand starting at position 3078 of SEQ ID NO: 586036
uucuauggucccugcucaa

SEQ ID NO: 687189 - RNA, 19 nt, Artificial Sequence
  Description of Artificial Sequence: Synthetic oligonucleotide
  Antisense strand to SEQ ID NO: 687188
uugagcagggaccauagaa

SEQ ID NO: 687190 - RNA, 19 nt, Artificial Sequence
  Description of Artificial Sequence: Synthetic oligonucleotide
  Sense strand starting at position 3520 of SEQ ID NO: 586036
aucuguaacugguuacgau

SEQ ID NO: 687191 - RNA, 19 nt, Artificial Sequence
  Description of Artificial Sequence: Synthetic oligonucleotide
  Antisense strand to SEQ ID NO: 687190
aucguaaccaguuacagau

SEQ ID NO: 687192 - RNA, 19 nt, Artificial Sequence
  Description of Artificial Sequence: Synthetic oligonucleotide
  Sense strand starting at position 3524 of SEQ ID NO: 586036
guaacugguuacgaucaau

SEQ ID NO: 687193 - RNA, 19 nt, Artificial Sequence
  Description of Artificial Sequence: Synthetic oligonucleotide
  Antisense strand to SEQ ID NO: 687192
auugaucguaaccaguuac

SEQ ID NO: 687194 - RNA, 19 nt, Artificial Sequence
  Description of Artificial Sequence: Synthetic oligonucleotide
  Sense strand starting at position 3534 of SEQ ID NO: 586036
acgaucaauuaguugucaa

SEQ ID NO: 687195 - RNA, 19 nt, Artificial Sequence
  Description of Artificial Sequence: Synthetic oligonucleotide
  Antisense strand to SEQ ID NO: 687194
uugacaacuaauugaucgu

SEQ ID NO: 687196 - RNA, 19 nt, Artificial Sequence
  Description of Artificial Sequence: Synthetic oligonucleotide
  Sense strand starting at position 166 of SEQ ID NO: 586037
gaaggcaacgauuaguaau

SEQ ID NO: 687197 - RNA, 19 nt, Artificial Sequence
  Description of Artificial Sequence: Synthetic oligonucleotide
  Antisense strand to SEQ ID NO: 687196
auuacuaaucguugccuuc

SEQ ID NO: 687198 - RNA, 19 nt, Artificial Sequence
  Description of Artificial Sequence: Synthetic oligonucleotide
  Sense strand starting at position 315 of SEQ ID NO: 586037
aggauaaacuguuccugag

SEQ ID NO: 687199 - RNA, 19 nt, Artificial Sequence
  Description of Artificial Sequence: Synthetic oligonucleotide
  Antisense strand to SEQ ID NO: 687198
cucaggaacaguuuauccu

SEQ ID NO: 687200 - RNA, 19 nt, Artificial Sequence
  Description of Artificial Sequence: Synthetic oligonucleotide
  Sense strand starting at position 317 of SEQ ID NO: 586037
gauaaacuguuccugagag

SEQ ID NO: 687201 - RNA, 19 nt, Artificial Sequence
  Description of Artificial Sequence: Synthetic oligonucleotide
  Antisense strand to SEQ ID NO: 687200
cucucaggaacaguuuauc

SEQ ID NO: 687202 - RNA, 19 nt, Artificial Sequence
  Description of Artificial Sequence: Synthetic oligonucleotide
  Sense strand starting at position 319 of SEQ ID NO: 586037
uaaacuguuccugagaguu

SEQ ID NO: 687203 - RNA, 19 nt, Artificial Sequence
  Description of Artificial Sequence: Synthetic oligonucleotide
  Antisense strand to SEQ ID NO: 687202
aacucucaggaacaguuua

SEQ ID NO: 687204 - RNA, 19 nt, Artificial Sequence
  Description of Artificial Sequence: Synthetic oligonucleotide
  Sense strand starting at position 489 of SEQ ID NO: 586037
uuagcuaaucgugaaucua

SEQ ID NO: 687205 - RNA, 19 nt, Artificial Sequence
  Description of Artificial Sequence: Synthetic oligonucleotide
  Antisense strand to SEQ ID NO: 687204
uagauucacgauuagcuaa

SEQ ID NO: 687206 - RNA, 19 nt, Artificial Sequence
  Description of Artificial Sequence: Synthetic oligonucleotide
  Sense strand starting at position 569 of SEQ ID NO: 586037
auuagaguaagucguauuu

SEQ ID NO: 687207 - RNA, 19 nt, Artificial Sequence
  Description of Artificial Sequence: Synthetic oligonucleotide
  Antisense strand to SEQ ID NO: 687206
aaauacgacuuacucuaau

SEQ ID NO: 687208 - RNA, 19 nt, Artificial Sequence
  Description of Artificial Sequence: Synthetic oligonucleotide
  Sense strand starting at position 578 of SEQ ID NO: 586037
agucguauuuaaguaccua

SEQ ID NO: 687209 - RNA, 19 nt, Artificial Sequence
  Description of Artificial Sequence: Synthetic oligonucleotide
  Antisense strand to SEQ ID NO: 687208
uagguacuuaaauacgacu

SEQ ID NO: 687210 - RNA, 19 nt, Artificial Sequence
  Description of Artificial Sequence: Synthetic oligonucleotide
  Sense strand starting at position 642 of SEQ ID NO: 586037
gaauguugagaucggaugu

SEQ ID NO: 687211 - RNA, 19 nt, Artificial Sequence
  Description of Artificial Sequence: Synthetic oligonucleotide
  Antisense strand to SEQ ID NO: 687210
acauccgaucucaacauuc

SEQ ID NO: 687212 - RNA, 19 nt, Artificial Sequence
  Description of Artificial Sequence: Synthetic oligonucleotide
  Sense strand starting at position 780 of SEQ ID NO: 586037
ugcugcauaguugaauaau

SEQ ID NO: 687213 - RNA, 19 nt, Artificial Sequence
  Description of Artificial Sequence: Synthetic oligonucleotide
  Antisense strand to SEQ ID NO: 687212
auuauucaacuaugcagca

SEQ ID NO: 687214 - RNA, 19 nt, Artificial Sequence
  Description of Artificial Sequence: Synthetic oligonucleotide
  Sense strand starting at position 789 of SEQ ID NO: 586037
guugaauaauuaucugggu

SEQ ID NO: 687215 - RNA, 19 nt, Artificial Sequence
  Description of Artificial Sequence: Synthetic oligonucleotide
  Antisense strand to SEQ ID NO: 687214
acccagauaauuauucaac

SEQ ID NO: 687216 - RNA, 19 nt, Artificial Sequence
  Description of Artificial Sequence: Synthetic oligonucleotide
  Sense strand starting at position 793 of SEQ ID NO: 586037
aauaauuaucuggguggca

SEQ ID NO: 687217 - RNA, 19 nt, Artificial Sequence
  Description of Artificial Sequence: Synthetic oligonucleotide
  Antisense strand to SEQ ID NO: 687216
ugccacccagauaauuauu

SEQ ID NO: 687218 - RNA, 19 nt, Artificial Sequence
  Description of Artificial Sequence: Synthetic oligonucleotide
  Sense strand starting at position 795 of SEQ ID NO: 586037
uaauuaucuggguggcaca

SEQ ID NO: 687219 - RNA, 19 nt, Artificial Sequence
  Description of Artificial Sequence: Synthetic oligonucleotide
  Antisense strand to SEQ ID NO: 687218
ugugccacccagauaauua

SEQ ID NO: 687220 - RNA, 19 nt, Artificial Sequence
  Description of Artificial Sequence: Synthetic oligonucleotide
  Sense strand starting at position 841 of SEQ ID NO: 586037
ugagugagcggcuccguaa

SEQ ID NO: 687221 - RNA, 19 nt, Artificial Sequence
  Description of Artificial Sequence: Synthetic oligonucleotide
  Antisense strand to SEQ ID NO: 687220
uuacggagccgcucacuca

SEQ ID NO: 687222 - RNA, 19 nt, Artificial Sequence
  Description of Artificial Sequence: Synthetic oligonucleotide
  Sense strand starting at position 947 of SEQ ID NO: 586037
cucgcuuuaccguuauguu

SEQ ID NO: 687223 - RNA, 19 nt, Artificial Sequence
  Description of Artificial Sequence: Synthetic oligonucleotide
  Antisense strand to SEQ ID NO: 687222
aacauaacgguaaagcgag

SEQ ID NO: 687224 - RNA, 19 nt, Artificial Sequence
  Description of Artificial Sequence: Synthetic oligonucleotide
  Sense strand starting at position 1988 of SEQ ID NO: 586037
agagaacacugcuuggcua

SEQ ID NO: 687225 - RNA, 19 nt, Artificial Sequence
  Description of Artificial Sequence: Synthetic oligonucleotide
  Antisense strand to SEQ ID NO: 687224
uagccaagcaguguucucu

SEQ ID NO: 687226 - RNA, 19 nt, Artificial Sequence
  Description of Artificial Sequence: Synthetic oligonucleotide
  Sense strand starting at position 2162 of SEQ ID NO: 586037
ccgcgaggccucaagguau

SEQ ID NO: 687227 - RNA, 19 nt, Artificial Sequence
  Description of Artificial Sequence: Synthetic oligonucleotide
  Antisense strand to SEQ ID NO: 687226
auaccuugaggccucgcgg

SEQ ID NO: 687228 - RNA, 19 nt, Artificial Sequence
  Description of Artificial Sequence: Synthetic oligonucleotide
  Sense strand starting at position 2645 of SEQ ID NO: 586037
acuaaugcagugugggaau

SEQ ID NO: 687229 - RNA, 19 nt, Artificial Sequence
  Description of Artificial Sequence: Synthetic oligonucleotide
  Antisense strand to SEQ ID NO: 687228
auucccacacugcauuagu

SEQ ID NO: 687230 - RNA, 19 nt, Artificial Sequence
  Description of Artificial Sequence: Synthetic oligonucleotide
  Sense strand starting at position 2657 of SEQ ID NO: 586037
ugggaauuguuggcuucag

SEQ ID NO: 687231 - RNA, 19 nt, Artificial Sequence
  Description of Artificial Sequence: Synthetic oligonucleotide
  Antisense strand to SEQ ID NO: 687230
cugaagccaacaauuccca

SEQ ID NO: 687232 - RNA, 19 nt, Artificial Sequence
  Description of Artificial Sequence: Synthetic oligonucleotide
  Sense strand starting at position 2717 of SEQ ID NO: 586037
uuucucagugcucagagau

SEQ ID NO: 687233 - RNA, 19 nt, Artificial Sequence
  Description of Artificial Sequence: Synthetic oligonucleotide
  Antisense strand to SEQ ID NO: 687232
aucucugagcacugagaaa

SEQ ID NO: 687234 - RNA, 19 nt, Artificial Sequence
  Description of Artificial Sequence: Synthetic oligonucleotide
  Sense strand starting at position 2738 of SEQ ID NO: 586037
guugcuaacguuugaauuu

SEQ ID NO: 687235 - RNA, 19 nt, Artificial Sequence
  Description of Artificial Sequence: Synthetic oligonucleotide
  Antisense strand to SEQ ID NO: 687234
aaauucaaacguuagcaac

SEQ ID NO: 687236 - RNA, 19 nt, Artificial Sequence
  Description of Artificial Sequence: Synthetic oligonucleotide
  Sense strand starting at position 2873 of SEQ ID NO: 586037
auuugaauuuguggauuag

SEQ ID NO: 687237 - RNA, 19 nt, Artificial Sequence
  Description of Artificial Sequence: Synthetic oligonucleotide
  Antisense strand to SEQ ID NO: 687236
cuaauccacaaauucaaau

SEQ ID NO: 687238 - RNA, 19 nt, Artificial Sequence
  Description of Artificial Sequence: Synthetic oligonucleotide
  Sense strand starting at position 2891 of SEQ ID NO: 586037
gggacauagccuggaaagu

SEQ ID NO: 687239 - RNA, 19 nt, Artificial Sequence
  Description of Artificial Sequence: Synthetic oligonucleotide
  Antisense strand to SEQ ID NO: 687238
acuuuccaggcuauguccc

SEQ ID NO: 687240 - RNA, 19 nt, Artificial Sequence
  Description of Artificial Sequence: Synthetic oligonucleotide
  Sense strand starting at position 2912 of SEQ ID NO: 586037
agguguaaucucggaacau

SEQ ID NO: 687241 - RNA, 19 nt, Artificial Sequence
  Description of Artificial Sequence: Synthetic oligonucleotide
  Antisense strand to SEQ ID NO: 687240
auguuccgagauuacaccu

SEQ ID NO: 687242 - RNA, 19 nt, Artificial Sequence
  Description of Artificial Sequence: Synthetic oligonucleotide
  Sense strand starting at position 2916 of SEQ ID NO: 586037
guaaucucggaacauaagu

SEQ ID NO: 687243 - RNA, 19 nt, Artificial Sequence
  Description of Artificial Sequence: Synthetic oligonucleotide
  Antisense strand to SEQ ID NO: 687242
acuuauguuccgagauuac

SEQ ID NO: 687244 - RNA, 19 nt, Artificial Sequence
  Description of Artificial Sequence: Synthetic oligonucleotide
  Sense strand starting at position 2921 of SEQ ID NO: 586037
cucggaacauaagugaaau

SEQ ID NO: 687245 - RNA, 19 nt, Artificial Sequence
  Description of Artificial Sequence: Synthetic oligonucleotide
  Antisense strand to SEQ ID NO: 687244
auuucacuuauguuccgag

SEQ ID NO: 687246 - RNA, 19 nt, Artificial Sequence
  Description of Artificial Sequence: Synthetic oligonucleotide
  Sense strand starting at position 2922 of SEQ ID NO: 586037
ucggaacauaagugaaauu

SEQ ID NO: 687247 - RNA, 19 nt, Artificial Sequence
  Description of Artificial Sequence: Synthetic oligonucleotide
  Antisense strand to SEQ ID NO: 687246
aauuucacuuauguuccga

SEQ ID NO: 687248 - RNA, 19 nt, Artificial Sequence
  Description of Artificial Sequence: Synthetic oligonucleotide
  Sense strand starting at position 2978 of SEQ ID NO: 586037
guggccucgauuugucuua

SEQ ID NO: 687249 - RNA, 19 nt, Artificial Sequence
  Description of Artificial Sequence: Synthetic oligonucleotide
  Antisense strand to SEQ ID NO: 687248
uaagacaaaucgaggccac

SEQ ID NO: 687250 - RNA, 19 nt, Artificial Sequence
  Description of Artificial Sequence: Synthetic oligonucleotide
  Sense strand starting at position 2980 of SEQ ID NO: 586037
ggccucgauuugucuuauu

SEQ ID NO: 687251 - RNA, 19 nt, Artificial Sequence
  Description of Artificial Sequence: Synthetic oligonucleotide
  Antisense strand to SEQ ID NO: 687250
aauaagacaaaucgaggcc

SEQ ID NO: 687252 - RNA, 19 nt, Artificial Sequence
  Description of Artificial Sequence: Synthetic oligonucleotide
  Sense strand starting at position 2999 of SEQ ID NO: 586037
uuugaagaacuagguucua

SEQ ID NO: 687253 - RNA, 19 nt, Artificial Sequence
  Description of Artificial Sequence: Synthetic oligonucleotide
  Antisense strand to SEQ ID NO: 687252
uagaaccuaguucuucaaa

SEQ ID NO: 687254 - RNA, 19 nt, Artificial Sequence
  Description of Artificial Sequence: Synthetic oligonucleotide
  Sense strand starting at position 3182 of SEQ ID NO: 586037
gugagagugcaguaaaugu

SEQ ID NO: 687255 - RNA, 19 nt, Artificial Sequence
  Description of Artificial Sequence: Synthetic oligonucleotide
  Antisense strand to SEQ ID NO: 687254
acauuuacugcacucucac

SEQ ID NO: 687256 - RNA, 19 nt, Artificial Sequence
  Description of Artificial Sequence: Synthetic oligonucleotide
  Sense strand starting at position 3214 of SEQ ID NO: 586037
guguuaauacagugagaaa

SEQ ID NO: 687257 - RNA, 19 nt, Artificial Sequence
  Description of Artificial Sequence: Synthetic oligonucleotide
  Antisense strand to SEQ ID NO: 687256
uuucucacuguauuaacac

SEQ ID NO: 687258 - RNA, 19 nt, Artificial Sequence
  Description of Artificial Sequence: Synthetic oligonucleotide
  Sense strand starting at position 3235 of SEQ ID NO: 586037
ggccuuggauuugagaaac

SEQ ID NO: 687259 - RNA, 19 nt, Artificial Sequence
  Description of Artificial Sequence: Synthetic oligonucleotide
  Antisense strand to SEQ ID NO: 687258
guuucucaaauccaaggcc

SEQ ID NO: 687260 - RNA, 19 nt, Artificial Sequence
  Description of Artificial Sequence: Synthetic oligonucleotide
  Sense strand starting at position 3252 of SEQ ID NO: 586037
acagcugcaugaucucaau

SEQ ID NO: 687261 - RNA, 19 nt, Artificial Sequence
  Description of Artificial Sequence: Synthetic oligonucleotide
  Antisense strand to SEQ ID NO: 687260
auugagaucaugcagcugu

SEQ ID NO: 687262 - RNA, 19 nt, Artificial Sequence
  Description of Artificial Sequence: Synthetic oligonucleotide
  Sense strand starting at position 3258 of SEQ ID NO: 586037
gcaugaucucaauggagga

SEQ ID NO: 687263 - RNA, 19 nt, Artificial Sequence
  Description of Artificial Sequence: Synthetic oligonucleotide
  Antisense strand to SEQ ID NO: 687262
uccuccauugagaucaugc

SEQ ID NO: 687264 - RNA, 19 nt, Artificial Sequence
  Description of Artificial Sequence: Synthetic oligonucleotide
  Sense strand starting at position 3439 of SEQ ID NO: 586037
ugaucagcucaagauguga

SEQ ID NO: 687265 - RNA, 19 nt, Artificial Sequence
  Description of Artificial Sequence: Synthetic oligonucleotide
  Antisense strand to SEQ ID NO: 687264
ucacaucuugagcugauca

SEQ ID NO: 687266 - RNA, 19 nt, Artificial Sequence
  Description of Artificial Sequence: Synthetic oligonucleotide
  Sense strand starting at position 3505 of SEQ ID NO: 586037
cuaguuuaaugacuuaaga

SEQ ID NO: 687267 - RNA, 19 nt, Artificial Sequence
  Description of Artificial Sequence: Synthetic oligonucleotide
  Antisense strand to SEQ ID NO: 687266
ucuuaagucauuaaacuag

SEQ ID NO: 687268 - RNA, 19 nt, Artificial Sequence
  Description of Artificial Sequence: Synthetic oligonucleotide
  Sense strand starting at position 3541 of SEQ ID NO: 586037
uaacaagcuguaugugaau

SEQ ID NO: 687269 - RNA, 19 nt, Artificial Sequence
  Description of Artificial Sequence: Synthetic oligonucleotide
  Antisense strand to SEQ ID NO: 687268
auucacauacagcuuguua

SEQ ID NO: 687270 - RNA, 19 nt, Artificial Sequence
  Description of Artificial Sequence: Synthetic oligonucleotide
  Sense strand starting at position 3762 of SEQ ID NO: 586037
gaaacuacugucugugagu

SEQ ID NO: 687271 - RNA, 19 nt, Artificial Sequence
  Description of Artificial Sequence: Synthetic oligonucleotide
  Antisense strand to SEQ ID NO: 687270
acucacagacaguaguuuc

SEQ ID NO: 687272 - RNA, 19 nt, Artificial Sequence
  Description of Artificial Sequence: Synthetic oligonucleotide
  Sense strand starting at position 3764 of SEQ ID NO: 586037
aacuacugucugugaguga

SEQ ID NO: 687273 - RNA, 19 nt, Artificial Sequence
  Description of Artificial Sequence: Synthetic oligonucleotide
  Antisense strand to SEQ ID NO: 687272
ucacucacagacaguaguu

SEQ ID NO: 687274 - RNA, 19 nt, Artificial Sequence
  Description of Artificial Sequence: Synthetic oligonucleotide
  Sense strand starting at position 3851 of SEQ ID NO: 586037
auuaguuccucuuucuuga

SEQ ID NO: 687275 - RNA, 19 nt, Artificial Sequence
  Description of Artificial Sequence: Synthetic oligonucleotide
  Antisense strand to SEQ ID NO: 687274
ucaagaaagaggaacuaau

SEQ ID NO: 687276 - RNA, 19 nt, Artificial Sequence
  Description of Artificial Sequence: Synthetic oligonucleotide
  Sense strand starting at position 120 of SEQ ID NO: 586038
gcaacuaguuugucuucuu

SEQ ID NO: 687277 - RNA, 19 nt, Artificial Sequence
  Description of Artificial Sequence: Synthetic oligonucleotide
  Antisense strand to SEQ ID NO: 687276
aagaagacaaacuaguugc

SEQ ID NO: 687278 - RNA, 19 nt, Artificial Sequence
  Description of Artificial Sequence: Synthetic oligonucleotide
  Sense strand starting at position 123 of SEQ ID NO: 586038
acuaguuugucuucuuagu

SEQ ID NO: 687279 - RNA, 19 nt, Artificial Sequence
  Description of Artificial Sequence: Synthetic oligonucleotide
  Antisense strand to SEQ ID NO: 687278
acuaagaagacaaacuagu

SEQ ID NO: 687280 - RNA, 19 nt, Artificial Sequence
  Description of Artificial Sequence: Synthetic oligonucleotide
  Sense strand starting at position 128 of SEQ ID NO: 586038
uuugucuucuuaguccaua

SEQ ID NO: 687281 - RNA, 19 nt, Artificial Sequence
  Description of Artificial Sequence: Synthetic oligonucleotide
  Antisense strand to SEQ ID NO: 687280
uauggacuaagaagacaaa

SEQ ID NO: 687282 - RNA, 19 nt, Artificial Sequence
  Description of Artificial Sequence: Synthetic oligonucleotide
  Sense strand starting at position 177 of SEQ ID NO: 586038
gccugauggagagaacugu

SEQ ID NO: 687283 - RNA, 19 nt, Artificial Sequence
  Description of Artificial Sequence: Synthetic oligonucleotide
  Antisense strand to SEQ ID NO: 687282
acaguucucuccaucaggc

SEQ ID NO: 687284 - RNA, 19 nt, Artificial Sequence
  Description of Artificial Sequence: Synthetic oligonucleotide
  Sense strand starting at position 181 of SEQ ID NO: 586038
gauggagagaacugugcaa

SEQ ID NO: 687285 - RNA, 19 nt, Artificial Sequence
  Description of Artificial Sequence: Synthetic oligonucleotide
  Antisense strand to SEQ ID NO: 687284
uugcacaguucucuccauc

SEQ ID NO: 687286 - RNA, 19 nt, Artificial Sequence
  Description of Artificial Sequence: Synthetic oligonucleotide
  Sense strand starting at position 183 of SEQ ID NO: 586038
uggagagaacugugcaauc

SEQ ID NO: 687287 - RNA, 19 nt, Artificial Sequence
  Description of Artificial Sequence: Synthetic oligonucleotide
  Antisense strand to SEQ ID NO: 687286
gauugcacaguucucucca

SEQ ID NO: 687288 - RNA, 19 nt, Artificial Sequence
  Description of Artificial Sequence: Synthetic oligonucleotide
  Sense strand starting at position 185 of SEQ ID NO: 586038
gagagaacugugcaauccu

SEQ ID NO: 687289 - RNA, 19 nt, Artificial Sequence
  Description of Artificial Sequence: Synthetic oligonucleotide
  Antisense strand to SEQ ID NO: 687288
aggauugcacaguucucuc

SEQ ID NO: 687290 - RNA, 19 nt, Artificial Sequence
  Description of Artificial Sequence: Synthetic oligonucleotide
  Sense strand starting at position 192 of SEQ ID NO: 586038
cugugcaauccugagaaau

SEQ ID NO: 687291 - RNA, 19 nt, Artificial Sequence
  Description of Artificial Sequence: Synthetic oligonucleotide
  Antisense strand to SEQ ID NO: 687290
auuucucaggauugcacag

SEQ ID NO: 687292 - RNA, 19 nt, Artificial Sequence
  Description of Artificial Sequence: Synthetic oligonucleotide
  Sense strand starting at position 194 of SEQ ID NO: 586038
gugcaauccugagaaaugu

SEQ ID NO: 687293 - RNA, 19 nt, Artificial Sequence
  Description of Artificial Sequence: Synthetic oligonucleotide
  Antisense strand to SEQ ID NO: 687292
acauuucucaggauugcac

SEQ ID NO: 687294 - RNA, 19 nt, Artificial Sequence
  Description of Artificial Sequence: Synthetic oligonucleotide
  Sense strand starting at position 208 of SEQ ID NO: 586038
aauguucuguguugcacua

SEQ ID NO: 687295 - RNA, 19 nt, Artificial Sequence
  Description of Artificial Sequence: Synthetic oligonucleotide
  Antisense strand to SEQ ID NO: 687294
uagugcaacacagaacauu

SEQ ID NO: 687296 - RNA, 19 nt, Artificial Sequence
  Description of Artificial Sequence: Synthetic oligonucleotide
  Sense strand starting at position 258 of SEQ ID NO: 586038
gggagaguguguucuccau

SEQ ID NO: 687297 - RNA, 19 nt, Artificial Sequence
  Description of Artificial Sequence: Synthetic oligonucleotide
  Antisense strand to SEQ ID NO: 687296
auggagaacacacucuccc

SEQ ID NO: 687298 - RNA, 19 nt, Artificial Sequence
  Description of Artificial Sequence: Synthetic oligonucleotide
  Sense strand starting at position 260 of SEQ ID NO: 586038
gagaguguguucuccaugu

SEQ ID NO: 687299 - RNA, 19 nt, Artificial Sequence
  Description of Artificial Sequence: Synthetic oligonucleotide
  Antisense strand to SEQ ID NO: 687298
acauggagaacacacucuc

SEQ ID NO: 687300 - RNA, 19 nt, Artificial Sequence
  Description of Artificial Sequence: Synthetic oligonucleotide
  Sense strand starting at position 264 of SEQ ID NO: 586038
guguguucuccauguggga

SEQ ID NO: 687301 - RNA, 19 nt, Artificial Sequence
  Description of Artificial Sequence: Synthetic oligonucleotide
  Antisense strand to SEQ ID NO: 687300
ucccacauggagaacacac

SEQ ID NO: 687302 - RNA, 19 nt, Artificial Sequence
  Description of Artificial Sequence: Synthetic oligonucleotide
  Sense strand starting at position 324 of SEQ ID NO: 586038
cgguaagugcuguuccuuu

SEQ ID NO: 687303 - RNA, 19 nt, Artificial Sequence
  Description of Artificial Sequence: Synthetic oligonucleotide
  Antisense strand to SEQ ID NO: 687302
aaaggaacagcacuuaccg

SEQ ID NO: 687304 - RNA, 19 nt, Artificial Sequence
  Description of Artificial Sequence: Synthetic oligonucleotide
  Sense strand starting at position 418 of SEQ ID NO: 586038
agccauguagucguugagu

SEQ ID NO: 687305 - RNA, 19 nt, Artificial Sequence
  Description of Artificial Sequence: Synthetic oligonucleotide
  Antisense strand to SEQ ID NO: 687304
acucaacgacuacauggcu

SEQ ID NO: 687306 - RNA, 19 nt, Artificial Sequence
  Description of Artificial Sequence: Synthetic oligonucleotide
  Sense strand starting at position 433 of SEQ ID NO: 586038
gagugccuggcccauaaau

SEQ ID NO: 687307 - RNA, 19 nt, Artificial Sequence
  Description of Artificial Sequence: Synthetic oligonucleotide
  Antisense strand to SEQ ID NO: 687306
auuuaugggccaggcacuc

SEQ ID NO: 687308 - RNA, 19 nt, Artificial Sequence
  Description of Artificial Sequence: Synthetic oligonucleotide
  Sense strand starting at position 487 of SEQ ID NO: 586038
uggcuaaaugcggagaauu

SEQ ID NO: 687309 - RNA, 19 nt, Artificial Sequence
  Description of Artificial Sequence: Synthetic oligonucleotide
  Antisense strand to SEQ ID NO: 687308
aauucuccgcauuuagcca

SEQ ID NO: 687310 - RNA, 19 nt, Artificial Sequence
  Description of Artificial Sequence: Synthetic oligonucleotide
  Sense strand starting at position 573 of SEQ ID NO: 586038
aaaggaaucgucugacuag

SEQ ID NO: 687311 - RNA, 19 nt, Artificial Sequence
  Description of Artificial Sequence: Synthetic oligonucleotide
  Antisense strand to SEQ ID NO: 687310
cuagucagacgauuccuuu

SEQ ID NO: 687312 - RNA, 19 nt, Artificial Sequence
  Description of Artificial Sequence: Synthetic oligonucleotide
  Sense strand starting at position 574 of SEQ ID NO: 586038
aaggaaucgucugacuaga

SEQ ID NO: 687313 - RNA, 19 nt, Artificial Sequence
  Description of Artificial Sequence: Synthetic oligonucleotide
  Antisense strand to SEQ ID NO: 687312
ucuagucagacgauuccuu

SEQ ID NO: 687314 - RNA, 19 nt, Artificial Sequence
  Description of Artificial Sequence: Synthetic oligonucleotide
  Sense strand starting at position 576 of SEQ ID NO: 586038
ggaaucgucugacuagaaa

SEQ ID NO: 687315 - RNA, 19 nt, Artificial Sequence
  Description of Artificial Sequence: Synthetic oligonucleotide
  Antisense strand to SEQ ID NO: 687314
uuucuagucagacgauucc

SEQ ID NO: 687316 - RNA, 19 nt, Artificial Sequence
  Description of Artificial Sequence: Synthetic oligonucleotide
  Sense strand starting at position 608 of SEQ ID NO: 586038
cugugugagcaagaaacau

SEQ ID NO: 687317 - RNA, 19 nt, Artificial Sequence
  Description of Artificial Sequence: Synthetic oligonucleotide
  Antisense strand to SEQ ID NO: 687316
auguuucuugcucacacag

SEQ ID NO: 687318 - RNA, 19 nt, Artificial Sequence
  Description of Artificial Sequence: Synthetic oligonucleotide
  Sense strand starting at position 643 of SEQ ID NO: 586038
ggugaauugcuacagcacu

SEQ ID NO: 687319 - RNA, 19 nt, Artificial Sequence
  Description of Artificial Sequence: Synthetic oligonucleotide
  Antisense strand to SEQ ID NO: 687318
agugcuguagcaauucacc

SEQ ID NO: 687320 - RNA, 19 nt, Artificial Sequence
  Description of Artificial Sequence: Synthetic oligonucleotide
  Sense strand starting at position 892 of SEQ ID NO: 586038
gagauucuagugcaccuaa

SEQ ID NO: 687321 - RNA, 19 nt, Artificial Sequence
  Description of Artificial Sequence: Synthetic oligonucleotide
  Antisense strand to SEQ ID NO: 687320
uuaggugcacuagaaucuc

SEQ ID NO: 687322 - RNA, 19 nt, Artificial Sequence
  Description of Artificial Sequence: Synthetic oligonucleotide
  Sense strand starting at position 938 of SEQ ID NO: 586038
agugacaagugauugcuaa

SEQ ID NO: 687323 - RNA, 19 nt, Artificial Sequence
  Description of Artificial Sequence: Synthetic oligonucleotide
  Antisense strand to SEQ ID NO: 687322
uuagcaaucacuugucacu

SEQ ID NO: 687324 - RNA, 19 nt, Artificial Sequence
  Description of Artificial Sequence: Synthetic oligonucleotide
  Sense strand starting at position 939 of SEQ ID NO: 586038
gugacaagugauugcuaaa

SEQ ID NO: 687325 - RNA, 19 nt, Artificial Sequence
  Description of Artificial Sequence: Synthetic oligonucleotide
  Antisense strand to SEQ ID NO: 687324
uuuagcaaucacuugucac

SEQ ID NO: 687326 - RNA, 19 nt, Artificial Sequence
  Description of Artificial Sequence: Synthetic oligonucleotide
  Sense strand starting at position 942 of SEQ ID NO: 586038
acaagugauugcuaaagau

SEQ ID NO: 687327 - RNA, 19 nt, Artificial Sequence
  Description of Artificial Sequence: Synthetic oligonucleotide
  Antisense strand to SEQ ID NO: 687326
aucuuuagcaaucacuugu

SEQ ID NO: 687328 - RNA, 19 nt, Artificial Sequence
  Description of Artificial Sequence: Synthetic oligonucleotide
  Sense strand starting at position 959 of SEQ ID NO: 586038
auaccauagucuuaaaguu

SEQ ID NO: 687329 - RNA, 19 nt, Artificial Sequence
  Description of Artificial Sequence: Synthetic oligonucleotide
  Antisense strand to SEQ ID NO: 687328
aacuuuaagacuaugguau

SEQ ID NO: 687330 - RNA, 19 nt, Artificial Sequence
  Description of Artificial Sequence: Synthetic oligonucleotide
  Sense strand starting at position 968 of SEQ ID NO: 586038
ucuuaaaguuaagucagua

SEQ ID NO: 687331 - RNA, 19 nt, Artificial Sequence
  Description of Artificial Sequence: Synthetic oligonucleotide
  Antisense strand to SEQ ID NO: 687330
uacugacuuaacuuuaaga

SEQ ID NO: 687332 - RNA, 19 nt, Artificial Sequence
  Description of Artificial Sequence: Synthetic oligonucleotide
  Sense strand starting at position 1013 of SEQ ID NO: 586038
cuggaagcuguagaguuaa

SEQ ID NO: 687333 - RNA, 19 nt, Artificial Sequence
  Description of Artificial Sequence: Synthetic oligonucleotide
  Antisense strand to SEQ ID NO: 687332
uuaacucuacagcuuccag

SEQ ID NO: 687334 - RNA, 19 nt, Artificial Sequence
  Description of Artificial Sequence: Synthetic oligonucleotide
  Sense strand starting at position 1101 of SEQ ID NO: 586038
acucuacuacucgaggagu

SEQ ID NO: 687335 - RNA, 19 nt, Artificial Sequence
  Description of Artificial Sequence: Synthetic oligonucleotide
  Antisense strand to SEQ ID NO: 687334
acuccucgaguaguagagu

SEQ ID NO: 687336 - RNA, 19 nt, Artificial Sequence
  Description of Artificial Sequence: Synthetic oligonucleotide
  Sense strand starting at position 1252 of SEQ ID NO: 586038
ugcuguuuggcucgaguua

SEQ ID NO: 687337 - RNA, 19 nt, Artificial Sequence
  Description of Artificial Sequence: Synthetic oligonucleotide
  Antisense strand to SEQ ID NO: 687336
uaacucgagccaaacagca

SEQ ID NO: 687338 - RNA, 19 nt, Artificial Sequence
  Description of Artificial Sequence: Synthetic oligonucleotide
  Sense strand starting at position 1253 of SEQ ID NO: 586038
gcuguuuggcucgaguuag

SEQ ID NO: 687339 - RNA, 19 nt, Artificial Sequence
  Description of Artificial Sequence: Synthetic oligonucleotide
  Antisense strand to SEQ ID NO: 687338
cuaacucgagccaaacagc

SEQ ID NO: 687340 - RNA, 19 nt, Artificial Sequence
  Description of Artificial Sequence: Synthetic oligonucleotide
  Sense strand starting at position 1257 of SEQ ID NO: 586038
uuuggcucgaguuaggaaa

SEQ ID NO: 687341 - RNA, 19 nt, Artificial Sequence
  Description of Artificial Sequence: Synthetic oligonucleotide
  Antisense strand to SEQ ID NO: 687340
uuuccuaacucgagccaaa

SEQ ID NO: 687342 - RNA, 19 nt, Artificial Sequence
  Description of Artificial Sequence: Synthetic oligonucleotide
  Sense strand starting at position 1406 of SEQ ID NO: 586038
ccugguucguuccuaaacu

SEQ ID NO: 687343 - RNA, 19 nt, Artificial Sequence
  Description of Artificial Sequence: Synthetic oligonucleotide
  Antisense strand to SEQ ID NO: 687342
aguuuaggaacgaaccagg

SEQ ID NO: 687344 - RNA, 19 nt, Artificial Sequence
  Description of Artificial Sequence: Synthetic oligonucleotide
  Sense strand starting at position 1407 of SEQ ID NO: 586038
cugguucguuccuaaacua

SEQ ID NO: 687345 - RNA, 19 nt, Artificial Sequence
  Description of Artificial Sequence: Synthetic oligonucleotide
  Antisense strand to SEQ ID NO: 687344
uaguuuaggaacgaaccag

SEQ ID NO: 687346 - RNA, 19 nt, Artificial Sequence
  Description of Artificial Sequence: Synthetic oligonucleotide
  Sense strand starting at position 1438 of SEQ ID NO: 586038
aagagaucugagugcuccu

SEQ ID NO: 687347 - RNA, 19 nt, Artificial Sequence
  Description of Artificial Sequence: Synthetic oligonucleotide
  Antisense strand to SEQ ID NO: 687346
aggagcacucagaucucuu

SEQ ID NO: 687348 - RNA, 19 nt, Artificial Sequence
  Description of Artificial Sequence: Synthetic oligonucleotide
  Sense strand starting at position 1441 of SEQ ID NO: 586038
agaucugagugcuccuuau

SEQ ID NO: 687349 - RNA, 19 nt, Artificial Sequence
  Description of Artificial Sequence: Synthetic oligonucleotide
  Antisense strand to SEQ ID NO: 687348
auaaggagcacucagaucu

SEQ ID NO: 687350 - RNA, 19 nt, Artificial Sequence
  Description of Artificial Sequence: Synthetic oligonucleotide
  Sense strand starting at position 1445 of SEQ ID NO: 586038
cugagugcuccuuauacac

SEQ ID NO: 687351 - RNA, 19 nt, Artificial Sequence
  Description of Artificial Sequence: Synthetic oligonucleotide
  Antisense strand to SEQ ID NO: 687350
guguauaaggagcacucag

SEQ ID NO: 687352 - RNA, 19 nt, Artificial Sequence
  Description of Artificial Sequence: Synthetic oligonucleotide
  Sense strand starting at position 13 of SEQ ID NO: 586039
gaggucacaggcuaucauu

SEQ ID NO: 687353 - RNA, 19 nt, Artificial Sequence
  Description of Artificial Sequence: Synthetic oligonucleotide
  Antisense strand to SEQ ID NO: 687352
aaugauagccugugaccuc

SEQ ID NO: 687354 - RNA, 19 nt, Artificial Sequence
  Description of Artificial Sequence: Synthetic oligonucleotide
  Sense strand starting at position 380 of SEQ ID NO: 586039
ggcugaagugguuaaggaa

SEQ ID NO: 687355 - RNA, 19 nt, Artificial Sequence
  Description of Artificial Sequence: Synthetic oligonucleotide
  Antisense strand to SEQ ID NO: 687354
uuccuuaaccacuucagcc

SEQ ID NO: 687356 - RNA, 19 nt, Artificial Sequence
  Description of Artificial Sequence: Synthetic oligonucleotide
  Sense strand starting at position 438 of SEQ ID NO: 586039
cuuccaguucgagaguagu

SEQ ID NO: 687357 - RNA, 19 nt, Artificial Sequence
  Description of Artificial Sequence: Synthetic oligonucleotide
  Antisense strand to SEQ ID NO: 687356
acuacucucgaacuggaag

SEQ ID NO: 687358 - RNA, 19 nt, Artificial Sequence
  Description of Artificial Sequence: Synthetic oligonucleotide
  Sense strand starting at position 441 of SEQ ID NO: 586039
ccaguucgagaguaguuua

SEQ ID NO: 687359 - RNA, 19 nt, Artificial Sequence
  Description of Artificial Sequence: Synthetic oligonucleotide
  Antisense strand to SEQ ID NO: 687358
uaaacuacucucgaacugg

SEQ ID NO: 687360 - RNA, 19 nt, Artificial Sequence
  Description of Artificial Sequence: Synthetic oligonucleotide
  Sense strand starting at position 448 of SEQ ID NO: 586039
gagaguaguuuagucugua

SEQ ID NO: 687361 - RNA, 19 nt, Artificial Sequence
  Description of Artificial Sequence: Synthetic oligonucleotide
  Antisense strand to SEQ ID NO: 687360
uacagacuaaacuacucuc

SEQ ID NO: 687362 - RNA, 19 nt, Artificial Sequence
  Description of Artificial Sequence: Synthetic oligonucleotide
  Sense strand starting at position 449 of SEQ ID NO: 586039
agaguaguuuagucuguag

SEQ ID NO: 687363 - RNA, 19 nt, Artificial Sequence
  Description of Artificial Sequence: Synthetic oligonucleotide
  Antisense strand to SEQ ID NO: 687362
cuacagacuaaacuacucu

SEQ ID NO: 687364 - RNA, 19 nt, Artificial Sequence
  Description of Artificial Sequence: Synthetic oligonucleotide
  Sense strand starting at position 491 of SEQ ID NO: 586039
gucaaagugcugggaaaga

SEQ ID NO: 687365 - RNA, 19 nt, Artificial Sequence
  Description of Artificial Sequence: Synthetic oligonucleotide
  Antisense strand to SEQ ID NO: 687364
ucuuucccagcacuuugac

SEQ ID NO: 687366 - RNA, 19 nt, Artificial Sequence
  Description of Artificial Sequence: Synthetic oligonucleotide
  Sense strand starting at position 1097 of SEQ ID NO: 586039
uugucaaugcgacagaacu

SEQ ID NO: 687367 - RNA, 19 nt, Artificial Sequence
  Description of Artificial Sequence: Synthetic oligonucleotide
  Antisense strand to SEQ ID NO: 687366
aguucugucgcauugacaa

SEQ ID NO: 687368 - RNA, 19 nt, Artificial Sequence
  Description of Artificial Sequence: Synthetic oligonucleotide
  Sense strand starting at position 1319 of SEQ ID NO: 586039
ggguuucuucgggaccuga

SEQ ID NO: 687369 - RNA, 19 nt, Artificial Sequence
  Description of Artificial Sequence: Synthetic oligonucleotide
  Antisense strand to SEQ ID NO: 687368
ucaggucccgaagaaaccc

SEQ ID NO: 687370 - RNA, 19 nt, Artificial Sequence
  Description of Artificial Sequence: Synthetic oligonucleotide
  Sense strand starting at position 1332 of SEQ ID NO: 586039
accugaggcuucuuagaga

SEQ ID NO: 687371 - RNA, 19 nt, Artificial Sequence
  Description of Artificial Sequence: Synthetic oligonucleotide
  Antisense strand to SEQ ID NO: 687370
ucucuaagaagccucaggu

SEQ ID NO: 687372 - RNA, 19 nt, Artificial Sequence
  Description of Artificial Sequence: Synthetic oligonucleotide
  Sense strand starting at position 1337 of SEQ ID NO: 586039
aggcuucuuagagauccga

SEQ ID NO: 687373 - RNA, 19 nt, Artificial Sequence
  Description of Artificial Sequence: Synthetic oligonucleotide
  Antisense strand to SEQ ID NO: 687372
ucggaucucuaagaagccu

SEQ ID NO: 687374 - RNA, 19 nt, Artificial Sequence
  Description of Artificial Sequence: Synthetic oligonucleotide
  Sense strand starting at position 1341 of SEQ ID NO: 586039
uucuuagagauccgagacu

SEQ ID NO: 687375 - RNA, 19 nt, Artificial Sequence
  Description of Artificial Sequence: Synthetic oligonucleotide
  Antisense strand to SEQ ID NO: 687374
agucucggaucucuaagaa

SEQ ID NO: 687376 - RNA, 19 nt, Artificial Sequence
  Description of Artificial Sequence: Synthetic oligonucleotide
  Sense strand starting at position 1350 of SEQ ID NO: 586039
auccgagacuucuuuaaga

SEQ ID NO: 687377 - RNA, 19 nt, Artificial Sequence
  Description of Artificial Sequence: Synthetic oligonucleotide
  Antisense strand to SEQ ID NO: 687376
ucuuaaagaagucucggau

SEQ ID NO: 687378 - RNA, 19 nt, Artificial Sequence
  Description of Artificial Sequence: Synthetic oligonucleotide
  Sense strand starting at position 1393 of SEQ ID NO: 586039
gacggagcucccgauucuu

SEQ ID NO: 687379 - RNA, 19 nt, Artificial Sequence
  Description of Artificial Sequence: Synthetic oligonucleotide
  Antisense strand to SEQ ID NO: 687378
aagaaucgggagcuccguc

SEQ ID NO: 687380 - RNA, 19 nt, Artificial Sequence
  Description of Artificial Sequence: Synthetic oligonucleotide
  Sense strand starting at position 1573 of SEQ ID NO: 586039
accuuucucuuggucugaa

SEQ ID NO: 687381 - RNA, 19 nt, Artificial Sequence
  Description of Artificial Sequence: Synthetic oligonucleotide
  Antisense strand to SEQ ID NO: 687380
uucagaccaagagaaaggu

SEQ ID NO: 687382 - RNA, 19 nt, Artificial Sequence
  Description of Artificial Sequence: Synthetic oligonucleotide
  Sense strand starting at position 1754 of SEQ ID NO: 586039
guaugaagcucucuaggug

SEQ ID NO: 687383 - RNA, 19 nt, Artificial Sequence
  Description of Artificial Sequence: Synthetic oligonucleotide
  Antisense strand to SEQ ID NO: 687382
caccuagagagcuucauac

SEQ ID NO: 687384 - RNA, 19 nt, Artificial Sequence
  Description of Artificial Sequence: Synthetic oligonucleotide
  Sense strand starting at position 1840 of SEQ ID NO: 586039
cagcuuaugcaagagugau

SEQ ID NO: 687385 - RNA, 19 nt, Artificial Sequence
  Description of Artificial Sequence: Synthetic oligonucleotide
  Antisense strand to SEQ ID NO: 687384
aucacucuugcauaagcug

SEQ ID NO: 687386 - RNA, 19 nt, Artificial Sequence
  Description of Artificial Sequence: Synthetic oligonucleotide
  Sense strand starting at position 2007 of SEQ ID NO: 586039
caucaagggucagaaagaa

SEQ ID NO: 687387 - RNA, 19 nt, Artificial Sequence
  Description of Artificial Sequence: Synthetic oligonucleotide
  Antisense strand to SEQ ID NO: 687386
uucuuucugacccuugaug

SEQ ID NO: 687388 - RNA, 19 nt, Artificial Sequence
  Description of Artificial Sequence: Synthetic oligonucleotide
  Sense strand starting at position 2066 of SEQ ID NO: 586039
ccggguuuauuacuacuga

SEQ ID NO: 687389 - RNA, 19 nt, Artificial Sequence
  Description of Artificial Sequence: Synthetic oligonucleotide
  Antisense strand to SEQ ID NO: 687388
ucaguaguaauaaacccgg

SEQ ID NO: 687390 - RNA, 19 nt, Artificial Sequence
  Description of Artificial Sequence: Synthetic oligonucleotide
  Sense strand starting at position 2086 of SEQ ID NO: 586039
ggaagaacgugaguagguu

SEQ ID NO: 687391 - RNA, 19 nt, Artificial Sequence
  Description of Artificial Sequence: Synthetic oligonucleotide
  Antisense strand to SEQ ID NO: 687390
aaccuacucacguucuucc

SEQ ID NO: 687392 - RNA, 19 nt, Artificial Sequence
  Description of Artificial Sequence: Synthetic oligonucleotide
  Sense strand starting at position 2087 of SEQ ID NO: 586039
gaagaacgugaguagguua

SEQ ID NO: 687393 - RNA, 19 nt, Artificial Sequence
  Description of Artificial Sequence: Synthetic oligonucleotide
  Antisense strand to SEQ ID NO: 687392
uaaccuacucacguucuuc

SEQ ID NO: 687394 - RNA, 19 nt, Artificial Sequence
  Description of Artificial Sequence: Synthetic oligonucleotide
  Sense strand starting at position 2092 of SEQ ID NO: 586039
acgugaguagguuaggauu

SEQ ID NO: 687395 - RNA, 19 nt, Artificial Sequence
  Description of Artificial Sequence: Synthetic oligonucleotide
  Antisense strand to SEQ ID NO: 687394
aauccuaaccuacucacgu

SEQ ID NO: 687396 - RNA, 19 nt, Artificial Sequence
  Description of Artificial Sequence: Synthetic oligonucleotide
  Sense strand starting at position 2106 of SEQ ID NO: 586039
ggauuucgguugagaggcu

SEQ ID NO: 687397 - RNA, 19 nt, Artificial Sequence
  Description of Artificial Sequence: Synthetic oligonucleotide
  Antisense strand to SEQ ID NO: 687396
agccucucaaccgaaaucc

SEQ ID NO: 687398 - RNA, 19 nt, Artificial Sequence
  Description of Artificial Sequence: Synthetic oligonucleotide
  Sense strand starting at position 2409 of SEQ ID NO: 586039
cgguauggucucgcccaau

SEQ ID NO: 687399 - RNA, 19 nt, Artificial Sequence
  Description of Artificial Sequence: Synthetic oligonucleotide
  Antisense strand to SEQ ID NO: 687398
auugggcgagaccauaccg

SEQ ID NO: 687400 - RNA, 19 nt, Artificial Sequence
  Description of Artificial Sequence: Synthetic oligonucleotide
  Sense strand starting at position 2445 of SEQ ID NO: 586039
ccauuaccgagauaagguu

SEQ ID NO: 687401 - RNA, 19 nt, Artificial Sequence
  Description of Artificial Sequence: Synthetic oligonucleotide
  Antisense strand to SEQ ID NO: 687400
aaccuuaucucgguaaugg

SEQ ID NO: 687402 - RNA, 19 nt, Artificial Sequence
  Description of Artificial Sequence: Synthetic oligonucleotide
  Sense strand starting at position 2913 of SEQ ID NO: 586039
acagcugaaaugugaguuu

SEQ ID NO: 687403 - RNA, 19 nt, Artificial Sequence
  Description of Artificial Sequence: Synthetic oligonucleotide
  Antisense strand to SEQ ID NO: 687402
aaacucacauuucagcugu

SEQ ID NO: 687404 - RNA, 19 nt, Artificial Sequence
  Description of Artificial Sequence: Synthetic oligonucleotide
  Sense strand starting at position 2957 of SEQ ID NO: 586039
cugugaugcaagugaacca

SEQ ID NO: 687405 - RNA, 19 nt, Artificial Sequence
  Description of Artificial Sequence: Synthetic oligonucleotide
  Antisense strand to SEQ ID NO: 687404
ugguucacuugcaucacag

SEQ ID NO: 687406 - RNA, 19 nt, Artificial Sequence
  Description of Artificial Sequence: Synthetic oligonucleotide
  Sense strand starting at position 2980 of SEQ ID NO: 586039
aguagagguguugaaccau

SEQ ID NO: 687407 - RNA, 19 nt, Artificial Sequence
  Description of Artificial Sequence: Synthetic oligonucleotide
  Antisense strand to SEQ ID NO: 687406
augguucaacaccucuacu

SEQ ID NO: 687408 - RNA, 19 nt, Artificial Sequence
  Description of Artificial Sequence: Synthetic oligonucleotide
  Sense strand starting at position 3109 of SEQ ID NO: 586039
cucuuucuugcguuuagca

SEQ ID NO: 687409 - RNA, 19 nt, Artificial Sequence
  Description of Artificial Sequence: Synthetic oligonucleotide
  Antisense strand to SEQ ID NO: 687408
ugcuaaacgcaagaaagag

SEQ ID NO: 687410 - RNA, 19 nt, Artificial Sequence
  Description of Artificial Sequence: Synthetic oligonucleotide
  Sense strand starting at position 3182 of SEQ ID NO: 586039
uccuuaguaagcgauacga

SEQ ID NO: 687411 - RNA, 19 nt, Artificial Sequence
  Description of Artificial Sequence: Synthetic oligonucleotide
  Antisense strand to SEQ ID NO: 687410
ucguaucgcuuacuaagga

SEQ ID NO: 687412 - RNA, 19 nt, Artificial Sequence
  Description of Artificial Sequence: Synthetic oligonucleotide
  Sense strand starting at position 3184 of SEQ ID NO: 586039
cuuaguaagcgauacgaau

SEQ ID NO: 687413 - RNA, 19 nt, Artificial Sequence
  Description of Artificial Sequence: Synthetic oligonucleotide
  Antisense strand to SEQ ID NO: 687412
auucguaucgcuuacuaag

SEQ ID NO: 687414 - RNA, 19 nt, Artificial Sequence
  Description of Artificial Sequence: Synthetic oligonucleotide
  Sense strand starting at position 3505 of SEQ ID NO: 586039
uuggaaucucuuuguggca

SEQ ID NO: 687415 - RNA, 19 nt, Artificial Sequence
  Description of Artificial Sequence: Synthetic oligonucleotide
  Antisense strand to SEQ ID NO: 687414
ugccacaaagagauuccaa

SEQ ID NO: 687416 - RNA, 19 nt, Artificial Sequence
  Description of Artificial Sequence: Synthetic oligonucleotide
  Sense strand starting at position 3647 of SEQ ID NO: 586039
accauauugcuaggaaugu

SEQ ID NO: 687417 - RNA, 19 nt, Artificial Sequence
  Description of Artificial Sequence: Synthetic oligonucleotide
  Antisense strand to SEQ ID NO: 687416
acauuccuagcaauauggu

SEQ ID NO: 687418 - RNA, 19 nt, Artificial Sequence
  Description of Artificial Sequence: Synthetic oligonucleotide
  Sense strand starting at position 3656 of SEQ ID NO: 586039
cuaggaaugucgguuuaau

SEQ ID NO: 687419 - RNA, 19 nt, Artificial Sequence
  Description of Artificial Sequence: Synthetic oligonucleotide
  Antisense strand to SEQ ID NO: 687418
auuaaaccgacauuccuag

SEQ ID NO: 687420 - RNA, 19 nt, Artificial Sequence
  Description of Artificial Sequence: Synthetic oligonucleotide
  Sense strand starting at position 3713 of SEQ ID NO: 586039
gaugaaaugugguuacccu

SEQ ID NO: 687421 - RNA, 19 nt, Artificial Sequence
  Description of Artificial Sequence: Synthetic oligonucleotide
  Antisense strand to SEQ ID NO: 687420
aggguaaccacauuucauc

SEQ ID NO: 687422 - RNA, 19 nt, Artificial Sequence
  Description of Artificial Sequence: Synthetic oligonucleotide
  Sense strand starting at position 3828 of SEQ ID NO: 586039
cauguaaugcuuuauggua

SEQ ID NO: 687423 - RNA, 19 nt, Artificial Sequence
  Description of Artificial Sequence: Synthetic oligonucleotide
  Antisense strand to SEQ ID NO: 687422
uaccauaaagcauuacaug

SEQ ID NO: 687424 - RNA, 19 nt, Artificial Sequence
  Description of Artificial Sequence: Synthetic oligonucleotide
  Sense strand starting at position 3865 of SEQ ID NO: 586039
uuauauguuguccauaaag

SEQ ID NO: 687425 - RNA, 19 nt, Artificial Sequence
  Description of Artificial Sequence: Synthetic oligonucleotide
  Antisense strand to SEQ ID NO: 687424
cuuuauggacaacauauaa

SEQ ID NO: 687426 - RNA, 19 nt, Artificial Sequence
  Description of Artificial Sequence: Synthetic oligonucleotide
  Sense strand starting at position 3867 of SEQ ID NO: 586039
auauguuguccauaaaguu

SEQ ID NO: 687427 - RNA, 19 nt, Artificial Sequence
  Description of Artificial Sequence: Synthetic oligonucleotide
  Antisense strand to SEQ ID NO: 687426
aacuuuauggacaacauau

SEQ ID NO: 687428 - RNA, 19 nt, Artificial Sequence
  Description of Artificial Sequence: Synthetic oligonucleotide
  Sense strand starting at position 3889 of SEQ ID NO: 586039
cugccauuuccuuguccua

SEQ ID NO: 687429 - RNA, 19 nt, Artificial Sequence
  Description of Artificial Sequence: Synthetic oligonucleotide
  Antisense strand to SEQ ID NO: 687428
uaggacaaggaaauggcag

SEQ ID NO: 687430 - RNA, 19 nt, Artificial Sequence
  Description of Artificial Sequence: Synthetic oligonucleotide
  Sense strand starting at position 3938 of SEQ ID NO: 586039
accagugguagagagguua

SEQ ID NO: 687431 - RNA, 19 nt, Artificial Sequence
  Description of Artificial Sequence: Synthetic oligonucleotide
  Antisense strand to SEQ ID NO: 687430
uaaccucucuaccacuggu

SEQ ID NO: 687432 - RNA, 19 nt, Artificial Sequence
  Description of Artificial Sequence: Synthetic oligonucleotide
  Sense strand starting at position 6 of SEQ ID NO: 586040
uaagcaucacuagaauggu

SEQ ID NO: 687433 - RNA, 19 nt, Artificial Sequence
  Description of Artificial Sequence: Synthetic oligonucleotide
  Antisense strand to SEQ ID NO: 687432
accauucuagugaugcuua

SEQ ID NO: 687434 - RNA, 19 nt, Artificial Sequence
  Description of Artificial Sequence: Synthetic oligonucleotide
  Sense strand starting at position 65 of SEQ ID NO: 586040
uugcaacagcucugugauc

SEQ ID NO: 687435 - RNA, 19 nt, Artificial Sequence
  Description of Artificial Sequence: Synthetic oligonucleotide
  Antisense strand to SEQ ID NO: 687434
gaucacagagcuguugcaa

SEQ ID NO: 687436 - RNA, 19 nt, Artificial Sequence
  Description of Artificial Sequence: Synthetic oligonucleotide
  Sense strand starting at position 67 of SEQ ID NO: 586040
gcaacagcucugugaucuu

SEQ ID NO: 687437 - RNA, 19 nt, Artificial Sequence
  Description of Artificial Sequence: Synthetic oligonucleotide
  Antisense strand to SEQ ID NO: 687436
aagaucacagagcuguugc

SEQ ID NO: 687438 - RNA, 19 nt, Artificial Sequence
  Description of Artificial Sequence: Synthetic oligonucleotide
  Sense strand starting at position 70 of SEQ ID NO: 586040
acagcucugugaucuuaca

SEQ ID NO: 687439 - RNA, 19 nt, Artificial Sequence
  Description of Artificial Sequence: Synthetic oligonucleotide
  Antisense strand to SEQ ID NO: 687438
uguaagaucacagagcugu

SEQ ID NO: 687440 - RNA, 19 nt, Artificial Sequence
  Description of Artificial Sequence: Synthetic oligonucleotide
  Sense strand starting at position 104 of SEQ ID NO: 586040
ugaucuccucuguaauaug

SEQ ID NO: 687441 - RNA, 19 nt, Artificial Sequence
  Description of Artificial Sequence: Synthetic oligonucleotide
  Antisense strand to SEQ ID NO: 687440
cauauuacagaggagauca

SEQ ID NO: 687442 - RNA, 19 nt, Artificial Sequence
  Description of Artificial Sequence: Synthetic oligonucleotide
  Sense strand starting at position 334 of SEQ ID NO: 586040
gguguaggccuguaaucuc

SEQ ID NO: 687443 - RNA, 19 nt, Artificial Sequence
  Description of Artificial Sequence: Synthetic oligonucleotide
  Antisense strand to SEQ ID NO: 687442
gagauuacaggccuacacc

SEQ ID NO: 687444 - RNA, 19 nt, Artificial Sequence
  Description of Artificial Sequence: Synthetic oligonucleotide
  Sense strand starting at position 532 of SEQ ID NO: 586040
caguaaaugcuagguauua

SEQ ID NO: 687445 - RNA, 19 nt, Artificial Sequence
  Description of Artificial Sequence: Synthetic oligonucleotide
  Antisense strand to SEQ ID NO: 687444
uaauaccuagcauuuacug

SEQ ID NO: 687446 - RNA, 19 nt, Artificial Sequence
  Description of Artificial Sequence: Synthetic oligonucleotide
  Sense strand starting at position 533 of SEQ ID NO: 586040
aguaaaugcuagguauuau

SEQ ID NO: 687447 - RNA, 19 nt, Artificial Sequence
  Description of Artificial Sequence: Synthetic oligonucleotide
  Antisense strand to SEQ ID NO: 687446
auaauaccuagcauuuacu

SEQ ID NO: 687448 - RNA, 19 nt, Artificial Sequence
  Description of Artificial Sequence: Synthetic oligonucleotide
  Sense strand starting at position 660 of SEQ ID NO: 586040
guacacaucucucuguguu

SEQ ID NO: 687449 - RNA, 19 nt, Artificial Sequence
  Description of Artificial Sequence: Synthetic oligonucleotide
  Antisense strand to SEQ ID NO: 687448
aacacagagagauguguac

SEQ ID NO: 687450 - RNA, 19 nt, Artificial Sequence
  Description of Artificial Sequence: Synthetic oligonucleotide
  Sense strand starting at position 663 of SEQ ID NO: 586040
cacaucucucuguguugga

SEQ ID NO: 687451 - RNA, 19 nt, Artificial Sequence
  Description of Artificial Sequence: Synthetic oligonucleotide
  Antisense strand to SEQ ID NO: 687450
uccaacacagagagaugug

SEQ ID NO: 687452 - RNA, 19 nt, Artificial Sequence
  Description of Artificial Sequence: Synthetic oligonucleotide
  Sense strand starting at position 664 of SEQ ID NO: 586040
acaucucucuguguuggaa

SEQ ID NO: 687453 - RNA, 19 nt, Artificial Sequence
  Description of Artificial Sequence: Synthetic oligonucleotide
  Antisense strand to SEQ ID NO: 687452
uuccaacacagagagaugu

SEQ ID NO: 687454 - RNA, 19 nt, Artificial Sequence
  Description of Artificial Sequence: Synthetic oligonucleotide
  Sense strand starting at position 814 of SEQ ID NO: 586040
cugacauucuugucaugau

SEQ ID NO: 687455 - RNA, 19 nt, Artificial Sequence
  Description of Artificial Sequence: Synthetic oligonucleotide
  Antisense strand to SEQ ID NO: 687454
aucaugacaagaaugucag

SEQ ID NO: 687456 - RNA, 19 nt, Artificial Sequence
  Description of Artificial Sequence: Synthetic oligonucleotide
  Sense strand starting at position 985 of SEQ ID NO: 586040
cugucuaccguguaaauaa

SEQ ID NO: 687457 - RNA, 19 nt, Artificial Sequence
  Description of Artificial Sequence: Synthetic oligonucleotide
  Antisense strand to SEQ ID NO: 687456
uuauuuacacgguagacag

SEQ ID NO: 687458 - RNA, 19 nt, Artificial Sequence
  Description of Artificial Sequence: Synthetic oligonucleotide
  Sense strand starting at position 1008 of SEQ ID NO: 586040
acaauuaagucaccuuguu

SEQ ID NO: 687459 - RNA, 19 nt, Artificial Sequence
  Description of Artificial Sequence: Synthetic oligonucleotide
  Antisense strand to SEQ ID NO: 687458
aacaaggugacuuaauugu

SEQ ID NO: 687460 - RNA, 19 nt, Artificial Sequence
  Description of Artificial Sequence: Synthetic oligonucleotide
  Sense strand starting at position 1074 of SEQ ID NO: 586040
aguuaaacuucccuuuggu

SEQ ID NO: 687461 - RNA, 19 nt, Artificial Sequence
  Description of Artificial Sequence: Synthetic oligonucleotide
  Antisense strand to SEQ ID NO: 687460
accaaagggaaguuuaacu

SEQ ID NO: 687462 - RNA, 19 nt, Artificial Sequence
  Description of Artificial Sequence: Synthetic oligonucleotide
  Sense strand starting at position 1087 of SEQ ID NO: 586040
uuuggucuguugcuugaaa

SEQ ID NO: 687463 - RNA, 19 nt, Artificial Sequence
  Description of Artificial Sequence: Synthetic oligonucleotide
  Antisense strand to SEQ ID NO: 687462
uuucaagcaacagaccaaa

SEQ ID NO: 687464 - RNA, 19 nt, Artificial Sequence
  Description of Artificial Sequence: Synthetic oligonucleotide
  Sense strand starting at position 1088 of SEQ ID NO: 586040
uuggucuguugcuugaaau

SEQ ID NO: 687465 - RNA, 19 nt, Artificial Sequence
  Description of Artificial Sequence: Synthetic oligonucleotide
  Antisense strand to SEQ ID NO: 687464
auuucaagcaacagaccaa

SEQ ID NO: 687466 - RNA, 19 nt, Artificial Sequence
  Description of Artificial Sequence: Synthetic oligonucleotide
  Sense strand starting at position 1089 of SEQ ID NO: 586040
uggucuguugcuugaaaua

SEQ ID NO: 687467 - RNA, 19 nt, Artificial Sequence
  Description of Artificial Sequence: Synthetic oligonucleotide
  Antisense strand to SEQ ID NO: 687466
uauuucaagcaacagacca

SEQ ID NO: 687468 - RNA, 19 nt, Artificial Sequence
  Description of Artificial Sequence: Synthetic oligonucleotide
  Sense strand starting at position 1196 of SEQ ID NO: 586040
guaaauguuuauuccaaag

SEQ ID NO: 687469 - RNA, 19 nt, Artificial Sequence
  Description of Artificial Sequence: Synthetic oligonucleotide
  Antisense strand to SEQ ID NO: 687468
cuuuggaauaaacauuuac

SEQ ID NO: 687470 - RNA, 19 nt, Artificial Sequence
  Description of Artificial Sequence: Synthetic oligonucleotide
  Sense strand starting at position 1405 of SEQ ID NO: 586040
aagcguggcgcuguucaaa

SEQ ID NO: 687471 - RNA, 19 nt, Artificial Sequence
  Description of Artificial Sequence: Synthetic oligonucleotide
  Antisense strand to SEQ ID NO: 687470
uuugaacagcgccacgcuu

SEQ ID NO: 687472 - RNA, 19 nt, Artificial Sequence
  Description of Artificial Sequence: Synthetic oligonucleotide
  Sense strand starting at position 1547 of SEQ ID NO: 586040
gaaguaguuccacaagcca

SEQ ID NO: 687473 - RNA, 19 nt, Artificial Sequence
  Description of Artificial Sequence: Synthetic oligonucleotide
  Antisense strand to SEQ ID NO: 687472
uggcuuguggaacuacuuc

SEQ ID NO: 687474 - RNA, 19 nt, Artificial Sequence
  Description of Artificial Sequence: Synthetic oligonucleotide
  Sense strand starting at position 1660 of SEQ ID NO: 586040
agaggacuuaccugugcca

SEQ ID NO: 687475 - RNA, 19 nt, Artificial Sequence
  Description of Artificial Sequence: Synthetic oligonucleotide
  Antisense strand to SEQ ID NO: 687474
uggcacagguaaguccucu

SEQ ID NO: 687476 - RNA, 19 nt, Artificial Sequence
  Description of Artificial Sequence: Synthetic oligonucleotide
  Sense strand starting at position 2013 of SEQ ID NO: 586040
aguagugacuguucucuaa

SEQ ID NO: 687477 - RNA, 19 nt, Artificial Sequence
  Description of Artificial Sequence: Synthetic oligonucleotide
  Antisense strand to SEQ ID NO: 687476
uuagagaacagucacuacu

SEQ ID NO: 687478 - RNA, 19 nt, Artificial Sequence
  Description of Artificial Sequence: Synthetic oligonucleotide
  Sense strand starting at position 2015 of SEQ ID NO: 586040
uagugacuguucucuaagu

SEQ ID NO: 687479 - RNA, 19 nt, Artificial Sequence
  Description of Artificial Sequence: Synthetic oligonucleotide
  Antisense strand to SEQ ID NO: 687478
acuuagagaacagucacua

SEQ ID NO: 687480 - RNA, 19 nt, Artificial Sequence
  Description of Artificial Sequence: Synthetic oligonucleotide
  Sense strand starting at position 2017 of SEQ ID NO: 586040
gugacuguucucuaaguga

SEQ ID NO: 687481 - RNA, 19 nt, Artificial Sequence
  Description of Artificial Sequence: Synthetic oligonucleotide
  Antisense strand to SEQ ID NO: 687480
ucacuuagagaacagucac

SEQ ID NO: 687482 - RNA, 19 nt, Artificial Sequence
  Description of Artificial Sequence: Synthetic oligonucleotide
  Sense strand starting at position 2037 of SEQ ID NO: 586040
uguguuaccuguuccugga

SEQ ID NO: 687483 - RNA, 19 nt, Artificial Sequence
  Description of Artificial Sequence: Synthetic oligonucleotide
  Antisense strand to SEQ ID NO: 687482
uccaggaacagguaacaca

SEQ ID NO: 687484 - RNA, 19 nt, Artificial Sequence
  Description of Artificial Sequence: Synthetic oligonucleotide
  Sense strand starting at position 2295 of SEQ ID NO: 586040
ucagauucucucggaggca

SEQ ID NO: 687485 - RNA, 19 nt, Artificial Sequence
  Description of Artificial Sequence: Synthetic oligonucleotide
  Antisense strand to SEQ ID NO: 687484
ugccuccgagagaaucuga

SEQ ID NO: 687486 - RNA, 19 nt, Artificial Sequence
  Description of Artificial Sequence: Synthetic oligonucleotide
  Sense strand starting at position 2362 of SEQ ID NO: 586040
gguggacugugaguggaaa

SEQ ID NO: 687487 - RNA, 19 nt, Artificial Sequence
  Description of Artificial Sequence: Synthetic oligonucleotide
  Antisense strand to SEQ ID NO: 687486
uuuccacucacaguccacc

SEQ ID NO: 687488 - RNA, 19 nt, Artificial Sequence
  Description of Artificial Sequence: Synthetic oligonucleotide
  Sense strand starting at position 2445 of SEQ ID NO: 586040
gccacaguuccaugacaga

SEQ ID NO: 687489 - RNA, 19 nt, Artificial Sequence
  Description of Artificial Sequence: Synthetic oligonucleotide
  Antisense strand to SEQ ID NO: 687488
ucugucauggaacuguggc

SEQ ID NO: 687490 - RNA, 19 nt, Artificial Sequence
  Description of Artificial Sequence: Synthetic oligonucleotide
  Sense strand starting at position 2448 of SEQ ID NO: 586040
acaguuccaugacagauga

SEQ ID NO: 687491 - RNA, 19 nt, Artificial Sequence
  Description of Artificial Sequence: Synthetic oligonucleotide
  Antisense strand to SEQ ID NO: 687490
ucaucugucauggaacugu

SEQ ID NO: 687492 - RNA, 19 nt, Artificial Sequence
  Description of Artificial Sequence: Synthetic oligonucleotide
  Sense strand starting at position 2740 of SEQ ID NO: 586040
ggacaagagugagaauuau

SEQ ID NO: 687493 - RNA, 19 nt, Artificial Sequence
  Description of Artificial Sequence: Synthetic oligonucleotide
  Antisense strand to SEQ ID NO: 687492
auaauucucacucuugucc

SEQ ID NO: 687494 - RNA, 19 nt, Artificial Sequence
  Description of Artificial Sequence: Synthetic oligonucleotide
  Sense strand starting at position 2746 of SEQ ID NO: 586040
gagugagaauuauucucaa

SEQ ID NO: 687495 - RNA, 19 nt, Artificial Sequence
  Description of Artificial Sequence: Synthetic oligonucleotide
  Antisense strand to SEQ ID NO: 687494
uugagaauaauucucacuc

SEQ ID NO: 687496 - RNA, 19 nt, Artificial Sequence
  Description of Artificial Sequence: Synthetic oligonucleotide
  Sense strand starting at position 2906 of SEQ ID NO: 586040
gggucuguguucccaucuu

SEQ ID NO: 687497 - RNA, 19 nt, Artificial Sequence
  Description of Artificial Sequence: Synthetic oligonucleotide
  Antisense strand to SEQ ID NO: 687496
aagaugggaacacagaccc

SEQ ID NO: 687498 - RNA, 19 nt, Artificial Sequence
  Description of Artificial Sequence: Synthetic oligonucleotide
  Sense strand starting at position 3005 of SEQ ID NO: 586040
ucuauuuccuuugaucagu

SEQ ID NO: 687499 - RNA, 19 nt, Artificial Sequence
  Description of Artificial Sequence: Synthetic oligonucleotide
  Antisense strand to SEQ ID NO: 687498
acugaucaaaggaaauaga

SEQ ID NO: 687500 - RNA, 19 nt, Artificial Sequence
  Description of Artificial Sequence: Synthetic oligonucleotide
  Sense strand starting at position 3184 of SEQ ID NO: 586040
ucugguguccuuggagaac

SEQ ID NO: 687501 - RNA, 19 nt, Artificial Sequence
  Description of Artificial Sequence: Synthetic oligonucleotide
  Antisense strand to SEQ ID NO: 687500
guucuccaaggacaccaga

SEQ ID NO: 687502 - RNA, 19 nt, Artificial Sequence
  Description of Artificial Sequence: Synthetic oligonucleotide
  Sense strand starting at position 3187 of SEQ ID NO: 586040
gguguccuuggagaaccau

SEQ ID NO: 687503 - RNA, 19 nt, Artificial Sequence
  Description of Artificial Sequence: Synthetic oligonucleotide
  Antisense strand to SEQ ID NO: 687502
augguucuccaaggacacc

SEQ ID NO: 687504 - RNA, 19 nt, Artificial Sequence
  Description of Artificial Sequence: Synthetic oligonucleotide
  Sense strand starting at position 3248 of SEQ ID NO: 586040
gucauuaaacuguaaguau

SEQ ID NO: 687505 - RNA, 19 nt, Artificial Sequence
  Description of Artificial Sequence: Synthetic oligonucleotide
  Antisense strand to SEQ ID NO: 687504
auacuuacaguuuaaugac

SEQ ID NO: 687506 - RNA, 19 nt, Artificial Sequence
  Description of Artificial Sequence: Synthetic oligonucleotide
  Sense strand starting at position 3520 of SEQ ID NO: 586040
guccuuuagcauuaggcau

SEQ ID NO: 687507 - RNA, 19 nt, Artificial Sequence
  Description of Artificial Sequence: Synthetic oligonucleotide
  Antisense strand to SEQ ID NO: 687506
augccuaaugcuaaaggac

SEQ ID NO: 687508 - RNA, 19 nt, Artificial Sequence
  Description of Artificial Sequence: Synthetic oligonucleotide
  Sense strand starting at position 3616 of SEQ ID NO: 586040
caguguucucacuguagag

SEQ ID NO: 687509 - RNA, 19 nt, Artificial Sequence
  Description of Artificial Sequence: Synthetic oligonucleotide
  Antisense strand to SEQ ID NO: 687508
cucuacagugagaacacug

SEQ ID NO: 687510 - RNA, 19 nt, Artificial Sequence
  Description of Artificial Sequence: Synthetic oligonucleotide
  Sense strand starting at position 3620 of SEQ ID NO: 586040
guucucacuguagagaagu

SEQ ID NO: 687511 - RNA, 19 nt, Artificial Sequence
  Description of Artificial Sequence: Synthetic oligonucleotide
  Antisense strand to SEQ ID NO: 687510
acuucucuacagugagaac

SEQ ID NO: 687512 - RNA, 19 nt, Artificial Sequence
  Description of Artificial Sequence: Synthetic oligonucleotide
  Sense strand starting at position 5 of SEQ ID NO: 586041
auagucaauauguggguaa

SEQ ID NO: 687513 - RNA, 19 nt, Artificial Sequence
  Description of Artificial Sequence: Synthetic oligonucleotide
  Antisense strand to SEQ ID NO: 687512
uuacccacauauugacuau

SEQ ID NO: 687514 - RNA, 19 nt, Artificial Sequence
  Description of Artificial Sequence: Synthetic oligonucleotide
  Sense strand starting at position 8 of SEQ ID NO: 586041
gucaauauguggguaaaua

SEQ ID NO: 687515 - RNA, 19 nt, Artificial Sequence
  Description of Artificial Sequence: Synthetic oligonucleotide
  Antisense strand to SEQ ID NO: 687514
uauuuacccacauauugac

SEQ ID NO: 687516 - RNA, 19 nt, Artificial Sequence
  Description of Artificial Sequence: Synthetic oligonucleotide
  Sense strand starting at position 99 of SEQ ID NO: 586041
uaagcaucacuagaauggu

SEQ ID NO: 687517 - RNA, 19 nt, Artificial Sequence
  Description of Artificial Sequence: Synthetic oligonucleotide
  Antisense strand to SEQ ID NO: 687516
accauucuagugaugcuua

SEQ ID NO: 687518 - RNA, 19 nt, Artificial Sequence
  Description of Artificial Sequence: Synthetic oligonucleotide
  Sense strand starting at position 158 of SEQ ID NO: 586041
uugcaacagcucugugauc

SEQ ID NO: 687519 - RNA, 19 nt, Artificial Sequence
  Description of Artificial Sequence: Synthetic oligonucleotide
  Antisense strand to SEQ ID NO: 687518
gaucacagagcuguugcaa

SEQ ID NO: 687520 - RNA, 19 nt, Artificial Sequence
  Description of Artificial Sequence: Synthetic oligonucleotide
  Sense strand starting at position 160 of SEQ ID NO: 586041
gcaacagcucugugaucuu

SEQ ID NO: 687521 - RNA, 19 nt, Artificial Sequence
  Description of Artificial Sequence: Synthetic oligonucleotide
  Antisense strand to SEQ ID NO: 687520
aagaucacagagcuguugc

SEQ ID NO: 687522 - RNA, 19 nt, Artificial Sequence
  Description of Artificial Sequence: Synthetic oligonucleotide
  Sense strand starting at position 163 of SEQ ID NO: 586041
acagcucugugaucuuaca

SEQ ID NO: 687523 - RNA, 19 nt, Artificial Sequence
  Description of Artificial Sequence: Synthetic oligonucleotide
  Antisense strand to SEQ ID NO: 687522
uguaagaucacagagcugu

SEQ ID NO: 687524 - RNA, 19 nt, Artificial Sequence
  Description of Artificial Sequence: Synthetic oligonucleotide
  Sense strand starting at position 197 of SEQ ID NO: 586041
ugaucuccucuguaauaug

SEQ ID NO: 687525 - RNA, 19 nt, Artificial Sequence
  Description of Artificial Sequence: Synthetic oligonucleotide
  Antisense strand to SEQ ID NO: 687524
cauauuacagaggagauca

SEQ ID NO: 687526 - RNA, 19 nt, Artificial Sequence
  Description of Artificial Sequence: Synthetic oligonucleotide
  Sense strand starting at position 427 of SEQ ID NO: 586041
gguguaggccuguaaucuc

SEQ ID NO: 687527 - RNA, 19 nt, Artificial Sequence
  Description of Artificial Sequence: Synthetic oligonucleotide
  Antisense strand to SEQ ID NO: 687526
gagauuacaggccuacacc

SEQ ID NO: 687528 - RNA, 19 nt, Artificial Sequence
  Description of Artificial Sequence: Synthetic oligonucleotide
  Sense strand starting at position 625 of SEQ ID NO: 586041
caguaaaugcuagguauua

SEQ ID NO: 687529 - RNA, 19 nt, Artificial Sequence
  Description of Artificial Sequence: Synthetic oligonucleotide
  Antisense strand to SEQ ID NO: 687528
uaauaccuagcauuuacug

SEQ ID NO: 687530 - RNA, 19 nt, Artificial Sequence
  Description of Artificial Sequence: Synthetic oligonucleotide
  Sense strand starting at position 626 of SEQ ID NO: 586041
aguaaaugcuagguauuau

SEQ ID NO: 687531 - RNA, 19 nt, Artificial Sequence
  Description of Artificial Sequence: Synthetic oligonucleotide
  Antisense strand to SEQ ID NO: 687530
auaauaccuagcauuuacu

SEQ ID NO: 687532 - RNA, 19 nt, Artificial Sequence
  Description of Artificial Sequence: Synthetic oligonucleotide
  Sense strand starting at position 753 of SEQ ID NO: 586041
guacacaucucucuguguu

SEQ ID NO: 687533 - RNA, 19 nt, Artificial Sequence
  Description of Artificial Sequence: Synthetic oligonucleotide
  Antisense strand to SEQ ID NO: 687532
aacacagagagauguguac

SEQ ID NO: 687534 - RNA, 19 nt, Artificial Sequence
  Description of Artificial Sequence: Synthetic oligonucleotide
  Sense strand starting at position 756 of SEQ ID NO: 586041
cacaucucucuguguugga

SEQ ID NO: 687535 - RNA, 19 nt, Artificial Sequence
  Description of Artificial Sequence: Synthetic oligonucleotide
  Antisense strand to SEQ ID NO: 687534
uccaacacagagagaugug

SEQ ID NO: 687536 - RNA, 19 nt, Artificial Sequence
  Description of Artificial Sequence: Synthetic oligonucleotide
  Sense strand starting at position 757 of SEQ ID NO: 586041
acaucucucuguguuggaa

SEQ ID NO: 687537 - RNA, 19 nt, Artificial Sequence
  Description of Artificial Sequence: Synthetic oligonucleotide
  Antisense strand to SEQ ID NO: 687536
uuccaacacagagagaugu

SEQ ID NO: 687538 - RNA, 19 nt, Artificial Sequence
  Description of Artificial Sequence: Synthetic oligonucleotide
  Sense strand starting at position 907 of SEQ ID NO: 586041
cugacauucuugucaugau

SEQ ID NO: 687539 - RNA, 19 nt, Artificial Sequence
  Description of Artificial Sequence: Synthetic oligonucleotide
  Antisense strand to SEQ ID NO: 687538
aucaugacaagaaugucag

SEQ ID NO: 687540 - RNA, 19 nt, Artificial Sequence
  Description of Artificial Sequence: Synthetic oligonucleotide
  Sense strand starting at position 1078 of SEQ ID NO: 586041
cugucuaccguguaaauaa

SEQ ID NO: 687541 - RNA, 19 nt, Artificial Sequence
  Description of Artificial Sequence: Synthetic oligonucleotide
  Antisense strand to SEQ ID NO: 687540
uuauuuacacgguagacag

SEQ ID NO: 687542 - RNA, 19 nt, Artificial Sequence
  Description of Artificial Sequence: Synthetic oligonucleotide
  Sense strand starting at position 1101 of SEQ ID NO: 586041
acaauuaagucaccuuguu

SEQ ID NO: 687543 - RNA, 19 nt, Artificial Sequence
  Description of Artificial Sequence: Synthetic oligonucleotide
  Antisense strand to SEQ ID NO: 687542
aacaaggugacuuaauugu

SEQ ID NO: 687544 - RNA, 19 nt, Artificial Sequence
  Description of Artificial Sequence: Synthetic oligonucleotide
  Sense strand starting at position 1167 of SEQ ID NO: 586041
aguuaaacuucccuuuggu

SEQ ID NO: 687545 - RNA, 19 nt, Artificial Sequence
  Description of Artificial Sequence: Synthetic oligonucleotide
  Antisense strand to SEQ ID NO: 687544
accaaagggaaguuuaacu

SEQ ID NO: 687546 - RNA, 19 nt, Artificial Sequence
  Description of Artificial Sequence: Synthetic oligonucleotide
  Sense strand starting at position 1180 of SEQ ID NO: 586041
uuuggucuguugcuugaaa

SEQ ID NO: 687547 - RNA, 19 nt, Artificial Sequence
  Description of Artificial Sequence: Synthetic oligonucleotide
  Antisense strand to SEQ ID NO: 687546
uuucaagcaacagaccaaa

SEQ ID NO: 687548 - RNA, 19 nt, Artificial Sequence
  Description of Artificial Sequence: Synthetic oligonucleotide
  Sense strand starting at position 1181 of SEQ ID NO: 586041
uuggucuguugcuugaaau

SEQ ID NO: 687549 - RNA, 19 nt, Artificial Sequence
  Description of Artificial Sequence: Synthetic oligonucleotide
  Antisense strand to SEQ ID NO: 687548
auuucaagcaacagaccaa

SEQ ID NO: 687550 - RNA, 19 nt, Artificial Sequence
  Description of Artificial Sequence: Synthetic oligonucleotide
  Sense strand starting at position 1182 of SEQ ID NO: 586041
uggucuguugcuugaaaua

SEQ ID NO: 687551 - RNA, 19 nt, Artificial Sequence
  Description of Artificial Sequence: Synthetic oligonucleotide
  Antisense strand to SEQ ID NO: 687550
uauuucaagcaacagacca

SEQ ID NO: 687552 - RNA, 19 nt, Artificial Sequence
  Description of Artificial Sequence: Synthetic oligonucleotide
  Sense strand starting at position 1289 of SEQ ID NO: 586041
guaaauguuuauuccaaag

SEQ ID NO: 687553 - RNA, 19 nt, Artificial Sequence
  Description of Artificial Sequence: Synthetic oligonucleotide
  Antisense strand to SEQ ID NO: 687552
cuuuggaauaaacauuuac

SEQ ID NO: 687554 - RNA, 19 nt, Artificial Sequence
  Description of Artificial Sequence: Synthetic oligonucleotide
  Sense strand starting at position 1498 of SEQ ID NO: 586041
aagcguggcgcuguucaaa

SEQ ID NO: 687555 - RNA, 19 nt, Artificial Sequence
  Description of Artificial Sequence: Synthetic oligonucleotide
  Antisense strand to SEQ ID NO: 687554
uuugaacagcgccacgcuu

SEQ ID NO: 687556 - RNA, 19 nt, Artificial Sequence
  Description of Artificial Sequence: Synthetic oligonucleotide
  Sense strand starting at position 1640 of SEQ ID NO: 586041
gaaguaguuccacaagcca

SEQ ID NO: 687557 - RNA, 19 nt, Artificial Sequence
  Description of Artificial Sequence: Synthetic oligonucleotide
  Antisense strand to SEQ ID NO: 687556
uggcuuguggaacuacuuc

SEQ ID NO: 687558 - RNA, 19 nt, Artificial Sequence
  Description of Artificial Sequence: Synthetic oligonucleotide
  Sense strand starting at position 1753 of SEQ ID NO: 586041
agaggacuuaccugugcca

SEQ ID NO: 687559 - RNA, 19 nt, Artificial Sequence
  Description of Artificial Sequence: Synthetic oligonucleotide
  Antisense strand to SEQ ID NO: 687558
uggcacagguaaguccucu

SEQ ID NO: 687560 - RNA, 19 nt, Artificial Sequence
  Description of Artificial Sequence: Synthetic oligonucleotide
  Sense strand starting at position 2106 of SEQ ID NO: 586041
aguagugacuguucucuaa

SEQ ID NO: 687561 - RNA, 19 nt, Artificial Sequence
  Description of Artificial Sequence: Synthetic oligonucleotide
  Antisense strand to SEQ ID NO: 687560
uuagagaacagucacuacu

SEQ ID NO: 687562 - RNA, 19 nt, Artificial Sequence
  Description of Artificial Sequence: Synthetic oligonucleotide
  Sense strand starting at position 2108 of SEQ ID NO: 586041
uagugacuguucucuaagu

SEQ ID NO: 687563 - RNA, 19 nt, Artificial Sequence
  Description of Artificial Sequence: Synthetic oligonucleotide
  Antisense strand to SEQ ID NO: 687562
acuuagagaacagucacua

SEQ ID NO: 687564 - RNA, 19 nt, Artificial Sequence
  Description of Artificial Sequence: Synthetic oligonucleotide
  Sense strand starting at position 2110 of SEQ ID NO: 586041
gugacuguucucuaaguga

SEQ ID NO: 687565 - RNA, 19 nt, Artificial Sequence
  Description of Artificial Sequence: Synthetic oligonucleotide
  Antisense strand to SEQ ID NO: 687564
ucacuuagagaacagucac

SEQ ID NO: 687566 - RNA, 19 nt, Artificial Sequence
  Description of Artificial Sequence: Synthetic oligonucleotide
  Sense strand starting at position 2130 of SEQ ID NO: 586041
uguguuaccuguuccugga

SEQ ID NO: 687567 - RNA, 19 nt, Artificial Sequence
  Description of Artificial Sequence: Synthetic oligonucleotide
  Antisense strand to SEQ ID NO: 687566
uccaggaacagguaacaca

SEQ ID NO: 687568 - RNA, 19 nt, Artificial Sequence
  Description of Artificial Sequence: Synthetic oligonucleotide
  Sense strand starting at position 2388 of SEQ ID NO: 586041
ucagauucucucggaggca

SEQ ID NO: 687569 - RNA, 19 nt, Artificial Sequence
  Description of Artificial Sequence: Synthetic oligonucleotide
  Antisense strand to SEQ ID NO: 687568
ugccuccgagagaaucuga

SEQ ID NO: 687570 - RNA, 19 nt, Artificial Sequence
  Description of Artificial Sequence: Synthetic oligonucleotide
  Sense strand starting at position 2455 of SEQ ID NO: 586041
gguggacugugaguggaaa

SEQ ID NO: 687571 - RNA, 19 nt, Artificial Sequence
  Description of Artificial Sequence: Synthetic oligonucleotide
  Antisense strand to SEQ ID NO: 687570
uuuccacucacaguccacc

SEQ ID NO: 687572 - RNA, 19 nt, Artificial Sequence
  Description of Artificial Sequence: Synthetic oligonucleotide
  Sense strand starting at position 2538 of SEQ ID NO: 586041
gccacaguuccaugacaga

SEQ ID NO: 687573 - RNA, 19 nt, Artificial Sequence
  Description of Artificial Sequence: Synthetic oligonucleotide
  Antisense strand to SEQ ID NO: 687572
ucugucauggaacuguggc

SEQ ID NO: 687574 - RNA, 19 nt, Artificial Sequence
  Description of Artificial Sequence: Synthetic oligonucleotide
  Sense strand starting at position 2833 of SEQ ID NO: 586041
ggacaagagugagaauuau

SEQ ID NO: 687575 - RNA, 19 nt, Artificial Sequence
  Description of Artificial Sequence: Synthetic oligonucleotide
  Antisense strand to SEQ ID NO: 687574
auaauucucacucuugucc

SEQ ID NO: 687576 - RNA, 19 nt, Artificial Sequence
  Description of Artificial Sequence: Synthetic oligonucleotide
  Sense strand starting at position 2839 of SEQ ID NO: 586041
gagugagaauuauucucaa

SEQ ID NO: 687577 - RNA, 19 nt, Artificial Sequence
  Description of Artificial Sequence: Synthetic oligonucleotide
  Antisense strand to SEQ ID NO: 687576
uugagaauaauucucacuc

SEQ ID NO: 687578 - RNA, 19 nt, Artificial Sequence
  Description of Artificial Sequence: Synthetic oligonucleotide
  Sense strand starting at position 3098 of SEQ ID NO: 586041
ucuauuuccuuugaucagu

SEQ ID NO: 687579 - RNA, 19 nt, Artificial Sequence
  Description of Artificial Sequence: Synthetic oligonucleotide
  Antisense strand to SEQ ID NO: 687578
acugaucaaaggaaauaga

SEQ ID NO: 687580 - RNA, 19 nt, Artificial Sequence
  Description of Artificial Sequence: Synthetic oligonucleotide
  Sense strand starting at position 3277 of SEQ ID NO: 586041
ucugguguccuuggagaac

SEQ ID NO: 687581 - RNA, 19 nt, Artificial Sequence
  Description of Artificial Sequence: Synthetic oligonucleotide
  Antisense strand to SEQ ID NO: 687580
guucuccaaggacaccaga

SEQ ID NO: 687582 - RNA, 19 nt, Artificial Sequence
  Description of Artificial Sequence: Synthetic oligonucleotide
  Sense strand starting at position 3280 of SEQ ID NO: 586041
gguguccuuggagaaccau

SEQ ID NO: 687583 - RNA, 19 nt, Artificial Sequence
  Description of Artificial Sequence: Synthetic oligonucleotide
  Antisense strand to SEQ ID NO: 687582
augguucuccaaggacacc

SEQ ID NO: 687584 - RNA, 19 nt, Artificial Sequence
  Description of Artificial Sequence: Synthetic oligonucleotide
  Sense strand starting at position 3341 of SEQ ID NO: 586041
gucauuaaacuguaaguau

SEQ ID NO: 687585 - RNA, 19 nt, Artificial Sequence
  Description of Artificial Sequence: Synthetic oligonucleotide
  Antisense strand to SEQ ID NO: 687584
auacuuacaguuuaaugac

SEQ ID NO: 687586 - RNA, 19 nt, Artificial Sequence
  Description of Artificial Sequence: Synthetic oligonucleotide
  Sense strand starting at position 3613 of SEQ ID NO: 586041
guccuuuagcauuaggcau

SEQ ID NO: 687587 - RNA, 19 nt, Artificial Sequence
  Description of Artificial Sequence: Synthetic oligonucleotide
  Antisense strand to SEQ ID NO: 687586
augccuaaugcuaaaggac

SEQ ID NO: 687588 - RNA, 19 nt, Artificial Sequence
  Description of Artificial Sequence: Synthetic oligonucleotide
  Sense strand starting at position 3709 of SEQ ID NO: 586041
caguguucucacuguagag

SEQ ID NO: 687589 - RNA, 19 nt, Artificial Sequence
  Description of Artificial Sequence: Synthetic oligonucleotide
  Antisense strand to SEQ ID NO: 687588
cucuacagugagaacacug

SEQ ID NO: 687590 - RNA, 19 nt, Artificial Sequence
  Description of Artificial Sequence: Synthetic oligonucleotide
  Sense strand starting at position 3713 of SEQ ID NO: 586041
guucucacuguagagaagu

SEQ ID NO: 687591 - RNA, 19 nt, Artificial Sequence
  Description of Artificial Sequence: Synthetic oligonucleotide
  Antisense strand to SEQ ID NO: 687590
acuucucuacagugagaac

SEQ ID NO: 687592 - RNA, 19 nt, Artificial Sequence
  Description of Artificial Sequence: Synthetic oligonucleotide
  Sense strand starting at position 27 of SEQ ID NO: 586042
aagccuugugugcaaacga

SEQ ID NO: 687593 - RNA, 19 nt, Artificial Sequence
  Description of Artificial Sequence: Synthetic oligonucleotide
  Antisense strand to SEQ ID NO: 687592
ucguuugcacacaaggcuu

SEQ ID NO: 687594 - RNA, 19 nt, Artificial Sequence
  Description of Artificial Sequence: Synthetic oligonucleotide
  Sense strand starting at position 73 of SEQ ID NO: 586042
uuuacaguuugaucccuga

SEQ ID NO: 687595 - RNA, 19 nt, Artificial Sequence
  Description of Artificial Sequence: Synthetic oligonucleotide
  Antisense strand to SEQ ID NO: 687594
ucagggaucaaacuguaaa

SEQ ID NO: 687596 - RNA, 19 nt, Artificial Sequence
  Description of Artificial Sequence: Synthetic oligonucleotide
  Sense strand starting at position 116 of SEQ ID NO: 586042
ugguucuucucccuuauua

SEQ ID NO: 687597 - RNA, 19 nt, Artificial Sequence
  Description of Artificial Sequence: Synthetic oligonucleotide
  Antisense strand to SEQ ID NO: 687596
uaauaagggagaagaacca

SEQ ID NO: 687598 - RNA, 19 nt, Artificial Sequence
  Description of Artificial Sequence: Synthetic oligonucleotide
  Sense strand starting at position 118 of SEQ ID NO: 586042
guucuucucccuuauuaug

SEQ ID NO: 687599 - RNA, 19 nt, Artificial Sequence
  Description of Artificial Sequence: Synthetic oligonucleotide
  Antisense strand to SEQ ID NO: 687598
cauaauaagggagaagaac

SEQ ID NO: 687600 - RNA, 19 nt, Artificial Sequence
  Description of Artificial Sequence: Synthetic oligonucleotide
  Sense strand starting at position 223 of SEQ ID NO: 586042
augacaugcuuucuagacu

SEQ ID NO: 687601 - RNA, 19 nt, Artificial Sequence
  Description of Artificial Sequence: Synthetic oligonucleotide
  Antisense strand to SEQ ID NO: 687600
agucuagaaagcaugucau

SEQ ID NO: 687602 - RNA, 19 nt, Artificial Sequence
  Description of Artificial Sequence: Synthetic oligonucleotide
  Sense strand starting at position 314 of SEQ ID NO: 586042
cacggauguuucuucucua

SEQ ID NO: 687603 - RNA, 19 nt, Artificial Sequence
  Description of Artificial Sequence: Synthetic oligonucleotide
  Antisense strand to SEQ ID NO: 687602
uagagaagaaacauccgug

SEQ ID NO: 687604 - RNA, 19 nt, Artificial Sequence
  Description of Artificial Sequence: Synthetic oligonucleotide
  Sense strand starting at position 317 of SEQ ID NO: 586042
ggauguuucuucucuagag

SEQ ID NO: 687605 - RNA, 19 nt, Artificial Sequence
  Description of Artificial Sequence: Synthetic oligonucleotide
  Antisense strand to SEQ ID NO: 687604
cucuagagaagaaacaucc

SEQ ID NO: 687606 - RNA, 19 nt, Artificial Sequence
  Description of Artificial Sequence: Synthetic oligonucleotide
  Sense strand starting at position 318 of SEQ ID NO: 586042
gauguuucuucucuagagu

SEQ ID NO: 687607 - RNA, 19 nt, Artificial Sequence
  Description of Artificial Sequence: Synthetic oligonucleotide
  Antisense strand to SEQ ID NO: 687606
acucuagagaagaaacauc

SEQ ID NO: 687608 - RNA, 19 nt, Artificial Sequence
  Description of Artificial Sequence: Synthetic oligonucleotide
  Sense strand starting at position 319 of SEQ ID NO: 586042
auguuucuucucuagagua

SEQ ID NO: 687609 - RNA, 19 nt, Artificial Sequence
  Description of Artificial Sequence: Synthetic oligonucleotide
  Antisense strand to SEQ ID NO: 687608
uacucuagagaagaaacau

SEQ ID NO: 687610 - RNA, 19 nt, Artificial Sequence
  Description of Artificial Sequence: Synthetic oligonucleotide
  Sense strand starting at position 321 of SEQ ID NO: 586042
guuucuucucuagaguaca

SEQ ID NO: 687611 - RNA, 19 nt, Artificial Sequence
  Description of Artificial Sequence: Synthetic oligonucleotide
  Antisense strand to SEQ ID NO: 687610
uguacucuagagaagaaac

SEQ ID NO: 687612 - RNA, 19 nt, Artificial Sequence
  Description of Artificial Sequence: Synthetic oligonucleotide
  Sense strand starting at position 329 of SEQ ID NO: 586042
ucuagaguacaaggcauua

SEQ ID NO: 687613 - RNA, 19 nt, Artificial Sequence
  Description of Artificial Sequence: Synthetic oligonucleotide
  Antisense strand to SEQ ID NO: 687612
uaaugccuuguacucuaga

SEQ ID NO: 687614 - RNA, 19 nt, Artificial Sequence
  Description of Artificial Sequence: Synthetic oligonucleotide
  Sense strand starting at position 358 of SEQ ID NO: 586042
uacggaaauaccggaugaa

SEQ ID NO: 687615 - RNA, 19 nt, Artificial Sequence
  Description of Artificial Sequence: Synthetic oligonucleotide
  Antisense strand to SEQ ID NO: 687614
uucauccgguauuuccgua

SEQ ID NO: 687616 - RNA, 19 nt, Artificial Sequence
  Description of Artificial Sequence: Synthetic oligonucleotide
  Sense strand starting at position 565 of SEQ ID NO: 586042
aaagcugaauccguuauua

SEQ ID NO: 687617 - RNA, 19 nt, Artificial Sequence
  Description of Artificial Sequence: Synthetic oligonucleotide
  Antisense strand to SEQ ID NO: 687616
uaauaacggauucagcuuu

SEQ ID NO: 687618 - RNA, 19 nt, Artificial Sequence
  Description of Artificial Sequence: Synthetic oligonucleotide
  Sense strand starting at position 567 of SEQ ID NO: 586042
agcugaauccguuauuaug

SEQ ID NO: 687619 - RNA, 19 nt, Artificial Sequence
  Description of Artificial Sequence: Synthetic oligonucleotide
  Antisense strand to SEQ ID NO: 687618
cauaauaacggauucagcu

SEQ ID NO: 687620 - RNA, 19 nt, Artificial Sequence
  Description of Artificial Sequence: Synthetic oligonucleotide
  Sense strand starting at position 569 of SEQ ID NO: 586042
cugaauccguuauuaugua

SEQ ID NO: 687621 - RNA, 19 nt, Artificial Sequence
  Description of Artificial Sequence: Synthetic oligonucleotide
  Antisense strand to SEQ ID NO: 687620
uacauaauaacggauucag

SEQ ID NO: 687622 - RNA, 19 nt, Artificial Sequence
  Description of Artificial Sequence: Synthetic oligonucleotide
  Sense strand starting at position 573 of SEQ ID NO: 586042
auccguuauuauguacaaa

SEQ ID NO: 687623 - RNA, 19 nt, Artificial Sequence
  Description of Artificial Sequence: Synthetic oligonucleotide
  Antisense strand to SEQ ID NO: 687622
uuuguacauaauaacggau

SEQ ID NO: 687624 - RNA, 19 nt, Artificial Sequence
  Description of Artificial Sequence: Synthetic oligonucleotide
  Sense strand starting at position 637 of SEQ ID NO: 586042
ugcgaauucgguuacuaaa

SEQ ID NO: 687625 - RNA, 19 nt, Artificial Sequence
  Description of Artificial Sequence: Synthetic oligonucleotide
  Antisense strand to SEQ ID NO: 687624
uuuaguaaccgaauucgca

SEQ ID NO: 687626 - RNA, 19 nt, Artificial Sequence
  Description of Artificial Sequence: Synthetic oligonucleotide
  Sense strand starting at position 639 of SEQ ID NO: 586042
cgaauucgguuacuaaauc

SEQ ID NO: 687627 - RNA, 19 nt, Artificial Sequence
  Description of Artificial Sequence: Synthetic oligonucleotide
  Antisense strand to SEQ ID NO: 687626
gauuuaguaaccgaauucg

SEQ ID NO: 687628 - RNA, 19 nt, Artificial Sequence
  Description of Artificial Sequence: Synthetic oligonucleotide
  Sense strand starting at position 769 of SEQ ID NO: 586042
gcaagccugccuuaccaau

SEQ ID NO: 687629 - RNA, 19 nt, Artificial Sequence
  Description of Artificial Sequence: Synthetic oligonucleotide
  Antisense strand to SEQ ID NO: 687628
auugguaaggcaggcuugc

SEQ ID NO: 687630 - RNA, 19 nt, Artificial Sequence
  Description of Artificial Sequence: Synthetic oligonucleotide
  Sense strand starting at position 945 of SEQ ID NO: 586042
cgccgagauaacuacggaa

SEQ ID NO: 687631 - RNA, 19 nt, Artificial Sequence
  Description of Artificial Sequence: Synthetic oligonucleotide
  Antisense strand to SEQ ID NO: 687630
uuccguaguuaucucggcg

SEQ ID NO: 687632 - RNA, 19 nt, Artificial Sequence
  Description of Artificial Sequence: Synthetic oligonucleotide
  Sense strand starting at position 2023 of SEQ ID NO: 586042
cggcgugucgggaagugua

SEQ ID NO: 687633 - RNA, 19 nt, Artificial Sequence
  Description of Artificial Sequence: Synthetic oligonucleotide
  Antisense strand to SEQ ID NO: 687632
uacacuucccgacacgccg

SEQ ID NO: 687634 - RNA, 19 nt, Artificial Sequence
  Description of Artificial Sequence: Synthetic oligonucleotide
  Sense strand starting at position 2116 of SEQ ID NO: 586042
cccaaucaccgccgagaau

SEQ ID NO: 687635 - RNA, 19 nt, Artificial Sequence
  Description of Artificial Sequence: Synthetic oligonucleotide
  Antisense strand to SEQ ID NO: 687634
auucucggcggugauuggg

SEQ ID NO: 687636 - RNA, 19 nt, Artificial Sequence
  Description of Artificial Sequence: Synthetic oligonucleotide
  Sense strand starting at position 2117 of SEQ ID NO: 586042
ccaaucaccgccgagaaua

SEQ ID NO: 687637 - RNA, 19 nt, Artificial Sequence
  Description of Artificial Sequence: Synthetic oligonucleotide
  Antisense strand to SEQ ID NO: 687636
uauucucggcggugauugg

SEQ ID NO: 687638 - RNA, 19 nt, Artificial Sequence
  Description of Artificial Sequence: Synthetic oligonucleotide
  Sense strand starting at position 2511 of SEQ ID NO: 586042
uguucuauuggacgugaac

SEQ ID NO: 687639 - RNA, 19 nt, Artificial Sequence
  Description of Artificial Sequence: Synthetic oligonucleotide
  Antisense strand to SEQ ID NO: 687638
guucacguccaauagaaca

SEQ ID NO: 687640 - RNA, 19 nt, Artificial Sequence
  Description of Artificial Sequence: Synthetic oligonucleotide
  Sense strand starting at position 2513 of SEQ ID NO: 586042
uucuauuggacgugaacag

SEQ ID NO: 687641 - RNA, 19 nt, Artificial Sequence
  Description of Artificial Sequence: Synthetic oligonucleotide
  Antisense strand to SEQ ID NO: 687640
cuguucacguccaauagaa

SEQ ID NO: 687642 - RNA, 19 nt, Artificial Sequence
  Description of Artificial Sequence: Synthetic oligonucleotide
  Sense strand starting at position 2547 of SEQ ID NO: 586042
caaguacgcgagugaaaga

SEQ ID NO: 687643 - RNA, 19 nt, Artificial Sequence
  Description of Artificial Sequence: Synthetic oligonucleotide
  Antisense strand to SEQ ID NO: 687642
ucuuucacucgcguacuug

SEQ ID NO: 687644 - RNA, 19 nt, Artificial Sequence
  Description of Artificial Sequence: Synthetic oligonucleotide
  Sense strand starting at position 2550 of SEQ ID NO: 586042
guacgcgagugaaagaaau

SEQ ID NO: 687645 - RNA, 19 nt, Artificial Sequence
  Description of Artificial Sequence: Synthetic oligonucleotide
  Antisense strand to SEQ ID NO: 687644
auuucuuucacucgcguac

SEQ ID NO: 687646 - RNA, 19 nt, Artificial Sequence
  Description of Artificial Sequence: Synthetic oligonucleotide
  Sense strand starting at position 2575 of SEQ ID NO: 586042
cucaguaguggucagggaa

SEQ ID NO: 687647 - RNA, 19 nt, Artificial Sequence
  Description of Artificial Sequence: Synthetic oligonucleotide
  Antisense strand to SEQ ID NO: 687646
uucccugaccacuacugag

SEQ ID NO: 687648 - RNA, 19 nt, Artificial Sequence
  Description of Artificial Sequence: Synthetic oligonucleotide
  Sense strand starting at position 2578 of SEQ ID NO: 586042
aguaguggucagggaaaug

SEQ ID NO: 687649 - RNA, 19 nt, Artificial Sequence
  Description of Artificial Sequence: Synthetic oligonucleotide
  Antisense strand to SEQ ID NO: 687648
cauuucccugaccacuacu

SEQ ID NO: 687650 - RNA, 19 nt, Artificial Sequence
  Description of Artificial Sequence: Synthetic oligonucleotide
  Sense strand starting at position 2626 of SEQ ID NO: 586042
auguguuggcguuuaaguc

SEQ ID NO: 687651 - RNA, 19 nt, Artificial Sequence
  Description of Artificial Sequence: Synthetic oligonucleotide
  Antisense strand to SEQ ID NO: 687650
gacuuaaacgccaacacau

SEQ ID NO: 687652 - RNA, 19 nt, Artificial Sequence
  Description of Artificial Sequence: Synthetic oligonucleotide
  Sense strand starting at position 2699 of SEQ ID NO: 586042
cuguguaauaguggcaaau

SEQ ID NO: 687653 - RNA, 19 nt, Artificial Sequence
  Description of Artificial Sequence: Synthetic oligonucleotide
  Antisense strand to SEQ ID NO: 687652
auuugccacuauuacacag

SEQ ID NO: 687654 - RNA, 19 nt, Artificial Sequence
  Description of Artificial Sequence: Synthetic oligonucleotide
  Sense strand starting at position 2779 of SEQ ID NO: 586042
acguccuagacggauagaa

SEQ ID NO: 687655 - RNA, 19 nt, Artificial Sequence
  Description of Artificial Sequence: Synthetic oligonucleotide
  Antisense strand to SEQ ID NO: 687654
uucuauccgucuaggacgu

SEQ ID NO: 687656 - RNA, 19 nt, Artificial Sequence
  Description of Artificial Sequence: Synthetic oligonucleotide
  Sense strand starting at position 2799 of SEQ ID NO: 586042
uggaaagaauaucagauua

SEQ ID NO: 687657 - RNA, 19 nt, Artificial Sequence
  Description of Artificial Sequence: Synthetic oligonucleotide
  Antisense strand to SEQ ID NO: 687656
uaaucugauauucuuucca

SEQ ID NO: 687658 - RNA, 19 nt, Artificial Sequence
  Description of Artificial Sequence: Synthetic oligonucleotide
  Sense strand starting at position 2830 of SEQ ID NO: 586042
uagucugcaucuuugaaug

SEQ ID NO: 687659 - RNA, 19 nt, Artificial Sequence
  Description of Artificial Sequence: Synthetic oligonucleotide
  Antisense strand to SEQ ID NO: 687658
cauucaaagaugcagacua

SEQ ID NO: 687660 - RNA, 19 nt, Artificial Sequence
  Description of Artificial Sequence: Synthetic oligonucleotide
  Sense strand starting at position 2835 of SEQ ID NO: 586042
ugcaucuuugaaugaauua

SEQ ID NO: 687661 - RNA, 19 nt, Artificial Sequence
  Description of Artificial Sequence: Synthetic oligonucleotide
  Antisense strand to SEQ ID NO: 687660
uaauucauucaaagaugca

SEQ ID NO: 687662 - RNA, 19 nt, Artificial Sequence
  Description of Artificial Sequence: Synthetic oligonucleotide
  Sense strand starting at position 3165 of SEQ ID NO: 586042
cugguuaagaguuguuucu

SEQ ID NO: 687663 - RNA, 19 nt, Artificial Sequence
  Description of Artificial Sequence: Synthetic oligonucleotide
  Antisense strand to SEQ ID NO: 687662
agaaacaacucuuaaccag

SEQ ID NO: 687664 - RNA, 19 nt, Artificial Sequence
  Description of Artificial Sequence: Synthetic oligonucleotide
  Sense strand starting at position 3167 of SEQ ID NO: 586042
gguuaagaguuguuucuaa

SEQ ID NO: 687665 - RNA, 19 nt, Artificial Sequence
  Description of Artificial Sequence: Synthetic oligonucleotide
  Antisense strand to SEQ ID NO: 687664
uuagaaacaacucuuaacc

SEQ ID NO: 687666 - RNA, 19 nt, Artificial Sequence
  Description of Artificial Sequence: Synthetic oligonucleotide
  Sense strand starting at position 3275 of SEQ ID NO: 586042
agaggaucgugagcuuuca

SEQ ID NO: 687667 - RNA, 19 nt, Artificial Sequence
  Description of Artificial Sequence: Synthetic oligonucleotide
  Antisense strand to SEQ ID NO: 687666
ugaaagcucacgauccucu

SEQ ID NO: 687668 - RNA, 19 nt, Artificial Sequence
  Description of Artificial Sequence: Synthetic oligonucleotide
  Sense strand starting at position 3476 of SEQ ID NO: 586042
ggguuucuuccucgaacuc

SEQ ID NO: 687669 - RNA, 19 nt, Artificial Sequence
  Description of Artificial Sequence: Synthetic oligonucleotide
  Antisense strand to SEQ ID NO: 687668
gaguucgaggaagaaaccc

SEQ ID NO: 687670 - RNA, 19 nt, Artificial Sequence
  Description of Artificial Sequence: Synthetic oligonucleotide
  Sense strand starting at position 3584 of SEQ ID NO: 586042
ucauuugucccucagcagu

SEQ ID NO: 687671 - RNA, 19 nt, Artificial Sequence
  Description of Artificial Sequence: Synthetic oligonucleotide
  Antisense strand to SEQ ID NO: 687670
acugcugagggacaaauga

SEQ ID NO: 687672 - RNA, 19 nt, Artificial Sequence
  Description of Artificial Sequence: Synthetic oligonucleotide
  Sense strand starting at position 117 of SEQ ID NO: 586043
cuguguuaagcuuaguaac

SEQ ID NO: 687673 - RNA, 19 nt, Artificial Sequence
  Description of Artificial Sequence: Synthetic oligonucleotide
  Antisense strand to SEQ ID NO: 687672
guuacuaagcuuaacacag

SEQ ID NO: 687674 - RNA, 19 nt, Artificial Sequence
  Description of Artificial Sequence: Synthetic oligonucleotide
  Sense strand starting at position 351 of SEQ ID NO: 586043
ccuugaacgcuuuaaugua

SEQ ID NO: 687675 - RNA, 19 nt, Artificial Sequence
  Description of Artificial Sequence: Synthetic oligonucleotide
  Antisense strand to SEQ ID NO: 687674
uacauuaaagcguucaagg

SEQ ID NO: 687676 - RNA, 19 nt, Artificial Sequence
  Description of Artificial Sequence: Synthetic oligonucleotide
  Sense strand starting at position 771 of SEQ ID NO: 586043
cgacuuggcuaaucagaug

SEQ ID NO: 687677 - RNA, 19 nt, Artificial Sequence
  Description of Artificial Sequence: Synthetic oligonucleotide
  Antisense strand to SEQ ID NO: 687676
caucugauuagccaagucg

SEQ ID NO: 687678 - RNA, 19 nt, Artificial Sequence
  Description of Artificial Sequence: Synthetic oligonucleotide
  Sense strand starting at position 782 of SEQ ID NO: 586043
aucagaugcuacuugaaug

SEQ ID NO: 687679 - RNA, 19 nt, Artificial Sequence
  Description of Artificial Sequence: Synthetic oligonucleotide
  Antisense strand to SEQ ID NO: 687678
cauucaaguagcaucugau

SEQ ID NO: 687680 - RNA, 19 nt, Artificial Sequence
  Description of Artificial Sequence: Synthetic oligonucleotide
  Sense strand starting at position 787 of SEQ ID NO: 586043
augcuacuugaaugaauua

SEQ ID NO: 687681 - RNA, 19 nt, Artificial Sequence
  Description of Artificial Sequence: Synthetic oligonucleotide
  Antisense strand to SEQ ID NO: 687680
uaauucauucaaguagcau

SEQ ID NO: 687682 - RNA, 19 nt, Artificial Sequence
  Description of Artificial Sequence: Synthetic oligonucleotide
  Sense strand starting at position 925 of SEQ ID NO: 586043
gagaacuugcgauggaucu

SEQ ID NO: 687683 - RNA, 19 nt, Artificial Sequence
  Description of Artificial Sequence: Synthetic oligonucleotide
  Antisense strand to SEQ ID NO: 687682
agauccaucgcaaguucuc

SEQ ID NO: 687684 - RNA, 19 nt, Artificial Sequence
  Description of Artificial Sequence: Synthetic oligonucleotide
  Sense strand starting at position 926 of SEQ ID NO: 586043
agaacuugcgauggaucua

SEQ ID NO: 687685 - RNA, 19 nt, Artificial Sequence
  Description of Artificial Sequence: Synthetic oligonucleotide
  Antisense strand to SEQ ID NO: 687684
uagauccaucgcaaguucu

SEQ ID NO: 687686 - RNA, 19 nt, Artificial Sequence
  Description of Artificial Sequence: Synthetic oligonucleotide
  Sense strand starting at position 940 of SEQ ID NO: 586043
aucuaugacguccacuuau

SEQ ID NO: 687687 - RNA, 19 nt, Artificial Sequence
  Description of Artificial Sequence: Synthetic oligonucleotide
  Antisense strand to SEQ ID NO: 687686
auaaguggacgucauagau

SEQ ID NO: 687688 - RNA, 19 nt, Artificial Sequence
  Description of Artificial Sequence: Synthetic oligonucleotide
  Sense strand starting at position 1037 of SEQ ID NO: 586043
guauuucccuaccagacua

SEQ ID NO: 687689 - RNA, 19 nt, Artificial Sequence
  Description of Artificial Sequence: Synthetic oligonucleotide
  Antisense strand to SEQ ID NO: 687688
uagucugguagggaaauac

SEQ ID NO: 687690 - RNA, 19 nt, Artificial Sequence
  Description of Artificial Sequence: Synthetic oligonucleotide
  Sense strand starting at position 1102 of SEQ ID NO: 586043
uuaugcuaguccuugauaa

SEQ ID NO: 687691 - RNA, 19 nt, Artificial Sequence
  Description of Artificial Sequence: Synthetic oligonucleotide
  Antisense strand to SEQ ID NO: 687690
uuaucaaggacuagcauaa

SEQ ID NO: 687692 - RNA, 19 nt, Artificial Sequence
  Description of Artificial Sequence: Synthetic oligonucleotide
  Sense strand starting at position 1104 of SEQ ID NO: 586043
augcuaguccuugauaaug

SEQ ID NO: 687693 - RNA, 19 nt, Artificial Sequence
  Description of Artificial Sequence: Synthetic oligonucleotide
  Antisense strand to SEQ ID NO: 687692
cauuaucaaggacuagcau

SEQ ID NO: 687694 - RNA, 19 nt, Artificial Sequence
  Description of Artificial Sequence: Synthetic oligonucleotide
  Sense strand starting at position 1115 of SEQ ID NO: 586043
ugauaauguuaagcuaauc

SEQ ID NO: 687695 - RNA, 19 nt, Artificial Sequence
  Description of Artificial Sequence: Synthetic oligonucleotide
  Antisense strand to SEQ ID NO: 687694
gauuagcuuaacauuauca

SEQ ID NO: 687696 - RNA, 19 nt, Artificial Sequence
  Description of Artificial Sequence: Synthetic oligonucleotide
  Sense strand starting at position 1123 of SEQ ID NO: 586043
uuaagcuaauccuuuggga

SEQ ID NO: 687697 - RNA, 19 nt, Artificial Sequence
  Description of Artificial Sequence: Synthetic oligonucleotide
  Antisense strand to SEQ ID NO: 687696
ucccaaaggauuagcuuaa

SEQ ID NO: 687698 - RNA, 19 nt, Artificial Sequence
  Description of Artificial Sequence: Synthetic oligonucleotide
  Sense strand starting at position 1296 of SEQ ID NO: 586043
aguuucuuuccucagaaug

SEQ ID NO: 687699 - RNA, 19 nt, Artificial Sequence
  Description of Artificial Sequence: Synthetic oligonucleotide
  Antisense strand to SEQ ID NO: 687698
cauucugaggaaagaaacu

SEQ ID NO: 687700 - RNA, 19 nt, Artificial Sequence
  Description of Artificial Sequence: Synthetic oligonucleotide
  Sense strand starting at position 2635 of SEQ ID NO: 586043
agcagaagcucaccuguaa

SEQ ID NO: 687701 - RNA, 19 nt, Artificial Sequence
  Description of Artificial Sequence: Synthetic oligonucleotide
  Antisense strand to SEQ ID NO: 687700
uuacaggugagcuucugcu

SEQ ID NO: 687702 - RNA, 19 nt, Artificial Sequence
  Description of Artificial Sequence: Synthetic oligonucleotide
  Sense strand starting at position 2842 of SEQ ID NO: 586043
cccugugagguuuagugaa

SEQ ID NO: 687703 - RNA, 19 nt, Artificial Sequence
  Description of Artificial Sequence: Synthetic oligonucleotide
  Antisense strand to SEQ ID NO: 687702
uucacuaaaccucacaggg

SEQ ID NO: 687704 - RNA, 19 nt, Artificial Sequence
  Description of Artificial Sequence: Synthetic oligonucleotide
  Sense strand starting at position 2844 of SEQ ID NO: 586043
cugugagguuuagugaacu

SEQ ID NO: 687705 - RNA, 19 nt, Artificial Sequence
  Description of Artificial Sequence: Synthetic oligonucleotide
  Antisense strand to SEQ ID NO: 687704
aguucacuaaaccucacag

SEQ ID NO: 687706 - RNA, 19 nt, Artificial Sequence
  Description of Artificial Sequence: Synthetic oligonucleotide
  Sense strand starting at position 2885 of SEQ ID NO: 586043
ggaguagacucccugaagu

SEQ ID NO: 687707 - RNA, 19 nt, Artificial Sequence
  Description of Artificial Sequence: Synthetic oligonucleotide
  Antisense strand to SEQ ID NO: 687706
acuucagggagucuacucc

SEQ ID NO: 687708 - RNA, 19 nt, Artificial Sequence
  Description of Artificial Sequence: Synthetic oligonucleotide
  Sense strand starting at position 2914 of SEQ ID NO: 586043
ucuggaccgccgaguaaug

SEQ ID NO: 687709 - RNA, 19 nt, Artificial Sequence
  Description of Artificial Sequence: Synthetic oligonucleotide
  Antisense strand to SEQ ID NO: 687708
cauuacucggcgguccaga

SEQ ID NO: 687710 - RNA, 19 nt, Artificial Sequence
  Description of Artificial Sequence: Synthetic oligonucleotide
  Sense strand starting at position 2924 of SEQ ID NO: 586043
cgaguaauggcgguguuac

SEQ ID NO: 687711 - RNA, 19 nt, Artificial Sequence
  Description of Artificial Sequence: Synthetic oligonucleotide
  Antisense strand to SEQ ID NO: 687710
guaacaccgccauuacucg

SEQ ID NO: 687712 - RNA, 19 nt, Artificial Sequence
  Description of Artificial Sequence: Synthetic oligonucleotide
  Sense strand starting at position 2952 of SEQ ID NO: 586043
gugaaacagucucuaaaca

SEQ ID NO: 687713 - RNA, 19 nt, Artificial Sequence
  Description of Artificial Sequence: Synthetic oligonucleotide
  Antisense strand to SEQ ID NO: 687712
uguuuagagacuguuucac

SEQ ID NO: 687714 - RNA, 19 nt, Artificial Sequence
  Description of Artificial Sequence: Synthetic oligonucleotide
  Sense strand starting at position 2974 of SEQ ID NO: 586043
acuagaagagcacguaauu

SEQ ID NO: 687715 - RNA, 19 nt, Artificial Sequence
  Description of Artificial Sequence: Synthetic oligonucleotide
  Antisense strand to SEQ ID NO: 687714
aauuacgugcucuucuagu

SEQ ID NO: 687716 - RNA, 19 nt, Artificial Sequence
  Description of Artificial Sequence: Synthetic oligonucleotide
  Sense strand starting at position 3010 of SEQ ID NO: 586043
cuuagccggcuuuaucaaa

SEQ ID NO: 687717 - RNA, 19 nt, Artificial Sequence
  Description of Artificial Sequence: Synthetic oligonucleotide
  Antisense strand to SEQ ID NO: 687716
uuugauaaagccggcuaag

SEQ ID NO: 687718 - RNA, 19 nt, Artificial Sequence
  Description of Artificial Sequence: Synthetic oligonucleotide
  Sense strand starting at position 3062 of SEQ ID NO: 586043
ggugauuuauuaggauaag

SEQ ID NO: 687719 - RNA, 19 nt, Artificial Sequence
  Description of Artificial Sequence: Synthetic oligonucleotide
  Antisense strand to SEQ ID NO: 687718
cuuauccuaauaaaucacc

SEQ ID NO: 687720 - RNA, 19 nt, Artificial Sequence
  Description of Artificial Sequence: Synthetic oligonucleotide
  Sense strand starting at position 3063 of SEQ ID NO: 586043
gugauuuauuaggauaaga

SEQ ID NO: 687721 - RNA, 19 nt, Artificial Sequence
  Description of Artificial Sequence: Synthetic oligonucleotide
  Antisense strand to SEQ ID NO: 687720
ucuuauccuaauaaaucac

SEQ ID NO: 687722 - RNA, 19 nt, Artificial Sequence
  Description of Artificial Sequence: Synthetic oligonucleotide
  Sense strand starting at position 3101 of SEQ ID NO: 586043
gucguaguauauuuccagu

SEQ ID NO: 687723 - RNA, 19 nt, Artificial Sequence
  Description of Artificial Sequence: Synthetic oligonucleotide
  Antisense strand to SEQ ID NO: 687722
acuggaaauauacuacgac

SEQ ID NO: 687724 - RNA, 19 nt, Artificial Sequence
  Description of Artificial Sequence: Synthetic oligonucleotide
  Sense strand starting at position 3103 of SEQ ID NO: 586043
cguaguauauuuccaguga

SEQ ID NO: 687725 - RNA, 19 nt, Artificial Sequence
  Description of Artificial Sequence: Synthetic oligonucleotide
  Antisense strand to SEQ ID NO: 687724
ucacuggaaauauacuacg

SEQ ID NO: 687726 - RNA, 19 nt, Artificial Sequence
  Description of Artificial Sequence: Synthetic oligonucleotide
  Sense strand starting at position 3122 of SEQ ID NO: 586043
aucagaucggucuggagaa

SEQ ID NO: 687727 - RNA, 19 nt, Artificial Sequence
  Description of Artificial Sequence: Synthetic oligonucleotide
  Antisense strand to SEQ ID NO: 687726
uucuccagaccgaucugau

SEQ ID NO: 687728 - RNA, 19 nt, Artificial Sequence
  Description of Artificial Sequence: Synthetic oligonucleotide
  Sense strand starting at position 3250 of SEQ ID NO: 586043
ccguaauggucuuuaaaca

SEQ ID NO: 687729 - RNA, 19 nt, Artificial Sequence
  Description of Artificial Sequence: Synthetic oligonucleotide
  Antisense strand to SEQ ID NO: 687728
uguuuaaagaccauuacgg

SEQ ID NO: 687730 - RNA, 19 nt, Artificial Sequence
  Description of Artificial Sequence: Synthetic oligonucleotide
  Sense strand starting at position 3251 of SEQ ID NO: 586043
cguaauggucuuuaaacau

SEQ ID NO: 687731 - RNA, 19 nt, Artificial Sequence
  Description of Artificial Sequence: Synthetic oligonucleotide
  Antisense strand to SEQ ID NO: 687730
auguuuaaagaccauuacg

SEQ ID NO: 687732 - RNA, 19 nt, Artificial Sequence
  Description of Artificial Sequence: Synthetic oligonucleotide
  Sense strand starting at position 3297 of SEQ ID NO: 586043
ggaaauacacguugaaauu

SEQ ID NO: 687733 - RNA, 19 nt, Artificial Sequence
  Description of Artificial Sequence: Synthetic oligonucleotide
  Antisense strand to SEQ ID NO: 687732
aauuucaacguguauuucc

SEQ ID NO: 687734 - RNA, 19 nt, Artificial Sequence
  Description of Artificial Sequence: Synthetic oligonucleotide
  Sense strand starting at position 3345 of SEQ ID NO: 586043
ucaaguuccacggaguaca

SEQ ID NO: 687735 - RNA, 19 nt, Artificial Sequence
  Description of Artificial Sequence: Synthetic oligonucleotide
  Antisense strand to SEQ ID NO: 687734
uguacuccguggaacuuga

SEQ ID NO: 687736 - RNA, 19 nt, Artificial Sequence
  Description of Artificial Sequence: Synthetic oligonucleotide
  Sense strand starting at position 3450 of SEQ ID NO: 586043
auagguauacaagguuauu

SEQ ID NO: 687737 - RNA, 19 nt, Artificial Sequence
  Description of Artificial Sequence: Synthetic oligonucleotide
  Antisense strand to SEQ ID NO: 687736
aauaaccuuguauaccuau

SEQ ID NO: 687738 - RNA, 19 nt, Artificial Sequence
  Description of Artificial Sequence: Synthetic oligonucleotide
  Sense strand starting at position 3505 of SEQ ID NO: 586043
ccaaauauccguuaauagg

SEQ ID NO: 687739 - RNA, 19 nt, Artificial Sequence
  Description of Artificial Sequence: Synthetic oligonucleotide
  Antisense strand to SEQ ID NO: 687738
ccuauuaacggauauuugg

SEQ ID NO: 687740 - RNA, 19 nt, Artificial Sequence
  Description of Artificial Sequence: Synthetic oligonucleotide
  Sense strand starting at position 3531 of SEQ ID NO: 586043
uugggaauggugcauccau

SEQ ID NO: 687741 - RNA, 19 nt, Artificial Sequence
  Description of Artificial Sequence: Synthetic oligonucleotide
  Antisense strand to SEQ ID NO: 687740
auggaugcaccauucccaa

SEQ ID NO: 687742 - RNA, 19 nt, Artificial Sequence
  Description of Artificial Sequence: Synthetic oligonucleotide
  Sense strand starting at position 3539 of SEQ ID NO: 586043
ggugcauccauacaguaga

SEQ ID NO: 687743 - RNA, 19 nt, Artificial Sequence
  Description of Artificial Sequence: Synthetic oligonucleotide
  Antisense strand to SEQ ID NO: 687742
ucuacuguauggaugcacc

SEQ ID NO: 687744 - RNA, 19 nt, Artificial Sequence
  Description of Artificial Sequence: Synthetic oligonucleotide
  Sense strand starting at position 3542 of SEQ ID NO: 586043
gcauccauacaguagaaca

SEQ ID NO: 687745 - RNA, 19 nt, Artificial Sequence
  Description of Artificial Sequence: Synthetic oligonucleotide
  Antisense strand to SEQ ID NO: 687744
uguucuacuguauggaugc

SEQ ID NO: 687746 - RNA, 19 nt, Artificial Sequence
  Description of Artificial Sequence: Synthetic oligonucleotide
  Sense strand starting at position 3582 of SEQ ID NO: 586043
ucaggaaauaaucgugugu

SEQ ID NO: 687747 - RNA, 19 nt, Artificial Sequence
  Description of Artificial Sequence: Synthetic oligonucleotide
  Antisense strand to SEQ ID NO: 687746
acacacgauuauuuccuga

SEQ ID NO: 687748 - RNA, 19 nt, Artificial Sequence
  Description of Artificial Sequence: Synthetic oligonucleotide
  Sense strand starting at position 3593 of SEQ ID NO: 586043
ucguguguugcuuuggaau

SEQ ID NO: 687749 - RNA, 19 nt, Artificial Sequence
  Description of Artificial Sequence: Synthetic oligonucleotide
  Antisense strand to SEQ ID NO: 687748
auuccaaagcaacacacga

SEQ ID NO: 687750 - RNA, 19 nt, Artificial Sequence
  Description of Artificial Sequence: Synthetic oligonucleotide
  Sense strand starting at position 3814 of SEQ ID NO: 586043
uuuaguugccuauaaagag

SEQ ID NO: 687751 - RNA, 19 nt, Artificial Sequence
  Description of Artificial Sequence: Synthetic oligonucleotide
  Antisense strand to SEQ ID NO: 687750
cucuuuauaggcaacuaaa

SEQ ID NO: 687752 - RNA, 19 nt, Artificial Sequence
  Description of Artificial Sequence: Synthetic oligonucleotide
  Sense strand starting at position 269 of SEQ ID NO: 586044
cgacuuggcuaaucagaug

SEQ ID NO: 687753 - RNA, 19 nt, Artificial Sequence
  Description of Artificial Sequence: Synthetic oligonucleotide
  Antisense strand to SEQ ID NO: 687752
caucugauuagccaagucg

SEQ ID NO: 687754 - RNA, 19 nt, Artificial Sequence
  Description of Artificial Sequence: Synthetic oligonucleotide
  Sense strand starting at position 280 of SEQ ID NO: 586044
aucagaugcuacuugaaug

SEQ ID NO: 687755 - RNA, 19 nt, Artificial Sequence
  Description of Artificial Sequence: Synthetic oligonucleotide
  Antisense strand to SEQ ID NO: 687754
cauucaaguagcaucugau

SEQ ID NO: 687756 - RNA, 19 nt, Artificial Sequence
  Description of Artificial Sequence: Synthetic oligonucleotide
  Sense strand starting at position 285 of SEQ ID NO: 586044
augcuacuugaaugaauua

SEQ ID NO: 687757 - RNA, 19 nt, Artificial Sequence
  Description of Artificial Sequence: Synthetic oligonucleotide
  Antisense strand to SEQ ID NO: 687756
uaauucauucaaguagcau

SEQ ID NO: 687758 - RNA, 19 nt, Artificial Sequence
  Description of Artificial Sequence: Synthetic oligonucleotide
  Sense strand starting at position 423 of SEQ ID NO: 586044
gagaacuugcgauggaucu

SEQ ID NO: 687759 - RNA, 19 nt, Artificial Sequence
  Description of Artificial Sequence: Synthetic oligonucleotide
  Antisense strand to SEQ ID NO: 687758
agauccaucgcaaguucuc

SEQ ID NO: 687760 - RNA, 19 nt, Artificial Sequence
  Description of Artificial Sequence: Synthetic oligonucleotide
  Sense strand starting at position 424 of SEQ ID NO: 586044
agaacuugcgauggaucua

SEQ ID NO: 687761 - RNA, 19 nt, Artificial Sequence
  Description of Artificial Sequence: Synthetic oligonucleotide
  Antisense strand to SEQ ID NO: 687760
uagauccaucgcaaguucu

SEQ ID NO: 687762 - RNA, 19 nt, Artificial Sequence
  Description of Artificial Sequence: Synthetic oligonucleotide
  Sense strand starting at position 438 of SEQ ID NO: 586044
aucuaugacguccacuuau

SEQ ID NO: 687763 - RNA, 19 nt, Artificial Sequence
  Description of Artificial Sequence: Synthetic oligonucleotide
  Antisense strand to SEQ ID NO: 687762
auaaguggacgucauagau

SEQ ID NO: 687764 - RNA, 19 nt, Artificial Sequence
  Description of Artificial Sequence: Synthetic oligonucleotide
  Sense strand starting at position 600 of SEQ ID NO: 586044
uuaugcuaguccuugauaa

SEQ ID NO: 687765 - RNA, 19 nt, Artificial Sequence
  Description of Artificial Sequence: Synthetic oligonucleotide
  Antisense strand to SEQ ID NO: 687764
uuaucaaggacuagcauaa

SEQ ID NO: 687766 - RNA, 19 nt, Artificial Sequence
  Description of Artificial Sequence: Synthetic oligonucleotide
  Sense strand starting at position 602 of SEQ ID NO: 586044
augcuaguccuugauaaug

SEQ ID NO: 687767 - RNA, 19 nt, Artificial Sequence
  Description of Artificial Sequence: Synthetic oligonucleotide
  Antisense strand to SEQ ID NO: 687766
cauuaucaaggacuagcau

SEQ ID NO: 687768 - RNA, 19 nt, Artificial Sequence
  Description of Artificial Sequence: Synthetic oligonucleotide
  Sense strand starting at position 613 of SEQ ID NO: 586044
ugauaauguuaagcuaauc

SEQ ID NO: 687769 - RNA, 19 nt, Artificial Sequence
  Description of Artificial Sequence: Synthetic oligonucleotide
  Antisense strand to SEQ ID NO: 687768
gauuagcuuaacauuauca

SEQ ID NO: 687770 - RNA, 19 nt, Artificial Sequence
  Description of Artificial Sequence: Synthetic oligonucleotide
  Sense strand starting at position 621 of SEQ ID NO: 586044
uuaagcuaauccuuuggga

SEQ ID NO: 687771 - RNA, 19 nt, Artificial Sequence
  Description of Artificial Sequence: Synthetic oligonucleotide
  Antisense strand to SEQ ID NO: 687770
ucccaaaggauuagcuuaa

SEQ ID NO: 687772 - RNA, 19 nt, Artificial Sequence
  Description of Artificial Sequence: Synthetic oligonucleotide
  Sense strand starting at position 794 of SEQ ID NO: 586044
aguuucuuuccucagaaug

SEQ ID NO: 687773 - RNA, 19 nt, Artificial Sequence
  Description of Artificial Sequence: Synthetic oligonucleotide
  Antisense strand to SEQ ID NO: 687772
cauucugaggaaagaaacu

SEQ ID NO: 687774 - RNA, 19 nt, Artificial Sequence
  Description of Artificial Sequence: Synthetic oligonucleotide
  Sense strand starting at position 2133 of SEQ ID NO: 586044
agcagaagcucaccuguaa

SEQ ID NO: 687775 - RNA, 19 nt, Artificial Sequence
  Description of Artificial Sequence: Synthetic oligonucleotide
  Antisense strand to SEQ ID NO: 687774
uuacaggugagcuucugcu

SEQ ID NO: 687776 - RNA, 19 nt, Artificial Sequence
  Description of Artificial Sequence: Synthetic oligonucleotide
  Sense strand starting at position 2340 of SEQ ID NO: 586044
cccugugagguuuagugaa

SEQ ID NO: 687777 - RNA, 19 nt, Artificial Sequence
  Description of Artificial Sequence: Synthetic oligonucleotide
  Antisense strand to SEQ ID NO: 687776
uucacuaaaccucacaggg

SEQ ID NO: 687778 - RNA, 19 nt, Artificial Sequence
  Description of Artificial Sequence: Synthetic oligonucleotide
  Sense strand starting at position 2342 of SEQ ID NO: 586044
cugugagguuuagugaacu

SEQ ID NO: 687779 - RNA, 19 nt, Artificial Sequence
  Description of Artificial Sequence: Synthetic oligonucleotide
  Antisense strand to SEQ ID NO: 687778
aguucacuaaaccucacag

SEQ ID NO: 687780 - RNA, 19 nt, Artificial Sequence
  Description of Artificial Sequence: Synthetic oligonucleotide
  Sense strand starting at position 2383 of SEQ ID NO: 586044
ggaguagacucccugaagu

SEQ ID NO: 687781 - RNA, 19 nt, Artificial Sequence
  Description of Artificial Sequence: Synthetic oligonucleotide
  Antisense strand to SEQ ID NO: 687780
acuucagggagucuacucc

SEQ ID NO: 687782 - RNA, 19 nt, Artificial Sequence
  Description of Artificial Sequence: Synthetic oligonucleotide
  Sense strand starting at position 2412 of SEQ ID NO: 586044
ucuggaccgccgaguaaug

SEQ ID NO: 687783 - RNA, 19 nt, Artificial Sequence
  Description of Artificial Sequence: Synthetic oligonucleotide
  Antisense strand to SEQ ID NO: 687782
cauuacucggcgguccaga

SEQ ID NO: 687784 - RNA, 19 nt, Artificial Sequence
  Description of Artificial Sequence: Synthetic oligonucleotide
  Sense strand starting at position 2422 of SEQ ID NO: 586044
cgaguaauggcgguguuac

SEQ ID NO: 687785 - RNA, 19 nt, Artificial Sequence
  Description of Artificial Sequence: Synthetic oligonucleotide
  Antisense strand to SEQ ID NO: 687784
guaacaccgccauuacucg

SEQ ID NO: 687786 - RNA, 19 nt, Artificial Sequence
  Description of Artificial Sequence: Synthetic oligonucleotide
  Sense strand starting at position 2450 of SEQ ID NO: 586044
gugaaacagucucuaaaca

SEQ ID NO: 687787 - RNA, 19 nt, Artificial Sequence
  Description of Artificial Sequence: Synthetic oligonucleotide
  Antisense strand to SEQ ID NO: 687786
uguuuagagacuguuucac

SEQ ID NO: 687788 - RNA, 19 nt, Artificial Sequence
  Description of Artificial Sequence: Synthetic oligonucleotide
  Sense strand starting at position 2472 of SEQ ID NO: 586044
acuagaagagcacguaauu

SEQ ID NO: 687789 - RNA, 19 nt, Artificial Sequence
  Description of Artificial Sequence: Synthetic oligonucleotide
  Antisense strand to SEQ ID NO: 687788
aauuacgugcucuucuagu

SEQ ID NO: 687790 - RNA, 19 nt, Artificial Sequence
  Description of Artificial Sequence: Synthetic oligonucleotide
  Sense strand starting at position 2508 of SEQ ID NO: 586044
cuuagccggcuuuaucaaa

SEQ ID NO: 687791 - RNA, 19 nt, Artificial Sequence
  Description of Artificial Sequence: Synthetic oligonucleotide
  Antisense strand to SEQ ID NO: 687790
uuugauaaagccggcuaag

SEQ ID NO: 687792 - RNA, 19 nt, Artificial Sequence
  Description of Artificial Sequence: Synthetic oligonucleotide
  Sense strand starting at position 2560 of SEQ ID NO: 586044
ggugauuuauuaggauaag

SEQ ID NO: 687793 - RNA, 19 nt, Artificial Sequence
  Description of Artificial Sequence: Synthetic oligonucleotide
  Antisense strand to SEQ ID NO: 687792
cuuauccuaauaaaucacc

SEQ ID NO: 687794 - RNA, 19 nt, Artificial Sequence
  Description of Artificial Sequence: Synthetic oligonucleotide
  Sense strand starting at position 2561 of SEQ ID NO: 586044
gugauuuauuaggauaaga

SEQ ID NO: 687795 - RNA, 19 nt, Artificial Sequence
  Description of Artificial Sequence: Synthetic oligonucleotide
  Antisense strand to SEQ ID NO: 687794
ucuuauccuaauaaaucac

SEQ ID NO: 687796 - RNA, 19 nt, Artificial Sequence
  Description of Artificial Sequence: Synthetic oligonucleotide
  Sense strand starting at position 2599 of SEQ ID NO: 586044
gucguaguauauuuccagu

SEQ ID NO: 687797 - RNA, 19 nt, Artificial Sequence
  Description of Artificial Sequence: Synthetic oligonucleotide
  Antisense strand to SEQ ID NO: 687796
acuggaaauauacuacgac

SEQ ID NO: 687798 - RNA, 19 nt, Artificial Sequence
  Description of Artificial Sequence: Synthetic oligonucleotide
  Sense strand starting at position 2601 of SEQ ID NO: 586044
cguaguauauuuccaguga

SEQ ID NO: 687799 - RNA, 19 nt, Artificial Sequence
  Description of Artificial Sequence: Synthetic oligonucleotide
  Antisense strand to SEQ ID NO: 687798
ucacuggaaauauacuacg

SEQ ID NO: 687800 - RNA, 19 nt, Artificial Sequence
  Description of Artificial Sequence: Synthetic oligonucleotide
  Sense strand starting at position 2620 of SEQ ID NO: 586044
aucagaucggucuggagaa

SEQ ID NO: 687801 - RNA, 19 nt, Artificial Sequence
  Description of Artificial Sequence: Synthetic oligonucleotide
  Antisense strand to SEQ ID NO: 687800
uucuccagaccgaucugau

SEQ ID NO: 687802 - RNA, 19 nt, Artificial Sequence
  Description of Artificial Sequence: Synthetic oligonucleotide
  Sense strand starting at position 2748 of SEQ ID NO: 586044
ccguaauggucuuuaaaca

SEQ ID NO: 687803 - RNA, 19 nt, Artificial Sequence
  Description of Artificial Sequence: Synthetic oligonucleotide
  Antisense strand to SEQ ID NO: 687802
uguuuaaagaccauuacgg

SEQ ID NO: 687804 - RNA, 19 nt, Artificial Sequence
  Description of Artificial Sequence: Synthetic oligonucleotide
  Sense strand starting at position 2749 of SEQ ID NO: 586044
cguaauggucuuuaaacau

SEQ ID NO: 687805 - RNA, 19 nt, Artificial Sequence
  Description of Artificial Sequence: Synthetic oligonucleotide
  Antisense strand to SEQ ID NO: 687804
auguuuaaagaccauuacg

SEQ ID NO: 687806 - RNA, 19 nt, Artificial Sequence
  Description of Artificial Sequence: Synthetic oligonucleotide
  Sense strand starting at position 2795 of SEQ ID NO: 586044
ggaaauacacguugaaauu

SEQ ID NO: 687807 - RNA, 19 nt, Artificial Sequence
  Description of Artificial Sequence: Synthetic oligonucleotide
  Antisense strand to SEQ ID NO: 687806
aauuucaacguguauuucc

SEQ ID NO: 687808 - RNA, 19 nt, Artificial Sequence
  Description of Artificial Sequence: Synthetic oligonucleotide
  Sense strand starting at position 2843 of SEQ ID NO: 586044
ucaaguuccacggaguaca

SEQ ID NO: 687809 - RNA, 19 nt, Artificial Sequence
  Description of Artificial Sequence: Synthetic oligonucleotide
  Antisense strand to SEQ ID NO: 687808
uguacuccguggaacuuga

SEQ ID NO: 687810 - RNA, 19 nt, Artificial Sequence
  Description of Artificial Sequence: Synthetic oligonucleotide
  Sense strand starting at position 2948 of SEQ ID NO: 586044
auagguauacaagguuauu

SEQ ID NO: 687811 - RNA, 19 nt, Artificial Sequence
  Description of Artificial Sequence: Synthetic oligonucleotide
  Antisense strand to SEQ ID NO: 687810
aauaaccuuguauaccuau

SEQ ID NO: 687812 - RNA, 19 nt, Artificial Sequence
  Description of Artificial Sequence: Synthetic oligonucleotide
  Sense strand starting at position 3003 of SEQ ID NO: 586044
ccaaauauccguuaauagg

SEQ ID NO: 687813 - RNA, 19 nt, Artificial Sequence
  Description of Artificial Sequence: Synthetic oligonucleotide
  Antisense strand to SEQ ID NO: 687812
ccuauuaacggauauuugg

SEQ ID NO: 687814 - RNA, 19 nt, Artificial Sequence
  Description of Artificial Sequence: Synthetic oligonucleotide
  Sense strand starting at position 3029 of SEQ ID NO: 586044
uugggaauggugcauccau

SEQ ID NO: 687815 - RNA, 19 nt, Artificial Sequence
  Description of Artificial Sequence: Synthetic oligonucleotide
  Antisense strand to SEQ ID NO: 687814
auggaugcaccauucccaa

SEQ ID NO: 687816 - RNA, 19 nt, Artificial Sequence
  Description of Artificial Sequence: Synthetic oligonucleotide
  Sense strand starting at position 3037 of SEQ ID NO: 586044
ggugcauccauacaguaga

SEQ ID NO: 687817 - RNA, 19 nt, Artificial Sequence
  Description of Artificial Sequence: Synthetic oligonucleotide
  Antisense strand to SEQ ID NO: 687816
ucuacuguauggaugcacc

SEQ ID NO: 687818 - RNA, 19 nt, Artificial Sequence
  Description of Artificial Sequence: Synthetic oligonucleotide
  Sense strand starting at position 3040 of SEQ ID NO: 586044
gcauccauacaguagaaca

SEQ ID NO: 687819 - RNA, 19 nt, Artificial Sequence
  Description of Artificial Sequence: Synthetic oligonucleotide
  Antisense strand to SEQ ID NO: 687818
uguucuacuguauggaugc

SEQ ID NO: 687820 - RNA, 19 nt, Artificial Sequence
  Description of Artificial Sequence: Synthetic oligonucleotide
  Sense strand starting at position 3091 of SEQ ID NO: 586044
ucguguguugcuuuggaau

SEQ ID NO: 687821 - RNA, 19 nt, Artificial Sequence
  Description of Artificial Sequence: Synthetic oligonucleotide
  Antisense strand to SEQ ID NO: 687820
auuccaaagcaacacacga

SEQ ID NO: 687822 - RNA, 19 nt, Artificial Sequence
  Description of Artificial Sequence: Synthetic oligonucleotide
  Sense strand starting at position 3312 of SEQ ID NO: 586044
uuuaguugccuauaaagag

SEQ ID NO: 687823 - RNA, 19 nt, Artificial Sequence
  Description of Artificial Sequence: Synthetic oligonucleotide
  Antisense strand to SEQ ID NO: 687822
cucuuuauaggcaacuaaa

SEQ ID NO: 687824 - RNA, 19 nt, Artificial Sequence
  Description of Artificial Sequence: Synthetic oligonucleotide
  Sense strand starting at position 3815 of SEQ ID NO: 586044
ugaacacaguacucuagua

SEQ ID NO: 687825 - RNA, 19 nt, Artificial Sequence
  Description of Artificial Sequence: Synthetic oligonucleotide
  Antisense strand to SEQ ID NO: 687824
uacuagaguacuguguuca

SEQ ID NO: 687826 - RNA, 19 nt, Artificial Sequence
  Description of Artificial Sequence: Synthetic oligonucleotide
  Sense strand starting at position 3840 of SEQ ID NO: 586044
cuguguugugauaguguag

SEQ ID NO: 687827 - RNA, 19 nt, Artificial Sequence
  Description of Artificial Sequence: Synthetic oligonucleotide
  Antisense strand to SEQ ID NO: 687826
cuacacuaucacaacacag

SEQ ID NO: 687828 - RNA, 19 nt, Artificial Sequence
  Description of Artificial Sequence: Synthetic oligonucleotide
  Sense strand starting at position 3863 of SEQ ID NO: 586044
uccuuauaugcaggagauu

SEQ ID NO: 687829 - RNA, 19 nt, Artificial Sequence
  Description of Artificial Sequence: Synthetic oligonucleotide
  Antisense strand to SEQ ID NO: 687828
aaucuccugcauauaagga

SEQ ID NO: 687830 - RNA, 19 nt, Artificial Sequence
  Description of Artificial Sequence: Synthetic oligonucleotide
  Sense strand starting at position 3944 of SEQ ID NO: 586044
uagggaaaguugguucuuu

SEQ ID NO: 687831 - RNA, 19 nt, Artificial Sequence
  Description of Artificial Sequence: Synthetic oligonucleotide
  Antisense strand to SEQ ID NO: 687830
aaagaaccaacuuucccua

SEQ ID NO: 687832 - RNA, 19 nt, Artificial Sequence
  Description of Artificial Sequence: Synthetic oligonucleotide
  Sense strand starting at position 123 of SEQ ID NO: 586045
gcugaagugguaggagaau

SEQ ID NO: 687833 - RNA, 19 nt, Artificial Sequence
  Description of Artificial Sequence: Synthetic oligonucleotide
  Antisense strand to SEQ ID NO: 687832
auucuccuaccacuucagc

SEQ ID NO: 687834 - RNA, 19 nt, Artificial Sequence
  Description of Artificial Sequence: Synthetic oligonucleotide
  Sense strand starting at position 140 of SEQ ID NO: 586045
aucacuugagcucgagaaa

SEQ ID NO: 687835 - RNA, 19 nt, Artificial Sequence
  Description of Artificial Sequence: Synthetic oligonucleotide
  Antisense strand to SEQ ID NO: 687834
uuucucgagcucaagugau

SEQ ID NO: 687836 - RNA, 19 nt, Artificial Sequence
  Description of Artificial Sequence: Synthetic oligonucleotide
  Sense strand starting at position 141 of SEQ ID NO: 586045
ucacuugagcucgagaaau

SEQ ID NO: 687837 - RNA, 19 nt, Artificial Sequence
  Description of Artificial Sequence: Synthetic oligonucleotide
  Antisense strand to SEQ ID NO: 687836
auuucucgagcucaaguga

SEQ ID NO: 687838 - RNA, 19 nt, Artificial Sequence
  Description of Artificial Sequence: Synthetic oligonucleotide
  Sense strand starting at position 143 of SEQ ID NO: 586045
acuugagcucgagaaauca

SEQ ID NO: 687839 - RNA, 19 nt, Artificial Sequence
  Description of Artificial Sequence: Synthetic oligonucleotide
  Antisense strand to SEQ ID NO: 687838
ugauuucucgagcucaagu

SEQ ID NO: 687840 - RNA, 19 nt, Artificial Sequence
  Description of Artificial Sequence: Synthetic oligonucleotide
  Sense strand starting at position 151 of SEQ ID NO: 586045
ucgagaaaucaaggcugaa

SEQ ID NO: 687841 - RNA, 19 nt, Artificial Sequence
  Description of Artificial Sequence: Synthetic oligonucleotide
  Antisense strand to SEQ ID NO: 687840
uucagccuugauuucucga

SEQ ID NO: 687842 - RNA, 19 nt, Artificial Sequence
  Description of Artificial Sequence: Synthetic oligonucleotide
  Sense strand starting at position 275 of SEQ ID NO: 586045
gaucaauauuauguggauc

SEQ ID NO: 687843 - RNA, 19 nt, Artificial Sequence
  Description of Artificial Sequence: Synthetic oligonucleotide
  Antisense strand to SEQ ID NO: 687842
gauccacauaauauugauc

SEQ ID NO: 687844 - RNA, 19 nt, Artificial Sequence
  Description of Artificial Sequence: Synthetic oligonucleotide
  Sense strand starting at position 943 of SEQ ID NO: 586045
gcaaguaagcuugaauugu

SEQ ID NO: 687845 - RNA, 19 nt, Artificial Sequence
  Description of Artificial Sequence: Synthetic oligonucleotide
  Antisense strand to SEQ ID NO: 687844
acaauucaagcuuacuugc

SEQ ID NO: 687846 - RNA, 19 nt, Artificial Sequence
  Description of Artificial Sequence: Synthetic oligonucleotide
  Sense strand starting at position 1010 of SEQ ID NO: 586045
ucgggucucacgcaaacua

SEQ ID NO: 687847 - RNA, 19 nt, Artificial Sequence
  Description of Artificial Sequence: Synthetic oligonucleotide
  Antisense strand to SEQ ID NO: 687846
uaguuugcgugagacccga

SEQ ID NO: 687848 - RNA, 19 nt, Artificial Sequence
  Description of Artificial Sequence: Synthetic oligonucleotide
  Sense strand starting at position 1060 of SEQ ID NO: 586045
ugcaaaguaagugguagaa

SEQ ID NO: 687849 - RNA, 19 nt, Artificial Sequence
  Description of Artificial Sequence: Synthetic oligonucleotide
  Antisense strand to SEQ ID NO: 687848
uucuaccacuuacuuugca

SEQ ID NO: 687850 - RNA, 19 nt, Artificial Sequence
  Description of Artificial Sequence: Synthetic oligonucleotide
  Sense strand starting at position 1064 of SEQ ID NO: 586045
aaguaagugguagaaguua

SEQ ID NO: 687851 - RNA, 19 nt, Artificial Sequence
  Description of Artificial Sequence: Synthetic oligonucleotide
  Antisense strand to SEQ ID NO: 687850
uaacuucuaccacuuacuu

SEQ ID NO: 687852 - RNA, 19 nt, Artificial Sequence
  Description of Artificial Sequence: Synthetic oligonucleotide
  Sense strand starting at position 1069 of SEQ ID NO: 586045
agugguagaaguuaucuuu

SEQ ID NO: 687853 - RNA, 19 nt, Artificial Sequence
  Description of Artificial Sequence: Synthetic oligonucleotide
  Antisense strand to SEQ ID NO: 687852
aaagauaacuucuaccacu

SEQ ID NO: 687854 - RNA, 19 nt, Artificial Sequence
  Description of Artificial Sequence: Synthetic oligonucleotide
  Sense strand starting at position 1172 of SEQ ID NO: 586045
aaacgaaaguuagcgagau

SEQ ID NO: 687855 - RNA, 19 nt, Artificial Sequence
  Description of Artificial Sequence: Synthetic oligonucleotide
  Antisense strand to SEQ ID NO: 687854
aucucgcuaacuuucguuu

SEQ ID NO: 687856 - RNA, 19 nt, Artificial Sequence
  Description of Artificial Sequence: Synthetic oligonucleotide
  Sense strand starting at position 1174 of SEQ ID NO: 586045
acgaaaguuagcgagaugu

SEQ ID NO: 687857 - RNA, 19 nt, Artificial Sequence
  Description of Artificial Sequence: Synthetic oligonucleotide
  Antisense strand to SEQ ID NO: 687856
acaucucgcuaacuuucgu

SEQ ID NO: 687858 - RNA, 19 nt, Artificial Sequence
  Description of Artificial Sequence: Synthetic oligonucleotide
  Sense strand starting at position 1176 of SEQ ID NO: 586045
gaaaguuagcgagauguua

SEQ ID NO: 687859 - RNA, 19 nt, Artificial Sequence
  Description of Artificial Sequence: Synthetic oligonucleotide
  Antisense strand to SEQ ID NO: 687858
uaacaucucgcuaacuuuc

SEQ ID NO: 687860 - RNA, 19 nt, Artificial Sequence
  Description of Artificial Sequence: Synthetic oligonucleotide
  Sense strand starting at position 1264 of SEQ ID NO: 586045
aaacguuuagugcaggaga

SEQ ID NO: 687861 - RNA, 19 nt, Artificial Sequence
  Description of Artificial Sequence: Synthetic oligonucleotide
  Antisense strand to SEQ ID NO: 687860
ucuccugcacuaaacguuu

SEQ ID NO: 687862 - RNA, 19 nt, Artificial Sequence
  Description of Artificial Sequence: Synthetic oligonucleotide
  Sense strand starting at position 1266 of SEQ ID NO: 586045
acguuuagugcaggagaga

SEQ ID NO: 687863 - RNA, 19 nt, Artificial Sequence
  Description of Artificial Sequence: Synthetic oligonucleotide
  Antisense strand to SEQ ID NO: 687862
ucucuccugcacuaaacgu

SEQ ID NO: 687864 - RNA, 19 nt, Artificial Sequence
  Description of Artificial Sequence: Synthetic oligonucleotide
  Sense strand starting at position 1379 of SEQ ID NO: 586045
ggucauguugcggacaaga

SEQ ID NO: 687865 - RNA, 19 nt, Artificial Sequence
  Description of Artificial Sequence: Synthetic oligonucleotide
  Antisense strand to SEQ ID NO: 687864
ucuuguccgcaacaugacc

SEQ ID NO: 687866 - RNA, 19 nt, Artificial Sequence
  Description of Artificial Sequence: Synthetic oligonucleotide
  Sense strand starting at position 1381 of SEQ ID NO: 586045
ucauguugcggacaagagu

SEQ ID NO: 687867 - RNA, 19 nt, Artificial Sequence
  Description of Artificial Sequence: Synthetic oligonucleotide
  Antisense strand to SEQ ID NO: 687866
acucuuguccgcaacauga

SEQ ID NO: 687868 - RNA, 19 nt, Artificial Sequence
  Description of Artificial Sequence: Synthetic oligonucleotide
  Sense strand starting at position 1471 of SEQ ID NO: 586045
cggagugucccaggcaaag

SEQ ID NO: 687869 - RNA, 19 nt, Artificial Sequence
  Description of Artificial Sequence: Synthetic oligonucleotide
  Antisense strand to SEQ ID NO: 687868
cuuugccugggacacuccg

SEQ ID NO: 687870 - RNA, 19 nt, Artificial Sequence
  Description of Artificial Sequence: Synthetic oligonucleotide
  Sense strand starting at position 2353 of SEQ ID NO: 586045
guuuguuaccuugguaaga

SEQ ID NO: 687871 - RNA, 19 nt, Artificial Sequence
  Description of Artificial Sequence: Synthetic oligonucleotide
  Antisense strand to SEQ ID NO: 687870
ucuuaccaagguaacaaac

SEQ ID NO: 687872 - RNA, 19 nt, Artificial Sequence
  Description of Artificial Sequence: Synthetic oligonucleotide
  Sense strand starting at position 2354 of SEQ ID NO: 586045
uuuguuaccuugguaagaa

SEQ ID NO: 687873 - RNA, 19 nt, Artificial Sequence
  Description of Artificial Sequence: Synthetic oligonucleotide
  Antisense strand to SEQ ID NO: 687872
uucuuaccaagguaacaaa

SEQ ID NO: 687874 - RNA, 19 nt, Artificial Sequence
  Description of Artificial Sequence: Synthetic oligonucleotide
  Sense strand starting at position 2459 of SEQ ID NO: 586045
gguugcgugaaauauaaau

SEQ ID NO: 687875 - RNA, 19 nt, Artificial Sequence
  Description of Artificial Sequence: Synthetic oligonucleotide
  Antisense strand to SEQ ID NO: 687874
auuuauauuucacgcaacc

SEQ ID NO: 687876 - RNA, 19 nt, Artificial Sequence
  Description of Artificial Sequence: Synthetic oligonucleotide
  Sense strand starting at position 2488 of SEQ ID NO: 586045
gggauaaggcccugguacu

SEQ ID NO: 687877 - RNA, 19 nt, Artificial Sequence
  Description of Artificial Sequence: Synthetic oligonucleotide
  Antisense strand to SEQ ID NO: 687876
aguaccagggccuuauccc

SEQ ID NO: 687878 - RNA, 19 nt, Artificial Sequence
  Description of Artificial Sequence: Synthetic oligonucleotide
  Sense strand starting at position 2499 of SEQ ID NO: 586045
cugguacugucuucuaaga

SEQ ID NO: 687879 - RNA, 19 nt, Artificial Sequence
  Description of Artificial Sequence: Synthetic oligonucleotide
  Antisense strand to SEQ ID NO: 687878
ucuuagaagacaguaccag

SEQ ID NO: 687880 - RNA, 19 nt, Artificial Sequence
  Description of Artificial Sequence: Synthetic oligonucleotide
  Sense strand starting at position 2571 of SEQ ID NO: 586045
uggaauuacuuuccuggau

SEQ ID NO: 687881 - RNA, 19 nt, Artificial Sequence
  Description of Artificial Sequence: Synthetic oligonucleotide
  Antisense strand to SEQ ID NO: 687880
auccaggaaaguaauucca

SEQ ID NO: 687882 - RNA, 19 nt, Artificial Sequence
  Description of Artificial Sequence: Synthetic oligonucleotide
  Sense strand starting at position 2572 of SEQ ID NO: 586045
ggaauuacuuuccuggaug

SEQ ID NO: 687883 - RNA, 19 nt, Artificial Sequence
  Description of Artificial Sequence: Synthetic oligonucleotide
  Antisense strand to SEQ ID NO: 687882
cauccaggaaaguaauucc

SEQ ID NO: 687884 - RNA, 19 nt, Artificial Sequence
  Description of Artificial Sequence: Synthetic oligonucleotide
  Sense strand starting at position 2575 of SEQ ID NO: 586045
auuacuuuccuggauguau

SEQ ID NO: 687885 - RNA, 19 nt, Artificial Sequence
  Description of Artificial Sequence: Synthetic oligonucleotide
  Antisense strand to SEQ ID NO: 687884
auacauccaggaaaguaau

SEQ ID NO: 687886 - RNA, 19 nt, Artificial Sequence
  Description of Artificial Sequence: Synthetic oligonucleotide
  Sense strand starting at position 2634 of SEQ ID NO: 586045
gguaacucgagauguuuaa

SEQ ID NO: 687887 - RNA, 19 nt, Artificial Sequence
  Description of Artificial Sequence: Synthetic oligonucleotide
  Antisense strand to SEQ ID NO: 687886
uuaaacaucucgaguuacc

SEQ ID NO: 687888 - RNA, 19 nt, Artificial Sequence
  Description of Artificial Sequence: Synthetic oligonucleotide
  Sense strand starting at position 2660 of SEQ ID NO: 586045
aauugcaaucagugaaggu

SEQ ID NO: 687889 - RNA, 19 nt, Artificial Sequence
  Description of Artificial Sequence: Synthetic oligonucleotide
  Antisense strand to SEQ ID NO: 687888
accuucacugauugcaauu

SEQ ID NO: 687890 - RNA, 19 nt, Artificial Sequence
  Description of Artificial Sequence: Synthetic oligonucleotide
  Sense strand starting at position 2661 of SEQ ID NO: 586045
auugcaaucagugaagguu

SEQ ID NO: 687891 - RNA, 19 nt, Artificial Sequence
  Description of Artificial Sequence: Synthetic oligonucleotide
  Antisense strand to SEQ ID NO: 687890
aaccuucacugauugcaau

SEQ ID NO: 687892 - RNA, 19 nt, Artificial Sequence
  Description of Artificial Sequence: Synthetic oligonucleotide
  Sense strand starting at position 2702 of SEQ ID NO: 586045
aagugcuauguauaagguu

SEQ ID NO: 687893 - RNA, 19 nt, Artificial Sequence
  Description of Artificial Sequence: Synthetic oligonucleotide
  Antisense strand to SEQ ID NO: 687892
aaccuuauacauagcacuu

SEQ ID NO: 687894 - RNA, 19 nt, Artificial Sequence
  Description of Artificial Sequence: Synthetic oligonucleotide
  Sense strand starting at position 3161 of SEQ ID NO: 586045
acagcuuuauuaucuguua

SEQ ID NO: 687895 - RNA, 19 nt, Artificial Sequence
  Description of Artificial Sequence: Synthetic oligonucleotide
  Antisense strand to SEQ ID NO: 687894
uaacagauaauaaagcugu

SEQ ID NO: 687896 - RNA, 19 nt, Artificial Sequence
  Description of Artificial Sequence: Synthetic oligonucleotide
  Sense strand starting at position 3164 of SEQ ID NO: 586045
gcuuuauuaucuguuaaag

SEQ ID NO: 687897 - RNA, 19 nt, Artificial Sequence
  Description of Artificial Sequence: Synthetic oligonucleotide
  Antisense strand to SEQ ID NO: 687896
cuuuaacagauaauaaagc

SEQ ID NO: 687898 - RNA, 19 nt, Artificial Sequence
  Description of Artificial Sequence: Synthetic oligonucleotide
  Sense strand starting at position 3220 of SEQ ID NO: 586045
uugugugcugaacauaaau

SEQ ID NO: 687899 - RNA, 19 nt, Artificial Sequence
  Description of Artificial Sequence: Synthetic oligonucleotide
  Antisense strand to SEQ ID NO: 687898
auuuauguucagcacacaa

SEQ ID NO: 687900 - RNA, 19 nt, Artificial Sequence
  Description of Artificial Sequence: Synthetic oligonucleotide
  Sense strand starting at position 3373 of SEQ ID NO: 586045
ggacuucuggcauguuaua

SEQ ID NO: 687901 - RNA, 19 nt, Artificial Sequence
  Description of Artificial Sequence: Synthetic oligonucleotide
  Antisense strand to SEQ ID NO: 687900
uauaacaugccagaagucc

SEQ ID NO: 687902 - RNA, 19 nt, Artificial Sequence
  Description of Artificial Sequence: Synthetic oligonucleotide
  Sense strand starting at position 3460 of SEQ ID NO: 586045
aggaauuaaugcuuugacu

SEQ ID NO: 687903 - RNA, 19 nt, Artificial Sequence
  Description of Artificial Sequence: Synthetic oligonucleotide
  Antisense strand to SEQ ID NO: 687902
agucaaagcauuaauuccu

SEQ ID NO: 687904 - RNA, 19 nt, Artificial Sequence
  Description of Artificial Sequence: Synthetic oligonucleotide
  Sense strand starting at position 3618 of SEQ ID NO: 586045
uguuucucguauuuaaauc

SEQ ID NO: 687905 - RNA, 19 nt, Artificial Sequence
  Description of Artificial Sequence: Synthetic oligonucleotide
  Antisense strand to SEQ ID NO: 687904
gauuuaaauacgagaaaca

SEQ ID NO: 687906 - RNA, 19 nt, Artificial Sequence
  Description of Artificial Sequence: Synthetic oligonucleotide
  Sense strand starting at position 3626 of SEQ ID NO: 586045
guauuuaaaucauggauug

SEQ ID NO: 687907 - RNA, 19 nt, Artificial Sequence
  Description of Artificial Sequence: Synthetic oligonucleotide
  Antisense strand to SEQ ID NO: 687906
caauccaugauuuaaauac

SEQ ID NO: 687908 - RNA, 19 nt, Artificial Sequence
  Description of Artificial Sequence: Synthetic oligonucleotide
  Sense strand starting at position 3649 of SEQ ID NO: 586045
uguuucgauugucuuauuu

SEQ ID NO: 687909 - RNA, 19 nt, Artificial Sequence
  Description of Artificial Sequence: Synthetic oligonucleotide
  Antisense strand to SEQ ID NO: 687908
aaauaagacaaucgaaaca

SEQ ID NO: 687910 - RNA, 19 nt, Artificial Sequence
  Description of Artificial Sequence: Synthetic oligonucleotide
  Sense strand starting at position 3653 of SEQ ID NO: 586045
ucgauugucuuauuuaggu

SEQ ID NO: 687911 - RNA, 19 nt, Artificial Sequence
  Description of Artificial Sequence: Synthetic oligonucleotide
  Antisense strand to SEQ ID NO: 687910
accuaaauaagacaaucga

SEQ ID NO: 687912 - RNA, 19 nt, Artificial Sequence
  Description of Artificial Sequence: Synthetic oligonucleotide
  Sense strand starting at position 374 of SEQ ID NO: 586046
ggaagugacaucugaggua

SEQ ID NO: 687913 - RNA, 19 nt, Artificial Sequence
  Description of Artificial Sequence: Synthetic oligonucleotide
  Antisense strand to SEQ ID NO: 687912
uaccucagaugucacuucc

SEQ ID NO: 687914 - RNA, 19 nt, Artificial Sequence
  Description of Artificial Sequence: Synthetic oligonucleotide
  Sense strand starting at position 379 of SEQ ID NO: 586046
ugacaucugagguagguuu

SEQ ID NO: 687915 - RNA, 19 nt, Artificial Sequence
  Description of Artificial Sequence: Synthetic oligonucleotide
  Antisense strand to SEQ ID NO: 687914
aaaccuaccucagauguca

SEQ ID NO: 687916 - RNA, 19 nt, Artificial Sequence
  Description of Artificial Sequence: Synthetic oligonucleotide
  Sense strand starting at position 403 of SEQ ID NO: 586046
gaagaugaguagucaguua

SEQ ID NO: 687917 - RNA, 19 nt, Artificial Sequence
  Description of Artificial Sequence: Synthetic oligonucleotide
  Antisense strand to SEQ ID NO: 687916
uaacugacuacucaucuuc

SEQ ID NO: 687918 - RNA, 19 nt, Artificial Sequence
  Description of Artificial Sequence: Synthetic oligonucleotide
  Sense strand starting at position 408 of SEQ ID NO: 586046
ugaguagucaguuagaugg

SEQ ID NO: 687919 - RNA, 19 nt, Artificial Sequence
  Description of Artificial Sequence: Synthetic oligonucleotide
  Antisense strand to SEQ ID NO: 687918
ccaucuaacugacuacuca

SEQ ID NO: 687920 - RNA, 19 nt, Artificial Sequence
  Description of Artificial Sequence: Synthetic oligonucleotide
  Sense strand starting at position 532 of SEQ ID NO: 586046
uugaaaucugacuguagug

SEQ ID NO: 687921 - RNA, 19 nt, Artificial Sequence
  Description of Artificial Sequence: Synthetic oligonucleotide
  Antisense strand to SEQ ID NO: 687920
cacuacagucagauuucaa

SEQ ID NO: 687922 - RNA, 19 nt, Artificial Sequence
  Description of Artificial Sequence: Synthetic oligonucleotide
  Sense strand starting at position 633 of SEQ ID NO: 586046
caaaguagggucugaggau

SEQ ID NO: 687923 - RNA, 19 nt, Artificial Sequence
  Description of Artificial Sequence: Synthetic oligonucleotide
  Antisense strand to SEQ ID NO: 687922
auccucagacccuacuuug

SEQ ID NO: 687924 - RNA, 19 nt, Artificial Sequence
  Description of Artificial Sequence: Synthetic oligonucleotide
  Sense strand starting at position 776 of SEQ ID NO: 586046
uccguuugauuucuacaug

SEQ ID NO: 687925 - RNA, 19 nt, Artificial Sequence
  Description of Artificial Sequence: Synthetic oligonucleotide
  Antisense strand to SEQ ID NO: 687924
cauguagaaaucaaacgga

SEQ ID NO: 687926 - RNA, 19 nt, Artificial Sequence
  Description of Artificial Sequence: Synthetic oligonucleotide
  Sense strand starting at position 848 of SEQ ID NO: 586046
ggacauaccuaggucuacu

SEQ ID NO: 687927 - RNA, 19 nt, Artificial Sequence
  Description of Artificial Sequence: Synthetic oligonucleotide
  Antisense strand to SEQ ID NO: 687926
aguagaccuagguaugucc

SEQ ID NO: 687928 - RNA, 19 nt, Artificial Sequence
  Description of Artificial Sequence: Synthetic oligonucleotide
  Sense strand starting at position 867 of SEQ ID NO: 586046
uuucuaccugcagaggauu

SEQ ID NO: 687929 - RNA, 19 nt, Artificial Sequence
  Description of Artificial Sequence: Synthetic oligonucleotide
  Antisense strand to SEQ ID NO: 687928
aauccucugcagguagaaa

SEQ ID NO: 687930 - RNA, 19 nt, Artificial Sequence
  Description of Artificial Sequence: Synthetic oligonucleotide
  Sense strand starting at position 1034 of SEQ ID NO: 586046
acccauauccucgaagcua

SEQ ID NO: 687931 - RNA, 19 nt, Artificial Sequence
  Description of Artificial Sequence: Synthetic oligonucleotide
  Antisense strand to SEQ ID NO: 687930
uagcuucgaggauaugggu

SEQ ID NO: 687932 - RNA, 19 nt, Artificial Sequence
  Description of Artificial Sequence: Synthetic oligonucleotide
  Sense strand starting at position 1047 of SEQ ID NO: 586046
aagcuagagccugagguau

SEQ ID NO: 687933 - RNA, 19 nt, Artificial Sequence
  Description of Artificial Sequence: Synthetic oligonucleotide
  Antisense strand to SEQ ID NO: 687932
auaccucaggcucuagcuu

SEQ ID NO: 687934 - RNA, 19 nt, Artificial Sequence
  Description of Artificial Sequence: Synthetic oligonucleotide
  Sense strand starting at position 1067 of SEQ ID NO: 586046
auccauguucuccauguca

SEQ ID NO: 687935 - RNA, 19 nt, Artificial Sequence
  Description of Artificial Sequence: Synthetic oligonucleotide
  Antisense strand to SEQ ID NO: 687934
ugacauggagaacauggau

SEQ ID NO: 687936 - RNA, 19 nt, Artificial Sequence
  Description of Artificial Sequence: Synthetic oligonucleotide
  Sense strand starting at position 1203 of SEQ ID NO: 586046
gaggauacggcuuggaauc

SEQ ID NO: 687937 - RNA, 19 nt, Artificial Sequence
  Description of Artificial Sequence: Synthetic oligonucleotide
  Antisense strand to SEQ ID NO: 687936
gauuccaagccguauccuc

SEQ ID NO: 687938 - RNA, 19 nt, Artificial Sequence
  Description of Artificial Sequence: Synthetic oligonucleotide
  Sense strand starting at position 1728 of SEQ ID NO: 586046
ggccauuaccuggauguuu

SEQ ID NO: 687939 - RNA, 19 nt, Artificial Sequence
  Description of Artificial Sequence: Synthetic oligonucleotide
  Antisense strand to SEQ ID NO: 687938
aaacauccagguaauggcc

SEQ ID NO: 687940 - RNA, 19 nt, Artificial Sequence
  Description of Artificial Sequence: Synthetic oligonucleotide
  Sense strand starting at position 1941 of SEQ ID NO: 586046
aggagaagcccggauguuu

SEQ ID NO: 687941 - RNA, 19 nt, Artificial Sequence
  Description of Artificial Sequence: Synthetic oligonucleotide
  Antisense strand to SEQ ID NO: 687940
aaacauccgggcuucuccu

SEQ ID NO: 687942 - RNA, 19 nt, Artificial Sequence
  Description of Artificial Sequence: Synthetic oligonucleotide
  Sense strand starting at position 2413 of SEQ ID NO: 586046
gaggguuaugaaggccaga

SEQ ID NO: 687943 - RNA, 19 nt, Artificial Sequence
  Description of Artificial Sequence: Synthetic oligonucleotide
  Antisense strand to SEQ ID NO: 687942
ucuggccuucauaacccuc

SEQ ID NO: 687944 - RNA, 19 nt, Artificial Sequence
  Description of Artificial Sequence: Synthetic oligonucleotide
  Sense strand starting at position 2510 of SEQ ID NO: 586046
gugcuagacgcuccguuua

SEQ ID NO: 687945 - RNA, 19 nt, Artificial Sequence
  Description of Artificial Sequence: Synthetic oligonucleotide
  Antisense strand to SEQ ID NO: 687944
uaaacggagcgucuagcac

SEQ ID NO: 687946 - RNA, 19 nt, Artificial Sequence
  Description of Artificial Sequence: Synthetic oligonucleotide
  Sense strand starting at position 2575 of SEQ ID NO: 586046
agucuuguugaggaauggu

SEQ ID NO: 687947 - RNA, 19 nt, Artificial Sequence
  Description of Artificial Sequence: Synthetic oligonucleotide
  Antisense strand to SEQ ID NO: 687946
accauuccucaacaagacu

SEQ ID NO: 687948 - RNA, 19 nt, Artificial Sequence
  Description of Artificial Sequence: Synthetic oligonucleotide
  Sense strand starting at position 2583 of SEQ ID NO: 586046
ugaggaaugguguguauaa

SEQ ID NO: 687949 - RNA, 19 nt, Artificial Sequence
  Description of Artificial Sequence: Synthetic oligonucleotide
  Antisense strand to SEQ ID NO: 687948
uuauacacaccauuccuca

SEQ ID NO: 687950 - RNA, 19 nt, Artificial Sequence
  Description of Artificial Sequence: Synthetic oligonucleotide
  Sense strand starting at position 2584 of SEQ ID NO: 586046
gaggaaugguguguauaaa

SEQ ID NO: 687951 - RNA, 19 nt, Artificial Sequence
  Description of Artificial Sequence: Synthetic oligonucleotide
  Antisense strand to SEQ ID NO: 687950
uuuauacacaccauuccuc

SEQ ID NO: 687952 - RNA, 19 nt, Artificial Sequence
  Description of Artificial Sequence: Synthetic oligonucleotide
  Sense strand starting at position 2585 of SEQ ID NO: 586046
aggaaugguguguauaaac

SEQ ID NO: 687953 - RNA, 19 nt, Artificial Sequence
  Description of Artificial Sequence: Synthetic oligonucleotide
  Antisense strand to SEQ ID NO: 687952
guuuauacacaccauuccu

SEQ ID NO: 687954 - RNA, 19 nt, Artificial Sequence
  Description of Artificial Sequence: Synthetic oligonucleotide
  Sense strand starting at position 2605 of SEQ ID NO: 586046
gugaaucuaguguaauaug

SEQ ID NO: 687955 - RNA, 19 nt, Artificial Sequence
  Description of Artificial Sequence: Synthetic oligonucleotide
  Antisense strand to SEQ ID NO: 687954
cauauuacacuagauucac

SEQ ID NO: 687956 - RNA, 19 nt, Artificial Sequence
  Description of Artificial Sequence: Synthetic oligonucleotide
  Sense strand starting at position 2630 of SEQ ID NO: 586046
gugguugauagcgaugaag

SEQ ID NO: 687957 - RNA, 19 nt, Artificial Sequence
  Description of Artificial Sequence: Synthetic oligonucleotide
  Antisense strand to SEQ ID NO: 687956
cuucaucgcuaucaaccac

SEQ ID NO: 687958 - RNA, 19 nt, Artificial Sequence
  Description of Artificial Sequence: Synthetic oligonucleotide
  Sense strand starting at position 2668 of SEQ ID NO: 586046
gagcauuacgcugagacca

SEQ ID NO: 687959 - RNA, 19 nt, Artificial Sequence
  Description of Artificial Sequence: Synthetic oligonucleotide
  Antisense strand to SEQ ID NO: 687958
uggucucagcguaaugcuc

SEQ ID NO: 687960 - RNA, 19 nt, Artificial Sequence
  Description of Artificial Sequence: Synthetic oligonucleotide
  Sense strand starting at position 2798 of SEQ ID NO: 586046
gucagugaaguucaggaua

SEQ ID NO: 687961 - RNA, 19 nt, Artificial Sequence
  Description of Artificial Sequence: Synthetic oligonucleotide
  Antisense strand to SEQ ID NO: 687960
uauccugaacuucacugac

SEQ ID NO: 687962 - RNA, 19 nt, Artificial Sequence
  Description of Artificial Sequence: Synthetic oligonucleotide
  Sense strand starting at position 2936 of SEQ ID NO: 586046
gcuuauaaacaugaucugu

SEQ ID NO: 687963 - RNA, 19 nt, Artificial Sequence
  Description of Artificial Sequence: Synthetic oligonucleotide
  Antisense strand to SEQ ID NO: 687962
acagaucauguuuauaagc

SEQ ID NO: 687964 - RNA, 19 nt, Artificial Sequence
  Description of Artificial Sequence: Synthetic oligonucleotide
  Sense strand starting at position 2954 of SEQ ID NO: 586046
uaaaucagugcuugggaaa

SEQ ID NO: 687965 - RNA, 19 nt, Artificial Sequence
  Description of Artificial Sequence: Synthetic oligonucleotide
  Antisense strand to SEQ ID NO: 687964
uuucccaagcacugauuua

SEQ ID NO: 687966 - RNA, 19 nt, Artificial Sequence
  Description of Artificial Sequence: Synthetic oligonucleotide
  Sense strand starting at position 3123 of SEQ ID NO: 586046
uugggcacuguugaugaua

SEQ ID NO: 687967 - RNA, 19 nt, Artificial Sequence
  Description of Artificial Sequence: Synthetic oligonucleotide
  Antisense strand to SEQ ID NO: 687966
uaucaucaacagugcccaa

SEQ ID NO: 687968 - RNA, 19 nt, Artificial Sequence
  Description of Artificial Sequence: Synthetic oligonucleotide
  Sense strand starting at position 3144 of SEQ ID NO: 586046
gagauugaauaguucuuaa

SEQ ID NO: 687969 - RNA, 19 nt, Artificial Sequence
  Description of Artificial Sequence: Synthetic oligonucleotide
  Antisense strand to SEQ ID NO: 687968
uuaagaacuauucaaucuc

SEQ ID NO: 687970 - RNA, 19 nt, Artificial Sequence
  Description of Artificial Sequence: Synthetic oligonucleotide
  Sense strand starting at position 3147 of SEQ ID NO: 586046
auugaauaguucuuaagca

SEQ ID NO: 687971 - RNA, 19 nt, Artificial Sequence
  Description of Artificial Sequence: Synthetic oligonucleotide
  Antisense strand to SEQ ID NO: 687970
ugcuuaagaacuauucaau

SEQ ID NO: 687972 - RNA, 19 nt, Artificial Sequence
  Description of Artificial Sequence: Synthetic oligonucleotide
  Sense strand starting at position 3154 of SEQ ID NO: 586046
aguucuuaagcagacauga

SEQ ID NO: 687973 - RNA, 19 nt, Artificial Sequence
  Description of Artificial Sequence: Synthetic oligonucleotide
  Antisense strand to SEQ ID NO: 687972
ucaugucugcuuaagaacu

SEQ ID NO: 687974 - RNA, 19 nt, Artificial Sequence
  Description of Artificial Sequence: Synthetic oligonucleotide
  Sense strand starting at position 3205 of SEQ ID NO: 586046
ugaguuugaggaggaucau

SEQ ID NO: 687975 - RNA, 19 nt, Artificial Sequence
  Description of Artificial Sequence: Synthetic oligonucleotide
  Antisense strand to SEQ ID NO: 687974
augauccuccucaaacuca

SEQ ID NO: 687976 - RNA, 19 nt, Artificial Sequence
  Description of Artificial Sequence: Synthetic oligonucleotide
  Sense strand starting at position 3455 of SEQ ID NO: 586046
ucugcauguggagaaaucu

SEQ ID NO: 687977 - RNA, 19 nt, Artificial Sequence
  Description of Artificial Sequence: Synthetic oligonucleotide
  Antisense strand to SEQ ID NO: 687976
agauuucuccacaugcaga

SEQ ID NO: 687978 - RNA, 19 nt, Artificial Sequence
  Description of Artificial Sequence: Synthetic oligonucleotide
  Sense strand starting at position 3466 of SEQ ID NO: 586046
agaaaucuagcaggcuaga

SEQ ID NO: 687979 - RNA, 19 nt, Artificial Sequence
  Description of Artificial Sequence: Synthetic oligonucleotide
  Antisense strand to SEQ ID NO: 687978
ucuagccugcuagauuucu

SEQ ID NO: 687980 - RNA, 19 nt, Artificial Sequence
  Description of Artificial Sequence: Synthetic oligonucleotide
  Sense strand starting at position 3486 of SEQ ID NO: 586046
gacugcaugcuugaaauga

SEQ ID NO: 687981 - RNA, 19 nt, Artificial Sequence
  Description of Artificial Sequence: Synthetic oligonucleotide
  Antisense strand to SEQ ID NO: 687980
ucauuucaagcaugcaguc

SEQ ID NO: 687982 - RNA, 19 nt, Artificial Sequence
  Description of Artificial Sequence: Synthetic oligonucleotide
  Sense strand starting at position 3532 of SEQ ID NO: 586046
guugucagaacagauaguu

SEQ ID NO: 687983 - RNA, 19 nt, Artificial Sequence
  Description of Artificial Sequence: Synthetic oligonucleotide
  Antisense strand to SEQ ID NO: 687982
aacuaucuguucugacaac

SEQ ID NO: 687984 - RNA, 19 nt, Artificial Sequence
  Description of Artificial Sequence: Synthetic oligonucleotide
  Sense strand starting at position 3591 of SEQ ID NO: 586046
acaagaaccuggcaaauuu

SEQ ID NO: 687985 - RNA, 19 nt, Artificial Sequence
  Description of Artificial Sequence: Synthetic oligonucleotide
  Antisense strand to SEQ ID NO: 687984
aaauuugccagguucuugu

SEQ ID NO: 687986 - RNA, 19 nt, Artificial Sequence
  Description of Artificial Sequence: Synthetic oligonucleotide
  Sense strand starting at position 3607 of SEQ ID NO: 586046
uuuagagauggguggaagu

SEQ ID NO: 687987 - RNA, 19 nt, Artificial Sequence
  Description of Artificial Sequence: Synthetic oligonucleotide
  Antisense strand to SEQ ID NO: 687986
acuuccacccaucucuaaa

SEQ ID NO: 687988 - RNA, 19 nt, Artificial Sequence
  Description of Artificial Sequence: Synthetic oligonucleotide
  Sense strand starting at position 3618 of SEQ ID NO: 586046
guggaagucgaucaucaga

SEQ ID NO: 687989 - RNA, 19 nt, Artificial Sequence
  Description of Artificial Sequence: Synthetic oligonucleotide
  Antisense strand to SEQ ID NO: 687988
ucugaugaucgacuuccac

SEQ ID NO: 687990 - RNA, 19 nt, Artificial Sequence
  Description of Artificial Sequence: Synthetic oligonucleotide
  Sense strand starting at position 3620 of SEQ ID NO: 586046
ggaagucgaucaucagaga

SEQ ID NO: 687991 - RNA, 19 nt, Artificial Sequence
  Description of Artificial Sequence: Synthetic oligonucleotide
  Antisense strand to SEQ ID NO: 687990
ucucugaugaucgacuucc

SEQ ID NO: 687992 - RNA, 19 nt, Artificial Sequence
  Description of Artificial Sequence: Synthetic oligonucleotide
  Sense strand starting at position 362 of SEQ ID NO: 586047
auauaagaaugucuggcaa

SEQ ID NO: 687993 - RNA, 19 nt, Artificial Sequence
  Description of Artificial Sequence: Synthetic oligonucleotide
  Antisense strand to SEQ ID NO: 687992
uugccagacauucuuauau

SEQ ID NO: 687994 - RNA, 19 nt, Artificial Sequence
  Description of Artificial Sequence: Synthetic oligonucleotide
  Sense strand starting at position 375 of SEQ ID NO: 586047
uggcaauauccacaauguu

SEQ ID NO: 687995 - RNA, 19 nt, Artificial Sequence
  Description of Artificial Sequence: Synthetic oligonucleotide
  Antisense strand to SEQ ID NO: 687994
aacauuguggauauugcca

SEQ ID NO: 687996 - RNA, 19 nt, Artificial Sequence
  Description of Artificial Sequence: Synthetic oligonucleotide
  Sense strand starting at position 1229 of SEQ ID NO: 586047
gagagaguucccugguaua

SEQ ID NO: 687997 - RNA, 19 nt, Artificial Sequence
  Description of Artificial Sequence: Synthetic oligonucleotide
  Antisense strand to SEQ ID NO: 687996
uauaccagggaacucucuc

SEQ ID NO: 687998 - RNA, 19 nt, Artificial Sequence
  Description of Artificial Sequence: Synthetic oligonucleotide
  Sense strand starting at position 1461 of SEQ ID NO: 586047
uuuguucuuggucaggaaa

SEQ ID NO: 687999 - RNA, 19 nt, Artificial Sequence
  Description of Artificial Sequence: Synthetic oligonucleotide
  Antisense strand to SEQ ID NO: 687998
uuuccugaccaagaacaaa

SEQ ID NO: 688000 - RNA, 19 nt, Artificial Sequence
  Description of Artificial Sequence: Synthetic oligonucleotide
  Sense strand starting at position 1464 of SEQ ID NO: 586047
guucuuggucaggaaaguu

SEQ ID NO: 688001 - RNA, 19 nt, Artificial Sequence
  Description of Artificial Sequence: Synthetic oligonucleotide
  Antisense strand to SEQ ID NO: 688000
aacuuuccugaccaagaac

SEQ ID NO: 688002 - RNA, 19 nt, Artificial Sequence
  Description of Artificial Sequence: Synthetic oligonucleotide
  Sense strand starting at position 1531 of SEQ ID NO: 586047
aaaggacuuguuuacguga

SEQ ID NO: 688003 - RNA, 19 nt, Artificial Sequence
  Description of Artificial Sequence: Synthetic oligonucleotide
  Antisense strand to SEQ ID NO: 688002
ucacguaaacaaguccuuu

SEQ ID NO: 688004 - RNA, 19 nt, Artificial Sequence
  Description of Artificial Sequence: Synthetic oligonucleotide
  Sense strand starting at position 1536 of SEQ ID NO: 586047
acuuguuuacgugacaaca

SEQ ID NO: 688005 - RNA, 19 nt, Artificial Sequence
  Description of Artificial Sequence: Synthetic oligonucleotide
  Antisense strand to SEQ ID NO: 688004
uguugucacguaaacaagu

SEQ ID NO: 688006 - RNA, 19 nt, Artificial Sequence
  Description of Artificial Sequence: Synthetic oligonucleotide
  Sense strand starting at position 1569 of SEQ ID NO: 586047
gggcaauuccauugaaagu

SEQ ID NO: 688007 - RNA, 19 nt, Artificial Sequence
  Description of Artificial Sequence: Synthetic oligonucleotide
  Antisense strand to SEQ ID NO: 688006
acuuucaauggaauugccc

SEQ ID NO: 688008 - RNA, 19 nt, Artificial Sequence
  Description of Artificial Sequence: Synthetic oligonucleotide
  Sense strand starting at position 1570 of SEQ ID NO: 586047
ggcaauuccauugaaagug

SEQ ID NO: 688009 - RNA, 19 nt, Artificial Sequence
  Description of Artificial Sequence: Synthetic oligonucleotide
  Antisense strand to SEQ ID NO: 688008
cacuuucaauggaauugcc

SEQ ID NO: 688010 - RNA, 19 nt, Artificial Sequence
  Description of Artificial Sequence: Synthetic oligonucleotide
  Sense strand starting at position 1609 of SEQ ID NO: 586047
cagaaauagugagcacaga

SEQ ID NO: 688011 - RNA, 19 nt, Artificial Sequence
  Description of Artificial Sequence: Synthetic oligonucleotide
  Antisense strand to SEQ ID NO: 688010
ucugugcucacuauuucug

SEQ ID NO: 688012 - RNA, 19 nt, Artificial Sequence
  Description of Artificial Sequence: Synthetic oligonucleotide
  Sense strand starting at position 1653 of SEQ ID NO: 586047
caaauugagcggcaagaua

SEQ ID NO: 688013 - RNA, 19 nt, Artificial Sequence
  Description of Artificial Sequence: Synthetic oligonucleotide
  Antisense strand to SEQ ID NO: 688012
uaucuugccgcucaauuug

SEQ ID NO: 688014 - RNA, 19 nt, Artificial Sequence
  Description of Artificial Sequence: Synthetic oligonucleotide
  Sense strand starting at position 1690 of SEQ ID NO: 586047
gagguuaugacggauacuu

SEQ ID NO: 688015 - RNA, 19 nt, Artificial Sequence
  Description of Artificial Sequence: Synthetic oligonucleotide
  Antisense strand to SEQ ID NO: 688014
aaguauccgucauaaccuc

SEQ ID NO: 688016 - RNA, 19 nt, Artificial Sequence
  Description of Artificial Sequence: Synthetic oligonucleotide
  Sense strand starting at position 1875 of SEQ ID NO: 586047
gagcucagacccuguggaa

SEQ ID NO: 688017 - RNA, 19 nt, Artificial Sequence
  Description of Artificial Sequence: Synthetic oligonucleotide
  Antisense strand to SEQ ID NO: 688016
uuccacagggucugagcuc

SEQ ID NO: 688018 - RNA, 19 nt, Artificial Sequence
  Description of Artificial Sequence: Synthetic oligonucleotide
  Sense strand starting at position 2081 of SEQ ID NO: 586047
ggaggcaaguacucuggaa

SEQ ID NO: 688019 - RNA, 19 nt, Artificial Sequence
  Description of Artificial Sequence: Synthetic oligonucleotide
  Antisense strand to SEQ ID NO: 688018
uuccagaguacuugccucc

SEQ ID NO: 688020 - RNA, 19 nt, Artificial Sequence
  Description of Artificial Sequence: Synthetic oligonucleotide
  Sense strand starting at position 2083 of SEQ ID NO: 586047
aggcaaguacucuggaaac

SEQ ID NO: 688021 - RNA, 19 nt, Artificial Sequence
  Description of Artificial Sequence: Synthetic oligonucleotide
  Antisense strand to SEQ ID NO: 688020
guuuccagaguacuugccu

SEQ ID NO: 688022 - RNA, 19 nt, Artificial Sequence
  Description of Artificial Sequence: Synthetic oligonucleotide
  Sense strand starting at position 2085 of SEQ ID NO: 586047
gcaaguacucuggaaacga

SEQ ID NO: 688023 - RNA, 19 nt, Artificial Sequence
  Description of Artificial Sequence: Synthetic oligonucleotide
  Antisense strand to SEQ ID NO: 688022
ucguuuccagaguacuugc

SEQ ID NO: 688024 - RNA, 19 nt, Artificial Sequence
  Description of Artificial Sequence: Synthetic oligonucleotide
  Sense strand starting at position 2106 of SEQ ID NO: 586047
gagaauuaacuccggaauu

SEQ ID NO: 688025 - RNA, 19 nt, Artificial Sequence
  Description of Artificial Sequence: Synthetic oligonucleotide
  Antisense strand to SEQ ID NO: 688024
aauuccggaguuaauucuc

SEQ ID NO: 688026 - RNA, 19 nt, Artificial Sequence
  Description of Artificial Sequence: Synthetic oligonucleotide
  Sense strand starting at position 2119 of SEQ ID NO: 586047
ggaauuaccuaguuaucug

SEQ ID NO: 688027 - RNA, 19 nt, Artificial Sequence
  Description of Artificial Sequence: Synthetic oligonucleotide
  Antisense strand to SEQ ID NO: 688026
cagauaacuagguaauucc

SEQ ID NO: 688028 - RNA, 19 nt, Artificial Sequence
  Description of Artificial Sequence: Synthetic oligonucleotide
  Sense strand starting at position 2166 of SEQ ID NO: 586047
ugaguagugcuggaguaga

SEQ ID NO: 688029 - RNA, 19 nt, Artificial Sequence
  Description of Artificial Sequence: Synthetic oligonucleotide
  Antisense strand to SEQ ID NO: 688028
ucuacuccagcacuacuca

SEQ ID NO: 688030 - RNA, 19 nt, Artificial Sequence
  Description of Artificial Sequence: Synthetic oligonucleotide
  Sense strand starting at position 2203 of SEQ ID NO: 586047
uccugucaccgugauaaac

SEQ ID NO: 688031 - RNA, 19 nt, Artificial Sequence
  Description of Artificial Sequence: Synthetic oligonucleotide
  Antisense strand to SEQ ID NO: 688030
guuuaucacggugacagga

SEQ ID NO: 688032 - RNA, 19 nt, Artificial Sequence
  Description of Artificial Sequence: Synthetic oligonucleotide
  Sense strand starting at position 2327 of SEQ ID NO: 586047
ccgccuuuccucguuaauu

SEQ ID NO: 688033 - RNA, 19 nt, Artificial Sequence
  Description of Artificial Sequence: Synthetic oligonucleotide
  Antisense strand to SEQ ID NO: 688032
aauuaacgaggaaaggcgg

SEQ ID NO: 688034 - RNA, 19 nt, Artificial Sequence
  Description of Artificial Sequence: Synthetic oligonucleotide
  Sense strand starting at position 2329 of SEQ ID NO: 586047
gccuuuccucguuaauuuc

SEQ ID NO: 688035 - RNA, 19 nt, Artificial Sequence
  Description of Artificial Sequence: Synthetic oligonucleotide
  Antisense strand to SEQ ID NO: 688034
gaaauuaacgaggaaaggc

SEQ ID NO: 688036 - RNA, 19 nt, Artificial Sequence
  Description of Artificial Sequence: Synthetic oligonucleotide
  Sense strand starting at position 2504 of SEQ ID NO: 586047
gugggaaacuggucccaga

SEQ ID NO: 688037 - RNA, 19 nt, Artificial Sequence
  Description of Artificial Sequence: Synthetic oligonucleotide
  Antisense strand to SEQ ID NO: 688036
ucugggaccaguuucccac

SEQ ID NO: 688038 - RNA, 19 nt, Artificial Sequence
  Description of Artificial Sequence: Synthetic oligonucleotide
  Sense strand starting at position 2630 of SEQ ID NO: 586047
cgcagagaugcccaaggaa

SEQ ID NO: 688039 - RNA, 19 nt, Artificial Sequence
  Description of Artificial Sequence: Synthetic oligonucleotide
  Antisense strand to SEQ ID NO: 688038
uuccuugggcaucucugcg

SEQ ID NO: 688040 - RNA, 19 nt, Artificial Sequence
  Description of Artificial Sequence: Synthetic oligonucleotide
  Sense strand starting at position 2741 of SEQ ID NO: 586047
aguagagagucuuugaaua

SEQ ID NO: 688041 - RNA, 19 nt, Artificial Sequence
  Description of Artificial Sequence: Synthetic oligonucleotide
  Antisense strand to SEQ ID NO: 688040
uauucaaagacucucuacu

SEQ ID NO: 688042 - RNA, 19 nt, Artificial Sequence
  Description of Artificial Sequence: Synthetic oligonucleotide
  Sense strand starting at position 2749 of SEQ ID NO: 586047
gucuuugaauaaucagaac

SEQ ID NO: 688043 - RNA, 19 nt, Artificial Sequence
  Description of Artificial Sequence: Synthetic oligonucleotide
  Antisense strand to SEQ ID NO: 688042
guucugauuauucaaagac

SEQ ID NO: 688044 - RNA, 19 nt, Artificial Sequence
  Description of Artificial Sequence: Synthetic oligonucleotide
  Sense strand starting at position 2798 of SEQ ID NO: 586047
aaaucuuacgcuuagaguc

SEQ ID NO: 688045 - RNA, 19 nt, Artificial Sequence
  Description of Artificial Sequence: Synthetic oligonucleotide
  Antisense strand to SEQ ID NO: 688044
gacucuaagcguaagauuu

SEQ ID NO: 688046 - RNA, 19 nt, Artificial Sequence
  Description of Artificial Sequence: Synthetic oligonucleotide
  Sense strand starting at position 2818 of SEQ ID NO: 586047
gugaauggucuugaguaaa

SEQ ID NO: 688047 - RNA, 19 nt, Artificial Sequence
  Description of Artificial Sequence: Synthetic oligonucleotide
  Antisense strand to SEQ ID NO: 688046
uuuacucaagaccauucac

SEQ ID NO: 688048 - RNA, 19 nt, Artificial Sequence
  Description of Artificial Sequence: Synthetic oligonucleotide
  Sense strand starting at position 2855 of SEQ ID NO: 586047
gucugugugccugugucau

SEQ ID NO: 688049 - RNA, 19 nt, Artificial Sequence
  Description of Artificial Sequence: Synthetic oligonucleotide
  Antisense strand to SEQ ID NO: 688048
augacacaggcacacagac

SEQ ID NO: 688050 - RNA, 19 nt, Artificial Sequence
  Description of Artificial Sequence: Synthetic oligonucleotide
  Sense strand starting at position 3022 of SEQ ID NO: 586047
ggcaguuaacauggaguaa

SEQ ID NO: 688051 - RNA, 19 nt, Artificial Sequence
  Description of Artificial Sequence: Synthetic oligonucleotide
  Antisense strand to SEQ ID NO: 688050
uuacuccauguuaacugcc

SEQ ID NO: 688052 - RNA, 19 nt, Artificial Sequence
  Description of Artificial Sequence: Synthetic oligonucleotide
  Sense strand starting at position 3023 of SEQ ID NO: 586047
gcaguuaacauggaguaag

SEQ ID NO: 688053 - RNA, 19 nt, Artificial Sequence
  Description of Artificial Sequence: Synthetic oligonucleotide
  Antisense strand to SEQ ID NO: 688052
cuuacuccauguuaacugc

SEQ ID NO: 688054 - RNA, 19 nt, Artificial Sequence
  Description of Artificial Sequence: Synthetic oligonucleotide
  Sense strand starting at position 3026 of SEQ ID NO: 586047
guuaacauggaguaagcau

SEQ ID NO: 688055 - RNA, 19 nt, Artificial Sequence
  Description of Artificial Sequence: Synthetic oligonucleotide
  Antisense strand to SEQ ID NO: 688054
augcuuacuccauguuaac

SEQ ID NO: 688056 - RNA, 19 nt, Artificial Sequence
  Description of Artificial Sequence: Synthetic oligonucleotide
  Sense strand starting at position 3109 of SEQ ID NO: 586047
uguuaauuacuacaacagu

SEQ ID NO: 688057 - RNA, 19 nt, Artificial Sequence
  Description of Artificial Sequence: Synthetic oligonucleotide
  Antisense strand to SEQ ID NO: 688056
acuguuguaguaauuaaca

SEQ ID NO: 688058 - RNA, 19 nt, Artificial Sequence
  Description of Artificial Sequence: Synthetic oligonucleotide
  Sense strand starting at position 3170 of SEQ ID NO: 586047
guggcaagaagugaaguuu

SEQ ID NO: 688059 - RNA, 19 nt, Artificial Sequence
  Description of Artificial Sequence: Synthetic oligonucleotide
  Antisense strand to SEQ ID NO: 688058
aaacuucacuucuugccac

SEQ ID NO: 688060 - RNA, 19 nt, Artificial Sequence
  Description of Artificial Sequence: Synthetic oligonucleotide
  Sense strand starting at position 3518 of SEQ ID NO: 586047
gagggauguuuaucgugag

SEQ ID NO: 688061 - RNA, 19 nt, Artificial Sequence
  Description of Artificial Sequence: Synthetic oligonucleotide
  Antisense strand to SEQ ID NO: 688060
cucacgauaaacaucccuc

SEQ ID NO: 688062 - RNA, 19 nt, Artificial Sequence
  Description of Artificial Sequence: Synthetic oligonucleotide
  Sense strand starting at position 3532 of SEQ ID NO: 586047
gugagucucgcuaaagugu

SEQ ID NO: 688063 - RNA, 19 nt, Artificial Sequence
  Description of Artificial Sequence: Synthetic oligonucleotide
  Antisense strand to SEQ ID NO: 688062
acacuuuagcgagacucac

SEQ ID NO: 688064 - RNA, 19 nt, Artificial Sequence
  Description of Artificial Sequence: Synthetic oligonucleotide
  Sense strand starting at position 3595 of SEQ ID NO: 586047
gagguugcucuguaugaaa

SEQ ID NO: 688065 - RNA, 19 nt, Artificial Sequence
  Description of Artificial Sequence: Synthetic oligonucleotide
  Antisense strand to SEQ ID NO: 688064
uuucauacagagcaaccuc

SEQ ID NO: 688066 - RNA, 19 nt, Artificial Sequence
  Description of Artificial Sequence: Synthetic oligonucleotide
  Sense strand starting at position 3705 of SEQ ID NO: 586047
ucauacaggccuuagagua

SEQ ID NO: 688067 - RNA, 19 nt, Artificial Sequence
  Description of Artificial Sequence: Synthetic oligonucleotide
  Antisense strand to SEQ ID NO: 688066
uacucuaaggccuguauga

SEQ ID NO: 688068 - RNA, 19 nt, Artificial Sequence
  Description of Artificial Sequence: Synthetic oligonucleotide
  Sense strand starting at position 3919 of SEQ ID NO: 586047
ucagcuuuccugucagcgu

SEQ ID NO: 688069 - RNA, 19 nt, Artificial Sequence
  Description of Artificial Sequence: Synthetic oligonucleotide
  Antisense strand to SEQ ID NO: 688068
acgcugacaggaaagcuga

SEQ ID NO: 688070 - RNA, 19 nt, Artificial Sequence
  Description of Artificial Sequence: Synthetic oligonucleotide
  Sense strand starting at position 3954 of SEQ ID NO: 586047
ugaccuaacucuuucggau

SEQ ID NO: 688071 - RNA, 19 nt, Artificial Sequence
  Description of Artificial Sequence: Synthetic oligonucleotide
  Antisense strand to SEQ ID NO: 688070
auccgaaagaguuagguca

SEQ ID NO: 688072 - RNA, 19 nt, Artificial Sequence
  Description of Artificial Sequence: Synthetic oligonucleotide
  Sense strand starting at position 206 of SEQ ID NO: 586048
gguugaacugcuugccaca

SEQ ID NO: 688073 - RNA, 19 nt, Artificial Sequence
  Description of Artificial Sequence: Synthetic oligonucleotide
  Antisense strand to SEQ ID NO: 688072
uguggcaagcaguucaacc

SEQ ID NO: 688074 - RNA, 19 nt, Artificial Sequence
  Description of Artificial Sequence: Synthetic oligonucleotide
  Sense strand starting at position 998 of SEQ ID NO: 586048
cuguaagguaguugacgau

SEQ ID NO: 688075 - RNA, 19 nt, Artificial Sequence
  Description of Artificial Sequence: Synthetic oligonucleotide
  Antisense strand to SEQ ID NO: 688074
aucgucaacuaccuuacag

SEQ ID NO: 688076 - RNA, 19 nt, Artificial Sequence
  Description of Artificial Sequence: Synthetic oligonucleotide
  Sense strand starting at position 1241 of SEQ ID NO: 586048
gguucauguuccguagcgu

SEQ ID NO: 688077 - RNA, 19 nt, Artificial Sequence
  Description of Artificial Sequence: Synthetic oligonucleotide
  Antisense strand to SEQ ID NO: 688076
acgcuacggaacaugaacc

SEQ ID NO: 688078 - RNA, 19 nt, Artificial Sequence
  Description of Artificial Sequence: Synthetic oligonucleotide
  Sense strand starting at position 1242 of SEQ ID NO: 586048
guucauguuccguagcguu

SEQ ID NO: 688079 - RNA, 19 nt, Artificial Sequence
  Description of Artificial Sequence: Synthetic oligonucleotide
  Antisense strand to SEQ ID NO: 688078
aacgcuacggaacaugaac

SEQ ID NO: 688080 - RNA, 19 nt, Artificial Sequence
  Description of Artificial Sequence: Synthetic oligonucleotide
  Sense strand starting at position 2188 of SEQ ID NO: 586048
uccucuuuggccgggauua

SEQ ID NO: 688081 - RNA, 19 nt, Artificial Sequence
  Description of Artificial Sequence: Synthetic oligonucleotide
  Antisense strand to SEQ ID NO: 688080
uaaucccggccaaagagga

SEQ ID NO: 688082 - RNA, 19 nt, Artificial Sequence
  Description of Artificial Sequence: Synthetic oligonucleotide
  Sense strand starting at position 2189 of SEQ ID NO: 586048
ccucuuuggccgggauuau

SEQ ID NO: 688083 - RNA, 19 nt, Artificial Sequence
  Description of Artificial Sequence: Synthetic oligonucleotide
  Antisense strand to SEQ ID NO: 688082
auaaucccggccaaagagg

SEQ ID NO: 688084 - RNA, 19 nt, Artificial Sequence
  Description of Artificial Sequence: Synthetic oligonucleotide
  Sense strand starting at position 2190 of SEQ ID NO: 586048
cucuuuggccgggauuauu

SEQ ID NO: 688085 - RNA, 19 nt, Artificial Sequence
  Description of Artificial Sequence: Synthetic oligonucleotide
  Antisense strand to SEQ ID NO: 688084
aauaaucccggccaaagag

SEQ ID NO: 688086 - RNA, 19 nt, Artificial Sequence
  Description of Artificial Sequence: Synthetic oligonucleotide
  Sense strand starting at position 2199 of SEQ ID NO: 586048
cgggauuauuuguccgcca

SEQ ID NO: 688087 - RNA, 19 nt, Artificial Sequence
  Description of Artificial Sequence: Synthetic oligonucleotide
  Antisense strand to SEQ ID NO: 688086
uggcggacaaauaaucccg

SEQ ID NO: 688088 - RNA, 19 nt, Artificial Sequence
  Description of Artificial Sequence: Synthetic oligonucleotide
  Sense strand starting at position 2201 of SEQ ID NO: 586048
ggauuauuuguccgccaga

SEQ ID NO: 688089 - RNA, 19 nt, Artificial Sequence
  Description of Artificial Sequence: Synthetic oligonucleotide
  Antisense strand to SEQ ID NO: 688088
ucuggcggacaaauaaucc

SEQ ID NO: 688090 - RNA, 19 nt, Artificial Sequence
  Description of Artificial Sequence: Synthetic oligonucleotide
  Sense strand starting at position 2202 of SEQ ID NO: 586048
gauuauuuguccgccagag

SEQ ID NO: 688091 - RNA, 19 nt, Artificial Sequence
  Description of Artificial Sequence: Synthetic oligonucleotide
  Antisense strand to SEQ ID NO: 688090
cucuggcggacaaauaauc

SEQ ID NO: 688092 - RNA, 19 nt, Artificial Sequence
  Description of Artificial Sequence: Synthetic oligonucleotide
  Sense strand starting at position 2550 of SEQ ID NO: 586048
cagagcuguugguagcuau

SEQ ID NO: 688093 - RNA, 19 nt, Artificial Sequence
  Description of Artificial Sequence: Synthetic oligonucleotide
  Antisense strand to SEQ ID NO: 688092
auagcuaccaacagcucug

SEQ ID NO: 688094 - RNA, 19 nt, Artificial Sequence
  Description of Artificial Sequence: Synthetic oligonucleotide
  Sense strand starting at position 2588 of SEQ ID NO: 586048
ugcugagugugcucacagu

SEQ ID NO: 688095 - RNA, 19 nt, Artificial Sequence
  Description of Artificial Sequence: Synthetic oligonucleotide
  Antisense strand to SEQ ID NO: 688094
acugugagcacacucagca

SEQ ID NO: 688096 - RNA, 19 nt, Artificial Sequence
  Description of Artificial Sequence: Synthetic oligonucleotide
  Sense strand starting at position 2602 of SEQ ID NO: 586048
acaguugcuccagacacau

SEQ ID NO: 688097 - RNA, 19 nt, Artificial Sequence
  Description of Artificial Sequence: Synthetic oligonucleotide
  Antisense strand to SEQ ID NO: 688096
augugucuggagcaacugu

SEQ ID NO: 688098 - RNA, 19 nt, Artificial Sequence
  Description of Artificial Sequence: Synthetic oligonucleotide
  Sense strand starting at position 2770 of SEQ ID NO: 586048
ccuccauucucaggauuga

SEQ ID NO: 688099 - RNA, 19 nt, Artificial Sequence
  Description of Artificial Sequence: Synthetic oligonucleotide
  Antisense strand to SEQ ID NO: 688098
ucaauccugagaauggagg

SEQ ID NO: 688100 - RNA, 19 nt, Artificial Sequence
  Description of Artificial Sequence: Synthetic oligonucleotide
  Sense strand starting at position 2818 of SEQ ID NO: 586048
ccgcuugugcuaucgauga

SEQ ID NO: 688101 - RNA, 19 nt, Artificial Sequence
  Description of Artificial Sequence: Synthetic oligonucleotide
  Antisense strand to SEQ ID NO: 688100
ucaucgauagcacaagcgg

SEQ ID NO: 688102 - RNA, 19 nt, Artificial Sequence
  Description of Artificial Sequence: Synthetic oligonucleotide
  Sense strand starting at position 2822 of SEQ ID NO: 586048
uugugcuaucgaugaccuu

SEQ ID NO: 688103 - RNA, 19 nt, Artificial Sequence
  Description of Artificial Sequence: Synthetic oligonucleotide
  Antisense strand to SEQ ID NO: 688102
aaggucaucgauagcacaa

SEQ ID NO: 688104 - RNA, 19 nt, Artificial Sequence
  Description of Artificial Sequence: Synthetic oligonucleotide
  Sense strand starting at position 2901 of SEQ ID NO: 586048
auguuaguaugauucuacu

SEQ ID NO: 688105 - RNA, 19 nt, Artificial Sequence
  Description of Artificial Sequence: Synthetic oligonucleotide
  Antisense strand to SEQ ID NO: 688104
aguagaaucauacuaacau

SEQ ID NO: 688106 - RNA, 19 nt, Artificial Sequence
  Description of Artificial Sequence: Synthetic oligonucleotide
  Sense strand starting at position 2904 of SEQ ID NO: 586048
uuaguaugauucuacucua

SEQ ID NO: 688107 - RNA, 19 nt, Artificial Sequence
  Description of Artificial Sequence: Synthetic oligonucleotide
  Antisense strand to SEQ ID NO: 688106
uagaguagaaucauacuaa

SEQ ID NO: 688108 - RNA, 19 nt, Artificial Sequence
  Description of Artificial Sequence: Synthetic oligonucleotide
  Sense strand starting at position 3246 of SEQ ID NO: 586048
ugaaguuucuuauuaugug

SEQ ID NO: 688109 - RNA, 19 nt, Artificial Sequence
  Description of Artificial Sequence: Synthetic oligonucleotide
  Antisense strand to SEQ ID NO: 688108
cacauaauaagaaacuuca

SEQ ID NO: 688110 - RNA, 19 nt, Artificial Sequence
  Description of Artificial Sequence: Synthetic oligonucleotide
  Sense strand starting at position 3247 of SEQ ID NO: 586048
gaaguuucuuauuaugugu

SEQ ID NO: 688111 - RNA, 19 nt, Artificial Sequence
  Description of Artificial Sequence: Synthetic oligonucleotide
  Antisense strand to SEQ ID NO: 688110
acacauaauaagaaacuuc

SEQ ID NO: 688112 - RNA, 19 nt, Artificial Sequence
  Description of Artificial Sequence: Synthetic oligonucleotide
  Sense strand starting at position 3296 of SEQ ID NO: 586048
acuucuugguugcaggaau

SEQ ID NO: 688113 - RNA, 19 nt, Artificial Sequence
  Description of Artificial Sequence: Synthetic oligonucleotide
  Antisense strand to SEQ ID NO: 688112
auuccugcaaccaagaagu

SEQ ID NO: 688114 - RNA, 19 nt, Artificial Sequence
  Description of Artificial Sequence: Synthetic oligonucleotide
  Sense strand starting at position 3308 of SEQ ID NO: 586048
caggaauuauguugugggu

SEQ ID NO: 688115 - RNA, 19 nt, Artificial Sequence
  Description of Artificial Sequence: Synthetic oligonucleotide
  Antisense strand to SEQ ID NO: 688114
acccacaacauaauuccug

SEQ ID NO: 688116 - RNA, 19 nt, Artificial Sequence
  Description of Artificial Sequence: Synthetic oligonucleotide
  Sense strand starting at position 3310 of SEQ ID NO: 586048
ggaauuauguuguggguuu

SEQ ID NO: 688117 - RNA, 19 nt, Artificial Sequence
  Description of Artificial Sequence: Synthetic oligonucleotide
  Antisense strand to SEQ ID NO: 688116
aaacccacaacauaauucc

SEQ ID NO: 688118 - RNA, 19 nt, Artificial Sequence
  Description of Artificial Sequence: Synthetic oligonucleotide
  Sense strand starting at position 3663 of SEQ ID NO: 586048
gcaacaaaugauuguugaa

SEQ ID NO: 688119 - RNA, 19 nt, Artificial Sequence
  Description of Artificial Sequence: Synthetic oligonucleotide
  Antisense strand to SEQ ID NO: 688118
uucaacaaucauuuguugc

SEQ ID NO: 688120 - RNA, 19 nt, Artificial Sequence
  Description of Artificial Sequence: Synthetic oligonucleotide
  Sense strand starting at position 3665 of SEQ ID NO: 586048
aacaaaugauuguugaagu

SEQ ID NO: 688121 - RNA, 19 nt, Artificial Sequence
  Description of Artificial Sequence: Synthetic oligonucleotide
  Antisense strand to SEQ ID NO: 688120
acuucaacaaucauuuguu

SEQ ID NO: 688122 - RNA, 19 nt, Artificial Sequence
  Description of Artificial Sequence: Synthetic oligonucleotide
  Sense strand starting at position 3666 of SEQ ID NO: 586048
acaaaugauuguugaagua

SEQ ID NO: 688123 - RNA, 19 nt, Artificial Sequence
  Description of Artificial Sequence: Synthetic oligonucleotide
  Antisense strand to SEQ ID NO: 688122
uacuucaacaaucauuugu

SEQ ID NO: 688124 - RNA, 19 nt, Artificial Sequence
  Description of Artificial Sequence: Synthetic oligonucleotide
  Sense strand starting at position 3682 of SEQ ID NO: 586048
guaauuccucuuuggcuca

SEQ ID NO: 688125 - RNA, 19 nt, Artificial Sequence
  Description of Artificial Sequence: Synthetic oligonucleotide
  Antisense strand to SEQ ID NO: 688124
ugagccaaagaggaauuac

SEQ ID NO: 688126 - RNA, 19 nt, Artificial Sequence
  Description of Artificial Sequence: Synthetic oligonucleotide
  Sense strand starting at position 3719 of SEQ ID NO: 586048
aaaguuuguucuugagcug

SEQ ID NO: 688127 - RNA, 19 nt, Artificial Sequence
  Description of Artificial Sequence: Synthetic oligonucleotide
  Antisense strand to SEQ ID NO: 688126
cagcucaagaacaaacuuu

SEQ ID NO: 688128 - RNA, 19 nt, Artificial Sequence
  Description of Artificial Sequence: Synthetic oligonucleotide
  Sense strand starting at position 3720 of SEQ ID NO: 586048
aaguuuguucuugagcuga

SEQ ID NO: 688129 - RNA, 19 nt, Artificial Sequence
  Description of Artificial Sequence: Synthetic oligonucleotide
  Antisense strand to SEQ ID NO: 688128
ucagcucaagaacaaacuu

SEQ ID NO: 688130 - RNA, 19 nt, Artificial Sequence
  Description of Artificial Sequence: Synthetic oligonucleotide
  Sense strand starting at position 3722 of SEQ ID NO: 586048
guuuguucuugagcugaaa

SEQ ID NO: 688131 - RNA, 19 nt, Artificial Sequence
  Description of Artificial Sequence: Synthetic oligonucleotide
  Antisense strand to SEQ ID NO: 688130
uuucagcucaagaacaaac

SEQ ID NO: 688132 - RNA, 19 nt, Artificial Sequence
  Description of Artificial Sequence: Synthetic oligonucleotide
  Sense strand starting at position 3863 of SEQ ID NO: 586048
ccaguucccucuguugaau

SEQ ID NO: 688133 - RNA, 19 nt, Artificial Sequence
  Description of Artificial Sequence: Synthetic oligonucleotide
  Antisense strand to SEQ ID NO: 688132
auucaacagagggaacugg

SEQ ID NO: 688134 - RNA, 19 nt, Artificial Sequence
  Description of Artificial Sequence: Synthetic oligonucleotide
  Sense strand starting at position 3866 of SEQ ID NO: 586048
guucccucuguugaaucua

SEQ ID NO: 688135 - RNA, 19 nt, Artificial Sequence
  Description of Artificial Sequence: Synthetic oligonucleotide
  Antisense strand to SEQ ID NO: 688134
uagauucaacagagggaac

SEQ ID NO: 688136 - RNA, 19 nt, Artificial Sequence
  Description of Artificial Sequence: Synthetic oligonucleotide
  Sense strand starting at position 3874 of SEQ ID NO: 586048
uguugaaucuaagagucug

SEQ ID NO: 688137 - RNA, 19 nt, Artificial Sequence
  Description of Artificial Sequence: Synthetic oligonucleotide
  Antisense strand to SEQ ID NO: 688136
cagacucuuagauucaaca

SEQ ID NO: 688138 - RNA, 19 nt, Artificial Sequence
  Description of Artificial Sequence: Synthetic oligonucleotide
  Sense strand starting at position 3880 of SEQ ID NO: 586048
aucuaagagucuguucuaa

SEQ ID NO: 688139 - RNA, 19 nt, Artificial Sequence
  Description of Artificial Sequence: Synthetic oligonucleotide
  Antisense strand to SEQ ID NO: 688138
uuagaacagacucuuagau

SEQ ID NO: 688140 - RNA, 19 nt, Artificial Sequence
  Description of Artificial Sequence: Synthetic oligonucleotide
  Sense strand starting at position 3882 of SEQ ID NO: 586048
cuaagagucuguucuaaac

SEQ ID NO: 688141 - RNA, 19 nt, Artificial Sequence
  Description of Artificial Sequence: Synthetic oligonucleotide
  Antisense strand to SEQ ID NO: 688140
guuuagaacagacucuuag

SEQ ID NO: 688142 - RNA, 19 nt, Artificial Sequence
  Description of Artificial Sequence: Synthetic oligonucleotide
  Sense strand starting at position 3884 of SEQ ID NO: 586048
aagagucuguucuaaacug

SEQ ID NO: 688143 - RNA, 19 nt, Artificial Sequence
  Description of Artificial Sequence: Synthetic oligonucleotide
  Antisense strand to SEQ ID NO: 688142
caguuuagaacagacucuu

SEQ ID NO: 688144 - RNA, 19 nt, Artificial Sequence
  Description of Artificial Sequence: Synthetic oligonucleotide
  Sense strand starting at position 3899 of SEQ ID NO: 586048
acugcucucuuuguauuua

SEQ ID NO: 688145 - RNA, 19 nt, Artificial Sequence
  Description of Artificial Sequence: Synthetic oligonucleotide
  Antisense strand to SEQ ID NO: 688144
uaaauacaaagagagcagu

SEQ ID NO: 688146 - RNA, 19 nt, Artificial Sequence
  Description of Artificial Sequence: Synthetic oligonucleotide
  Sense strand starting at position 3911 of SEQ ID NO: 586048
guauuuaggccuuguagau

SEQ ID NO: 688147 - RNA, 19 nt, Artificial Sequence
  Description of Artificial Sequence: Synthetic oligonucleotide
  Antisense strand to SEQ ID NO: 688146
aucuacaaggccuaaauac

SEQ ID NO: 688148 - RNA, 19 nt, Artificial Sequence
  Description of Artificial Sequence: Synthetic oligonucleotide
  Sense strand starting at position 3974 of SEQ ID NO: 586048
aagccacauuccuaggagu

SEQ ID NO: 688149 - RNA, 19 nt, Artificial Sequence
  Description of Artificial Sequence: Synthetic oligonucleotide
  Antisense strand to SEQ ID NO: 688148
acuccuaggaauguggcuu

SEQ ID NO: 688150 - RNA, 19 nt, Artificial Sequence
  Description of Artificial Sequence: Synthetic oligonucleotide
  Sense strand starting at position 3976 of SEQ ID NO: 586048
gccacauuccuaggaguuu

SEQ ID NO: 688151 - RNA, 19 nt, Artificial Sequence
  Description of Artificial Sequence: Synthetic oligonucleotide
  Antisense strand to SEQ ID NO: 688150
aaacuccuaggaauguggc

SEQ ID NO: 688152 - RNA, 19 nt, Artificial Sequence
  Description of Artificial Sequence: Synthetic oligonucleotide
  Sense strand starting at position 120 of SEQ ID NO: 586049
ggacccauuguaugaugaa

SEQ ID NO: 688153 - RNA, 19 nt, Artificial Sequence
  Description of Artificial Sequence: Synthetic oligonucleotide
  Antisense strand to SEQ ID NO: 688152
uucaucauacaaugggucc

SEQ ID NO: 688154 - RNA, 19 nt, Artificial Sequence
  Description of Artificial Sequence: Synthetic oligonucleotide
  Sense strand starting at position 1314 of SEQ ID NO: 586049
cgaggcgucggaaggauua

SEQ ID NO: 688155 - RNA, 19 nt, Artificial Sequence
  Description of Artificial Sequence: Synthetic oligonucleotide
  Antisense strand to SEQ ID NO: 688154
uaauccuuccgacgccucg

SEQ ID NO: 688156 - RNA, 19 nt, Artificial Sequence
  Description of Artificial Sequence: Synthetic oligonucleotide
  Sense strand starting at position 2376 of SEQ ID NO: 586049
uacauaaaguguuuaggua

SEQ ID NO: 688157 - RNA, 19 nt, Artificial Sequence
  Description of Artificial Sequence: Synthetic oligonucleotide
  Antisense strand to SEQ ID NO: 688156
uaccuaaacacuuuaugua

SEQ ID NO: 688158 - RNA, 19 nt, Artificial Sequence
  Description of Artificial Sequence: Synthetic oligonucleotide
  Sense strand starting at position 2393 of SEQ ID NO: 586049
uagcacaaguccuugagau

SEQ ID NO: 688159 - RNA, 19 nt, Artificial Sequence
  Description of Artificial Sequence: Synthetic oligonucleotide
  Antisense strand to SEQ ID NO: 688158
aucucaaggacuugugcua

SEQ ID NO: 688160 - RNA, 19 nt, Artificial Sequence
  Description of Artificial Sequence: Synthetic oligonucleotide
  Sense strand starting at position 2394 of SEQ ID NO: 586049
agcacaaguccuugagaug

SEQ ID NO: 688161 - RNA, 19 nt, Artificial Sequence
  Description of Artificial Sequence: Synthetic oligonucleotide
  Antisense strand to SEQ ID NO: 688160
caucucaaggacuugugcu

SEQ ID NO: 688162 - RNA, 19 nt, Artificial Sequence
  Description of Artificial Sequence: Synthetic oligonucleotide
  Sense strand starting at position 2600 of SEQ ID NO: 586049
gaaagucaugcugaaguac

SEQ ID NO: 688163 - RNA, 19 nt, Artificial Sequence
  Description of Artificial Sequence: Synthetic oligonucleotide
  Antisense strand to SEQ ID NO: 688162
guacuucagcaugacuuuc

SEQ ID NO: 688164 - RNA, 19 nt, Artificial Sequence
  Description of Artificial Sequence: Synthetic oligonucleotide
  Sense strand starting at position 2678 of SEQ ID NO: 586049
cggcguaagauguuucugu

SEQ ID NO: 688165 - RNA, 19 nt, Artificial Sequence
  Description of Artificial Sequence: Synthetic oligonucleotide
  Antisense strand to SEQ ID NO: 688164
acagaaacaucuuacgccg

SEQ ID NO: 688166 - RNA, 19 nt, Artificial Sequence
  Description of Artificial Sequence: Synthetic oligonucleotide
  Sense strand starting at position 2770 of SEQ ID NO: 586049
cugcaacgcauguuuguua

SEQ ID NO: 688167 - RNA, 19 nt, Artificial Sequence
  Description of Artificial Sequence: Synthetic oligonucleotide
  Antisense strand to SEQ ID NO: 688166
uaacaaacaugcguugcag

SEQ ID NO: 688168 - RNA, 19 nt, Artificial Sequence
  Description of Artificial Sequence: Synthetic oligonucleotide
  Sense strand starting at position 2818 of SEQ ID NO: 586049
uggucuuugagguauggau

SEQ ID NO: 688169 - RNA, 19 nt, Artificial Sequence
  Description of Artificial Sequence: Synthetic oligonucleotide
  Antisense strand to SEQ ID NO: 688168
auccauaccucaaagacca

SEQ ID NO: 688170 - RNA, 19 nt, Artificial Sequence
  Description of Artificial Sequence: Synthetic oligonucleotide
  Sense strand starting at position 2833 of SEQ ID NO: 586049
ggauuccagaguuggcuau

SEQ ID NO: 688171 - RNA, 19 nt, Artificial Sequence
  Description of Artificial Sequence: Synthetic oligonucleotide
  Antisense strand to SEQ ID NO: 688170
auagccaacucuggaaucc

SEQ ID NO: 688172 - RNA, 19 nt, Artificial Sequence
  Description of Artificial Sequence: Synthetic oligonucleotide
  Sense strand starting at position 2906 of SEQ ID NO: 586049
gaaacauggcagggaaguu

SEQ ID NO: 688173 - RNA, 19 nt, Artificial Sequence
  Description of Artificial Sequence: Synthetic oligonucleotide
  Antisense strand to SEQ ID NO: 688172
aacuucccugccauguuuc

SEQ ID NO: 688174 - RNA, 19 nt, Artificial Sequence
  Description of Artificial Sequence: Synthetic oligonucleotide
  Sense strand starting at position 3011 of SEQ ID NO: 586049
aauacaguccuuugaggac

SEQ ID NO: 688175 - RNA, 19 nt, Artificial Sequence
  Description of Artificial Sequence: Synthetic oligonucleotide
  Antisense strand to SEQ ID NO: 688174
guccucaaaggacuguauu

SEQ ID NO: 688176 - RNA, 19 nt, Artificial Sequence
  Description of Artificial Sequence: Synthetic oligonucleotide
  Sense strand starting at position 3079 of SEQ ID NO: 586049
aggauauggcuuuauuccu

SEQ ID NO: 688177 - RNA, 19 nt, Artificial Sequence
  Description of Artificial Sequence: Synthetic oligonucleotide
  Antisense strand to SEQ ID NO: 688176
aggaauaaagccauauccu

SEQ ID NO: 688178 - RNA, 19 nt, Artificial Sequence
  Description of Artificial Sequence: Synthetic oligonucleotide
  Sense strand starting at position 3084 of SEQ ID NO: 586049
auggcuuuauuccuaagga

SEQ ID NO: 688179 - RNA, 19 nt, Artificial Sequence
  Description of Artificial Sequence: Synthetic oligonucleotide
  Antisense strand to SEQ ID NO: 688178
uccuuaggaauaaagccau

SEQ ID NO: 688180 - RNA, 19 nt, Artificial Sequence
  Description of Artificial Sequence: Synthetic oligonucleotide
  Sense strand starting at position 3153 of SEQ ID NO: 586049
gguugugaugucuaaccca

SEQ ID NO: 688181 - RNA, 19 nt, Artificial Sequence
  Description of Artificial Sequence: Synthetic oligonucleotide
  Antisense strand to SEQ ID NO: 688180
uggguuagacaucacaacc

SEQ ID NO: 688182 - RNA, 19 nt, Artificial Sequence
  Description of Artificial Sequence: Synthetic oligonucleotide
  Sense strand starting at position 3208 of SEQ ID NO: 586049
uggcacauaguuuacaaau

SEQ ID NO: 688183 - RNA, 19 nt, Artificial Sequence
  Description of Artificial Sequence: Synthetic oligonucleotide
  Antisense strand to SEQ ID NO: 688182
auuuguaaacuaugugcca

SEQ ID NO: 688184 - RNA, 19 nt, Artificial Sequence
  Description of Artificial Sequence: Synthetic oligonucleotide
  Sense strand starting at position 3266 of SEQ ID NO: 586049
auagaagugucccuccuaa

SEQ ID NO: 688185 - RNA, 19 nt, Artificial Sequence
  Description of Artificial Sequence: Synthetic oligonucleotide
  Antisense strand to SEQ ID NO: 688184
uuaggagggacacuucuau

SEQ ID NO: 688186 - RNA, 19 nt, Artificial Sequence
  Description of Artificial Sequence: Synthetic oligonucleotide
  Sense strand starting at position 3309 of SEQ ID NO: 586049
caguuauaccugcagguac

SEQ ID NO: 688187 - RNA, 19 nt, Artificial Sequence
  Description of Artificial Sequence: Synthetic oligonucleotide
  Antisense strand to SEQ ID NO: 688186
guaccugcagguauaacug

SEQ ID NO: 688188 - RNA, 19 nt, Artificial Sequence
  Description of Artificial Sequence: Synthetic oligonucleotide
  Sense strand starting at position 3320 of SEQ ID NO: 586049
gcagguacugaugacuaau

SEQ ID NO: 688189 - RNA, 19 nt, Artificial Sequence
  Description of Artificial Sequence: Synthetic oligonucleotide
  Antisense strand to SEQ ID NO: 688188
auuagucaucaguaccugc

SEQ ID NO: 688190 - RNA, 19 nt, Artificial Sequence
  Description of Artificial Sequence: Synthetic oligonucleotide
  Sense strand starting at position 3378 of SEQ ID NO: 586049
guggcucucaaauggauaa

SEQ ID NO: 688191 - RNA, 19 nt, Artificial Sequence
  Description of Artificial Sequence: Synthetic oligonucleotide
  Antisense strand to SEQ ID NO: 688190
uuauccauuugagagccac

SEQ ID NO: 688192 - RNA, 19 nt, Artificial Sequence
  Description of Artificial Sequence: Synthetic oligonucleotide
  Sense strand starting at position 3443 of SEQ ID NO: 586049
cuagauaaaugacuuuagu

SEQ ID NO: 688193 - RNA, 19 nt, Artificial Sequence
  Description of Artificial Sequence: Synthetic oligonucleotide
  Antisense strand to SEQ ID NO: 688192
acuaaagucauuuaucuag

SEQ ID NO: 688194 - RNA, 19 nt, Artificial Sequence
  Description of Artificial Sequence: Synthetic oligonucleotide
  Sense strand starting at position 3451 of SEQ ID NO: 586049
augacuuuaguggguaaau

SEQ ID NO: 688195 - RNA, 19 nt, Artificial Sequence
  Description of Artificial Sequence: Synthetic oligonucleotide
  Antisense strand to SEQ ID NO: 688194
auuuacccacuaaagucau

SEQ ID NO: 688196 - RNA, 19 nt, Artificial Sequence
  Description of Artificial Sequence: Synthetic oligonucleotide
  Sense strand starting at position 3452 of SEQ ID NO: 586049
ugacuuuaguggguaaaug

SEQ ID NO: 688197 - RNA, 19 nt, Artificial Sequence
  Description of Artificial Sequence: Synthetic oligonucleotide
  Antisense strand to SEQ ID NO: 688196
cauuuacccacuaaaguca

SEQ ID NO: 688198 - RNA, 19 nt, Artificial Sequence
  Description of Artificial Sequence: Synthetic oligonucleotide
  Sense strand starting at position 3453 of SEQ ID NO: 586049
gacuuuaguggguaaaugu

SEQ ID NO: 688199 - RNA, 19 nt, Artificial Sequence
  Description of Artificial Sequence: Synthetic oligonucleotide
  Antisense strand to SEQ ID NO: 688198
acauuuacccacuaaaguc

SEQ ID NO: 688200 - RNA, 19 nt, Artificial Sequence
  Description of Artificial Sequence: Synthetic oligonucleotide
  Sense strand starting at position 3489 of SEQ ID NO: 586049
uucugacccugaucuaagu

SEQ ID NO: 688201 - RNA, 19 nt, Artificial Sequence
  Description of Artificial Sequence: Synthetic oligonucleotide
  Antisense strand to SEQ ID NO: 688200
acuuagaucagggucagaa

SEQ ID NO: 688202 - RNA, 19 nt, Artificial Sequence
  Description of Artificial Sequence: Synthetic oligonucleotide
  Sense strand starting at position 3569 of SEQ ID NO: 586049
uuggauuggcuugaguauu

SEQ ID NO: 688203 - RNA, 19 nt, Artificial Sequence
  Description of Artificial Sequence: Synthetic oligonucleotide
  Antisense strand to SEQ ID NO: 688202
aauacucaagccaauccaa

SEQ ID NO: 688204 - RNA, 19 nt, Artificial Sequence
  Description of Artificial Sequence: Synthetic oligonucleotide
  Sense strand starting at position 3594 of SEQ ID NO: 586049
ugucucaucuuacuaggga

SEQ ID NO: 688205 - RNA, 19 nt, Artificial Sequence
  Description of Artificial Sequence: Synthetic oligonucleotide
  Antisense strand to SEQ ID NO: 688204
ucccuaguaagaugagaca

SEQ ID NO: 688206 - RNA, 19 nt, Artificial Sequence
  Description of Artificial Sequence: Synthetic oligonucleotide
  Sense strand starting at position 3649 of SEQ ID NO: 586049
auuagagaucuguagguuc

SEQ ID NO: 688207 - RNA, 19 nt, Artificial Sequence
  Description of Artificial Sequence: Synthetic oligonucleotide
  Antisense strand to SEQ ID NO: 688206
gaaccuacagaucucuaau

SEQ ID NO: 688208 - RNA, 19 nt, Artificial Sequence
  Description of Artificial Sequence: Synthetic oligonucleotide
  Sense strand starting at position 3651 of SEQ ID NO: 586049
uagagaucuguagguucuu

SEQ ID NO: 688209 - RNA, 19 nt, Artificial Sequence
  Description of Artificial Sequence: Synthetic oligonucleotide
  Antisense strand to SEQ ID NO: 688208
aagaaccuacagaucucua

SEQ ID NO: 688210 - RNA, 19 nt, Artificial Sequence
  Description of Artificial Sequence: Synthetic oligonucleotide
  Sense strand starting at position 3652 of SEQ ID NO: 586049
agagaucuguagguucuua

SEQ ID NO: 688211 - RNA, 19 nt, Artificial Sequence
  Description of Artificial Sequence: Synthetic oligonucleotide
  Antisense strand to SEQ ID NO: 688210
uaagaaccuacagaucucu

SEQ ID NO: 688212 - RNA, 19 nt, Artificial Sequence
  Description of Artificial Sequence: Synthetic oligonucleotide
  Sense strand starting at position 3723 of SEQ ID NO: 586049
ugcucaugugaagagugaa

SEQ ID NO: 688213 - RNA, 19 nt, Artificial Sequence
  Description of Artificial Sequence: Synthetic oligonucleotide
  Antisense strand to SEQ ID NO: 688212
uucacucuucacaugagca

SEQ ID NO: 688214 - RNA, 19 nt, Artificial Sequence
  Description of Artificial Sequence: Synthetic oligonucleotide
  Sense strand starting at position 3726 of SEQ ID NO: 586049
ucaugugaagagugaaacu

SEQ ID NO: 688215 - RNA, 19 nt, Artificial Sequence
  Description of Artificial Sequence: Synthetic oligonucleotide
  Antisense strand to SEQ ID NO: 688214
aguuucacucuucacauga

SEQ ID NO: 688216 - RNA, 19 nt, Artificial Sequence
  Description of Artificial Sequence: Synthetic oligonucleotide
  Sense strand starting at position 3800 of SEQ ID NO: 586049
ggcagaaauuugccugugu

SEQ ID NO: 688217 - RNA, 19 nt, Artificial Sequence
  Description of Artificial Sequence: Synthetic oligonucleotide
  Antisense strand to SEQ ID NO: 688216
acacaggcaaauuucugcc

SEQ ID NO: 688218 - RNA, 19 nt, Artificial Sequence
  Description of Artificial Sequence: Synthetic oligonucleotide
  Sense strand starting at position 3801 of SEQ ID NO: 586049
gcagaaauuugccugugug

SEQ ID NO: 688219 - RNA, 19 nt, Artificial Sequence
  Description of Artificial Sequence: Synthetic oligonucleotide
  Antisense strand to SEQ ID NO: 688218
cacacaggcaaauuucugc

SEQ ID NO: 688220 - RNA, 19 nt, Artificial Sequence
  Description of Artificial Sequence: Synthetic oligonucleotide
  Sense strand starting at position 3802 of SEQ ID NO: 586049
cagaaauuugccugugugu

SEQ ID NO: 688221 - RNA, 19 nt, Artificial Sequence
  Description of Artificial Sequence: Synthetic oligonucleotide
  Antisense strand to SEQ ID NO: 688220
acacacaggcaaauuucug

SEQ ID NO: 688222 - RNA, 19 nt, Artificial Sequence
  Description of Artificial Sequence: Synthetic oligonucleotide
  Sense strand starting at position 3822 of SEQ ID NO: 586049
uagaguaauuggucuugag

SEQ ID NO: 688223 - RNA, 19 nt, Artificial Sequence
  Description of Artificial Sequence: Synthetic oligonucleotide
  Antisense strand to SEQ ID NO: 688222
cucaagaccaauuacucua

SEQ ID NO: 688224 - RNA, 19 nt, Artificial Sequence
  Description of Artificial Sequence: Synthetic oligonucleotide
  Sense strand starting at position 3826 of SEQ ID NO: 586049
guaauuggucuugagucaa

SEQ ID NO: 688225 - RNA, 19 nt, Artificial Sequence
  Description of Artificial Sequence: Synthetic oligonucleotide
  Antisense strand to SEQ ID NO: 688224
uugacucaagaccaauuac

SEQ ID NO: 688226 - RNA, 19 nt, Artificial Sequence
  Description of Artificial Sequence: Synthetic oligonucleotide
  Sense strand starting at position 3830 of SEQ ID NO: 586049
uuggucuugagucaaagua

SEQ ID NO: 688227 - RNA, 19 nt, Artificial Sequence
  Description of Artificial Sequence: Synthetic oligonucleotide
  Antisense strand to SEQ ID NO: 688226
uacuuugacucaagaccaa

SEQ ID NO: 688228 - RNA, 19 nt, Artificial Sequence
  Description of Artificial Sequence: Synthetic oligonucleotide
  Sense strand starting at position 3884 of SEQ ID NO: 586049
agcguuacacucuauauag

SEQ ID NO: 688229 - RNA, 19 nt, Artificial Sequence
  Description of Artificial Sequence: Synthetic oligonucleotide
  Antisense strand to SEQ ID NO: 688228
cuauauagaguguaacgcu

SEQ ID NO: 688230 - RNA, 19 nt, Artificial Sequence
  Description of Artificial Sequence: Synthetic oligonucleotide
  Sense strand starting at position 3894 of SEQ ID NO: 586049
ucuauauaggcuuguagaa

SEQ ID NO: 688231 - RNA, 19 nt, Artificial Sequence
  Description of Artificial Sequence: Synthetic oligonucleotide
  Antisense strand to SEQ ID NO: 688230
uucuacaagccuauauaga

SEQ ID NO: 688232 - RNA, 19 nt, Artificial Sequence
  Description of Artificial Sequence: Synthetic oligonucleotide
  Sense strand starting at position 312 of SEQ ID NO: 586050
ggaggaagaugagaaauca

SEQ ID NO: 688233 - RNA, 19 nt, Artificial Sequence
  Description of Artificial Sequence: Synthetic oligonucleotide
  Antisense strand to SEQ ID NO: 688232
ugauuucucaucuuccucc

SEQ ID NO: 688234 - RNA, 19 nt, Artificial Sequence
  Description of Artificial Sequence: Synthetic oligonucleotide
  Sense strand starting at position 523 of SEQ ID NO: 586050
cggccuucucggaguaguu

SEQ ID NO: 688235 - RNA, 19 nt, Artificial Sequence
  Description of Artificial Sequence: Synthetic oligonucleotide
  Antisense strand to SEQ ID NO: 688234
aacuacuccgagaaggccg

SEQ ID NO: 688236 - RNA, 19 nt, Artificial Sequence
  Description of Artificial Sequence: Synthetic oligonucleotide
  Sense strand starting at position 525 of SEQ ID NO: 586050
gccuucucggaguaguuca

SEQ ID NO: 688237 - RNA, 19 nt, Artificial Sequence
  Description of Artificial Sequence: Synthetic oligonucleotide
  Antisense strand to SEQ ID NO: 688236
ugaacuacuccgagaaggc

SEQ ID NO: 688238 - RNA, 19 nt, Artificial Sequence
  Description of Artificial Sequence: Synthetic oligonucleotide
  Sense strand starting at position 533 of SEQ ID NO: 586050
ggaguaguucagugcacuu

SEQ ID NO: 688239 - RNA, 19 nt, Artificial Sequence
  Description of Artificial Sequence: Synthetic oligonucleotide
  Antisense strand to SEQ ID NO: 688238
aagugcacugaacuacucc

SEQ ID NO: 688240 - RNA, 19 nt, Artificial Sequence
  Description of Artificial Sequence: Synthetic oligonucleotide
  Sense strand starting at position 587 of SEQ ID NO: 586050
cuguaaggaaguugacaau

SEQ ID NO: 688241 - RNA, 19 nt, Artificial Sequence
  Description of Artificial Sequence: Synthetic oligonucleotide
  Antisense strand to SEQ ID NO: 688240
auugucaacuuccuuacag

SEQ ID NO: 688242 - RNA, 19 nt, Artificial Sequence
  Description of Artificial Sequence: Synthetic oligonucleotide
  Sense strand starting at position 698 of SEQ ID NO: 586050
aggucaugccuuugaguag

SEQ ID NO: 688243 - RNA, 19 nt, Artificial Sequence
  Description of Artificial Sequence: Synthetic oligonucleotide
  Antisense strand to SEQ ID NO: 688242
cuacucaaaggcaugaccu

SEQ ID NO: 688244 - RNA, 19 nt, Artificial Sequence
  Description of Artificial Sequence: Synthetic oligonucleotide
  Sense strand starting at position 709 of SEQ ID NO: 586050
uugaguaggaccugaucau

SEQ ID NO: 688245 - RNA, 19 nt, Artificial Sequence
  Description of Artificial Sequence: Synthetic oligonucleotide
  Antisense strand to SEQ ID NO: 688244
augaucagguccuacucaa

SEQ ID NO: 688246 - RNA, 19 nt, Artificial Sequence
  Description of Artificial Sequence: Synthetic oligonucleotide
  Sense strand starting at position 779 of SEQ ID NO: 586050
ggcccugcacucugauaga

SEQ ID NO: 688247 - RNA, 19 nt, Artificial Sequence
  Description of Artificial Sequence: Synthetic oligonucleotide
  Antisense strand to SEQ ID NO: 688246
ucuaucagagugcagggcc

SEQ ID NO: 688248 - RNA, 19 nt, Artificial Sequence
  Description of Artificial Sequence: Synthetic oligonucleotide
  Sense strand starting at position 1121 of SEQ ID NO: 586050
gcucauuaucuguguaacu

SEQ ID NO: 688249 - RNA, 19 nt, Artificial Sequence
  Description of Artificial Sequence: Synthetic oligonucleotide
  Antisense strand to SEQ ID NO: 688248
aguuacacagauaaugagc

SEQ ID NO: 688250 - RNA, 19 nt, Artificial Sequence
  Description of Artificial Sequence: Synthetic oligonucleotide
  Sense strand starting at position 1122 of SEQ ID NO: 586050
cucauuaucuguguaacuc

SEQ ID NO: 688251 - RNA, 19 nt, Artificial Sequence
  Description of Artificial Sequence: Synthetic oligonucleotide
  Antisense strand to SEQ ID NO: 688250
gaguuacacagauaaugag

SEQ ID NO: 688252 - RNA, 19 nt, Artificial Sequence
  Description of Artificial Sequence: Synthetic oligonucleotide
  Sense strand starting at position 1144 of SEQ ID NO: 586050
acaacagugagguagguau

SEQ ID NO: 688253 - RNA, 19 nt, Artificial Sequence
  Description of Artificial Sequence: Synthetic oligonucleotide
  Antisense strand to SEQ ID NO: 688252
auaccuaccucacuguugu

SEQ ID NO: 688254 - RNA, 19 nt, Artificial Sequence
  Description of Artificial Sequence: Synthetic oligonucleotide
  Sense strand starting at position 1210 of SEQ ID NO: 586050
uuaagagauuauccaaggu

SEQ ID NO: 688255 - RNA, 19 nt, Artificial Sequence
  Description of Artificial Sequence: Synthetic oligonucleotide
  Antisense strand to SEQ ID NO: 688254
accuuggauaaucucuuaa

SEQ ID NO: 688256 - RNA, 19 nt, Artificial Sequence
  Description of Artificial Sequence: Synthetic oligonucleotide
  Sense strand starting at position 1214 of SEQ ID NO: 586050
gagauuauccaaggucaca

SEQ ID NO: 688257 - RNA, 19 nt, Artificial Sequence
  Description of Artificial Sequence: Synthetic oligonucleotide
  Antisense strand to SEQ ID NO: 688256
ugugaccuuggauaaucuc

SEQ ID NO: 688258 - RNA, 19 nt, Artificial Sequence
  Description of Artificial Sequence: Synthetic oligonucleotide
  Sense strand starting at position 1297 of SEQ ID NO: 586050
agagaaauaaggugcucuu

SEQ ID NO: 688259 - RNA, 19 nt, Artificial Sequence
  Description of Artificial Sequence: Synthetic oligonucleotide
  Antisense strand to SEQ ID NO: 688258
aagagcaccuuauuucucu

SEQ ID NO: 688260 - RNA, 19 nt, Artificial Sequence
  Description of Artificial Sequence: Synthetic oligonucleotide
  Sense strand starting at position 1325 of SEQ ID NO: 586050
aguggcuuccuucggaauu

SEQ ID NO: 688261 - RNA, 19 nt, Artificial Sequence
  Description of Artificial Sequence: Synthetic oligonucleotide
  Antisense strand to SEQ ID NO: 688260
aauuccgaaggaagccacu

SEQ ID NO: 688262 - RNA, 19 nt, Artificial Sequence
  Description of Artificial Sequence: Synthetic oligonucleotide
  Sense strand starting at position 1878 of SEQ ID NO: 586050
gggcaauacucggccgacu

SEQ ID NO: 688263 - RNA, 19 nt, Artificial Sequence
  Description of Artificial Sequence: Synthetic oligonucleotide
  Antisense strand to SEQ ID NO: 688262
agucggccgaguauugccc

SEQ ID NO: 688264 - RNA, 19 nt, Artificial Sequence
  Description of Artificial Sequence: Synthetic oligonucleotide
  Sense strand starting at position 1977 of SEQ ID NO: 586050
uugguucggccgaagcauu

SEQ ID NO: 688265 - RNA, 19 nt, Artificial Sequence
  Description of Artificial Sequence: Synthetic oligonucleotide
  Antisense strand to SEQ ID NO: 688264
aaugcuucggccgaaccaa

SEQ ID NO: 688266 - RNA, 19 nt, Artificial Sequence
  Description of Artificial Sequence: Synthetic oligonucleotide
  Sense strand starting at position 2033 of SEQ ID NO: 586050
uggcgauggguccagguau

SEQ ID NO: 688267 - RNA, 19 nt, Artificial Sequence
  Description of Artificial Sequence: Synthetic oligonucleotide
  Antisense strand to SEQ ID NO: 688266
auaccuggacccaucgcca

SEQ ID NO: 688268 - RNA, 19 nt, Artificial Sequence
  Description of Artificial Sequence: Synthetic oligonucleotide
  Sense strand starting at position 2160 of SEQ ID NO: 586050
gggccuggauuggcuaaau

SEQ ID NO: 688269 - RNA, 19 nt, Artificial Sequence
  Description of Artificial Sequence: Synthetic oligonucleotide
  Antisense strand to SEQ ID NO: 688268
auuuagccaauccaggccc

SEQ ID NO: 688270 - RNA, 19 nt, Artificial Sequence
  Description of Artificial Sequence: Synthetic oligonucleotide
  Sense strand starting at position 2392 of SEQ ID NO: 586050
gaggcauuaucgcuugaga

SEQ ID NO: 688271 - RNA, 19 nt, Artificial Sequence
  Description of Artificial Sequence: Synthetic oligonucleotide
  Antisense strand to SEQ ID NO: 688270
ucucaagcgauaaugccuc

SEQ ID NO: 688272 - RNA, 19 nt, Artificial Sequence
  Description of Artificial Sequence: Synthetic oligonucleotide
  Sense strand starting at position 2394 of SEQ ID NO: 586050
ggcauuaucgcuugagacu

SEQ ID NO: 688273 - RNA, 19 nt, Artificial Sequence
  Description of Artificial Sequence: Synthetic oligonucleotide
  Antisense strand to SEQ ID NO: 688272
agucucaagcgauaaugcc

SEQ ID NO: 688274 - RNA, 19 nt, Artificial Sequence
  Description of Artificial Sequence: Synthetic oligonucleotide
  Sense strand starting at position 2395 of SEQ ID NO: 586050
gcauuaucgcuugagacug

SEQ ID NO: 688275 - RNA, 19 nt, Artificial Sequence
  Description of Artificial Sequence: Synthetic oligonucleotide
  Antisense strand to SEQ ID NO: 688274
cagucucaagcgauaaugc

SEQ ID NO: 688276 - RNA, 19 nt, Artificial Sequence
  Description of Artificial Sequence: Synthetic oligonucleotide
  Sense strand starting at position 2852 of SEQ ID NO: 586050
cacacuugucugcagggaa

SEQ ID NO: 688277 - RNA, 19 nt, Artificial Sequence
  Description of Artificial Sequence: Synthetic oligonucleotide
  Antisense strand to SEQ ID NO: 688276
uucccugcagacaagugug

SEQ ID NO: 688278 - RNA, 19 nt, Artificial Sequence
  Description of Artificial Sequence: Synthetic oligonucleotide
  Sense strand starting at position 2885 of SEQ ID NO: 586050
gucaaagagaucuggagua

SEQ ID NO: 688279 - RNA, 19 nt, Artificial Sequence
  Description of Artificial Sequence: Synthetic oligonucleotide
  Antisense strand to SEQ ID NO: 688278
uacuccagaucucuuugac

SEQ ID NO: 688280 - RNA, 19 nt, Artificial Sequence
  Description of Artificial Sequence: Synthetic oligonucleotide
  Sense strand starting at position 2963 of SEQ ID NO: 586050
ggauguggcacguggaaua

SEQ ID NO: 688281 - RNA, 19 nt, Artificial Sequence
  Description of Artificial Sequence: Synthetic oligonucleotide
  Antisense strand to SEQ ID NO: 688280
uauuccacgugccacaucc

SEQ ID NO: 688282 - RNA, 19 nt, Artificial Sequence
  Description of Artificial Sequence: Synthetic oligonucleotide
  Sense strand starting at position 2974 of SEQ ID NO: 586050
guggaauauucagacagag

SEQ ID NO: 688283 - RNA, 19 nt, Artificial Sequence
  Description of Artificial Sequence: Synthetic oligonucleotide
  Antisense strand to SEQ ID NO: 688282
cucugucugaauauuccac

SEQ ID NO: 688284 - RNA, 19 nt, Artificial Sequence
  Description of Artificial Sequence: Synthetic oligonucleotide
  Sense strand starting at position 3015 of SEQ ID NO: 586050
agaacaaauugucagagga

SEQ ID NO: 688285 - RNA, 19 nt, Artificial Sequence
  Description of Artificial Sequence: Synthetic oligonucleotide
  Antisense strand to SEQ ID NO: 688284
uccucugacaauuuguucu

SEQ ID NO: 688286 - RNA, 19 nt, Artificial Sequence
  Description of Artificial Sequence: Synthetic oligonucleotide
  Sense strand starting at position 3068 of SEQ ID NO: 586050
ggccgaggaggcugugaau

SEQ ID NO: 688287 - RNA, 19 nt, Artificial Sequence
  Description of Artificial Sequence: Synthetic oligonucleotide
  Antisense strand to SEQ ID NO: 688286
auucacagccuccucggcc

SEQ ID NO: 688288 - RNA, 19 nt, Artificial Sequence
  Description of Artificial Sequence: Synthetic oligonucleotide
  Sense strand starting at position 3368 of SEQ ID NO: 586050
caguauugcucuccgaaag

SEQ ID NO: 688289 - RNA, 19 nt, Artificial Sequence
  Description of Artificial Sequence: Synthetic oligonucleotide
  Antisense strand to SEQ ID NO: 688288
cuuucggagagcaauacug

SEQ ID NO: 688290 - RNA, 19 nt, Artificial Sequence
  Description of Artificial Sequence: Synthetic oligonucleotide
  Sense strand starting at position 3369 of SEQ ID NO: 586050
aguauugcucuccgaaagu

SEQ ID NO: 688291 - RNA, 19 nt, Artificial Sequence
  Description of Artificial Sequence: Synthetic oligonucleotide
  Antisense strand to SEQ ID NO: 688290
acuuucggagagcaauacu

SEQ ID NO: 688292 - RNA, 19 nt, Artificial Sequence
  Description of Artificial Sequence: Synthetic oligonucleotide
  Sense strand starting at position 3469 of SEQ ID NO: 586050
ucuucuccuuccgagauuu

SEQ ID NO: 688293 - RNA, 19 nt, Artificial Sequence
  Description of Artificial Sequence: Synthetic oligonucleotide
  Antisense strand to SEQ ID NO: 688292
aaaucucggaaggagaaga

SEQ ID NO: 688294 - RNA, 19 nt, Artificial Sequence
  Description of Artificial Sequence: Synthetic oligonucleotide
  Sense strand starting at position 3523 of SEQ ID NO: 586050
gagagacgccuccauugaa

SEQ ID NO: 688295 - RNA, 19 nt, Artificial Sequence
  Description of Artificial Sequence: Synthetic oligonucleotide
  Antisense strand to SEQ ID NO: 688294
uucaauggaggcgucucuc

SEQ ID NO: 688296 - RNA, 19 nt, Artificial Sequence
  Description of Artificial Sequence: Synthetic oligonucleotide
  Sense strand starting at position 3571 of SEQ ID NO: 586050
ucucuaagacaguggugaa

SEQ ID NO: 688297 - RNA, 19 nt, Artificial Sequence
  Description of Artificial Sequence: Synthetic oligonucleotide
  Antisense strand to SEQ ID NO: 688296
uucaccacugucuuagaga

SEQ ID NO: 688298 - RNA, 19 nt, Artificial Sequence
  Description of Artificial Sequence: Synthetic oligonucleotide
  Sense strand starting at position 3597 of SEQ ID NO: 586050
ucugauugcuuccuggaag

SEQ ID NO: 688299 - RNA, 19 nt, Artificial Sequence
  Description of Artificial Sequence: Synthetic oligonucleotide
  Antisense strand to SEQ ID NO: 688298
cuuccaggaagcaaucaga

SEQ ID NO: 688300 - RNA, 19 nt, Artificial Sequence
  Description of Artificial Sequence: Synthetic oligonucleotide
  Sense strand starting at position 3615 of SEQ ID NO: 586050
gaggaaauguccgucucca

SEQ ID NO: 688301 - RNA, 19 nt, Artificial Sequence
  Description of Artificial Sequence: Synthetic oligonucleotide
  Antisense strand to SEQ ID NO: 688300
uggagacggacauuuccuc

SEQ ID NO: 688302 - RNA, 19 nt, Artificial Sequence
  Description of Artificial Sequence: Synthetic oligonucleotide
  Sense strand starting at position 3619 of SEQ ID NO: 586050
aaauguccgucuccacaga

SEQ ID NO: 688303 - RNA, 19 nt, Artificial Sequence
  Description of Artificial Sequence: Synthetic oligonucleotide
  Antisense strand to SEQ ID NO: 688302
ucuguggagacggacauuu

SEQ ID NO: 688304 - RNA, 19 nt, Artificial Sequence
  Description of Artificial Sequence: Synthetic oligonucleotide
  Sense strand starting at position 3723 of SEQ ID NO: 586050
ggcuguucuccauugcuuu

SEQ ID NO: 688305 - RNA, 19 nt, Artificial Sequence
  Description of Artificial Sequence: Synthetic oligonucleotide
  Antisense strand to SEQ ID NO: 688304
aaagcaauggagaacagcc

SEQ ID NO: 688306 - RNA, 19 nt, Artificial Sequence
  Description of Artificial Sequence: Synthetic oligonucleotide
  Sense strand starting at position 3770 of SEQ ID NO: 586050
uucuucugacaguaacgau

SEQ ID NO: 688307 - RNA, 19 nt, Artificial Sequence
  Description of Artificial Sequence: Synthetic oligonucleotide
  Antisense strand to SEQ ID NO: 688306
aucguuacugucagaagaa

SEQ ID NO: 688308 - RNA, 19 nt, Artificial Sequence
  Description of Artificial Sequence: Synthetic oligonucleotide
  Sense strand starting at position 3777 of SEQ ID NO: 586050
gacaguaacgauggugaca

SEQ ID NO: 688309 - RNA, 19 nt, Artificial Sequence
  Description of Artificial Sequence: Synthetic oligonucleotide
  Antisense strand to SEQ ID NO: 688308
ugucaccaucguuacuguc

SEQ ID NO: 688310 - RNA, 19 nt, Artificial Sequence
  Description of Artificial Sequence: Synthetic oligonucleotide
  Sense strand starting at position 3824 of SEQ ID NO: 586050
ugaagaucugcugaucugu

SEQ ID NO: 688311 - RNA, 19 nt, Artificial Sequence
  Description of Artificial Sequence: Synthetic oligonucleotide
  Antisense strand to SEQ ID NO: 688310
acagaucagcagaucuuca

SEQ ID NO: 688312 - RNA, 19 nt, Artificial Sequence
  Description of Artificial Sequence: Synthetic oligonucleotide
  Sense strand starting at position 26 of SEQ ID NO: 586051
ggccaaagucauuggagga

SEQ ID NO: 688313 - RNA, 19 nt, Artificial Sequence
  Description of Artificial Sequence: Synthetic oligonucleotide
  Antisense strand to SEQ ID NO: 688312
uccuccaaugacuuuggcc

SEQ ID NO: 688314 - RNA, 19 nt, Artificial Sequence
  Description of Artificial Sequence: Synthetic oligonucleotide
  Sense strand starting at position 27 of SEQ ID NO: 586051
gccaaagucauuggaggac

SEQ ID NO: 688315 - RNA, 19 nt, Artificial Sequence
  Description of Artificial Sequence: Synthetic oligonucleotide
  Antisense strand to SEQ ID NO: 688314
guccuccaaugacuuuggc

SEQ ID NO: 688316 - RNA, 19 nt, Artificial Sequence
  Description of Artificial Sequence: Synthetic oligonucleotide
  Sense strand starting at position 102 of SEQ ID NO: 586051
aucacuuaugcugagggua

SEQ ID NO: 688317 - RNA, 19 nt, Artificial Sequence
  Description of Artificial Sequence: Synthetic oligonucleotide
  Antisense strand to SEQ ID NO: 688316
uacccucagcauaagugau

SEQ ID NO: 688318 - RNA, 19 nt, Artificial Sequence
  Description of Artificial Sequence: Synthetic oligonucleotide
  Sense strand starting at position 519 of SEQ ID NO: 586051
ggaggaagaugagaaauca

SEQ ID NO: 688319 - RNA, 19 nt, Artificial Sequence
  Description of Artificial Sequence: Synthetic oligonucleotide
  Antisense strand to SEQ ID NO: 688318
ugauuucucaucuuccucc

SEQ ID NO: 688320 - RNA, 19 nt, Artificial Sequence
  Description of Artificial Sequence: Synthetic oligonucleotide
  Sense strand starting at position 730 of SEQ ID NO: 586051
cggccuucucggaguaguu

SEQ ID NO: 688321 - RNA, 19 nt, Artificial Sequence
  Description of Artificial Sequence: Synthetic oligonucleotide
  Antisense strand to SEQ ID NO: 688320
aacuacuccgagaaggccg

SEQ ID NO: 688322 - RNA, 19 nt, Artificial Sequence
  Description of Artificial Sequence: Synthetic oligonucleotide
  Sense strand starting at position 732 of SEQ ID NO: 586051
gccuucucggaguaguuca

SEQ ID NO: 688323 - RNA, 19 nt, Artificial Sequence
  Description of Artificial Sequence: Synthetic oligonucleotide
  Antisense strand to SEQ ID NO: 688322
ugaacuacuccgagaaggc

SEQ ID NO: 688324 - RNA, 19 nt, Artificial Sequence
  Description of Artificial Sequence: Synthetic oligonucleotide
  Sense strand starting at position 740 of SEQ ID NO: 586051
ggaguaguucagugcacuu

SEQ ID NO: 688325 - RNA, 19 nt, Artificial Sequence
  Description of Artificial Sequence: Synthetic oligonucleotide
  Antisense strand to SEQ ID NO: 688324
aagugcacugaacuacucc

SEQ ID NO: 688326 - RNA, 19 nt, Artificial Sequence
  Description of Artificial Sequence: Synthetic oligonucleotide
  Sense strand starting at position 794 of SEQ ID NO: 586051
cuguaaggaaguugacaau

SEQ ID NO: 688327 - RNA, 19 nt, Artificial Sequence
  Description of Artificial Sequence: Synthetic oligonucleotide
  Antisense strand to SEQ ID NO: 688326
auugucaacuuccuuacag

SEQ ID NO: 688328 - RNA, 19 nt, Artificial Sequence
  Description of Artificial Sequence: Synthetic oligonucleotide
  Sense strand starting at position 905 of SEQ ID NO: 586051
aggucaugccuuugaguag

SEQ ID NO: 688329 - RNA, 19 nt, Artificial Sequence
  Description of Artificial Sequence: Synthetic oligonucleotide
  Antisense strand to SEQ ID NO: 688328
cuacucaaaggcaugaccu

SEQ ID NO: 688330 - RNA, 19 nt, Artificial Sequence
  Description of Artificial Sequence: Synthetic oligonucleotide
  Sense strand starting at position 916 of SEQ ID NO: 586051
uugaguaggaccugaucau

SEQ ID NO: 688331 - RNA, 19 nt, Artificial Sequence
  Description of Artificial Sequence: Synthetic oligonucleotide
  Antisense strand to SEQ ID NO: 688330
augaucagguccuacucaa

SEQ ID NO: 688332 - RNA, 19 nt, Artificial Sequence
  Description of Artificial Sequence: Synthetic oligonucleotide
  Sense strand starting at position 986 of SEQ ID NO: 586051
ggcccugcacucugauaga

SEQ ID NO: 688333 - RNA, 19 nt, Artificial Sequence
  Description of Artificial Sequence: Synthetic oligonucleotide
  Antisense strand to SEQ ID NO: 688332
ucuaucagagugcagggcc

SEQ ID NO: 688334 - RNA, 19 nt, Artificial Sequence
  Description of Artificial Sequence: Synthetic oligonucleotide
  Sense strand starting at position 1328 of SEQ ID NO: 586051
gcucauuaucuguguaacu

SEQ ID NO: 688335 - RNA, 19 nt, Artificial Sequence
  Description of Artificial Sequence: Synthetic oligonucleotide
  Antisense strand to SEQ ID NO: 688334
aguuacacagauaaugagc

SEQ ID NO: 688336 - RNA, 19 nt, Artificial Sequence
  Description of Artificial Sequence: Synthetic oligonucleotide
  Sense strand starting at position 1329 of SEQ ID NO: 586051
cucauuaucuguguaacuc

SEQ ID NO: 688337 - RNA, 19 nt, Artificial Sequence
  Description of Artificial Sequence: Synthetic oligonucleotide
  Antisense strand to SEQ ID NO: 688336
gaguuacacagauaaugag

SEQ ID NO: 688338 - RNA, 19 nt, Artificial Sequence
  Description of Artificial Sequence: Synthetic oligonucleotide
  Sense strand starting at position 1351 of SEQ ID NO: 586051
acaacagugagguagguau

SEQ ID NO: 688339 - RNA, 19 nt, Artificial Sequence
  Description of Artificial Sequence: Synthetic oligonucleotide
  Antisense strand to SEQ ID NO: 688338
auaccuaccucacuguugu

SEQ ID NO: 688340 - RNA, 19 nt, Artificial Sequence
  Description of Artificial Sequence: Synthetic oligonucleotide
  Sense strand starting at position 1417 of SEQ ID NO: 586051
uuaagagauuauccaaggu

SEQ ID NO: 688341 - RNA, 19 nt, Artificial Sequence
  Description of Artificial Sequence: Synthetic oligonucleotide
  Antisense strand to SEQ ID NO: 688340
accuuggauaaucucuuaa

SEQ ID NO: 688342 - RNA, 19 nt, Artificial Sequence
  Description of Artificial Sequence: Synthetic oligonucleotide
  Sense strand starting at position 1421 of SEQ ID NO: 586051
gagauuauccaaggucaca

SEQ ID NO: 688343 - RNA, 19 nt, Artificial Sequence
  Description of Artificial Sequence: Synthetic oligonucleotide
  Antisense strand to SEQ ID NO: 688342
ugugaccuuggauaaucuc

SEQ ID NO: 688344 - RNA, 19 nt, Artificial Sequence
  Description of Artificial Sequence: Synthetic oligonucleotide
  Sense strand starting at position 1504 of SEQ ID NO: 586051
agagaaauaaggugcucuu

SEQ ID NO: 688345 - RNA, 19 nt, Artificial Sequence
  Description of Artificial Sequence: Synthetic oligonucleotide
  Antisense strand to SEQ ID NO: 688344
aagagcaccuuauuucucu

SEQ ID NO: 688346 - RNA, 19 nt, Artificial Sequence
  Description of Artificial Sequence: Synthetic oligonucleotide
  Sense strand starting at position 1532 of SEQ ID NO: 586051
aguggcuuccuucggaauu

SEQ ID NO: 688347 - RNA, 19 nt, Artificial Sequence
  Description of Artificial Sequence: Synthetic oligonucleotide
  Antisense strand to SEQ ID NO: 688346
aauuccgaaggaagccacu

SEQ ID NO: 688348 - RNA, 19 nt, Artificial Sequence
  Description of Artificial Sequence: Synthetic oligonucleotide
  Sense strand starting at position 2184 of SEQ ID NO: 586051
uugguucggccgaagcauu

SEQ ID NO: 688349 - RNA, 19 nt, Artificial Sequence
  Description of Artificial Sequence: Synthetic oligonucleotide
  Antisense strand to SEQ ID NO: 688348
aaugcuucggccgaaccaa

SEQ ID NO: 688350 - RNA, 19 nt, Artificial Sequence
  Description of Artificial Sequence: Synthetic oligonucleotide
  Sense strand starting at position 2240 of SEQ ID NO: 586051
uggcgauggguccagguau

SEQ ID NO: 688351 - RNA, 19 nt, Artificial Sequence
  Description of Artificial Sequence: Synthetic oligonucleotide
  Antisense strand to SEQ ID NO: 688350
auaccuggacccaucgcca

SEQ ID NO: 688352 - RNA, 19 nt, Artificial Sequence
  Description of Artificial Sequence: Synthetic oligonucleotide
  Sense strand starting at position 2367 of SEQ ID NO: 586051
gggccuggauuggcuaaau

SEQ ID NO: 688353 - RNA, 19 nt, Artificial Sequence
  Description of Artificial Sequence: Synthetic oligonucleotide
  Antisense strand to SEQ ID NO: 688352
auuuagccaauccaggccc

SEQ ID NO: 688354 - RNA, 19 nt, Artificial Sequence
  Description of Artificial Sequence: Synthetic oligonucleotide
  Sense strand starting at position 2599 of SEQ ID NO: 586051
gaggcauuaucgcuugaga

SEQ ID NO: 688355 - RNA, 19 nt, Artificial Sequence
  Description of Artificial Sequence: Synthetic oligonucleotide
  Antisense strand to SEQ ID NO: 688354
ucucaagcgauaaugccuc

SEQ ID NO: 688356 - RNA, 19 nt, Artificial Sequence
  Description of Artificial Sequence: Synthetic oligonucleotide
  Sense strand starting at position 2601 of SEQ ID NO: 586051
ggcauuaucgcuugagacu

SEQ ID NO: 688357 - RNA, 19 nt, Artificial Sequence
  Description of Artificial Sequence: Synthetic oligonucleotide
  Antisense strand to SEQ ID NO: 688356
agucucaagcgauaaugcc

SEQ ID NO: 688358 - RNA, 19 nt, Artificial Sequence
  Description of Artificial Sequence: Synthetic oligonucleotide
  Sense strand starting at position 2602 of SEQ ID NO: 586051
gcauuaucgcuugagacug

SEQ ID NO: 688359 - RNA, 19 nt, Artificial Sequence
  Description of Artificial Sequence: Synthetic oligonucleotide
  Antisense strand to SEQ ID NO: 688358
cagucucaagcgauaaugc

SEQ ID NO: 688360 - RNA, 19 nt, Artificial Sequence
  Description of Artificial Sequence: Synthetic oligonucleotide
  Sense strand starting at position 3059 of SEQ ID NO: 586051
cacacuugucugcagggaa

SEQ ID NO: 688361 - RNA, 19 nt, Artificial Sequence
  Description of Artificial Sequence: Synthetic oligonucleotide
  Antisense strand to SEQ ID NO: 688360
uucccugcagacaagugug

SEQ ID NO: 688362 - RNA, 19 nt, Artificial Sequence
  Description of Artificial Sequence: Synthetic oligonucleotide
  Sense strand starting at position 3092 of SEQ ID NO: 586051
gucaaagagaucuggagua

SEQ ID NO: 688363 - RNA, 19 nt, Artificial Sequence
  Description of Artificial Sequence: Synthetic oligonucleotide
  Antisense strand to SEQ ID NO: 688362
uacuccagaucucuuugac

SEQ ID NO: 688364 - RNA, 19 nt, Artificial Sequence
  Description of Artificial Sequence: Synthetic oligonucleotide
  Sense strand starting at position 3170 of SEQ ID NO: 586051
ggauguggcacguggaaua

SEQ ID NO: 688365 - RNA, 19 nt, Artificial Sequence
  Description of Artificial Sequence: Synthetic oligonucleotide
  Antisense strand to SEQ ID NO: 688364
uauuccacgugccacaucc

SEQ ID NO: 688366 - RNA, 19 nt, Artificial Sequence
  Description of Artificial Sequence: Synthetic oligonucleotide
  Sense strand starting at position 3181 of SEQ ID NO: 586051
guggaauauucagacagag

SEQ ID NO: 688367 - RNA, 19 nt, Artificial Sequence
  Description of Artificial Sequence: Synthetic oligonucleotide
  Antisense strand to SEQ ID NO: 688366
cucugucugaauauuccac

SEQ ID NO: 688368 - RNA, 19 nt, Artificial Sequence
  Description of Artificial Sequence: Synthetic oligonucleotide
  Sense strand starting at position 3222 of SEQ ID NO: 586051
agaacaaauugucagagga

SEQ ID NO: 688369 - RNA, 19 nt, Artificial Sequence
  Description of Artificial Sequence: Synthetic oligonucleotide
  Antisense strand to SEQ ID NO: 688368
uccucugacaauuuguucu

SEQ ID NO: 688370 - RNA, 19 nt, Artificial Sequence
  Description of Artificial Sequence: Synthetic oligonucleotide
  Sense strand starting at position 3275 of SEQ ID NO: 586051
ggccgaggaggcugugaau

SEQ ID NO: 688371 - RNA, 19 nt, Artificial Sequence
  Description of Artificial Sequence: Synthetic oligonucleotide
  Antisense strand to SEQ ID NO: 688370
auucacagccuccucggcc

SEQ ID NO: 688372 - RNA, 19 nt, Artificial Sequence
  Description of Artificial Sequence: Synthetic oligonucleotide
  Sense strand starting at position 3575 of SEQ ID NO: 586051
caguauugcucuccgaaag

SEQ ID NO: 688373 - RNA, 19 nt, Artificial Sequence
  Description of Artificial Sequence: Synthetic oligonucleotide
  Antisense strand to SEQ ID NO: 688372
cuuucggagagcaauacug

SEQ ID NO: 688374 - RNA, 19 nt, Artificial Sequence
  Description of Artificial Sequence: Synthetic oligonucleotide
  Sense strand starting at position 3576 of SEQ ID NO: 586051
aguauugcucuccgaaagu

SEQ ID NO: 688375 - RNA, 19 nt, Artificial Sequence
  Description of Artificial Sequence: Synthetic oligonucleotide
  Antisense strand to SEQ ID NO: 688374
acuuucggagagcaauacu

SEQ ID NO: 688376 - RNA, 19 nt, Artificial Sequence
  Description of Artificial Sequence: Synthetic oligonucleotide
  Sense strand starting at position 3676 of SEQ ID NO: 586051
ucuucuccuuccgagauuu

SEQ ID NO: 688377 - RNA, 19 nt, Artificial Sequence
  Description of Artificial Sequence: Synthetic oligonucleotide
  Antisense strand to SEQ ID NO: 688376
aaaucucggaaggagaaga

SEQ ID NO: 688378 - RNA, 19 nt, Artificial Sequence
  Description of Artificial Sequence: Synthetic oligonucleotide
  Sense strand starting at position 3730 of SEQ ID NO: 586051
gagagacgccuccauugaa

SEQ ID NO: 688379 - RNA, 19 nt, Artificial Sequence
  Description of Artificial Sequence: Synthetic oligonucleotide
  Antisense strand to SEQ ID NO: 688378
uucaauggaggcgucucuc

SEQ ID NO: 688380 - RNA, 19 nt, Artificial Sequence
  Description of Artificial Sequence: Synthetic oligonucleotide
  Sense strand starting at position 3778 of SEQ ID NO: 586051
ucucuaagacaguggugaa

SEQ ID NO: 688381 - RNA, 19 nt, Artificial Sequence
  Description of Artificial Sequence: Synthetic oligonucleotide
  Antisense strand to SEQ ID NO: 688380
uucaccacugucuuagaga

SEQ ID NO: 688382 - RNA, 19 nt, Artificial Sequence
  Description of Artificial Sequence: Synthetic oligonucleotide
  Sense strand starting at position 3804 of SEQ ID NO: 586051
ucugauugcuuccuggaag

SEQ ID NO: 688383 - RNA, 19 nt, Artificial Sequence
  Description of Artificial Sequence: Synthetic oligonucleotide
  Antisense strand to SEQ ID NO: 688382
cuuccaggaagcaaucaga

SEQ ID NO: 688384 - RNA, 19 nt, Artificial Sequence
  Description of Artificial Sequence: Synthetic oligonucleotide
  Sense strand starting at position 3822 of SEQ ID NO: 586051
gaggaaauguccgucucca

SEQ ID NO: 688385 - RNA, 19 nt, Artificial Sequence
  Description of Artificial Sequence: Synthetic oligonucleotide
  Antisense strand to SEQ ID NO: 688384
uggagacggacauuuccuc

SEQ ID NO: 688386 - RNA, 19 nt, Artificial Sequence
  Description of Artificial Sequence: Synthetic oligonucleotide
  Sense strand starting at position 3826 of SEQ ID NO: 586051
aaauguccgucuccacaga

SEQ ID NO: 688387 - RNA, 19 nt, Artificial Sequence
  Description of Artificial Sequence: Synthetic oligonucleotide
  Antisense strand to SEQ ID NO: 688386
ucuguggagacggacauuu

SEQ ID NO: 688388 - RNA, 19 nt, Artificial Sequence
  Description of Artificial Sequence: Synthetic oligonucleotide
  Sense strand starting at position 3930 of SEQ ID NO: 586051
ggcuguucuccauugcuuu

SEQ ID NO: 688389 - RNA, 19 nt, Artificial Sequence
  Description of Artificial Sequence: Synthetic oligonucleotide
  Antisense strand to SEQ ID NO: 688388
aaagcaauggagaacagcc

SEQ ID NO: 688390 - RNA, 19 nt, Artificial Sequence
  Description of Artificial Sequence: Synthetic oligonucleotide
  Sense strand starting at position 3977 of SEQ ID NO: 586051
uucuucugacaguaacgau

SEQ ID NO: 688391 - RNA, 19 nt, Artificial Sequence
  Description of Artificial Sequence: Synthetic oligonucleotide
  Antisense strand to SEQ ID NO: 688390
aucguuacugucagaagaa

SEQ ID NO: 688392 - RNA, 19 nt, Artificial Sequence
  Description of Artificial Sequence: Synthetic oligonucleotide
  Sense strand starting at position 60 of SEQ ID NO: 586052
cggucuugggaucauaguu

SEQ ID NO: 688393 - RNA, 19 nt, Artificial Sequence
  Description of Artificial Sequence: Synthetic oligonucleotide
  Antisense strand to SEQ ID NO: 688392
aacuaugaucccaagaccg

SEQ ID NO: 688394 - RNA, 19 nt, Artificial Sequence
  Description of Artificial Sequence: Synthetic oligonucleotide
  Sense strand starting at position 65 of SEQ ID NO: 586052
uugggaucauaguucucau

SEQ ID NO: 688395 - RNA, 19 nt, Artificial Sequence
  Description of Artificial Sequence: Synthetic oligonucleotide
  Antisense strand to SEQ ID NO: 688394
augagaacuaugaucccaa

SEQ ID NO: 688396 - RNA, 19 nt, Artificial Sequence
  Description of Artificial Sequence: Synthetic oligonucleotide
  Sense strand starting at position 68 of SEQ ID NO: 586052
ggaucauaguucucaucuu

SEQ ID NO: 688397 - RNA, 19 nt, Artificial Sequence
  Description of Artificial Sequence: Synthetic oligonucleotide
  Antisense strand to SEQ ID NO: 688396
aagaugagaacuaugaucc

SEQ ID NO: 688398 - RNA, 19 nt, Artificial Sequence
  Description of Artificial Sequence: Synthetic oligonucleotide
  Sense strand starting at position 480 of SEQ ID NO: 586052
ucucacuggcauggagaua

SEQ ID NO: 688399 - RNA, 19 nt, Artificial Sequence
  Description of Artificial Sequence: Synthetic oligonucleotide
  Antisense strand to SEQ ID NO: 688398
uaucuccaugccagugaga

SEQ ID NO: 688400 - RNA, 19 nt, Artificial Sequence
  Description of Artificial Sequence: Synthetic oligonucleotide
  Sense strand starting at position 492 of SEQ ID NO: 586052
ggagauaaccuguguagau

SEQ ID NO: 688401 - RNA, 19 nt, Artificial Sequence
  Description of Artificial Sequence: Synthetic oligonucleotide
  Antisense strand to SEQ ID NO: 688400
aucuacacagguuaucucc

SEQ ID NO: 688402 - RNA, 19 nt, Artificial Sequence
  Description of Artificial Sequence: Synthetic oligonucleotide
  Sense strand starting at position 493 of SEQ ID NO: 586052
gagauaaccuguguagaua

SEQ ID NO: 688403 - RNA, 19 nt, Artificial Sequence
  Description of Artificial Sequence: Synthetic oligonucleotide
  Antisense strand to SEQ ID NO: 688402
uaucuacacagguuaucuc

SEQ ID NO: 688404 - RNA, 19 nt, Artificial Sequence
  Description of Artificial Sequence: Synthetic oligonucleotide
  Sense strand starting at position 649 of SEQ ID NO: 586052
auguacauucuccacgauu

SEQ ID NO: 688405 - RNA, 19 nt, Artificial Sequence
  Description of Artificial Sequence: Synthetic oligonucleotide
  Antisense strand to SEQ ID NO: 688404
aaucguggagaauguacau

SEQ ID NO: 688406 - RNA, 19 nt, Artificial Sequence
  Description of Artificial Sequence: Synthetic oligonucleotide
  Sense strand starting at position 651 of SEQ ID NO: 586052
guacauucuccacgauuaa

SEQ ID NO: 688407 - RNA, 19 nt, Artificial Sequence
  Description of Artificial Sequence: Synthetic oligonucleotide
  Antisense strand to SEQ ID NO: 688406
uuaaucguggagaauguac

SEQ ID NO: 688408 - RNA, 19 nt, Artificial Sequence
  Description of Artificial Sequence: Synthetic oligonucleotide
  Sense strand starting at position 655 of SEQ ID NO: 586052
auucuccacgauuaaagua

SEQ ID NO: 688409 - RNA, 19 nt, Artificial Sequence
  Description of Artificial Sequence: Synthetic oligonucleotide
  Antisense strand to SEQ ID NO: 688408
uacuuuaaucguggagaau

SEQ ID NO: 688410 - RNA, 19 nt, Artificial Sequence
  Description of Artificial Sequence: Synthetic oligonucleotide
  Sense strand starting at position 773 of SEQ ID NO: 586052
ggcgauguuucugccauuu

SEQ ID NO: 688411 - RNA, 19 nt, Artificial Sequence
  Description of Artificial Sequence: Synthetic oligonucleotide
  Antisense strand to SEQ ID NO: 688410
aaauggcagaaacaucgcc

SEQ ID NO: 688412 - RNA, 19 nt, Artificial Sequence
  Description of Artificial Sequence: Synthetic oligonucleotide
  Sense strand starting at position 801 of SEQ ID NO: 586052
gccacuaaggguuaaaucu

SEQ ID NO: 688413 - RNA, 19 nt, Artificial Sequence
  Description of Artificial Sequence: Synthetic oligonucleotide
  Antisense strand to SEQ ID NO: 688412
agauuuaacccuuaguggc

SEQ ID NO: 688414 - RNA, 19 nt, Artificial Sequence
  Description of Artificial Sequence: Synthetic oligonucleotide
  Sense strand starting at position 844 of SEQ ID NO: 586052
aggagaaagcacugucuaa

SEQ ID NO: 688415 - RNA, 19 nt, Artificial Sequence
  Description of Artificial Sequence: Synthetic oligonucleotide
  Antisense strand to SEQ ID NO: 688414
uuagacagugcuuucuccu

SEQ ID NO: 688416 - RNA, 19 nt, Artificial Sequence
  Description of Artificial Sequence: Synthetic oligonucleotide
  Sense strand starting at position 933 of SEQ ID NO: 586052
uuugucugucuacaaacuu

SEQ ID NO: 688417 - RNA, 19 nt, Artificial Sequence
  Description of Artificial Sequence: Synthetic oligonucleotide
  Antisense strand to SEQ ID NO: 688416
aaguuuguagacagacaaa

SEQ ID NO: 688418 - RNA, 19 nt, Artificial Sequence
  Description of Artificial Sequence: Synthetic oligonucleotide
  Sense strand starting at position 1396 of SEQ ID NO: 586052
cugagugacucuccaguau

SEQ ID NO: 688419 - RNA, 19 nt, Artificial Sequence
  Description of Artificial Sequence: Synthetic oligonucleotide
  Antisense strand to SEQ ID NO: 688418
auacuggagagucacucag

SEQ ID NO: 688420 - RNA, 19 nt, Artificial Sequence
  Description of Artificial Sequence: Synthetic oligonucleotide
  Sense strand starting at position 1494 of SEQ ID NO: 586052
acuuucuaugguugcacaa

SEQ ID NO: 688421 - RNA, 19 nt, Artificial Sequence
  Description of Artificial Sequence: Synthetic oligonucleotide
  Antisense strand to SEQ ID NO: 688420
uugugcaaccauagaaagu

SEQ ID NO: 688422 - RNA, 19 nt, Artificial Sequence
  Description of Artificial Sequence: Synthetic oligonucleotide
  Sense strand starting at position 1556 of SEQ ID NO: 586052
agccauuucguauguggga

SEQ ID NO: 688423 - RNA, 19 nt, Artificial Sequence
  Description of Artificial Sequence: Synthetic oligonucleotide
  Antisense strand to SEQ ID NO: 688422
ucccacauacgaaauggcu

SEQ ID NO: 688424 - RNA, 19 nt, Artificial Sequence
  Description of Artificial Sequence: Synthetic oligonucleotide
  Sense strand starting at position 1557 of SEQ ID NO: 586052
gccauuucguaugugggaa

SEQ ID NO: 688425 - RNA, 19 nt, Artificial Sequence
  Description of Artificial Sequence: Synthetic oligonucleotide
  Antisense strand to SEQ ID NO: 688424
uucccacauacgaaauggc

SEQ ID NO: 688426 - RNA, 19 nt, Artificial Sequence
  Description of Artificial Sequence: Synthetic oligonucleotide
  Sense strand starting at position 2607 of SEQ ID NO: 586052
uguauaaaggcaugaaauc

SEQ ID NO: 688427 - RNA, 19 nt, Artificial Sequence
  Description of Artificial Sequence: Synthetic oligonucleotide
  Antisense strand to SEQ ID NO: 688426
gauuucaugccuuuauaca

SEQ ID NO: 688428 - RNA, 19 nt, Artificial Sequence
  Description of Artificial Sequence: Synthetic oligonucleotide
  Sense strand starting at position 2747 of SEQ ID NO: 586052
gaugccuuagucuaaggga

SEQ ID NO: 688429 - RNA, 19 nt, Artificial Sequence
  Description of Artificial Sequence: Synthetic oligonucleotide
  Antisense strand to SEQ ID NO: 688428
ucccuuagacuaaggcauc

SEQ ID NO: 688430 - RNA, 19 nt, Artificial Sequence
  Description of Artificial Sequence: Synthetic oligonucleotide
  Sense strand starting at position 2891 of SEQ ID NO: 586052
guugcuauugcauaaacaa

SEQ ID NO: 688431 - RNA, 19 nt, Artificial Sequence
  Description of Artificial Sequence: Synthetic oligonucleotide
  Antisense strand to SEQ ID NO: 688430
uuguuuaugcaauagcaac

SEQ ID NO: 688432 - RNA, 19 nt, Artificial Sequence
  Description of Artificial Sequence: Synthetic oligonucleotide
  Sense strand starting at position 2929 of SEQ ID NO: 586052
uuaggaaaugccugguuua

SEQ ID NO: 688433 - RNA, 19 nt, Artificial Sequence
  Description of Artificial Sequence: Synthetic oligonucleotide
  Antisense strand to SEQ ID NO: 688432
uaaaccaggcauuuccuaa

SEQ ID NO: 688434 - RNA, 19 nt, Artificial Sequence
  Description of Artificial Sequence: Synthetic oligonucleotide
  Sense strand starting at position 2930 of SEQ ID NO: 586052
uaggaaaugccugguuuaa

SEQ ID NO: 688435 - RNA, 19 nt, Artificial Sequence
  Description of Artificial Sequence: Synthetic oligonucleotide
  Antisense strand to SEQ ID NO: 688434
uuaaaccaggcauuuccua

SEQ ID NO: 688436 - RNA, 19 nt, Artificial Sequence
  Description of Artificial Sequence: Synthetic oligonucleotide
  Sense strand starting at position 2932 of SEQ ID NO: 586052
ggaaaugccugguuuaauu

SEQ ID NO: 688437 - RNA, 19 nt, Artificial Sequence
  Description of Artificial Sequence: Synthetic oligonucleotide
  Antisense strand to SEQ ID NO: 688436
aauuaaaccaggcauuucc

SEQ ID NO: 688438 - RNA, 19 nt, Artificial Sequence
  Description of Artificial Sequence: Synthetic oligonucleotide
  Sense strand starting at position 2942 of SEQ ID NO: 586052
gguuuaauucgucugcugu

SEQ ID NO: 688439 - RNA, 19 nt, Artificial Sequence
  Description of Artificial Sequence: Synthetic oligonucleotide
  Antisense strand to SEQ ID NO: 688438
acagcagacgaauuaaacc

SEQ ID NO: 688440 - RNA, 19 nt, Artificial Sequence
  Description of Artificial Sequence: Synthetic oligonucleotide
  Sense strand starting at position 3043 of SEQ ID NO: 586052
ucucuuuaauucgcagaag

SEQ ID NO: 688441 - RNA, 19 nt, Artificial Sequence
  Description of Artificial Sequence: Synthetic oligonucleotide
  Antisense strand to SEQ ID NO: 688440
cuucugcgaauuaaagaga

SEQ ID NO: 688442 - RNA, 19 nt, Artificial Sequence
  Description of Artificial Sequence: Synthetic oligonucleotide
  Sense strand starting at position 3046 of SEQ ID NO: 586052
cuuuaauucgcagaaguac

SEQ ID NO: 688443 - RNA, 19 nt, Artificial Sequence
  Description of Artificial Sequence: Synthetic oligonucleotide
  Antisense strand to SEQ ID NO: 688442
guacuucugcgaauuaaag

SEQ ID NO: 688444 - RNA, 19 nt, Artificial Sequence
  Description of Artificial Sequence: Synthetic oligonucleotide
  Sense strand starting at position 3054 of SEQ ID NO: 586052
cgcagaaguacagaggauu

SEQ ID NO: 688445 - RNA, 19 nt, Artificial Sequence
  Description of Artificial Sequence: Synthetic oligonucleotide
  Antisense strand to SEQ ID NO: 688444
aauccucuguacuucugcg

SEQ ID NO: 688446 - RNA, 19 nt, Artificial Sequence
  Description of Artificial Sequence: Synthetic oligonucleotide
  Sense strand starting at position 3104 of SEQ ID NO: 586052
agucacuccuuggcuuaga

SEQ ID NO: 688447 - RNA, 19 nt, Artificial Sequence
  Description of Artificial Sequence: Synthetic oligonucleotide
  Antisense strand to SEQ ID NO: 688446
ucuaagccaaggagugacu

SEQ ID NO: 688448 - RNA, 19 nt, Artificial Sequence
  Description of Artificial Sequence: Synthetic oligonucleotide
  Sense strand starting at position 3105 of SEQ ID NO: 586052
gucacuccuuggcuuagaa

SEQ ID NO: 688449 - RNA, 19 nt, Artificial Sequence
  Description of Artificial Sequence: Synthetic oligonucleotide
  Antisense strand to SEQ ID NO: 688448
uucuaagccaaggagugac

SEQ ID NO: 688450 - RNA, 19 nt, Artificial Sequence
  Description of Artificial Sequence: Synthetic oligonucleotide
  Sense strand starting at position 3136 of SEQ ID NO: 586052
ccacaugcccucuggauaa

SEQ ID NO: 688451 - RNA, 19 nt, Artificial Sequence
  Description of Artificial Sequence: Synthetic oligonucleotide
  Antisense strand to SEQ ID NO: 688450
uuauccagagggcaugugg

SEQ ID NO: 688452 - RNA, 19 nt, Artificial Sequence
  Description of Artificial Sequence: Synthetic oligonucleotide
  Sense strand starting at position 3149 of SEQ ID NO: 586052
ggauaaaguccaggcuucu

SEQ ID NO: 688453 - RNA, 19 nt, Artificial Sequence
  Description of Artificial Sequence: Synthetic oligonucleotide
  Antisense strand to SEQ ID NO: 688452
agaagccuggacuuuaucc

SEQ ID NO: 688454 - RNA, 19 nt, Artificial Sequence
  Description of Artificial Sequence: Synthetic oligonucleotide
  Sense strand starting at position 3164 of SEQ ID NO: 586052
uucuuaauguggucuacaa

SEQ ID NO: 688455 - RNA, 19 nt, Artificial Sequence
  Description of Artificial Sequence: Synthetic oligonucleotide
  Antisense strand to SEQ ID NO: 688454
uuguagaccacauuaagaa

SEQ ID NO: 688456 - RNA, 19 nt, Artificial Sequence
  Description of Artificial Sequence: Synthetic oligonucleotide
  Sense strand starting at position 3315 of SEQ ID NO: 586052
ucuugaaccggagguguaa

SEQ ID NO: 688457 - RNA, 19 nt, Artificial Sequence
  Description of Artificial Sequence: Synthetic oligonucleotide
  Antisense strand to SEQ ID NO: 688456
uuacaccuccgguucaaga

SEQ ID NO: 688458 - RNA, 19 nt, Artificial Sequence
  Description of Artificial Sequence: Synthetic oligonucleotide
  Sense strand starting at position 3317 of SEQ ID NO: 586052
uugaaccggagguguaauu

SEQ ID NO: 688459 - RNA, 19 nt, Artificial Sequence
  Description of Artificial Sequence: Synthetic oligonucleotide
  Antisense strand to SEQ ID NO: 688458
aauuacaccuccgguucaa

SEQ ID NO: 688460 - RNA, 19 nt, Artificial Sequence
  Description of Artificial Sequence: Synthetic oligonucleotide
  Sense strand starting at position 3421 of SEQ ID NO: 586052
auugaauugucucuaaguc

SEQ ID NO: 688461 - RNA, 19 nt, Artificial Sequence
  Description of Artificial Sequence: Synthetic oligonucleotide
  Antisense strand to SEQ ID NO: 688460
gacuuagagacaauucaau

SEQ ID NO: 688462 - RNA, 19 nt, Artificial Sequence
  Description of Artificial Sequence: Synthetic oligonucleotide
  Sense strand starting at position 3429 of SEQ ID NO: 586052
gucucuaaguccucuggau

SEQ ID NO: 688463 - RNA, 19 nt, Artificial Sequence
  Description of Artificial Sequence: Synthetic oligonucleotide
  Antisense strand to SEQ ID NO: 688462
auccagaggacuuagagac

SEQ ID NO: 688464 - RNA, 19 nt, Artificial Sequence
  Description of Artificial Sequence: Synthetic oligonucleotide
  Sense strand starting at position 3535 of SEQ ID NO: 586052
gaggguugcagucaaauca

SEQ ID NO: 688465 - RNA, 19 nt, Artificial Sequence
  Description of Artificial Sequence: Synthetic oligonucleotide
  Antisense strand to SEQ ID NO: 688464
ugauuugacugcaacccuc

SEQ ID NO: 688466 - RNA, 19 nt, Artificial Sequence
  Description of Artificial Sequence: Synthetic oligonucleotide
  Sense strand starting at position 3633 of SEQ ID NO: 586052
cauugcucacuggagcaua

SEQ ID NO: 688467 - RNA, 19 nt, Artificial Sequence
  Description of Artificial Sequence: Synthetic oligonucleotide
  Antisense strand to SEQ ID NO: 688466
uaugcuccagugagcaaug

SEQ ID NO: 688468 - RNA, 19 nt, Artificial Sequence
  Description of Artificial Sequence: Synthetic oligonucleotide
  Sense strand starting at position 3646 of SEQ ID NO: 586052
agcauaauccugcgaggaa

SEQ ID NO: 688469 - RNA, 19 nt, Artificial Sequence
  Description of Artificial Sequence: Synthetic oligonucleotide
  Antisense strand to SEQ ID NO: 688468
uuccucgcaggauuaugcu

SEQ ID NO: 688470 - RNA, 19 nt, Artificial Sequence
  Description of Artificial Sequence: Synthetic oligonucleotide
  Sense strand starting at position 3649 of SEQ ID NO: 586052
auaauccugcgaggaaaga

SEQ ID NO: 688471 - RNA, 19 nt, Artificial Sequence
  Description of Artificial Sequence: Synthetic oligonucleotide
  Antisense strand to SEQ ID NO: 688470
ucuuuccucgcaggauuau

SEQ ID NO: 688472 - RNA, 19 nt, Artificial Sequence
  Description of Artificial Sequence: Synthetic oligonucleotide
  Sense strand starting at position 1594 of SEQ ID NO: 586053
ggagccacaucuucucaaa

SEQ ID NO: 688473 - RNA, 19 nt, Artificial Sequence
  Description of Artificial Sequence: Synthetic oligonucleotide
  Antisense strand to SEQ ID NO: 688472
uuugagaagauguggcucc

SEQ ID NO: 688474 - RNA, 19 nt, Artificial Sequence
  Description of Artificial Sequence: Synthetic oligonucleotide
  Sense strand starting at position 1654 of SEQ ID NO: 586053
aguggcgguuucugcaaau

SEQ ID NO: 688475 - RNA, 19 nt, Artificial Sequence
  Description of Artificial Sequence: Synthetic oligonucleotide
  Antisense strand to SEQ ID NO: 688474
auuugcagaaaccgccacu

SEQ ID NO: 688476 - RNA, 19 nt, Artificial Sequence
  Description of Artificial Sequence: Synthetic oligonucleotide
  Sense strand starting at position 2080 of SEQ ID NO: 586053
cuacaagccucguguugau

SEQ ID NO: 688477 - RNA, 19 nt, Artificial Sequence
  Description of Artificial Sequence: Synthetic oligonucleotide
  Antisense strand to SEQ ID NO: 688476
aucaacacgaggcuuguag

SEQ ID NO: 688478 - RNA, 19 nt, Artificial Sequence
  Description of Artificial Sequence: Synthetic oligonucleotide
  Sense strand starting at position 2273 of SEQ ID NO: 586053
cugcguuucccggugauua

SEQ ID NO: 688479 - RNA, 19 nt, Artificial Sequence
  Description of Artificial Sequence: Synthetic oligonucleotide
  Antisense strand to SEQ ID NO: 688478
uaaucaccgggaaacgcag

SEQ ID NO: 688480 - RNA, 19 nt, Artificial Sequence
  Description of Artificial Sequence: Synthetic oligonucleotide
  Sense strand starting at position 2274 of SEQ ID NO: 586053
ugcguuucccggugauuaa

SEQ ID NO: 688481 - RNA, 19 nt, Artificial Sequence
  Description of Artificial Sequence: Synthetic oligonucleotide
  Antisense strand to SEQ ID NO: 688480
uuaaucaccgggaaacgca

SEQ ID NO: 688482 - RNA, 19 nt, Artificial Sequence
  Description of Artificial Sequence: Synthetic oligonucleotide
  Sense strand starting at position 2275 of SEQ ID NO: 586053
gcguuucccggugauuaag

SEQ ID NO: 688483 - RNA, 19 nt, Artificial Sequence
  Description of Artificial Sequence: Synthetic oligonucleotide
  Antisense strand to SEQ ID NO: 688482
cuuaaucaccgggaaacgc

SEQ ID NO: 688484 - RNA, 19 nt, Artificial Sequence
  Description of Artificial Sequence: Synthetic oligonucleotide
  Sense strand starting at position 2325 of SEQ ID NO: 586053
gggcgagauuaguugggua

SEQ ID NO: 688485 - RNA, 19 nt, Artificial Sequence
  Description of Artificial Sequence: Synthetic oligonucleotide
  Antisense strand to SEQ ID NO: 688484
uacccaacuaaucucgccc

SEQ ID NO: 688486 - RNA, 19 nt, Artificial Sequence
  Description of Artificial Sequence: Synthetic oligonucleotide
  Sense strand starting at position 2327 of SEQ ID NO: 586053
gcgagauuaguuggguacu

SEQ ID NO: 688487 - RNA, 19 nt, Artificial Sequence
  Description of Artificial Sequence: Synthetic oligonucleotide
  Antisense strand to SEQ ID NO: 688486
aguacccaacuaaucucgc

SEQ ID NO: 688488 - RNA, 19 nt, Artificial Sequence
  Description of Artificial Sequence: Synthetic oligonucleotide
  Sense strand starting at position 2328 of SEQ ID NO: 586053
cgagauuaguuggguacuu

SEQ ID NO: 688489 - RNA, 19 nt, Artificial Sequence
  Description of Artificial Sequence: Synthetic oligonucleotide
  Antisense strand to SEQ ID NO: 688488
aaguacccaacuaaucucg

SEQ ID NO: 688490 - RNA, 19 nt, Artificial Sequence
  Description of Artificial Sequence: Synthetic oligonucleotide
  Sense strand starting at position 2329 of SEQ ID NO: 586053
gagauuaguuggguacuua

SEQ ID NO: 688491 - RNA, 19 nt, Artificial Sequence
  Description of Artificial Sequence: Synthetic oligonucleotide
  Antisense strand to SEQ ID NO: 688490
uaaguacccaacuaaucuc

SEQ ID NO: 688492 - RNA, 19 nt, Artificial Sequence
  Description of Artificial Sequence: Synthetic oligonucleotide
  Sense strand starting at position 2449 of SEQ ID NO: 586053
ggaagcgucacucagcuaa

SEQ ID NO: 688493 - RNA, 19 nt, Artificial Sequence
  Description of Artificial Sequence: Synthetic oligonucleotide
  Antisense strand to SEQ ID NO: 688492
uuagcugagugacgcuucc

SEQ ID NO: 688494 - RNA, 19 nt, Artificial Sequence
  Description of Artificial Sequence: Synthetic oligonucleotide
  Sense strand starting at position 2451 of SEQ ID NO: 586053
aagcgucacucagcuaaua

SEQ ID NO: 688495 - RNA, 19 nt, Artificial Sequence
  Description of Artificial Sequence: Synthetic oligonucleotide
  Antisense strand to SEQ ID NO: 688494
uauuagcugagugacgcuu

SEQ ID NO: 688496 - RNA, 19 nt, Artificial Sequence
  Description of Artificial Sequence: Synthetic oligonucleotide
  Sense strand starting at position 2453 of SEQ ID NO: 586053
gcgucacucagcuaauagu

SEQ ID NO: 688497 - RNA, 19 nt, Artificial Sequence
  Description of Artificial Sequence: Synthetic oligonucleotide
  Antisense strand to SEQ ID NO: 688496
acuauuagcugagugacgc

SEQ ID NO: 688498 - RNA, 19 nt, Artificial Sequence
  Description of Artificial Sequence: Synthetic oligonucleotide
  Sense strand starting at position 2591 of SEQ ID NO: 586053
agagauaaauguggauaua

SEQ ID NO: 688499 - RNA, 19 nt, Artificial Sequence
  Description of Artificial Sequence: Synthetic oligonucleotide
  Antisense strand to SEQ ID NO: 688498
uauauccacauuuaucucu

SEQ ID NO: 688500 - RNA, 19 nt, Artificial Sequence
  Description of Artificial Sequence: Synthetic oligonucleotide
  Sense strand starting at position 2679 of SEQ ID NO: 586053
agaguuagauuggagaagu

SEQ ID NO: 688501 - RNA, 19 nt, Artificial Sequence
  Description of Artificial Sequence: Synthetic oligonucleotide
  Antisense strand to SEQ ID NO: 688500
acuucuccaaucuaacucu

SEQ ID NO: 688502 - RNA, 19 nt, Artificial Sequence
  Description of Artificial Sequence: Synthetic oligonucleotide
  Sense strand starting at position 2692 of SEQ ID NO: 586053
agaaguuuggccggugcaa

SEQ ID NO: 688503 - RNA, 19 nt, Artificial Sequence
  Description of Artificial Sequence: Synthetic oligonucleotide
  Antisense strand to SEQ ID NO: 688502
uugcaccggccaaacuucu

SEQ ID NO: 688504 - RNA, 19 nt, Artificial Sequence
  Description of Artificial Sequence: Synthetic oligonucleotide
  Sense strand starting at position 2754 of SEQ ID NO: 586053
gugacauucuaugaggaga

SEQ ID NO: 688505 - RNA, 19 nt, Artificial Sequence
  Description of Artificial Sequence: Synthetic oligonucleotide
  Antisense strand to SEQ ID NO: 688504
ucuccucauagaaugucac

SEQ ID NO: 688506 - RNA, 19 nt, Artificial Sequence
  Description of Artificial Sequence: Synthetic oligonucleotide
  Sense strand starting at position 2756 of SEQ ID NO: 586053
gacauucuaugaggagagu

SEQ ID NO: 688507 - RNA, 19 nt, Artificial Sequence
  Description of Artificial Sequence: Synthetic oligonucleotide
  Antisense strand to SEQ ID NO: 688506
acucuccucauagaauguc

SEQ ID NO: 688508 - RNA, 19 nt, Artificial Sequence
  Description of Artificial Sequence: Synthetic oligonucleotide
  Sense strand starting at position 2832 of SEQ ID NO: 586053
agcagaucuuaccaccgua

SEQ ID NO: 688509 - RNA, 19 nt, Artificial Sequence
  Description of Artificial Sequence: Synthetic oligonucleotide
  Antisense strand to SEQ ID NO: 688508
uacggugguaagaucugcu

SEQ ID NO: 688510 - RNA, 19 nt, Artificial Sequence
  Description of Artificial Sequence: Synthetic oligonucleotide
  Sense strand starting at position 2859 of SEQ ID NO: 586053
gagagcccugccuaagaaa

SEQ ID NO: 688511 - RNA, 19 nt, Artificial Sequence
  Description of Artificial Sequence: Synthetic oligonucleotide
  Antisense strand to SEQ ID NO: 688510
uuucuuaggcagggcucuc

SEQ ID NO: 688512 - RNA, 19 nt, Artificial Sequence
  Description of Artificial Sequence: Synthetic oligonucleotide
  Sense strand starting at position 35 of SEQ ID NO: 586054
ugugaucacgagggcaaau

SEQ ID NO: 688513 - RNA, 19 nt, Artificial Sequence
  Description of Artificial Sequence: Synthetic oligonucleotide
  Antisense strand to SEQ ID NO: 688512
auuugcccucgugaucaca

SEQ ID NO: 688514 - RNA, 19 nt, Artificial Sequence
  Description of Artificial Sequence: Synthetic oligonucleotide
  Sense strand starting at position 67 of SEQ ID NO: 586054
gcgugcuguauugccagau

SEQ ID NO: 688515 - RNA, 19 nt, Artificial Sequence
  Description of Artificial Sequence: Synthetic oligonucleotide
  Antisense strand to SEQ ID NO: 688514
aucuggcaauacagcacgc

SEQ ID NO: 688516 - RNA, 19 nt, Artificial Sequence
  Description of Artificial Sequence: Synthetic oligonucleotide
  Sense strand starting at position 112 of SEQ ID NO: 586054
aaaguauucugagcaaguu

SEQ ID NO: 688517 - RNA, 19 nt, Artificial Sequence
  Description of Artificial Sequence: Synthetic oligonucleotide
  Antisense strand to SEQ ID NO: 688516
aacuugcucagaauacuuu

SEQ ID NO: 688518 - RNA, 19 nt, Artificial Sequence
  Description of Artificial Sequence: Synthetic oligonucleotide
  Sense strand starting at position 215 of SEQ ID NO: 586054
ugggcuuaucagggcauaa

SEQ ID NO: 688519 - RNA, 19 nt, Artificial Sequence
  Description of Artificial Sequence: Synthetic oligonucleotide
  Antisense strand to SEQ ID NO: 688518
uuaugcccugauaagccca

SEQ ID NO: 688520 - RNA, 19 nt, Artificial Sequence
  Description of Artificial Sequence: Synthetic oligonucleotide
  Sense strand starting at position 217 of SEQ ID NO: 586054
ggcuuaucagggcauaauc

SEQ ID NO: 688521 - RNA, 19 nt, Artificial Sequence
  Description of Artificial Sequence: Synthetic oligonucleotide
  Antisense strand to SEQ ID NO: 688520
gauuaugcccugauaagcc

SEQ ID NO: 688522 - RNA, 19 nt, Artificial Sequence
  Description of Artificial Sequence: Synthetic oligonucleotide
  Sense strand starting at position 228 of SEQ ID NO: 586054
gcauaaucccaccacgagu

SEQ ID NO: 688523 - RNA, 19 nt, Artificial Sequence
  Description of Artificial Sequence: Synthetic oligonucleotide
  Antisense strand to SEQ ID NO: 688522
acucguggugggauuaugc

SEQ ID NO: 688524 - RNA, 19 nt, Artificial Sequence
  Description of Artificial Sequence: Synthetic oligonucleotide
  Sense strand starting at position 262 of SEQ ID NO: 586054
guacuaugauauccaagug

SEQ ID NO: 688525 - RNA, 19 nt, Artificial Sequence
  Description of Artificial Sequence: Synthetic oligonucleotide
  Antisense strand to SEQ ID NO: 688524
cacuuggauaucauaguac

SEQ ID NO: 688526 - RNA, 19 nt, Artificial Sequence
  Description of Artificial Sequence: Synthetic oligonucleotide
  Sense strand starting at position 295 of SEQ ID NO: 586054
acgggcagugcuuaaacaa

SEQ ID NO: 688527 - RNA, 19 nt, Artificial Sequence
  Description of Artificial Sequence: Synthetic oligonucleotide
  Antisense strand to SEQ ID NO: 688526
uuguuuaagcacugcccgu

SEQ ID NO: 688528 - RNA, 19 nt, Artificial Sequence
  Description of Artificial Sequence: Synthetic oligonucleotide
  Sense strand starting at position 766 of SEQ ID NO: 586054
acuacuuugugacuguaua

SEQ ID NO: 688529 - RNA, 19 nt, Artificial Sequence
  Description of Artificial Sequence: Synthetic oligonucleotide
  Antisense strand to SEQ ID NO: 688528
uauacagucacaaaguagu

SEQ ID NO: 688530 - RNA, 19 nt, Artificial Sequence
  Description of Artificial Sequence: Synthetic oligonucleotide
  Sense strand starting at position 943 of SEQ ID NO: 586054
gagggaugcgugcaggauu

SEQ ID NO: 688531 - RNA, 19 nt, Artificial Sequence
  Description of Artificial Sequence: Synthetic oligonucleotide
  Antisense strand to SEQ ID NO: 688530
aauccugcacgcaucccuc

SEQ ID NO: 688532 - RNA, 19 nt, Artificial Sequence
  Description of Artificial Sequence: Synthetic oligonucleotide
  Sense strand starting at position 944 of SEQ ID NO: 586054
agggaugcgugcaggauuu

SEQ ID NO: 688533 - RNA, 19 nt, Artificial Sequence
  Description of Artificial Sequence: Synthetic oligonucleotide
  Antisense strand to SEQ ID NO: 688532
aaauccugcacgcaucccu

SEQ ID NO: 688534 - RNA, 19 nt, Artificial Sequence
  Description of Artificial Sequence: Synthetic oligonucleotide
  Sense strand starting at position 985 of SEQ ID NO: 586054
gccuauagugaagguuaca

SEQ ID NO: 688535 - RNA, 19 nt, Artificial Sequence
  Description of Artificial Sequence: Synthetic oligonucleotide
  Antisense strand to SEQ ID NO: 688534
uguaaccuucacuauaggc

SEQ ID NO: 688536 - RNA, 19 nt, Artificial Sequence
  Description of Artificial Sequence: Synthetic oligonucleotide
  Sense strand starting at position 1024 of SEQ ID NO: 586054
aaggucugucugcagugaa

SEQ ID NO: 688537 - RNA, 19 nt, Artificial Sequence
  Description of Artificial Sequence: Synthetic oligonucleotide
  Antisense strand to SEQ ID NO: 688536
uucacugcagacagaccuu

SEQ ID NO: 688538 - RNA, 19 nt, Artificial Sequence
  Description of Artificial Sequence: Synthetic oligonucleotide
  Sense strand starting at position 1087 of SEQ ID NO: 586054
ugguacuuaccacgauagu

SEQ ID NO: 688539 - RNA, 19 nt, Artificial Sequence
  Description of Artificial Sequence: Synthetic oligonucleotide
  Antisense strand to SEQ ID NO: 688538
acuaucgugguaaguacca

SEQ ID NO: 688540 - RNA, 19 nt, Artificial Sequence
  Description of Artificial Sequence: Synthetic oligonucleotide
  Sense strand starting at position 1088 of SEQ ID NO: 586054
gguacuuaccacgauagua

SEQ ID NO: 688541 - RNA, 19 nt, Artificial Sequence
  Description of Artificial Sequence: Synthetic oligonucleotide
  Antisense strand to SEQ ID NO: 688540
uacuaucgugguaaguacc

SEQ ID NO: 688542 - RNA, 19 nt, Artificial Sequence
  Description of Artificial Sequence: Synthetic oligonucleotide
  Sense strand starting at position 1450 of SEQ ID NO: 586054
gaauuugaguaacaugaca

SEQ ID NO: 688543 - RNA, 19 nt, Artificial Sequence
  Description of Artificial Sequence: Synthetic oligonucleotide
  Antisense strand to SEQ ID NO: 688542
ugucauguuacucaaauuc

SEQ ID NO: 688544 - RNA, 19 nt, Artificial Sequence
  Description of Artificial Sequence: Synthetic oligonucleotide
  Sense strand starting at position 1455 of SEQ ID NO: 586054
ugaguaacaugacaaagaa

SEQ ID NO: 688545 - RNA, 19 nt, Artificial Sequence
  Description of Artificial Sequence: Synthetic oligonucleotide
  Antisense strand to SEQ ID NO: 688544
uucuuugucauguuacuca

SEQ ID NO: 688546 - RNA, 19 nt, Artificial Sequence
  Description of Artificial Sequence: Synthetic oligonucleotide
  Sense strand starting at position 1634 of SEQ ID NO: 586054
ccaguauccuacuucugca

SEQ ID NO: 688547 - RNA, 19 nt, Artificial Sequence
  Description of Artificial Sequence: Synthetic oligonucleotide
  Antisense strand to SEQ ID NO: 688546
ugcagaaguaggauacugg

SEQ ID NO: 688548 - RNA, 19 nt, Artificial Sequence
  Description of Artificial Sequence: Synthetic oligonucleotide
  Sense strand starting at position 1642 of SEQ ID NO: 586054
cuacuucugcaaugacaag

SEQ ID NO: 688549 - RNA, 19 nt, Artificial Sequence
  Description of Artificial Sequence: Synthetic oligonucleotide
  Antisense strand to SEQ ID NO: 688548
cuugucauugcagaaguag

SEQ ID NO: 688550 - RNA, 19 nt, Artificial Sequence
  Description of Artificial Sequence: Synthetic oligonucleotide
  Sense strand starting at position 1683 of SEQ ID NO: 586054
uagccaauguugguagaau

SEQ ID NO: 688551 - RNA, 19 nt, Artificial Sequence
  Description of Artificial Sequence: Synthetic oligonucleotide
  Antisense strand to SEQ ID NO: 688550
auucuaccaacauuggcua

SEQ ID NO: 688552 - RNA, 19 nt, Artificial Sequence
  Description of Artificial Sequence: Synthetic oligonucleotide
  Sense strand starting at position 1758 of SEQ ID NO: 586054
acggaucacacaugguaga

SEQ ID NO: 688553 - RNA, 19 nt, Artificial Sequence
  Description of Artificial Sequence: Synthetic oligonucleotide
  Antisense strand to SEQ ID NO: 688552
ucuaccaugugugauccgu

SEQ ID NO: 688554 - RNA, 19 nt, Artificial Sequence
  Description of Artificial Sequence: Synthetic oligonucleotide
  Sense strand starting at position 1759 of SEQ ID NO: 586054
cggaucacacaugguagaa

SEQ ID NO: 688555 - RNA, 19 nt, Artificial Sequence
  Description of Artificial Sequence: Synthetic oligonucleotide
  Antisense strand to SEQ ID NO: 688554
uucuaccaugugugauccg

SEQ ID NO: 688556 - RNA, 19 nt, Artificial Sequence
  Description of Artificial Sequence: Synthetic oligonucleotide
  Sense strand starting at position 1806 of SEQ ID NO: 586054
gccauaaaugaaugauuac

SEQ ID NO: 688557 - RNA, 19 nt, Artificial Sequence
  Description of Artificial Sequence: Synthetic oligonucleotide
  Antisense strand to SEQ ID NO: 688556
guaaucauucauuuauggc

SEQ ID NO: 688558 - RNA, 19 nt, Artificial Sequence
  Description of Artificial Sequence: Synthetic oligonucleotide
  Sense strand starting at position 1995 of SEQ ID NO: 586054
guugcaagaagucauaguu

SEQ ID NO: 688559 - RNA, 19 nt, Artificial Sequence
  Description of Artificial Sequence: Synthetic oligonucleotide
  Antisense strand to SEQ ID NO: 688558
aacuaugacuucuugcaac

SEQ ID NO: 688560 - RNA, 19 nt, Artificial Sequence
  Description of Artificial Sequence: Synthetic oligonucleotide
  Sense strand starting at position 2004 of SEQ ID NO: 586054
agucauaguuuaccaaaua

SEQ ID NO: 688561 - RNA, 19 nt, Artificial Sequence
  Description of Artificial Sequence: Synthetic oligonucleotide
  Antisense strand to SEQ ID NO: 688560
uauuugguaaacuaugacu

SEQ ID NO: 688562 - RNA, 19 nt, Artificial Sequence
  Description of Artificial Sequence: Synthetic oligonucleotide
  Sense strand starting at position 2034 of SEQ ID NO: 586054
ugaugaugucauugccuaa

SEQ ID NO: 688563 - RNA, 19 nt, Artificial Sequence
  Description of Artificial Sequence: Synthetic oligonucleotide
  Antisense strand to SEQ ID NO: 688562
uuaggcaaugacaucauca

SEQ ID NO: 688564 - RNA, 19 nt, Artificial Sequence
  Description of Artificial Sequence: Synthetic oligonucleotide
  Sense strand starting at position 2143 of SEQ ID NO: 586054
gguuccaagcauuaacuga

SEQ ID NO: 688565 - RNA, 19 nt, Artificial Sequence
  Description of Artificial Sequence: Synthetic oligonucleotide
  Antisense strand to SEQ ID NO: 688564
ucaguuaaugcuuggaacc

SEQ ID NO: 688566 - RNA, 19 nt, Artificial Sequence
  Description of Artificial Sequence: Synthetic oligonucleotide
  Sense strand starting at position 2309 of SEQ ID NO: 586054
ccaguaauauaacaggaaa

SEQ ID NO: 688567 - RNA, 19 nt, Artificial Sequence
  Description of Artificial Sequence: Synthetic oligonucleotide
  Antisense strand to SEQ ID NO: 688566
uuuccuguuauauuacugg

SEQ ID NO: 688568 - RNA, 19 nt, Artificial Sequence
  Description of Artificial Sequence: Synthetic oligonucleotide
  Sense strand starting at position 2369 of SEQ ID NO: 586054
uugaaacaguccuuuguau

SEQ ID NO: 688569 - RNA, 19 nt, Artificial Sequence
  Description of Artificial Sequence: Synthetic oligonucleotide
  Antisense strand to SEQ ID NO: 688568
auacaaaggacuguuucaa

SEQ ID NO: 688570 - RNA, 19 nt, Artificial Sequence
  Description of Artificial Sequence: Synthetic oligonucleotide
  Sense strand starting at position 2416 of SEQ ID NO: 586054
aguggaaccuucucagaaa

SEQ ID NO: 688571 - RNA, 19 nt, Artificial Sequence
  Description of Artificial Sequence: Synthetic oligonucleotide
  Antisense strand to SEQ ID NO: 688570
uuucugagaagguuccacu

SEQ ID NO: 688572 - RNA, 19 nt, Artificial Sequence
  Description of Artificial Sequence: Synthetic oligonucleotide
  Sense strand starting at position 3342 of SEQ ID NO: 586054
uuuguuugggcugaaauac

SEQ ID NO: 688573 - RNA, 19 nt, Artificial Sequence
  Description of Artificial Sequence: Synthetic oligonucleotide
  Antisense strand to SEQ ID NO: 688572
guauuucagcccaaacaaa

SEQ ID NO: 688574 - RNA, 19 nt, Artificial Sequence
  Description of Artificial Sequence: Synthetic oligonucleotide
  Sense strand starting at position 3371 of SEQ ID NO: 586054
guacuagaguuacuucuca

SEQ ID NO: 688575 - RNA, 19 nt, Artificial Sequence
  Description of Artificial Sequence: Synthetic oligonucleotide
  Antisense strand to SEQ ID NO: 688574
ugagaaguaacucuaguac

SEQ ID NO: 688576 - RNA, 19 nt, Artificial Sequence
  Description of Artificial Sequence: Synthetic oligonucleotide
  Sense strand starting at position 3532 of SEQ ID NO: 586054
aggacuuaccuuugguuga

SEQ ID NO: 688577 - RNA, 19 nt, Artificial Sequence
  Description of Artificial Sequence: Synthetic oligonucleotide
  Antisense strand to SEQ ID NO: 688576
ucaaccaaagguaaguccu

SEQ ID NO: 688578 - RNA, 19 nt, Artificial Sequence
  Description of Artificial Sequence: Synthetic oligonucleotide
  Sense strand starting at position 3534 of SEQ ID NO: 586054
gacuuaccuuugguugaua

SEQ ID NO: 688579 - RNA, 19 nt, Artificial Sequence
  Description of Artificial Sequence: Synthetic oligonucleotide
  Antisense strand to SEQ ID NO: 688578
uaucaaccaaagguaaguc

SEQ ID NO: 688580 - RNA, 19 nt, Artificial Sequence
  Description of Artificial Sequence: Synthetic oligonucleotide
  Sense strand starting at position 3536 of SEQ ID NO: 586054
cuuaccuuugguugauacu

SEQ ID NO: 688581 - RNA, 19 nt, Artificial Sequence
  Description of Artificial Sequence: Synthetic oligonucleotide
  Antisense strand to SEQ ID NO: 688580
aguaucaaccaaagguaag

SEQ ID NO: 688582 - RNA, 19 nt, Artificial Sequence
  Description of Artificial Sequence: Synthetic oligonucleotide
  Sense strand starting at position 3537 of SEQ ID NO: 586054
uuaccuuugguugauacuu

SEQ ID NO: 688583 - RNA, 19 nt, Artificial Sequence
  Description of Artificial Sequence: Synthetic oligonucleotide
  Antisense strand to SEQ ID NO: 688582
aaguaucaaccaaagguaa

SEQ ID NO: 688584 - RNA, 19 nt, Artificial Sequence
  Description of Artificial Sequence: Synthetic oligonucleotide
  Sense strand starting at position 3582 of SEQ ID NO: 586054
uugaguauguaccuaaaca

SEQ ID NO: 688585 - RNA, 19 nt, Artificial Sequence
  Description of Artificial Sequence: Synthetic oligonucleotide
  Antisense strand to SEQ ID NO: 688584
uguuuagguacauacucaa

SEQ ID NO: 688586 - RNA, 19 nt, Artificial Sequence
  Description of Artificial Sequence: Synthetic oligonucleotide
  Sense strand starting at position 3611 of SEQ ID NO: 586054
agucauguaucaguaagca

SEQ ID NO: 688587 - RNA, 19 nt, Artificial Sequence
  Description of Artificial Sequence: Synthetic oligonucleotide
  Antisense strand to SEQ ID NO: 688586
ugcuuacugauacaugacu

SEQ ID NO: 688588 - RNA, 19 nt, Artificial Sequence
  Description of Artificial Sequence: Synthetic oligonucleotide
  Sense strand starting at position 3706 of SEQ ID NO: 586054
uggagucucugaucaaugu

SEQ ID NO: 688589 - RNA, 19 nt, Artificial Sequence
  Description of Artificial Sequence: Synthetic oligonucleotide
  Antisense strand to SEQ ID NO: 688588
acauugaucagagacucca

SEQ ID NO: 688590 - RNA, 19 nt, Artificial Sequence
  Description of Artificial Sequence: Synthetic oligonucleotide
  Sense strand starting at position 3707 of SEQ ID NO: 586054
ggagucucugaucaauguu

SEQ ID NO: 688591 - RNA, 19 nt, Artificial Sequence
  Description of Artificial Sequence: Synthetic oligonucleotide
  Antisense strand to SEQ ID NO: 688590
aacauugaucagagacucc

SEQ ID NO: 688592 - RNA, 19 nt, Artificial Sequence
  Description of Artificial Sequence: Synthetic oligonucleotide
  Sense strand starting at position 41 of SEQ ID NO: 586055
cugccagcuccacagaaau

SEQ ID NO: 688593 - RNA, 19 nt, Artificial Sequence
  Description of Artificial Sequence: Synthetic oligonucleotide
  Antisense strand to SEQ ID NO: 688592
auuucuguggagcuggcag

SEQ ID NO: 688594 - RNA, 19 nt, Artificial Sequence
  Description of Artificial Sequence: Synthetic oligonucleotide
  Sense strand starting at position 99 of SEQ ID NO: 586055
aggagaaaguugucuuguc

SEQ ID NO: 688595 - RNA, 19 nt, Artificial Sequence
  Description of Artificial Sequence: Synthetic oligonucleotide
  Antisense strand to SEQ ID NO: 688594
gacaagacaacuuucuccu

SEQ ID NO: 688596 - RNA, 19 nt, Artificial Sequence
  Description of Artificial Sequence: Synthetic oligonucleotide
  Sense strand starting at position 226 of SEQ ID NO: 586055
acgguaguucaugggacaa

SEQ ID NO: 688597 - RNA, 19 nt, Artificial Sequence
  Description of Artificial Sequence: Synthetic oligonucleotide
  Antisense strand to SEQ ID NO: 688596
uugucccaugaacuaccgu

SEQ ID NO: 688598 - RNA, 19 nt, Artificial Sequence
  Description of Artificial Sequence: Synthetic oligonucleotide
  Sense strand starting at position 530 of SEQ ID NO: 586055
ugaugauucuaggcagcuc

SEQ ID NO: 688599 - RNA, 19 nt, Artificial Sequence
  Description of Artificial Sequence: Synthetic oligonucleotide
  Antisense strand to SEQ ID NO: 688598
gagcugccuagaaucauca

SEQ ID NO: 688600 - RNA, 19 nt, Artificial Sequence
  Description of Artificial Sequence: Synthetic oligonucleotide
  Sense strand starting at position 544 of SEQ ID NO: 586055
agcucuuaggaguggaacu

SEQ ID NO: 688601 - RNA, 19 nt, Artificial Sequence
  Description of Artificial Sequence: Synthetic oligonucleotide
  Antisense strand to SEQ ID NO: 688600
aguuccacuccuaagagcu

SEQ ID NO: 688602 - RNA, 19 nt, Artificial Sequence
  Description of Artificial Sequence: Synthetic oligonucleotide
  Sense strand starting at position 876 of SEQ ID NO: 586055
guauguauacaccacauca

SEQ ID NO: 688603 - RNA, 19 nt, Artificial Sequence
  Description of Artificial Sequence: Synthetic oligonucleotide
  Antisense strand to SEQ ID NO: 688602
ugaugugguguauacauac

SEQ ID NO: 688604 - RNA, 19 nt, Artificial Sequence
  Description of Artificial Sequence: Synthetic oligonucleotide
  Sense strand starting at position 887 of SEQ ID NO: 586055
ccacaucacguuuaucuau

SEQ ID NO: 688605 - RNA, 19 nt, Artificial Sequence
  Description of Artificial Sequence: Synthetic oligonucleotide
  Antisense strand to SEQ ID NO: 688604
auagauaaacgugaugugg

SEQ ID NO: 688606 - RNA, 19 nt, Artificial Sequence
  Description of Artificial Sequence: Synthetic oligonucleotide
  Sense strand starting at position 959 of SEQ ID NO: 586055
uguugcugugaacauaagu

SEQ ID NO: 688607 - RNA, 19 nt, Artificial Sequence
  Description of Artificial Sequence: Synthetic oligonucleotide
  Antisense strand to SEQ ID NO: 688606
acuuauguucacagcaaca

SEQ ID NO: 688608 - RNA, 19 nt, Artificial Sequence
  Description of Artificial Sequence: Synthetic oligonucleotide
  Sense strand starting at position 1028 of SEQ ID NO: 586055
uugugaugguuucucuaag

SEQ ID NO: 688609 - RNA, 19 nt, Artificial Sequence
  Description of Artificial Sequence: Synthetic oligonucleotide
  Antisense strand to SEQ ID NO: 688608
cuuagagaaaccaucacaa

SEQ ID NO: 688610 - RNA, 19 nt, Artificial Sequence
  Description of Artificial Sequence: Synthetic oligonucleotide
  Sense strand starting at position 1152 of SEQ ID NO: 586055
auugccuggccuuagagaa

SEQ ID NO: 688611 - RNA, 19 nt, Artificial Sequence
  Description of Artificial Sequence: Synthetic oligonucleotide
  Antisense strand to SEQ ID NO: 688610
uucucuaaggccaggcaau

SEQ ID NO: 688612 - RNA, 19 nt, Artificial Sequence
  Description of Artificial Sequence: Synthetic oligonucleotide
  Sense strand starting at position 1203 of SEQ ID NO: 586055
uucuuauggcugcagggaa

SEQ ID NO: 688613 - RNA, 19 nt, Artificial Sequence
  Description of Artificial Sequence: Synthetic oligonucleotide
  Antisense strand to SEQ ID NO: 688612
uucccugcagccauaagaa

SEQ ID NO: 688614 - RNA, 19 nt, Artificial Sequence
  Description of Artificial Sequence: Synthetic oligonucleotide
  Sense strand starting at position 1263 of SEQ ID NO: 586055
cucauuagccuuugggaag

SEQ ID NO: 688615 - RNA, 19 nt, Artificial Sequence
  Description of Artificial Sequence: Synthetic oligonucleotide
  Antisense strand to SEQ ID NO: 688614
cuucccaaaggcuaaugag

SEQ ID NO: 688616 - RNA, 19 nt, Artificial Sequence
  Description of Artificial Sequence: Synthetic oligonucleotide
  Sense strand starting at position 1345 of SEQ ID NO: 586055
cuaggcuucccauagauga

SEQ ID NO: 688617 - RNA, 19 nt, Artificial Sequence
  Description of Artificial Sequence: Synthetic oligonucleotide
  Antisense strand to SEQ ID NO: 688616
ucaucuaugggaagccuag

SEQ ID NO: 688618 - RNA, 19 nt, Artificial Sequence
  Description of Artificial Sequence: Synthetic oligonucleotide
  Sense strand starting at position 1405 of SEQ ID NO: 586055
cucaaaugugccugggagu

SEQ ID NO: 688619 - RNA, 19 nt, Artificial Sequence
  Description of Artificial Sequence: Synthetic oligonucleotide
  Antisense strand to SEQ ID NO: 688618
acucccaggcacauuugag

SEQ ID NO: 688620 - RNA, 19 nt, Artificial Sequence
  Description of Artificial Sequence: Synthetic oligonucleotide
  Sense strand starting at position 1406 of SEQ ID NO: 586055
ucaaaugugccugggaguu

SEQ ID NO: 688621 - RNA, 19 nt, Artificial Sequence
  Description of Artificial Sequence: Synthetic oligonucleotide
  Antisense strand to SEQ ID NO: 688620
aacucccaggcacauuuga

SEQ ID NO: 688622 - RNA, 19 nt, Artificial Sequence
  Description of Artificial Sequence: Synthetic oligonucleotide
  Sense strand starting at position 1434 of SEQ ID NO: 586055
cugauuuccuaauacguaa

SEQ ID NO: 688623 - RNA, 19 nt, Artificial Sequence
  Description of Artificial Sequence: Synthetic oligonucleotide
  Antisense strand to SEQ ID NO: 688622
uuacguauuaggaaaucag

SEQ ID NO: 688624 - RNA, 19 nt, Artificial Sequence
  Description of Artificial Sequence: Synthetic oligonucleotide
  Sense strand starting at position 1493 of SEQ ID NO: 586055
aagagcucccucugguuaa

SEQ ID NO: 688625 - RNA, 19 nt, Artificial Sequence
  Description of Artificial Sequence: Synthetic oligonucleotide
  Antisense strand to SEQ ID NO: 688624
uuaaccagagggagcucuu

SEQ ID NO: 688626 - RNA, 19 nt, Artificial Sequence
  Description of Artificial Sequence: Synthetic oligonucleotide
  Sense strand starting at position 1532 of SEQ ID NO: 586055
ucuggaaauuaagcacaau

SEQ ID NO: 688627 - RNA, 19 nt, Artificial Sequence
  Description of Artificial Sequence: Synthetic oligonucleotide
  Antisense strand to SEQ ID NO: 688626
auugugcuuaauuuccaga

SEQ ID NO: 688628 - RNA, 19 nt, Artificial Sequence
  Description of Artificial Sequence: Synthetic oligonucleotide
  Sense strand starting at position 1588 of SEQ ID NO: 586055
uaaagaggguuaucuuauu

SEQ ID NO: 688629 - RNA, 19 nt, Artificial Sequence
  Description of Artificial Sequence: Synthetic oligonucleotide
  Antisense strand to SEQ ID NO: 688628
aauaagauaacccucuuua

SEQ ID NO: 688630 - RNA, 19 nt, Artificial Sequence
  Description of Artificial Sequence: Synthetic oligonucleotide
  Sense strand starting at position 2112 of SEQ ID NO: 586055
cagcaugagucaccgaauc

SEQ ID NO: 688631 - RNA, 19 nt, Artificial Sequence
  Description of Artificial Sequence: Synthetic oligonucleotide
  Antisense strand to SEQ ID NO: 688630
gauucggugacucaugcug

SEQ ID NO: 688632 - RNA, 19 nt, Artificial Sequence
  Description of Artificial Sequence: Synthetic oligonucleotide
  Sense strand starting at position 2114 of SEQ ID NO: 586055
gcaugagucaccgaaucaa

SEQ ID NO: 688633 - RNA, 19 nt, Artificial Sequence
  Description of Artificial Sequence: Synthetic oligonucleotide
  Antisense strand to SEQ ID NO: 688632
uugauucggugacucaugc

SEQ ID NO: 688634 - RNA, 19 nt, Artificial Sequence
  Description of Artificial Sequence: Synthetic oligonucleotide
  Sense strand starting at position 2317 of SEQ ID NO: 586055
agaagaugaucagauucua

SEQ ID NO: 688635 - RNA, 19 nt, Artificial Sequence
  Description of Artificial Sequence: Synthetic oligonucleotide
  Antisense strand to SEQ ID NO: 688634
uagaaucugaucaucuucu

SEQ ID NO: 688636 - RNA, 19 nt, Artificial Sequence
  Description of Artificial Sequence: Synthetic oligonucleotide
  Sense strand starting at position 2418 of SEQ ID NO: 586055
cagagauggcuacggagau

SEQ ID NO: 688637 - RNA, 19 nt, Artificial Sequence
  Description of Artificial Sequence: Synthetic oligonucleotide
  Antisense strand to SEQ ID NO: 688636
aucuccguagccaucucug

SEQ ID NO: 688638 - RNA, 19 nt, Artificial Sequence
  Description of Artificial Sequence: Synthetic oligonucleotide
  Sense strand starting at position 2430 of SEQ ID NO: 586055
cggagauaugggugcauau

SEQ ID NO: 688639 - RNA, 19 nt, Artificial Sequence
  Description of Artificial Sequence: Synthetic oligonucleotide
  Antisense strand to SEQ ID NO: 688638
auaugcacccauaucuccg

SEQ ID NO: 688640 - RNA, 19 nt, Artificial Sequence
  Description of Artificial Sequence: Synthetic oligonucleotide
  Sense strand starting at position 2492 of SEQ ID NO: 586055
gggaauuccaaacgaguca

SEQ ID NO: 688641 - RNA, 19 nt, Artificial Sequence
  Description of Artificial Sequence: Synthetic oligonucleotide
  Antisense strand to SEQ ID NO: 688640
ugacucguuuggaauuccc

SEQ ID NO: 688642 - RNA, 19 nt, Artificial Sequence
  Description of Artificial Sequence: Synthetic oligonucleotide
  Sense strand starting at position 2543 of SEQ ID NO: 586055
gccugugucagagauaaca

SEQ ID NO: 688643 - RNA, 19 nt, Artificial Sequence
  Description of Artificial Sequence: Synthetic oligonucleotide
  Antisense strand to SEQ ID NO: 688642
uguuaucucugacacaggc

SEQ ID NO: 688644 - RNA, 19 nt, Artificial Sequence
  Description of Artificial Sequence: Synthetic oligonucleotide
  Sense strand starting at position 2888 of SEQ ID NO: 586055
gugcuagggagguaagaau

SEQ ID NO: 688645 - RNA, 19 nt, Artificial Sequence
  Description of Artificial Sequence: Synthetic oligonucleotide
  Antisense strand to SEQ ID NO: 688644
auucuuaccucccuagcac

SEQ ID NO: 688646 - RNA, 19 nt, Artificial Sequence
  Description of Artificial Sequence: Synthetic oligonucleotide
  Sense strand starting at position 2899 of SEQ ID NO: 586055
guaagaauggcacauggua

SEQ ID NO: 688647 - RNA, 19 nt, Artificial Sequence
  Description of Artificial Sequence: Synthetic oligonucleotide
  Antisense strand to SEQ ID NO: 688646
uaccaugugccauucuuac

SEQ ID NO: 688648 - RNA, 19 nt, Artificial Sequence
  Description of Artificial Sequence: Synthetic oligonucleotide
  Sense strand starting at position 2972 of SEQ ID NO: 586055
ugaagcaguguagaugauu

SEQ ID NO: 688649 - RNA, 19 nt, Artificial Sequence
  Description of Artificial Sequence: Synthetic oligonucleotide
  Antisense strand to SEQ ID NO: 688648
aaucaucuacacugcuuca

SEQ ID NO: 688650 - RNA, 19 nt, Artificial Sequence
  Description of Artificial Sequence: Synthetic oligonucleotide
  Sense strand starting at position 2975 of SEQ ID NO: 586055
agcaguguagaugauuaaa

SEQ ID NO: 688651 - RNA, 19 nt, Artificial Sequence
  Description of Artificial Sequence: Synthetic oligonucleotide
  Antisense strand to SEQ ID NO: 688650
uuuaaucaucuacacugcu

SEQ ID NO: 688652 - RNA, 19 nt, Artificial Sequence
  Description of Artificial Sequence: Synthetic oligonucleotide
  Sense strand starting at position 3381 of SEQ ID NO: 586055
gcuagauuagaguagucac

SEQ ID NO: 688653 - RNA, 19 nt, Artificial Sequence
  Description of Artificial Sequence: Synthetic oligonucleotide
  Antisense strand to SEQ ID NO: 688652
gugacuacucuaaucuagc

SEQ ID NO: 688654 - RNA, 19 nt, Artificial Sequence
  Description of Artificial Sequence: Synthetic oligonucleotide
  Sense strand starting at position 3388 of SEQ ID NO: 586055
uagaguagucacugcauua

SEQ ID NO: 688655 - RNA, 19 nt, Artificial Sequence
  Description of Artificial Sequence: Synthetic oligonucleotide
  Antisense strand to SEQ ID NO: 688654
uaaugcagugacuacucua

SEQ ID NO: 688656 - RNA, 19 nt, Artificial Sequence
  Description of Artificial Sequence: Synthetic oligonucleotide
  Sense strand starting at position 3580 of SEQ ID NO: 586055
cgauucucuugucucagau

SEQ ID NO: 688657 - RNA, 19 nt, Artificial Sequence
  Description of Artificial Sequence: Synthetic oligonucleotide
  Antisense strand to SEQ ID NO: 688656
aucugagacaagagaaucg

SEQ ID NO: 688658 - RNA, 19 nt, Artificial Sequence
  Description of Artificial Sequence: Synthetic oligonucleotide
  Sense strand starting at position 3770 of SEQ ID NO: 586055
uuuguuuagcaccaaugau

SEQ ID NO: 688659 - RNA, 19 nt, Artificial Sequence
  Description of Artificial Sequence: Synthetic oligonucleotide
  Antisense strand to SEQ ID NO: 688658
aucauuggugcuaaacaaa

SEQ ID NO: 688660 - RNA, 19 nt, Artificial Sequence
  Description of Artificial Sequence: Synthetic oligonucleotide
  Sense strand starting at position 3795 of SEQ ID NO: 586055
aguaguuuacaucaaagug

SEQ ID NO: 688661 - RNA, 19 nt, Artificial Sequence
  Description of Artificial Sequence: Synthetic oligonucleotide
  Antisense strand to SEQ ID NO: 688660
cacuuugauguaaacuacu

SEQ ID NO: 688662 - RNA, 19 nt, Artificial Sequence
  Description of Artificial Sequence: Synthetic oligonucleotide
  Sense strand starting at position 3831 of SEQ ID NO: 586055
gcucgauggcauuggaaua

SEQ ID NO: 688663 - RNA, 19 nt, Artificial Sequence
  Description of Artificial Sequence: Synthetic oligonucleotide
  Antisense strand to SEQ ID NO: 688662
uauuccaaugccaucgagc

SEQ ID NO: 688664 - RNA, 19 nt, Artificial Sequence
  Description of Artificial Sequence: Synthetic oligonucleotide
  Sense strand starting at position 3832 of SEQ ID NO: 586055
cucgauggcauuggaauaa

SEQ ID NO: 688665 - RNA, 19 nt, Artificial Sequence
  Description of Artificial Sequence: Synthetic oligonucleotide
  Antisense strand to SEQ ID NO: 688664
uuauuccaaugccaucgag

SEQ ID NO: 688666 - RNA, 19 nt, Artificial Sequence
  Description of Artificial Sequence: Synthetic oligonucleotide
  Sense strand starting at position 3915 of SEQ ID NO: 586055
ucauuaaguggcugaguga

SEQ ID NO: 688667 - RNA, 19 nt, Artificial Sequence
  Description of Artificial Sequence: Synthetic oligonucleotide
  Antisense strand to SEQ ID NO: 688666
ucacucagccacuuaauga

SEQ ID NO: 688668 - RNA, 19 nt, Artificial Sequence
  Description of Artificial Sequence: Synthetic oligonucleotide
  Sense strand starting at position 3916 of SEQ ID NO: 586055
cauuaaguggcugagugaa

SEQ ID NO: 688669 - RNA, 19 nt, Artificial Sequence
  Description of Artificial Sequence: Synthetic oligonucleotide
  Antisense strand to SEQ ID NO: 688668
uucacucagccacuuaaug

SEQ ID NO: 688670 - RNA, 19 nt, Artificial Sequence
  Description of Artificial Sequence: Synthetic oligonucleotide
  Sense strand starting at position 3918 of SEQ ID NO: 586055
uuaaguggcugagugaaga

SEQ ID NO: 688671 - RNA, 19 nt, Artificial Sequence
  Description of Artificial Sequence: Synthetic oligonucleotide
  Antisense strand to SEQ ID NO: 688670
ucuucacucagccacuuaa

SEQ ID NO: 688672 - RNA, 19 nt, Artificial Sequence
  Description of Artificial Sequence: Synthetic oligonucleotide
  Sense strand starting at position 335 of SEQ ID NO: 586056
aauugauuggaaugugguu

SEQ ID NO: 688673 - RNA, 19 nt, Artificial Sequence
  Description of Artificial Sequence: Synthetic oligonucleotide
  Antisense strand to SEQ ID NO: 688672
aaccacauuccaaucaauu

SEQ ID NO: 688674 - RNA, 19 nt, Artificial Sequence
  Description of Artificial Sequence: Synthetic oligonucleotide
  Sense strand starting at position 340 of SEQ ID NO: 586056
auuggaaugugguuuaacu

SEQ ID NO: 688675 - RNA, 19 nt, Artificial Sequence
  Description of Artificial Sequence: Synthetic oligonucleotide
  Antisense strand to SEQ ID NO: 688674
aguuaaaccacauuccaau

SEQ ID NO: 688676 - RNA, 19 nt, Artificial Sequence
  Description of Artificial Sequence: Synthetic oligonucleotide
  Sense strand starting at position 349 of SEQ ID NO: 586056
ugguuuaacugcuuuaucu

SEQ ID NO: 688677 - RNA, 19 nt, Artificial Sequence
  Description of Artificial Sequence: Synthetic oligonucleotide
  Antisense strand to SEQ ID NO: 688676
agauaaagcaguuaaacca

SEQ ID NO: 688678 - RNA, 19 nt, Artificial Sequence
  Description of Artificial Sequence: Synthetic oligonucleotide
  Sense strand starting at position 482 of SEQ ID NO: 586056
agauauaaucccugaaguc

SEQ ID NO: 688679 - RNA, 19 nt, Artificial Sequence
  Description of Artificial Sequence: Synthetic oligonucleotide
  Antisense strand to SEQ ID NO: 688678
gacuucagggauuauaucu

SEQ ID NO: 688680 - RNA, 19 nt, Artificial Sequence
  Description of Artificial Sequence: Synthetic oligonucleotide
  Sense strand starting at position 491 of SEQ ID NO: 586056
cccugaaguccagacuguu

SEQ ID NO: 688681 - RNA, 19 nt, Artificial Sequence
  Description of Artificial Sequence: Synthetic oligonucleotide
  Antisense strand to SEQ ID NO: 688680
aacagucuggacuucaggg

SEQ ID NO: 688682 - RNA, 19 nt, Artificial Sequence
  Description of Artificial Sequence: Synthetic oligonucleotide
  Sense strand starting at position 499 of SEQ ID NO: 586056
uccagacuguuucuggaau

SEQ ID NO: 688683 - RNA, 19 nt, Artificial Sequence
  Description of Artificial Sequence: Synthetic oligonucleotide
  Antisense strand to SEQ ID NO: 688682
auuccagaaacagucugga

SEQ ID NO: 688684 - RNA, 19 nt, Artificial Sequence
  Description of Artificial Sequence: Synthetic oligonucleotide
  Sense strand starting at position 507 of SEQ ID NO: 586056
guuucuggaaucggaaguu

SEQ ID NO: 688685 - RNA, 19 nt, Artificial Sequence
  Description of Artificial Sequence: Synthetic oligonucleotide
  Antisense strand to SEQ ID NO: 688684
aacuuccgauuccagaaac

SEQ ID NO: 688686 - RNA, 19 nt, Artificial Sequence
  Description of Artificial Sequence: Synthetic oligonucleotide
  Sense strand starting at position 534 of SEQ ID NO: 586056
gugucauccucuuccuuaa

SEQ ID NO: 688687 - RNA, 19 nt, Artificial Sequence
  Description of Artificial Sequence: Synthetic oligonucleotide
  Antisense strand to SEQ ID NO: 688686
uuaaggaagaggaugacac

SEQ ID NO: 688688 - RNA, 19 nt, Artificial Sequence
  Description of Artificial Sequence: Synthetic oligonucleotide
  Sense strand starting at position 663 of SEQ ID NO: 586056
guuaauccagagugagcau

SEQ ID NO: 688689 - RNA, 19 nt, Artificial Sequence
  Description of Artificial Sequence: Synthetic oligonucleotide
  Antisense strand to SEQ ID NO: 688688
augcucacucuggauuaac

SEQ ID NO: 688690 - RNA, 19 nt, Artificial Sequence
  Description of Artificial Sequence: Synthetic oligonucleotide
  Sense strand starting at position 691 of SEQ ID NO: 586056
uggagaaugcaaugaucua

SEQ ID NO: 688691 - RNA, 19 nt, Artificial Sequence
  Description of Artificial Sequence: Synthetic oligonucleotide
  Antisense strand to SEQ ID NO: 688690
uagaucauugcauucucca

SEQ ID NO: 688692 - RNA, 19 nt, Artificial Sequence
  Description of Artificial Sequence: Synthetic oligonucleotide
  Sense strand starting at position 702 of SEQ ID NO: 586056
augaucuauccagggcaca

SEQ ID NO: 688693 - RNA, 19 nt, Artificial Sequence
  Description of Artificial Sequence: Synthetic oligonucleotide
  Antisense strand to SEQ ID NO: 688692
ugugcccuggauagaucau

SEQ ID NO: 688694 - RNA, 19 nt, Artificial Sequence
  Description of Artificial Sequence: Synthetic oligonucleotide
  Sense strand starting at position 761 of SEQ ID NO: 586056
ccucaauuauucgucgaag

SEQ ID NO: 688695 - RNA, 19 nt, Artificial Sequence
  Description of Artificial Sequence: Synthetic oligonucleotide
  Antisense strand to SEQ ID NO: 688694
cuucgacgaauaauugagg

SEQ ID NO: 688696 - RNA, 19 nt, Artificial Sequence
  Description of Artificial Sequence: Synthetic oligonucleotide
  Sense strand starting at position 764 of SEQ ID NO: 586056
caauuauucgucgaaguua

SEQ ID NO: 688697 - RNA, 19 nt, Artificial Sequence
  Description of Artificial Sequence: Synthetic oligonucleotide
  Antisense strand to SEQ ID NO: 688696
uaacuucgacgaauaauug

SEQ ID NO: 688698 - RNA, 19 nt, Artificial Sequence
  Description of Artificial Sequence: Synthetic oligonucleotide
  Sense strand starting at position 773 of SEQ ID NO: 586056
gucgaaguuacaugggaga

SEQ ID NO: 688699 - RNA, 19 nt, Artificial Sequence
  Description of Artificial Sequence: Synthetic oligonucleotide
  Antisense strand to SEQ ID NO: 688698
ucucccauguaacuucgac

SEQ ID NO: 688700 - RNA, 19 nt, Artificial Sequence
  Description of Artificial Sequence: Synthetic oligonucleotide
  Sense strand starting at position 775 of SEQ ID NO: 586056
cgaaguuacaugggagauu

SEQ ID NO: 688701 - RNA, 19 nt, Artificial Sequence
  Description of Artificial Sequence: Synthetic oligonucleotide
  Antisense strand to SEQ ID NO: 688700
aaucucccauguaacuucg

SEQ ID NO: 688702 - RNA, 19 nt, Artificial Sequence
  Description of Artificial Sequence: Synthetic oligonucleotide
  Sense strand starting at position 807 of SEQ ID NO: 586056
uuaagaagaugcccuauau

SEQ ID NO: 688703 - RNA, 19 nt, Artificial Sequence
  Description of Artificial Sequence: Synthetic oligonucleotide
  Antisense strand to SEQ ID NO: 688702
auauagggcaucuucuuaa

SEQ ID NO: 688704 - RNA, 19 nt, Artificial Sequence
  Description of Artificial Sequence: Synthetic oligonucleotide
  Sense strand starting at position 811 of SEQ ID NO: 586056
gaagaugcccuauauguug

SEQ ID NO: 688705 - RNA, 19 nt, Artificial Sequence
  Description of Artificial Sequence: Synthetic oligonucleotide
  Antisense strand to SEQ ID NO: 688704
caacauauagggcaucuuc

SEQ ID NO: 688706 - RNA, 19 nt, Artificial Sequence
  Description of Artificial Sequence: Synthetic oligonucleotide
  Sense strand starting at position 818 of SEQ ID NO: 586056
cccuauauguugucagcaa

SEQ ID NO: 688707 - RNA, 19 nt, Artificial Sequence
  Description of Artificial Sequence: Synthetic oligonucleotide
  Antisense strand to SEQ ID NO: 688706
uugcugacaacauauaggg

SEQ ID NO: 688708 - RNA, 19 nt, Artificial Sequence
  Description of Artificial Sequence: Synthetic oligonucleotide
  Sense strand starting at position 852 of SEQ ID NO: 586056
uuccauguaucccugacuu

SEQ ID NO: 688709 - RNA, 19 nt, Artificial Sequence
  Description of Artificial Sequence: Synthetic oligonucleotide
  Antisense strand to SEQ ID NO: 688708
aagucagggauacauggaa

SEQ ID NO: 688710 - RNA, 19 nt, Artificial Sequence
  Description of Artificial Sequence: Synthetic oligonucleotide
  Sense strand starting at position 854 of SEQ ID NO: 586056
ccauguaucccugacuuag

SEQ ID NO: 688711 - RNA, 19 nt, Artificial Sequence
  Description of Artificial Sequence: Synthetic oligonucleotide
  Antisense strand to SEQ ID NO: 688710
cuaagucagggauacaugg

SEQ ID NO: 688712 - RNA, 19 nt, Artificial Sequence
  Description of Artificial Sequence: Synthetic oligonucleotide
  Sense strand starting at position 856 of SEQ ID NO: 586056
auguaucccugacuuagga

SEQ ID NO: 688713 - RNA, 19 nt, Artificial Sequence
  Description of Artificial Sequence: Synthetic oligonucleotide
  Antisense strand to SEQ ID NO: 688712
uccuaagucagggauacau

SEQ ID NO: 688714 - RNA, 19 nt, Artificial Sequence
  Description of Artificial Sequence: Synthetic oligonucleotide
  Sense strand starting at position 903 of SEQ ID NO: 586056
ggcuacaucugggcugauu

SEQ ID NO: 688715 - RNA, 19 nt, Artificial Sequence
  Description of Artificial Sequence: Synthetic oligonucleotide
  Antisense strand to SEQ ID NO: 688714
aaucagcccagauguagcc

SEQ ID NO: 688716 - RNA, 19 nt, Artificial Sequence
  Description of Artificial Sequence: Synthetic oligonucleotide
  Sense strand starting at position 1132 of SEQ ID NO: 586056
gcagacuggcauuauauaa

SEQ ID NO: 688717 - RNA, 19 nt, Artificial Sequence
  Description of Artificial Sequence: Synthetic oligonucleotide
  Antisense strand to SEQ ID NO: 688716
uuauauaaugccagucugc

SEQ ID NO: 688718 - RNA, 19 nt, Artificial Sequence
  Description of Artificial Sequence: Synthetic oligonucleotide
  Sense strand starting at position 2807 of SEQ ID NO: 586056
ucuggugaugcccgagaaa

SEQ ID NO: 688719 - RNA, 19 nt, Artificial Sequence
  Description of Artificial Sequence: Synthetic oligonucleotide
  Antisense strand to SEQ ID NO: 688718
uuucucgggcaucaccaga

SEQ ID NO: 688720 - RNA, 19 nt, Artificial Sequence
  Description of Artificial Sequence: Synthetic oligonucleotide
  Sense strand starting at position 2984 of SEQ ID NO: 586056
gccucccucccggaguaua

SEQ ID NO: 688721 - RNA, 19 nt, Artificial Sequence
  Description of Artificial Sequence: Synthetic oligonucleotide
  Antisense strand to SEQ ID NO: 688720
uauacuccgggagggaggc

SEQ ID NO: 688722 - RNA, 19 nt, Artificial Sequence
  Description of Artificial Sequence: Synthetic oligonucleotide
  Sense strand starting at position 3568 of SEQ ID NO: 586056
gcaguuugcacguuacaca

SEQ ID NO: 688723 - RNA, 19 nt, Artificial Sequence
  Description of Artificial Sequence: Synthetic oligonucleotide
  Antisense strand to SEQ ID NO: 688722
uguguaacgugcaaacugc

SEQ ID NO: 688724 - RNA, 19 nt, Artificial Sequence
  Description of Artificial Sequence: Synthetic oligonucleotide
  Sense strand starting at position 3569 of SEQ ID NO: 586056
caguuugcacguuacacau

SEQ ID NO: 688725 - RNA, 19 nt, Artificial Sequence
  Description of Artificial Sequence: Synthetic oligonucleotide
  Antisense strand to SEQ ID NO: 688724
auguguaacgugcaaacug

SEQ ID NO: 688726 - RNA, 19 nt, Artificial Sequence
  Description of Artificial Sequence: Synthetic oligonucleotide
  Sense strand starting at position 3582 of SEQ ID NO: 586056
acacauguucuuugucuaa

SEQ ID NO: 688727 - RNA, 19 nt, Artificial Sequence
  Description of Artificial Sequence: Synthetic oligonucleotide
  Antisense strand to SEQ ID NO: 688726
uuagacaaagaacaugugu

SEQ ID NO: 688728 - RNA, 19 nt, Artificial Sequence
  Description of Artificial Sequence: Synthetic oligonucleotide
  Sense strand starting at position 3584 of SEQ ID NO: 586056
acauguucuuugucuaauc

SEQ ID NO: 688729 - RNA, 19 nt, Artificial Sequence
  Description of Artificial Sequence: Synthetic oligonucleotide
  Antisense strand to SEQ ID NO: 688728
gauuagacaaagaacaugu

SEQ ID NO: 688730 - RNA, 19 nt, Artificial Sequence
  Description of Artificial Sequence: Synthetic oligonucleotide
  Sense strand starting at position 3586 of SEQ ID NO: 586056
auguucuuugucuaaucuu

SEQ ID NO: 688731 - RNA, 19 nt, Artificial Sequence
  Description of Artificial Sequence: Synthetic oligonucleotide
  Antisense strand to SEQ ID NO: 688730
aagauuagacaaagaacau

SEQ ID NO: 688732 - RNA, 19 nt, Artificial Sequence
  Description of Artificial Sequence: Synthetic oligonucleotide
  Sense strand starting at position 3628 of SEQ ID NO: 586056
uuguauccagcuuagagaa

SEQ ID NO: 688733 - RNA, 19 nt, Artificial Sequence
  Description of Artificial Sequence: Synthetic oligonucleotide
  Antisense strand to SEQ ID NO: 688732
uucucuaagcuggauacaa

SEQ ID NO: 688734 - RNA, 19 nt, Artificial Sequence
  Description of Artificial Sequence: Synthetic oligonucleotide
  Sense strand starting at position 3712 of SEQ ID NO: 586056
cuaaguaugucccuuacaa

SEQ ID NO: 688735 - RNA, 19 nt, Artificial Sequence
  Description of Artificial Sequence: Synthetic oligonucleotide
  Antisense strand to SEQ ID NO: 688734
uuguaagggacauacuuag

SEQ ID NO: 688736 - RNA, 19 nt, Artificial Sequence
  Description of Artificial Sequence: Synthetic oligonucleotide
  Sense strand starting at position 3738 of SEQ ID NO: 586056
cucagugaggagugucgaa

SEQ ID NO: 688737 - RNA, 19 nt, Artificial Sequence
  Description of Artificial Sequence: Synthetic oligonucleotide
  Antisense strand to SEQ ID NO: 688736
uucgacacuccucacugag

SEQ ID NO: 688738 - RNA, 19 nt, Artificial Sequence
  Description of Artificial Sequence: Synthetic oligonucleotide
  Sense strand starting at position 3764 of SEQ ID NO: 586056
gagauuggcuuauccaaga

SEQ ID NO: 688739 - RNA, 19 nt, Artificial Sequence
  Description of Artificial Sequence: Synthetic oligonucleotide
  Antisense strand to SEQ ID NO: 688738
ucuuggauaagccaaucuc

SEQ ID NO: 688740 - RNA, 19 nt, Artificial Sequence
  Description of Artificial Sequence: Synthetic oligonucleotide
  Sense strand starting at position 3828 of SEQ ID NO: 586056
gcaauuagaguaugacaug

SEQ ID NO: 688741 - RNA, 19 nt, Artificial Sequence
  Description of Artificial Sequence: Synthetic oligonucleotide
  Antisense strand to SEQ ID NO: 688740
caugucauacucuaauugc

SEQ ID NO: 688742 - RNA, 19 nt, Artificial Sequence
  Description of Artificial Sequence: Synthetic oligonucleotide
  Sense strand starting at position 3844 of SEQ ID NO: 586056
augcaauuacaaggaguuu

SEQ ID NO: 688743 - RNA, 19 nt, Artificial Sequence
  Description of Artificial Sequence: Synthetic oligonucleotide
  Antisense strand to SEQ ID NO: 688742
aaacuccuuguaauugcau

SEQ ID NO: 688744 - RNA, 19 nt, Artificial Sequence
  Description of Artificial Sequence: Synthetic oligonucleotide
  Sense strand starting at position 3901 of SEQ ID NO: 586056
cgguuagagucuagggaga

SEQ ID NO: 688745 - RNA, 19 nt, Artificial Sequence
  Description of Artificial Sequence: Synthetic oligonucleotide
  Antisense strand to SEQ ID NO: 688744
ucucccuagacucuaaccg

SEQ ID NO: 688746 - RNA, 19 nt, Artificial Sequence
  Description of Artificial Sequence: Synthetic oligonucleotide
  Sense strand starting at position 3922 of SEQ ID NO: 586056
ggaucuuaagcacacgaua

SEQ ID NO: 688747 - RNA, 19 nt, Artificial Sequence
  Description of Artificial Sequence: Synthetic oligonucleotide
  Antisense strand to SEQ ID NO: 688746
uaucgugugcuuaagaucc

SEQ ID NO: 688748 - RNA, 19 nt, Artificial Sequence
  Description of Artificial Sequence: Synthetic oligonucleotide
  Sense strand starting at position 3925 of SEQ ID NO: 586056
ucuuaagcacacgauaaua

SEQ ID NO: 688749 - RNA, 19 nt, Artificial Sequence
  Description of Artificial Sequence: Synthetic oligonucleotide
  Antisense strand to SEQ ID NO: 688748
uauuaucgugugcuuaaga

SEQ ID NO: 688750 - RNA, 19 nt, Artificial Sequence
  Description of Artificial Sequence: Synthetic oligonucleotide
  Sense strand starting at position 3982 of SEQ ID NO: 586056
agcauauuacagggacaau

SEQ ID NO: 688751 - RNA, 19 nt, Artificial Sequence
  Description of Artificial Sequence: Synthetic oligonucleotide
  Antisense strand to SEQ ID NO: 688750
auugucccuguaauaugcu

SEQ ID NO: 688752 - RNA, 19 nt, Artificial Sequence
  Description of Artificial Sequence: Synthetic oligonucleotide
  Sense strand starting at position 43 of SEQ ID NO: 586057
augagauaaugguuccuac

SEQ ID NO: 688753 - RNA, 19 nt, Artificial Sequence
  Description of Artificial Sequence: Synthetic oligonucleotide
  Antisense strand to SEQ ID NO: 688752
guaggaaccauuaucucau

SEQ ID NO: 688754 - RNA, 19 nt, Artificial Sequence
  Description of Artificial Sequence: Synthetic oligonucleotide
  Sense strand starting at position 67 of SEQ ID NO: 586057
aagauucuugugggaauua

SEQ ID NO: 688755 - RNA, 19 nt, Artificial Sequence
  Description of Artificial Sequence: Synthetic oligonucleotide
  Antisense strand to SEQ ID NO: 688754
uaauucccacaagaaucuu

SEQ ID NO: 688756 - RNA, 19 nt, Artificial Sequence
  Description of Artificial Sequence: Synthetic oligonucleotide
  Sense strand starting at position 207 of SEQ ID NO: 586057
guccuuccacagggaaauu

SEQ ID NO: 688757 - RNA, 19 nt, Artificial Sequence
  Description of Artificial Sequence: Synthetic oligonucleotide
  Antisense strand to SEQ ID NO: 688756
aauuucccuguggaaggac

SEQ ID NO: 688758 - RNA, 19 nt, Artificial Sequence
  Description of Artificial Sequence: Synthetic oligonucleotide
  Sense strand starting at position 268 of SEQ ID NO: 586057
uugucauaaccuugagaua

SEQ ID NO: 688759 - RNA, 19 nt, Artificial Sequence
  Description of Artificial Sequence: Synthetic oligonucleotide
  Antisense strand to SEQ ID NO: 688758
uaucucaagguuaugacaa

SEQ ID NO: 688760 - RNA, 19 nt, Artificial Sequence
  Description of Artificial Sequence: Synthetic oligonucleotide
  Sense strand starting at position 287 of SEQ ID NO: 586057
cgacaacuuccacagaagu

SEQ ID NO: 688761 - RNA, 19 nt, Artificial Sequence
  Description of Artificial Sequence: Synthetic oligonucleotide
  Antisense strand to SEQ ID NO: 688760
acuucuguggaaguugucg

SEQ ID NO: 688762 - RNA, 19 nt, Artificial Sequence
  Description of Artificial Sequence: Synthetic oligonucleotide
  Sense strand starting at position 565 of SEQ ID NO: 586057
gcuuucuuacugcagaacu

SEQ ID NO: 688763 - RNA, 19 nt, Artificial Sequence
  Description of Artificial Sequence: Synthetic oligonucleotide
  Antisense strand to SEQ ID NO: 688762
aguucugcaguaagaaagc

SEQ ID NO: 688764 - RNA, 19 nt, Artificial Sequence
  Description of Artificial Sequence: Synthetic oligonucleotide
  Sense strand starting at position 581 of SEQ ID NO: 586057
acuacagucaugugguaug

SEQ ID NO: 688765 - RNA, 19 nt, Artificial Sequence
  Description of Artificial Sequence: Synthetic oligonucleotide
  Antisense strand to SEQ ID NO: 688764
cauaccacaugacuguagu

SEQ ID NO: 688766 - RNA, 19 nt, Artificial Sequence
  Description of Artificial Sequence: Synthetic oligonucleotide
  Sense strand starting at position 586 of SEQ ID NO: 586057
agucaugugguaugaugga

SEQ ID NO: 688767 - RNA, 19 nt, Artificial Sequence
  Description of Artificial Sequence: Synthetic oligonucleotide
  Antisense strand to SEQ ID NO: 688766
uccaucauaccacaugacu

SEQ ID NO: 688768 - RNA, 19 nt, Artificial Sequence
  Description of Artificial Sequence: Synthetic oligonucleotide
  Sense strand starting at position 616 of SEQ ID NO: 586057
gguggcaauccaugaagcu

SEQ ID NO: 688769 - RNA, 19 nt, Artificial Sequence
  Description of Artificial Sequence: Synthetic oligonucleotide
  Antisense strand to SEQ ID NO: 688768
agcuucauggauugccacc

SEQ ID NO: 688770 - RNA, 19 nt, Artificial Sequence
  Description of Artificial Sequence: Synthetic oligonucleotide
  Sense strand starting at position 617 of SEQ ID NO: 586057
guggcaauccaugaagcuu

SEQ ID NO: 688771 - RNA, 19 nt, Artificial Sequence
  Description of Artificial Sequence: Synthetic oligonucleotide
  Antisense strand to SEQ ID NO: 688770
aagcuucauggauugccac

SEQ ID NO: 688772 - RNA, 19 nt, Artificial Sequence
  Description of Artificial Sequence: Synthetic oligonucleotide
  Sense strand starting at position 987 of SEQ ID NO: 586057
ggugacgugugaauagcuu

SEQ ID NO: 688773 - RNA, 19 nt, Artificial Sequence
  Description of Artificial Sequence: Synthetic oligonucleotide
  Antisense strand to SEQ ID NO: 688772
aagcuauucacacgucacc

SEQ ID NO: 688774 - RNA, 19 nt, Artificial Sequence
  Description of Artificial Sequence: Synthetic oligonucleotide
  Sense strand starting at position 2185 of SEQ ID NO: 586057
cuucguuccgcgccucaaa

SEQ ID NO: 688775 - RNA, 19 nt, Artificial Sequence
  Description of Artificial Sequence: Synthetic oligonucleotide
  Antisense strand to SEQ ID NO: 688774
uuugaggcgcggaacgaag

SEQ ID NO: 688776 - RNA, 19 nt, Artificial Sequence
  Description of Artificial Sequence: Synthetic oligonucleotide
  Sense strand starting at position 2333 of SEQ ID NO: 586057
gggagcagguuucugagua

SEQ ID NO: 688777 - RNA, 19 nt, Artificial Sequence
  Description of Artificial Sequence: Synthetic oligonucleotide
  Antisense strand to SEQ ID NO: 688776
uacucagaaaccugcuccc

SEQ ID NO: 688778 - RNA, 19 nt, Artificial Sequence
  Description of Artificial Sequence: Synthetic oligonucleotide
  Sense strand starting at position 2410 of SEQ ID NO: 586057
ggagcagauuaguugugua

SEQ ID NO: 688779 - RNA, 19 nt, Artificial Sequence
  Description of Artificial Sequence: Synthetic oligonucleotide
  Antisense strand to SEQ ID NO: 688778
uacacaacuaaucugcucc

SEQ ID NO: 688780 - RNA, 19 nt, Artificial Sequence
  Description of Artificial Sequence: Synthetic oligonucleotide
  Sense strand starting at position 2415 of SEQ ID NO: 586057
agauuaguuguguagggua

SEQ ID NO: 688781 - RNA, 19 nt, Artificial Sequence
  Description of Artificial Sequence: Synthetic oligonucleotide
  Antisense strand to SEQ ID NO: 688780
uacccuacacaacuaaucu

SEQ ID NO: 688782 - RNA, 19 nt, Artificial Sequence
  Description of Artificial Sequence: Synthetic oligonucleotide
  Sense strand starting at position 2417 of SEQ ID NO: 586057
auuaguuguguaggguaaa

SEQ ID NO: 688783 - RNA, 19 nt, Artificial Sequence
  Description of Artificial Sequence: Synthetic oligonucleotide
  Antisense strand to SEQ ID NO: 688782
uuuacccuacacaacuaau

SEQ ID NO: 688784 - RNA, 19 nt, Artificial Sequence
  Description of Artificial Sequence: Synthetic oligonucleotide
  Sense strand starting at position 2694 of SEQ ID NO: 586057
guauacuggucucuugaca

SEQ ID NO: 688785 - RNA, 19 nt, Artificial Sequence
  Description of Artificial Sequence: Synthetic oligonucleotide
  Antisense strand to SEQ ID NO: 688784
ugucaagagaccaguauac

SEQ ID NO: 688786 - RNA, 19 nt, Artificial Sequence
  Description of Artificial Sequence: Synthetic oligonucleotide
  Sense strand starting at position 2702 of SEQ ID NO: 586057
gucucuugacaggaacuuu

SEQ ID NO: 688787 - RNA, 19 nt, Artificial Sequence
  Description of Artificial Sequence: Synthetic oligonucleotide
  Antisense strand to SEQ ID NO: 688786
aaaguuccugucaagagac

SEQ ID NO: 688788 - RNA, 19 nt, Artificial Sequence
  Description of Artificial Sequence: Synthetic oligonucleotide
  Sense strand starting at position 2790 of SEQ ID NO: 586057
gggaguuccuugucuccac

SEQ ID NO: 688789 - RNA, 19 nt, Artificial Sequence
  Description of Artificial Sequence: Synthetic oligonucleotide
  Antisense strand to SEQ ID NO: 688788
guggagacaaggaacuccc

SEQ ID NO: 688790 - RNA, 19 nt, Artificial Sequence
  Description of Artificial Sequence: Synthetic oligonucleotide
  Sense strand starting at position 2923 of SEQ ID NO: 586057
gggagcuguagcugaauca

SEQ ID NO: 688791 - RNA, 19 nt, Artificial Sequence
  Description of Artificial Sequence: Synthetic oligonucleotide
  Antisense strand to SEQ ID NO: 688790
ugauucagcuacagcuccc

SEQ ID NO: 688792 - RNA, 19 nt, Artificial Sequence
  Description of Artificial Sequence: Synthetic oligonucleotide
  Sense strand starting at position 2951 of SEQ ID NO: 586057
auugguaagugaccaaaga

SEQ ID NO: 688793 - RNA, 19 nt, Artificial Sequence
  Description of Artificial Sequence: Synthetic oligonucleotide
  Antisense strand to SEQ ID NO: 688792
ucuuuggucacuuaccaau

SEQ ID NO: 688794 - RNA, 19 nt, Artificial Sequence
  Description of Artificial Sequence: Synthetic oligonucleotide
  Sense strand starting at position 2987 of SEQ ID NO: 586057
aaaugaguccuuuaacgau

SEQ ID NO: 688795 - RNA, 19 nt, Artificial Sequence
  Description of Artificial Sequence: Synthetic oligonucleotide
  Antisense strand to SEQ ID NO: 688794
aucguuaaaggacucauuu

SEQ ID NO: 688796 - RNA, 19 nt, Artificial Sequence
  Description of Artificial Sequence: Synthetic oligonucleotide
  Sense strand starting at position 2999 of SEQ ID NO: 586057
uaacgauccuaguccuuga

SEQ ID NO: 688797 - RNA, 19 nt, Artificial Sequence
  Description of Artificial Sequence: Synthetic oligonucleotide
  Antisense strand to SEQ ID NO: 688796
ucaaggacuaggaucguua

SEQ ID NO: 688798 - RNA, 19 nt, Artificial Sequence
  Description of Artificial Sequence: Synthetic oligonucleotide
  Sense strand starting at position 3010 of SEQ ID NO: 586057
guccuugauccugagcuca

SEQ ID NO: 688799 - RNA, 19 nt, Artificial Sequence
  Description of Artificial Sequence: Synthetic oligonucleotide
  Antisense strand to SEQ ID NO: 688798
ugagcucaggaucaaggac

SEQ ID NO: 688800 - RNA, 19 nt, Artificial Sequence
  Description of Artificial Sequence: Synthetic oligonucleotide
  Sense strand starting at position 3012 of SEQ ID NO: 586057
ccuugauccugagcucauu

SEQ ID NO: 688801 - RNA, 19 nt, Artificial Sequence
  Description of Artificial Sequence: Synthetic oligonucleotide
  Antisense strand to SEQ ID NO: 688800
aaugagcucaggaucaagg

SEQ ID NO: 688802 - RNA, 19 nt, Artificial Sequence
  Description of Artificial Sequence: Synthetic oligonucleotide
  Sense strand starting at position 3026 of SEQ ID NO: 586057
ucauucugaucuccaguua

SEQ ID NO: 688803 - RNA, 19 nt, Artificial Sequence
  Description of Artificial Sequence: Synthetic oligonucleotide
  Antisense strand to SEQ ID NO: 688802
uaacuggagaucagaauga

SEQ ID NO: 688804 - RNA, 19 nt, Artificial Sequence
  Description of Artificial Sequence: Synthetic oligonucleotide
  Sense strand starting at position 3034 of SEQ ID NO: 586057
aucuccaguuagucaugaa

SEQ ID NO: 688805 - RNA, 19 nt, Artificial Sequence
  Description of Artificial Sequence: Synthetic oligonucleotide
  Antisense strand to SEQ ID NO: 688804
uucaugacuaacuggagau

SEQ ID NO: 688806 - RNA, 19 nt, Artificial Sequence
  Description of Artificial Sequence: Synthetic oligonucleotide
  Sense strand starting at position 3113 of SEQ ID NO: 586057
gagacccaucgcugaggaa

SEQ ID NO: 688807 - RNA, 19 nt, Artificial Sequence
  Description of Artificial Sequence: Synthetic oligonucleotide
  Antisense strand to SEQ ID NO: 688806
uuccucagcgaugggucuc

SEQ ID NO: 688808 - RNA, 19 nt, Artificial Sequence
  Description of Artificial Sequence: Synthetic oligonucleotide
  Sense strand starting at position 3173 of SEQ ID NO: 586057
gccugucggguauaucaga

SEQ ID NO: 688809 - RNA, 19 nt, Artificial Sequence
  Description of Artificial Sequence: Synthetic oligonucleotide
  Antisense strand to SEQ ID NO: 688808
ucugauauacccgacaggc

SEQ ID NO: 688810 - RNA, 19 nt, Artificial Sequence
  Description of Artificial Sequence: Synthetic oligonucleotide
  Sense strand starting at position 3234 of SEQ ID NO: 586057
guugcuaucuuauuucuuu

SEQ ID NO: 688811 - RNA, 19 nt, Artificial Sequence
  Description of Artificial Sequence: Synthetic oligonucleotide
  Antisense strand to SEQ ID NO: 688810
aaagaaauaagauagcaac

SEQ ID NO: 688812 - RNA, 19 nt, Artificial Sequence
  Description of Artificial Sequence: Synthetic oligonucleotide
  Sense strand starting at position 3263 of SEQ ID NO: 586057
ucacauuucuguuugugca

SEQ ID NO: 688813 - RNA, 19 nt, Artificial Sequence
  Description of Artificial Sequence: Synthetic oligonucleotide
  Antisense strand to SEQ ID NO: 688812
ugcacaaacagaaauguga

SEQ ID NO: 688814 - RNA, 19 nt, Artificial Sequence
  Description of Artificial Sequence: Synthetic oligonucleotide
  Sense strand starting at position 3265 of SEQ ID NO: 586057
acauuucuguuugugcaua

SEQ ID NO: 688815 - RNA, 19 nt, Artificial Sequence
  Description of Artificial Sequence: Synthetic oligonucleotide
  Antisense strand to SEQ ID NO: 688814
uaugcacaaacagaaaugu

SEQ ID NO: 688816 - RNA, 19 nt, Artificial Sequence
  Description of Artificial Sequence: Synthetic oligonucleotide
  Sense strand starting at position 3363 of SEQ ID NO: 586057
gcuguugauggugaaguua

SEQ ID NO: 688817 - RNA, 19 nt, Artificial Sequence
  Description of Artificial Sequence: Synthetic oligonucleotide
  Antisense strand to SEQ ID NO: 688816
uaacuucaccaucaacagc

SEQ ID NO: 688818 - RNA, 19 nt, Artificial Sequence
  Description of Artificial Sequence: Synthetic oligonucleotide
  Sense strand starting at position 3372 of SEQ ID NO: 586057
ggugaaguuaaugauugca

SEQ ID NO: 688819 - RNA, 19 nt, Artificial Sequence
  Description of Artificial Sequence: Synthetic oligonucleotide
  Antisense strand to SEQ ID NO: 688818
ugcaaucauuaacuucacc

SEQ ID NO: 688820 - RNA, 19 nt, Artificial Sequence
  Description of Artificial Sequence: Synthetic oligonucleotide
  Sense strand starting at position 3374 of SEQ ID NO: 586057
ugaaguuaaugauugcaaa

SEQ ID NO: 688821 - RNA, 19 nt, Artificial Sequence
  Description of Artificial Sequence: Synthetic oligonucleotide
  Antisense strand to SEQ ID NO: 688820
uuugcaaucauuaacuuca

SEQ ID NO: 688822 - RNA, 19 nt, Artificial Sequence
  Description of Artificial Sequence: Synthetic oligonucleotide
  Sense strand starting at position 3429 of SEQ ID NO: 586057
agugcugauuuauuaugca

SEQ ID NO: 688823 - RNA, 19 nt, Artificial Sequence
  Description of Artificial Sequence: Synthetic oligonucleotide
  Antisense strand to SEQ ID NO: 688822
ugcauaauaaaucagcacu

SEQ ID NO: 688824 - RNA, 19 nt, Artificial Sequence
  Description of Artificial Sequence: Synthetic oligonucleotide
  Sense strand starting at position 3932 of SEQ ID NO: 586057
acaugcgugagauacuuaa

SEQ ID NO: 688825 - RNA, 19 nt, Artificial Sequence
  Description of Artificial Sequence: Synthetic oligonucleotide
  Antisense strand to SEQ ID NO: 688824
uuaaguaucucacgcaugu

SEQ ID NO: 688826 - RNA, 19 nt, Artificial Sequence
  Description of Artificial Sequence: Synthetic oligonucleotide
  Sense strand starting at position 3936 of SEQ ID NO: 586057
gcgugagauacuuaacagc

SEQ ID NO: 688827 - RNA, 19 nt, Artificial Sequence
  Description of Artificial Sequence: Synthetic oligonucleotide
  Antisense strand to SEQ ID NO: 688826
gcuguuaaguaucucacgc

SEQ ID NO: 688828 - RNA, 19 nt, Artificial Sequence
  Description of Artificial Sequence: Synthetic oligonucleotide
  Sense strand starting at position 3952 of SEQ ID NO: 586057
agccuuugaguuuaacaaa

SEQ ID NO: 688829 - RNA, 19 nt, Artificial Sequence
  Description of Artificial Sequence: Synthetic oligonucleotide
  Antisense strand to SEQ ID NO: 688828
uuuguuaaacucaaaggcu

SEQ ID NO: 688830 - RNA, 19 nt, Artificial Sequence
  Description of Artificial Sequence: Synthetic oligonucleotide
  Sense strand starting at position 3979 of SEQ ID NO: 586057
gggauuaucucucuuggca

SEQ ID NO: 688831 - RNA, 19 nt, Artificial Sequence
  Description of Artificial Sequence: Synthetic oligonucleotide
  Antisense strand to SEQ ID NO: 688830
ugccaagagagauaauccc

SEQ ID NO: 688832 - RNA, 19 nt, Artificial Sequence
  Description of Artificial Sequence: Synthetic oligonucleotide
  Sense strand starting at position 219 of SEQ ID NO: 586058
uggcaauucuuaccugaaa

SEQ ID NO: 688833 - RNA, 19 nt, Artificial Sequence
  Description of Artificial Sequence: Synthetic oligonucleotide
  Antisense strand to SEQ ID NO: 688832
uuucagguaagaauugcca

SEQ ID NO: 688834 - RNA, 19 nt, Artificial Sequence
  Description of Artificial Sequence: Synthetic oligonucleotide
  Sense strand starting at position 220 of SEQ ID NO: 586058
ggcaauucuuaccugaaag

SEQ ID NO: 688835 - RNA, 19 nt, Artificial Sequence
  Description of Artificial Sequence: Synthetic oligonucleotide
  Antisense strand to SEQ ID NO: 688834
cuuucagguaagaauugcc

SEQ ID NO: 688836 - RNA, 19 nt, Artificial Sequence
  Description of Artificial Sequence: Synthetic oligonucleotide
  Sense strand starting at position 246 of SEQ ID NO: 586058
guguuugggagauggacaa

SEQ ID NO: 688837 - RNA, 19 nt, Artificial Sequence
  Description of Artificial Sequence: Synthetic oligonucleotide
  Antisense strand to SEQ ID NO: 688836
uuguccaucucccaaacac

SEQ ID NO: 688838 - RNA, 19 nt, Artificial Sequence
  Description of Artificial Sequence: Synthetic oligonucleotide
  Sense strand starting at position 310 of SEQ ID NO: 586058
cuggcuuaugcagaaagau

SEQ ID NO: 688839 - RNA, 19 nt, Artificial Sequence
  Description of Artificial Sequence: Synthetic oligonucleotide
  Antisense strand to SEQ ID NO: 688838
aucuuucugcauaagccag

SEQ ID NO: 688840 - RNA, 19 nt, Artificial Sequence
  Description of Artificial Sequence: Synthetic oligonucleotide
  Sense strand starting at position 322 of SEQ ID NO: 586058
gaaagauucuggcugaugu

SEQ ID NO: 688841 - RNA, 19 nt, Artificial Sequence
  Description of Artificial Sequence: Synthetic oligonucleotide
  Antisense strand to SEQ ID NO: 688840
acaucagccagaaucuuuc

SEQ ID NO: 688842 - RNA, 19 nt, Artificial Sequence
  Description of Artificial Sequence: Synthetic oligonucleotide
  Sense strand starting at position 330 of SEQ ID NO: 586058
cuggcugaugugugggaau

SEQ ID NO: 688843 - RNA, 19 nt, Artificial Sequence
  Description of Artificial Sequence: Synthetic oligonucleotide
  Antisense strand to SEQ ID NO: 688842
auucccacacaucagccag

SEQ ID NO: 688844 - RNA, 19 nt, Artificial Sequence
  Description of Artificial Sequence: Synthetic oligonucleotide
  Sense strand starting at position 332 of SEQ ID NO: 586058
ggcugaugugugggaauga

SEQ ID NO: 688845 - RNA, 19 nt, Artificial Sequence
  Description of Artificial Sequence: Synthetic oligonucleotide
  Antisense strand to SEQ ID NO: 688844
ucauucccacacaucagcc

SEQ ID NO: 688846 - RNA, 19 nt, Artificial Sequence
  Description of Artificial Sequence: Synthetic oligonucleotide
  Sense strand starting at position 416 of SEQ ID NO: 586058
guagccuuuguuuaagaac

SEQ ID NO: 688847 - RNA, 19 nt, Artificial Sequence
  Description of Artificial Sequence: Synthetic oligonucleotide
  Antisense strand to SEQ ID NO: 688846
guucuuaaacaaaggcuac

SEQ ID NO: 688848 - RNA, 19 nt, Artificial Sequence
  Description of Artificial Sequence: Synthetic oligonucleotide
  Sense strand starting at position 499 of SEQ ID NO: 586058
gguucucaggagugacuua

SEQ ID NO: 688849 - RNA, 19 nt, Artificial Sequence
  Description of Artificial Sequence: Synthetic oligonucleotide
  Antisense strand to SEQ ID NO: 688848
uaagucacuccugagaacc

SEQ ID NO: 688850 - RNA, 19 nt, Artificial Sequence
  Description of Artificial Sequence: Synthetic oligonucleotide
  Sense strand starting at position 506 of SEQ ID NO: 586058
aggagugacuuaguaaaua

SEQ ID NO: 688851 - RNA, 19 nt, Artificial Sequence
  Description of Artificial Sequence: Synthetic oligonucleotide
  Antisense strand to SEQ ID NO: 688850
uauuuacuaagucacuccu

SEQ ID NO: 688852 - RNA, 19 nt, Artificial Sequence
  Description of Artificial Sequence: Synthetic oligonucleotide
  Sense strand starting at position 559 of SEQ ID NO: 586058
agaacacugucaucauguu

SEQ ID NO: 688853 - RNA, 19 nt, Artificial Sequence
  Description of Artificial Sequence: Synthetic oligonucleotide
  Antisense strand to SEQ ID NO: 688852
aacaugaugacaguguucu

SEQ ID NO: 688854 - RNA, 19 nt, Artificial Sequence
  Description of Artificial Sequence: Synthetic oligonucleotide
  Sense strand starting at position 629 of SEQ ID NO: 586058
ugagcuuagugacucagau

SEQ ID NO: 688855 - RNA, 19 nt, Artificial Sequence
  Description of Artificial Sequence: Synthetic oligonucleotide
  Antisense strand to SEQ ID NO: 688854
aucugagucacuaagcuca

SEQ ID NO: 688856 - RNA, 19 nt, Artificial Sequence
  Description of Artificial Sequence: Synthetic oligonucleotide
  Sense strand starting at position 680 of SEQ ID NO: 586058
cagugaaacuaauuguaag

SEQ ID NO: 688857 - RNA, 19 nt, Artificial Sequence
  Description of Artificial Sequence: Synthetic oligonucleotide
  Antisense strand to SEQ ID NO: 688856
cuuacaauuaguuucacug

SEQ ID NO: 688858 - RNA, 19 nt, Artificial Sequence
  Description of Artificial Sequence: Synthetic oligonucleotide
  Sense strand starting at position 770 of SEQ ID NO: 586058
gccucuuacccacagaugu

SEQ ID NO: 688859 - RNA, 19 nt, Artificial Sequence
  Description of Artificial Sequence: Synthetic oligonucleotide
  Antisense strand to SEQ ID NO: 688858
acaucuguggguaagaggc

SEQ ID NO: 688860 - RNA, 19 nt, Artificial Sequence
  Description of Artificial Sequence: Synthetic oligonucleotide
  Sense strand starting at position 784 of SEQ ID NO: 586058
gauguuagauucuuaaagg

SEQ ID NO: 688861 - RNA, 19 nt, Artificial Sequence
  Description of Artificial Sequence: Synthetic oligonucleotide
  Antisense strand to SEQ ID NO: 688860
ccuuuaagaaucuaacauc

SEQ ID NO: 688862 - RNA, 19 nt, Artificial Sequence
  Description of Artificial Sequence: Synthetic oligonucleotide
  Sense strand starting at position 794 of SEQ ID NO: 586058
ucuuaaagguuuccgacau

SEQ ID NO: 688863 - RNA, 19 nt, Artificial Sequence
  Description of Artificial Sequence: Synthetic oligonucleotide
  Antisense strand to SEQ ID NO: 688862
augucggaaaccuuuaaga

SEQ ID NO: 688864 - RNA, 19 nt, Artificial Sequence
  Description of Artificial Sequence: Synthetic oligonucleotide
  Sense strand starting at position 855 of SEQ ID NO: 586058
ccacucuuccugggugaaa

SEQ ID NO: 688865 - RNA, 19 nt, Artificial Sequence
  Description of Artificial Sequence: Synthetic oligonucleotide
  Antisense strand to SEQ ID NO: 688864
uuucacccaggaagagugg

SEQ ID NO: 688866 - RNA, 19 nt, Artificial Sequence
  Description of Artificial Sequence: Synthetic oligonucleotide
  Sense strand starting at position 856 of SEQ ID NO: 586058
cacucuuccugggugaaau

SEQ ID NO: 688867 - RNA, 19 nt, Artificial Sequence
  Description of Artificial Sequence: Synthetic oligonucleotide
  Antisense strand to SEQ ID NO: 688866
auuucacccaggaagagug

SEQ ID NO: 688868 - RNA, 19 nt, Artificial Sequence
  Description of Artificial Sequence: Synthetic oligonucleotide
  Sense strand starting at position 857 of SEQ ID NO: 586058
acucuuccugggugaaauu

SEQ ID NO: 688869 - RNA, 19 nt, Artificial Sequence
  Description of Artificial Sequence: Synthetic oligonucleotide
  Antisense strand to SEQ ID NO: 688868
aauuucacccaggaagagu

SEQ ID NO: 688870 - RNA, 19 nt, Artificial Sequence
  Description of Artificial Sequence: Synthetic oligonucleotide
  Sense strand starting at position 1074 of SEQ ID NO: 586058
gcaacugugaaguauagaa

SEQ ID NO: 688871 - RNA, 19 nt, Artificial Sequence
  Description of Artificial Sequence: Synthetic oligonucleotide
  Antisense strand to SEQ ID NO: 688870
uucuauacuucacaguugc

SEQ ID NO: 688872 - RNA, 19 nt, Artificial Sequence
  Description of Artificial Sequence: Synthetic oligonucleotide
  Sense strand starting at position 1470 of SEQ ID NO: 586058
ugcagauaugcagaauaua

SEQ ID NO: 688873 - RNA, 19 nt, Artificial Sequence
  Description of Artificial Sequence: Synthetic oligonucleotide
  Antisense strand to SEQ ID NO: 688872
uauauucugcauaucugca

SEQ ID NO: 688874 - RNA, 19 nt, Artificial Sequence
  Description of Artificial Sequence: Synthetic oligonucleotide
  Sense strand starting at position 1621 of SEQ ID NO: 586058
cuggaacaaucugagauuu

SEQ ID NO: 688875 - RNA, 19 nt, Artificial Sequence
  Description of Artificial Sequence: Synthetic oligonucleotide
  Antisense strand to SEQ ID NO: 688874
aaaucucagauuguuccag

SEQ ID NO: 688876 - RNA, 19 nt, Artificial Sequence
  Description of Artificial Sequence: Synthetic oligonucleotide
  Sense strand starting at position 2325 of SEQ ID NO: 586058
gcucucagcaaugagguaa

SEQ ID NO: 688877 - RNA, 19 nt, Artificial Sequence
  Description of Artificial Sequence: Synthetic oligonucleotide
  Antisense strand to SEQ ID NO: 688876
uuaccucauugcugagagc

SEQ ID NO: 688878 - RNA, 19 nt, Artificial Sequence
  Description of Artificial Sequence: Synthetic oligonucleotide
  Sense strand starting at position 2451 of SEQ ID NO: 586058
auguuagacucaguaccau

SEQ ID NO: 688879 - RNA, 19 nt, Artificial Sequence
  Description of Artificial Sequence: Synthetic oligonucleotide
  Antisense strand to SEQ ID NO: 688878
augguacugagucuaacau

SEQ ID NO: 688880 - RNA, 19 nt, Artificial Sequence
  Description of Artificial Sequence: Synthetic oligonucleotide
  Sense strand starting at position 2509 of SEQ ID NO: 586058
cacagaucaccucgaguga

SEQ ID NO: 688881 - RNA, 19 nt, Artificial Sequence
  Description of Artificial Sequence: Synthetic oligonucleotide
  Antisense strand to SEQ ID NO: 688880
ucacucgaggugaucugug

SEQ ID NO: 688882 - RNA, 19 nt, Artificial Sequence
  Description of Artificial Sequence: Synthetic oligonucleotide
  Sense strand starting at position 2522 of SEQ ID NO: 586058
gagugagucucuuuauucu

SEQ ID NO: 688883 - RNA, 19 nt, Artificial Sequence
  Description of Artificial Sequence: Synthetic oligonucleotide
  Antisense strand to SEQ ID NO: 688882
agaauaaagagacucacuc

SEQ ID NO: 688884 - RNA, 19 nt, Artificial Sequence
  Description of Artificial Sequence: Synthetic oligonucleotide
  Sense strand starting at position 2557 of SEQ ID NO: 586058
ucagaaaugugagaauaaa

SEQ ID NO: 688885 - RNA, 19 nt, Artificial Sequence
  Description of Artificial Sequence: Synthetic oligonucleotide
  Antisense strand to SEQ ID NO: 688884
uuuauucucacauuucuga

SEQ ID NO: 688886 - RNA, 19 nt, Artificial Sequence
  Description of Artificial Sequence: Synthetic oligonucleotide
  Sense strand starting at position 2641 of SEQ ID NO: 586058
acaauucugugaucuggau

SEQ ID NO: 688887 - RNA, 19 nt, Artificial Sequence
  Description of Artificial Sequence: Synthetic oligonucleotide
  Antisense strand to SEQ ID NO: 688886
auccagaucacagaauugu

SEQ ID NO: 688888 - RNA, 19 nt, Artificial Sequence
  Description of Artificial Sequence: Synthetic oligonucleotide
  Sense strand starting at position 3093 of SEQ ID NO: 586058
uugacauucugaguagugu

SEQ ID NO: 688889 - RNA, 19 nt, Artificial Sequence
  Description of Artificial Sequence: Synthetic oligonucleotide
  Antisense strand to SEQ ID NO: 688888
acacuacucagaaugucaa

SEQ ID NO: 688890 - RNA, 19 nt, Artificial Sequence
  Description of Artificial Sequence: Synthetic oligonucleotide
  Sense strand starting at position 3094 of SEQ ID NO: 586058
ugacauucugaguagugug

SEQ ID NO: 688891 - RNA, 19 nt, Artificial Sequence
  Description of Artificial Sequence: Synthetic oligonucleotide
  Antisense strand to SEQ ID NO: 688890
cacacuacucagaauguca

SEQ ID NO: 688892 - RNA, 19 nt, Artificial Sequence
  Description of Artificial Sequence: Synthetic oligonucleotide
  Sense strand starting at position 3151 of SEQ ID NO: 586058
ugugaaucaucccuuugac

SEQ ID NO: 688893 - RNA, 19 nt, Artificial Sequence
  Description of Artificial Sequence: Synthetic oligonucleotide
  Antisense strand to SEQ ID NO: 688892
gucaaagggaugauucaca

SEQ ID NO: 688894 - RNA, 19 nt, Artificial Sequence
  Description of Artificial Sequence: Synthetic oligonucleotide
  Sense strand starting at position 3199 of SEQ ID NO: 586058
cccauuaguuccuuaguag

SEQ ID NO: 688895 - RNA, 19 nt, Artificial Sequence
  Description of Artificial Sequence: Synthetic oligonucleotide
  Antisense strand to SEQ ID NO: 688894
cuacuaaggaacuaauggg

SEQ ID NO: 688896 - RNA, 19 nt, Artificial Sequence
  Description of Artificial Sequence: Synthetic oligonucleotide
  Sense strand starting at position 3237 of SEQ ID NO: 586058
gguugacuacuguaguaua

SEQ ID NO: 688897 - RNA, 19 nt, Artificial Sequence
  Description of Artificial Sequence: Synthetic oligonucleotide
  Antisense strand to SEQ ID NO: 688896
uauacuacaguagucaacc

SEQ ID NO: 688898 - RNA, 19 nt, Artificial Sequence
  Description of Artificial Sequence: Synthetic oligonucleotide
  Sense strand starting at position 3314 of SEQ ID NO: 586058
aguagagacgcuggaaauu

SEQ ID NO: 688899 - RNA, 19 nt, Artificial Sequence
  Description of Artificial Sequence: Synthetic oligonucleotide
  Antisense strand to SEQ ID NO: 688898
aauuuccagcgucucuacu

SEQ ID NO: 688900 - RNA, 19 nt, Artificial Sequence
  Description of Artificial Sequence: Synthetic oligonucleotide
  Sense strand starting at position 3492 of SEQ ID NO: 586058
uguucuaucuuauuacuag

SEQ ID NO: 688901 - RNA, 19 nt, Artificial Sequence
  Description of Artificial Sequence: Synthetic oligonucleotide
  Antisense strand to SEQ ID NO: 688900
cuaguaauaagauagaaca

SEQ ID NO: 688902 - RNA, 19 nt, Artificial Sequence
  Description of Artificial Sequence: Synthetic oligonucleotide
  Sense strand starting at position 3515 of SEQ ID NO: 586058
uguugucaaucucuuacca

SEQ ID NO: 688903 - RNA, 19 nt, Artificial Sequence
  Description of Artificial Sequence: Synthetic oligonucleotide
  Antisense strand to SEQ ID NO: 688902
ugguaagagauugacaaca

SEQ ID NO: 688904 - RNA, 19 nt, Artificial Sequence
  Description of Artificial Sequence: Synthetic oligonucleotide
  Sense strand starting at position 3898 of SEQ ID NO: 586058
acuagagcucuuggaacau

SEQ ID NO: 688905 - RNA, 19 nt, Artificial Sequence
  Description of Artificial Sequence: Synthetic oligonucleotide
  Antisense strand to SEQ ID NO: 688904
auguuccaagagcucuagu

SEQ ID NO: 688906 - RNA, 19 nt, Artificial Sequence
  Description of Artificial Sequence: Synthetic oligonucleotide
  Sense strand starting at position 3913 of SEQ ID NO: 586058
acauaucaccuguggauaa

SEQ ID NO: 688907 - RNA, 19 nt, Artificial Sequence
  Description of Artificial Sequence: Synthetic oligonucleotide
  Antisense strand to SEQ ID NO: 688906
uuauccacaggugauaugu

SEQ ID NO: 688908 - RNA, 19 nt, Artificial Sequence
  Description of Artificial Sequence: Synthetic oligonucleotide
  Sense strand starting at position 3945 of SEQ ID NO: 586058
auauacagaucuuugugaa

SEQ ID NO: 688909 - RNA, 19 nt, Artificial Sequence
  Description of Artificial Sequence: Synthetic oligonucleotide
  Antisense strand to SEQ ID NO: 688908
uucacaaagaucuguauau

SEQ ID NO: 688910 - RNA, 19 nt, Artificial Sequence
  Description of Artificial Sequence: Synthetic oligonucleotide
  Sense strand starting at position 3946 of SEQ ID NO: 586058
uauacagaucuuugugaag

SEQ ID NO: 688911 - RNA, 19 nt, Artificial Sequence
  Description of Artificial Sequence: Synthetic oligonucleotide
  Antisense strand to SEQ ID NO: 688910
cuucacaaagaucuguaua

SEQ ID NO: 688912 - RNA, 19 nt, Artificial Sequence
  Description of Artificial Sequence: Synthetic oligonucleotide
  Sense strand starting at position 4 of SEQ ID NO: 586059
gcgugugaucaugauacua

SEQ ID NO: 688913 - RNA, 19 nt, Artificial Sequence
  Description of Artificial Sequence: Synthetic oligonucleotide
  Antisense strand to SEQ ID NO: 688912
uaguaucaugaucacacgc

SEQ ID NO: 688914 - RNA, 19 nt, Artificial Sequence
  Description of Artificial Sequence: Synthetic oligonucleotide
  Sense strand starting at position 52 of SEQ ID NO: 586059
auaagaaauugacacugaa

SEQ ID NO: 688915 - RNA, 19 nt, Artificial Sequence
  Description of Artificial Sequence: Synthetic oligonucleotide
  Antisense strand to SEQ ID NO: 688914
uucagugucaauuucuuau

SEQ ID NO: 688916 - RNA, 19 nt, Artificial Sequence
  Description of Artificial Sequence: Synthetic oligonucleotide
  Sense strand starting at position 75 of SEQ ID NO: 586059
uuguacuugugagugaacu

SEQ ID NO: 688917 - RNA, 19 nt, Artificial Sequence
  Description of Artificial Sequence: Synthetic oligonucleotide
  Antisense strand to SEQ ID NO: 688916
aguucacucacaaguacaa

SEQ ID NO: 688918 - RNA, 19 nt, Artificial Sequence
  Description of Artificial Sequence: Synthetic oligonucleotide
  Sense strand starting at position 76 of SEQ ID NO: 586059
uguacuugugagugaacua

SEQ ID NO: 688919 - RNA, 19 nt, Artificial Sequence
  Description of Artificial Sequence: Synthetic oligonucleotide
  Antisense strand to SEQ ID NO: 688918
uaguucacucacaaguaca

SEQ ID NO: 688920 - RNA, 19 nt, Artificial Sequence
  Description of Artificial Sequence: Synthetic oligonucleotide
  Sense strand starting at position 77 of SEQ ID NO: 586059
guacuugugagugaacuaa

SEQ ID NO: 688921 - RNA, 19 nt, Artificial Sequence
  Description of Artificial Sequence: Synthetic oligonucleotide
  Antisense strand to SEQ ID NO: 688920
uuaguucacucacaaguac

SEQ ID NO: 688922 - RNA, 19 nt, Artificial Sequence
  Description of Artificial Sequence: Synthetic oligonucleotide
  Sense strand starting at position 361 of SEQ ID NO: 586059
cugagucaugguuauauug

SEQ ID NO: 688923 - RNA, 19 nt, Artificial Sequence
  Description of Artificial Sequence: Synthetic oligonucleotide
  Antisense strand to SEQ ID NO: 688922
caauauaaccaugacucag

SEQ ID NO: 688924 - RNA, 19 nt, Artificial Sequence
  Description of Artificial Sequence: Synthetic oligonucleotide
  Sense strand starting at position 690 of SEQ ID NO: 586059
gagccaaacugaucacagu

SEQ ID NO: 688925 - RNA, 19 nt, Artificial Sequence
  Description of Artificial Sequence: Synthetic oligonucleotide
  Antisense strand to SEQ ID NO: 688924
acugugaucaguuuggcuc

SEQ ID NO: 688926 - RNA, 19 nt, Artificial Sequence
  Description of Artificial Sequence: Synthetic oligonucleotide
  Sense strand starting at position 723 of SEQ ID NO: 586059
uugggaaauugguugccaa

SEQ ID NO: 688927 - RNA, 19 nt, Artificial Sequence
  Description of Artificial Sequence: Synthetic oligonucleotide
  Antisense strand to SEQ ID NO: 688926
uuggcaaccaauuucccaa

SEQ ID NO: 688928 - RNA, 19 nt, Artificial Sequence
  Description of Artificial Sequence: Synthetic oligonucleotide
  Sense strand starting at position 724 of SEQ ID NO: 586059
ugggaaauugguugccaac

SEQ ID NO: 688929 - RNA, 19 nt, Artificial Sequence
  Description of Artificial Sequence: Synthetic oligonucleotide
  Antisense strand to SEQ ID NO: 688928
guuggcaaccaauuuccca

SEQ ID NO: 688930 - RNA, 19 nt, Artificial Sequence
  Description of Artificial Sequence: Synthetic oligonucleotide
  Sense strand starting at position 813 of SEQ ID NO: 586059
guuacaagucuaugaaaga

SEQ ID NO: 688931 - RNA, 19 nt, Artificial Sequence
  Description of Artificial Sequence: Synthetic oligonucleotide
  Antisense strand to SEQ ID NO: 688930
ucuuucauagacuuguaac

SEQ ID NO: 688932 - RNA, 19 nt, Artificial Sequence
  Description of Artificial Sequence: Synthetic oligonucleotide
  Sense strand starting at position 851 of SEQ ID NO: 586059
gguugaaaugaaggguguu

SEQ ID NO: 688933 - RNA, 19 nt, Artificial Sequence
  Description of Artificial Sequence: Synthetic oligonucleotide
  Antisense strand to SEQ ID NO: 688932
aacacccuucauuucaacc

SEQ ID NO: 688934 - RNA, 19 nt, Artificial Sequence
  Description of Artificial Sequence: Synthetic oligonucleotide
  Sense strand starting at position 852 of SEQ ID NO: 586059
guugaaaugaaggguguua

SEQ ID NO: 688935 - RNA, 19 nt, Artificial Sequence
  Description of Artificial Sequence: Synthetic oligonucleotide
  Antisense strand to SEQ ID NO: 688934
uaacacccuucauuucaac

SEQ ID NO: 688936 - RNA, 19 nt, Artificial Sequence
  Description of Artificial Sequence: Synthetic oligonucleotide
  Sense strand starting at position 854 of SEQ ID NO: 586059
ugaaaugaaggguguuagu

SEQ ID NO: 688937 - RNA, 19 nt, Artificial Sequence
  Description of Artificial Sequence: Synthetic oligonucleotide
  Antisense strand to SEQ ID NO: 688936
acuaacacccuucauuuca

SEQ ID NO: 688938 - RNA, 19 nt, Artificial Sequence
  Description of Artificial Sequence: Synthetic oligonucleotide
  Sense strand starting at position 1043 of SEQ ID NO: 586059
ucuuaaagccuuugagagu

SEQ ID NO: 688939 - RNA, 19 nt, Artificial Sequence
  Description of Artificial Sequence: Synthetic oligonucleotide
  Antisense strand to SEQ ID NO: 688938
acucucaaaggcuuuaaga

SEQ ID NO: 688940 - RNA, 19 nt, Artificial Sequence
  Description of Artificial Sequence: Synthetic oligonucleotide
  Sense strand starting at position 1054 of SEQ ID NO: 586059
uugagaguuugaguaucac

SEQ ID NO: 688941 - RNA, 19 nt, Artificial Sequence
  Description of Artificial Sequence: Synthetic oligonucleotide
  Antisense strand to SEQ ID NO: 688940
gugauacucaaacucucaa

SEQ ID NO: 688942 - RNA, 19 nt, Artificial Sequence
  Description of Artificial Sequence: Synthetic oligonucleotide
  Sense strand starting at position 1063 of SEQ ID NO: 586059
ugaguaucacaacguccaa

SEQ ID NO: 688943 - RNA, 19 nt, Artificial Sequence
  Description of Artificial Sequence: Synthetic oligonucleotide
  Antisense strand to SEQ ID NO: 688942
uuggacguugugauacuca

SEQ ID NO: 688944 - RNA, 19 nt, Artificial Sequence
  Description of Artificial Sequence: Synthetic oligonucleotide
  Sense strand starting at position 1225 of SEQ ID NO: 586059
acuaaugugucaucauagu

SEQ ID NO: 688945 - RNA, 19 nt, Artificial Sequence
  Description of Artificial Sequence: Synthetic oligonucleotide
  Antisense strand to SEQ ID NO: 688944
acuaugaugacacauuagu

SEQ ID NO: 688946 - RNA, 19 nt, Artificial Sequence
  Description of Artificial Sequence: Synthetic oligonucleotide
  Sense strand starting at position 1231 of SEQ ID NO: 586059
gugucaucauaguuauaaa

SEQ ID NO: 688947 - RNA, 19 nt, Artificial Sequence
  Description of Artificial Sequence: Synthetic oligonucleotide
  Antisense strand to SEQ ID NO: 688946
uuuauaacuaugaugacac

SEQ ID NO: 688948 - RNA, 19 nt, Artificial Sequence
  Description of Artificial Sequence: Synthetic oligonucleotide
  Sense strand starting at position 1299 of SEQ ID NO: 586059
gcaccuuacccauacgaau

SEQ ID NO: 688949 - RNA, 19 nt, Artificial Sequence
  Description of Artificial Sequence: Synthetic oligonucleotide
  Antisense strand to SEQ ID NO: 688948
auucguauggguaaggugc

SEQ ID NO: 688950 - RNA, 19 nt, Artificial Sequence
  Description of Artificial Sequence: Synthetic oligonucleotide
  Sense strand starting at position 1331 of SEQ ID NO: 586059
acaacaacccagugaguua

SEQ ID NO: 688951 - RNA, 19 nt, Artificial Sequence
  Description of Artificial Sequence: Synthetic oligonucleotide
  Antisense strand to SEQ ID NO: 688950
uaacucacuggguuguugu

SEQ ID NO: 688952 - RNA, 19 nt, Artificial Sequence
  Description of Artificial Sequence: Synthetic oligonucleotide
  Sense strand starting at position 1459 of SEQ ID NO: 586059
guaaucugacuccaacguu

SEQ ID NO: 688953 - RNA, 19 nt, Artificial Sequence
  Description of Artificial Sequence: Synthetic oligonucleotide
  Antisense strand to SEQ ID NO: 688952
aacguuggagucagauuac

SEQ ID NO: 688954 - RNA, 19 nt, Artificial Sequence
  Description of Artificial Sequence: Synthetic oligonucleotide
  Sense strand starting at position 1486 of SEQ ID NO: 586059
uggccaguaccacagaaua

SEQ ID NO: 688955 - RNA, 19 nt, Artificial Sequence
  Description of Artificial Sequence: Synthetic oligonucleotide
  Antisense strand to SEQ ID NO: 688954
uauucugugguacuggcca

SEQ ID NO: 688956 - RNA, 19 nt, Artificial Sequence
  Description of Artificial Sequence: Synthetic oligonucleotide
  Sense strand starting at position 2130 of SEQ ID NO: 586059
aggcaaggugcagaauuau

SEQ ID NO: 688957 - RNA, 19 nt, Artificial Sequence
  Description of Artificial Sequence: Synthetic oligonucleotide
  Antisense strand to SEQ ID NO: 688956
auaauucugcaccuugccu

SEQ ID NO: 688958 - RNA, 19 nt, Artificial Sequence
  Description of Artificial Sequence: Synthetic oligonucleotide
  Sense strand starting at position 2157 of SEQ ID NO: 586059
uuugcuauauuugcgaaua

SEQ ID NO: 688959 - RNA, 19 nt, Artificial Sequence
  Description of Artificial Sequence: Synthetic oligonucleotide
  Antisense strand to SEQ ID NO: 688958
uauucgcaaauauagcaaa

SEQ ID NO: 688960 - RNA, 19 nt, Artificial Sequence
  Description of Artificial Sequence: Synthetic oligonucleotide
  Sense strand starting at position 2247 of SEQ ID NO: 586059
uaauaauggugguuaccua

SEQ ID NO: 688961 - RNA, 19 nt, Artificial Sequence
  Description of Artificial Sequence: Synthetic oligonucleotide
  Antisense strand to SEQ ID NO: 688960
uagguaaccaccauuauua

SEQ ID NO: 688962 - RNA, 19 nt, Artificial Sequence
  Description of Artificial Sequence: Synthetic oligonucleotide
  Sense strand starting at position 2367 of SEQ ID NO: 586059
ugcauugccuaauuagaau

SEQ ID NO: 688963 - RNA, 19 nt, Artificial Sequence
  Description of Artificial Sequence: Synthetic oligonucleotide
  Antisense strand to SEQ ID NO: 688962
auucuaauuaggcaaugca

SEQ ID NO: 688964 - RNA, 19 nt, Artificial Sequence
  Description of Artificial Sequence: Synthetic oligonucleotide
  Sense strand starting at position 3011 of SEQ ID NO: 586059
guauauaagacauguguau

SEQ ID NO: 688965 - RNA, 19 nt, Artificial Sequence
  Description of Artificial Sequence: Synthetic oligonucleotide
  Antisense strand to SEQ ID NO: 688964
auacacaugucuuauauac

SEQ ID NO: 688966 - RNA, 19 nt, Artificial Sequence
  Description of Artificial Sequence: Synthetic oligonucleotide
  Sense strand starting at position 3025 of SEQ ID NO: 586059
uguauacaccuguauauga

SEQ ID NO: 688967 - RNA, 19 nt, Artificial Sequence
  Description of Artificial Sequence: Synthetic oligonucleotide
  Antisense strand to SEQ ID NO: 688966
ucauauacagguguauaca

SEQ ID NO: 688968 - RNA, 19 nt, Artificial Sequence
  Description of Artificial Sequence: Synthetic oligonucleotide
  Sense strand starting at position 3142 of SEQ ID NO: 586059
uccaauugugcucagugga

SEQ ID NO: 688969 - RNA, 19 nt, Artificial Sequence
  Description of Artificial Sequence: Synthetic oligonucleotide
  Antisense strand to SEQ ID NO: 688968
uccacugagcacaauugga

SEQ ID NO: 688970 - RNA, 19 nt, Artificial Sequence
  Description of Artificial Sequence: Synthetic oligonucleotide
  Sense strand starting at position 3145 of SEQ ID NO: 586059
aauugugcucaguggaacu

SEQ ID NO: 688971 - RNA, 19 nt, Artificial Sequence
  Description of Artificial Sequence: Synthetic oligonucleotide
  Antisense strand to SEQ ID NO: 688970
aguuccacugagcacaauu

SEQ ID NO: 688972 - RNA, 19 nt, Artificial Sequence
  Description of Artificial Sequence: Synthetic oligonucleotide
  Sense strand starting at position 3156 of SEQ ID NO: 586059
guggaacuugacuaguuga

SEQ ID NO: 688973 - RNA, 19 nt, Artificial Sequence
  Description of Artificial Sequence: Synthetic oligonucleotide
  Antisense strand to SEQ ID NO: 688972
ucaacuagucaaguuccac

SEQ ID NO: 688974 - RNA, 19 nt, Artificial Sequence
  Description of Artificial Sequence: Synthetic oligonucleotide
  Sense strand starting at position 3242 of SEQ ID NO: 586059
ugcagaaacuugcccuaua

SEQ ID NO: 688975 - RNA, 19 nt, Artificial Sequence
  Description of Artificial Sequence: Synthetic oligonucleotide
  Antisense strand to SEQ ID NO: 688974
uauagggcaaguuucugca

SEQ ID NO: 688976 - RNA, 19 nt, Artificial Sequence
  Description of Artificial Sequence: Synthetic oligonucleotide
  Sense strand starting at position 3243 of SEQ ID NO: 586059
gcagaaacuugcccuauau

SEQ ID NO: 688977 - RNA, 19 nt, Artificial Sequence
  Description of Artificial Sequence: Synthetic oligonucleotide
  Antisense strand to SEQ ID NO: 688976
auauagggcaaguuucugc

SEQ ID NO: 688978 - RNA, 19 nt, Artificial Sequence
  Description of Artificial Sequence: Synthetic oligonucleotide
  Sense strand starting at position 3295 of SEQ ID NO: 586059
auaguauuggcacaacuac

SEQ ID NO: 688979 - RNA, 19 nt, Artificial Sequence
  Description of Artificial Sequence: Synthetic oligonucleotide
  Antisense strand to SEQ ID NO: 688978
guaguugugccaauacuau

SEQ ID NO: 688980 - RNA, 19 nt, Artificial Sequence
  Description of Artificial Sequence: Synthetic oligonucleotide
  Sense strand starting at position 3371 of SEQ ID NO: 586059
augcuugauauauggugga

SEQ ID NO: 688981 - RNA, 19 nt, Artificial Sequence
  Description of Artificial Sequence: Synthetic oligonucleotide
  Antisense strand to SEQ ID NO: 688980
uccaccauauaucaagcau

SEQ ID NO: 688982 - RNA, 19 nt, Artificial Sequence
  Description of Artificial Sequence: Synthetic oligonucleotide
  Sense strand starting at position 3375 of SEQ ID NO: 586059
uugauauaugguggaaauu

SEQ ID NO: 688983 - RNA, 19 nt, Artificial Sequence
  Description of Artificial Sequence: Synthetic oligonucleotide
  Antisense strand to SEQ ID NO: 688982
aauuuccaccauauaucaa

SEQ ID NO: 688984 - RNA, 19 nt, Artificial Sequence
  Description of Artificial Sequence: Synthetic oligonucleotide
  Sense strand starting at position 3440 of SEQ ID NO: 586059
cuguaauauuuggauaucu

SEQ ID NO: 688985 - RNA, 19 nt, Artificial Sequence
  Description of Artificial Sequence: Synthetic oligonucleotide
  Antisense strand to SEQ ID NO: 688984
agauauccaaauauuacag

SEQ ID NO: 688986 - RNA, 19 nt, Artificial Sequence
  Description of Artificial Sequence: Synthetic oligonucleotide
  Sense strand starting at position 3480 of SEQ ID NO: 586059
uuggguuucuacuuuauau

SEQ ID NO: 688987 - RNA, 19 nt, Artificial Sequence
  Description of Artificial Sequence: Synthetic oligonucleotide
  Antisense strand to SEQ ID NO: 688986
auauaaaguagaaacccaa

SEQ ID NO: 688988 - RNA, 19 nt, Artificial Sequence
  Description of Artificial Sequence: Synthetic oligonucleotide
  Sense strand starting at position 3482 of SEQ ID NO: 586059
ggguuucuacuuuauaugu

SEQ ID NO: 688989 - RNA, 19 nt, Artificial Sequence
  Description of Artificial Sequence: Synthetic oligonucleotide
  Antisense strand to SEQ ID NO: 688988
acauauaaaguagaaaccc

SEQ ID NO: 688990 - RNA, 19 nt, Artificial Sequence
  Description of Artificial Sequence: Synthetic oligonucleotide
  Sense strand starting at position 3793 of SEQ ID NO: 586059
ggaucaguccacugaauau

SEQ ID NO: 688991 - RNA, 19 nt, Artificial Sequence
  Description of Artificial Sequence: Synthetic oligonucleotide
  Antisense strand to SEQ ID NO: 688990
auauucaguggacugaucc

SEQ ID NO: 688992 - RNA, 19 nt, Artificial Sequence
  Description of Artificial Sequence: Synthetic oligonucleotide
  Sense strand starting at position 145 of SEQ ID NO: 586060
aaggguggacaguguuuaa

SEQ ID NO: 688993 - RNA, 19 nt, Artificial Sequence
  Description of Artificial Sequence: Synthetic oligonucleotide
  Antisense strand to SEQ ID NO: 688992
uuaaacacuguccacccuu

SEQ ID NO: 688994 - RNA, 19 nt, Artificial Sequence
  Description of Artificial Sequence: Synthetic oligonucleotide
  Sense strand starting at position 309 of SEQ ID NO: 586060
ggugcuaaauucucaauac

SEQ ID NO: 688995 - RNA, 19 nt, Artificial Sequence
  Description of Artificial Sequence: Synthetic oligonucleotide
  Antisense strand to SEQ ID NO: 688994
guauugagaauuuagcacc

SEQ ID NO: 688996 - RNA, 19 nt, Artificial Sequence
  Description of Artificial Sequence: Synthetic oligonucleotide
  Sense strand starting at position 429 of SEQ ID NO: 586060
gggccuggcacauaguuau

SEQ ID NO: 688997 - RNA, 19 nt, Artificial Sequence
  Description of Artificial Sequence: Synthetic oligonucleotide
  Antisense strand to SEQ ID NO: 688996
auaacuaugugccaggccc

SEQ ID NO: 688998 - RNA, 19 nt, Artificial Sequence
  Description of Artificial Sequence: Synthetic oligonucleotide
  Sense strand starting at position 440 of SEQ ID NO: 586060
auaguuauguccucauuaa

SEQ ID NO: 688999 - RNA, 19 nt, Artificial Sequence
  Description of Artificial Sequence: Synthetic oligonucleotide
  Antisense strand to SEQ ID NO: 688998
uuaaugaggacauaacuau

SEQ ID NO: 689000 - RNA, 19 nt, Artificial Sequence
  Description of Artificial Sequence: Synthetic oligonucleotide
  Sense strand starting at position 464 of SEQ ID NO: 586060
gguuuccuuccagacauug

SEQ ID NO: 689001 - RNA, 19 nt, Artificial Sequence
  Description of Artificial Sequence: Synthetic oligonucleotide
  Antisense strand to SEQ ID NO: 689000
caaugucuggaaggaaacc

SEQ ID NO: 689002 - RNA, 19 nt, Artificial Sequence
  Description of Artificial Sequence: Synthetic oligonucleotide
  Sense strand starting at position 469 of SEQ ID NO: 586060
ccuuccagacauugauagu

SEQ ID NO: 689003 - RNA, 19 nt, Artificial Sequence
  Description of Artificial Sequence: Synthetic oligonucleotide
  Antisense strand to SEQ ID NO: 689002
acuaucaaugucuggaagg

SEQ ID NO: 689004 - RNA, 19 nt, Artificial Sequence
  Description of Artificial Sequence: Synthetic oligonucleotide
  Sense strand starting at position 551 of SEQ ID NO: 586060
gaaugaagcuaagagauuu

SEQ ID NO: 689005 - RNA, 19 nt, Artificial Sequence
  Description of Artificial Sequence: Synthetic oligonucleotide
  Antisense strand to SEQ ID NO: 689004
aaaucucuuagcuucauuc

SEQ ID NO: 689006 - RNA, 19 nt, Artificial Sequence
  Description of Artificial Sequence: Synthetic oligonucleotide
  Sense strand starting at position 559 of SEQ ID NO: 586060
cuaagagauuugcaaugac

SEQ ID NO: 689007 - RNA, 19 nt, Artificial Sequence
  Description of Artificial Sequence: Synthetic oligonucleotide
  Antisense strand to SEQ ID NO: 689006
gucauugcaaaucucuuag

SEQ ID NO: 689008 - RNA, 19 nt, Artificial Sequence
  Description of Artificial Sequence: Synthetic oligonucleotide
  Sense strand starting at position 614 of SEQ ID NO: 586060
agucaagaaccuugguauc

SEQ ID NO: 689009 - RNA, 19 nt, Artificial Sequence
  Description of Artificial Sequence: Synthetic oligonucleotide
  Antisense strand to SEQ ID NO: 689008
gauaccaagguucuugacu

SEQ ID NO: 689010 - RNA, 19 nt, Artificial Sequence
  Description of Artificial Sequence: Synthetic oligonucleotide
  Sense strand starting at position 616 of SEQ ID NO: 586060
ucaagaaccuugguaucca

SEQ ID NO: 689011 - RNA, 19 nt, Artificial Sequence
  Description of Artificial Sequence: Synthetic oligonucleotide
  Antisense strand to SEQ ID NO: 689010
uggauaccaagguucuuga

SEQ ID NO: 689012 - RNA, 19 nt, Artificial Sequence
  Description of Artificial Sequence: Synthetic oligonucleotide
  Sense strand starting at position 781 of SEQ ID NO: 586060
accagugguccauggacuu

SEQ ID NO: 689013 - RNA, 19 nt, Artificial Sequence
  Description of Artificial Sequence: Synthetic oligonucleotide
  Antisense strand to SEQ ID NO: 689012
aaguccauggaccacuggu

SEQ ID NO: 689014 - RNA, 19 nt, Artificial Sequence
  Description of Artificial Sequence: Synthetic oligonucleotide
  Sense strand starting at position 804 of SEQ ID NO: 586060
ccaagugguccaugaacuu

SEQ ID NO: 689015 - RNA, 19 nt, Artificial Sequence
  Description of Artificial Sequence: Synthetic oligonucleotide
  Antisense strand to SEQ ID NO: 689014
aaguucauggaccacuugg

SEQ ID NO: 689016 - RNA, 19 nt, Artificial Sequence
  Description of Artificial Sequence: Synthetic oligonucleotide
  Sense strand starting at position 929 of SEQ ID NO: 586060
aggacuuugucaccaacaa

SEQ ID NO: 689017 - RNA, 19 nt, Artificial Sequence
  Description of Artificial Sequence: Synthetic oligonucleotide
  Antisense strand to SEQ ID NO: 689016
uuguuggugacaaaguccu

SEQ ID NO: 689018 - RNA, 19 nt, Artificial Sequence
  Description of Artificial Sequence: Synthetic oligonucleotide
  Sense strand starting at position 1104 of SEQ ID NO: 586060
acuguaugucaauauaguu

SEQ ID NO: 689019 - RNA, 19 nt, Artificial Sequence
  Description of Artificial Sequence: Synthetic oligonucleotide
  Antisense strand to SEQ ID NO: 689018
aacuauauugacauacagu

SEQ ID NO: 689020 - RNA, 19 nt, Artificial Sequence
  Description of Artificial Sequence: Synthetic oligonucleotide
  Sense strand starting at position 1234 of SEQ ID NO: 586060
ugaagaacuccuggaccuu

SEQ ID NO: 689021 - RNA, 19 nt, Artificial Sequence
  Description of Artificial Sequence: Synthetic oligonucleotide
  Antisense strand to SEQ ID NO: 689020
aagguccaggaguucuuca

SEQ ID NO: 689022 - RNA, 19 nt, Artificial Sequence
  Description of Artificial Sequence: Synthetic oligonucleotide
  Sense strand starting at position 1818 of SEQ ID NO: 586060
cuggaagggugguaaauuu

SEQ ID NO: 689023 - RNA, 19 nt, Artificial Sequence
  Description of Artificial Sequence: Synthetic oligonucleotide
  Antisense strand to SEQ ID NO: 689022
aaauuuaccacccuuccag

SEQ ID NO: 689024 - RNA, 19 nt, Artificial Sequence
  Description of Artificial Sequence: Synthetic oligonucleotide
  Sense strand starting at position 1963 of SEQ ID NO: 586060
ugaaucccacaguaaguau

SEQ ID NO: 689025 - RNA, 19 nt, Artificial Sequence
  Description of Artificial Sequence: Synthetic oligonucleotide
  Antisense strand to SEQ ID NO: 689024
auacuuacugugggauuca

SEQ ID NO: 689026 - RNA, 19 nt, Artificial Sequence
  Description of Artificial Sequence: Synthetic oligonucleotide
  Sense strand starting at position 1986 of SEQ ID NO: 586060
aaaggaugucuuugggagu

SEQ ID NO: 689027 - RNA, 19 nt, Artificial Sequence
  Description of Artificial Sequence: Synthetic oligonucleotide
  Antisense strand to SEQ ID NO: 689026
acucccaaagacauccuuu

SEQ ID NO: 689028 - RNA, 19 nt, Artificial Sequence
  Description of Artificial Sequence: Synthetic oligonucleotide
  Sense strand starting at position 1992 of SEQ ID NO: 586060
ugucuuugggagugaaagu

SEQ ID NO: 689029 - RNA, 19 nt, Artificial Sequence
  Description of Artificial Sequence: Synthetic oligonucleotide
  Antisense strand to SEQ ID NO: 689028
acuuucacucccaaagaca

SEQ ID NO: 689030 - RNA, 19 nt, Artificial Sequence
  Description of Artificial Sequence: Synthetic oligonucleotide
  Sense strand starting at position 2001 of SEQ ID NO: 586060
gagugaaagugaucacucu

SEQ ID NO: 689031 - RNA, 19 nt, Artificial Sequence
  Description of Artificial Sequence: Synthetic oligonucleotide
  Antisense strand to SEQ ID NO: 689030
agagugaucacuuucacuc

SEQ ID NO: 689032 - RNA, 19 nt, Artificial Sequence
  Description of Artificial Sequence: Synthetic oligonucleotide
  Sense strand starting at position 2008 of SEQ ID NO: 586060
agugaucacucuccagaca

SEQ ID NO: 689033 - RNA, 19 nt, Artificial Sequence
  Description of Artificial Sequence: Synthetic oligonucleotide
  Antisense strand to SEQ ID NO: 689032
ugucuggagagugaucacu

SEQ ID NO: 689034 - RNA, 19 nt, Artificial Sequence
  Description of Artificial Sequence: Synthetic oligonucleotide
  Sense strand starting at position 2009 of SEQ ID NO: 586060
gugaucacucuccagacau

SEQ ID NO: 689035 - RNA, 19 nt, Artificial Sequence
  Description of Artificial Sequence: Synthetic oligonucleotide
  Antisense strand to SEQ ID NO: 689034
augucuggagagugaucac

SEQ ID NO: 689036 - RNA, 19 nt, Artificial Sequence
  Description of Artificial Sequence: Synthetic oligonucleotide
  Sense strand starting at position 2054 of SEQ ID NO: 586060
ggaagucucgaugggaacu

SEQ ID NO: 689037 - RNA, 19 nt, Artificial Sequence
  Description of Artificial Sequence: Synthetic oligonucleotide
  Antisense strand to SEQ ID NO: 689036
aguucccaucgagacuucc

SEQ ID NO: 689038 - RNA, 19 nt, Artificial Sequence
  Description of Artificial Sequence: Synthetic oligonucleotide
  Sense strand starting at position 2055 of SEQ ID NO: 586060
gaagucucgaugggaacua

SEQ ID NO: 689039 - RNA, 19 nt, Artificial Sequence
  Description of Artificial Sequence: Synthetic oligonucleotide
  Antisense strand to SEQ ID NO: 689038
uaguucccaucgagacuuc

SEQ ID NO: 689040 - RNA, 19 nt, Artificial Sequence
  Description of Artificial Sequence: Synthetic oligonucleotide
  Sense strand starting at position 2757 of SEQ ID NO: 586060
agguuaccuguguaauccu

SEQ ID NO: 689041 - RNA, 19 nt, Artificial Sequence
  Description of Artificial Sequence: Synthetic oligonucleotide
  Antisense strand to SEQ ID NO: 689040
aggauuacacagguaaccu

SEQ ID NO: 689042 - RNA, 19 nt, Artificial Sequence
  Description of Artificial Sequence: Synthetic oligonucleotide
  Sense strand starting at position 2828 of SEQ ID NO: 586060
aguagauagggauguugua

SEQ ID NO: 689043 - RNA, 19 nt, Artificial Sequence
  Description of Artificial Sequence: Synthetic oligonucleotide
  Antisense strand to SEQ ID NO: 689042
uacaacaucccuaucuacu

SEQ ID NO: 689044 - RNA, 19 nt, Artificial Sequence
  Description of Artificial Sequence: Synthetic oligonucleotide
  Sense strand starting at position 2835 of SEQ ID NO: 586060
agggauguuguaggcauua

SEQ ID NO: 689045 - RNA, 19 nt, Artificial Sequence
  Description of Artificial Sequence: Synthetic oligonucleotide
  Antisense strand to SEQ ID NO: 689044
uaaugccuacaacaucccu

SEQ ID NO: 689046 - RNA, 19 nt, Artificial Sequence
  Description of Artificial Sequence: Synthetic oligonucleotide
  Sense strand starting at position 2837 of SEQ ID NO: 586060
ggauguuguaggcauuacu

SEQ ID NO: 689047 - RNA, 19 nt, Artificial Sequence
  Description of Artificial Sequence: Synthetic oligonucleotide
  Antisense strand to SEQ ID NO: 689046
aguaaugccuacaacaucc

SEQ ID NO: 689048 - RNA, 19 nt, Artificial Sequence
  Description of Artificial Sequence: Synthetic oligonucleotide
  Sense strand starting at position 2845 of SEQ ID NO: 586060
uaggcauuacuagggauua

SEQ ID NO: 689049 - RNA, 19 nt, Artificial Sequence
  Description of Artificial Sequence: Synthetic oligonucleotide
  Antisense strand to SEQ ID NO: 689048
uaaucccuaguaaugccua

SEQ ID NO: 689050 - RNA, 19 nt, Artificial Sequence
  Description of Artificial Sequence: Synthetic oligonucleotide
  Sense strand starting at position 2866 of SEQ ID NO: 586060
uaauguugugagcacucuu

SEQ ID NO: 689051 - RNA, 19 nt, Artificial Sequence
  Description of Artificial Sequence: Synthetic oligonucleotide
  Antisense strand to SEQ ID NO: 689050
aagagugcucacaacauua

SEQ ID NO: 689052 - RNA, 19 nt, Artificial Sequence
  Description of Artificial Sequence: Synthetic oligonucleotide
  Sense strand starting at position 2914 of SEQ ID NO: 586060
ugugauaaacuaggccuau

SEQ ID NO: 689053 - RNA, 19 nt, Artificial Sequence
  Description of Artificial Sequence: Synthetic oligonucleotide
  Antisense strand to SEQ ID NO: 689052
auaggccuaguuuaucaca

SEQ ID NO: 689054 - RNA, 19 nt, Artificial Sequence
  Description of Artificial Sequence: Synthetic oligonucleotide
  Sense strand starting at position 2950 of SEQ ID NO: 586060
cccugagaauucuuugaac

SEQ ID NO: 689055 - RNA, 19 nt, Artificial Sequence
  Description of Artificial Sequence: Synthetic oligonucleotide
  Antisense strand to SEQ ID NO: 689054
guucaaagaauucucaggg

SEQ ID NO: 689056 - RNA, 19 nt, Artificial Sequence
  Description of Artificial Sequence: Synthetic oligonucleotide
  Sense strand starting at position 2952 of SEQ ID NO: 586060
cugagaauucuuugaacua

SEQ ID NO: 689057 - RNA, 19 nt, Artificial Sequence
  Description of Artificial Sequence: Synthetic oligonucleotide
  Antisense strand to SEQ ID NO: 689056
uaguucaaagaauucucag

SEQ ID NO: 689058 - RNA, 19 nt, Artificial Sequence
  Description of Artificial Sequence: Synthetic oligonucleotide
  Sense strand starting at position 3264 of SEQ ID NO: 586060
ggcacugcccaugaaguau

SEQ ID NO: 689059 - RNA, 19 nt, Artificial Sequence
  Description of Artificial Sequence: Synthetic oligonucleotide
  Antisense strand to SEQ ID NO: 689058
auacuucaugggcagugcc

SEQ ID NO: 689060 - RNA, 19 nt, Artificial Sequence
  Description of Artificial Sequence: Synthetic oligonucleotide
  Sense strand starting at position 3279 of SEQ ID NO: 586060
guauccuuauaagugaacu

SEQ ID NO: 689061 - RNA, 19 nt, Artificial Sequence
  Description of Artificial Sequence: Synthetic oligonucleotide
  Antisense strand to SEQ ID NO: 689060
aguucacuuauaaggauac

SEQ ID NO: 689062 - RNA, 19 nt, Artificial Sequence
  Description of Artificial Sequence: Synthetic oligonucleotide
  Sense strand starting at position 3334 of SEQ ID NO: 586060
gaaauaaguuaaguuagca

SEQ ID NO: 689063 - RNA, 19 nt, Artificial Sequence
  Description of Artificial Sequence: Synthetic oligonucleotide
  Antisense strand to SEQ ID NO: 689062
ugcuaacuuaacuuauuuc

SEQ ID NO: 689064 - RNA, 19 nt, Artificial Sequence
  Description of Artificial Sequence: Synthetic oligonucleotide
  Sense strand starting at position 3413 of SEQ ID NO: 586060
ggcugcaaccaagaucaau

SEQ ID NO: 689065 - RNA, 19 nt, Artificial Sequence
  Description of Artificial Sequence: Synthetic oligonucleotide
  Antisense strand to SEQ ID NO: 689064
auugaucuugguugcagcc

SEQ ID NO: 689066 - RNA, 19 nt, Artificial Sequence
  Description of Artificial Sequence: Synthetic oligonucleotide
  Sense strand starting at position 3726 of SEQ ID NO: 586060
ccaacuuuccuaggugauu

SEQ ID NO: 689067 - RNA, 19 nt, Artificial Sequence
  Description of Artificial Sequence: Synthetic oligonucleotide
  Antisense strand to SEQ ID NO: 689066
aaucaccuaggaaaguugg

SEQ ID NO: 689068 - RNA, 19 nt, Artificial Sequence
  Description of Artificial Sequence: Synthetic oligonucleotide
  Sense strand starting at position 3905 of SEQ ID NO: 586060
ggaagaguucaagggcaag

SEQ ID NO: 689069 - RNA, 19 nt, Artificial Sequence
  Description of Artificial Sequence: Synthetic oligonucleotide
  Antisense strand to SEQ ID NO: 689068
cuugcccuugaacucuucc

SEQ ID NO: 689070 - RNA, 19 nt, Artificial Sequence
  Description of Artificial Sequence: Synthetic oligonucleotide
  Sense strand starting at position 3929 of SEQ ID NO: 586060
gguauuaggcagcaacuuu

SEQ ID NO: 689071 - RNA, 19 nt, Artificial Sequence
  Description of Artificial Sequence: Synthetic oligonucleotide
  Antisense strand to SEQ ID NO: 689070
aaaguugcugccuaauacc

SEQ ID NO: 689072 - RNA, 19 nt, Artificial Sequence
  Description of Artificial Sequence: Synthetic oligonucleotide
  Sense strand starting at position 127 of SEQ ID NO: 586061
cuacuuaugguuuaauguu

SEQ ID NO: 689073 - RNA, 19 nt, Artificial Sequence
  Description of Artificial Sequence: Synthetic oligonucleotide
  Antisense strand to SEQ ID NO: 689072
aacauuaaaccauaaguag

SEQ ID NO: 689074 - RNA, 19 nt, Artificial Sequence
  Description of Artificial Sequence: Synthetic oligonucleotide
  Sense strand starting at position 178 of SEQ ID NO: 586061
uucuguuuagaaugugaug

SEQ ID NO: 689075 - RNA, 19 nt, Artificial Sequence
  Description of Artificial Sequence: Synthetic oligonucleotide
  Antisense strand to SEQ ID NO: 689074
caucacauucuaaacagaa

SEQ ID NO: 689076 - RNA, 19 nt, Artificial Sequence
  Description of Artificial Sequence: Synthetic oligonucleotide
  Sense strand starting at position 265 of SEQ ID NO: 586061
ugaacaacuggccaucuau

SEQ ID NO: 689077 - RNA, 19 nt, Artificial Sequence
  Description of Artificial Sequence: Synthetic oligonucleotide
  Antisense strand to SEQ ID NO: 689076
auagauggccaguuguuca

SEQ ID NO: 689078 - RNA, 19 nt, Artificial Sequence
  Description of Artificial Sequence: Synthetic oligonucleotide
  Sense strand starting at position 664 of SEQ ID NO: 586061
auaaauaacugagugcaaa

SEQ ID NO: 689079 - RNA, 19 nt, Artificial Sequence
  Description of Artificial Sequence: Synthetic oligonucleotide
  Antisense strand to SEQ ID NO: 689078
uuugcacucaguuauuuau

SEQ ID NO: 689080 - RNA, 19 nt, Artificial Sequence
  Description of Artificial Sequence: Synthetic oligonucleotide
  Sense strand starting at position 718 of SEQ ID NO: 586061
cguacaugucuguauuaag

SEQ ID NO: 689081 - RNA, 19 nt, Artificial Sequence
  Description of Artificial Sequence: Synthetic oligonucleotide
  Antisense strand to SEQ ID NO: 689080
cuuaauacagacauguacg

SEQ ID NO: 689082 - RNA, 19 nt, Artificial Sequence
  Description of Artificial Sequence: Synthetic oligonucleotide
  Sense strand starting at position 728 of SEQ ID NO: 586061
uguauuaaguuggugagca

SEQ ID NO: 689083 - RNA, 19 nt, Artificial Sequence
  Description of Artificial Sequence: Synthetic oligonucleotide
  Antisense strand to SEQ ID NO: 689082
ugcucaccaacuuaauaca

SEQ ID NO: 689084 - RNA, 19 nt, Artificial Sequence
  Description of Artificial Sequence: Synthetic oligonucleotide
  Sense strand starting at position 738 of SEQ ID NO: 586061
uggugagcacuuuguggau

SEQ ID NO: 689085 - RNA, 19 nt, Artificial Sequence
  Description of Artificial Sequence: Synthetic oligonucleotide
  Antisense strand to SEQ ID NO: 689084
auccacaaagugcucacca

SEQ ID NO: 689086 - RNA, 19 nt, Artificial Sequence
  Description of Artificial Sequence: Synthetic oligonucleotide
  Sense strand starting at position 792 of SEQ ID NO: 586061
ccuagucaaguuuacauga

SEQ ID NO: 689087 - RNA, 19 nt, Artificial Sequence
  Description of Artificial Sequence: Synthetic oligonucleotide
  Antisense strand to SEQ ID NO: 689086
ucauguaaacuugacuagg

SEQ ID NO: 689088 - RNA, 19 nt, Artificial Sequence
  Description of Artificial Sequence: Synthetic oligonucleotide
  Sense strand starting at position 797 of SEQ ID NO: 586061
ucaaguuuacaugaguuua

SEQ ID NO: 689089 - RNA, 19 nt, Artificial Sequence
  Description of Artificial Sequence: Synthetic oligonucleotide
  Antisense strand to SEQ ID NO: 689088
uaaacucauguaaacuuga

SEQ ID NO: 689090 - RNA, 19 nt, Artificial Sequence
  Description of Artificial Sequence: Synthetic oligonucleotide
  Sense strand starting at position 825 of SEQ ID NO: 586061
cuuuaaagcuuccucugga

SEQ ID NO: 689091 - RNA, 19 nt, Artificial Sequence
  Description of Artificial Sequence: Synthetic oligonucleotide
  Antisense strand to SEQ ID NO: 689090
uccagaggaagcuuuaaag

SEQ ID NO: 689092 - RNA, 19 nt, Artificial Sequence
  Description of Artificial Sequence: Synthetic oligonucleotide
  Sense strand starting at position 826 of SEQ ID NO: 586061
uuuaaagcuuccucuggau

SEQ ID NO: 689093 - RNA, 19 nt, Artificial Sequence
  Description of Artificial Sequence: Synthetic oligonucleotide
  Antisense strand to SEQ ID NO: 689092
auccagaggaagcuuuaaa

SEQ ID NO: 689094 - RNA, 19 nt, Artificial Sequence
  Description of Artificial Sequence: Synthetic oligonucleotide
  Sense strand starting at position 852 of SEQ ID NO: 586061
acuguaauccugugagaug

SEQ ID NO: 689095 - RNA, 19 nt, Artificial Sequence
  Description of Artificial Sequence: Synthetic oligonucleotide
  Antisense strand to SEQ ID NO: 689094
caucucacaggauuacagu

SEQ ID NO: 689096 - RNA, 19 nt, Artificial Sequence
  Description of Artificial Sequence: Synthetic oligonucleotide
  Sense strand starting at position 916 of SEQ ID NO: 586061
guggaaggaauguauucuu

SEQ ID NO: 689097 - RNA, 19 nt, Artificial Sequence
  Description of Artificial Sequence: Synthetic oligonucleotide
  Antisense strand to SEQ ID NO: 689096
aagaauacauuccuuccac

SEQ ID NO: 689098 - RNA, 19 nt, Artificial Sequence
  Description of Artificial Sequence: Synthetic oligonucleotide
  Sense strand starting at position 919 of SEQ ID NO: 586061
gaaggaauguauucuuccu

SEQ ID NO: 689099 - RNA, 19 nt, Artificial Sequence
  Description of Artificial Sequence: Synthetic oligonucleotide
  Antisense strand to SEQ ID NO: 689098
aggaagaauacauuccuuc

SEQ ID NO: 689100 - RNA, 19 nt, Artificial Sequence
  Description of Artificial Sequence: Synthetic oligonucleotide
  Sense strand starting at position 946 of SEQ ID NO: 586061
ugucuaauuugagaaaugu

SEQ ID NO: 689101 - RNA, 19 nt, Artificial Sequence
  Description of Artificial Sequence: Synthetic oligonucleotide
  Antisense strand to SEQ ID NO: 689100
acauuucucaaauuagaca

SEQ ID NO: 689102 - RNA, 19 nt, Artificial Sequence
  Description of Artificial Sequence: Synthetic oligonucleotide
  Sense strand starting at position 1036 of SEQ ID NO: 586061
auacuaugcuuuguuaucu

SEQ ID NO: 689103 - RNA, 19 nt, Artificial Sequence
  Description of Artificial Sequence: Synthetic oligonucleotide
  Antisense strand to SEQ ID NO: 689102
agauaacaaagcauaguau

SEQ ID NO: 689104 - RNA, 19 nt, Artificial Sequence
  Description of Artificial Sequence: Synthetic oligonucleotide
  Sense strand starting at position 1058 of SEQ ID NO: 586061
auugcauuagcugaaaguu

SEQ ID NO: 689105 - RNA, 19 nt, Artificial Sequence
  Description of Artificial Sequence: Synthetic oligonucleotide
  Antisense strand to SEQ ID NO: 689104
aacuuucagcuaaugcaau

SEQ ID NO: 689106 - RNA, 19 nt, Artificial Sequence
  Description of Artificial Sequence: Synthetic oligonucleotide
  Sense strand starting at position 1142 of SEQ ID NO: 586061
aaacaaugauugcuacgua

SEQ ID NO: 689107 - RNA, 19 nt, Artificial Sequence
  Description of Artificial Sequence: Synthetic oligonucleotide
  Antisense strand to SEQ ID NO: 689106
uacguagcaaucauuguuu

SEQ ID NO: 689108 - RNA, 19 nt, Artificial Sequence
  Description of Artificial Sequence: Synthetic oligonucleotide
  Sense strand starting at position 1145 of SEQ ID NO: 586061
caaugauugcuacguaaau

SEQ ID NO: 689109 - RNA, 19 nt, Artificial Sequence
  Description of Artificial Sequence: Synthetic oligonucleotide
  Antisense strand to SEQ ID NO: 689108
auuuacguagcaaucauug

SEQ ID NO: 689110 - RNA, 19 nt, Artificial Sequence
  Description of Artificial Sequence: Synthetic oligonucleotide
  Sense strand starting at position 1146 of SEQ ID NO: 586061
aaugauugcuacguaaaua

SEQ ID NO: 689111 - RNA, 19 nt, Artificial Sequence
  Description of Artificial Sequence: Synthetic oligonucleotide
  Antisense strand to SEQ ID NO: 689110
uauuuacguagcaaucauu

SEQ ID NO: 689112 - RNA, 19 nt, Artificial Sequence
  Description of Artificial Sequence: Synthetic oligonucleotide
  Sense strand starting at position 1157 of SEQ ID NO: 586061
cguaaauauacucaacgga

SEQ ID NO: 689113 - RNA, 19 nt, Artificial Sequence
  Description of Artificial Sequence: Synthetic oligonucleotide
  Antisense strand to SEQ ID NO: 689112
uccguugaguauauuuacg

SEQ ID NO: 689114 - RNA, 19 nt, Artificial Sequence
  Description of Artificial Sequence: Synthetic oligonucleotide
  Sense strand starting at position 1206 of SEQ ID NO: 586061
gguggugguggcagucaaa

SEQ ID NO: 689115 - RNA, 19 nt, Artificial Sequence
  Description of Artificial Sequence: Synthetic oligonucleotide
  Antisense strand to SEQ ID NO: 689114
uuugacugccaccaccacc

SEQ ID NO: 689116 - RNA, 19 nt, Artificial Sequence
  Description of Artificial Sequence: Synthetic oligonucleotide
  Sense strand starting at position 1209 of SEQ ID NO: 586061
ggugguggcagucaaagua

SEQ ID NO: 689117 - RNA, 19 nt, Artificial Sequence
  Description of Artificial Sequence: Synthetic oligonucleotide
  Antisense strand to SEQ ID NO: 689116
uacuuugacugccaccacc

SEQ ID NO: 689118 - RNA, 19 nt, Artificial Sequence
  Description of Artificial Sequence: Synthetic oligonucleotide
  Sense strand starting at position 1219 of SEQ ID NO: 586061
gucaaaguagccugacaaa

SEQ ID NO: 689119 - RNA, 19 nt, Artificial Sequence
  Description of Artificial Sequence: Synthetic oligonucleotide
  Antisense strand to SEQ ID NO: 689118
uuugucaggcuacuuugac

SEQ ID NO: 689120 - RNA, 19 nt, Artificial Sequence
  Description of Artificial Sequence: Synthetic oligonucleotide
  Sense strand starting at position 1741 of SEQ ID NO: 586061
caacuaaggcgucagaauc

SEQ ID NO: 689121 - RNA, 19 nt, Artificial Sequence
  Description of Artificial Sequence: Synthetic oligonucleotide
  Antisense strand to SEQ ID NO: 689120
gauucugacgccuuaguug

SEQ ID NO: 689122 - RNA, 19 nt, Artificial Sequence
  Description of Artificial Sequence: Synthetic oligonucleotide
  Sense strand starting at position 2063 of SEQ ID NO: 586061
ccggaagcucucuaggagu

SEQ ID NO: 689123 - RNA, 19 nt, Artificial Sequence
  Description of Artificial Sequence: Synthetic oligonucleotide
  Antisense strand to SEQ ID NO: 689122
acuccuagagagcuuccgg

SEQ ID NO: 689124 - RNA, 19 nt, Artificial Sequence
  Description of Artificial Sequence: Synthetic oligonucleotide
  Sense strand starting at position 2327 of SEQ ID NO: 586061
ggaggcuggagcugugaau

SEQ ID NO: 689125 - RNA, 19 nt, Artificial Sequence
  Description of Artificial Sequence: Synthetic oligonucleotide
  Antisense strand to SEQ ID NO: 689124
auucacagcuccagccucc

SEQ ID NO: 689126 - RNA, 19 nt, Artificial Sequence
  Description of Artificial Sequence: Synthetic oligonucleotide
  Sense strand starting at position 2527 of SEQ ID NO: 586061
uugugaaaucccuauggca

SEQ ID NO: 689127 - RNA, 19 nt, Artificial Sequence
  Description of Artificial Sequence: Synthetic oligonucleotide
  Antisense strand to SEQ ID NO: 689126
ugccauagggauuucacaa

SEQ ID NO: 689128 - RNA, 19 nt, Artificial Sequence
  Description of Artificial Sequence: Synthetic oligonucleotide
  Sense strand starting at position 2529 of SEQ ID NO: 586061
gugaaaucccuauggcaug

SEQ ID NO: 689129 - RNA, 19 nt, Artificial Sequence
  Description of Artificial Sequence: Synthetic oligonucleotide
  Antisense strand to SEQ ID NO: 689128
caugccauagggauuucac

SEQ ID NO: 689130 - RNA, 19 nt, Artificial Sequence
  Description of Artificial Sequence: Synthetic oligonucleotide
  Sense strand starting at position 2541 of SEQ ID NO: 586061
uggcauggcacuuaggaau

SEQ ID NO: 689131 - RNA, 19 nt, Artificial Sequence
  Description of Artificial Sequence: Synthetic oligonucleotide
  Antisense strand to SEQ ID NO: 689130
auuccuaagugccaugcca

SEQ ID NO: 689132 - RNA, 19 nt, Artificial Sequence
  Description of Artificial Sequence: Synthetic oligonucleotide
  Sense strand starting at position 2547 of SEQ ID NO: 586061
ggcacuuaggaauagcaua

SEQ ID NO: 689133 - RNA, 19 nt, Artificial Sequence
  Description of Artificial Sequence: Synthetic oligonucleotide
  Antisense strand to SEQ ID NO: 689132
uaugcuauuccuaagugcc

SEQ ID NO: 689134 - RNA, 19 nt, Artificial Sequence
  Description of Artificial Sequence: Synthetic oligonucleotide
  Sense strand starting at position 2652 of SEQ ID NO: 586061
auuucuaucgcuuacagca

SEQ ID NO: 689135 - RNA, 19 nt, Artificial Sequence
  Description of Artificial Sequence: Synthetic oligonucleotide
  Antisense strand to SEQ ID NO: 689134
ugcuguaagcgauagaaau

SEQ ID NO: 689136 - RNA, 19 nt, Artificial Sequence
  Description of Artificial Sequence: Synthetic oligonucleotide
  Sense strand starting at position 2696 of SEQ ID NO: 586061
augcuaaaccuaugaugua

SEQ ID NO: 689137 - RNA, 19 nt, Artificial Sequence
  Description of Artificial Sequence: Synthetic oligonucleotide
  Antisense strand to SEQ ID NO: 689136
uacaucauagguuuagcau

SEQ ID NO: 689138 - RNA, 19 nt, Artificial Sequence
  Description of Artificial Sequence: Synthetic oligonucleotide
  Sense strand starting at position 2708 of SEQ ID NO: 586061
ugauguaagcuugaagagu

SEQ ID NO: 689139 - RNA, 19 nt, Artificial Sequence
  Description of Artificial Sequence: Synthetic oligonucleotide
  Antisense strand to SEQ ID NO: 689138
acucuucaagcuuacauca

SEQ ID NO: 689140 - RNA, 19 nt, Artificial Sequence
  Description of Artificial Sequence: Synthetic oligonucleotide
  Sense strand starting at position 2724 of SEQ ID NO: 586061
aguagacccuagguuuaau

SEQ ID NO: 689141 - RNA, 19 nt, Artificial Sequence
  Description of Artificial Sequence: Synthetic oligonucleotide
  Antisense strand to SEQ ID NO: 689140
auuaaaccuagggucuacu

SEQ ID NO: 689142 - RNA, 19 nt, Artificial Sequence
  Description of Artificial Sequence: Synthetic oligonucleotide
  Sense strand starting at position 2834 of SEQ ID NO: 586061
gucucuauugcagagugua

SEQ ID NO: 689143 - RNA, 19 nt, Artificial Sequence
  Description of Artificial Sequence: Synthetic oligonucleotide
  Antisense strand to SEQ ID NO: 689142
uacacucugcaauagagac

SEQ ID NO: 689144 - RNA, 19 nt, Artificial Sequence
  Description of Artificial Sequence: Synthetic oligonucleotide
  Sense strand starting at position 3255 of SEQ ID NO: 586061
accuauuauugaguucuca

SEQ ID NO: 689145 - RNA, 19 nt, Artificial Sequence
  Description of Artificial Sequence: Synthetic oligonucleotide
  Antisense strand to SEQ ID NO: 689144
ugagaacucaauaauaggu

SEQ ID NO: 689146 - RNA, 19 nt, Artificial Sequence
  Description of Artificial Sequence: Synthetic oligonucleotide
  Sense strand starting at position 3925 of SEQ ID NO: 586061
ucugaaguugugcacauau

SEQ ID NO: 689147 - RNA, 19 nt, Artificial Sequence
  Description of Artificial Sequence: Synthetic oligonucleotide
  Antisense strand to SEQ ID NO: 689146
auaugugcacaacuucaga

SEQ ID NO: 689148 - RNA, 19 nt, Artificial Sequence
  Description of Artificial Sequence: Synthetic oligonucleotide
  Sense strand starting at position 3927 of SEQ ID NO: 586061
ugaaguugugcacauaugu

SEQ ID NO: 689149 - RNA, 19 nt, Artificial Sequence
  Description of Artificial Sequence: Synthetic oligonucleotide
  Antisense strand to SEQ ID NO: 689148
acauaugugcacaacuuca

SEQ ID NO: 689150 - RNA, 19 nt, Artificial Sequence
  Description of Artificial Sequence: Synthetic oligonucleotide
  Sense strand starting at position 3936 of SEQ ID NO: 586061
gcacauauguaguuguaca

SEQ ID NO: 689151 - RNA, 19 nt, Artificial Sequence
  Description of Artificial Sequence: Synthetic oligonucleotide
  Antisense strand to SEQ ID NO: 689150
uguacaacuacauaugugc

SEQ ID NO: 689152 - RNA, 19 nt, Artificial Sequence
  Description of Artificial Sequence: Synthetic oligonucleotide
  Sense strand starting at position 207 of SEQ ID NO: 586062
ggaggaauuugcuagaaua

SEQ ID NO: 689153 - RNA, 19 nt, Artificial Sequence
  Description of Artificial Sequence: Synthetic oligonucleotide
  Antisense strand to SEQ ID NO: 689152
uauucuagcaaauuccucc

SEQ ID NO: 689154 - RNA, 19 nt, Artificial Sequence
  Description of Artificial Sequence: Synthetic oligonucleotide
  Sense strand starting at position 242 of SEQ ID NO: 586062
gagugaauuugaggaagau

SEQ ID NO: 689155 - RNA, 19 nt, Artificial Sequence
  Description of Artificial Sequence: Synthetic oligonucleotide
  Antisense strand to SEQ ID NO: 689154
aucuuccucaaauucacuc

SEQ ID NO: 689156 - RNA, 19 nt, Artificial Sequence
  Description of Artificial Sequence: Synthetic oligonucleotide
  Sense strand starting at position 269 of SEQ ID NO: 586062
uuuguugagaaaggguaau

SEQ ID NO: 689157 - RNA, 19 nt, Artificial Sequence
  Description of Artificial Sequence: Synthetic oligonucleotide
  Antisense strand to SEQ ID NO: 689156
auuacccuuucucaacaaa

SEQ ID NO: 689158 - RNA, 19 nt, Artificial Sequence
  Description of Artificial Sequence: Synthetic oligonucleotide
  Sense strand starting at position 428 of SEQ ID NO: 586062
cuacuuaugguuuaauguu

SEQ ID NO: 689159 - RNA, 19 nt, Artificial Sequence
  Description of Artificial Sequence: Synthetic oligonucleotide
  Antisense strand to SEQ ID NO: 689158
aacauuaaaccauaaguag

SEQ ID NO: 689160 - RNA, 19 nt, Artificial Sequence
  Description of Artificial Sequence: Synthetic oligonucleotide
  Sense strand starting at position 479 of SEQ ID NO: 586062
uucuguuuagaaugugaug

SEQ ID NO: 689161 - RNA, 19 nt, Artificial Sequence
  Description of Artificial Sequence: Synthetic oligonucleotide
  Antisense strand to SEQ ID NO: 689160
caucacauucuaaacagaa

SEQ ID NO: 689162 - RNA, 19 nt, Artificial Sequence
  Description of Artificial Sequence: Synthetic oligonucleotide
  Sense strand starting at position 566 of SEQ ID NO: 586062
ugaacaacuggccaucuau

SEQ ID NO: 689163 - RNA, 19 nt, Artificial Sequence
  Description of Artificial Sequence: Synthetic oligonucleotide
  Antisense strand to SEQ ID NO: 689162
auagauggccaguuguuca

SEQ ID NO: 689164 - RNA, 19 nt, Artificial Sequence
  Description of Artificial Sequence: Synthetic oligonucleotide
  Sense strand starting at position 965 of SEQ ID NO: 586062
auaaauaacugagugcaaa

SEQ ID NO: 689165 - RNA, 19 nt, Artificial Sequence
  Description of Artificial Sequence: Synthetic oligonucleotide
  Antisense strand to SEQ ID NO: 689164
uuugcacucaguuauuuau

SEQ ID NO: 689166 - RNA, 19 nt, Artificial Sequence
  Description of Artificial Sequence: Synthetic oligonucleotide
  Sense strand starting at position 1019 of SEQ ID NO: 586062
cguacaugucuguauuaag

SEQ ID NO: 689167 - RNA, 19 nt, Artificial Sequence
  Description of Artificial Sequence: Synthetic oligonucleotide
  Antisense strand to SEQ ID NO: 689166
cuuaauacagacauguacg

SEQ ID NO: 689168 - RNA, 19 nt, Artificial Sequence
  Description of Artificial Sequence: Synthetic oligonucleotide
  Sense strand starting at position 1029 of SEQ ID NO: 586062
uguauuaaguuggugagca

SEQ ID NO: 689169 - RNA, 19 nt, Artificial Sequence
  Description of Artificial Sequence: Synthetic oligonucleotide
  Antisense strand to SEQ ID NO: 689168
ugcucaccaacuuaauaca

SEQ ID NO: 689170 - RNA, 19 nt, Artificial Sequence
  Description of Artificial Sequence: Synthetic oligonucleotide
  Sense strand starting at position 1039 of SEQ ID NO: 586062
uggugagcacuuuguggau

SEQ ID NO: 689171 - RNA, 19 nt, Artificial Sequence
  Description of Artificial Sequence: Synthetic oligonucleotide
  Antisense strand to SEQ ID NO: 689170
auccacaaagugcucacca

SEQ ID NO: 689172 - RNA, 19 nt, Artificial Sequence
  Description of Artificial Sequence: Synthetic oligonucleotide
  Sense strand starting at position 1093 of SEQ ID NO: 586062
ccuagucaaguuuacauga

SEQ ID NO: 689173 - RNA, 19 nt, Artificial Sequence
  Description of Artificial Sequence: Synthetic oligonucleotide
  Antisense strand to SEQ ID NO: 689172
ucauguaaacuugacuagg

SEQ ID NO: 689174 - RNA, 19 nt, Artificial Sequence
  Description of Artificial Sequence: Synthetic oligonucleotide
  Sense strand starting at position 1098 of SEQ ID NO: 586062
ucaaguuuacaugaguuua

SEQ ID NO: 689175 - RNA, 19 nt, Artificial Sequence
  Description of Artificial Sequence: Synthetic oligonucleotide
  Antisense strand to SEQ ID NO: 689174
uaaacucauguaaacuuga

SEQ ID NO: 689176 - RNA, 19 nt, Artificial Sequence
  Description of Artificial Sequence: Synthetic oligonucleotide
  Sense strand starting at position 1126 of SEQ ID NO: 586062
cuuuaaagcuuccucugga

SEQ ID NO: 689177 - RNA, 19 nt, Artificial Sequence
  Description of Artificial Sequence: Synthetic oligonucleotide
  Antisense strand to SEQ ID NO: 689176
uccagaggaagcuuuaaag

SEQ ID NO: 689178 - RNA, 19 nt, Artificial Sequence
  Description of Artificial Sequence: Synthetic oligonucleotide
  Sense strand starting at position 1127 of SEQ ID NO: 586062
uuuaaagcuuccucuggau

SEQ ID NO: 689179 - RNA, 19 nt, Artificial Sequence
  Description of Artificial Sequence: Synthetic oligonucleotide
  Antisense strand to SEQ ID NO: 689178
auccagaggaagcuuuaaa

SEQ ID NO: 689180 - RNA, 19 nt, Artificial Sequence
  Description of Artificial Sequence: Synthetic oligonucleotide
  Sense strand starting at position 1153 of SEQ ID NO: 586062
acuguaauccugugagaug

SEQ ID NO: 689181 - RNA, 19 nt, Artificial Sequence
  Description of Artificial Sequence: Synthetic oligonucleotide
  Antisense strand to SEQ ID NO: 689180
caucucacaggauuacagu

SEQ ID NO: 689182 - RNA, 19 nt, Artificial Sequence
  Description of Artificial Sequence: Synthetic oligonucleotide
  Sense strand starting at position 1217 of SEQ ID NO: 586062
guggaaggaauguauucuu

SEQ ID NO: 689183 - RNA, 19 nt, Artificial Sequence
  Description of Artificial Sequence: Synthetic oligonucleotide
  Antisense strand to SEQ ID NO: 689182
aagaauacauuccuuccac

SEQ ID NO: 689184 - RNA, 19 nt, Artificial Sequence
  Description of Artificial Sequence: Synthetic oligonucleotide
  Sense strand starting at position 1220 of SEQ ID NO: 586062
gaaggaauguauucuuccu

SEQ ID NO: 689185 - RNA, 19 nt, Artificial Sequence
  Description of Artificial Sequence: Synthetic oligonucleotide
  Antisense strand to SEQ ID NO: 689184
aggaagaauacauuccuuc

SEQ ID NO: 689186 - RNA, 19 nt, Artificial Sequence
  Description of Artificial Sequence: Synthetic oligonucleotide
  Sense strand starting at position 1247 of SEQ ID NO: 586062
ugucuaauuugagaaaugu

SEQ ID NO: 689187 - RNA, 19 nt, Artificial Sequence
  Description of Artificial Sequence: Synthetic oligonucleotide
  Antisense strand to SEQ ID NO: 689186
acauuucucaaauuagaca

SEQ ID NO: 689188 - RNA, 19 nt, Artificial Sequence
  Description of Artificial Sequence: Synthetic oligonucleotide
  Sense strand starting at position 1337 of SEQ ID NO: 586062
auacuaugcuuuguuaucu

SEQ ID NO: 689189 - RNA, 19 nt, Artificial Sequence
  Description of Artificial Sequence: Synthetic oligonucleotide
  Antisense strand to SEQ ID NO: 689188
agauaacaaagcauaguau

SEQ ID NO: 689190 - RNA, 19 nt, Artificial Sequence
  Description of Artificial Sequence: Synthetic oligonucleotide
  Sense strand starting at position 1359 of SEQ ID NO: 586062
auugcauuagcugaaaguu

SEQ ID NO: 689191 - RNA, 19 nt, Artificial Sequence
  Description of Artificial Sequence: Synthetic oligonucleotide
  Antisense strand to SEQ ID NO: 689190
aacuuucagcuaaugcaau

SEQ ID NO: 689192 - RNA, 19 nt, Artificial Sequence
  Description of Artificial Sequence: Synthetic oligonucleotide
  Sense strand starting at position 1443 of SEQ ID NO: 586062
aaacaaugauugcuacgua

SEQ ID NO: 689193 - RNA, 19 nt, Artificial Sequence
  Description of Artificial Sequence: Synthetic oligonucleotide
  Antisense strand to SEQ ID NO: 689192
uacguagcaaucauuguuu

SEQ ID NO: 689194 - RNA, 19 nt, Artificial Sequence
  Description of Artificial Sequence: Synthetic oligonucleotide
  Sense strand starting at position 1446 of SEQ ID NO: 586062
caaugauugcuacguaaau

SEQ ID NO: 689195 - RNA, 19 nt, Artificial Sequence
  Description of Artificial Sequence: Synthetic oligonucleotide
  Antisense strand to SEQ ID NO: 689194
auuuacguagcaaucauug

SEQ ID NO: 689196 - RNA, 19 nt, Artificial Sequence
  Description of Artificial Sequence: Synthetic oligonucleotide
  Sense strand starting at position 1447 of SEQ ID NO: 586062
aaugauugcuacguaaaua

SEQ ID NO: 689197 - RNA, 19 nt, Artificial Sequence
  Description of Artificial Sequence: Synthetic oligonucleotide
  Antisense strand to SEQ ID NO: 689196
uauuuacguagcaaucauu

SEQ ID NO: 689198 - RNA, 19 nt, Artificial Sequence
  Description of Artificial Sequence: Synthetic oligonucleotide
  Sense strand starting at position 1458 of SEQ ID NO: 586062
cguaaauauacucaacgga

SEQ ID NO: 689199 - RNA, 19 nt, Artificial Sequence
  Description of Artificial Sequence: Synthetic oligonucleotide
  Antisense strand to SEQ ID NO: 689198
uccguugaguauauuuacg

SEQ ID NO: 689200 - RNA, 19 nt, Artificial Sequence
  Description of Artificial Sequence: Synthetic oligonucleotide
  Sense strand starting at position 1507 of SEQ ID NO: 586062
gguggugguggcagucaaa

SEQ ID NO: 689201 - RNA, 19 nt, Artificial Sequence
  Description of Artificial Sequence: Synthetic oligonucleotide
  Antisense strand to SEQ ID NO: 689200
uuugacugccaccaccacc

SEQ ID NO: 689202 - RNA, 19 nt, Artificial Sequence
  Description of Artificial Sequence: Synthetic oligonucleotide
  Sense strand starting at position 1510 of SEQ ID NO: 586062
ggugguggcagucaaagua

SEQ ID NO: 689203 - RNA, 19 nt, Artificial Sequence
  Description of Artificial Sequence: Synthetic oligonucleotide
  Antisense strand to SEQ ID NO: 689202
uacuuugacugccaccacc

SEQ ID NO: 689204 - RNA, 19 nt, Artificial Sequence
  Description of Artificial Sequence: Synthetic oligonucleotide
  Sense strand starting at position 1520 of SEQ ID NO: 586062
gucaaaguagccugacaaa

SEQ ID NO: 689205 - RNA, 19 nt, Artificial Sequence
  Description of Artificial Sequence: Synthetic oligonucleotide
  Antisense strand to SEQ ID NO: 689204
uuugucaggcuacuuugac

SEQ ID NO: 689206 - RNA, 19 nt, Artificial Sequence
  Description of Artificial Sequence: Synthetic oligonucleotide
  Sense strand starting at position 2042 of SEQ ID NO: 586062
caacuaaggcgucagaauc

SEQ ID NO: 689207 - RNA, 19 nt, Artificial Sequence
  Description of Artificial Sequence: Synthetic oligonucleotide
  Antisense strand to SEQ ID NO: 689206
gauucugacgccuuaguug

SEQ ID NO: 689208 - RNA, 19 nt, Artificial Sequence
  Description of Artificial Sequence: Synthetic oligonucleotide
  Sense strand starting at position 2364 of SEQ ID NO: 586062
ccggaagcucucuaggagu

SEQ ID NO: 689209 - RNA, 19 nt, Artificial Sequence
  Description of Artificial Sequence: Synthetic oligonucleotide
  Antisense strand to SEQ ID NO: 689208
acuccuagagagcuuccgg

SEQ ID NO: 689210 - RNA, 19 nt, Artificial Sequence
  Description of Artificial Sequence: Synthetic oligonucleotide
  Sense strand starting at position 2628 of SEQ ID NO: 586062
ggaggcuggagcugugaau

SEQ ID NO: 689211 - RNA, 19 nt, Artificial Sequence
  Description of Artificial Sequence: Synthetic oligonucleotide
  Antisense strand to SEQ ID NO: 689210
auucacagcuccagccucc

SEQ ID NO: 689212 - RNA, 19 nt, Artificial Sequence
  Description of Artificial Sequence: Synthetic oligonucleotide
  Sense strand starting at position 2828 of SEQ ID NO: 586062
uugugaaaucccuauggca

SEQ ID NO: 689213 - RNA, 19 nt, Artificial Sequence
  Description of Artificial Sequence: Synthetic oligonucleotide
  Antisense strand to SEQ ID NO: 689212
ugccauagggauuucacaa

SEQ ID NO: 689214 - RNA, 19 nt, Artificial Sequence
  Description of Artificial Sequence: Synthetic oligonucleotide
  Sense strand starting at position 2830 of SEQ ID NO: 586062
gugaaaucccuauggcaug

SEQ ID NO: 689215 - RNA, 19 nt, Artificial Sequence
  Description of Artificial Sequence: Synthetic oligonucleotide
  Antisense strand to SEQ ID NO: 689214
caugccauagggauuucac

SEQ ID NO: 689216 - RNA, 19 nt, Artificial Sequence
  Description of Artificial Sequence: Synthetic oligonucleotide
  Sense strand starting at position 2842 of SEQ ID NO: 586062
uggcauggcacuuaggaau

SEQ ID NO: 689217 - RNA, 19 nt, Artificial Sequence
  Description of Artificial Sequence: Synthetic oligonucleotide
  Antisense strand to SEQ ID NO: 689216
auuccuaagugccaugcca

SEQ ID NO: 689218 - RNA, 19 nt, Artificial Sequence
  Description of Artificial Sequence: Synthetic oligonucleotide
  Sense strand starting at position 2848 of SEQ ID NO: 586062
ggcacuuaggaauagcaua

SEQ ID NO: 689219 - RNA, 19 nt, Artificial Sequence
  Description of Artificial Sequence: Synthetic oligonucleotide
  Antisense strand to SEQ ID NO: 689218
uaugcuauuccuaagugcc

SEQ ID NO: 689220 - RNA, 19 nt, Artificial Sequence
  Description of Artificial Sequence: Synthetic oligonucleotide
  Sense strand starting at position 2953 of SEQ ID NO: 586062
auuucuaucgcuuacagca

SEQ ID NO: 689221 - RNA, 19 nt, Artificial Sequence
  Description of Artificial Sequence: Synthetic oligonucleotide
  Antisense strand to SEQ ID NO: 689220
ugcuguaagcgauagaaau

SEQ ID NO: 689222 - RNA, 19 nt, Artificial Sequence
  Description of Artificial Sequence: Synthetic oligonucleotide
  Sense strand starting at position 2997 of SEQ ID NO: 586062
augcuaaaccuaugaugua

SEQ ID NO: 689223 - RNA, 19 nt, Artificial Sequence
  Description of Artificial Sequence: Synthetic oligonucleotide
  Antisense strand to SEQ ID NO: 689222
uacaucauagguuuagcau

SEQ ID NO: 689224 - RNA, 19 nt, Artificial Sequence
  Description of Artificial Sequence: Synthetic oligonucleotide
  Sense strand starting at position 3009 of SEQ ID NO: 586062
ugauguaagcuugaagagu

SEQ ID NO: 689225 - RNA, 19 nt, Artificial Sequence
  Description of Artificial Sequence: Synthetic oligonucleotide
  Antisense strand to SEQ ID NO: 689224
acucuucaagcuuacauca

SEQ ID NO: 689226 - RNA, 19 nt, Artificial Sequence
  Description of Artificial Sequence: Synthetic oligonucleotide
  Sense strand starting at position 3025 of SEQ ID NO: 586062
aguagacccuagguuuaau

SEQ ID NO: 689227 - RNA, 19 nt, Artificial Sequence
  Description of Artificial Sequence: Synthetic oligonucleotide
  Antisense strand to SEQ ID NO: 689226
auuaaaccuagggucuacu

SEQ ID NO: 689228 - RNA, 19 nt, Artificial Sequence
  Description of Artificial Sequence: Synthetic oligonucleotide
  Sense strand starting at position 3135 of SEQ ID NO: 586062
gucucuauugcagagugua

SEQ ID NO: 689229 - RNA, 19 nt, Artificial Sequence
  Description of Artificial Sequence: Synthetic oligonucleotide
  Antisense strand to SEQ ID NO: 689228
uacacucugcaauagagac

SEQ ID NO: 689230 - RNA, 19 nt, Artificial Sequence
  Description of Artificial Sequence: Synthetic oligonucleotide
  Sense strand starting at position 3556 of SEQ ID NO: 586062
accuauuauugaguucuca

SEQ ID NO: 689231 - RNA, 19 nt, Artificial Sequence
  Description of Artificial Sequence: Synthetic oligonucleotide
  Antisense strand to SEQ ID NO: 689230
ugagaacucaauaauaggu

SEQ ID NO: 689232 - RNA, 19 nt, Artificial Sequence
  Description of Artificial Sequence: Synthetic oligonucleotide
  Sense strand starting at position 237 of SEQ ID NO: 586063
gcuugcugucaauaaauaa

SEQ ID NO: 689233 - RNA, 19 nt, Artificial Sequence
  Description of Artificial Sequence: Synthetic oligonucleotide
  Antisense strand to SEQ ID NO: 689232
uuauuuauugacagcaagc

SEQ ID NO: 689234 - RNA, 19 nt, Artificial Sequence
  Description of Artificial Sequence: Synthetic oligonucleotide
  Sense strand starting at position 385 of SEQ ID NO: 586063
gagcuugucuuggcagaca

SEQ ID NO: 689235 - RNA, 19 nt, Artificial Sequence
  Description of Artificial Sequence: Synthetic oligonucleotide
  Antisense strand to SEQ ID NO: 689234
ugucugccaagacaagcuc

SEQ ID NO: 689236 - RNA, 19 nt, Artificial Sequence
  Description of Artificial Sequence: Synthetic oligonucleotide
  Sense strand starting at position 388 of SEQ ID NO: 586063
cuugucuuggcagacaaga

SEQ ID NO: 689237 - RNA, 19 nt, Artificial Sequence
  Description of Artificial Sequence: Synthetic oligonucleotide
  Antisense strand to SEQ ID NO: 689236
ucuugucugccaagacaag

SEQ ID NO: 689238 - RNA, 19 nt, Artificial Sequence
  Description of Artificial Sequence: Synthetic oligonucleotide
  Sense strand starting at position 390 of SEQ ID NO: 586063
ugucuuggcagacaagauu

SEQ ID NO: 689239 - RNA, 19 nt, Artificial Sequence
  Description of Artificial Sequence: Synthetic oligonucleotide
  Antisense strand to SEQ ID NO: 689238
aaucuugucugccaagaca

SEQ ID NO: 689240 - RNA, 19 nt, Artificial Sequence
  Description of Artificial Sequence: Synthetic oligonucleotide
  Sense strand starting at position 418 of SEQ ID NO: 586063
gguaguugaagauauguaa

SEQ ID NO: 689241 - RNA, 19 nt, Artificial Sequence
  Description of Artificial Sequence: Synthetic oligonucleotide
  Antisense strand to SEQ ID NO: 689240
uuacauaucuucaacuacc

SEQ ID NO: 689242 - RNA, 19 nt, Artificial Sequence
  Description of Artificial Sequence: Synthetic oligonucleotide
  Sense strand starting at position 422 of SEQ ID NO: 586063
guugaagauauguaacagu

SEQ ID NO: 689243 - RNA, 19 nt, Artificial Sequence
  Description of Artificial Sequence: Synthetic oligonucleotide
  Antisense strand to SEQ ID NO: 689242
acuguuacauaucuucaac

SEQ ID NO: 689244 - RNA, 19 nt, Artificial Sequence
  Description of Artificial Sequence: Synthetic oligonucleotide
  Sense strand starting at position 438 of SEQ ID NO: 586063
aguauuaauucuccaagag

SEQ ID NO: 689245 - RNA, 19 nt, Artificial Sequence
  Description of Artificial Sequence: Synthetic oligonucleotide
  Antisense strand to SEQ ID NO: 689244
cucuuggagaauuaauacu

SEQ ID NO: 689246 - RNA, 19 nt, Artificial Sequence
  Description of Artificial Sequence: Synthetic oligonucleotide
  Sense strand starting at position 439 of SEQ ID NO: 586063
guauuaauucuccaagagu

SEQ ID NO: 689247 - RNA, 19 nt, Artificial Sequence
  Description of Artificial Sequence: Synthetic oligonucleotide
  Antisense strand to SEQ ID NO: 689246
acucuuggagaauuaauac

SEQ ID NO: 689248 - RNA, 19 nt, Artificial Sequence
  Description of Artificial Sequence: Synthetic oligonucleotide
  Sense strand starting at position 509 of SEQ ID NO: 586063
gaguauaaguaagaacaaa

SEQ ID NO: 689249 - RNA, 19 nt, Artificial Sequence
  Description of Artificial Sequence: Synthetic oligonucleotide
  Antisense strand to SEQ ID NO: 689248
uuuguucuuacuuauacuc

SEQ ID NO: 689250 - RNA, 19 nt, Artificial Sequence
  Description of Artificial Sequence: Synthetic oligonucleotide
  Sense strand starting at position 556 of SEQ ID NO: 586063
ggguuaguuccaugguaua

SEQ ID NO: 689251 - RNA, 19 nt, Artificial Sequence
  Description of Artificial Sequence: Synthetic oligonucleotide
  Antisense strand to SEQ ID NO: 689250
uauaccauggaacuaaccc

SEQ ID NO: 689252 - RNA, 19 nt, Artificial Sequence
  Description of Artificial Sequence: Synthetic oligonucleotide
  Sense strand starting at position 610 of SEQ ID NO: 586063
ggccauuucuuugauauuu

SEQ ID NO: 689253 - RNA, 19 nt, Artificial Sequence
  Description of Artificial Sequence: Synthetic oligonucleotide
  Antisense strand to SEQ ID NO: 689252
aaauaucaaagaaauggcc

SEQ ID NO: 689254 - RNA, 19 nt, Artificial Sequence
  Description of Artificial Sequence: Synthetic oligonucleotide
  Sense strand starting at position 629 of SEQ ID NO: 586063
cugguuauguuuccuagau

SEQ ID NO: 689255 - RNA, 19 nt, Artificial Sequence
  Description of Artificial Sequence: Synthetic oligonucleotide
  Antisense strand to SEQ ID NO: 689254
aucuaggaaacauaaccag

SEQ ID NO: 689256 - RNA, 19 nt, Artificial Sequence
  Description of Artificial Sequence: Synthetic oligonucleotide
  Sense strand starting at position 662 of SEQ ID NO: 586063
guguccuaaugcuuaauga

SEQ ID NO: 689257 - RNA, 19 nt, Artificial Sequence
  Description of Artificial Sequence: Synthetic oligonucleotide
  Antisense strand to SEQ ID NO: 689256
ucauuaagcauuaggacac

SEQ ID NO: 689258 - RNA, 19 nt, Artificial Sequence
  Description of Artificial Sequence: Synthetic oligonucleotide
  Sense strand starting at position 672 of SEQ ID NO: 586063
gcuuaaugagcaugaucuc

SEQ ID NO: 689259 - RNA, 19 nt, Artificial Sequence
  Description of Artificial Sequence: Synthetic oligonucleotide
  Antisense strand to SEQ ID NO: 689258
gagaucaugcucauuaagc

SEQ ID NO: 689260 - RNA, 19 nt, Artificial Sequence
  Description of Artificial Sequence: Synthetic oligonucleotide
  Sense strand starting at position 673 of SEQ ID NO: 586063
cuuaaugagcaugaucuca

SEQ ID NO: 689261 - RNA, 19 nt, Artificial Sequence
  Description of Artificial Sequence: Synthetic oligonucleotide
  Antisense strand to SEQ ID NO: 689260
ugagaucaugcucauuaag

SEQ ID NO: 689262 - RNA, 19 nt, Artificial Sequence
  Description of Artificial Sequence: Synthetic oligonucleotide
  Sense strand starting at position 678 of SEQ ID NO: 586063
ugagcaugaucucauuuac

SEQ ID NO: 689263 - RNA, 19 nt, Artificial Sequence
  Description of Artificial Sequence: Synthetic oligonucleotide
  Antisense strand to SEQ ID NO: 689262
guaaaugagaucaugcuca

SEQ ID NO: 689264 - RNA, 19 nt, Artificial Sequence
  Description of Artificial Sequence: Synthetic oligonucleotide
  Sense strand starting at position 697 of SEQ ID NO: 586063
cauaguaagauggguguaa

SEQ ID NO: 689265 - RNA, 19 nt, Artificial Sequence
  Description of Artificial Sequence: Synthetic oligonucleotide
  Antisense strand to SEQ ID NO: 689264
uuacacccaucuuacuaug

SEQ ID NO: 689266 - RNA, 19 nt, Artificial Sequence
  Description of Artificial Sequence: Synthetic oligonucleotide
  Sense strand starting at position 698 of SEQ ID NO: 586063
auaguaagauggguguaaa

SEQ ID NO: 689267 - RNA, 19 nt, Artificial Sequence
  Description of Artificial Sequence: Synthetic oligonucleotide
  Antisense strand to SEQ ID NO: 689266
uuuacacccaucuuacuau

SEQ ID NO: 689268 - RNA, 19 nt, Artificial Sequence
  Description of Artificial Sequence: Synthetic oligonucleotide
  Sense strand starting at position 699 of SEQ ID NO: 586063
uaguaagauggguguaaag

SEQ ID NO: 689269 - RNA, 19 nt, Artificial Sequence
  Description of Artificial Sequence: Synthetic oligonucleotide
  Antisense strand to SEQ ID NO: 689268
cuuuacacccaucuuacua

SEQ ID NO: 689270 - RNA, 19 nt, Artificial Sequence
  Description of Artificial Sequence: Synthetic oligonucleotide
  Sense strand starting at position 701 of SEQ ID NO: 586063
guaagauggguguaaagua

SEQ ID NO: 689271 - RNA, 19 nt, Artificial Sequence
  Description of Artificial Sequence: Synthetic oligonucleotide
  Antisense strand to SEQ ID NO: 689270
uacuuuacacccaucuuac

SEQ ID NO: 689272 - RNA, 19 nt, Artificial Sequence
  Description of Artificial Sequence: Synthetic oligonucleotide
  Sense strand starting at position 776 of SEQ ID NO: 586063
guuaucucagcugacagua

SEQ ID NO: 689273 - RNA, 19 nt, Artificial Sequence
  Description of Artificial Sequence: Synthetic oligonucleotide
  Antisense strand to SEQ ID NO: 689272
uacugucagcugagauaac

SEQ ID NO: 689274 - RNA, 19 nt, Artificial Sequence
  Description of Artificial Sequence: Synthetic oligonucleotide
  Sense strand starting at position 845 of SEQ ID NO: 586063
uaaagcugguagcuuuaaa

SEQ ID NO: 689275 - RNA, 19 nt, Artificial Sequence
  Description of Artificial Sequence: Synthetic oligonucleotide
  Antisense strand to SEQ ID NO: 689274
uuuaaagcuaccagcuuua

SEQ ID NO: 689276 - RNA, 19 nt, Artificial Sequence
  Description of Artificial Sequence: Synthetic oligonucleotide
  Sense strand starting at position 881 of SEQ ID NO: 586063
agcaucuagugccuuauaa

SEQ ID NO: 689277 - RNA, 19 nt, Artificial Sequence
  Description of Artificial Sequence: Synthetic oligonucleotide
  Antisense strand to SEQ ID NO: 689276
uuauaaggcacuagaugcu

SEQ ID NO: 689278 - RNA, 19 nt, Artificial Sequence
  Description of Artificial Sequence: Synthetic oligonucleotide
  Sense strand starting at position 926 of SEQ ID NO: 586063
uggguaagcagauguguga

SEQ ID NO: 689279 - RNA, 19 nt, Artificial Sequence
  Description of Artificial Sequence: Synthetic oligonucleotide
  Antisense strand to SEQ ID NO: 689278
ucacacaucugcuuaccca

SEQ ID NO: 689280 - RNA, 19 nt, Artificial Sequence
  Description of Artificial Sequence: Synthetic oligonucleotide
  Sense strand starting at position 1015 of SEQ ID NO: 586063
gcuccugauggaugaacau

SEQ ID NO: 689281 - RNA, 19 nt, Artificial Sequence
  Description of Artificial Sequence: Synthetic oligonucleotide
  Antisense strand to SEQ ID NO: 689280
auguucauccaucaggagc

SEQ ID NO: 689282 - RNA, 19 nt, Artificial Sequence
  Description of Artificial Sequence: Synthetic oligonucleotide
  Sense strand starting at position 2512 of SEQ ID NO: 586063
agucuaaguuaauuccgau

SEQ ID NO: 689283 - RNA, 19 nt, Artificial Sequence
  Description of Artificial Sequence: Synthetic oligonucleotide
  Antisense strand to SEQ ID NO: 689282
aucggaauuaacuuagacu

SEQ ID NO: 689284 - RNA, 19 nt, Artificial Sequence
  Description of Artificial Sequence: Synthetic oligonucleotide
  Sense strand starting at position 2578 of SEQ ID NO: 586063
gcaguuucagugggaagga

SEQ ID NO: 689285 - RNA, 19 nt, Artificial Sequence
  Description of Artificial Sequence: Synthetic oligonucleotide
  Antisense strand to SEQ ID NO: 689284
uccuucccacugaaacugc

SEQ ID NO: 689286 - RNA, 19 nt, Artificial Sequence
  Description of Artificial Sequence: Synthetic oligonucleotide
  Sense strand starting at position 3106 of SEQ ID NO: 586063
auagacgugccagaguaaa

SEQ ID NO: 689287 - RNA, 19 nt, Artificial Sequence
  Description of Artificial Sequence: Synthetic oligonucleotide
  Antisense strand to SEQ ID NO: 689286
uuuacucuggcacgucuau

SEQ ID NO: 689288 - RNA, 19 nt, Artificial Sequence
  Description of Artificial Sequence: Synthetic oligonucleotide
  Sense strand starting at position 3117 of SEQ ID NO: 586063
agaguaaacuauguuucua

SEQ ID NO: 689289 - RNA, 19 nt, Artificial Sequence
  Description of Artificial Sequence: Synthetic oligonucleotide
  Antisense strand to SEQ ID NO: 689288
uagaaacauaguuuacucu

SEQ ID NO: 689290 - RNA, 19 nt, Artificial Sequence
  Description of Artificial Sequence: Synthetic oligonucleotide
  Sense strand starting at position 3129 of SEQ ID NO: 586063
guuucuauucagggaggua

SEQ ID NO: 689291 - RNA, 19 nt, Artificial Sequence
  Description of Artificial Sequence: Synthetic oligonucleotide
  Antisense strand to SEQ ID NO: 689290
uaccucccugaauagaaac

SEQ ID NO: 689292 - RNA, 19 nt, Artificial Sequence
  Description of Artificial Sequence: Synthetic oligonucleotide
  Sense strand starting at position 3218 of SEQ ID NO: 586063
cuacaaagaucgguaacga

SEQ ID NO: 689293 - RNA, 19 nt, Artificial Sequence
  Description of Artificial Sequence: Synthetic oligonucleotide
  Antisense strand to SEQ ID NO: 689292
ucguuaccgaucuuuguag

SEQ ID NO: 689294 - RNA, 19 nt, Artificial Sequence
  Description of Artificial Sequence: Synthetic oligonucleotide
  Sense strand starting at position 3346 of SEQ ID NO: 586063
ggcauacaagccugagaag

SEQ ID NO: 689295 - RNA, 19 nt, Artificial Sequence
  Description of Artificial Sequence: Synthetic oligonucleotide
  Antisense strand to SEQ ID NO: 689294
cuucucaggcuuguaugcc

SEQ ID NO: 689296 - RNA, 19 nt, Artificial Sequence
  Description of Artificial Sequence: Synthetic oligonucleotide
  Sense strand starting at position 3347 of SEQ ID NO: 586063
gcauacaagccugagaagu

SEQ ID NO: 689297 - RNA, 19 nt, Artificial Sequence
  Description of Artificial Sequence: Synthetic oligonucleotide
  Antisense strand to SEQ ID NO: 689296
acuucucaggcuuguaugc

SEQ ID NO: 689298 - RNA, 19 nt, Artificial Sequence
  Description of Artificial Sequence: Synthetic oligonucleotide
  Sense strand starting at position 3384 of SEQ ID NO: 586063
cuggcucuaucugucagau

SEQ ID NO: 689299 - RNA, 19 nt, Artificial Sequence
  Description of Artificial Sequence: Synthetic oligonucleotide
  Antisense strand to SEQ ID NO: 689298
aucugacagauagagccag

SEQ ID NO: 689300 - RNA, 19 nt, Artificial Sequence
  Description of Artificial Sequence: Synthetic oligonucleotide
  Sense strand starting at position 3440 of SEQ ID NO: 586063
gggcguguuggcucacuuu

SEQ ID NO: 689301 - RNA, 19 nt, Artificial Sequence
  Description of Artificial Sequence: Synthetic oligonucleotide
  Antisense strand to SEQ ID NO: 689300
aaagugagccaacacgccc

SEQ ID NO: 689302 - RNA, 19 nt, Artificial Sequence
  Description of Artificial Sequence: Synthetic oligonucleotide
  Sense strand starting at position 3722 of SEQ ID NO: 586063
uuaaaucucagguggugaa

SEQ ID NO: 689303 - RNA, 19 nt, Artificial Sequence
  Description of Artificial Sequence: Synthetic oligonucleotide
  Antisense strand to SEQ ID NO: 689302
uucaccaccugagauuuaa

SEQ ID NO: 689304 - RNA, 19 nt, Artificial Sequence
  Description of Artificial Sequence: Synthetic oligonucleotide
  Sense strand starting at position 3723 of SEQ ID NO: 586063
uaaaucucagguggugaaa

SEQ ID NO: 689305 - RNA, 19 nt, Artificial Sequence
  Description of Artificial Sequence: Synthetic oligonucleotide
  Antisense strand to SEQ ID NO: 689304
uuucaccaccugagauuua

SEQ ID NO: 689306 - RNA, 19 nt, Artificial Sequence
  Description of Artificial Sequence: Synthetic oligonucleotide
  Sense strand starting at position 3758 of SEQ ID NO: 586063
aggguugcaacugaaacuu

SEQ ID NO: 689307 - RNA, 19 nt, Artificial Sequence
  Description of Artificial Sequence: Synthetic oligonucleotide
  Antisense strand to SEQ ID NO: 689306
aaguuucaguugcaacccu

SEQ ID NO: 689308 - RNA, 19 nt, Artificial Sequence
  Description of Artificial Sequence: Synthetic oligonucleotide
  Sense strand starting at position 3898 of SEQ ID NO: 586063
cugucauugguccaugcau

SEQ ID NO: 689309 - RNA, 19 nt, Artificial Sequence
  Description of Artificial Sequence: Synthetic oligonucleotide
  Antisense strand to SEQ ID NO: 689308
augcauggaccaaugacag

SEQ ID NO: 689310 - RNA, 19 nt, Artificial Sequence
  Description of Artificial Sequence: Synthetic oligonucleotide
  Sense strand starting at position 3917 of SEQ ID NO: 586063
ggccuuaaagugugaacau

SEQ ID NO: 689311 - RNA, 19 nt, Artificial Sequence
  Description of Artificial Sequence: Synthetic oligonucleotide
  Antisense strand to SEQ ID NO: 689310
auguucacacuuuaaggcc

SEQ ID NO: 689312 - RNA, 19 nt, Artificial Sequence
  Description of Artificial Sequence: Synthetic oligonucleotide
  Sense strand starting at position 108 of SEQ ID NO: 586064
ccgcuaguggcauuaaguu

SEQ ID NO: 689313 - RNA, 19 nt, Artificial Sequence
  Description of Artificial Sequence: Synthetic oligonucleotide
  Antisense strand to SEQ ID NO: 689312
aacuuaaugccacuagcgg

SEQ ID NO: 689314 - RNA, 19 nt, Artificial Sequence
  Description of Artificial Sequence: Synthetic oligonucleotide
  Sense strand starting at position 114 of SEQ ID NO: 586064
guggcauuaaguuagaaag

SEQ ID NO: 689315 - RNA, 19 nt, Artificial Sequence
  Description of Artificial Sequence: Synthetic oligonucleotide
  Antisense strand to SEQ ID NO: 689314
cuuucuaacuuaaugccac

SEQ ID NO: 689316 - RNA, 19 nt, Artificial Sequence
  Description of Artificial Sequence: Synthetic oligonucleotide
  Sense strand starting at position 142 of SEQ ID NO: 586064
ggcacugaauaacuaaauu

SEQ ID NO: 689317 - RNA, 19 nt, Artificial Sequence
  Description of Artificial Sequence: Synthetic oligonucleotide
  Antisense strand to SEQ ID NO: 689316
aauuuaguuauucagugcc

SEQ ID NO: 689318 - RNA, 19 nt, Artificial Sequence
  Description of Artificial Sequence: Synthetic oligonucleotide
  Sense strand starting at position 214 of SEQ ID NO: 586064
ucauaaauguaagucauga

SEQ ID NO: 689319 - RNA, 19 nt, Artificial Sequence
  Description of Artificial Sequence: Synthetic oligonucleotide
  Antisense strand to SEQ ID NO: 689318
ucaugacuuacauuuauga

SEQ ID NO: 689320 - RNA, 19 nt, Artificial Sequence
  Description of Artificial Sequence: Synthetic oligonucleotide
  Sense strand starting at position 268 of SEQ ID NO: 586064
gguguaaaucuagaucacu

SEQ ID NO: 689321 - RNA, 19 nt, Artificial Sequence
  Description of Artificial Sequence: Synthetic oligonucleotide
  Antisense strand to SEQ ID NO: 689320
agugaucuagauuuacacc

SEQ ID NO: 689322 - RNA, 19 nt, Artificial Sequence
  Description of Artificial Sequence: Synthetic oligonucleotide
  Sense strand starting at position 316 of SEQ ID NO: 586064
acaguacaucacugauagu

SEQ ID NO: 689323 - RNA, 19 nt, Artificial Sequence
  Description of Artificial Sequence: Synthetic oligonucleotide
  Antisense strand to SEQ ID NO: 689322
acuaucagugauguacugu

SEQ ID NO: 689324 - RNA, 19 nt, Artificial Sequence
  Description of Artificial Sequence: Synthetic oligonucleotide
  Sense strand starting at position 368 of SEQ ID NO: 586064
ggaaguauaauccgaguca

SEQ ID NO: 689325 - RNA, 19 nt, Artificial Sequence
  Description of Artificial Sequence: Synthetic oligonucleotide
  Antisense strand to SEQ ID NO: 689324
ugacucggauuauacuucc

SEQ ID NO: 689326 - RNA, 19 nt, Artificial Sequence
  Description of Artificial Sequence: Synthetic oligonucleotide
  Sense strand starting at position 377 of SEQ ID NO: 586064
auccgagucaaaggaagua

SEQ ID NO: 689327 - RNA, 19 nt, Artificial Sequence
  Description of Artificial Sequence: Synthetic oligonucleotide
  Antisense strand to SEQ ID NO: 689326
uacuuccuuugacucggau

SEQ ID NO: 689328 - RNA, 19 nt, Artificial Sequence
  Description of Artificial Sequence: Synthetic oligonucleotide
  Sense strand starting at position 430 of SEQ ID NO: 586064
uccaaagagcuauguuuac

SEQ ID NO: 689329 - RNA, 19 nt, Artificial Sequence
  Description of Artificial Sequence: Synthetic oligonucleotide
  Antisense strand to SEQ ID NO: 689328
guaaacauagcucuuugga

SEQ ID NO: 689330 - RNA, 19 nt, Artificial Sequence
  Description of Artificial Sequence: Synthetic oligonucleotide
  Sense strand starting at position 436 of SEQ ID NO: 586064
gagcuauguuuaccauuag

SEQ ID NO: 689331 - RNA, 19 nt, Artificial Sequence
  Description of Artificial Sequence: Synthetic oligonucleotide
  Antisense strand to SEQ ID NO: 689330
cuaaugguaaacauagcuc

SEQ ID NO: 689332 - RNA, 19 nt, Artificial Sequence
  Description of Artificial Sequence: Synthetic oligonucleotide
  Sense strand starting at position 541 of SEQ ID NO: 586064
gaggcuauauugcuuagaa

SEQ ID NO: 689333 - RNA, 19 nt, Artificial Sequence
  Description of Artificial Sequence: Synthetic oligonucleotide
  Antisense strand to SEQ ID NO: 689332
uucuaagcaauauagccuc

SEQ ID NO: 689334 - RNA, 19 nt, Artificial Sequence
  Description of Artificial Sequence: Synthetic oligonucleotide
  Sense strand starting at position 542 of SEQ ID NO: 586064
aggcuauauugcuuagaaa

SEQ ID NO: 689335 - RNA, 19 nt, Artificial Sequence
  Description of Artificial Sequence: Synthetic oligonucleotide
  Antisense strand to SEQ ID NO: 689334
uuucuaagcaauauagccu

SEQ ID NO: 689336 - RNA, 19 nt, Artificial Sequence
  Description of Artificial Sequence: Synthetic oligonucleotide
  Sense strand starting at position 689 of SEQ ID NO: 586064
acaaguacaucuguuuaau

SEQ ID NO: 689337 - RNA, 19 nt, Artificial Sequence
  Description of Artificial Sequence: Synthetic oligonucleotide
  Antisense strand to SEQ ID NO: 689336
auuaaacagauguacuugu

SEQ ID NO: 689338 - RNA, 19 nt, Artificial Sequence
  Description of Artificial Sequence: Synthetic oligonucleotide
  Sense strand starting at position 735 of SEQ ID NO: 586064
agggaauagucugcaccca

SEQ ID NO: 689339 - RNA, 19 nt, Artificial Sequence
  Description of Artificial Sequence: Synthetic oligonucleotide
  Antisense strand to SEQ ID NO: 689338
ugggugcagacuauucccu

SEQ ID NO: 689340 - RNA, 19 nt, Artificial Sequence
  Description of Artificial Sequence: Synthetic oligonucleotide
  Sense strand starting at position 736 of SEQ ID NO: 586064
gggaauagucugcacccaa

SEQ ID NO: 689341 - RNA, 19 nt, Artificial Sequence
  Description of Artificial Sequence: Synthetic oligonucleotide
  Antisense strand to SEQ ID NO: 689340
uugggugcagacuauuccc

SEQ ID NO: 689342 - RNA, 19 nt, Artificial Sequence
  Description of Artificial Sequence: Synthetic oligonucleotide
  Sense strand starting at position 762 of SEQ ID NO: 586064
aguuuaaugccacacuagu

SEQ ID NO: 689343 - RNA, 19 nt, Artificial Sequence
  Description of Artificial Sequence: Synthetic oligonucleotide
  Antisense strand to SEQ ID NO: 689342
acuaguguggcauuaaacu

SEQ ID NO: 689344 - RNA, 19 nt, Artificial Sequence
  Description of Artificial Sequence: Synthetic oligonucleotide
  Sense strand starting at position 782 of SEQ ID NO: 586064
cgggcauaggguugacaga

SEQ ID NO: 689345 - RNA, 19 nt, Artificial Sequence
  Description of Artificial Sequence: Synthetic oligonucleotide
  Antisense strand to SEQ ID NO: 689344
ucugucaacccuaugcccg

SEQ ID NO: 689346 - RNA, 19 nt, Artificial Sequence
  Description of Artificial Sequence: Synthetic oligonucleotide
  Sense strand starting at position 847 of SEQ ID NO: 586064
gauaauugccaagaugucu

SEQ ID NO: 689347 - RNA, 19 nt, Artificial Sequence
  Description of Artificial Sequence: Synthetic oligonucleotide
  Antisense strand to SEQ ID NO: 689346
agacaucuuggcaauuauc

SEQ ID NO: 689348 - RNA, 19 nt, Artificial Sequence
  Description of Artificial Sequence: Synthetic oligonucleotide
  Sense strand starting at position 1112 of SEQ ID NO: 586064
agucaugacuguucucaag

SEQ ID NO: 689349 - RNA, 19 nt, Artificial Sequence
  Description of Artificial Sequence: Synthetic oligonucleotide
  Antisense strand to SEQ ID NO: 689348
cuugagaacagucaugacu

SEQ ID NO: 689350 - RNA, 19 nt, Artificial Sequence
  Description of Artificial Sequence: Synthetic oligonucleotide
  Sense strand starting at position 1434 of SEQ ID NO: 586064
guggcacuccgaugaacaa

SEQ ID NO: 689351 - RNA, 19 nt, Artificial Sequence
  Description of Artificial Sequence: Synthetic oligonucleotide
  Antisense strand to SEQ ID NO: 689350
uuguucaucggagugccac

SEQ ID NO: 689352 - RNA, 19 nt, Artificial Sequence
  Description of Artificial Sequence: Synthetic oligonucleotide
  Sense strand starting at position 2000 of SEQ ID NO: 586064
cggucacuuccggucguua

SEQ ID NO: 689353 - RNA, 19 nt, Artificial Sequence
  Description of Artificial Sequence: Synthetic oligonucleotide
  Antisense strand to SEQ ID NO: 689352
uaacgaccggaagugaccg

SEQ ID NO: 689354 - RNA, 19 nt, Artificial Sequence
  Description of Artificial Sequence: Synthetic oligonucleotide
  Sense strand starting at position 2088 of SEQ ID NO: 586064
gaagguguuccugaacuuc

SEQ ID NO: 689355 - RNA, 19 nt, Artificial Sequence
  Description of Artificial Sequence: Synthetic oligonucleotide
  Antisense strand to SEQ ID NO: 689354
gaaguucaggaacaccuuc

SEQ ID NO: 689356 - RNA, 19 nt, Artificial Sequence
  Description of Artificial Sequence: Synthetic oligonucleotide
  Sense strand starting at position 2130 of SEQ ID NO: 586064
guguacuuucgcccugcga

SEQ ID NO: 689357 - RNA, 19 nt, Artificial Sequence
  Description of Artificial Sequence: Synthetic oligonucleotide
  Antisense strand to SEQ ID NO: 689356
ucgcagggcgaaaguacac

SEQ ID NO: 689358 - RNA, 19 nt, Artificial Sequence
  Description of Artificial Sequence: Synthetic oligonucleotide
  Sense strand starting at position 2131 of SEQ ID NO: 586064
uguacuuucgcccugcgau

SEQ ID NO: 689359 - RNA, 19 nt, Artificial Sequence
  Description of Artificial Sequence: Synthetic oligonucleotide
  Antisense strand to SEQ ID NO: 689358
aucgcagggcgaaaguaca

SEQ ID NO: 689360 - RNA, 19 nt, Artificial Sequence
  Description of Artificial Sequence: Synthetic oligonucleotide
  Sense strand starting at position 2188 of SEQ ID NO: 586064
ucagguaugcgugugcauu

SEQ ID NO: 689361 - RNA, 19 nt, Artificial Sequence
  Description of Artificial Sequence: Synthetic oligonucleotide
  Antisense strand to SEQ ID NO: 689360
aaugcacacgcauaccuga

SEQ ID NO: 689362 - RNA, 19 nt, Artificial Sequence
  Description of Artificial Sequence: Synthetic oligonucleotide
  Sense strand starting at position 2204 of SEQ ID NO: 586064
auuguaaacuugucugacu

SEQ ID NO: 689363 - RNA, 19 nt, Artificial Sequence
  Description of Artificial Sequence: Synthetic oligonucleotide
  Antisense strand to SEQ ID NO: 689362
agucagacaaguuuacaau

SEQ ID NO: 689364 - RNA, 19 nt, Artificial Sequence
  Description of Artificial Sequence: Synthetic oligonucleotide
  Sense strand starting at position 2206 of SEQ ID NO: 586064
uguaaacuugucugacuga

SEQ ID NO: 689365 - RNA, 19 nt, Artificial Sequence
  Description of Artificial Sequence: Synthetic oligonucleotide
  Antisense strand to SEQ ID NO: 689364
ucagucagacaaguuuaca

SEQ ID NO: 689366 - RNA, 19 nt, Artificial Sequence
  Description of Artificial Sequence: Synthetic oligonucleotide
  Sense strand starting at position 2221 of SEQ ID NO: 586064
cugaacugauuauaagaaa

SEQ ID NO: 689367 - RNA, 19 nt, Artificial Sequence
  Description of Artificial Sequence: Synthetic oligonucleotide
  Antisense strand to SEQ ID NO: 689366
uuucuuauaaucaguucag

SEQ ID NO: 689368 - RNA, 19 nt, Artificial Sequence
  Description of Artificial Sequence: Synthetic oligonucleotide
  Sense strand starting at position 2609 of SEQ ID NO: 586064
gcaaacaaucguuaccuuu

SEQ ID NO: 689369 - RNA, 19 nt, Artificial Sequence
  Description of Artificial Sequence: Synthetic oligonucleotide
  Antisense strand to SEQ ID NO: 689368
aaagguaacgauuguuugc

SEQ ID NO: 689370 - RNA, 19 nt, Artificial Sequence
  Description of Artificial Sequence: Synthetic oligonucleotide
  Sense strand starting at position 2681 of SEQ ID NO: 586064
acugguaguuacccauuaa

SEQ ID NO: 689371 - RNA, 19 nt, Artificial Sequence
  Description of Artificial Sequence: Synthetic oligonucleotide
  Antisense strand to SEQ ID NO: 689370
uuaauggguaacuaccagu

SEQ ID NO: 689372 - RNA, 19 nt, Artificial Sequence
  Description of Artificial Sequence: Synthetic oligonucleotide
  Sense strand starting at position 3075 of SEQ ID NO: 586064
cggagauaauauucccaug

SEQ ID NO: 689373 - RNA, 19 nt, Artificial Sequence
  Description of Artificial Sequence: Synthetic oligonucleotide
  Antisense strand to SEQ ID NO: 689372
caugggaauauuaucuccg

SEQ ID NO: 689374 - RNA, 19 nt, Artificial Sequence
  Description of Artificial Sequence: Synthetic oligonucleotide
  Sense strand starting at position 3200 of SEQ ID NO: 586064
ccaacaaaucgguagguuu

SEQ ID NO: 689375 - RNA, 19 nt, Artificial Sequence
  Description of Artificial Sequence: Synthetic oligonucleotide
  Antisense strand to SEQ ID NO: 689374
aaaccuaccgauuuguugg

SEQ ID NO: 689376 - RNA, 19 nt, Artificial Sequence
  Description of Artificial Sequence: Synthetic oligonucleotide
  Sense strand starting at position 3302 of SEQ ID NO: 586064
cagacuguuggcugacaaa

SEQ ID NO: 689377 - RNA, 19 nt, Artificial Sequence
  Description of Artificial Sequence: Synthetic oligonucleotide
  Antisense strand to SEQ ID NO: 689376
uuugucagccaacagucug

SEQ ID NO: 689378 - RNA, 19 nt, Artificial Sequence
  Description of Artificial Sequence: Synthetic oligonucleotide
  Sense strand starting at position 3335 of SEQ ID NO: 586064
auccuaacagaguguauga

SEQ ID NO: 689379 - RNA, 19 nt, Artificial Sequence
  Description of Artificial Sequence: Synthetic oligonucleotide
  Antisense strand to SEQ ID NO: 689378
ucauacacucuguuaggau

SEQ ID NO: 689380 - RNA, 19 nt, Artificial Sequence
  Description of Artificial Sequence: Synthetic oligonucleotide
  Sense strand starting at position 3381 of SEQ ID NO: 586064
uagagaaagcuucggucau

SEQ ID NO: 689381 - RNA, 19 nt, Artificial Sequence
  Description of Artificial Sequence: Synthetic oligonucleotide
  Antisense strand to SEQ ID NO: 689380
augaccgaagcuuucucua

SEQ ID NO: 689382 - RNA, 19 nt, Artificial Sequence
  Description of Artificial Sequence: Synthetic oligonucleotide
  Sense strand starting at position 3394 of SEQ ID NO: 586064
ggucaucuuagagaaugca

SEQ ID NO: 689383 - RNA, 19 nt, Artificial Sequence
  Description of Artificial Sequence: Synthetic oligonucleotide
  Antisense strand to SEQ ID NO: 689382
ugcauucucuaagaugacc

SEQ ID NO: 689384 - RNA, 19 nt, Artificial Sequence
  Description of Artificial Sequence: Synthetic oligonucleotide
  Sense strand starting at position 3408 of SEQ ID NO: 586064
augcauauauugccaugaa

SEQ ID NO: 689385 - RNA, 19 nt, Artificial Sequence
  Description of Artificial Sequence: Synthetic oligonucleotide
  Antisense strand to SEQ ID NO: 689384
uucauggcaauauaugcau

SEQ ID NO: 689386 - RNA, 19 nt, Artificial Sequence
  Description of Artificial Sequence: Synthetic oligonucleotide
  Sense strand starting at position 3657 of SEQ ID NO: 586064
ccacauauguccucaguga

SEQ ID NO: 689387 - RNA, 19 nt, Artificial Sequence
  Description of Artificial Sequence: Synthetic oligonucleotide
  Antisense strand to SEQ ID NO: 689386
ucacugaggacauaugugg

SEQ ID NO: 689388 - RNA, 19 nt, Artificial Sequence
  Description of Artificial Sequence: Synthetic oligonucleotide
  Sense strand starting at position 3864 of SEQ ID NO: 586064
cuuaccauaugaucuagua

SEQ ID NO: 689389 - RNA, 19 nt, Artificial Sequence
  Description of Artificial Sequence: Synthetic oligonucleotide
  Antisense strand to SEQ ID NO: 689388
uacuagaucauaugguaag

SEQ ID NO: 689390 - RNA, 19 nt, Artificial Sequence
  Description of Artificial Sequence: Synthetic oligonucleotide
  Sense strand starting at position 3934 of SEQ ID NO: 586064
aaacgugcccaagaauguu

SEQ ID NO: 689391 - RNA, 19 nt, Artificial Sequence
  Description of Artificial Sequence: Synthetic oligonucleotide
  Antisense strand to SEQ ID NO: 689390
aacauucuugggcacguuu

SEQ ID NO: 689392 - RNA, 19 nt, Artificial Sequence
  Description of Artificial Sequence: Synthetic oligonucleotide
  Sense strand starting at position 51 of SEQ ID NO: 586065
ucagcaaagcuagacuuua

SEQ ID NO: 689393 - RNA, 19 nt, Artificial Sequence
  Description of Artificial Sequence: Synthetic oligonucleotide
  Antisense strand to SEQ ID NO: 689392
uaaagucuagcuuugcuga

SEQ ID NO: 689394 - RNA, 19 nt, Artificial Sequence
  Description of Artificial Sequence: Synthetic oligonucleotide
  Sense strand starting at position 123 of SEQ ID NO: 586065
uuccuauuauggguaucuu

SEQ ID NO: 689395 - RNA, 19 nt, Artificial Sequence
  Description of Artificial Sequence: Synthetic oligonucleotide
  Antisense strand to SEQ ID NO: 689394
aagauacccauaauaggaa

SEQ ID NO: 689396 - RNA, 19 nt, Artificial Sequence
  Description of Artificial Sequence: Synthetic oligonucleotide
  Sense strand starting at position 124 of SEQ ID NO: 586065
uccuauuauggguaucuua

SEQ ID NO: 689397 - RNA, 19 nt, Artificial Sequence
  Description of Artificial Sequence: Synthetic oligonucleotide
  Antisense strand to SEQ ID NO: 689396
uaagauacccauaauagga

SEQ ID NO: 689398 - RNA, 19 nt, Artificial Sequence
  Description of Artificial Sequence: Synthetic oligonucleotide
  Sense strand starting at position 131 of SEQ ID NO: 586065
auggguaucuuagagaaau

SEQ ID NO: 689399 - RNA, 19 nt, Artificial Sequence
  Description of Artificial Sequence: Synthetic oligonucleotide
  Antisense strand to SEQ ID NO: 689398
auuucucuaagauacccau

SEQ ID NO: 689400 - RNA, 19 nt, Artificial Sequence
  Description of Artificial Sequence: Synthetic oligonucleotide
  Sense strand starting at position 184 of SEQ ID NO: 586065
uuaagaaugaguggguacu

SEQ ID NO: 689401 - RNA, 19 nt, Artificial Sequence
  Description of Artificial Sequence: Synthetic oligonucleotide
  Antisense strand to SEQ ID NO: 689400
aguacccacucauucuuaa

SEQ ID NO: 689402 - RNA, 19 nt, Artificial Sequence
  Description of Artificial Sequence: Synthetic oligonucleotide
  Sense strand starting at position 434 of SEQ ID NO: 586065
uuuguaugugaucacguau

SEQ ID NO: 689403 - RNA, 19 nt, Artificial Sequence
  Description of Artificial Sequence: Synthetic oligonucleotide
  Antisense strand to SEQ ID NO: 689402
auacgugaucacauacaaa

SEQ ID NO: 689404 - RNA, 19 nt, Artificial Sequence
  Description of Artificial Sequence: Synthetic oligonucleotide
  Sense strand starting at position 528 of SEQ ID NO: 586065
auggucaaccauuguucua

SEQ ID NO: 689405 - RNA, 19 nt, Artificial Sequence
  Description of Artificial Sequence: Synthetic oligonucleotide
  Antisense strand to SEQ ID NO: 689404
uagaacaaugguugaccau

SEQ ID NO: 689406 - RNA, 19 nt, Artificial Sequence
  Description of Artificial Sequence: Synthetic oligonucleotide
  Sense strand starting at position 535 of SEQ ID NO: 586065
accauuguucuacguuaag

SEQ ID NO: 689407 - RNA, 19 nt, Artificial Sequence
  Description of Artificial Sequence: Synthetic oligonucleotide
  Antisense strand to SEQ ID NO: 689406
cuuaacguagaacaauggu

SEQ ID NO: 689408 - RNA, 19 nt, Artificial Sequence
  Description of Artificial Sequence: Synthetic oligonucleotide
  Sense strand starting at position 538 of SEQ ID NO: 586065
auuguucuacguuaagauc

SEQ ID NO: 689409 - RNA, 19 nt, Artificial Sequence
  Description of Artificial Sequence: Synthetic oligonucleotide
  Antisense strand to SEQ ID NO: 689408
gaucuuaacguagaacaau

SEQ ID NO: 689410 - RNA, 19 nt, Artificial Sequence
  Description of Artificial Sequence: Synthetic oligonucleotide
  Sense strand starting at position 544 of SEQ ID NO: 586065
cuacguuaagaucaguauu

SEQ ID NO: 689411 - RNA, 19 nt, Artificial Sequence
  Description of Artificial Sequence: Synthetic oligonucleotide
  Antisense strand to SEQ ID NO: 689410
aauacugaucuuaacguag

SEQ ID NO: 689412 - RNA, 19 nt, Artificial Sequence
  Description of Artificial Sequence: Synthetic oligonucleotide
  Sense strand starting at position 571 of SEQ ID NO: 586065
acgaauucucuguaaugau

SEQ ID NO: 689413 - RNA, 19 nt, Artificial Sequence
  Description of Artificial Sequence: Synthetic oligonucleotide
  Antisense strand to SEQ ID NO: 689412
aucauuacagagaauucgu

SEQ ID NO: 689414 - RNA, 19 nt, Artificial Sequence
  Description of Artificial Sequence: Synthetic oligonucleotide
  Sense strand starting at position 611 of SEQ ID NO: 586065
auaugaccuguguaaauug

SEQ ID NO: 689415 - RNA, 19 nt, Artificial Sequence
  Description of Artificial Sequence: Synthetic oligonucleotide
  Antisense strand to SEQ ID NO: 689414
caauuuacacaggucauau

SEQ ID NO: 689416 - RNA, 19 nt, Artificial Sequence
  Description of Artificial Sequence: Synthetic oligonucleotide
  Sense strand starting at position 719 of SEQ ID NO: 586065
cucguaaugaagugcaaau

SEQ ID NO: 689417 - RNA, 19 nt, Artificial Sequence
  Description of Artificial Sequence: Synthetic oligonucleotide
  Antisense strand to SEQ ID NO: 689416
auuugcacuucauuacgag

SEQ ID NO: 689418 - RNA, 19 nt, Artificial Sequence
  Description of Artificial Sequence: Synthetic oligonucleotide
  Sense strand starting at position 730 of SEQ ID NO: 586065
gugcaaauguagucccaaa

SEQ ID NO: 689419 - RNA, 19 nt, Artificial Sequence
  Description of Artificial Sequence: Synthetic oligonucleotide
  Antisense strand to SEQ ID NO: 689418
uuugggacuacauuugcac

SEQ ID NO: 689420 - RNA, 19 nt, Artificial Sequence
  Description of Artificial Sequence: Synthetic oligonucleotide
  Sense strand starting at position 786 of SEQ ID NO: 586065
acuagcaaacaguguuauu

SEQ ID NO: 689421 - RNA, 19 nt, Artificial Sequence
  Description of Artificial Sequence: Synthetic oligonucleotide
  Antisense strand to SEQ ID NO: 689420
aauaacacuguuugcuagu

SEQ ID NO: 689422 - RNA, 19 nt, Artificial Sequence
  Description of Artificial Sequence: Synthetic oligonucleotide
  Sense strand starting at position 810 of SEQ ID NO: 586065
uccaaauucugguuagaau

SEQ ID NO: 689423 - RNA, 19 nt, Artificial Sequence
  Description of Artificial Sequence: Synthetic oligonucleotide
  Antisense strand to SEQ ID NO: 689422
auucuaaccagaauuugga

SEQ ID NO: 689424 - RNA, 19 nt, Artificial Sequence
  Description of Artificial Sequence: Synthetic oligonucleotide
  Sense strand starting at position 1014 of SEQ ID NO: 586065
ggcgaaagcaaaugagaaa

SEQ ID NO: 689425 - RNA, 19 nt, Artificial Sequence
  Description of Artificial Sequence: Synthetic oligonucleotide
  Antisense strand to SEQ ID NO: 689424
uuucucauuugcuuucgcc

SEQ ID NO: 689426 - RNA, 19 nt, Artificial Sequence
  Description of Artificial Sequence: Synthetic oligonucleotide
  Sense strand starting at position 2337 of SEQ ID NO: 586065
cgaagucuucuacggacau

SEQ ID NO: 689427 - RNA, 19 nt, Artificial Sequence
  Description of Artificial Sequence: Synthetic oligonucleotide
  Antisense strand to SEQ ID NO: 689426
auguccguagaagacuucg

SEQ ID NO: 689428 - RNA, 19 nt, Artificial Sequence
  Description of Artificial Sequence: Synthetic oligonucleotide
  Sense strand starting at position 2387 of SEQ ID NO: 586065
gagaguucugaguggucuc

SEQ ID NO: 689429 - RNA, 19 nt, Artificial Sequence
  Description of Artificial Sequence: Synthetic oligonucleotide
  Antisense strand to SEQ ID NO: 689428
gagaccacucagaacucuc

SEQ ID NO: 689430 - RNA, 19 nt, Artificial Sequence
  Description of Artificial Sequence: Synthetic oligonucleotide
  Sense strand starting at position 2422 of SEQ ID NO: 586065
ugcuguuggccuguaagca

SEQ ID NO: 689431 - RNA, 19 nt, Artificial Sequence
  Description of Artificial Sequence: Synthetic oligonucleotide
  Antisense strand to SEQ ID NO: 689430
ugcuuacaggccaacagca

SEQ ID NO: 689432 - RNA, 19 nt, Artificial Sequence
  Description of Artificial Sequence: Synthetic oligonucleotide
  Sense strand starting at position 2706 of SEQ ID NO: 586065
caauccucagucuggagaa

SEQ ID NO: 689433 - RNA, 19 nt, Artificial Sequence
  Description of Artificial Sequence: Synthetic oligonucleotide
  Antisense strand to SEQ ID NO: 689432
uucuccagacugaggauug

SEQ ID NO: 689434 - RNA, 19 nt, Artificial Sequence
  Description of Artificial Sequence: Synthetic oligonucleotide
  Sense strand starting at position 2838 of SEQ ID NO: 586065
caccgugauuuagacucua

SEQ ID NO: 689435 - RNA, 19 nt, Artificial Sequence
  Description of Artificial Sequence: Synthetic oligonucleotide
  Antisense strand to SEQ ID NO: 689434
uagagucuaaaucacggug

SEQ ID NO: 689436 - RNA, 19 nt, Artificial Sequence
  Description of Artificial Sequence: Synthetic oligonucleotide
  Sense strand starting at position 3002 of SEQ ID NO: 586065
caauauugucgagaauuau

SEQ ID NO: 689437 - RNA, 19 nt, Artificial Sequence
  Description of Artificial Sequence: Synthetic oligonucleotide
  Antisense strand to SEQ ID NO: 689436
auaauucucgacaauauug

SEQ ID NO: 689438 - RNA, 19 nt, Artificial Sequence
  Description of Artificial Sequence: Synthetic oligonucleotide
  Sense strand starting at position 3158 of SEQ ID NO: 586065
agagcuuaacccuaaaguu

SEQ ID NO: 689439 - RNA, 19 nt, Artificial Sequence
  Description of Artificial Sequence: Synthetic oligonucleotide
  Antisense strand to SEQ ID NO: 689438
aacuuuaggguuaagcucu

SEQ ID NO: 689440 - RNA, 19 nt, Artificial Sequence
  Description of Artificial Sequence: Synthetic oligonucleotide
  Sense strand starting at position 3202 of SEQ ID NO: 586065
ccguuagagcauuagacaa

SEQ ID NO: 689441 - RNA, 19 nt, Artificial Sequence
  Description of Artificial Sequence: Synthetic oligonucleotide
  Antisense strand to SEQ ID NO: 689440
uugucuaaugcucuaacgg

SEQ ID NO: 689442 - RNA, 19 nt, Artificial Sequence
  Description of Artificial Sequence: Synthetic oligonucleotide
  Sense strand starting at position 3396 of SEQ ID NO: 586065
aauggaaaguguucuacau

SEQ ID NO: 689443 - RNA, 19 nt, Artificial Sequence
  Description of Artificial Sequence: Synthetic oligonucleotide
  Antisense strand to SEQ ID NO: 689442
auguagaacacuuuccauu

SEQ ID NO: 689444 - RNA, 19 nt, Artificial Sequence
  Description of Artificial Sequence: Synthetic oligonucleotide
  Sense strand starting at position 3413 of SEQ ID NO: 586065
auacuauguuguccagaau

SEQ ID NO: 689445 - RNA, 19 nt, Artificial Sequence
  Description of Artificial Sequence: Synthetic oligonucleotide
  Antisense strand to SEQ ID NO: 689444
auucuggacaacauaguau

SEQ ID NO: 689446 - RNA, 19 nt, Artificial Sequence
  Description of Artificial Sequence: Synthetic oligonucleotide
  Sense strand starting at position 3416 of SEQ ID NO: 586065
cuauguuguccagaauaaa

SEQ ID NO: 689447 - RNA, 19 nt, Artificial Sequence
  Description of Artificial Sequence: Synthetic oligonucleotide
  Antisense strand to SEQ ID NO: 689446
uuuauucuggacaacauag

SEQ ID NO: 689448 - RNA, 19 nt, Artificial Sequence
  Description of Artificial Sequence: Synthetic oligonucleotide
  Sense strand starting at position 3419 of SEQ ID NO: 586065
uguuguccagaauaaaugu

SEQ ID NO: 689449 - RNA, 19 nt, Artificial Sequence
  Description of Artificial Sequence: Synthetic oligonucleotide
  Antisense strand to SEQ ID NO: 689448
acauuuauucuggacaaca

SEQ ID NO: 689450 - RNA, 19 nt, Artificial Sequence
  Description of Artificial Sequence: Synthetic oligonucleotide
  Sense strand starting at position 3438 of SEQ ID NO: 586065
uuuauaacgcaucagugau

SEQ ID NO: 689451 - RNA, 19 nt, Artificial Sequence
  Description of Artificial Sequence: Synthetic oligonucleotide
  Antisense strand to SEQ ID NO: 689450
aucacugaugcguuauaaa

SEQ ID NO: 689452 - RNA, 19 nt, Artificial Sequence
  Description of Artificial Sequence: Synthetic oligonucleotide
  Sense strand starting at position 3448 of SEQ ID NO: 586065
aucagugauggugauguuu

SEQ ID NO: 689453 - RNA, 19 nt, Artificial Sequence
  Description of Artificial Sequence: Synthetic oligonucleotide
  Antisense strand to SEQ ID NO: 689452
aaacaucaccaucacugau

SEQ ID NO: 689454 - RNA, 19 nt, Artificial Sequence
  Description of Artificial Sequence: Synthetic oligonucleotide
  Sense strand starting at position 3574 of SEQ ID NO: 586065
ucaaauguuuacucaugga

SEQ ID NO: 689455 - RNA, 19 nt, Artificial Sequence
  Description of Artificial Sequence: Synthetic oligonucleotide
  Antisense strand to SEQ ID NO: 689454
uccaugaguaaacauuuga

SEQ ID NO: 689456 - RNA, 19 nt, Artificial Sequence
  Description of Artificial Sequence: Synthetic oligonucleotide
  Sense strand starting at position 3578 of SEQ ID NO: 586065
auguuuacucauggaagag

SEQ ID NO: 689457 - RNA, 19 nt, Artificial Sequence
  Description of Artificial Sequence: Synthetic oligonucleotide
  Antisense strand to SEQ ID NO: 689456
cucuuccaugaguaaacau

SEQ ID NO: 689458 - RNA, 19 nt, Artificial Sequence
  Description of Artificial Sequence: Synthetic oligonucleotide
  Sense strand starting at position 3633 of SEQ ID NO: 586065
auaauaguaucacugaguu

SEQ ID NO: 689459 - RNA, 19 nt, Artificial Sequence
  Description of Artificial Sequence: Synthetic oligonucleotide
  Antisense strand to SEQ ID NO: 689458
aacucagugauacuauuau

SEQ ID NO: 689460 - RNA, 19 nt, Artificial Sequence
  Description of Artificial Sequence: Synthetic oligonucleotide
  Sense strand starting at position 3637 of SEQ ID NO: 586065
uaguaucacugaguugaaa

SEQ ID NO: 689461 - RNA, 19 nt, Artificial Sequence
  Description of Artificial Sequence: Synthetic oligonucleotide
  Antisense strand to SEQ ID NO: 689460
uuucaacucagugauacua

SEQ ID NO: 689462 - RNA, 19 nt, Artificial Sequence
  Description of Artificial Sequence: Synthetic oligonucleotide
  Sense strand starting at position 3745 of SEQ ID NO: 586065
aguuuauguuaucuuagga

SEQ ID NO: 689463 - RNA, 19 nt, Artificial Sequence
  Description of Artificial Sequence: Synthetic oligonucleotide
  Antisense strand to SEQ ID NO: 689462
uccuaagauaacauaaacu

SEQ ID NO: 689464 - RNA, 19 nt, Artificial Sequence
  Description of Artificial Sequence: Synthetic oligonucleotide
  Sense strand starting at position 3801 of SEQ ID NO: 586065
agccaaauguacccguaaa

SEQ ID NO: 689465 - RNA, 19 nt, Artificial Sequence
  Description of Artificial Sequence: Synthetic oligonucleotide
  Antisense strand to SEQ ID NO: 689464
uuuacggguacauuuggcu

SEQ ID NO: 689466 - RNA, 19 nt, Artificial Sequence
  Description of Artificial Sequence: Synthetic oligonucleotide
  Sense strand starting at position 3864 of SEQ ID NO: 586065
aguauaaugguuuacacca

SEQ ID NO: 689467 - RNA, 19 nt, Artificial Sequence
  Description of Artificial Sequence: Synthetic oligonucleotide
  Antisense strand to SEQ ID NO: 689466
ugguguaaaccauuauacu

SEQ ID NO: 689468 - RNA, 19 nt, Artificial Sequence
  Description of Artificial Sequence: Synthetic oligonucleotide
  Sense strand starting at position 3955 of SEQ ID NO: 586065
uuaagagaauugccugaua

SEQ ID NO: 689469 - RNA, 19 nt, Artificial Sequence
  Description of Artificial Sequence: Synthetic oligonucleotide
  Antisense strand to SEQ ID NO: 689468
uaucaggcaauucucuuaa

SEQ ID NO: 689470 - RNA, 19 nt, Artificial Sequence
  Description of Artificial Sequence: Synthetic oligonucleotide
  Sense strand starting at position 3967 of SEQ ID NO: 586065
ccugauaauguaggucauu

SEQ ID NO: 689471 - RNA, 19 nt, Artificial Sequence
  Description of Artificial Sequence: Synthetic oligonucleotide
  Antisense strand to SEQ ID NO: 689470
aaugaccuacauuaucagg

SEQ ID NO: 689472 - RNA, 19 nt, Artificial Sequence
  Description of Artificial Sequence: Synthetic oligonucleotide
  Sense strand starting at position 4 of SEQ ID NO: 586066
ucugauaaauugcuuugua

SEQ ID NO: 689473 - RNA, 19 nt, Artificial Sequence
  Description of Artificial Sequence: Synthetic oligonucleotide
  Antisense strand to SEQ ID NO: 689472
uacaaagcaauuuaucaga

SEQ ID NO: 689474 - RNA, 19 nt, Artificial Sequence
  Description of Artificial Sequence: Synthetic oligonucleotide
  Sense strand starting at position 5 of SEQ ID NO: 586066
cugauaaauugcuuuguag

SEQ ID NO: 689475 - RNA, 19 nt, Artificial Sequence
  Description of Artificial Sequence: Synthetic oligonucleotide
  Antisense strand to SEQ ID NO: 689474
cuacaaagcaauuuaucag

SEQ ID NO: 689476 - RNA, 19 nt, Artificial Sequence
  Description of Artificial Sequence: Synthetic oligonucleotide
  Sense strand starting at position 7 of SEQ ID NO: 586066
gauaaauugcuuuguagaa

SEQ ID NO: 689477 - RNA, 19 nt, Artificial Sequence
  Description of Artificial Sequence: Synthetic oligonucleotide
  Antisense strand to SEQ ID NO: 689476
uucuacaaagcaauuuauc

SEQ ID NO: 689478 - RNA, 19 nt, Artificial Sequence
  Description of Artificial Sequence: Synthetic oligonucleotide
  Sense strand starting at position 54 of SEQ ID NO: 586066
uuaagauacugacagaaac

SEQ ID NO: 689479 - RNA, 19 nt, Artificial Sequence
  Description of Artificial Sequence: Synthetic oligonucleotide
  Antisense strand to SEQ ID NO: 689478
guuucugucaguaucuuaa

SEQ ID NO: 689480 - RNA, 19 nt, Artificial Sequence
  Description of Artificial Sequence: Synthetic oligonucleotide
  Sense strand starting at position 80 of SEQ ID NO: 586066
uuaguuccucuagauauug

SEQ ID NO: 689481 - RNA, 19 nt, Artificial Sequence
  Description of Artificial Sequence: Synthetic oligonucleotide
  Antisense strand to SEQ ID NO: 689480
caauaucuagaggaacuaa

SEQ ID NO: 689482 - RNA, 19 nt, Artificial Sequence
  Description of Artificial Sequence: Synthetic oligonucleotide
  Sense strand starting at position 525 of SEQ ID NO: 586066
uaaugaucaccaggucaag

SEQ ID NO: 689483 - RNA, 19 nt, Artificial Sequence
  Description of Artificial Sequence: Synthetic oligonucleotide
  Antisense strand to SEQ ID NO: 689482
cuugaccuggugaucauua

SEQ ID NO: 689484 - RNA, 19 nt, Artificial Sequence
  Description of Artificial Sequence: Synthetic oligonucleotide
  Sense strand starting at position 946 of SEQ ID NO: 586066
cuuguuucccugcauauuu

SEQ ID NO: 689485 - RNA, 19 nt, Artificial Sequence
  Description of Artificial Sequence: Synthetic oligonucleotide
  Antisense strand to SEQ ID NO: 689484
aaauaugcagggaaacaag

SEQ ID NO: 689486 - RNA, 19 nt, Artificial Sequence
  Description of Artificial Sequence: Synthetic oligonucleotide
  Sense strand starting at position 1313 of SEQ ID NO: 586066
uuuacaacuugaguuggau

SEQ ID NO: 689487 - RNA, 19 nt, Artificial Sequence
  Description of Artificial Sequence: Synthetic oligonucleotide
  Antisense strand to SEQ ID NO: 689486
auccaacucaaguuguaaa

SEQ ID NO: 689488 - RNA, 19 nt, Artificial Sequence
  Description of Artificial Sequence: Synthetic oligonucleotide
  Sense strand starting at position 1316 of SEQ ID NO: 586066
acaacuugaguuggaucau

SEQ ID NO: 689489 - RNA, 19 nt, Artificial Sequence
  Description of Artificial Sequence: Synthetic oligonucleotide
  Antisense strand to SEQ ID NO: 689488
augauccaacucaaguugu

SEQ ID NO: 689490 - RNA, 19 nt, Artificial Sequence
  Description of Artificial Sequence: Synthetic oligonucleotide
  Sense strand starting at position 1386 of SEQ ID NO: 586066
gaaguccuuaccgagguau

SEQ ID NO: 689491 - RNA, 19 nt, Artificial Sequence
  Description of Artificial Sequence: Synthetic oligonucleotide
  Antisense strand to SEQ ID NO: 689490
auaccucgguaaggacuuc

SEQ ID NO: 689492 - RNA, 19 nt, Artificial Sequence
  Description of Artificial Sequence: Synthetic oligonucleotide
  Sense strand starting at position 1471 of SEQ ID NO: 586066
aagucuuaagaguggcaua

SEQ ID NO: 689493 - RNA, 19 nt, Artificial Sequence
  Description of Artificial Sequence: Synthetic oligonucleotide
  Antisense strand to SEQ ID NO: 689492
uaugccacucuuaagacuu

SEQ ID NO: 689494 - RNA, 19 nt, Artificial Sequence
  Description of Artificial Sequence: Synthetic oligonucleotide
  Sense strand starting at position 1476 of SEQ ID NO: 586066
uuaagaguggcauacaagu

SEQ ID NO: 689495 - RNA, 19 nt, Artificial Sequence
  Description of Artificial Sequence: Synthetic oligonucleotide
  Antisense strand to SEQ ID NO: 689494
acuuguaugccacucuuaa

SEQ ID NO: 689496 - RNA, 19 nt, Artificial Sequence
  Description of Artificial Sequence: Synthetic oligonucleotide
  Sense strand starting at position 1498 of SEQ ID NO: 586066
caggaugugucauucucaa

SEQ ID NO: 689497 - RNA, 19 nt, Artificial Sequence
  Description of Artificial Sequence: Synthetic oligonucleotide
  Antisense strand to SEQ ID NO: 689496
uugagaaugacacauccug

SEQ ID NO: 689498 - RNA, 19 nt, Artificial Sequence
  Description of Artificial Sequence: Synthetic oligonucleotide
  Sense strand starting at position 1617 of SEQ ID NO: 586066
cgaucuccauggcuaauaa

SEQ ID NO: 689499 - RNA, 19 nt, Artificial Sequence
  Description of Artificial Sequence: Synthetic oligonucleotide
  Antisense strand to SEQ ID NO: 689498
uuauuagccauggagaucg

SEQ ID NO: 689500 - RNA, 19 nt, Artificial Sequence
  Description of Artificial Sequence: Synthetic oligonucleotide
  Sense strand starting at position 1795 of SEQ ID NO: 586066
uccaguauggugcauaagu

SEQ ID NO: 689501 - RNA, 19 nt, Artificial Sequence
  Description of Artificial Sequence: Synthetic oligonucleotide
  Antisense strand to SEQ ID NO: 689500
acuuaugcaccauacugga

SEQ ID NO: 689502 - RNA, 19 nt, Artificial Sequence
  Description of Artificial Sequence: Synthetic oligonucleotide
  Sense strand starting at position 1797 of SEQ ID NO: 586066
caguauggugcauaaguua

SEQ ID NO: 689503 - RNA, 19 nt, Artificial Sequence
  Description of Artificial Sequence: Synthetic oligonucleotide
  Antisense strand to SEQ ID NO: 689502
uaacuuaugcaccauacug

SEQ ID NO: 689504 - RNA, 19 nt, Artificial Sequence
  Description of Artificial Sequence: Synthetic oligonucleotide
  Sense strand starting at position 1946 of SEQ ID NO: 586066
auaguaugugcuggauuaa

SEQ ID NO: 689505 - RNA, 19 nt, Artificial Sequence
  Description of Artificial Sequence: Synthetic oligonucleotide
  Antisense strand to SEQ ID NO: 689504
uuaauccagcacauacuau

SEQ ID NO: 689506 - RNA, 19 nt, Artificial Sequence
  Description of Artificial Sequence: Synthetic oligonucleotide
  Sense strand starting at position 1947 of SEQ ID NO: 586066
uaguaugugcuggauuaaa

SEQ ID NO: 689507 - RNA, 19 nt, Artificial Sequence
  Description of Artificial Sequence: Synthetic oligonucleotide
  Antisense strand to SEQ ID NO: 689506
uuuaauccagcacauacua

SEQ ID NO: 689508 - RNA, 19 nt, Artificial Sequence
  Description of Artificial Sequence: Synthetic oligonucleotide
  Sense strand starting at position 2474 of SEQ ID NO: 586066
aggaguuugcgugcguuua

SEQ ID NO: 689509 - RNA, 19 nt, Artificial Sequence
  Description of Artificial Sequence: Synthetic oligonucleotide
  Antisense strand to SEQ ID NO: 689508
uaaacgcacgcaaacuccu

SEQ ID NO: 689510 - RNA, 19 nt, Artificial Sequence
  Description of Artificial Sequence: Synthetic oligonucleotide
  Sense strand starting at position 2487 of SEQ ID NO: 586066
cguuuauggccugugcaaa

SEQ ID NO: 689511 - RNA, 19 nt, Artificial Sequence
  Description of Artificial Sequence: Synthetic oligonucleotide
  Antisense strand to SEQ ID NO: 689510
uuugcacaggccauaaacg

SEQ ID NO: 689512 - RNA, 19 nt, Artificial Sequence
  Description of Artificial Sequence: Synthetic oligonucleotide
  Sense strand starting at position 3105 of SEQ ID NO: 586066
ugaacaaauugggacauuu

SEQ ID NO: 689513 - RNA, 19 nt, Artificial Sequence
  Description of Artificial Sequence: Synthetic oligonucleotide
  Antisense strand to SEQ ID NO: 689512
aaaugucccaauuuguuca

SEQ ID NO: 689514 - RNA, 19 nt, Artificial Sequence
  Description of Artificial Sequence: Synthetic oligonucleotide
  Sense strand starting at position 3123 of SEQ ID NO: 586066
uguccugaauguucuacau

SEQ ID NO: 689515 - RNA, 19 nt, Artificial Sequence
  Description of Artificial Sequence: Synthetic oligonucleotide
  Antisense strand to SEQ ID NO: 689514
auguagaacauucaggaca

SEQ ID NO: 689516 - RNA, 19 nt, Artificial Sequence
  Description of Artificial Sequence: Synthetic oligonucleotide
  Sense strand starting at position 3142 of SEQ ID NO: 586066
gcuggcuuugucuauuugu

SEQ ID NO: 689517 - RNA, 19 nt, Artificial Sequence
  Description of Artificial Sequence: Synthetic oligonucleotide
  Antisense strand to SEQ ID NO: 689516
acaaauagacaaagccagc

SEQ ID NO: 689518 - RNA, 19 nt, Artificial Sequence
  Description of Artificial Sequence: Synthetic oligonucleotide
  Sense strand starting at position 3207 of SEQ ID NO: 586066
ugauguuaccucuaaaggu

SEQ ID NO: 689519 - RNA, 19 nt, Artificial Sequence
  Description of Artificial Sequence: Synthetic oligonucleotide
  Antisense strand to SEQ ID NO: 689518
accuuuagagguaacauca

SEQ ID NO: 689520 - RNA, 19 nt, Artificial Sequence
  Description of Artificial Sequence: Synthetic oligonucleotide
  Sense strand starting at position 3215 of SEQ ID NO: 586066
ccucuaaagguuugauuag

SEQ ID NO: 689521 - RNA, 19 nt, Artificial Sequence
  Description of Artificial Sequence: Synthetic oligonucleotide
  Antisense strand to SEQ ID NO: 689520
cuaaucaaaccuuuagagg

SEQ ID NO: 689522 - RNA, 19 nt, Artificial Sequence
  Description of Artificial Sequence: Synthetic oligonucleotide
  Sense strand starting at position 3225 of SEQ ID NO: 586066
uuugauuagaguuagguuu

SEQ ID NO: 689523 - RNA, 19 nt, Artificial Sequence
  Description of Artificial Sequence: Synthetic oligonucleotide
  Antisense strand to SEQ ID NO: 689522
aaaccuaacucuaaucaaa

SEQ ID NO: 689524 - RNA, 19 nt, Artificial Sequence
  Description of Artificial Sequence: Synthetic oligonucleotide
  Sense strand starting at position 3231 of SEQ ID NO: 586066
uagaguuagguuuaacuuu

SEQ ID NO: 689525 - RNA, 19 nt, Artificial Sequence
  Description of Artificial Sequence: Synthetic oligonucleotide
  Antisense strand to SEQ ID NO: 689524
aaaguuaaaccuaacucua

SEQ ID NO: 689526 - RNA, 19 nt, Artificial Sequence
  Description of Artificial Sequence: Synthetic oligonucleotide
  Sense strand starting at position 3238 of SEQ ID NO: 586066
agguuuaacuuuguuagua

SEQ ID NO: 689527 - RNA, 19 nt, Artificial Sequence
  Description of Artificial Sequence: Synthetic oligonucleotide
  Antisense strand to SEQ ID NO: 689526
uacuaacaaaguuaaaccu

SEQ ID NO: 689528 - RNA, 19 nt, Artificial Sequence
  Description of Artificial Sequence: Synthetic oligonucleotide
  Sense strand starting at position 3239 of SEQ ID NO: 586066
gguuuaacuuuguuaguaa

SEQ ID NO: 689529 - RNA, 19 nt, Artificial Sequence
  Description of Artificial Sequence: Synthetic oligonucleotide
  Antisense strand to SEQ ID NO: 689528
uuacuaacaaaguuaaacc

SEQ ID NO: 689530 - RNA, 19 nt, Artificial Sequence
  Description of Artificial Sequence: Synthetic oligonucleotide
  Sense strand starting at position 3252 of SEQ ID NO: 586066
uaguaagaauccuuaggug

SEQ ID NO: 689531 - RNA, 19 nt, Artificial Sequence
  Description of Artificial Sequence: Synthetic oligonucleotide
  Antisense strand to SEQ ID NO: 689530
caccuaaggauucuuacua

SEQ ID NO: 689532 - RNA, 19 nt, Artificial Sequence
  Description of Artificial Sequence: Synthetic oligonucleotide
  Sense strand starting at position 3323 of SEQ ID NO: 586066
aagauugaccaguggguuu

SEQ ID NO: 689533 - RNA, 19 nt, Artificial Sequence
  Description of Artificial Sequence: Synthetic oligonucleotide
  Antisense strand to SEQ ID NO: 689532
aaacccacuggucaaucuu

SEQ ID NO: 689534 - RNA, 19 nt, Artificial Sequence
  Description of Artificial Sequence: Synthetic oligonucleotide
  Sense strand starting at position 3325 of SEQ ID NO: 586066
gauugaccaguggguuuaa

SEQ ID NO: 689535 - RNA, 19 nt, Artificial Sequence
  Description of Artificial Sequence: Synthetic oligonucleotide
  Antisense strand to SEQ ID NO: 689534
uuaaacccacuggucaauc

SEQ ID NO: 689536 - RNA, 19 nt, Artificial Sequence
  Description of Artificial Sequence: Synthetic oligonucleotide
  Sense strand starting at position 3335 of SEQ ID NO: 586066
uggguuuaauacuugauag

SEQ ID NO: 689537 - RNA, 19 nt, Artificial Sequence
  Description of Artificial Sequence: Synthetic oligonucleotide
  Antisense strand to SEQ ID NO: 689536
cuaucaaguauuaaaccca

SEQ ID NO: 689538 - RNA, 19 nt, Artificial Sequence
  Description of Artificial Sequence: Synthetic oligonucleotide
  Sense strand starting at position 3336 of SEQ ID NO: 586066
ggguuuaauacuugauagc

SEQ ID NO: 689539 - RNA, 19 nt, Artificial Sequence
  Description of Artificial Sequence: Synthetic oligonucleotide
  Antisense strand to SEQ ID NO: 689538
gcuaucaaguauuaaaccc

SEQ ID NO: 689540 - RNA, 19 nt, Artificial Sequence
  Description of Artificial Sequence: Synthetic oligonucleotide
  Sense strand starting at position 3337 of SEQ ID NO: 586066
gguuuaauacuugauagcu

SEQ ID NO: 689541 - RNA, 19 nt, Artificial Sequence
  Description of Artificial Sequence: Synthetic oligonucleotide
  Antisense strand to SEQ ID NO: 689540
agcuaucaaguauuaaacc

SEQ ID NO: 689542 - RNA, 19 nt, Artificial Sequence
  Description of Artificial Sequence: Synthetic oligonucleotide
  Sense strand starting at position 3531 of SEQ ID NO: 586066
uuugguuauccugaaaugu

SEQ ID NO: 689543 - RNA, 19 nt, Artificial Sequence
  Description of Artificial Sequence: Synthetic oligonucleotide
  Antisense strand to SEQ ID NO: 689542
acauuucaggauaaccaaa

SEQ ID NO: 689544 - RNA, 19 nt, Artificial Sequence
  Description of Artificial Sequence: Synthetic oligonucleotide
  Sense strand starting at position 3548 of SEQ ID NO: 586066
guaguuuguacaggaaaga

SEQ ID NO: 689545 - RNA, 19 nt, Artificial Sequence
  Description of Artificial Sequence: Synthetic oligonucleotide
  Antisense strand to SEQ ID NO: 689544
ucuuuccuguacaaacuac

SEQ ID NO: 689546 - RNA, 19 nt, Artificial Sequence
  Description of Artificial Sequence: Synthetic oligonucleotide
  Sense strand starting at position 3743 of SEQ ID NO: 586066
ugguuugugugacugaaug

SEQ ID NO: 689547 - RNA, 19 nt, Artificial Sequence
  Description of Artificial Sequence: Synthetic oligonucleotide
  Antisense strand to SEQ ID NO: 689546
cauucagucacacaaacca

SEQ ID NO: 689548 - RNA, 19 nt, Artificial Sequence
  Description of Artificial Sequence: Synthetic oligonucleotide
  Sense strand starting at position 3745 of SEQ ID NO: 586066
guuugugugacugaaugau

SEQ ID NO: 689549 - RNA, 19 nt, Artificial Sequence
  Description of Artificial Sequence: Synthetic oligonucleotide
  Antisense strand to SEQ ID NO: 689548
aucauucagucacacaaac

SEQ ID NO: 689550 - RNA, 19 nt, Artificial Sequence
  Description of Artificial Sequence: Synthetic oligonucleotide
  Sense strand starting at position 3751 of SEQ ID NO: 586066
gugacugaaugaucuggua

SEQ ID NO: 689551 - RNA, 19 nt, Artificial Sequence
  Description of Artificial Sequence: Synthetic oligonucleotide
  Antisense strand to SEQ ID NO: 689550
uaccagaucauucagucac

SEQ ID NO: 689552 - RNA, 19 nt, Artificial Sequence
  Description of Artificial Sequence: Synthetic oligonucleotide
  Sense strand starting at position 9 of SEQ ID NO: 586067
ugcaacaauccaugcaaga

SEQ ID NO: 689553 - RNA, 19 nt, Artificial Sequence
  Description of Artificial Sequence: Synthetic oligonucleotide
  Antisense strand to SEQ ID NO: 689552
ucuugcauggauuguugca

SEQ ID NO: 689554 - RNA, 19 nt, Artificial Sequence
  Description of Artificial Sequence: Synthetic oligonucleotide
  Sense strand starting at position 35 of SEQ ID NO: 586067
gggcuuagaccagagugau

SEQ ID NO: 689555 - RNA, 19 nt, Artificial Sequence
  Description of Artificial Sequence: Synthetic oligonucleotide
  Antisense strand to SEQ ID NO: 689554
aucacucuggucuaagccc

SEQ ID NO: 689556 - RNA, 19 nt, Artificial Sequence
  Description of Artificial Sequence: Synthetic oligonucleotide
  Sense strand starting at position 78 of SEQ ID NO: 586067
auguauucuagagguaaag

SEQ ID NO: 689557 - RNA, 19 nt, Artificial Sequence
  Description of Artificial Sequence: Synthetic oligonucleotide
  Antisense strand to SEQ ID NO: 689556
cuuuaccucuagaauacau

SEQ ID NO: 689558 - RNA, 19 nt, Artificial Sequence
  Description of Artificial Sequence: Synthetic oligonucleotide
  Sense strand starting at position 80 of SEQ ID NO: 586067
guauucuagagguaaagcu

SEQ ID NO: 689559 - RNA, 19 nt, Artificial Sequence
  Description of Artificial Sequence: Synthetic oligonucleotide
  Antisense strand to SEQ ID NO: 689558
agcuuuaccucuagaauac

SEQ ID NO: 689560 - RNA, 19 nt, Artificial Sequence
  Description of Artificial Sequence: Synthetic oligonucleotide
  Sense strand starting at position 102 of SEQ ID NO: 586067
ggguuagacagaugaggua

SEQ ID NO: 689561 - RNA, 19 nt, Artificial Sequence
  Description of Artificial Sequence: Synthetic oligonucleotide
  Antisense strand to SEQ ID NO: 689560
uaccucaucugucuaaccc

SEQ ID NO: 689562 - RNA, 19 nt, Artificial Sequence
  Description of Artificial Sequence: Synthetic oligonucleotide
  Sense strand starting at position 148 of SEQ ID NO: 586067
ggagauaauggcuguuucu

SEQ ID NO: 689563 - RNA, 19 nt, Artificial Sequence
  Description of Artificial Sequence: Synthetic oligonucleotide
  Antisense strand to SEQ ID NO: 689562
agaaacagccauuaucucc

SEQ ID NO: 689564 - RNA, 19 nt, Artificial Sequence
  Description of Artificial Sequence: Synthetic oligonucleotide
  Sense strand starting at position 151 of SEQ ID NO: 586067
gauaauggcuguuucugau

SEQ ID NO: 689565 - RNA, 19 nt, Artificial Sequence
  Description of Artificial Sequence: Synthetic oligonucleotide
  Antisense strand to SEQ ID NO: 689564
aucagaaacagccauuauc

SEQ ID NO: 689566 - RNA, 19 nt, Artificial Sequence
  Description of Artificial Sequence: Synthetic oligonucleotide
  Sense strand starting at position 167 of SEQ ID NO: 586067
gauguaagcaacggaugau

SEQ ID NO: 689567 - RNA, 19 nt, Artificial Sequence
  Description of Artificial Sequence: Synthetic oligonucleotide
  Antisense strand to SEQ ID NO: 689566
aucauccguugcuuacauc

SEQ ID NO: 689568 - RNA, 19 nt, Artificial Sequence
  Description of Artificial Sequence: Synthetic oligonucleotide
  Sense strand starting at position 186 of SEQ ID NO: 586067
gcuauuuacucagacagaa

SEQ ID NO: 689569 - RNA, 19 nt, Artificial Sequence
  Description of Artificial Sequence: Synthetic oligonucleotide
  Antisense strand to SEQ ID NO: 689568
uucugucugaguaaauagc

SEQ ID NO: 689570 - RNA, 19 nt, Artificial Sequence
  Description of Artificial Sequence: Synthetic oligonucleotide
  Sense strand starting at position 219 of SEQ ID NO: 586067
uacauugcgcacuggagaa

SEQ ID NO: 689571 - RNA, 19 nt, Artificial Sequence
  Description of Artificial Sequence: Synthetic oligonucleotide
  Antisense strand to SEQ ID NO: 689570
uucuccagugcgcaaugua

SEQ ID NO: 689572 - RNA, 19 nt, Artificial Sequence
  Description of Artificial Sequence: Synthetic oligonucleotide
  Sense strand starting at position 240 of SEQ ID NO: 586067
aaaggagguuguguaaaca

SEQ ID NO: 689573 - RNA, 19 nt, Artificial Sequence
  Description of Artificial Sequence: Synthetic oligonucleotide
  Antisense strand to SEQ ID NO: 689572
uguuuacacaaccuccuuu

SEQ ID NO: 689574 - RNA, 19 nt, Artificial Sequence
  Description of Artificial Sequence: Synthetic oligonucleotide
  Sense strand starting at position 352 of SEQ ID NO: 586067
ugaccaaaguacucacagu

SEQ ID NO: 689575 - RNA, 19 nt, Artificial Sequence
  Description of Artificial Sequence: Synthetic oligonucleotide
  Antisense strand to SEQ ID NO: 689574
acugugaguacuuugguca

SEQ ID NO: 689576 - RNA, 19 nt, Artificial Sequence
  Description of Artificial Sequence: Synthetic oligonucleotide
  Sense strand starting at position 403 of SEQ ID NO: 586067
agcagaacuuuguuacuaa

SEQ ID NO: 689577 - RNA, 19 nt, Artificial Sequence
  Description of Artificial Sequence: Synthetic oligonucleotide
  Antisense strand to SEQ ID NO: 689576
uuaguaacaaaguucugcu

SEQ ID NO: 689578 - RNA, 19 nt, Artificial Sequence
  Description of Artificial Sequence: Synthetic oligonucleotide
  Sense strand starting at position 406 of SEQ ID NO: 586067
agaacuuuguuacuaaguu

SEQ ID NO: 689579 - RNA, 19 nt, Artificial Sequence
  Description of Artificial Sequence: Synthetic oligonucleotide
  Antisense strand to SEQ ID NO: 689578
aacuuaguaacaaaguucu

SEQ ID NO: 689580 - RNA, 19 nt, Artificial Sequence
  Description of Artificial Sequence: Synthetic oligonucleotide
  Sense strand starting at position 669 of SEQ ID NO: 586067
ggugguuaugguuaaaggu

SEQ ID NO: 689581 - RNA, 19 nt, Artificial Sequence
  Description of Artificial Sequence: Synthetic oligonucleotide
  Antisense strand to SEQ ID NO: 689580
accuuuaaccauaaccacc

SEQ ID NO: 689582 - RNA, 19 nt, Artificial Sequence
  Description of Artificial Sequence: Synthetic oligonucleotide
  Sense strand starting at position 679 of SEQ ID NO: 586067
guuaaaggucaacauuauu

SEQ ID NO: 689583 - RNA, 19 nt, Artificial Sequence
  Description of Artificial Sequence: Synthetic oligonucleotide
  Antisense strand to SEQ ID NO: 689582
aauaauguugaccuuuaac

SEQ ID NO: 689584 - RNA, 19 nt, Artificial Sequence
  Description of Artificial Sequence: Synthetic oligonucleotide
  Sense strand starting at position 727 of SEQ ID NO: 586067
uuccucuagcagugaaaca

SEQ ID NO: 689585 - RNA, 19 nt, Artificial Sequence
  Description of Artificial Sequence: Synthetic oligonucleotide
  Antisense strand to SEQ ID NO: 689584
uguuucacugcuagaggaa

SEQ ID NO: 689586 - RNA, 19 nt, Artificial Sequence
  Description of Artificial Sequence: Synthetic oligonucleotide
  Sense strand starting at position 825 of SEQ ID NO: 586067
agucgaguuacuugaaccu

SEQ ID NO: 689587 - RNA, 19 nt, Artificial Sequence
  Description of Artificial Sequence: Synthetic oligonucleotide
  Antisense strand to SEQ ID NO: 689586
agguucaaguaacucgacu

SEQ ID NO: 689588 - RNA, 19 nt, Artificial Sequence
  Description of Artificial Sequence: Synthetic oligonucleotide
  Sense strand starting at position 900 of SEQ ID NO: 586067
aagacuugugaggguuaaa

SEQ ID NO: 689589 - RNA, 19 nt, Artificial Sequence
  Description of Artificial Sequence: Synthetic oligonucleotide
  Antisense strand to SEQ ID NO: 689588
uuuaacccucacaagucuu

SEQ ID NO: 689590 - RNA, 19 nt, Artificial Sequence
  Description of Artificial Sequence: Synthetic oligonucleotide
  Sense strand starting at position 930 of SEQ ID NO: 586067
agugaaaggcuaggcauaa

SEQ ID NO: 689591 - RNA, 19 nt, Artificial Sequence
  Description of Artificial Sequence: Synthetic oligonucleotide
  Antisense strand to SEQ ID NO: 689590
uuaugccuagccuuucacu

SEQ ID NO: 689592 - RNA, 19 nt, Artificial Sequence
  Description of Artificial Sequence: Synthetic oligonucleotide
  Sense strand starting at position 931 of SEQ ID NO: 586067
gugaaaggcuaggcauaau

SEQ ID NO: 689593 - RNA, 19 nt, Artificial Sequence
  Description of Artificial Sequence: Synthetic oligonucleotide
  Antisense strand to SEQ ID NO: 689592
auuaugccuagccuuucac

SEQ ID NO: 689594 - RNA, 19 nt, Artificial Sequence
  Description of Artificial Sequence: Synthetic oligonucleotide
  Sense strand starting at position 1049 of SEQ ID NO: 586067
guuuacacucuagacguaa

SEQ ID NO: 689595 - RNA, 19 nt, Artificial Sequence
  Description of Artificial Sequence: Synthetic oligonucleotide
  Antisense strand to SEQ ID NO: 689594
uuacgucuagaguguaaac

SEQ ID NO: 689596 - RNA, 19 nt, Artificial Sequence
  Description of Artificial Sequence: Synthetic oligonucleotide
  Sense strand starting at position 1087 of SEQ ID NO: 586067
gucccuaacucgccacaaa

SEQ ID NO: 689597 - RNA, 19 nt, Artificial Sequence
  Description of Artificial Sequence: Synthetic oligonucleotide
  Antisense strand to SEQ ID NO: 689596
uuuguggcgaguuagggac

SEQ ID NO: 689598 - RNA, 19 nt, Artificial Sequence
  Description of Artificial Sequence: Synthetic oligonucleotide
  Sense strand starting at position 1411 of SEQ ID NO: 586067
ggaggcuucgcgcuuagga

SEQ ID NO: 689599 - RNA, 19 nt, Artificial Sequence
  Description of Artificial Sequence: Synthetic oligonucleotide
  Antisense strand to SEQ ID NO: 689598
uccuaagcgcgaagccucc

SEQ ID NO: 689600 - RNA, 19 nt, Artificial Sequence
  Description of Artificial Sequence: Synthetic oligonucleotide
  Sense strand starting at position 2290 of SEQ ID NO: 586067
gccuccgaauccucaagau

SEQ ID NO: 689601 - RNA, 19 nt, Artificial Sequence
  Description of Artificial Sequence: Synthetic oligonucleotide
  Antisense strand to SEQ ID NO: 689600
aucuugaggauucggaggc

SEQ ID NO: 689602 - RNA, 19 nt, Artificial Sequence
  Description of Artificial Sequence: Synthetic oligonucleotide
  Sense strand starting at position 2506 of SEQ ID NO: 586067
cucuuaauuuagggaugga

SEQ ID NO: 689603 - RNA, 19 nt, Artificial Sequence
  Description of Artificial Sequence: Synthetic oligonucleotide
  Antisense strand to SEQ ID NO: 689602
uccaucccuaaauuaagag

SEQ ID NO: 689604 - RNA, 19 nt, Artificial Sequence
  Description of Artificial Sequence: Synthetic oligonucleotide
  Sense strand starting at position 2654 of SEQ ID NO: 586067
ucaguuuacuuuccaguuu

SEQ ID NO: 689605 - RNA, 19 nt, Artificial Sequence
  Description of Artificial Sequence: Synthetic oligonucleotide
  Antisense strand to SEQ ID NO: 689604
aaacuggaaaguaaacuga

SEQ ID NO: 689606 - RNA, 19 nt, Artificial Sequence
  Description of Artificial Sequence: Synthetic oligonucleotide
  Sense strand starting at position 2721 of SEQ ID NO: 586067
gguggugggccagaaucaa

SEQ ID NO: 689607 - RNA, 19 nt, Artificial Sequence
  Description of Artificial Sequence: Synthetic oligonucleotide
  Antisense strand to SEQ ID NO: 689606
uugauucuggcccaccacc

SEQ ID NO: 689608 - RNA, 19 nt, Artificial Sequence
  Description of Artificial Sequence: Synthetic oligonucleotide
  Sense strand starting at position 3232 of SEQ ID NO: 586067
uuguaagagauccaggcau

SEQ ID NO: 689609 - RNA, 19 nt, Artificial Sequence
  Description of Artificial Sequence: Synthetic oligonucleotide
  Antisense strand to SEQ ID NO: 689608
augccuggaucucuuacaa

SEQ ID NO: 689610 - RNA, 19 nt, Artificial Sequence
  Description of Artificial Sequence: Synthetic oligonucleotide
  Sense strand starting at position 3337 of SEQ ID NO: 586067
aagggucacgccuauaauc

SEQ ID NO: 689611 - RNA, 19 nt, Artificial Sequence
  Description of Artificial Sequence: Synthetic oligonucleotide
  Antisense strand to SEQ ID NO: 689610
gauuauaggcgugacccuu

SEQ ID NO: 689612 - RNA, 19 nt, Artificial Sequence
  Description of Artificial Sequence: Synthetic oligonucleotide
  Sense strand starting at position 3605 of SEQ ID NO: 586067
ccauuuccauacguucuua

SEQ ID NO: 689613 - RNA, 19 nt, Artificial Sequence
  Description of Artificial Sequence: Synthetic oligonucleotide
  Antisense strand to SEQ ID NO: 689612
uaagaacguauggaaaugg

SEQ ID NO: 689614 - RNA, 19 nt, Artificial Sequence
  Description of Artificial Sequence: Synthetic oligonucleotide
  Sense strand starting at position 3762 of SEQ ID NO: 586067
guguaugcccugucuuuau

SEQ ID NO: 689615 - RNA, 19 nt, Artificial Sequence
  Description of Artificial Sequence: Synthetic oligonucleotide
  Antisense strand to SEQ ID NO: 689614
auaaagacagggcauacac

SEQ ID NO: 689616 - RNA, 19 nt, Artificial Sequence
  Description of Artificial Sequence: Synthetic oligonucleotide
  Sense strand starting at position 3766 of SEQ ID NO: 586067
augcccugucuuuauuaga

SEQ ID NO: 689617 - RNA, 19 nt, Artificial Sequence
  Description of Artificial Sequence: Synthetic oligonucleotide
  Antisense strand to SEQ ID NO: 689616
ucuaauaaagacagggcau

SEQ ID NO: 689618 - RNA, 19 nt, Artificial Sequence
  Description of Artificial Sequence: Synthetic oligonucleotide
  Sense strand starting at position 3840 of SEQ ID NO: 586067
aaauguaaaucagugugua

SEQ ID NO: 689619 - RNA, 19 nt, Artificial Sequence
  Description of Artificial Sequence: Synthetic oligonucleotide
  Antisense strand to SEQ ID NO: 689618
uacacacugauuuacauuu

SEQ ID NO: 689620 - RNA, 19 nt, Artificial Sequence
  Description of Artificial Sequence: Synthetic oligonucleotide
  Sense strand starting at position 3841 of SEQ ID NO: 586067
aauguaaaucaguguguau

SEQ ID NO: 689621 - RNA, 19 nt, Artificial Sequence
  Description of Artificial Sequence: Synthetic oligonucleotide
  Antisense strand to SEQ ID NO: 689620
auacacacugauuuacauu

SEQ ID NO: 689622 - RNA, 19 nt, Artificial Sequence
  Description of Artificial Sequence: Synthetic oligonucleotide
  Sense strand starting at position 3843 of SEQ ID NO: 586067
uguaaaucaguguguauag

SEQ ID NO: 689623 - RNA, 19 nt, Artificial Sequence
  Description of Artificial Sequence: Synthetic oligonucleotide
  Antisense strand to SEQ ID NO: 689622
cuauacacacugauuuaca

SEQ ID NO: 689624 - RNA, 19 nt, Artificial Sequence
  Description of Artificial Sequence: Synthetic oligonucleotide
  Sense strand starting at position 3844 of SEQ ID NO: 586067
guaaaucaguguguauaga

SEQ ID NO: 689625 - RNA, 19 nt, Artificial Sequence
  Description of Artificial Sequence: Synthetic oligonucleotide
  Antisense strand to SEQ ID NO: 689624
ucuauacacacugauuuac

SEQ ID NO: 689626 - RNA, 19 nt, Artificial Sequence
  Description of Artificial Sequence: Synthetic oligonucleotide
  Sense strand starting at position 3845 of SEQ ID NO: 586067
uaaaucaguguguauagau

SEQ ID NO: 689627 - RNA, 19 nt, Artificial Sequence
  Description of Artificial Sequence: Synthetic oligonucleotide
  Antisense strand to SEQ ID NO: 689626
aucuauacacacugauuua

SEQ ID NO: 689628 - RNA, 19 nt, Artificial Sequence
  Description of Artificial Sequence: Synthetic oligonucleotide
  Sense strand starting at position 3854 of SEQ ID NO: 586067
guguauagauacuuggagu

SEQ ID NO: 689629 - RNA, 19 nt, Artificial Sequence
  Description of Artificial Sequence: Synthetic oligonucleotide
  Antisense strand to SEQ ID NO: 689628
acuccaaguaucuauacac

SEQ ID NO: 689630 - RNA, 19 nt, Artificial Sequence
  Description of Artificial Sequence: Synthetic oligonucleotide
  Sense strand starting at position 3894 of SEQ ID NO: 586067
uguuauauucuguaucaac

SEQ ID NO: 689631 - RNA, 19 nt, Artificial Sequence
  Description of Artificial Sequence: Synthetic oligonucleotide
  Antisense strand to SEQ ID NO: 689630
guugauacagaauauaaca

SEQ ID NO: 689632 - RNA, 19 nt, Artificial Sequence
  Description of Artificial Sequence: Synthetic oligonucleotide
  Sense strand starting at position 1 of SEQ ID NO: 586068
ccaguagcuguauaacaga

SEQ ID NO: 689633 - RNA, 19 nt, Artificial Sequence
  Description of Artificial Sequence: Synthetic oligonucleotide
  Antisense strand to SEQ ID NO: 689632
ucuguuauacagcuacugg

SEQ ID NO: 689634 - RNA, 19 nt, Artificial Sequence
  Description of Artificial Sequence: Synthetic oligonucleotide
  Sense strand starting at position 71 of SEQ ID NO: 586068
aagucuuagcuccagggua

SEQ ID NO: 689635 - RNA, 19 nt, Artificial Sequence
  Description of Artificial Sequence: Synthetic oligonucleotide
  Antisense strand to SEQ ID NO: 689634
uacccuggagcuaagacuu

SEQ ID NO: 689636 - RNA, 19 nt, Artificial Sequence
  Description of Artificial Sequence: Synthetic oligonucleotide
  Sense strand starting at position 154 of SEQ ID NO: 586068
gucgaagugaaaggaauaa

SEQ ID NO: 689637 - RNA, 19 nt, Artificial Sequence
  Description of Artificial Sequence: Synthetic oligonucleotide
  Antisense strand to SEQ ID NO: 689636
uuauuccuuucacuucgac

SEQ ID NO: 689638 - RNA, 19 nt, Artificial Sequence
  Description of Artificial Sequence: Synthetic oligonucleotide
  Sense strand starting at position 300 of SEQ ID NO: 586068
guuuauaggccuuagacuu

SEQ ID NO: 689639 - RNA, 19 nt, Artificial Sequence
  Description of Artificial Sequence: Synthetic oligonucleotide
  Antisense strand to SEQ ID NO: 689638
aagucuaaggccuauaaac

SEQ ID NO: 689640 - RNA, 19 nt, Artificial Sequence
  Description of Artificial Sequence: Synthetic oligonucleotide
  Sense strand starting at position 306 of SEQ ID NO: 586068
aggccuuagacuuggaaau

SEQ ID NO: 689641 - RNA, 19 nt, Artificial Sequence
  Description of Artificial Sequence: Synthetic oligonucleotide
  Antisense strand to SEQ ID NO: 689640
auuuccaagucuaaggccu

SEQ ID NO: 689642 - RNA, 19 nt, Artificial Sequence
  Description of Artificial Sequence: Synthetic oligonucleotide
  Sense strand starting at position 307 of SEQ ID NO: 586068
ggccuuagacuuggaaauu

SEQ ID NO: 689643 - RNA, 19 nt, Artificial Sequence
  Description of Artificial Sequence: Synthetic oligonucleotide
  Antisense strand to SEQ ID NO: 689642
aauuuccaagucuaaggcc

SEQ ID NO: 689644 - RNA, 19 nt, Artificial Sequence
  Description of Artificial Sequence: Synthetic oligonucleotide
  Sense strand starting at position 443 of SEQ ID NO: 586068
gcaguuagauaaucaccca

SEQ ID NO: 689645 - RNA, 19 nt, Artificial Sequence
  Description of Artificial Sequence: Synthetic oligonucleotide
  Antisense strand to SEQ ID NO: 689644
ugggugauuaucuaacugc

SEQ ID NO: 689646 - RNA, 19 nt, Artificial Sequence
  Description of Artificial Sequence: Synthetic oligonucleotide
  Sense strand starting at position 589 of SEQ ID NO: 586068
gccuaaugugaauaugcau

SEQ ID NO: 689647 - RNA, 19 nt, Artificial Sequence
  Description of Artificial Sequence: Synthetic oligonucleotide
  Antisense strand to SEQ ID NO: 689646
augcauauucacauuaggc

SEQ ID NO: 689648 - RNA, 19 nt, Artificial Sequence
  Description of Artificial Sequence: Synthetic oligonucleotide
  Sense strand starting at position 779 of SEQ ID NO: 586068
agaaacagagccugguaua

SEQ ID NO: 689649 - RNA, 19 nt, Artificial Sequence
  Description of Artificial Sequence: Synthetic oligonucleotide
  Antisense strand to SEQ ID NO: 689648
uauaccaggcucuguuucu

SEQ ID NO: 689650 - RNA, 19 nt, Artificial Sequence
  Description of Artificial Sequence: Synthetic oligonucleotide
  Sense strand starting at position 886 of SEQ ID NO: 586068
uugccucuccuagaggaaa

SEQ ID NO: 689651 - RNA, 19 nt, Artificial Sequence
  Description of Artificial Sequence: Synthetic oligonucleotide
  Antisense strand to SEQ ID NO: 689650
uuuccucuaggagaggcaa

SEQ ID NO: 689652 - RNA, 19 nt, Artificial Sequence
  Description of Artificial Sequence: Synthetic oligonucleotide
  Sense strand starting at position 917 of SEQ ID NO: 586068
agacgaugaccuugugaaa

SEQ ID NO: 689653 - RNA, 19 nt, Artificial Sequence
  Description of Artificial Sequence: Synthetic oligonucleotide
  Antisense strand to SEQ ID NO: 689652
uuucacaaggucaucgucu

SEQ ID NO: 689654 - RNA, 19 nt, Artificial Sequence
  Description of Artificial Sequence: Synthetic oligonucleotide
  Sense strand starting at position 1472 of SEQ ID NO: 586068
gugccuugcaguguuuacu

SEQ ID NO: 689655 - RNA, 19 nt, Artificial Sequence
  Description of Artificial Sequence: Synthetic oligonucleotide
  Antisense strand to SEQ ID NO: 689654
aguaaacacugcaaggcac

SEQ ID NO: 689656 - RNA, 19 nt, Artificial Sequence
  Description of Artificial Sequence: Synthetic oligonucleotide
  Sense strand starting at position 1473 of SEQ ID NO: 586068
ugccuugcaguguuuacua

SEQ ID NO: 689657 - RNA, 19 nt, Artificial Sequence
  Description of Artificial Sequence: Synthetic oligonucleotide
  Antisense strand to SEQ ID NO: 689656
uaguaaacacugcaaggca

SEQ ID NO: 689658 - RNA, 19 nt, Artificial Sequence
  Description of Artificial Sequence: Synthetic oligonucleotide
  Sense strand starting at position 1484 of SEQ ID NO: 586068
guuuacuaucucuaggaac

SEQ ID NO: 689659 - RNA, 19 nt, Artificial Sequence
  Description of Artificial Sequence: Synthetic oligonucleotide
  Antisense strand to SEQ ID NO: 689658
guuccuagagauaguaaac

SEQ ID NO: 689660 - RNA, 19 nt, Artificial Sequence
  Description of Artificial Sequence: Synthetic oligonucleotide
  Sense strand starting at position 2218 of SEQ ID NO: 586068
cagcguugcaguuuauguu

SEQ ID NO: 689661 - RNA, 19 nt, Artificial Sequence
  Description of Artificial Sequence: Synthetic oligonucleotide
  Antisense strand to SEQ ID NO: 689660
aacauaaacugcaacgcug

SEQ ID NO: 689662 - RNA, 19 nt, Artificial Sequence
  Description of Artificial Sequence: Synthetic oligonucleotide
  Sense strand starting at position 2252 of SEQ ID NO: 586068
cuguuaaccgaggacucaa

SEQ ID NO: 689663 - RNA, 19 nt, Artificial Sequence
  Description of Artificial Sequence: Synthetic oligonucleotide
  Antisense strand to SEQ ID NO: 689662
uugaguccucgguuaacag

SEQ ID NO: 689664 - RNA, 19 nt, Artificial Sequence
  Description of Artificial Sequence: Synthetic oligonucleotide
  Sense strand starting at position 2298 of SEQ ID NO: 586068
ugccacugacccugagaga

SEQ ID NO: 689665 - RNA, 19 nt, Artificial Sequence
  Description of Artificial Sequence: Synthetic oligonucleotide
  Antisense strand to SEQ ID NO: 689664
ucucucagggucaguggca

SEQ ID NO: 689666 - RNA, 19 nt, Artificial Sequence
  Description of Artificial Sequence: Synthetic oligonucleotide
  Sense strand starting at position 2369 of SEQ ID NO: 586068
gcugucauccacgaagaug

SEQ ID NO: 689667 - RNA, 19 nt, Artificial Sequence
  Description of Artificial Sequence: Synthetic oligonucleotide
  Antisense strand to SEQ ID NO: 689666
caucuucguggaugacagc

SEQ ID NO: 689668 - RNA, 19 nt, Artificial Sequence
  Description of Artificial Sequence: Synthetic oligonucleotide
  Sense strand starting at position 2425 of SEQ ID NO: 586068
ggacuuguguggguggaga

SEQ ID NO: 689669 - RNA, 19 nt, Artificial Sequence
  Description of Artificial Sequence: Synthetic oligonucleotide
  Antisense strand to SEQ ID NO: 689668
ucuccacccacacaagucc

SEQ ID NO: 689670 - RNA, 19 nt, Artificial Sequence
  Description of Artificial Sequence: Synthetic oligonucleotide
  Sense strand starting at position 2427 of SEQ ID NO: 586068
acuuguguggguggagaaa

SEQ ID NO: 689671 - RNA, 19 nt, Artificial Sequence
  Description of Artificial Sequence: Synthetic oligonucleotide
  Antisense strand to SEQ ID NO: 689670
uuucuccacccacacaagu

SEQ ID NO: 689672 - RNA, 19 nt, Artificial Sequence
  Description of Artificial Sequence: Synthetic oligonucleotide
  Sense strand starting at position 2458 of SEQ ID NO: 586068
gaaaguacugugggagguu

SEQ ID NO: 689673 - RNA, 19 nt, Artificial Sequence
  Description of Artificial Sequence: Synthetic oligonucleotide
  Antisense strand to SEQ ID NO: 689672
aaccucccacaguacuuuc

SEQ ID NO: 689674 - RNA, 19 nt, Artificial Sequence
  Description of Artificial Sequence: Synthetic oligonucleotide
  Sense strand starting at position 2505 of SEQ ID NO: 586068
uuuggaaucagcuaagagu

SEQ ID NO: 689675 - RNA, 19 nt, Artificial Sequence
  Description of Artificial Sequence: Synthetic oligonucleotide
  Antisense strand to SEQ ID NO: 689674
acucuuagcugauuccaaa

SEQ ID NO: 689676 - RNA, 19 nt, Artificial Sequence
  Description of Artificial Sequence: Synthetic oligonucleotide
  Sense strand starting at position 2558 of SEQ ID NO: 586068
guucuuuagguugaacacu

SEQ ID NO: 689677 - RNA, 19 nt, Artificial Sequence
  Description of Artificial Sequence: Synthetic oligonucleotide
  Antisense strand to SEQ ID NO: 689676
aguguucaaccuaaagaac

SEQ ID NO: 689678 - RNA, 19 nt, Artificial Sequence
  Description of Artificial Sequence: Synthetic oligonucleotide
  Sense strand starting at position 2824 of SEQ ID NO: 586068
gggucuacagcuuauucua

SEQ ID NO: 689679 - RNA, 19 nt, Artificial Sequence
  Description of Artificial Sequence: Synthetic oligonucleotide
  Antisense strand to SEQ ID NO: 689678
uagaauaagcuguagaccc

SEQ ID NO: 689680 - RNA, 19 nt, Artificial Sequence
  Description of Artificial Sequence: Synthetic oligonucleotide
  Sense strand starting at position 2938 of SEQ ID NO: 586068
uguaucaaacacuguucua

SEQ ID NO: 689681 - RNA, 19 nt, Artificial Sequence
  Description of Artificial Sequence: Synthetic oligonucleotide
  Antisense strand to SEQ ID NO: 689680
uagaacaguguuugauaca

SEQ ID NO: 689682 - RNA, 19 nt, Artificial Sequence
  Description of Artificial Sequence: Synthetic oligonucleotide
  Sense strand starting at position 2994 of SEQ ID NO: 586068
aaucgugugagauauguau

SEQ ID NO: 689683 - RNA, 19 nt, Artificial Sequence
  Description of Artificial Sequence: Synthetic oligonucleotide
  Antisense strand to SEQ ID NO: 689682
auacauaucucacacgauu

SEQ ID NO: 689684 - RNA, 19 nt, Artificial Sequence
  Description of Artificial Sequence: Synthetic oligonucleotide
  Sense strand starting at position 2998 of SEQ ID NO: 586068
gugugagauauguauucuu

SEQ ID NO: 689685 - RNA, 19 nt, Artificial Sequence
  Description of Artificial Sequence: Synthetic oligonucleotide
  Antisense strand to SEQ ID NO: 689684
aagaauacauaucucacac

SEQ ID NO: 689686 - RNA, 19 nt, Artificial Sequence
  Description of Artificial Sequence: Synthetic oligonucleotide
  Sense strand starting at position 3111 of SEQ ID NO: 586068
cugugcuugcagucacuau

SEQ ID NO: 689687 - RNA, 19 nt, Artificial Sequence
  Description of Artificial Sequence: Synthetic oligonucleotide
  Antisense strand to SEQ ID NO: 689686
auagugacugcaagcacag

SEQ ID NO: 689688 - RNA, 19 nt, Artificial Sequence
  Description of Artificial Sequence: Synthetic oligonucleotide
  Sense strand starting at position 3142 of SEQ ID NO: 586068
cucaauaguggugagugua

SEQ ID NO: 689689 - RNA, 19 nt, Artificial Sequence
  Description of Artificial Sequence: Synthetic oligonucleotide
  Antisense strand to SEQ ID NO: 689688
uacacucaccacuauugag

SEQ ID NO: 689690 - RNA, 19 nt, Artificial Sequence
  Description of Artificial Sequence: Synthetic oligonucleotide
  Sense strand starting at position 3226 of SEQ ID NO: 586068
aggucugaauauguguaga

SEQ ID NO: 689691 - RNA, 19 nt, Artificial Sequence
  Description of Artificial Sequence: Synthetic oligonucleotide
  Antisense strand to SEQ ID NO: 689690
ucuacacauauucagaccu

SEQ ID NO: 689692 - RNA, 19 nt, Artificial Sequence
  Description of Artificial Sequence: Synthetic oligonucleotide
  Sense strand starting at position 3228 of SEQ ID NO: 586068
gucugaauauguguagaau

SEQ ID NO: 689693 - RNA, 19 nt, Artificial Sequence
  Description of Artificial Sequence: Synthetic oligonucleotide
  Antisense strand to SEQ ID NO: 689692
auucuacacauauucagac

SEQ ID NO: 689694 - RNA, 19 nt, Artificial Sequence
  Description of Artificial Sequence: Synthetic oligonucleotide
  Sense strand starting at position 3229 of SEQ ID NO: 586068
ucugaauauguguagaauu

SEQ ID NO: 689695 - RNA, 19 nt, Artificial Sequence
  Description of Artificial Sequence: Synthetic oligonucleotide
  Antisense strand to SEQ ID NO: 689694
aauucuacacauauucaga

SEQ ID NO: 689696 - RNA, 19 nt, Artificial Sequence
  Description of Artificial Sequence: Synthetic oligonucleotide
  Sense strand starting at position 3272 of SEQ ID NO: 586068
gauacauuggcccaaagua

SEQ ID NO: 689697 - RNA, 19 nt, Artificial Sequence
  Description of Artificial Sequence: Synthetic oligonucleotide
  Antisense strand to SEQ ID NO: 689696
uacuuugggccaauguauc

SEQ ID NO: 689698 - RNA, 19 nt, Artificial Sequence
  Description of Artificial Sequence: Synthetic oligonucleotide
  Sense strand starting at position 3761 of SEQ ID NO: 586068
agagguagaaguuguauaa

SEQ ID NO: 689699 - RNA, 19 nt, Artificial Sequence
  Description of Artificial Sequence: Synthetic oligonucleotide
  Antisense strand to SEQ ID NO: 689698
uuauacaacuucuaccucu

SEQ ID NO: 689700 - RNA, 19 nt, Artificial Sequence
  Description of Artificial Sequence: Synthetic oligonucleotide
  Sense strand starting at position 3765 of SEQ ID NO: 586068
guagaaguuguauaagguc

SEQ ID NO: 689701 - RNA, 19 nt, Artificial Sequence
  Description of Artificial Sequence: Synthetic oligonucleotide
  Antisense strand to SEQ ID NO: 689700
gaccuuauacaacuucuac

SEQ ID NO: 689702 - RNA, 19 nt, Artificial Sequence
  Description of Artificial Sequence: Synthetic oligonucleotide
  Sense strand starting at position 3799 of SEQ ID NO: 586068
ggugaagcacuuuguaaga

SEQ ID NO: 689703 - RNA, 19 nt, Artificial Sequence
  Description of Artificial Sequence: Synthetic oligonucleotide
  Antisense strand to SEQ ID NO: 689702
ucuuacaaagugcuucacc

SEQ ID NO: 689704 - RNA, 19 nt, Artificial Sequence
  Description of Artificial Sequence: Synthetic oligonucleotide
  Sense strand starting at position 3813 of SEQ ID NO: 586068
uaagaacuuugagaaagag

SEQ ID NO: 689705 - RNA, 19 nt, Artificial Sequence
  Description of Artificial Sequence: Synthetic oligonucleotide
  Antisense strand to SEQ ID NO: 689704
cucuuucucaaaguucuua

SEQ ID NO: 689706 - RNA, 19 nt, Artificial Sequence
  Description of Artificial Sequence: Synthetic oligonucleotide
  Sense strand starting at position 3865 of SEQ ID NO: 586068
gugagacucgaaggaauag

SEQ ID NO: 689707 - RNA, 19 nt, Artificial Sequence
  Description of Artificial Sequence: Synthetic oligonucleotide
  Antisense strand to SEQ ID NO: 689706
cuauuccuucgagucucac

SEQ ID NO: 689708 - RNA, 19 nt, Artificial Sequence
  Description of Artificial Sequence: Synthetic oligonucleotide
  Sense strand starting at position 3883 of SEQ ID NO: 586068
gaaguaaggaguuggcuga

SEQ ID NO: 689709 - RNA, 19 nt, Artificial Sequence
  Description of Artificial Sequence: Synthetic oligonucleotide
  Antisense strand to SEQ ID NO: 689708
ucagccaacuccuuacuuc

SEQ ID NO: 689710 - RNA, 19 nt, Artificial Sequence
  Description of Artificial Sequence: Synthetic oligonucleotide
  Sense strand starting at position 3887 of SEQ ID NO: 586068
uaaggaguuggcugaagau

SEQ ID NO: 689711 - RNA, 19 nt, Artificial Sequence
  Description of Artificial Sequence: Synthetic oligonucleotide
  Antisense strand to SEQ ID NO: 689710
aucuucagccaacuccuua

SEQ ID NO: 689712 - RNA, 19 nt, Artificial Sequence
  Description of Artificial Sequence: Synthetic oligonucleotide
  Sense strand starting at position 19 of SEQ ID NO: 586069
gaugguguauguuuaagga

SEQ ID NO: 689713 - RNA, 19 nt, Artificial Sequence
  Description of Artificial Sequence: Synthetic oligonucleotide
  Antisense strand to SEQ ID NO: 689712
uccuuaaacauacaccauc

SEQ ID NO: 689714 - RNA, 19 nt, Artificial Sequence
  Description of Artificial Sequence: Synthetic oligonucleotide
  Sense strand starting at position 114 of SEQ ID NO: 586069
cuggcuuuggaggauguau

SEQ ID NO: 689715 - RNA, 19 nt, Artificial Sequence
  Description of Artificial Sequence: Synthetic oligonucleotide
  Antisense strand to SEQ ID NO: 689714
auacauccuccaaagccag

SEQ ID NO: 689716 - RNA, 19 nt, Artificial Sequence
  Description of Artificial Sequence: Synthetic oligonucleotide
  Sense strand starting at position 147 of SEQ ID NO: 586069
ggaagucuagcggauguga

SEQ ID NO: 689717 - RNA, 19 nt, Artificial Sequence
  Description of Artificial Sequence: Synthetic oligonucleotide
  Antisense strand to SEQ ID NO: 689716
ucacauccgcuagacuucc

SEQ ID NO: 689718 - RNA, 19 nt, Artificial Sequence
  Description of Artificial Sequence: Synthetic oligonucleotide
  Sense strand starting at position 149 of SEQ ID NO: 586069
aagucuagcggaugugaca

SEQ ID NO: 689719 - RNA, 19 nt, Artificial Sequence
  Description of Artificial Sequence: Synthetic oligonucleotide
  Antisense strand to SEQ ID NO: 689718
ugucacauccgcuagacuu

SEQ ID NO: 689720 - RNA, 19 nt, Artificial Sequence
  Description of Artificial Sequence: Synthetic oligonucleotide
  Sense strand starting at position 218 of SEQ ID NO: 586069
gggcuauaccuuuauccag

SEQ ID NO: 689721 - RNA, 19 nt, Artificial Sequence
  Description of Artificial Sequence: Synthetic oligonucleotide
  Antisense strand to SEQ ID NO: 689720
cuggauaaagguauagccc

SEQ ID NO: 689722 - RNA, 19 nt, Artificial Sequence
  Description of Artificial Sequence: Synthetic oligonucleotide
  Sense strand starting at position 324 of SEQ ID NO: 586069
ccuuacugcucucuggaua

SEQ ID NO: 689723 - RNA, 19 nt, Artificial Sequence
  Description of Artificial Sequence: Synthetic oligonucleotide
  Antisense strand to SEQ ID NO: 689722
uauccagagagcaguaagg

SEQ ID NO: 689724 - RNA, 19 nt, Artificial Sequence
  Description of Artificial Sequence: Synthetic oligonucleotide
  Sense strand starting at position 366 of SEQ ID NO: 586069
ucucuuaaguggucacaac

SEQ ID NO: 689725 - RNA, 19 nt, Artificial Sequence
  Description of Artificial Sequence: Synthetic oligonucleotide
  Antisense strand to SEQ ID NO: 689724
guugugaccacuuaagaga

SEQ ID NO: 689726 - RNA, 19 nt, Artificial Sequence
  Description of Artificial Sequence: Synthetic oligonucleotide
  Sense strand starting at position 367 of SEQ ID NO: 586069
cucuuaaguggucacaaca

SEQ ID NO: 689727 - RNA, 19 nt, Artificial Sequence
  Description of Artificial Sequence: Synthetic oligonucleotide
  Antisense strand to SEQ ID NO: 689726
uguugugaccacuuaagag

SEQ ID NO: 689728 - RNA, 19 nt, Artificial Sequence
  Description of Artificial Sequence: Synthetic oligonucleotide
  Sense strand starting at position 413 of SEQ ID NO: 586069
uugcuauuccuuuauguga

SEQ ID NO: 689729 - RNA, 19 nt, Artificial Sequence
  Description of Artificial Sequence: Synthetic oligonucleotide
  Antisense strand to SEQ ID NO: 689728
ucacauaaaggaauagcaa

SEQ ID NO: 689730 - RNA, 19 nt, Artificial Sequence
  Description of Artificial Sequence: Synthetic oligonucleotide
  Sense strand starting at position 533 of SEQ ID NO: 586069
agggauaauucuccuuuau

SEQ ID NO: 689731 - RNA, 19 nt, Artificial Sequence
  Description of Artificial Sequence: Synthetic oligonucleotide
  Antisense strand to SEQ ID NO: 689730
auaaaggagaauuaucccu

SEQ ID NO: 689732 - RNA, 19 nt, Artificial Sequence
  Description of Artificial Sequence: Synthetic oligonucleotide
  Sense strand starting at position 692 of SEQ ID NO: 586069
gccucaguuuaaucacaga

SEQ ID NO: 689733 - RNA, 19 nt, Artificial Sequence
  Description of Artificial Sequence: Synthetic oligonucleotide
  Antisense strand to SEQ ID NO: 689732
ucugugauuaaacugaggc

SEQ ID NO: 689734 - RNA, 19 nt, Artificial Sequence
  Description of Artificial Sequence: Synthetic oligonucleotide
  Sense strand starting at position 746 of SEQ ID NO: 586069
agguaacaauguucccaga

SEQ ID NO: 689735 - RNA, 19 nt, Artificial Sequence
  Description of Artificial Sequence: Synthetic oligonucleotide
  Antisense strand to SEQ ID NO: 689734
ucugggaacauuguuaccu

SEQ ID NO: 689736 - RNA, 19 nt, Artificial Sequence
  Description of Artificial Sequence: Synthetic oligonucleotide
  Sense strand starting at position 748 of SEQ ID NO: 586069
guaacaauguucccagaua

SEQ ID NO: 689737 - RNA, 19 nt, Artificial Sequence
  Description of Artificial Sequence: Synthetic oligonucleotide
  Antisense strand to SEQ ID NO: 689736
uaucugggaacauuguuac

SEQ ID NO: 689738 - RNA, 19 nt, Artificial Sequence
  Description of Artificial Sequence: Synthetic oligonucleotide
  Sense strand starting at position 759 of SEQ ID NO: 586069
cccagauauuggcucaaag

SEQ ID NO: 689739 - RNA, 19 nt, Artificial Sequence
  Description of Artificial Sequence: Synthetic oligonucleotide
  Antisense strand to SEQ ID NO: 689738
cuuugagccaauaucuggg

SEQ ID NO: 689740 - RNA, 19 nt, Artificial Sequence
  Description of Artificial Sequence: Synthetic oligonucleotide
  Sense strand starting at position 1354 of SEQ ID NO: 586069
ucaguaagcaccugggaaa

SEQ ID NO: 689741 - RNA, 19 nt, Artificial Sequence
  Description of Artificial Sequence: Synthetic oligonucleotide
  Antisense strand to SEQ ID NO: 689740
uuucccaggugcuuacuga

SEQ ID NO: 689742 - RNA, 19 nt, Artificial Sequence
  Description of Artificial Sequence: Synthetic oligonucleotide
  Sense strand starting at position 1634 of SEQ ID NO: 586069
cguguuuccgcuuuccaga

SEQ ID NO: 689743 - RNA, 19 nt, Artificial Sequence
  Description of Artificial Sequence: Synthetic oligonucleotide
  Antisense strand to SEQ ID NO: 689742
ucuggaaagcggaaacacg

SEQ ID NO: 689744 - RNA, 19 nt, Artificial Sequence
  Description of Artificial Sequence: Synthetic oligonucleotide
  Sense strand starting at position 2067 of SEQ ID NO: 586069
uucacuuucguggaagguu

SEQ ID NO: 689745 - RNA, 19 nt, Artificial Sequence
  Description of Artificial Sequence: Synthetic oligonucleotide
  Antisense strand to SEQ ID NO: 689744
aaccuuccacgaaagugaa

SEQ ID NO: 689746 - RNA, 19 nt, Artificial Sequence
  Description of Artificial Sequence: Synthetic oligonucleotide
  Sense strand starting at position 2222 of SEQ ID NO: 586069
uuaaauagcguacacaaau

SEQ ID NO: 689747 - RNA, 19 nt, Artificial Sequence
  Description of Artificial Sequence: Synthetic oligonucleotide
  Antisense strand to SEQ ID NO: 689746
auuuguguacgcuauuuaa

SEQ ID NO: 689748 - RNA, 19 nt, Artificial Sequence
  Description of Artificial Sequence: Synthetic oligonucleotide
  Sense strand starting at position 2279 of SEQ ID NO: 586069
gauuuacacuccgagauug

SEQ ID NO: 689749 - RNA, 19 nt, Artificial Sequence
  Description of Artificial Sequence: Synthetic oligonucleotide
  Antisense strand to SEQ ID NO: 689748
caaucucggaguguaaauc

SEQ ID NO: 689750 - RNA, 19 nt, Artificial Sequence
  Description of Artificial Sequence: Synthetic oligonucleotide
  Sense strand starting at position 2416 of SEQ ID NO: 586069
uguuaaaugcaagacaugu

SEQ ID NO: 689751 - RNA, 19 nt, Artificial Sequence
  Description of Artificial Sequence: Synthetic oligonucleotide
  Antisense strand to SEQ ID NO: 689750
acaugucuugcauuuaaca

SEQ ID NO: 689752 - RNA, 19 nt, Artificial Sequence
  Description of Artificial Sequence: Synthetic oligonucleotide
  Sense strand starting at position 2590 of SEQ ID NO: 586069
acuggagugguuugacuaa

SEQ ID NO: 689753 - RNA, 19 nt, Artificial Sequence
  Description of Artificial Sequence: Synthetic oligonucleotide
  Antisense strand to SEQ ID NO: 689752
uuagucaaaccacuccagu

SEQ ID NO: 689754 - RNA, 19 nt, Artificial Sequence
  Description of Artificial Sequence: Synthetic oligonucleotide
  Sense strand starting at position 2692 of SEQ ID NO: 586069
gcaggucugauacaugaca

SEQ ID NO: 689755 - RNA, 19 nt, Artificial Sequence
  Description of Artificial Sequence: Synthetic oligonucleotide
  Antisense strand to SEQ ID NO: 689754
ugucauguaucagaccugc

SEQ ID NO: 689756 - RNA, 19 nt, Artificial Sequence
  Description of Artificial Sequence: Synthetic oligonucleotide
  Sense strand starting at position 2749 of SEQ ID NO: 586069
aagcaugagccaugaagua

SEQ ID NO: 689757 - RNA, 19 nt, Artificial Sequence
  Description of Artificial Sequence: Synthetic oligonucleotide
  Antisense strand to SEQ ID NO: 689756
uacuucauggcucaugcuu

SEQ ID NO: 689758 - RNA, 19 nt, Artificial Sequence
  Description of Artificial Sequence: Synthetic oligonucleotide
  Sense strand starting at position 2796 of SEQ ID NO: 586069
uggaaagaauuagauaaag

SEQ ID NO: 689759 - RNA, 19 nt, Artificial Sequence
  Description of Artificial Sequence: Synthetic oligonucleotide
  Antisense strand to SEQ ID NO: 689758
cuuuaucuaauucuuucca

SEQ ID NO: 689760 - RNA, 19 nt, Artificial Sequence
  Description of Artificial Sequence: Synthetic oligonucleotide
  Sense strand starting at position 2965 of SEQ ID NO: 586069
uuucgucaucccuaaagau

SEQ ID NO: 689761 - RNA, 19 nt, Artificial Sequence
  Description of Artificial Sequence: Synthetic oligonucleotide
  Antisense strand to SEQ ID NO: 689760
aucuuuagggaugacgaaa

SEQ ID NO: 689762 - RNA, 19 nt, Artificial Sequence
  Description of Artificial Sequence: Synthetic oligonucleotide
  Sense strand starting at position 3043 of SEQ ID NO: 586069
cuauguuucuaugaauuug

SEQ ID NO: 689763 - RNA, 19 nt, Artificial Sequence
  Description of Artificial Sequence: Synthetic oligonucleotide
  Antisense strand to SEQ ID NO: 689762
caaauucauagaaacauag

SEQ ID NO: 689764 - RNA, 19 nt, Artificial Sequence
  Description of Artificial Sequence: Synthetic oligonucleotide
  Sense strand starting at position 3064 of SEQ ID NO: 586069
uguucuagauaugccauau

SEQ ID NO: 689765 - RNA, 19 nt, Artificial Sequence
  Description of Artificial Sequence: Synthetic oligonucleotide
  Antisense strand to SEQ ID NO: 689764
auauggcauaucuagaaca

SEQ ID NO: 689766 - RNA, 19 nt, Artificial Sequence
  Description of Artificial Sequence: Synthetic oligonucleotide
  Sense strand starting at position 3068 of SEQ ID NO: 586069
cuagauaugccauauaagu

SEQ ID NO: 689767 - RNA, 19 nt, Artificial Sequence
  Description of Artificial Sequence: Synthetic oligonucleotide
  Antisense strand to SEQ ID NO: 689766
acuuauauggcauaucuag

SEQ ID NO: 689768 - RNA, 19 nt, Artificial Sequence
  Description of Artificial Sequence: Synthetic oligonucleotide
  Sense strand starting at position 3348 of SEQ ID NO: 586069
uguacaaguaucugaguca

SEQ ID NO: 689769 - RNA, 19 nt, Artificial Sequence
  Description of Artificial Sequence: Synthetic oligonucleotide
  Antisense strand to SEQ ID NO: 689768
ugacucagauacuuguaca

SEQ ID NO: 689770 - RNA, 19 nt, Artificial Sequence
  Description of Artificial Sequence: Synthetic oligonucleotide
  Sense strand starting at position 3382 of SEQ ID NO: 586069
uggguauacaccuaggcau

SEQ ID NO: 689771 - RNA, 19 nt, Artificial Sequence
  Description of Artificial Sequence: Synthetic oligonucleotide
  Antisense strand to SEQ ID NO: 689770
augccuagguguauaccca

SEQ ID NO: 689772 - RNA, 19 nt, Artificial Sequence
  Description of Artificial Sequence: Synthetic oligonucleotide
  Sense strand starting at position 3396 of SEQ ID NO: 586069
ggcauugaauugcuauauc

SEQ ID NO: 689773 - RNA, 19 nt, Artificial Sequence
  Description of Artificial Sequence: Synthetic oligonucleotide
  Antisense strand to SEQ ID NO: 689772
gauauagcaauucaaugcc

SEQ ID NO: 689774 - RNA, 19 nt, Artificial Sequence
  Description of Artificial Sequence: Synthetic oligonucleotide
  Sense strand starting at position 3508 of SEQ ID NO: 586069
ggguucuaguucuccacau

SEQ ID NO: 689775 - RNA, 19 nt, Artificial Sequence
  Description of Artificial Sequence: Synthetic oligonucleotide
  Antisense strand to SEQ ID NO: 689774
auguggagaacuagaaccc

SEQ ID NO: 689776 - RNA, 19 nt, Artificial Sequence
  Description of Artificial Sequence: Synthetic oligonucleotide
  Sense strand starting at position 3509 of SEQ ID NO: 586069
gguucuaguucuccacauc

SEQ ID NO: 689777 - RNA, 19 nt, Artificial Sequence
  Description of Artificial Sequence: Synthetic oligonucleotide
  Antisense strand to SEQ ID NO: 689776
gauguggagaacuagaacc

SEQ ID NO: 689778 - RNA, 19 nt, Artificial Sequence
  Description of Artificial Sequence: Synthetic oligonucleotide
  Sense strand starting at position 3510 of SEQ ID NO: 586069
guucuaguucuccacaucu

SEQ ID NO: 689779 - RNA, 19 nt, Artificial Sequence
  Description of Artificial Sequence: Synthetic oligonucleotide
  Antisense strand to SEQ ID NO: 689778
agauguggagaacuagaac

SEQ ID NO: 689780 - RNA, 19 nt, Artificial Sequence
  Description of Artificial Sequence: Synthetic oligonucleotide
  Sense strand starting at position 3565 of SEQ ID NO: 586069
guaguauuauaaccaucau

SEQ ID NO: 689781 - RNA, 19 nt, Artificial Sequence
  Description of Artificial Sequence: Synthetic oligonucleotide
  Antisense strand to SEQ ID NO: 689780
augaugguuauaauacuac

SEQ ID NO: 689782 - RNA, 19 nt, Artificial Sequence
  Description of Artificial Sequence: Synthetic oligonucleotide
  Sense strand starting at position 3577 of SEQ ID NO: 586069
ccaucauaauggguauaag

SEQ ID NO: 689783 - RNA, 19 nt, Artificial Sequence
  Description of Artificial Sequence: Synthetic oligonucleotide
  Antisense strand to SEQ ID NO: 689782
cuuauacccauuaugaugg

SEQ ID NO: 689784 - RNA, 19 nt, Artificial Sequence
  Description of Artificial Sequence: Synthetic oligonucleotide
  Sense strand starting at position 3580 of SEQ ID NO: 586069
ucauaauggguauaagcuu

SEQ ID NO: 689785 - RNA, 19 nt, Artificial Sequence
  Description of Artificial Sequence: Synthetic oligonucleotide
  Antisense strand to SEQ ID NO: 689784
aagcuuauacccauuauga

SEQ ID NO: 689786 - RNA, 19 nt, Artificial Sequence
  Description of Artificial Sequence: Synthetic oligonucleotide
  Sense strand starting at position 3587 of SEQ ID NO: 586069
ggguauaagcuuuaucuca

SEQ ID NO: 689787 - RNA, 19 nt, Artificial Sequence
  Description of Artificial Sequence: Synthetic oligonucleotide
  Antisense strand to SEQ ID NO: 689786
ugagauaaagcuuauaccc

SEQ ID NO: 689788 - RNA, 19 nt, Artificial Sequence
  Description of Artificial Sequence: Synthetic oligonucleotide
  Sense strand starting at position 3661 of SEQ ID NO: 586069
guacuuauuugugugucuu

SEQ ID NO: 689789 - RNA, 19 nt, Artificial Sequence
  Description of Artificial Sequence: Synthetic oligonucleotide
  Antisense strand to SEQ ID NO: 689788
aagacacacaaauaaguac

SEQ ID NO: 689790 - RNA, 19 nt, Artificial Sequence
  Description of Artificial Sequence: Synthetic oligonucleotide
  Sense strand starting at position 3662 of SEQ ID NO: 586069
uacuuauuugugugucuuc

SEQ ID NO: 689791 - RNA, 19 nt, Artificial Sequence
  Description of Artificial Sequence: Synthetic oligonucleotide
  Antisense strand to SEQ ID NO: 689790
gaagacacacaaauaagua

SEQ ID NO: 689792 - RNA, 19 nt, Artificial Sequence
  Description of Artificial Sequence: Synthetic oligonucleotide
  Sense strand starting at position 24 of SEQ ID NO: 586070
uccaaauccguagaagauc

SEQ ID NO: 689793 - RNA, 19 nt, Artificial Sequence
  Description of Artificial Sequence: Synthetic oligonucleotide
  Antisense strand to SEQ ID NO: 689792
gaucuucuacggauuugga

SEQ ID NO: 689794 - RNA, 19 nt, Artificial Sequence
  Description of Artificial Sequence: Synthetic oligonucleotide
  Sense strand starting at position 165 of SEQ ID NO: 586070
gcccuaaugcugggaaaga

SEQ ID NO: 689795 - RNA, 19 nt, Artificial Sequence
  Description of Artificial Sequence: Synthetic oligonucleotide
  Antisense strand to SEQ ID NO: 689794
ucuuucccagcauuagggc

SEQ ID NO: 689796 - RNA, 19 nt, Artificial Sequence
  Description of Artificial Sequence: Synthetic oligonucleotide
  Sense strand starting at position 203 of SEQ ID NO: 586070
uuacaagguuucccagcau

SEQ ID NO: 689797 - RNA, 19 nt, Artificial Sequence
  Description of Artificial Sequence: Synthetic oligonucleotide
  Antisense strand to SEQ ID NO: 689796
augcugggaaaccuuguaa

SEQ ID NO: 689798 - RNA, 19 nt, Artificial Sequence
  Description of Artificial Sequence: Synthetic oligonucleotide
  Sense strand starting at position 421 of SEQ ID NO: 586070
acucucuucugcuuuggaa

SEQ ID NO: 689799 - RNA, 19 nt, Artificial Sequence
  Description of Artificial Sequence: Synthetic oligonucleotide
  Antisense strand to SEQ ID NO: 689798
uuccaaagcagaagagagu

SEQ ID NO: 689800 - RNA, 19 nt, Artificial Sequence
  Description of Artificial Sequence: Synthetic oligonucleotide
  Sense strand starting at position 423 of SEQ ID NO: 586070
ucucuucugcuuuggaaac

SEQ ID NO: 689801 - RNA, 19 nt, Artificial Sequence
  Description of Artificial Sequence: Synthetic oligonucleotide
  Antisense strand to SEQ ID NO: 689800
guuuccaaagcagaagaga

SEQ ID NO: 689802 - RNA, 19 nt, Artificial Sequence
  Description of Artificial Sequence: Synthetic oligonucleotide
  Sense strand starting at position 433 of SEQ ID NO: 586070
uuuggaaacccaugcugua

SEQ ID NO: 689803 - RNA, 19 nt, Artificial Sequence
  Description of Artificial Sequence: Synthetic oligonucleotide
  Antisense strand to SEQ ID NO: 689802
uacagcauggguuuccaaa

SEQ ID NO: 689804 - RNA, 19 nt, Artificial Sequence
  Description of Artificial Sequence: Synthetic oligonucleotide
  Sense strand starting at position 450 of SEQ ID NO: 586070
uacaaagugugcucagaaa

SEQ ID NO: 689805 - RNA, 19 nt, Artificial Sequence
  Description of Artificial Sequence: Synthetic oligonucleotide
  Antisense strand to SEQ ID NO: 689804
uuucugagcacacuuugua

SEQ ID NO: 689806 - RNA, 19 nt, Artificial Sequence
  Description of Artificial Sequence: Synthetic oligonucleotide
  Sense strand starting at position 2136 of SEQ ID NO: 586070
gguccugugagauagcgaa

SEQ ID NO: 689807 - RNA, 19 nt, Artificial Sequence
  Description of Artificial Sequence: Synthetic oligonucleotide
  Antisense strand to SEQ ID NO: 689806
uucgcuaucucacaggacc

SEQ ID NO: 689808 - RNA, 19 nt, Artificial Sequence
  Description of Artificial Sequence: Synthetic oligonucleotide
  Sense strand starting at position 2182 of SEQ ID NO: 586070
aggaggguuugaguuggua

SEQ ID NO: 689809 - RNA, 19 nt, Artificial Sequence
  Description of Artificial Sequence: Synthetic oligonucleotide
  Antisense strand to SEQ ID NO: 689808
uaccaacucaaacccuccu

SEQ ID NO: 689810 - RNA, 19 nt, Artificial Sequence
  Description of Artificial Sequence: Synthetic oligonucleotide
  Sense strand starting at position 2184 of SEQ ID NO: 586070
gaggguuugaguugguauu

SEQ ID NO: 689811 - RNA, 19 nt, Artificial Sequence
  Description of Artificial Sequence: Synthetic oligonucleotide
  Antisense strand to SEQ ID NO: 689810
aauaccaacucaaacccuc

SEQ ID NO: 689812 - RNA, 19 nt, Artificial Sequence
  Description of Artificial Sequence: Synthetic oligonucleotide
  Sense strand starting at position 2194 of SEQ ID NO: 586070
guugguauuuguuugguuu

SEQ ID NO: 689813 - RNA, 19 nt, Artificial Sequence
  Description of Artificial Sequence: Synthetic oligonucleotide
  Antisense strand to SEQ ID NO: 689812
aaaccaaacaaauaccaac

SEQ ID NO: 689814 - RNA, 19 nt, Artificial Sequence
  Description of Artificial Sequence: Synthetic oligonucleotide
  Sense strand starting at position 2226 of SEQ ID NO: 586070
aagcgcagcucauugauuu

SEQ ID NO: 689815 - RNA, 19 nt, Artificial Sequence
  Description of Artificial Sequence: Synthetic oligonucleotide
  Antisense strand to SEQ ID NO: 689814
aaaucaaugagcugcgcuu

SEQ ID NO: 689816 - RNA, 19 nt, Artificial Sequence
  Description of Artificial Sequence: Synthetic oligonucleotide
  Sense strand starting at position 2345 of SEQ ID NO: 586070
uguggagguuuagcugaau

SEQ ID NO: 689817 - RNA, 19 nt, Artificial Sequence
  Description of Artificial Sequence: Synthetic oligonucleotide
  Antisense strand to SEQ ID NO: 689816
auucagcuaaaccuccaca

SEQ ID NO: 689818 - RNA, 19 nt, Artificial Sequence
  Description of Artificial Sequence: Synthetic oligonucleotide
  Sense strand starting at position 2348 of SEQ ID NO: 586070
ggagguuuagcugaauccu

SEQ ID NO: 689819 - RNA, 19 nt, Artificial Sequence
  Description of Artificial Sequence: Synthetic oligonucleotide
  Antisense strand to SEQ ID NO: 689818
aggauucagcuaaaccucc

SEQ ID NO: 689820 - RNA, 19 nt, Artificial Sequence
  Description of Artificial Sequence: Synthetic oligonucleotide
  Sense strand starting at position 2356 of SEQ ID NO: 586070
agcugaauccuaggaucag

SEQ ID NO: 689821 - RNA, 19 nt, Artificial Sequence
  Description of Artificial Sequence: Synthetic oligonucleotide
  Antisense strand to SEQ ID NO: 689820
cugauccuaggauucagcu

SEQ ID NO: 689822 - RNA, 19 nt, Artificial Sequence
  Description of Artificial Sequence: Synthetic oligonucleotide
  Sense strand starting at position 2373 of SEQ ID NO: 586070
aggaaagaaucugaaguau

SEQ ID NO: 689823 - RNA, 19 nt, Artificial Sequence
  Description of Artificial Sequence: Synthetic oligonucleotide
  Antisense strand to SEQ ID NO: 689822
auacuucagauucuuuccu

SEQ ID NO: 689824 - RNA, 19 nt, Artificial Sequence
  Description of Artificial Sequence: Synthetic oligonucleotide
  Sense strand starting at position 2430 of SEQ ID NO: 586070
aggcccugccaguauuaau

SEQ ID NO: 689825 - RNA, 19 nt, Artificial Sequence
  Description of Artificial Sequence: Synthetic oligonucleotide
  Antisense strand to SEQ ID NO: 689824
auuaauacuggcagggccu

SEQ ID NO: 689826 - RNA, 19 nt, Artificial Sequence
  Description of Artificial Sequence: Synthetic oligonucleotide
  Sense strand starting at position 2601 of SEQ ID NO: 586070
uauagacugcuguaagguu

SEQ ID NO: 689827 - RNA, 19 nt, Artificial Sequence
  Description of Artificial Sequence: Synthetic oligonucleotide
  Antisense strand to SEQ ID NO: 689826
aaccuuacagcagucuaua

SEQ ID NO: 689828 - RNA, 19 nt, Artificial Sequence
  Description of Artificial Sequence: Synthetic oligonucleotide
  Sense strand starting at position 2693 of SEQ ID NO: 586070
uuuaaucuguucucaggua

SEQ ID NO: 689829 - RNA, 19 nt, Artificial Sequence
  Description of Artificial Sequence: Synthetic oligonucleotide
  Antisense strand to SEQ ID NO: 689828
uaccugagaacagauuaaa

SEQ ID NO: 689830 - RNA, 19 nt, Artificial Sequence
  Description of Artificial Sequence: Synthetic oligonucleotide
  Sense strand starting at position 2756 of SEQ ID NO: 586070
aaucguugucaauaaaguu

SEQ ID NO: 689831 - RNA, 19 nt, Artificial Sequence
  Description of Artificial Sequence: Synthetic oligonucleotide
  Antisense strand to SEQ ID NO: 689830
aacuuuauugacaacgauu

SEQ ID NO: 689832 - RNA, 19 nt, Artificial Sequence
  Description of Artificial Sequence: Synthetic oligonucleotide
  Sense strand starting at position 2890 of SEQ ID NO: 586070
gagggaaccucgucucuac

SEQ ID NO: 689833 - RNA, 19 nt, Artificial Sequence
  Description of Artificial Sequence: Synthetic oligonucleotide
  Antisense strand to SEQ ID NO: 689832
guagagacgagguucccuc

SEQ ID NO: 689834 - RNA, 19 nt, Artificial Sequence
  Description of Artificial Sequence: Synthetic oligonucleotide
  Sense strand starting at position 2985 of SEQ ID NO: 586070
ucgcuugaggccgagagau

SEQ ID NO: 689835 - RNA, 19 nt, Artificial Sequence
  Description of Artificial Sequence: Synthetic oligonucleotide
  Antisense strand to SEQ ID NO: 689834
aucucucggccucaagcga

SEQ ID NO: 689836 - RNA, 19 nt, Artificial Sequence
  Description of Artificial Sequence: Synthetic oligonucleotide
  Sense strand starting at position 2987 of SEQ ID NO: 586070
gcuugaggccgagagauug

SEQ ID NO: 689837 - RNA, 19 nt, Artificial Sequence
  Description of Artificial Sequence: Synthetic oligonucleotide
  Antisense strand to SEQ ID NO: 689836
caaucucucggccucaagc

SEQ ID NO: 689838 - RNA, 19 nt, Artificial Sequence
  Description of Artificial Sequence: Synthetic oligonucleotide
  Sense strand starting at position 3001 of SEQ ID NO: 586070
gauugagauccaggcugca

SEQ ID NO: 689839 - RNA, 19 nt, Artificial Sequence
  Description of Artificial Sequence: Synthetic oligonucleotide
  Antisense strand to SEQ ID NO: 689838
ugcagccuggaucucaauc

SEQ ID NO: 689840 - RNA, 19 nt, Artificial Sequence
  Description of Artificial Sequence: Synthetic oligonucleotide
  Sense strand starting at position 3216 of SEQ ID NO: 586070
gcuuuaugacuuuaguuac

SEQ ID NO: 689841 - RNA, 19 nt, Artificial Sequence
  Description of Artificial Sequence: Synthetic oligonucleotide
  Antisense strand to SEQ ID NO: 689840
guaacuaaagucauaaagc

SEQ ID NO: 689842 - RNA, 19 nt, Artificial Sequence
  Description of Artificial Sequence: Synthetic oligonucleotide
  Sense strand starting at position 3222 of SEQ ID NO: 586070
ugacuuuaguuacuuucua

SEQ ID NO: 689843 - RNA, 19 nt, Artificial Sequence
  Description of Artificial Sequence: Synthetic oligonucleotide
  Antisense strand to SEQ ID NO: 689842
uagaaaguaacuaaaguca

SEQ ID NO: 689844 - RNA, 19 nt, Artificial Sequence
  Description of Artificial Sequence: Synthetic oligonucleotide
  Sense strand starting at position 3230 of SEQ ID NO: 586070
guuacuuucuaccuaguaa

SEQ ID NO: 689845 - RNA, 19 nt, Artificial Sequence
  Description of Artificial Sequence: Synthetic oligonucleotide
  Antisense strand to SEQ ID NO: 689844
uuacuagguagaaaguaac

SEQ ID NO: 689846 - RNA, 19 nt, Artificial Sequence
  Description of Artificial Sequence: Synthetic oligonucleotide
  Sense strand starting at position 3260 of SEQ ID NO: 586070
guggaagccaauugagaau

SEQ ID NO: 689847 - RNA, 19 nt, Artificial Sequence
  Description of Artificial Sequence: Synthetic oligonucleotide
  Antisense strand to SEQ ID NO: 689846
auucucaauuggcuuccac

SEQ ID NO: 689848 - RNA, 19 nt, Artificial Sequence
  Description of Artificial Sequence: Synthetic oligonucleotide
  Sense strand starting at position 3273 of SEQ ID NO: 586070
gagaaugacagacgugcau

SEQ ID NO: 689849 - RNA, 19 nt, Artificial Sequence
  Description of Artificial Sequence: Synthetic oligonucleotide
  Antisense strand to SEQ ID NO: 689848
augcacgucugucauucuc

SEQ ID NO: 689850 - RNA, 19 nt, Artificial Sequence
  Description of Artificial Sequence: Synthetic oligonucleotide
  Sense strand starting at position 3334 of SEQ ID NO: 586070
aacguuaauguguaggcaa

SEQ ID NO: 689851 - RNA, 19 nt, Artificial Sequence
  Description of Artificial Sequence: Synthetic oligonucleotide
  Antisense strand to SEQ ID NO: 689850
uugccuacacauuaacguu

SEQ ID NO: 689852 - RNA, 19 nt, Artificial Sequence
  Description of Artificial Sequence: Synthetic oligonucleotide
  Sense strand starting at position 3384 of SEQ ID NO: 586070
uggugaaaguguccucuaa

SEQ ID NO: 689853 - RNA, 19 nt, Artificial Sequence
  Description of Artificial Sequence: Synthetic oligonucleotide
  Antisense strand to SEQ ID NO: 689852
uuagaggacacuuucacca

SEQ ID NO: 689854 - RNA, 19 nt, Artificial Sequence
  Description of Artificial Sequence: Synthetic oligonucleotide
  Sense strand starting at position 3386 of SEQ ID NO: 586070
gugaaaguguccucuaaua

SEQ ID NO: 689855 - RNA, 19 nt, Artificial Sequence
  Description of Artificial Sequence: Synthetic oligonucleotide
  Antisense strand to SEQ ID NO: 689854
uauuagaggacacuuucac

SEQ ID NO: 689856 - RNA, 19 nt, Artificial Sequence
  Description of Artificial Sequence: Synthetic oligonucleotide
  Sense strand starting at position 3410 of SEQ ID NO: 586070
ucaguugaggcaggaguua

SEQ ID NO: 689857 - RNA, 19 nt, Artificial Sequence
  Description of Artificial Sequence: Synthetic oligonucleotide
  Antisense strand to SEQ ID NO: 689856
uaacuccugccucaacuga

SEQ ID NO: 689858 - RNA, 19 nt, Artificial Sequence
  Description of Artificial Sequence: Synthetic oligonucleotide
  Sense strand starting at position 3419 of SEQ ID NO: 586070
gcaggaguuaauggguaaa

SEQ ID NO: 689859 - RNA, 19 nt, Artificial Sequence
  Description of Artificial Sequence: Synthetic oligonucleotide
  Antisense strand to SEQ ID NO: 689858
uuuacccauuaacuccugc

SEQ ID NO: 689860 - RNA, 19 nt, Artificial Sequence
  Description of Artificial Sequence: Synthetic oligonucleotide
  Sense strand starting at position 3501 of SEQ ID NO: 586070
acuguaguugcagggauuu

SEQ ID NO: 689861 - RNA, 19 nt, Artificial Sequence
  Description of Artificial Sequence: Synthetic oligonucleotide
  Antisense strand to SEQ ID NO: 689860
aaaucccugcaacuacagu

SEQ ID NO: 689862 - RNA, 19 nt, Artificial Sequence
  Description of Artificial Sequence: Synthetic oligonucleotide
  Sense strand starting at position 3608 of SEQ ID NO: 586070
uuugguauguaugcuauaa

SEQ ID NO: 689863 - RNA, 19 nt, Artificial Sequence
  Description of Artificial Sequence: Synthetic oligonucleotide
  Antisense strand to SEQ ID NO: 689862
uuauagcauacauaccaaa

SEQ ID NO: 689864 - RNA, 19 nt, Artificial Sequence
  Description of Artificial Sequence: Synthetic oligonucleotide
  Sense strand starting at position 3612 of SEQ ID NO: 586070
guauguaugcuauaaagau

SEQ ID NO: 689865 - RNA, 19 nt, Artificial Sequence
  Description of Artificial Sequence: Synthetic oligonucleotide
  Antisense strand to SEQ ID NO: 689864
aucuuuauagcauacauac

SEQ ID NO: 689866 - RNA, 19 nt, Artificial Sequence
  Description of Artificial Sequence: Synthetic oligonucleotide
  Sense strand starting at position 3711 of SEQ ID NO: 586070
auaggauaauuagaaccau

SEQ ID NO: 689867 - RNA, 19 nt, Artificial Sequence
  Description of Artificial Sequence: Synthetic oligonucleotide
  Antisense strand to SEQ ID NO: 689866
augguucuaauuauccuau

SEQ ID NO: 689868 - RNA, 19 nt, Artificial Sequence
  Description of Artificial Sequence: Synthetic oligonucleotide
  Sense strand starting at position 3729 of SEQ ID NO: 586070
uguuguauucguucuugca

SEQ ID NO: 689869 - RNA, 19 nt, Artificial Sequence
  Description of Artificial Sequence: Synthetic oligonucleotide
  Antisense strand to SEQ ID NO: 689868
ugcaagaacgaauacaaca

SEQ ID NO: 689870 - RNA, 19 nt, Artificial Sequence
  Description of Artificial Sequence: Synthetic oligonucleotide
  Sense strand starting at position 3730 of SEQ ID NO: 586070
guuguauucguucuugcac

SEQ ID NO: 689871 - RNA, 19 nt, Artificial Sequence
  Description of Artificial Sequence: Synthetic oligonucleotide
  Antisense strand to SEQ ID NO: 689870
gugcaagaacgaauacaac

SEQ ID NO: 689872 - RNA, 19 nt, Artificial Sequence
  Description of Artificial Sequence: Synthetic oligonucleotide
  Sense strand starting at position 4 of SEQ ID NO: 586071
uccaaauccguagaagauc

SEQ ID NO: 689873 - RNA, 19 nt, Artificial Sequence
  Description of Artificial Sequence: Synthetic oligonucleotide
  Antisense strand to SEQ ID NO: 689872
gaucuucuacggauuugga

SEQ ID NO: 689874 - RNA, 19 nt, Artificial Sequence
  Description of Artificial Sequence: Synthetic oligonucleotide
  Sense strand starting at position 145 of SEQ ID NO: 586071
gcccuaaugcugggaaaga

SEQ ID NO: 689875 - RNA, 19 nt, Artificial Sequence
  Description of Artificial Sequence: Synthetic oligonucleotide
  Antisense strand to SEQ ID NO: 689874
ucuuucccagcauuagggc

SEQ ID NO: 689876 - RNA, 19 nt, Artificial Sequence
  Description of Artificial Sequence: Synthetic oligonucleotide
  Sense strand starting at position 183 of SEQ ID NO: 586071
uuacaagguuucccagcau

SEQ ID NO: 689877 - RNA, 19 nt, Artificial Sequence
  Description of Artificial Sequence: Synthetic oligonucleotide
  Antisense strand to SEQ ID NO: 689876
augcugggaaaccuuguaa

SEQ ID NO: 689878 - RNA, 19 nt, Artificial Sequence
  Description of Artificial Sequence: Synthetic oligonucleotide
  Sense strand starting at position 401 of SEQ ID NO: 586071
acucucuucugcuuuggaa

SEQ ID NO: 689879 - RNA, 19 nt, Artificial Sequence
  Description of Artificial Sequence: Synthetic oligonucleotide
  Antisense strand to SEQ ID NO: 689878
uuccaaagcagaagagagu

SEQ ID NO: 689880 - RNA, 19 nt, Artificial Sequence
  Description of Artificial Sequence: Synthetic oligonucleotide
  Sense strand starting at position 403 of SEQ ID NO: 586071
ucucuucugcuuuggaaac

SEQ ID NO: 689881 - RNA, 19 nt, Artificial Sequence
  Description of Artificial Sequence: Synthetic oligonucleotide
  Antisense strand to SEQ ID NO: 689880
guuuccaaagcagaagaga

SEQ ID NO: 689882 - RNA, 19 nt, Artificial Sequence
  Description of Artificial Sequence: Synthetic oligonucleotide
  Sense strand starting at position 413 of SEQ ID NO: 586071
uuuggaaacccaugcugua

SEQ ID NO: 689883 - RNA, 19 nt, Artificial Sequence
  Description of Artificial Sequence: Synthetic oligonucleotide
  Antisense strand to SEQ ID NO: 689882
uacagcauggguuuccaaa

SEQ ID NO: 689884 - RNA, 19 nt, Artificial Sequence
  Description of Artificial Sequence: Synthetic oligonucleotide
  Sense strand starting at position 430 of SEQ ID NO: 586071
uacaaagugugcucagaaa

SEQ ID NO: 689885 - RNA, 19 nt, Artificial Sequence
  Description of Artificial Sequence: Synthetic oligonucleotide
  Antisense strand to SEQ ID NO: 689884
uuucugagcacacuuugua

SEQ ID NO: 689886 - RNA, 19 nt, Artificial Sequence
  Description of Artificial Sequence: Synthetic oligonucleotide
  Sense strand starting at position 2116 of SEQ ID NO: 586071
gguccugugagauagcgaa

SEQ ID NO: 689887 - RNA, 19 nt, Artificial Sequence
  Description of Artificial Sequence: Synthetic oligonucleotide
  Antisense strand to SEQ ID NO: 689886
uucgcuaucucacaggacc

SEQ ID NO: 689888 - RNA, 19 nt, Artificial Sequence
  Description of Artificial Sequence: Synthetic oligonucleotide
  Sense strand starting at position 2162 of SEQ ID NO: 586071
aggaggguuugaguuggua

SEQ ID NO: 689889 - RNA, 19 nt, Artificial Sequence
  Description of Artificial Sequence: Synthetic oligonucleotide
  Antisense strand to SEQ ID NO: 689888
uaccaacucaaacccuccu

SEQ ID NO: 689890 - RNA, 19 nt, Artificial Sequence
  Description of Artificial Sequence: Synthetic oligonucleotide
  Sense strand starting at position 2164 of SEQ ID NO: 586071
gaggguuugaguugguauu

SEQ ID NO: 689891 - RNA, 19 nt, Artificial Sequence
  Description of Artificial Sequence: Synthetic oligonucleotide
  Antisense strand to SEQ ID NO: 689890
aauaccaacucaaacccuc

SEQ ID NO: 689892 - RNA, 19 nt, Artificial Sequence
  Description of Artificial Sequence: Synthetic oligonucleotide
  Sense strand starting at position 2174 of SEQ ID NO: 586071
guugguauuuguuugguuu

SEQ ID NO: 689893 - RNA, 19 nt, Artificial Sequence
  Description of Artificial Sequence: Synthetic oligonucleotide
  Antisense strand to SEQ ID NO: 689892
aaaccaaacaaauaccaac

SEQ ID NO: 689894 - RNA, 19 nt, Artificial Sequence
  Description of Artificial Sequence: Synthetic oligonucleotide
  Sense strand starting at position 2206 of SEQ ID NO: 586071
aagcgcagcucauugauuu

SEQ ID NO: 689895 - RNA, 19 nt, Artificial Sequence
  Description of Artificial Sequence: Synthetic oligonucleotide
  Antisense strand to SEQ ID NO: 689894
aaaucaaugagcugcgcuu

SEQ ID NO: 689896 - RNA, 19 nt, Artificial Sequence
  Description of Artificial Sequence: Synthetic oligonucleotide
  Sense strand starting at position 2325 of SEQ ID NO: 586071
uguggagguuuagcugaau

SEQ ID NO: 689897 - RNA, 19 nt, Artificial Sequence
  Description of Artificial Sequence: Synthetic oligonucleotide
  Antisense strand to SEQ ID NO: 689896
auucagcuaaaccuccaca

SEQ ID NO: 689898 - RNA, 19 nt, Artificial Sequence
  Description of Artificial Sequence: Synthetic oligonucleotide
  Sense strand starting at position 2328 of SEQ ID NO: 586071
ggagguuuagcugaauccu

SEQ ID NO: 689899 - RNA, 19 nt, Artificial Sequence
  Description of Artificial Sequence: Synthetic oligonucleotide
  Antisense strand to SEQ ID NO: 689898
aggauucagcuaaaccucc

SEQ ID NO: 689900 - RNA, 19 nt, Artificial Sequence
  Description of Artificial Sequence: Synthetic oligonucleotide
  Sense strand starting at position 2336 of SEQ ID NO: 586071
agcugaauccuaggaucag

SEQ ID NO: 689901 - RNA, 19 nt, Artificial Sequence
  Description of Artificial Sequence: Synthetic oligonucleotide
  Antisense strand to SEQ ID NO: 689900
cugauccuaggauucagcu

SEQ ID NO: 689902 - RNA, 19 nt, Artificial Sequence
  Description of Artificial Sequence: Synthetic oligonucleotide
  Sense strand starting at position 2353 of SEQ ID NO: 586071
aggaaagaaucugaaguau

SEQ ID NO: 689903 - RNA, 19 nt, Artificial Sequence
  Description of Artificial Sequence: Synthetic oligonucleotide
  Antisense strand to SEQ ID NO: 689902
auacuucagauucuuuccu

SEQ ID NO: 689904 - RNA, 19 nt, Artificial Sequence
  Description of Artificial Sequence: Synthetic oligonucleotide
  Sense strand starting at position 2410 of SEQ ID NO: 586071
aggcccugccaguauuaau

SEQ ID NO: 689905 - RNA, 19 nt, Artificial Sequence
  Description of Artificial Sequence: Synthetic oligonucleotide
  Antisense strand to SEQ ID NO: 689904
auuaauacuggcagggccu

SEQ ID NO: 689906 - RNA, 19 nt, Artificial Sequence
  Description of Artificial Sequence: Synthetic oligonucleotide
  Sense strand starting at position 2581 of SEQ ID NO: 586071
uauagacugcuguaagguu

SEQ ID NO: 689907 - RNA, 19 nt, Artificial Sequence
  Description of Artificial Sequence: Synthetic oligonucleotide
  Antisense strand to SEQ ID NO: 689906
aaccuuacagcagucuaua

SEQ ID NO: 689908 - RNA, 19 nt, Artificial Sequence
  Description of Artificial Sequence: Synthetic oligonucleotide
  Sense strand starting at position 2673 of SEQ ID NO: 586071
uuuaaucuguucucaggua

SEQ ID NO: 689909 - RNA, 19 nt, Artificial Sequence
  Description of Artificial Sequence: Synthetic oligonucleotide
  Antisense strand to SEQ ID NO: 689908
uaccugagaacagauuaaa

SEQ ID NO: 689910 - RNA, 19 nt, Artificial Sequence
  Description of Artificial Sequence: Synthetic oligonucleotide
  Sense strand starting at position 2736 of SEQ ID NO: 586071
aaucguugucaauaaaguu

SEQ ID NO: 689911 - RNA, 19 nt, Artificial Sequence
  Description of Artificial Sequence: Synthetic oligonucleotide
  Antisense strand to SEQ ID NO: 689910
aacuuuauugacaacgauu

SEQ ID NO: 689912 - RNA, 19 nt, Artificial Sequence
  Description of Artificial Sequence: Synthetic oligonucleotide
  Sense strand starting at position 2870 of SEQ ID NO: 586071
gagggaaccucgucucuac

SEQ ID NO: 689913 - RNA, 19 nt, Artificial Sequence
  Description of Artificial Sequence: Synthetic oligonucleotide
  Antisense strand to SEQ ID NO: 689912
guagagacgagguucccuc

SEQ ID NO: 689914 - RNA, 19 nt, Artificial Sequence
  Description of Artificial Sequence: Synthetic oligonucleotide
  Sense strand starting at position 2965 of SEQ ID NO: 586071
ucgcuugaggccgagagau

SEQ ID NO: 689915 - RNA, 19 nt, Artificial Sequence
  Description of Artificial Sequence: Synthetic oligonucleotide
  Antisense strand to SEQ ID NO: 689914
aucucucggccucaagcga

SEQ ID NO: 689916 - RNA, 19 nt, Artificial Sequence
  Description of Artificial Sequence: Synthetic oligonucleotide
  Sense strand starting at position 2967 of SEQ ID NO: 586071
gcuugaggccgagagauug

SEQ ID NO: 689917 - RNA, 19 nt, Artificial Sequence
  Description of Artificial Sequence: Synthetic oligonucleotide
  Antisense strand to SEQ ID NO: 689916
caaucucucggccucaagc

SEQ ID NO: 689918 - RNA, 19 nt, Artificial Sequence
  Description of Artificial Sequence: Synthetic oligonucleotide
  Sense strand starting at position 2981 of SEQ ID NO: 586071
gauugagauccaggcugca

SEQ ID NO: 689919 - RNA, 19 nt, Artificial Sequence
  Description of Artificial Sequence: Synthetic oligonucleotide
  Antisense strand to SEQ ID NO: 689918
ugcagccuggaucucaauc

SEQ ID NO: 689920 - RNA, 19 nt, Artificial Sequence
  Description of Artificial Sequence: Synthetic oligonucleotide
  Sense strand starting at position 3196 of SEQ ID NO: 586071
gcuuuaugacuuuaguuac

SEQ ID NO: 689921 - RNA, 19 nt, Artificial Sequence
  Description of Artificial Sequence: Synthetic oligonucleotide
  Antisense strand to SEQ ID NO: 689920
guaacuaaagucauaaagc

SEQ ID NO: 689922 - RNA, 19 nt, Artificial Sequence
  Description of Artificial Sequence: Synthetic oligonucleotide
  Sense strand starting at position 3202 of SEQ ID NO: 586071
ugacuuuaguuacuuucua

SEQ ID NO: 689923 - RNA, 19 nt, Artificial Sequence
  Description of Artificial Sequence: Synthetic oligonucleotide
  Antisense strand to SEQ ID NO: 689922
uagaaaguaacuaaaguca

SEQ ID NO: 689924 - RNA, 19 nt, Artificial Sequence
  Description of Artificial Sequence: Synthetic oligonucleotide
  Sense strand starting at position 3210 of SEQ ID NO: 586071
guuacuuucuaccuaguaa

SEQ ID NO: 689925 - RNA, 19 nt, Artificial Sequence
  Description of Artificial Sequence: Synthetic oligonucleotide
  Antisense strand to SEQ ID NO: 689924
uuacuagguagaaaguaac

SEQ ID NO: 689926 - RNA, 19 nt, Artificial Sequence
  Description of Artificial Sequence: Synthetic oligonucleotide
  Sense strand starting at position 3240 of SEQ ID NO: 586071
guggaagccaauugagaau

SEQ ID NO: 689927 - RNA, 19 nt, Artificial Sequence
  Description of Artificial Sequence: Synthetic oligonucleotide
  Antisense strand to SEQ ID NO: 689926
auucucaauuggcuuccac

SEQ ID NO: 689928 - RNA, 19 nt, Artificial Sequence
  Description of Artificial Sequence: Synthetic oligonucleotide
  Sense strand starting at position 3253 of SEQ ID NO: 586071
gagaaugacagacgugcau

SEQ ID NO: 689929 - RNA, 19 nt, Artificial Sequence
  Description of Artificial Sequence: Synthetic oligonucleotide
  Antisense strand to SEQ ID NO: 689928
augcacgucugucauucuc

SEQ ID NO: 689930 - RNA, 19 nt, Artificial Sequence
  Description of Artificial Sequence: Synthetic oligonucleotide
  Sense strand starting at position 3314 of SEQ ID NO: 586071
aacguuaauguguaggcaa

SEQ ID NO: 689931 - RNA, 19 nt, Artificial Sequence
  Description of Artificial Sequence: Synthetic oligonucleotide
  Antisense strand to SEQ ID NO: 689930
uugccuacacauuaacguu

SEQ ID NO: 689932 - RNA, 19 nt, Artificial Sequence
  Description of Artificial Sequence: Synthetic oligonucleotide
  Sense strand starting at position 3364 of SEQ ID NO: 586071
uggugaaaguguccucuaa

SEQ ID NO: 689933 - RNA, 19 nt, Artificial Sequence
  Description of Artificial Sequence: Synthetic oligonucleotide
  Antisense strand to SEQ ID NO: 689932
uuagaggacacuuucacca

SEQ ID NO: 689934 - RNA, 19 nt, Artificial Sequence
  Description of Artificial Sequence: Synthetic oligonucleotide
  Sense strand starting at position 3366 of SEQ ID NO: 586071
gugaaaguguccucuaaua

SEQ ID NO: 689935 - RNA, 19 nt, Artificial Sequence
  Description of Artificial Sequence: Synthetic oligonucleotide
  Antisense strand to SEQ ID NO: 689934
uauuagaggacacuuucac

SEQ ID NO: 689936 - RNA, 19 nt, Artificial Sequence
  Description of Artificial Sequence: Synthetic oligonucleotide
  Sense strand starting at position 3390 of SEQ ID NO: 586071
ucaguugaggcaggaguua

SEQ ID NO: 689937 - RNA, 19 nt, Artificial Sequence
  Description of Artificial Sequence: Synthetic oligonucleotide
  Antisense strand to SEQ ID NO: 689936
uaacuccugccucaacuga

SEQ ID NO: 689938 - RNA, 19 nt, Artificial Sequence
  Description of Artificial Sequence: Synthetic oligonucleotide
  Sense strand starting at position 3399 of SEQ ID NO: 586071
gcaggaguuaauggguaaa

SEQ ID NO: 689939 - RNA, 19 nt, Artificial Sequence
  Description of Artificial Sequence: Synthetic oligonucleotide
  Antisense strand to SEQ ID NO: 689938
uuuacccauuaacuccugc

SEQ ID NO: 689940 - RNA, 19 nt, Artificial Sequence
  Description of Artificial Sequence: Synthetic oligonucleotide
  Sense strand starting at position 3481 of SEQ ID NO: 586071
acuguaguugcagggauuu

SEQ ID NO: 689941 - RNA, 19 nt, Artificial Sequence
  Description of Artificial Sequence: Synthetic oligonucleotide
  Antisense strand to SEQ ID NO: 689940
aaaucccugcaacuacagu

SEQ ID NO: 689942 - RNA, 19 nt, Artificial Sequence
  Description of Artificial Sequence: Synthetic oligonucleotide
  Sense strand starting at position 3588 of SEQ ID NO: 586071
uuugguauguaugcuauaa

SEQ ID NO: 689943 - RNA, 19 nt, Artificial Sequence
  Description of Artificial Sequence: Synthetic oligonucleotide
  Antisense strand to SEQ ID NO: 689942
uuauagcauacauaccaaa

SEQ ID NO: 689944 - RNA, 19 nt, Artificial Sequence
  Description of Artificial Sequence: Synthetic oligonucleotide
  Sense strand starting at position 3592 of SEQ ID NO: 586071
guauguaugcuauaaagau

SEQ ID NO: 689945 - RNA, 19 nt, Artificial Sequence
  Description of Artificial Sequence: Synthetic oligonucleotide
  Antisense strand to SEQ ID NO: 689944
aucuuuauagcauacauac

SEQ ID NO: 689946 - RNA, 19 nt, Artificial Sequence
  Description of Artificial Sequence: Synthetic oligonucleotide
  Sense strand starting at position 3691 of SEQ ID NO: 586071
auaggauaauuagaaccau

SEQ ID NO: 689947 - RNA, 19 nt, Artificial Sequence
  Description of Artificial Sequence: Synthetic oligonucleotide
  Antisense strand to SEQ ID NO: 689946
augguucuaauuauccuau

SEQ ID NO: 689948 - RNA, 19 nt, Artificial Sequence
  Description of Artificial Sequence: Synthetic oligonucleotide
  Sense strand starting at position 3709 of SEQ ID NO: 586071
uguuguauucguucuugca

SEQ ID NO: 689949 - RNA, 19 nt, Artificial Sequence
  Description of Artificial Sequence: Synthetic oligonucleotide
  Antisense strand to SEQ ID NO: 689948
ugcaagaacgaauacaaca

SEQ ID NO: 689950 - RNA, 19 nt, Artificial Sequence
  Description of Artificial Sequence: Synthetic oligonucleotide
  Sense strand starting at position 3710 of SEQ ID NO: 586071
guuguauucguucuugcac

SEQ ID NO: 689951 - RNA, 19 nt, Artificial Sequence
  Description of Artificial Sequence: Synthetic oligonucleotide
  Antisense strand to SEQ ID NO: 689950
gugcaagaacgaauacaac

SEQ ID NO: 689952 - RNA, 19 nt, Artificial Sequence
  Description of Artificial Sequence: Synthetic oligonucleotide
  Sense strand starting at position 2 of SEQ ID NO: 586072
caaggaacgagcugauguu

SEQ ID NO: 689953 - RNA, 19 nt, Artificial Sequence
  Description of Artificial Sequence: Synthetic oligonucleotide
  Antisense strand to SEQ ID NO: 689952
aacaucagcucguuccuug

SEQ ID NO: 689954 - RNA, 19 nt, Artificial Sequence
  Description of Artificial Sequence: Synthetic oligonucleotide
  Sense strand starting at position 17 of SEQ ID NO: 586072
uguuguauuuaggaauuac

SEQ ID NO: 689955 - RNA, 19 nt, Artificial Sequence
  Description of Artificial Sequence: Synthetic oligonucleotide
  Antisense strand to SEQ ID NO: 689954
guaauuccuaaauacaaca

SEQ ID NO: 689956 - RNA, 19 nt, Artificial Sequence
  Description of Artificial Sequence: Synthetic oligonucleotide
  Sense strand starting at position 46 of SEQ ID NO: 586072
ggaauaaggagcugagguu

SEQ ID NO: 689957 - RNA, 19 nt, Artificial Sequence
  Description of Artificial Sequence: Synthetic oligonucleotide
  Antisense strand to SEQ ID NO: 689956
aaccucagcuccuuauucc

SEQ ID NO: 689958 - RNA, 19 nt, Artificial Sequence
  Description of Artificial Sequence: Synthetic oligonucleotide
  Sense strand starting at position 274 of SEQ ID NO: 586072
cuuauauauccagagcuug

SEQ ID NO: 689959 - RNA, 19 nt, Artificial Sequence
  Description of Artificial Sequence: Synthetic oligonucleotide
  Antisense strand to SEQ ID NO: 689958
caagcucuggauauauaag

SEQ ID NO: 689960 - RNA, 19 nt, Artificial Sequence
  Description of Artificial Sequence: Synthetic oligonucleotide
  Sense strand starting at position 316 of SEQ ID NO: 586072
ccaaucguuauugaggcaa

SEQ ID NO: 689961 - RNA, 19 nt, Artificial Sequence
  Description of Artificial Sequence: Synthetic oligonucleotide
  Antisense strand to SEQ ID NO: 689960
uugccucaauaacgauugg

SEQ ID NO: 689962 - RNA, 19 nt, Artificial Sequence
  Description of Artificial Sequence: Synthetic oligonucleotide
  Sense strand starting at position 385 of SEQ ID NO: 586072
gggauuccaagaugucagu

SEQ ID NO: 689963 - RNA, 19 nt, Artificial Sequence
  Description of Artificial Sequence: Synthetic oligonucleotide
  Antisense strand to SEQ ID NO: 689962
acugacaucuuggaauccc

SEQ ID NO: 689964 - RNA, 19 nt, Artificial Sequence
  Description of Artificial Sequence: Synthetic oligonucleotide
  Sense strand starting at position 391 of SEQ ID NO: 586072
ccaagaugucaguaguagc

SEQ ID NO: 689965 - RNA, 19 nt, Artificial Sequence
  Description of Artificial Sequence: Synthetic oligonucleotide
  Antisense strand to SEQ ID NO: 689964
gcuacuacugacaucuugg

SEQ ID NO: 689966 - RNA, 19 nt, Artificial Sequence
  Description of Artificial Sequence: Synthetic oligonucleotide
  Sense strand starting at position 469 of SEQ ID NO: 586072
gaguaagauccauagcagc

SEQ ID NO: 689967 - RNA, 19 nt, Artificial Sequence
  Description of Artificial Sequence: Synthetic oligonucleotide
  Antisense strand to SEQ ID NO: 689966
gcugcuauggaucuuacuc

SEQ ID NO: 689968 - RNA, 19 nt, Artificial Sequence
  Description of Artificial Sequence: Synthetic oligonucleotide
  Sense strand starting at position 539 of SEQ ID NO: 586072
gugcccggugcuuuacaua

SEQ ID NO: 689969 - RNA, 19 nt, Artificial Sequence
  Description of Artificial Sequence: Synthetic oligonucleotide
  Antisense strand to SEQ ID NO: 689968
uauguaaagcaccgggcac

SEQ ID NO: 689970 - RNA, 19 nt, Artificial Sequence
  Description of Artificial Sequence: Synthetic oligonucleotide
  Sense strand starting at position 544 of SEQ ID NO: 586072
cggugcuuuacauauguua

SEQ ID NO: 689971 - RNA, 19 nt, Artificial Sequence
  Description of Artificial Sequence: Synthetic oligonucleotide
  Antisense strand to SEQ ID NO: 689970
uaacauauguaaagcaccg

SEQ ID NO: 689972 - RNA, 19 nt, Artificial Sequence
  Description of Artificial Sequence: Synthetic oligonucleotide
  Sense strand starting at position 668 of SEQ ID NO: 586072
gaaccuagguuuguuauga

SEQ ID NO: 689973 - RNA, 19 nt, Artificial Sequence
  Description of Artificial Sequence: Synthetic oligonucleotide
  Antisense strand to SEQ ID NO: 689972
ucauaacaaaccuagguuc

SEQ ID NO: 689974 - RNA, 19 nt, Artificial Sequence
  Description of Artificial Sequence: Synthetic oligonucleotide
  Sense strand starting at position 669 of SEQ ID NO: 586072
aaccuagguuuguuaugaa

SEQ ID NO: 689975 - RNA, 19 nt, Artificial Sequence
  Description of Artificial Sequence: Synthetic oligonucleotide
  Antisense strand to SEQ ID NO: 689974
uucauaacaaaccuagguu

SEQ ID NO: 689976 - RNA, 19 nt, Artificial Sequence
  Description of Artificial Sequence: Synthetic oligonucleotide
  Sense strand starting at position 746 of SEQ ID NO: 586072
gggccugaucaagggaaau

SEQ ID NO: 689977 - RNA, 19 nt, Artificial Sequence
  Description of Artificial Sequence: Synthetic oligonucleotide
  Antisense strand to SEQ ID NO: 689976
auuucccuugaucaggccc

SEQ ID NO: 689978 - RNA, 19 nt, Artificial Sequence
  Description of Artificial Sequence: Synthetic oligonucleotide
  Sense strand starting at position 758 of SEQ ID NO: 586072
gggaaauggguaugcacua

SEQ ID NO: 689979 - RNA, 19 nt, Artificial Sequence
  Description of Artificial Sequence: Synthetic oligonucleotide
  Antisense strand to SEQ ID NO: 689978
uagugcauacccauuuccc

SEQ ID NO: 689980 - RNA, 19 nt, Artificial Sequence
  Description of Artificial Sequence: Synthetic oligonucleotide
  Sense strand starting at position 788 of SEQ ID NO: 586072
gagggugauccgggaauga

SEQ ID NO: 689981 - RNA, 19 nt, Artificial Sequence
  Description of Artificial Sequence: Synthetic oligonucleotide
  Antisense strand to SEQ ID NO: 689980
ucauucccggaucacccuc

SEQ ID NO: 689982 - RNA, 19 nt, Artificial Sequence
  Description of Artificial Sequence: Synthetic oligonucleotide
  Sense strand starting at position 1077 of SEQ ID NO: 586072
uggauucuggauugaucca

SEQ ID NO: 689983 - RNA, 19 nt, Artificial Sequence
  Description of Artificial Sequence: Synthetic oligonucleotide
  Antisense strand to SEQ ID NO: 689982
uggaucaauccagaaucca

SEQ ID NO: 689984 - RNA, 19 nt, Artificial Sequence
  Description of Artificial Sequence: Synthetic oligonucleotide
  Sense strand starting at position 1182 of SEQ ID NO: 586072
ucaugugcugauugacacu

SEQ ID NO: 689985 - RNA, 19 nt, Artificial Sequence
  Description of Artificial Sequence: Synthetic oligonucleotide
  Antisense strand to SEQ ID NO: 689984
agugucaaucagcacauga

SEQ ID NO: 689986 - RNA, 19 nt, Artificial Sequence
  Description of Artificial Sequence: Synthetic oligonucleotide
  Sense strand starting at position 1480 of SEQ ID NO: 586072
ucaugugagucaccggauu

SEQ ID NO: 689987 - RNA, 19 nt, Artificial Sequence
  Description of Artificial Sequence: Synthetic oligonucleotide
  Antisense strand to SEQ ID NO: 689986
aauccggugacucacauga

SEQ ID NO: 689988 - RNA, 19 nt, Artificial Sequence
  Description of Artificial Sequence: Synthetic oligonucleotide
  Sense strand starting at position 1482 of SEQ ID NO: 586072
augugagucaccggauuaa

SEQ ID NO: 689989 - RNA, 19 nt, Artificial Sequence
  Description of Artificial Sequence: Synthetic oligonucleotide
  Antisense strand to SEQ ID NO: 689988
uuaauccggugacucacau

SEQ ID NO: 689990 - RNA, 19 nt, Artificial Sequence
  Description of Artificial Sequence: Synthetic oligonucleotide
  Sense strand starting at position 1518 of SEQ ID NO: 586072
guuggugggucucugagaa

SEQ ID NO: 689991 - RNA, 19 nt, Artificial Sequence
  Description of Artificial Sequence: Synthetic oligonucleotide
  Antisense strand to SEQ ID NO: 689990
uucucagagacccaccaac

SEQ ID NO: 689992 - RNA, 19 nt, Artificial Sequence
  Description of Artificial Sequence: Synthetic oligonucleotide
  Sense strand starting at position 1543 of SEQ ID NO: 586072
gggaaauuccuggguuagc

SEQ ID NO: 689993 - RNA, 19 nt, Artificial Sequence
  Description of Artificial Sequence: Synthetic oligonucleotide
  Antisense strand to SEQ ID NO: 689992
gcuaacccaggaauuuccc

SEQ ID NO: 689994 - RNA, 19 nt, Artificial Sequence
  Description of Artificial Sequence: Synthetic oligonucleotide
  Sense strand starting at position 1544 of SEQ ID NO: 586072
ggaaauuccuggguuagca

SEQ ID NO: 689995 - RNA, 19 nt, Artificial Sequence
  Description of Artificial Sequence: Synthetic oligonucleotide
  Antisense strand to SEQ ID NO: 689994
ugcuaacccaggaauuucc

SEQ ID NO: 689996 - RNA, 19 nt, Artificial Sequence
  Description of Artificial Sequence: Synthetic oligonucleotide
  Sense strand starting at position 1553 of SEQ ID NO: 586072
uggguuagcagccaaugaa

SEQ ID NO: 689997 - RNA, 19 nt, Artificial Sequence
  Description of Artificial Sequence: Synthetic oligonucleotide
  Antisense strand to SEQ ID NO: 689996
uucauuggcugcuaaccca

SEQ ID NO: 689998 - RNA, 19 nt, Artificial Sequence
  Description of Artificial Sequence: Synthetic oligonucleotide
  Sense strand starting at position 1556 of SEQ ID NO: 586072
guuagcagccaaugaauaa

SEQ ID NO: 689999 - RNA, 19 nt, Artificial Sequence
  Description of Artificial Sequence: Synthetic oligonucleotide
  Antisense strand to SEQ ID NO: 689998
uuauucauuggcugcuaac

SEQ ID NO: 690000 - RNA, 19 nt, Artificial Sequence
  Description of Artificial Sequence: Synthetic oligonucleotide
  Sense strand starting at position 2340 of SEQ ID NO: 586072
aaggauucgguccagcaga

SEQ ID NO: 690001 - RNA, 19 nt, Artificial Sequence
  Description of Artificial Sequence: Synthetic oligonucleotide
  Antisense strand to SEQ ID NO: 690000
ucugcuggaccgaauccuu

SEQ ID NO: 690002 - RNA, 19 nt, Artificial Sequence
  Description of Artificial Sequence: Synthetic oligonucleotide
  Sense strand starting at position 2544 of SEQ ID NO: 586072
cucagcacucacugucuua

SEQ ID NO: 690003 - RNA, 19 nt, Artificial Sequence
  Description of Artificial Sequence: Synthetic oligonucleotide
  Antisense strand to SEQ ID NO: 690002
uaagacagugagugcugag

SEQ ID NO: 690004 - RNA, 19 nt, Artificial Sequence
  Description of Artificial Sequence: Synthetic oligonucleotide
  Sense strand starting at position 2633 of SEQ ID NO: 586072
gaagcaguugcagguauua

SEQ ID NO: 690005 - RNA, 19 nt, Artificial Sequence
  Description of Artificial Sequence: Synthetic oligonucleotide
  Antisense strand to SEQ ID NO: 690004
uaauaccugcaacugcuuc

SEQ ID NO: 690006 - RNA, 19 nt, Artificial Sequence
  Description of Artificial Sequence: Synthetic oligonucleotide
  Sense strand starting at position 2799 of SEQ ID NO: 586072
cuugcuuuggguugaacau

SEQ ID NO: 690007 - RNA, 19 nt, Artificial Sequence
  Description of Artificial Sequence: Synthetic oligonucleotide
  Antisense strand to SEQ ID NO: 690006
auguucaacccaaagcaag

SEQ ID NO: 690008 - RNA, 19 nt, Artificial Sequence
  Description of Artificial Sequence: Synthetic oligonucleotide
  Sense strand starting at position 2800 of SEQ ID NO: 586072
uugcuuuggguugaacaua

SEQ ID NO: 690009 - RNA, 19 nt, Artificial Sequence
  Description of Artificial Sequence: Synthetic oligonucleotide
  Antisense strand to SEQ ID NO: 690008
uauguucaacccaaagcaa

SEQ ID NO: 690010 - RNA, 19 nt, Artificial Sequence
  Description of Artificial Sequence: Synthetic oligonucleotide
  Sense strand starting at position 3199 of SEQ ID NO: 586072
gccugaagagcuuaacuag

SEQ ID NO: 690011 - RNA, 19 nt, Artificial Sequence
  Description of Artificial Sequence: Synthetic oligonucleotide
  Antisense strand to SEQ ID NO: 690010
cuaguuaagcucuucaggc

SEQ ID NO: 690012 - RNA, 19 nt, Artificial Sequence
  Description of Artificial Sequence: Synthetic oligonucleotide
  Sense strand starting at position 3269 of SEQ ID NO: 586072
gggaccagaguucaguuua

SEQ ID NO: 690013 - RNA, 19 nt, Artificial Sequence
  Description of Artificial Sequence: Synthetic oligonucleotide
  Antisense strand to SEQ ID NO: 690012
uaaacugaacucugguccc

SEQ ID NO: 690014 - RNA, 19 nt, Artificial Sequence
  Description of Artificial Sequence: Synthetic oligonucleotide
  Sense strand starting at position 3293 of SEQ ID NO: 586072
gccagugagugacauuuga

SEQ ID NO: 690015 - RNA, 19 nt, Artificial Sequence
  Description of Artificial Sequence: Synthetic oligonucleotide
  Antisense strand to SEQ ID NO: 690014
ucaaaugucacucacuggc

SEQ ID NO: 690016 - RNA, 19 nt, Artificial Sequence
  Description of Artificial Sequence: Synthetic oligonucleotide
  Sense strand starting at position 3315 of SEQ ID NO: 586072
uuagaauuccuacgguuag

SEQ ID NO: 690017 - RNA, 19 nt, Artificial Sequence
  Description of Artificial Sequence: Synthetic oligonucleotide
  Antisense strand to SEQ ID NO: 690016
cuaaccguaggaauucuaa

SEQ ID NO: 690018 - RNA, 19 nt, Artificial Sequence
  Description of Artificial Sequence: Synthetic oligonucleotide
  Sense strand starting at position 3319 of SEQ ID NO: 586072
aauuccuacgguuagaauu

SEQ ID NO: 690019 - RNA, 19 nt, Artificial Sequence
  Description of Artificial Sequence: Synthetic oligonucleotide
  Antisense strand to SEQ ID NO: 690018
aauucuaaccguaggaauu

SEQ ID NO: 690020 - RNA, 19 nt, Artificial Sequence
  Description of Artificial Sequence: Synthetic oligonucleotide
  Sense strand starting at position 3342 of SEQ ID NO: 586072
ccuucuguaucuccuagua

SEQ ID NO: 690021 - RNA, 19 nt, Artificial Sequence
  Description of Artificial Sequence: Synthetic oligonucleotide
  Antisense strand to SEQ ID NO: 690020
uacuaggagauacagaagg

SEQ ID NO: 690022 - RNA, 19 nt, Artificial Sequence
  Description of Artificial Sequence: Synthetic oligonucleotide
  Sense strand starting at position 3828 of SEQ ID NO: 586072
agaaauaccgcagggaaua

SEQ ID NO: 690023 - RNA, 19 nt, Artificial Sequence
  Description of Artificial Sequence: Synthetic oligonucleotide
  Antisense strand to SEQ ID NO: 690022
uauucccugcgguauuucu

SEQ ID NO: 690024 - RNA, 19 nt, Artificial Sequence
  Description of Artificial Sequence: Synthetic oligonucleotide
  Sense strand starting at position 3862 of SEQ ID NO: 586072
cugaguuugucccucucca

SEQ ID NO: 690025 - RNA, 19 nt, Artificial Sequence
  Description of Artificial Sequence: Synthetic oligonucleotide
  Antisense strand to SEQ ID NO: 690024
uggagagggacaaacucag

SEQ ID NO: 690026 - RNA, 19 nt, Artificial Sequence
  Description of Artificial Sequence: Synthetic oligonucleotide
  Sense strand starting at position 3927 of SEQ ID NO: 586072
ucucacauuccuuacggau

SEQ ID NO: 690027 - RNA, 19 nt, Artificial Sequence
  Description of Artificial Sequence: Synthetic oligonucleotide
  Antisense strand to SEQ ID NO: 690026
auccguaaggaaugugaga

SEQ ID NO: 690028 - RNA, 19 nt, Artificial Sequence
  Description of Artificial Sequence: Synthetic oligonucleotide
  Sense strand starting at position 3939 of SEQ ID NO: 586072
uacggaucguaaucugaug

SEQ ID NO: 690029 - RNA, 19 nt, Artificial Sequence
  Description of Artificial Sequence: Synthetic oligonucleotide
  Antisense strand to SEQ ID NO: 690028
caucagauuacgauccgua

SEQ ID NO: 690030 - RNA, 19 nt, Artificial Sequence
  Description of Artificial Sequence: Synthetic oligonucleotide
  Sense strand starting at position 3947 of SEQ ID NO: 586072
guaaucugauggccaguca

SEQ ID NO: 690031 - RNA, 19 nt, Artificial Sequence
  Description of Artificial Sequence: Synthetic oligonucleotide
  Antisense strand to SEQ ID NO: 690030
ugacuggccaucagauuac

SEQ ID NO: 690032 - RNA, 19 nt, Artificial Sequence
  Description of Artificial Sequence: Synthetic oligonucleotide
  Sense strand starting at position 155 of SEQ ID NO: 586073
auacuauagugacugcaga

SEQ ID NO: 690033 - RNA, 19 nt, Artificial Sequence
  Description of Artificial Sequence: Synthetic oligonucleotide
  Antisense strand to SEQ ID NO: 690032
ucugcagucacuauaguau

SEQ ID NO: 690034 - RNA, 19 nt, Artificial Sequence
  Description of Artificial Sequence: Synthetic oligonucleotide
  Sense strand starting at position 156 of SEQ ID NO: 586073
uacuauagugacugcagaa

SEQ ID NO: 690035 - RNA, 19 nt, Artificial Sequence
  Description of Artificial Sequence: Synthetic oligonucleotide
  Antisense strand to SEQ ID NO: 690034
uucugcagucacuauagua

SEQ ID NO: 690036 - RNA, 19 nt, Artificial Sequence
  Description of Artificial Sequence: Synthetic oligonucleotide
  Sense strand starting at position 273 of SEQ ID NO: 586073
gguugaagacugcaguaua

SEQ ID NO: 690037 - RNA, 19 nt, Artificial Sequence
  Description of Artificial Sequence: Synthetic oligonucleotide
  Antisense strand to SEQ ID NO: 690036
uauacugcagucuucaacc

SEQ ID NO: 690038 - RNA, 19 nt, Artificial Sequence
  Description of Artificial Sequence: Synthetic oligonucleotide
  Sense strand starting at position 289 of SEQ ID NO: 586073
auaagaugcugaccacuaa

SEQ ID NO: 690039 - RNA, 19 nt, Artificial Sequence
  Description of Artificial Sequence: Synthetic oligonucleotide
  Antisense strand to SEQ ID NO: 690038
uuaguggucagcaucuuau

SEQ ID NO: 690040 - RNA, 19 nt, Artificial Sequence
  Description of Artificial Sequence: Synthetic oligonucleotide
  Sense strand starting at position 853 of SEQ ID NO: 586073
uggauuuguuuaguuagca

SEQ ID NO: 690041 - RNA, 19 nt, Artificial Sequence
  Description of Artificial Sequence: Synthetic oligonucleotide
  Antisense strand to SEQ ID NO: 690040
ugcuaacuaaacaaaucca

SEQ ID NO: 690042 - RNA, 19 nt, Artificial Sequence
  Description of Artificial Sequence: Synthetic oligonucleotide
  Sense strand starting at position 1008 of SEQ ID NO: 586073
gccugucaaccugggaaga

SEQ ID NO: 690043 - RNA, 19 nt, Artificial Sequence
  Description of Artificial Sequence: Synthetic oligonucleotide
  Antisense strand to SEQ ID NO: 690042
ucuucccagguugacaggc

SEQ ID NO: 690044 - RNA, 19 nt, Artificial Sequence
  Description of Artificial Sequence: Synthetic oligonucleotide
  Sense strand starting at position 1009 of SEQ ID NO: 586073
ccugucaaccugggaagaa

SEQ ID NO: 690045 - RNA, 19 nt, Artificial Sequence
  Description of Artificial Sequence: Synthetic oligonucleotide
  Antisense strand to SEQ ID NO: 690044
uucuucccagguugacagg

SEQ ID NO: 690046 - RNA, 19 nt, Artificial Sequence
  Description of Artificial Sequence: Synthetic oligonucleotide
  Sense strand starting at position 1196 of SEQ ID NO: 586073
gagccaguucuugaucuca

SEQ ID NO: 690047 - RNA, 19 nt, Artificial Sequence
  Description of Artificial Sequence: Synthetic oligonucleotide
  Antisense strand to SEQ ID NO: 690046
ugagaucaagaacuggcuc

SEQ ID NO: 690048 - RNA, 19 nt, Artificial Sequence
  Description of Artificial Sequence: Synthetic oligonucleotide
  Sense strand starting at position 1333 of SEQ ID NO: 586073
gcaaguaagaacugguuau

SEQ ID NO: 690049 - RNA, 19 nt, Artificial Sequence
  Description of Artificial Sequence: Synthetic oligonucleotide
  Antisense strand to SEQ ID NO: 690048
auaaccaguucuuacuugc

SEQ ID NO: 690050 - RNA, 19 nt, Artificial Sequence
  Description of Artificial Sequence: Synthetic oligonucleotide
  Sense strand starting at position 2018 of SEQ ID NO: 586073
caggcuuucgcguugacga

SEQ ID NO: 690051 - RNA, 19 nt, Artificial Sequence
  Description of Artificial Sequence: Synthetic oligonucleotide
  Antisense strand to SEQ ID NO: 690050
ucgucaacgcgaaagccug

SEQ ID NO: 690052 - RNA, 19 nt, Artificial Sequence
  Description of Artificial Sequence: Synthetic oligonucleotide
  Sense strand starting at position 2079 of SEQ ID NO: 586073
gcguuagagauggagacua

SEQ ID NO: 690053 - RNA, 19 nt, Artificial Sequence
  Description of Artificial Sequence: Synthetic oligonucleotide
  Antisense strand to SEQ ID NO: 690052
uagucuccaucucuaacgc

SEQ ID NO: 690054 - RNA, 19 nt, Artificial Sequence
  Description of Artificial Sequence: Synthetic oligonucleotide
  Sense strand starting at position 2097 of SEQ ID NO: 586073
aacgucuuccaagggagau

SEQ ID NO: 690055 - RNA, 19 nt, Artificial Sequence
  Description of Artificial Sequence: Synthetic oligonucleotide
  Antisense strand to SEQ ID NO: 690054
aucucccuuggaagacguu

SEQ ID NO: 690056 - RNA, 19 nt, Artificial Sequence
  Description of Artificial Sequence: Synthetic oligonucleotide
  Sense strand starting at position 2098 of SEQ ID NO: 586073
acgucuuccaagggagauu

SEQ ID NO: 690057 - RNA, 19 nt, Artificial Sequence
  Description of Artificial Sequence: Synthetic oligonucleotide
  Antisense strand to SEQ ID NO: 690056
aaucucccuuggaagacgu

SEQ ID NO: 690058 - RNA, 19 nt, Artificial Sequence
  Description of Artificial Sequence: Synthetic oligonucleotide
  Sense strand starting at position 2140 of SEQ ID NO: 586073
cugagagguugagcacaaa

SEQ ID NO: 690059 - RNA, 19 nt, Artificial Sequence
  Description of Artificial Sequence: Synthetic oligonucleotide
  Antisense strand to SEQ ID NO: 690058
uuugugcucaaccucucag

SEQ ID NO: 690060 - RNA, 19 nt, Artificial Sequence
  Description of Artificial Sequence: Synthetic oligonucleotide
  Sense strand starting at position 2173 of SEQ ID NO: 586073
cugcgcuuccagcaaauuu

SEQ ID NO: 690061 - RNA, 19 nt, Artificial Sequence
  Description of Artificial Sequence: Synthetic oligonucleotide
  Antisense strand to SEQ ID NO: 690060
aaauuugcuggaagcgcag

SEQ ID NO: 690062 - RNA, 19 nt, Artificial Sequence
  Description of Artificial Sequence: Synthetic oligonucleotide
  Sense strand starting at position 2200 of SEQ ID NO: 586073
gcacccaauccugggauau

SEQ ID NO: 690063 - RNA, 19 nt, Artificial Sequence
  Description of Artificial Sequence: Synthetic oligonucleotide
  Antisense strand to SEQ ID NO: 690062
auaucccaggauugggugc

SEQ ID NO: 690064 - RNA, 19 nt, Artificial Sequence
  Description of Artificial Sequence: Synthetic oligonucleotide
  Sense strand starting at position 2202 of SEQ ID NO: 586073
acccaauccugggauauuu

SEQ ID NO: 690065 - RNA, 19 nt, Artificial Sequence
  Description of Artificial Sequence: Synthetic oligonucleotide
  Antisense strand to SEQ ID NO: 690064
aaauaucccaggauugggu

SEQ ID NO: 690066 - RNA, 19 nt, Artificial Sequence
  Description of Artificial Sequence: Synthetic oligonucleotide
  Sense strand starting at position 2295 of SEQ ID NO: 586073
augauuucuuuggauuaga

SEQ ID NO: 690067 - RNA, 19 nt, Artificial Sequence
  Description of Artificial Sequence: Synthetic oligonucleotide
  Antisense strand to SEQ ID NO: 690066
ucuaauccaaagaaaucau

SEQ ID NO: 690068 - RNA, 19 nt, Artificial Sequence
  Description of Artificial Sequence: Synthetic oligonucleotide
  Sense strand starting at position 2395 of SEQ ID NO: 586073
ggacguauaguucuagcgu

SEQ ID NO: 690069 - RNA, 19 nt, Artificial Sequence
  Description of Artificial Sequence: Synthetic oligonucleotide
  Antisense strand to SEQ ID NO: 690068
acgcuagaacuauacgucc

SEQ ID NO: 690070 - RNA, 19 nt, Artificial Sequence
  Description of Artificial Sequence: Synthetic oligonucleotide
  Sense strand starting at position 2535 of SEQ ID NO: 586073
gagugaaggcccgaggaau

SEQ ID NO: 690071 - RNA, 19 nt, Artificial Sequence
  Description of Artificial Sequence: Synthetic oligonucleotide
  Antisense strand to SEQ ID NO: 690070
auuccucgggccuucacuc

SEQ ID NO: 690072 - RNA, 19 nt, Artificial Sequence
  Description of Artificial Sequence: Synthetic oligonucleotide
  Sense strand starting at position 2661 of SEQ ID NO: 586073
cgacuccugccagauaagu

SEQ ID NO: 690073 - RNA, 19 nt, Artificial Sequence
  Description of Artificial Sequence: Synthetic oligonucleotide
  Antisense strand to SEQ ID NO: 690072
acuuaucuggcaggagucg

SEQ ID NO: 690074 - RNA, 19 nt, Artificial Sequence
  Description of Artificial Sequence: Synthetic oligonucleotide
  Sense strand starting at position 2683 of SEQ ID NO: 586073
gcuagcaguagucaagaaa

SEQ ID NO: 690075 - RNA, 19 nt, Artificial Sequence
  Description of Artificial Sequence: Synthetic oligonucleotide
  Antisense strand to SEQ ID NO: 690074
uuucuugacuacugcuagc

SEQ ID NO: 690076 - RNA, 19 nt, Artificial Sequence
  Description of Artificial Sequence: Synthetic oligonucleotide
  Sense strand starting at position 2686 of SEQ ID NO: 586073
agcaguagucaagaaagcu

SEQ ID NO: 690077 - RNA, 19 nt, Artificial Sequence
  Description of Artificial Sequence: Synthetic oligonucleotide
  Antisense strand to SEQ ID NO: 690076
agcuuucuugacuacugcu

SEQ ID NO: 690078 - RNA, 19 nt, Artificial Sequence
  Description of Artificial Sequence: Synthetic oligonucleotide
  Sense strand starting at position 2894 of SEQ ID NO: 586073
aguagaaacuuucccugaa

SEQ ID NO: 690079 - RNA, 19 nt, Artificial Sequence
  Description of Artificial Sequence: Synthetic oligonucleotide
  Antisense strand to SEQ ID NO: 690078
uucagggaaaguuucuacu

SEQ ID NO: 690080 - RNA, 19 nt, Artificial Sequence
  Description of Artificial Sequence: Synthetic oligonucleotide
  Sense strand starting at position 2895 of SEQ ID NO: 586073
guagaaacuuucccugaag

SEQ ID NO: 690081 - RNA, 19 nt, Artificial Sequence
  Description of Artificial Sequence: Synthetic oligonucleotide
  Antisense strand to SEQ ID NO: 690080
cuucagggaaaguuucuac

SEQ ID NO: 690082 - RNA, 19 nt, Artificial Sequence
  Description of Artificial Sequence: Synthetic oligonucleotide
  Sense strand starting at position 3102 of SEQ ID NO: 586073
gccauagugaaaggguuaa

SEQ ID NO: 690083 - RNA, 19 nt, Artificial Sequence
  Description of Artificial Sequence: Synthetic oligonucleotide
  Antisense strand to SEQ ID NO: 690082
uuaacccuuucacuauggc

SEQ ID NO: 690084 - RNA, 19 nt, Artificial Sequence
  Description of Artificial Sequence: Synthetic oligonucleotide
  Sense strand starting at position 3125 of SEQ ID NO: 586073
cagcaaacugcugaagagu

SEQ ID NO: 690085 - RNA, 19 nt, Artificial Sequence
  Description of Artificial Sequence: Synthetic oligonucleotide
  Antisense strand to SEQ ID NO: 690084
acucuucagcaguuugcug

SEQ ID NO: 690086 - RNA, 19 nt, Artificial Sequence
  Description of Artificial Sequence: Synthetic oligonucleotide
  Sense strand starting at position 3141 of SEQ ID NO: 586073
agugacaagcccuaucauu

SEQ ID NO: 690087 - RNA, 19 nt, Artificial Sequence
  Description of Artificial Sequence: Synthetic oligonucleotide
  Antisense strand to SEQ ID NO: 690086
aaugauagggcuugucacu

SEQ ID NO: 690088 - RNA, 19 nt, Artificial Sequence
  Description of Artificial Sequence: Synthetic oligonucleotide
  Sense strand starting at position 3155 of SEQ ID NO: 586073
ucauuuaacugugaaauug

SEQ ID NO: 690089 - RNA, 19 nt, Artificial Sequence
  Description of Artificial Sequence: Synthetic oligonucleotide
  Antisense strand to SEQ ID NO: 690088
caauuucacaguuaaauga

SEQ ID NO: 690090 - RNA, 19 nt, Artificial Sequence
  Description of Artificial Sequence: Synthetic oligonucleotide
  Sense strand starting at position 3331 of SEQ ID NO: 586073
ugugaauugcaguaaagga

SEQ ID NO: 690091 - RNA, 19 nt, Artificial Sequence
  Description of Artificial Sequence: Synthetic oligonucleotide
  Antisense strand to SEQ ID NO: 690090
uccuuuacugcaauucaca

SEQ ID NO: 690092 - RNA, 19 nt, Artificial Sequence
  Description of Artificial Sequence: Synthetic oligonucleotide
  Sense strand starting at position 3388 of SEQ ID NO: 586073
cucacagucuaaucaguaa

SEQ ID NO: 690093 - RNA, 19 nt, Artificial Sequence
  Description of Artificial Sequence: Synthetic oligonucleotide
  Antisense strand to SEQ ID NO: 690092
uuacugauuagacugugag

SEQ ID NO: 690094 - RNA, 19 nt, Artificial Sequence
  Description of Artificial Sequence: Synthetic oligonucleotide
  Sense strand starting at position 3391 of SEQ ID NO: 586073
acagucuaaucaguaaaga

SEQ ID NO: 690095 - RNA, 19 nt, Artificial Sequence
  Description of Artificial Sequence: Synthetic oligonucleotide
  Antisense strand to SEQ ID NO: 690094
ucuuuacugauuagacugu

SEQ ID NO: 690096 - RNA, 19 nt, Artificial Sequence
  Description of Artificial Sequence: Synthetic oligonucleotide
  Sense strand starting at position 3652 of SEQ ID NO: 586073
cucagauauuaugugucaa

SEQ ID NO: 690097 - RNA, 19 nt, Artificial Sequence
  Description of Artificial Sequence: Synthetic oligonucleotide
  Antisense strand to SEQ ID NO: 690096
uugacacauaauaucugag

SEQ ID NO: 690098 - RNA, 19 nt, Artificial Sequence
  Description of Artificial Sequence: Synthetic oligonucleotide
  Sense strand starting at position 3665 of SEQ ID NO: 586073
ugucaaggaucaucagcaa

SEQ ID NO: 690099 - RNA, 19 nt, Artificial Sequence
  Description of Artificial Sequence: Synthetic oligonucleotide
  Antisense strand to SEQ ID NO: 690098
uugcugaugauccuugaca

SEQ ID NO: 690100 - RNA, 19 nt, Artificial Sequence
  Description of Artificial Sequence: Synthetic oligonucleotide
  Sense strand starting at position 3772 of SEQ ID NO: 586073
agaugaucauacguuuaca

SEQ ID NO: 690101 - RNA, 19 nt, Artificial Sequence
  Description of Artificial Sequence: Synthetic oligonucleotide
  Antisense strand to SEQ ID NO: 690100
uguaaacguaugaucaucu

SEQ ID NO: 690102 - RNA, 19 nt, Artificial Sequence
  Description of Artificial Sequence: Synthetic oligonucleotide
  Sense strand starting at position 3775 of SEQ ID NO: 586073
ugaucauacguuuacaauc

SEQ ID NO: 690103 - RNA, 19 nt, Artificial Sequence
  Description of Artificial Sequence: Synthetic oligonucleotide
  Antisense strand to SEQ ID NO: 690102
gauuguaaacguaugauca

SEQ ID NO: 690104 - RNA, 19 nt, Artificial Sequence
  Description of Artificial Sequence: Synthetic oligonucleotide
  Sense strand starting at position 3797 of SEQ ID NO: 586073
aaauaagcuuacguagaca

SEQ ID NO: 690105 - RNA, 19 nt, Artificial Sequence
  Description of Artificial Sequence: Synthetic oligonucleotide
  Antisense strand to SEQ ID NO: 690104
ugucuacguaagcuuauuu

SEQ ID NO: 690106 - RNA, 19 nt, Artificial Sequence
  Description of Artificial Sequence: Synthetic oligonucleotide
  Sense strand starting at position 3800 of SEQ ID NO: 586073
uaagcuuacguagacaaau

SEQ ID NO: 690107 - RNA, 19 nt, Artificial Sequence
  Description of Artificial Sequence: Synthetic oligonucleotide
  Antisense strand to SEQ ID NO: 690106
auuugucuacguaagcuua

SEQ ID NO: 690108 - RNA, 19 nt, Artificial Sequence
  Description of Artificial Sequence: Synthetic oligonucleotide
  Sense strand starting at position 3981 of SEQ ID NO: 586073
caguguaaaccacgauuaa

SEQ ID NO: 690109 - RNA, 19 nt, Artificial Sequence
  Description of Artificial Sequence: Synthetic oligonucleotide
  Antisense strand to SEQ ID NO: 690108
uuaaucgugguuuacacug

SEQ ID NO: 690110 - RNA, 19 nt, Artificial Sequence
  Description of Artificial Sequence: Synthetic oligonucleotide
  Sense strand starting at position 3982 of SEQ ID NO: 586073
aguguaaaccacgauuaau

SEQ ID NO: 690111 - RNA, 19 nt, Artificial Sequence
  Description of Artificial Sequence: Synthetic oligonucleotide
  Antisense strand to SEQ ID NO: 690110
auuaaucgugguuuacacu

SEQ ID NO: 690112 - RNA, 19 nt, Artificial Sequence
  Description of Artificial Sequence: Synthetic oligonucleotide
  Sense strand starting at position 94 of SEQ ID NO: 586074
ccaacuuuccgugaaacuc

SEQ ID NO: 690113 - RNA, 19 nt, Artificial Sequence
  Description of Artificial Sequence: Synthetic oligonucleotide
  Antisense strand to SEQ ID NO: 690112
gaguuucacggaaaguugg

SEQ ID NO: 690114 - RNA, 19 nt, Artificial Sequence
  Description of Artificial Sequence: Synthetic oligonucleotide
  Sense strand starting at position 488 of SEQ ID NO: 586074
gucugaaguacugacggaa

SEQ ID NO: 690115 - RNA, 19 nt, Artificial Sequence
  Description of Artificial Sequence: Synthetic oligonucleotide
  Antisense strand to SEQ ID NO: 690114
uuccgucaguacuucagac

SEQ ID NO: 690116 - RNA, 19 nt, Artificial Sequence
  Description of Artificial Sequence: Synthetic oligonucleotide
  Sense strand starting at position 503 of SEQ ID NO: 586074
ggaagaccucucugcuaug

SEQ ID NO: 690117 - RNA, 19 nt, Artificial Sequence
  Description of Artificial Sequence: Synthetic oligonucleotide
  Antisense strand to SEQ ID NO: 690116
cauagcagagaggucuucc

SEQ ID NO: 690118 - RNA, 19 nt, Artificial Sequence
  Description of Artificial Sequence: Synthetic oligonucleotide
  Sense strand starting at position 556 of SEQ ID NO: 586074
gugguauauuucucuuccu

SEQ ID NO: 690119 - RNA, 19 nt, Artificial Sequence
  Description of Artificial Sequence: Synthetic oligonucleotide
  Antisense strand to SEQ ID NO: 690118
aggaagagaaauauaccac

SEQ ID NO: 690120 - RNA, 19 nt, Artificial Sequence
  Description of Artificial Sequence: Synthetic oligonucleotide
  Sense strand starting at position 685 of SEQ ID NO: 586074
gaaacuguauuccuggaca

SEQ ID NO: 690121 - RNA, 19 nt, Artificial Sequence
  Description of Artificial Sequence: Synthetic oligonucleotide
  Antisense strand to SEQ ID NO: 690120
uguccaggaauacaguuuc

SEQ ID NO: 690122 - RNA, 19 nt, Artificial Sequence
  Description of Artificial Sequence: Synthetic oligonucleotide
  Sense strand starting at position 687 of SEQ ID NO: 586074
aacuguauuccuggacagu

SEQ ID NO: 690123 - RNA, 19 nt, Artificial Sequence
  Description of Artificial Sequence: Synthetic oligonucleotide
  Antisense strand to SEQ ID NO: 690122
acuguccaggaauacaguu

SEQ ID NO: 690124 - RNA, 19 nt, Artificial Sequence
  Description of Artificial Sequence: Synthetic oligonucleotide
  Sense strand starting at position 688 of SEQ ID NO: 586074
acuguauuccuggacaguc

SEQ ID NO: 690125 - RNA, 19 nt, Artificial Sequence
  Description of Artificial Sequence: Synthetic oligonucleotide
  Antisense strand to SEQ ID NO: 690124
gacuguccaggaauacagu

SEQ ID NO: 690126 - RNA, 19 nt, Artificial Sequence
  Description of Artificial Sequence: Synthetic oligonucleotide
  Sense strand starting at position 791 of SEQ ID NO: 586074
aucugaccuccggauuaau

SEQ ID NO: 690127 - RNA, 19 nt, Artificial Sequence
  Description of Artificial Sequence: Synthetic oligonucleotide
  Antisense strand to SEQ ID NO: 690126
auuaauccggaggucagau

SEQ ID NO: 690128 - RNA, 19 nt, Artificial Sequence
  Description of Artificial Sequence: Synthetic oligonucleotide
  Sense strand starting at position 794 of SEQ ID NO: 586074
ugaccuccggauuaaugua

SEQ ID NO: 690129 - RNA, 19 nt, Artificial Sequence
  Description of Artificial Sequence: Synthetic oligonucleotide
  Antisense strand to SEQ ID NO: 690128
uacauuaauccggagguca

SEQ ID NO: 690130 - RNA, 19 nt, Artificial Sequence
  Description of Artificial Sequence: Synthetic oligonucleotide
  Sense strand starting at position 801 of SEQ ID NO: 586074
cggauuaauguacaauacu

SEQ ID NO: 690131 - RNA, 19 nt, Artificial Sequence
  Description of Artificial Sequence: Synthetic oligonucleotide
  Antisense strand to SEQ ID NO: 690130
aguauuguacauuaauccg

SEQ ID NO: 690132 - RNA, 19 nt, Artificial Sequence
  Description of Artificial Sequence: Synthetic oligonucleotide
  Sense strand starting at position 1238 of SEQ ID NO: 586074
aagaguaagacuuguuggu

SEQ ID NO: 690133 - RNA, 19 nt, Artificial Sequence
  Description of Artificial Sequence: Synthetic oligonucleotide
  Antisense strand to SEQ ID NO: 690132
accaacaagucuuacucuu

SEQ ID NO: 690134 - RNA, 19 nt, Artificial Sequence
  Description of Artificial Sequence: Synthetic oligonucleotide
  Sense strand starting at position 1240 of SEQ ID NO: 586074
gaguaagacuuguugguaa

SEQ ID NO: 690135 - RNA, 19 nt, Artificial Sequence
  Description of Artificial Sequence: Synthetic oligonucleotide
  Antisense strand to SEQ ID NO: 690134
uuaccaacaagucuuacuc

SEQ ID NO: 690136 - RNA, 19 nt, Artificial Sequence
  Description of Artificial Sequence: Synthetic oligonucleotide
  Sense strand starting at position 1243 of SEQ ID NO: 586074
uaagacuuguugguaaacu

SEQ ID NO: 690137 - RNA, 19 nt, Artificial Sequence
  Description of Artificial Sequence: Synthetic oligonucleotide
  Antisense strand to SEQ ID NO: 690136
aguuuaccaacaagucuua

SEQ ID NO: 690138 - RNA, 19 nt, Artificial Sequence
  Description of Artificial Sequence: Synthetic oligonucleotide
  Sense strand starting at position 1340 of SEQ ID NO: 586074
uuaggacauccuugauuag

SEQ ID NO: 690139 - RNA, 19 nt, Artificial Sequence
  Description of Artificial Sequence: Synthetic oligonucleotide
  Antisense strand to SEQ ID NO: 690138
cuaaucaaggauguccuaa

SEQ ID NO: 690140 - RNA, 19 nt, Artificial Sequence
  Description of Artificial Sequence: Synthetic oligonucleotide
  Sense strand starting at position 1343 of SEQ ID NO: 586074
ggacauccuugauuaguua

SEQ ID NO: 690141 - RNA, 19 nt, Artificial Sequence
  Description of Artificial Sequence: Synthetic oligonucleotide
  Antisense strand to SEQ ID NO: 690140
uaacuaaucaaggaugucc

SEQ ID NO: 690142 - RNA, 19 nt, Artificial Sequence
  Description of Artificial Sequence: Synthetic oligonucleotide
  Sense strand starting at position 1371 of SEQ ID NO: 586074
uuugaauguccagaugucu

SEQ ID NO: 690143 - RNA, 19 nt, Artificial Sequence
  Description of Artificial Sequence: Synthetic oligonucleotide
  Antisense strand to SEQ ID NO: 690142
agacaucuggacauucaaa

SEQ ID NO: 690144 - RNA, 19 nt, Artificial Sequence
  Description of Artificial Sequence: Synthetic oligonucleotide
  Sense strand starting at position 1488 of SEQ ID NO: 586074
ggcugaagagguuacucuu

SEQ ID NO: 690145 - RNA, 19 nt, Artificial Sequence
  Description of Artificial Sequence: Synthetic oligonucleotide
  Antisense strand to SEQ ID NO: 690144
aagaguaaccucuucagcc

SEQ ID NO: 690146 - RNA, 19 nt, Artificial Sequence
  Description of Artificial Sequence: Synthetic oligonucleotide
  Sense strand starting at position 1491 of SEQ ID NO: 586074
ugaagagguuacucuuuaa

SEQ ID NO: 690147 - RNA, 19 nt, Artificial Sequence
  Description of Artificial Sequence: Synthetic oligonucleotide
  Antisense strand to SEQ ID NO: 690146
uuaaagaguaaccucuuca

SEQ ID NO: 690148 - RNA, 19 nt, Artificial Sequence
  Description of Artificial Sequence: Synthetic oligonucleotide
  Sense strand starting at position 1495 of SEQ ID NO: 586074
gagguuacucuuuaaggcu

SEQ ID NO: 690149 - RNA, 19 nt, Artificial Sequence
  Description of Artificial Sequence: Synthetic oligonucleotide
  Antisense strand to SEQ ID NO: 690148
agccuuaaagaguaaccuc

SEQ ID NO: 690150 - RNA, 19 nt, Artificial Sequence
  Description of Artificial Sequence: Synthetic oligonucleotide
  Sense strand starting at position 1532 of SEQ ID NO: 586074
cugugauuauaaucugaag

SEQ ID NO: 690151 - RNA, 19 nt, Artificial Sequence
  Description of Artificial Sequence: Synthetic oligonucleotide
  Antisense strand to SEQ ID NO: 690150
cuucagauuauaaucacag

SEQ ID NO: 690152 - RNA, 19 nt, Artificial Sequence
  Description of Artificial Sequence: Synthetic oligonucleotide
  Sense strand starting at position 1534 of SEQ ID NO: 586074
gugauuauaaucugaagug

SEQ ID NO: 690153 - RNA, 19 nt, Artificial Sequence
  Description of Artificial Sequence: Synthetic oligonucleotide
  Antisense strand to SEQ ID NO: 690152
cacuucagauuauaaucac

SEQ ID NO: 690154 - RNA, 19 nt, Artificial Sequence
  Description of Artificial Sequence: Synthetic oligonucleotide
  Sense strand starting at position 2098 of SEQ ID NO: 586074
cgcgucuacgugagaggaa

SEQ ID NO: 690155 - RNA, 19 nt, Artificial Sequence
  Description of Artificial Sequence: Synthetic oligonucleotide
  Antisense strand to SEQ ID NO: 690154
uuccucucacguagacgcg

SEQ ID NO: 690156 - RNA, 19 nt, Artificial Sequence
  Description of Artificial Sequence: Synthetic oligonucleotide
  Sense strand starting at position 2140 of SEQ ID NO: 586074
gguaaauggaacggguuua

SEQ ID NO: 690157 - RNA, 19 nt, Artificial Sequence
  Description of Artificial Sequence: Synthetic oligonucleotide
  Antisense strand to SEQ ID NO: 690156
uaaacccguuccauuuacc

SEQ ID NO: 690158 - RNA, 19 nt, Artificial Sequence
  Description of Artificial Sequence: Synthetic oligonucleotide
  Sense strand starting at position 2141 of SEQ ID NO: 586074
guaaauggaacggguuuau

SEQ ID NO: 690159 - RNA, 19 nt, Artificial Sequence
  Description of Artificial Sequence: Synthetic oligonucleotide
  Antisense strand to SEQ ID NO: 690158
auaaacccguuccauuuac

SEQ ID NO: 690160 - RNA, 19 nt, Artificial Sequence
  Description of Artificial Sequence: Synthetic oligonucleotide
  Sense strand starting at position 2282 of SEQ ID NO: 586074
ugucucugagguuagagau

SEQ ID NO: 690161 - RNA, 19 nt, Artificial Sequence
  Description of Artificial Sequence: Synthetic oligonucleotide
  Antisense strand to SEQ ID NO: 690160
aucucuaaccucagagaca

SEQ ID NO: 690162 - RNA, 19 nt, Artificial Sequence
  Description of Artificial Sequence: Synthetic oligonucleotide
  Sense strand starting at position 2288 of SEQ ID NO: 586074
ugagguuagagaugccuca

SEQ ID NO: 690163 - RNA, 19 nt, Artificial Sequence
  Description of Artificial Sequence: Synthetic oligonucleotide
  Antisense strand to SEQ ID NO: 690162
ugaggcaucucuaaccuca

SEQ ID NO: 690164 - RNA, 19 nt, Artificial Sequence
  Description of Artificial Sequence: Synthetic oligonucleotide
  Sense strand starting at position 2409 of SEQ ID NO: 586074
gcucuuucgccauccacga

SEQ ID NO: 690165 - RNA, 19 nt, Artificial Sequence
  Description of Artificial Sequence: Synthetic oligonucleotide
  Antisense strand to SEQ ID NO: 690164
ucguggauggcgaaagagc

SEQ ID NO: 690166 - RNA, 19 nt, Artificial Sequence
  Description of Artificial Sequence: Synthetic oligonucleotide
  Sense strand starting at position 2452 of SEQ ID NO: 586074
gcugauguaugauuauaug

SEQ ID NO: 690167 - RNA, 19 nt, Artificial Sequence
  Description of Artificial Sequence: Synthetic oligonucleotide
  Antisense strand to SEQ ID NO: 690166
cauauaaucauacaucagc

SEQ ID NO: 690168 - RNA, 19 nt, Artificial Sequence
  Description of Artificial Sequence: Synthetic oligonucleotide
  Sense strand starting at position 2458 of SEQ ID NO: 586074
guaugauuauaugucagaa

SEQ ID NO: 690169 - RNA, 19 nt, Artificial Sequence
  Description of Artificial Sequence: Synthetic oligonucleotide
  Antisense strand to SEQ ID NO: 690168
uucugacauauaaucauac

SEQ ID NO: 690170 - RNA, 19 nt, Artificial Sequence
  Description of Artificial Sequence: Synthetic oligonucleotide
  Sense strand starting at position 2589 of SEQ ID NO: 586074
cgaguuacgagauauaaug

SEQ ID NO: 690171 - RNA, 19 nt, Artificial Sequence
  Description of Artificial Sequence: Synthetic oligonucleotide
  Antisense strand to SEQ ID NO: 690170
cauuauaucucguaacucg

SEQ ID NO: 690172 - RNA, 19 nt, Artificial Sequence
  Description of Artificial Sequence: Synthetic oligonucleotide
  Sense strand starting at position 2738 of SEQ ID NO: 586074
cagaaagcgauaugagguu

SEQ ID NO: 690173 - RNA, 19 nt, Artificial Sequence
  Description of Artificial Sequence: Synthetic oligonucleotide
  Antisense strand to SEQ ID NO: 690172
aaccucauaucgcuuucug

SEQ ID NO: 690174 - RNA, 19 nt, Artificial Sequence
  Description of Artificial Sequence: Synthetic oligonucleotide
  Sense strand starting at position 2772 of SEQ ID NO: 586074
agaggucaguccucccuaa

SEQ ID NO: 690175 - RNA, 19 nt, Artificial Sequence
  Description of Artificial Sequence: Synthetic oligonucleotide
  Antisense strand to SEQ ID NO: 690174
uuagggaggacugaccucu

SEQ ID NO: 690176 - RNA, 19 nt, Artificial Sequence
  Description of Artificial Sequence: Synthetic oligonucleotide
  Sense strand starting at position 2776 of SEQ ID NO: 586074
gucaguccucccuaaauac

SEQ ID NO: 690177 - RNA, 19 nt, Artificial Sequence
  Description of Artificial Sequence: Synthetic oligonucleotide
  Antisense strand to SEQ ID NO: 690176
guauuuagggaggacugac

SEQ ID NO: 690178 - RNA, 19 nt, Artificial Sequence
  Description of Artificial Sequence: Synthetic oligonucleotide
  Sense strand starting at position 2921 of SEQ ID NO: 586074
gggucaaccuuaucagaua

SEQ ID NO: 690179 - RNA, 19 nt, Artificial Sequence
  Description of Artificial Sequence: Synthetic oligonucleotide
  Antisense strand to SEQ ID NO: 690178
uaucugauaagguugaccc

SEQ ID NO: 690180 - RNA, 19 nt, Artificial Sequence
  Description of Artificial Sequence: Synthetic oligonucleotide
  Sense strand starting at position 3071 of SEQ ID NO: 586074
agaaguugugcugggauga

SEQ ID NO: 690181 - RNA, 19 nt, Artificial Sequence
  Description of Artificial Sequence: Synthetic oligonucleotide
  Antisense strand to SEQ ID NO: 690180
ucaucccagcacaacuucu

SEQ ID NO: 690182 - RNA, 19 nt, Artificial Sequence
  Description of Artificial Sequence: Synthetic oligonucleotide
  Sense strand starting at position 3224 of SEQ ID NO: 586074
auucuaacacgugggaaua

SEQ ID NO: 690183 - RNA, 19 nt, Artificial Sequence
  Description of Artificial Sequence: Synthetic oligonucleotide
  Antisense strand to SEQ ID NO: 690182
uauucccacguguuagaau

SEQ ID NO: 690184 - RNA, 19 nt, Artificial Sequence
  Description of Artificial Sequence: Synthetic oligonucleotide
  Sense strand starting at position 3567 of SEQ ID NO: 586074
accguuagucaucagauug

SEQ ID NO: 690185 - RNA, 19 nt, Artificial Sequence
  Description of Artificial Sequence: Synthetic oligonucleotide
  Antisense strand to SEQ ID NO: 690184
caaucugaugacuaacggu

SEQ ID NO: 690186 - RNA, 19 nt, Artificial Sequence
  Description of Artificial Sequence: Synthetic oligonucleotide
  Sense strand starting at position 3572 of SEQ ID NO: 586074
uagucaucagauuggcaau

SEQ ID NO: 690187 - RNA, 19 nt, Artificial Sequence
  Description of Artificial Sequence: Synthetic oligonucleotide
  Antisense strand to SEQ ID NO: 690186
auugccaaucugaugacua

SEQ ID NO: 690188 - RNA, 19 nt, Artificial Sequence
  Description of Artificial Sequence: Synthetic oligonucleotide
  Sense strand starting at position 3578 of SEQ ID NO: 586074
ucagauuggcaaugguaca

SEQ ID NO: 690189 - RNA, 19 nt, Artificial Sequence
  Description of Artificial Sequence: Synthetic oligonucleotide
  Antisense strand to SEQ ID NO: 690188
uguaccauugccaaucuga

SEQ ID NO: 690190 - RNA, 19 nt, Artificial Sequence
  Description of Artificial Sequence: Synthetic oligonucleotide
  Sense strand starting at position 3664 of SEQ ID NO: 586074
ugguacaacccauagguau

SEQ ID NO: 690191 - RNA, 19 nt, Artificial Sequence
  Description of Artificial Sequence: Synthetic oligonucleotide
  Antisense strand to SEQ ID NO: 690190
auaccuauggguuguacca

SEQ ID NO: 690192 - RNA, 19 nt, Artificial Sequence
  Description of Artificial Sequence: Synthetic oligonucleotide
  Sense strand starting at position 54 of SEQ ID NO: 586075
ggaucagagcacugggauu

SEQ ID NO: 690193 - RNA, 19 nt, Artificial Sequence
  Description of Artificial Sequence: Synthetic oligonucleotide
  Antisense strand to SEQ ID NO: 690192
aaucccagugcucugaucc

SEQ ID NO: 690194 - RNA, 19 nt, Artificial Sequence
  Description of Artificial Sequence: Synthetic oligonucleotide
  Sense strand starting at position 136 of SEQ ID NO: 586075
caugcuauccgauauggua

SEQ ID NO: 690195 - RNA, 19 nt, Artificial Sequence
  Description of Artificial Sequence: Synthetic oligonucleotide
  Antisense strand to SEQ ID NO: 690194
uaccauaucggauagcaug

SEQ ID NO: 690196 - RNA, 19 nt, Artificial Sequence
  Description of Artificial Sequence: Synthetic oligonucleotide
  Sense strand starting at position 148 of SEQ ID NO: 586075
uaugguagucacuagcaaa

SEQ ID NO: 690197 - RNA, 19 nt, Artificial Sequence
  Description of Artificial Sequence: Synthetic oligonucleotide
  Antisense strand to SEQ ID NO: 690196
uuugcuagugacuaccaua

SEQ ID NO: 690198 - RNA, 19 nt, Artificial Sequence
  Description of Artificial Sequence: Synthetic oligonucleotide
  Sense strand starting at position 169 of SEQ ID NO: 586075
gugguuacugaguacuuaa

SEQ ID NO: 690199 - RNA, 19 nt, Artificial Sequence
  Description of Artificial Sequence: Synthetic oligonucleotide
  Antisense strand to SEQ ID NO: 690198
uuaaguacucaguaaccac

SEQ ID NO: 690200 - RNA, 19 nt, Artificial Sequence
  Description of Artificial Sequence: Synthetic oligonucleotide
  Sense strand starting at position 296 of SEQ ID NO: 586075
uuaaauauugugggcuaaa

SEQ ID NO: 690201 - RNA, 19 nt, Artificial Sequence
  Description of Artificial Sequence: Synthetic oligonucleotide
  Antisense strand to SEQ ID NO: 690200
uuuagcccacaauauuuaa

SEQ ID NO: 690202 - RNA, 19 nt, Artificial Sequence
  Description of Artificial Sequence: Synthetic oligonucleotide
  Sense strand starting at position 297 of SEQ ID NO: 586075
uaaauauugugggcuaaau

SEQ ID NO: 690203 - RNA, 19 nt, Artificial Sequence
  Description of Artificial Sequence: Synthetic oligonucleotide
  Antisense strand to SEQ ID NO: 690202
auuuagcccacaauauuua

SEQ ID NO: 690204 - RNA, 19 nt, Artificial Sequence
  Description of Artificial Sequence: Synthetic oligonucleotide
  Sense strand starting at position 497 of SEQ ID NO: 586075
gguaucuaugaauggcaga

SEQ ID NO: 690205 - RNA, 19 nt, Artificial Sequence
  Description of Artificial Sequence: Synthetic oligonucleotide
  Antisense strand to SEQ ID NO: 690204
ucugccauucauagauacc

SEQ ID NO: 690206 - RNA, 19 nt, Artificial Sequence
  Description of Artificial Sequence: Synthetic oligonucleotide
  Sense strand starting at position 498 of SEQ ID NO: 586075
guaucuaugaauggcagaa

SEQ ID NO: 690207 - RNA, 19 nt, Artificial Sequence
  Description of Artificial Sequence: Synthetic oligonucleotide
  Antisense strand to SEQ ID NO: 690206
uucugccauucauagauac

SEQ ID NO: 690208 - RNA, 19 nt, Artificial Sequence
  Description of Artificial Sequence: Synthetic oligonucleotide
  Sense strand starting at position 550 of SEQ ID NO: 586075
uuugguaacuucccacuga

SEQ ID NO: 690209 - RNA, 19 nt, Artificial Sequence
  Description of Artificial Sequence: Synthetic oligonucleotide
  Antisense strand to SEQ ID NO: 690208
ucagugggaaguuaccaaa

SEQ ID NO: 690210 - RNA, 19 nt, Artificial Sequence
  Description of Artificial Sequence: Synthetic oligonucleotide
  Sense strand starting at position 669 of SEQ ID NO: 586075
ugccuuguucuuuagagga

SEQ ID NO: 690211 - RNA, 19 nt, Artificial Sequence
  Description of Artificial Sequence: Synthetic oligonucleotide
  Antisense strand to SEQ ID NO: 690210
uccucuaaagaacaaggca

SEQ ID NO: 690212 - RNA, 19 nt, Artificial Sequence
  Description of Artificial Sequence: Synthetic oligonucleotide
  Sense strand starting at position 1189 of SEQ ID NO: 586075
auccucuaucugggauuga

SEQ ID NO: 690213 - RNA, 19 nt, Artificial Sequence
  Description of Artificial Sequence: Synthetic oligonucleotide
  Antisense strand to SEQ ID NO: 690212
ucaaucccagauagaggau

SEQ ID NO: 690214 - RNA, 19 nt, Artificial Sequence
  Description of Artificial Sequence: Synthetic oligonucleotide
  Sense strand starting at position 1193 of SEQ ID NO: 586075
ucuaucugggauugaguca

SEQ ID NO: 690215 - RNA, 19 nt, Artificial Sequence
  Description of Artificial Sequence: Synthetic oligonucleotide
  Antisense strand to SEQ ID NO: 690214
ugacucaaucccagauaga

SEQ ID NO: 690216 - RNA, 19 nt, Artificial Sequence
  Description of Artificial Sequence: Synthetic oligonucleotide
  Sense strand starting at position 1223 of SEQ ID NO: 586075
uuagaauccugccucagag

SEQ ID NO: 690217 - RNA, 19 nt, Artificial Sequence
  Description of Artificial Sequence: Synthetic oligonucleotide
  Antisense strand to SEQ ID NO: 690216
cucugaggcaggauucuaa

SEQ ID NO: 690218 - RNA, 19 nt, Artificial Sequence
  Description of Artificial Sequence: Synthetic oligonucleotide
  Sense strand starting at position 1395 of SEQ ID NO: 586075
aacagugacgcagggauau

SEQ ID NO: 690219 - RNA, 19 nt, Artificial Sequence
  Description of Artificial Sequence: Synthetic oligonucleotide
  Antisense strand to SEQ ID NO: 690218
auaucccugcgucacuguu

SEQ ID NO: 690220 - RNA, 19 nt, Artificial Sequence
  Description of Artificial Sequence: Synthetic oligonucleotide
  Sense strand starting at position 1407 of SEQ ID NO: 586075
gggauaugauuugaaucug

SEQ ID NO: 690221 - RNA, 19 nt, Artificial Sequence
  Description of Artificial Sequence: Synthetic oligonucleotide
  Antisense strand to SEQ ID NO: 690220
cagauucaaaucauauccc

SEQ ID NO: 690222 - RNA, 19 nt, Artificial Sequence
  Description of Artificial Sequence: Synthetic oligonucleotide
  Sense strand starting at position 1415 of SEQ ID NO: 586075
auuugaaucugugcucuau

SEQ ID NO: 690223 - RNA, 19 nt, Artificial Sequence
  Description of Artificial Sequence: Synthetic oligonucleotide
  Antisense strand to SEQ ID NO: 690222
auagagcacagauucaaau

SEQ ID NO: 690224 - RNA, 19 nt, Artificial Sequence
  Description of Artificial Sequence: Synthetic oligonucleotide
  Sense strand starting at position 1435 of SEQ ID NO: 586075
guguaacuuagaggaaguu

SEQ ID NO: 690225 - RNA, 19 nt, Artificial Sequence
  Description of Artificial Sequence: Synthetic oligonucleotide
  Antisense strand to SEQ ID NO: 690224
aacuuccucuaaguuacac

SEQ ID NO: 690226 - RNA, 19 nt, Artificial Sequence
  Description of Artificial Sequence: Synthetic oligonucleotide
  Sense strand starting at position 1711 of SEQ ID NO: 586075
gacagaugccucugcagag

SEQ ID NO: 690227 - RNA, 19 nt, Artificial Sequence
  Description of Artificial Sequence: Synthetic oligonucleotide
  Antisense strand to SEQ ID NO: 690226
cucugcagaggcaucuguc

SEQ ID NO: 690228 - RNA, 19 nt, Artificial Sequence
  Description of Artificial Sequence: Synthetic oligonucleotide
  Sense strand starting at position 1818 of SEQ ID NO: 586075
gagggacaggaguguuaca

SEQ ID NO: 690229 - RNA, 19 nt, Artificial Sequence
  Description of Artificial Sequence: Synthetic oligonucleotide
  Antisense strand to SEQ ID NO: 690228
uguaacacuccugucccuc

SEQ ID NO: 690230 - RNA, 19 nt, Artificial Sequence
  Description of Artificial Sequence: Synthetic oligonucleotide
  Sense strand starting at position 2158 of SEQ ID NO: 586075
gagcaagucuuauuuguac

SEQ ID NO: 690231 - RNA, 19 nt, Artificial Sequence
  Description of Artificial Sequence: Synthetic oligonucleotide
  Antisense strand to SEQ ID NO: 690230
guacaaauaagacuugcuc

SEQ ID NO: 690232 - RNA, 19 nt, Artificial Sequence
  Description of Artificial Sequence: Synthetic oligonucleotide
  Sense strand starting at position 2316 of SEQ ID NO: 586075
auauuacaccguuauagau

SEQ ID NO: 690233 - RNA, 19 nt, Artificial Sequence
  Description of Artificial Sequence: Synthetic oligonucleotide
  Antisense strand to SEQ ID NO: 690232
aucuauaacgguguaauau

SEQ ID NO: 690234 - RNA, 19 nt, Artificial Sequence
  Description of Artificial Sequence: Synthetic oligonucleotide
  Sense strand starting at position 2411 of SEQ ID NO: 586075
ugguaaaggcuguacauaa

SEQ ID NO: 690235 - RNA, 19 nt, Artificial Sequence
  Description of Artificial Sequence: Synthetic oligonucleotide
  Antisense strand to SEQ ID NO: 690234
uuauguacagccuuuacca

SEQ ID NO: 690236 - RNA, 19 nt, Artificial Sequence
  Description of Artificial Sequence: Synthetic oligonucleotide
  Sense strand starting at position 2428 of SEQ ID NO: 586075
aaguguuuccuugaucuug

SEQ ID NO: 690237 - RNA, 19 nt, Artificial Sequence
  Description of Artificial Sequence: Synthetic oligonucleotide
  Antisense strand to SEQ ID NO: 690236
caagaucaaggaaacacuu

SEQ ID NO: 690238 - RNA, 19 nt, Artificial Sequence
  Description of Artificial Sequence: Synthetic oligonucleotide
  Sense strand starting at position 2562 of SEQ ID NO: 586075
ugcaauaacuuacugugaa

SEQ ID NO: 690239 - RNA, 19 nt, Artificial Sequence
  Description of Artificial Sequence: Synthetic oligonucleotide
  Antisense strand to SEQ ID NO: 690238
uucacaguaaguuauugca

SEQ ID NO: 690240 - RNA, 19 nt, Artificial Sequence
  Description of Artificial Sequence: Synthetic oligonucleotide
  Sense strand starting at position 2708 of SEQ ID NO: 586075
gcaguauucuuauuuaccu

SEQ ID NO: 690241 - RNA, 19 nt, Artificial Sequence
  Description of Artificial Sequence: Synthetic oligonucleotide
  Antisense strand to SEQ ID NO: 690240
agguaaauaagaauacugc

SEQ ID NO: 690242 - RNA, 19 nt, Artificial Sequence
  Description of Artificial Sequence: Synthetic oligonucleotide
  Sense strand starting at position 2765 of SEQ ID NO: 586075
ugccaaauugaugggugaa

SEQ ID NO: 690243 - RNA, 19 nt, Artificial Sequence
  Description of Artificial Sequence: Synthetic oligonucleotide
  Antisense strand to SEQ ID NO: 690242
uucacccaucaauuuggca

SEQ ID NO: 690244 - RNA, 19 nt, Artificial Sequence
  Description of Artificial Sequence: Synthetic oligonucleotide
  Sense strand starting at position 2766 of SEQ ID NO: 586075
gccaaauugaugggugaaa

SEQ ID NO: 690245 - RNA, 19 nt, Artificial Sequence
  Description of Artificial Sequence: Synthetic oligonucleotide
  Antisense strand to SEQ ID NO: 690244
uuucacccaucaauuuggc

SEQ ID NO: 690246 - RNA, 19 nt, Artificial Sequence
  Description of Artificial Sequence: Synthetic oligonucleotide
  Sense strand starting at position 2995 of SEQ ID NO: 586075
guguauagagaguggauau

SEQ ID NO: 690247 - RNA, 19 nt, Artificial Sequence
  Description of Artificial Sequence: Synthetic oligonucleotide
  Antisense strand to SEQ ID NO: 690246
auauccacucucuauacac

SEQ ID NO: 690248 - RNA, 19 nt, Artificial Sequence
  Description of Artificial Sequence: Synthetic oligonucleotide
  Sense strand starting at position 3051 of SEQ ID NO: 586075
gggugagaaugaagugaug

SEQ ID NO: 690249 - RNA, 19 nt, Artificial Sequence
  Description of Artificial Sequence: Synthetic oligonucleotide
  Antisense strand to SEQ ID NO: 690248
caucacuucauucucaccc

SEQ ID NO: 690250 - RNA, 19 nt, Artificial Sequence
  Description of Artificial Sequence: Synthetic oligonucleotide
  Sense strand starting at position 3053 of SEQ ID NO: 586075
gugagaaugaagugaugca

SEQ ID NO: 690251 - RNA, 19 nt, Artificial Sequence
  Description of Artificial Sequence: Synthetic oligonucleotide
  Antisense strand to SEQ ID NO: 690250
ugcaucacuucauucucac

SEQ ID NO: 690252 - RNA, 19 nt, Artificial Sequence
  Description of Artificial Sequence: Synthetic oligonucleotide
  Sense strand starting at position 3102 of SEQ ID NO: 586075
cuaggaaauugacauuuga

SEQ ID NO: 690253 - RNA, 19 nt, Artificial Sequence
  Description of Artificial Sequence: Synthetic oligonucleotide
  Antisense strand to SEQ ID NO: 690252
ucaaaugucaauuuccuag

SEQ ID NO: 690254 - RNA, 19 nt, Artificial Sequence
  Description of Artificial Sequence: Synthetic oligonucleotide
  Sense strand starting at position 3272 of SEQ ID NO: 586075
gagcguuggguggagagau

SEQ ID NO: 690255 - RNA, 19 nt, Artificial Sequence
  Description of Artificial Sequence: Synthetic oligonucleotide
  Antisense strand to SEQ ID NO: 690254
aucucuccacccaacgcuc

SEQ ID NO: 690256 - RNA, 19 nt, Artificial Sequence
  Description of Artificial Sequence: Synthetic oligonucleotide
  Sense strand starting at position 3341 of SEQ ID NO: 586075
augauaagcuacucaguuu

SEQ ID NO: 690257 - RNA, 19 nt, Artificial Sequence
  Description of Artificial Sequence: Synthetic oligonucleotide
  Antisense strand to SEQ ID NO: 690256
aaacugaguagcuuaucau

SEQ ID NO: 690258 - RNA, 19 nt, Artificial Sequence
  Description of Artificial Sequence: Synthetic oligonucleotide
  Sense strand starting at position 3544 of SEQ ID NO: 586075
uggcucauuugagauuucu

SEQ ID NO: 690259 - RNA, 19 nt, Artificial Sequence
  Description of Artificial Sequence: Synthetic oligonucleotide
  Antisense strand to SEQ ID NO: 690258
agaaaucucaaaugagcca

SEQ ID NO: 690260 - RNA, 19 nt, Artificial Sequence
  Description of Artificial Sequence: Synthetic oligonucleotide
  Sense strand starting at position 3550 of SEQ ID NO: 586075
auuugagauuucugaguag

SEQ ID NO: 690261 - RNA, 19 nt, Artificial Sequence
  Description of Artificial Sequence: Synthetic oligonucleotide
  Antisense strand to SEQ ID NO: 690260
cuacucagaaaucucaaau

SEQ ID NO: 690262 - RNA, 19 nt, Artificial Sequence
  Description of Artificial Sequence: Synthetic oligonucleotide
  Sense strand starting at position 3578 of SEQ ID NO: 586075
augauuaaacuuggguauu

SEQ ID NO: 690263 - RNA, 19 nt, Artificial Sequence
  Description of Artificial Sequence: Synthetic oligonucleotide
  Antisense strand to SEQ ID NO: 690262
aauacccaaguuuaaucau

SEQ ID NO: 690264 - RNA, 19 nt, Artificial Sequence
  Description of Artificial Sequence: Synthetic oligonucleotide
  Sense strand starting at position 3580 of SEQ ID NO: 586075
gauuaaacuuggguauuga

SEQ ID NO: 690265 - RNA, 19 nt, Artificial Sequence
  Description of Artificial Sequence: Synthetic oligonucleotide
  Antisense strand to SEQ ID NO: 690264
ucaauacccaaguuuaauc

SEQ ID NO: 690266 - RNA, 19 nt, Artificial Sequence
  Description of Artificial Sequence: Synthetic oligonucleotide
  Sense strand starting at position 3616 of SEQ ID NO: 586075
cuauguuaacaguagacuu

SEQ ID NO: 690267 - RNA, 19 nt, Artificial Sequence
  Description of Artificial Sequence: Synthetic oligonucleotide
  Antisense strand to SEQ ID NO: 690266
aagucuacuguuaacauag

SEQ ID NO: 690268 - RNA, 19 nt, Artificial Sequence
  Description of Artificial Sequence: Synthetic oligonucleotide
  Sense strand starting at position 3626 of SEQ ID NO: 586075
aguagacuugaaugugaag

SEQ ID NO: 690269 - RNA, 19 nt, Artificial Sequence
  Description of Artificial Sequence: Synthetic oligonucleotide
  Antisense strand to SEQ ID NO: 690268
cuucacauucaagucuacu

SEQ ID NO: 690270 - RNA, 19 nt, Artificial Sequence
  Description of Artificial Sequence: Synthetic oligonucleotide
  Sense strand starting at position 3763 of SEQ ID NO: 586075
aaaugaaacuggccuugua

SEQ ID NO: 690271 - RNA, 19 nt, Artificial Sequence
  Description of Artificial Sequence: Synthetic oligonucleotide
  Antisense strand to SEQ ID NO: 690270
uacaaggccaguuucauuu

SEQ ID NO: 690272 - RNA, 19 nt, Artificial Sequence
  Description of Artificial Sequence: Synthetic oligonucleotide
  Sense strand starting at position 62 of SEQ ID NO: 586076
ugucauguacuguaugagu

SEQ ID NO: 690273 - RNA, 19 nt, Artificial Sequence
  Description of Artificial Sequence: Synthetic oligonucleotide
  Antisense strand to SEQ ID NO: 690272
acucauacaguacaugaca

SEQ ID NO: 690274 - RNA, 19 nt, Artificial Sequence
  Description of Artificial Sequence: Synthetic oligonucleotide
  Sense strand starting at position 241 of SEQ ID NO: 586076
uuugcaaucguauauacac

SEQ ID NO: 690275 - RNA, 19 nt, Artificial Sequence
  Description of Artificial Sequence: Synthetic oligonucleotide
  Antisense strand to SEQ ID NO: 690274
guguauauacgauugcaaa

SEQ ID NO: 690276 - RNA, 19 nt, Artificial Sequence
  Description of Artificial Sequence: Synthetic oligonucleotide
  Sense strand starting at position 329 of SEQ ID NO: 586076
gguaguaugagauagcaga

SEQ ID NO: 690277 - RNA, 19 nt, Artificial Sequence
  Description of Artificial Sequence: Synthetic oligonucleotide
  Antisense strand to SEQ ID NO: 690276
ucugcuaucucauacuacc

SEQ ID NO: 690278 - RNA, 19 nt, Artificial Sequence
  Description of Artificial Sequence: Synthetic oligonucleotide
  Sense strand starting at position 763 of SEQ ID NO: 586076
cuugccaacuuguugagaa

SEQ ID NO: 690279 - RNA, 19 nt, Artificial Sequence
  Description of Artificial Sequence: Synthetic oligonucleotide
  Antisense strand to SEQ ID NO: 690278
uucucaacaaguuggcaag

SEQ ID NO: 690280 - RNA, 19 nt, Artificial Sequence
  Description of Artificial Sequence: Synthetic oligonucleotide
  Sense strand starting at position 765 of SEQ ID NO: 586076
ugccaacuuguugagaaua

SEQ ID NO: 690281 - RNA, 19 nt, Artificial Sequence
  Description of Artificial Sequence: Synthetic oligonucleotide
  Antisense strand to SEQ ID NO: 690280
uauucucaacaaguuggca

SEQ ID NO: 690282 - RNA, 19 nt, Artificial Sequence
  Description of Artificial Sequence: Synthetic oligonucleotide
  Sense strand starting at position 876 of SEQ ID NO: 586076
guacaaugguaguuuaauu

SEQ ID NO: 690283 - RNA, 19 nt, Artificial Sequence
  Description of Artificial Sequence: Synthetic oligonucleotide
  Antisense strand to SEQ ID NO: 690282
aauuaaacuaccauuguac

SEQ ID NO: 690284 - RNA, 19 nt, Artificial Sequence
  Description of Artificial Sequence: Synthetic oligonucleotide
  Sense strand starting at position 916 of SEQ ID NO: 586076
gggccaagacuguaaucuu

SEQ ID NO: 690285 - RNA, 19 nt, Artificial Sequence
  Description of Artificial Sequence: Synthetic oligonucleotide
  Antisense strand to SEQ ID NO: 690284
aagauuacagucuuggccc

SEQ ID NO: 690286 - RNA, 19 nt, Artificial Sequence
  Description of Artificial Sequence: Synthetic oligonucleotide
  Sense strand starting at position 1133 of SEQ ID NO: 586076
ggguuauagcuguaaagcu

SEQ ID NO: 690287 - RNA, 19 nt, Artificial Sequence
  Description of Artificial Sequence: Synthetic oligonucleotide
  Antisense strand to SEQ ID NO: 690286
agcuuuacagcuauaaccc

SEQ ID NO: 690288 - RNA, 19 nt, Artificial Sequence
  Description of Artificial Sequence: Synthetic oligonucleotide
  Sense strand starting at position 1208 of SEQ ID NO: 586076
agccaaauugccuguauuu

SEQ ID NO: 690289 - RNA, 19 nt, Artificial Sequence
  Description of Artificial Sequence: Synthetic oligonucleotide
  Antisense strand to SEQ ID NO: 690288
aaauacaggcaauuuggcu

SEQ ID NO: 690290 - RNA, 19 nt, Artificial Sequence
  Description of Artificial Sequence: Synthetic oligonucleotide
  Sense strand starting at position 1330 of SEQ ID NO: 586076
ggguguagucuacauaaua

SEQ ID NO: 690291 - RNA, 19 nt, Artificial Sequence
  Description of Artificial Sequence: Synthetic oligonucleotide
  Antisense strand to SEQ ID NO: 690290
uauuauguagacuacaccc

SEQ ID NO: 690292 - RNA, 19 nt, Artificial Sequence
  Description of Artificial Sequence: Synthetic oligonucleotide
  Sense strand starting at position 1470 of SEQ ID NO: 586076
ccuuuauacuaugugaguu

SEQ ID NO: 690293 - RNA, 19 nt, Artificial Sequence
  Description of Artificial Sequence: Synthetic oligonucleotide
  Antisense strand to SEQ ID NO: 690292
aacucacauaguauaaagg

SEQ ID NO: 690294 - RNA, 19 nt, Artificial Sequence
  Description of Artificial Sequence: Synthetic oligonucleotide
  Sense strand starting at position 1474 of SEQ ID NO: 586076
uauacuaugugaguuagac

SEQ ID NO: 690295 - RNA, 19 nt, Artificial Sequence
  Description of Artificial Sequence: Synthetic oligonucleotide
  Antisense strand to SEQ ID NO: 690294
gucuaacucacauaguaua

SEQ ID NO: 690296 - RNA, 19 nt, Artificial Sequence
  Description of Artificial Sequence: Synthetic oligonucleotide
  Sense strand starting at position 1493 of SEQ ID NO: 586076
uaagaaaggcuguggcaua

SEQ ID NO: 690297 - RNA, 19 nt, Artificial Sequence
  Description of Artificial Sequence: Synthetic oligonucleotide
  Antisense strand to SEQ ID NO: 690296
uaugccacagccuuucuua

SEQ ID NO: 690298 - RNA, 19 nt, Artificial Sequence
  Description of Artificial Sequence: Synthetic oligonucleotide
  Sense strand starting at position 1498 of SEQ ID NO: 586076
aaggcuguggcauaguuua

SEQ ID NO: 690299 - RNA, 19 nt, Artificial Sequence
  Description of Artificial Sequence: Synthetic oligonucleotide
  Antisense strand to SEQ ID NO: 690298
uaaacuaugccacagccuu

SEQ ID NO: 690300 - RNA, 19 nt, Artificial Sequence
  Description of Artificial Sequence: Synthetic oligonucleotide
  Sense strand starting at position 1601 of SEQ ID NO: 586076
cuauuugaauccuaagaug

SEQ ID NO: 690301 - RNA, 19 nt, Artificial Sequence
  Description of Artificial Sequence: Synthetic oligonucleotide
  Antisense strand to SEQ ID NO: 690300
caucuuaggauucaaauag

SEQ ID NO: 690302 - RNA, 19 nt, Artificial Sequence
  Description of Artificial Sequence: Synthetic oligonucleotide
  Sense strand starting at position 1783 of SEQ ID NO: 586076
gcccaucucuggccaagaa

SEQ ID NO: 690303 - RNA, 19 nt, Artificial Sequence
  Description of Artificial Sequence: Synthetic oligonucleotide
  Antisense strand to SEQ ID NO: 690302
uucuuggccagagaugggc

SEQ ID NO: 690304 - RNA, 19 nt, Artificial Sequence
  Description of Artificial Sequence: Synthetic oligonucleotide
  Sense strand starting at position 1897 of SEQ ID NO: 586076
cgaggcauccgugagagga

SEQ ID NO: 690305 - RNA, 19 nt, Artificial Sequence
  Description of Artificial Sequence: Synthetic oligonucleotide
  Antisense strand to SEQ ID NO: 690304
uccucucacggaugccucg

SEQ ID NO: 690306 - RNA, 19 nt, Artificial Sequence
  Description of Artificial Sequence: Synthetic oligonucleotide
  Sense strand starting at position 1941 of SEQ ID NO: 586076
ugcucugaauccuugacaa

SEQ ID NO: 690307 - RNA, 19 nt, Artificial Sequence
  Description of Artificial Sequence: Synthetic oligonucleotide
  Antisense strand to SEQ ID NO: 690306
uugucaaggauucagagca

SEQ ID NO: 690308 - RNA, 19 nt, Artificial Sequence
  Description of Artificial Sequence: Synthetic oligonucleotide
  Sense strand starting at position 2103 of SEQ ID NO: 586076
uguagucuuaagugagaua

SEQ ID NO: 690309 - RNA, 19 nt, Artificial Sequence
  Description of Artificial Sequence: Synthetic oligonucleotide
  Antisense strand to SEQ ID NO: 690308
uaucucacuuaagacuaca

SEQ ID NO: 690310 - RNA, 19 nt, Artificial Sequence
  Description of Artificial Sequence: Synthetic oligonucleotide
  Sense strand starting at position 2104 of SEQ ID NO: 586076
guagucuuaagugagauac

SEQ ID NO: 690311 - RNA, 19 nt, Artificial Sequence
  Description of Artificial Sequence: Synthetic oligonucleotide
  Antisense strand to SEQ ID NO: 690310
guaucucacuuaagacuac

SEQ ID NO: 690312 - RNA, 19 nt, Artificial Sequence
  Description of Artificial Sequence: Synthetic oligonucleotide
  Sense strand starting at position 2201 of SEQ ID NO: 586076
gcauaacaacccugugagu

SEQ ID NO: 690313 - RNA, 19 nt, Artificial Sequence
  Description of Artificial Sequence: Synthetic oligonucleotide
  Antisense strand to SEQ ID NO: 690312
acucacaggguuguuaugc

SEQ ID NO: 690314 - RNA, 19 nt, Artificial Sequence
  Description of Artificial Sequence: Synthetic oligonucleotide
  Sense strand starting at position 2203 of SEQ ID NO: 586076
auaacaacccugugaguua

SEQ ID NO: 690315 - RNA, 19 nt, Artificial Sequence
  Description of Artificial Sequence: Synthetic oligonucleotide
  Antisense strand to SEQ ID NO: 690314
uaacucacaggguuguuau

SEQ ID NO: 690316 - RNA, 19 nt, Artificial Sequence
  Description of Artificial Sequence: Synthetic oligonucleotide
  Sense strand starting at position 2212 of SEQ ID NO: 586076
cugugaguuagguacaauu

SEQ ID NO: 690317 - RNA, 19 nt, Artificial Sequence
  Description of Artificial Sequence: Synthetic oligonucleotide
  Antisense strand to SEQ ID NO: 690316
aauuguaccuaacucacag

SEQ ID NO: 690318 - RNA, 19 nt, Artificial Sequence
  Description of Artificial Sequence: Synthetic oligonucleotide
  Sense strand starting at position 2214 of SEQ ID NO: 586076
gugaguuagguacaauuau

SEQ ID NO: 690319 - RNA, 19 nt, Artificial Sequence
  Description of Artificial Sequence: Synthetic oligonucleotide
  Antisense strand to SEQ ID NO: 690318
auaauuguaccuaacucac

SEQ ID NO: 690320 - RNA, 19 nt, Artificial Sequence
  Description of Artificial Sequence: Synthetic oligonucleotide
  Sense strand starting at position 2690 of SEQ ID NO: 586076
uucuauguccuuugauaag

SEQ ID NO: 690321 - RNA, 19 nt, Artificial Sequence
  Description of Artificial Sequence: Synthetic oligonucleotide
  Antisense strand to SEQ ID NO: 690320
cuuaucaaaggacauagaa

SEQ ID NO: 690322 - RNA, 19 nt, Artificial Sequence
  Description of Artificial Sequence: Synthetic oligonucleotide
  Sense strand starting at position 2810 of SEQ ID NO: 586076
gcuacaguacaucagugaa

SEQ ID NO: 690323 - RNA, 19 nt, Artificial Sequence
  Description of Artificial Sequence: Synthetic oligonucleotide
  Antisense strand to SEQ ID NO: 690322
uucacugauguacuguagc

SEQ ID NO: 690324 - RNA, 19 nt, Artificial Sequence
  Description of Artificial Sequence: Synthetic oligonucleotide
  Sense strand starting at position 2862 of SEQ ID NO: 586076
ggcaaugaauaaccucauu

SEQ ID NO: 690325 - RNA, 19 nt, Artificial Sequence
  Description of Artificial Sequence: Synthetic oligonucleotide
  Antisense strand to SEQ ID NO: 690324
aaugagguuauucauugcc

SEQ ID NO: 690326 - RNA, 19 nt, Artificial Sequence
  Description of Artificial Sequence: Synthetic oligonucleotide
  Sense strand starting at position 2909 of SEQ ID NO: 586076
agucuacuguguccagaau

SEQ ID NO: 690327 - RNA, 19 nt, Artificial Sequence
  Description of Artificial Sequence: Synthetic oligonucleotide
  Antisense strand to SEQ ID NO: 690326
auucuggacacaguagacu

SEQ ID NO: 690328 - RNA, 19 nt, Artificial Sequence
  Description of Artificial Sequence: Synthetic oligonucleotide
  Sense strand starting at position 2910 of SEQ ID NO: 586076
gucuacuguguccagaauu

SEQ ID NO: 690329 - RNA, 19 nt, Artificial Sequence
  Description of Artificial Sequence: Synthetic oligonucleotide
  Antisense strand to SEQ ID NO: 690328
aauucuggacacaguagac

SEQ ID NO: 690330 - RNA, 19 nt, Artificial Sequence
  Description of Artificial Sequence: Synthetic oligonucleotide
  Sense strand starting at position 2923 of SEQ ID NO: 586076
agaauuggcuccuuccagu

SEQ ID NO: 690331 - RNA, 19 nt, Artificial Sequence
  Description of Artificial Sequence: Synthetic oligonucleotide
  Antisense strand to SEQ ID NO: 690330
acuggaaggagccaauucu

SEQ ID NO: 690332 - RNA, 19 nt, Artificial Sequence
  Description of Artificial Sequence: Synthetic oligonucleotide
  Sense strand starting at position 2975 of SEQ ID NO: 586076
ggauacucacggugagcau

SEQ ID NO: 690333 - RNA, 19 nt, Artificial Sequence
  Description of Artificial Sequence: Synthetic oligonucleotide
  Antisense strand to SEQ ID NO: 690332
augcucaccgugaguaucc

SEQ ID NO: 690334 - RNA, 19 nt, Artificial Sequence
  Description of Artificial Sequence: Synthetic oligonucleotide
  Sense strand starting at position 2976 of SEQ ID NO: 586076
gauacucacggugagcauu

SEQ ID NO: 690335 - RNA, 19 nt, Artificial Sequence
  Description of Artificial Sequence: Synthetic oligonucleotide
  Antisense strand to SEQ ID NO: 690334
aaugcucaccgugaguauc

SEQ ID NO: 690336 - RNA, 19 nt, Artificial Sequence
  Description of Artificial Sequence: Synthetic oligonucleotide
  Sense strand starting at position 3213 of SEQ ID NO: 586076
gaccaucguagugagcauu

SEQ ID NO: 690337 - RNA, 19 nt, Artificial Sequence
  Description of Artificial Sequence: Synthetic oligonucleotide
  Antisense strand to SEQ ID NO: 690336
aaugcucacuacgaugguc

SEQ ID NO: 690338 - RNA, 19 nt, Artificial Sequence
  Description of Artificial Sequence: Synthetic oligonucleotide
  Sense strand starting at position 3216 of SEQ ID NO: 586076
caucguagugagcauuaca

SEQ ID NO: 690339 - RNA, 19 nt, Artificial Sequence
  Description of Artificial Sequence: Synthetic oligonucleotide
  Antisense strand to SEQ ID NO: 690338
uguaaugcucacuacgaug

SEQ ID NO: 690340 - RNA, 19 nt, Artificial Sequence
  Description of Artificial Sequence: Synthetic oligonucleotide
  Sense strand starting at position 3219 of SEQ ID NO: 586076
cguagugagcauuacaaug

SEQ ID NO: 690341 - RNA, 19 nt, Artificial Sequence
  Description of Artificial Sequence: Synthetic oligonucleotide
  Antisense strand to SEQ ID NO: 690340
cauuguaaugcucacuacg

SEQ ID NO: 690342 - RNA, 19 nt, Artificial Sequence
  Description of Artificial Sequence: Synthetic oligonucleotide
  Sense strand starting at position 3224 of SEQ ID NO: 586076
ugagcauuacaaugcuuaa

SEQ ID NO: 690343 - RNA, 19 nt, Artificial Sequence
  Description of Artificial Sequence: Synthetic oligonucleotide
  Antisense strand to SEQ ID NO: 690342
uuaagcauuguaaugcuca

SEQ ID NO: 690344 - RNA, 19 nt, Artificial Sequence
  Description of Artificial Sequence: Synthetic oligonucleotide
  Sense strand starting at position 3430 of SEQ ID NO: 586076
ugcugauugguccaucuuu

SEQ ID NO: 690345 - RNA, 19 nt, Artificial Sequence
  Description of Artificial Sequence: Synthetic oligonucleotide
  Antisense strand to SEQ ID NO: 690344
aaagauggaccaaucagca

SEQ ID NO: 690346 - RNA, 19 nt, Artificial Sequence
  Description of Artificial Sequence: Synthetic oligonucleotide
  Sense strand starting at position 3435 of SEQ ID NO: 586076
auugguccaucuuuacaga

SEQ ID NO: 690347 - RNA, 19 nt, Artificial Sequence
  Description of Artificial Sequence: Synthetic oligonucleotide
  Antisense strand to SEQ ID NO: 690346
ucuguaaagauggaccaau

SEQ ID NO: 690348 - RNA, 19 nt, Artificial Sequence
  Description of Artificial Sequence: Synthetic oligonucleotide
  Sense strand starting at position 3457 of SEQ ID NO: 586076
ccgcuugguguguuuacaa

SEQ ID NO: 690349 - RNA, 19 nt, Artificial Sequence
  Description of Artificial Sequence: Synthetic oligonucleotide
  Antisense strand to SEQ ID NO: 690348
uuguaaacacaccaagcgg

SEQ ID NO: 690350 - RNA, 19 nt, Artificial Sequence
  Description of Artificial Sequence: Synthetic oligonucleotide
  Sense strand starting at position 3727 of SEQ ID NO: 586076
guguacaagagcuagaaua

SEQ ID NO: 690351 - RNA, 19 nt, Artificial Sequence
  Description of Artificial Sequence: Synthetic oligonucleotide
  Antisense strand to SEQ ID NO: 690350
uauucuagcucuuguacac

SEQ ID NO: 690352 - RNA, 19 nt, Artificial Sequence
  Description of Artificial Sequence: Synthetic oligonucleotide
  Sense strand starting at position 180 of SEQ ID NO: 586077
uggguaugaggcugaauua

SEQ ID NO: 690353 - RNA, 19 nt, Artificial Sequence
  Description of Artificial Sequence: Synthetic oligonucleotide
  Antisense strand to SEQ ID NO: 690352
uaauucagccucauaccca

SEQ ID NO: 690354 - RNA, 19 nt, Artificial Sequence
  Description of Artificial Sequence: Synthetic oligonucleotide
  Sense strand starting at position 192 of SEQ ID NO: 586077
ugaauuaguggugaguuca

SEQ ID NO: 690355 - RNA, 19 nt, Artificial Sequence
  Description of Artificial Sequence: Synthetic oligonucleotide
  Antisense strand to SEQ ID NO: 690354
ugaacucaccacuaauuca

SEQ ID NO: 690356 - RNA, 19 nt, Artificial Sequence
  Description of Artificial Sequence: Synthetic oligonucleotide
  Sense strand starting at position 485 of SEQ ID NO: 586077
acacgcaaacagugaucau

SEQ ID NO: 690357 - RNA, 19 nt, Artificial Sequence
  Description of Artificial Sequence: Synthetic oligonucleotide
  Antisense strand to SEQ ID NO: 690356
augaucacuguuugcgugu

SEQ ID NO: 690358 - RNA, 19 nt, Artificial Sequence
  Description of Artificial Sequence: Synthetic oligonucleotide
  Sense strand starting at position 489 of SEQ ID NO: 586077
gcaaacagugaucauucua

SEQ ID NO: 690359 - RNA, 19 nt, Artificial Sequence
  Description of Artificial Sequence: Synthetic oligonucleotide
  Antisense strand to SEQ ID NO: 690358
uagaaugaucacuguuugc

SEQ ID NO: 690360 - RNA, 19 nt, Artificial Sequence
  Description of Artificial Sequence: Synthetic oligonucleotide
  Sense strand starting at position 506 of SEQ ID NO: 586077
uaaggaggauaugaaauau

SEQ ID NO: 690361 - RNA, 19 nt, Artificial Sequence
  Description of Artificial Sequence: Synthetic oligonucleotide
  Antisense strand to SEQ ID NO: 690360
auauuucauauccuccuua

SEQ ID NO: 690362 - RNA, 19 nt, Artificial Sequence
  Description of Artificial Sequence: Synthetic oligonucleotide
  Sense strand starting at position 549 of SEQ ID NO: 586077
acauauaauggcugauuau

SEQ ID NO: 690363 - RNA, 19 nt, Artificial Sequence
  Description of Artificial Sequence: Synthetic oligonucleotide
  Antisense strand to SEQ ID NO: 690362
auaaucagccauuauaugu

SEQ ID NO: 690364 - RNA, 19 nt, Artificial Sequence
  Description of Artificial Sequence: Synthetic oligonucleotide
  Sense strand starting at position 854 of SEQ ID NO: 586077
uuccuaauuucuucgugca

SEQ ID NO: 690365 - RNA, 19 nt, Artificial Sequence
  Description of Artificial Sequence: Synthetic oligonucleotide
  Antisense strand to SEQ ID NO: 690364
ugcacgaagaaauuaggaa

SEQ ID NO: 690366 - RNA, 19 nt, Artificial Sequence
  Description of Artificial Sequence: Synthetic oligonucleotide
  Sense strand starting at position 856 of SEQ ID NO: 586077
ccuaauuucuucgugcaga

SEQ ID NO: 690367 - RNA, 19 nt, Artificial Sequence
  Description of Artificial Sequence: Synthetic oligonucleotide
  Antisense strand to SEQ ID NO: 690366
ucugcacgaagaaauuagg

SEQ ID NO: 690368 - RNA, 19 nt, Artificial Sequence
  Description of Artificial Sequence: Synthetic oligonucleotide
  Sense strand starting at position 1065 of SEQ ID NO: 586077
ucugaucacuggcucaaga

SEQ ID NO: 690369 - RNA, 19 nt, Artificial Sequence
  Description of Artificial Sequence: Synthetic oligonucleotide
  Antisense strand to SEQ ID NO: 690368
ucuugagccagugaucaga

SEQ ID NO: 690370 - RNA, 19 nt, Artificial Sequence
  Description of Artificial Sequence: Synthetic oligonucleotide
  Sense strand starting at position 1075 of SEQ ID NO: 586077
ggcucaagauauccuuauc

SEQ ID NO: 690371 - RNA, 19 nt, Artificial Sequence
  Description of Artificial Sequence: Synthetic oligonucleotide
  Antisense strand to SEQ ID NO: 690370
gauaaggauaucuugagcc

SEQ ID NO: 690372 - RNA, 19 nt, Artificial Sequence
  Description of Artificial Sequence: Synthetic oligonucleotide
  Sense strand starting at position 1467 of SEQ ID NO: 586077
uagaaaguuccugaccgca

SEQ ID NO: 690373 - RNA, 19 nt, Artificial Sequence
  Description of Artificial Sequence: Synthetic oligonucleotide
  Antisense strand to SEQ ID NO: 690372
ugcggucaggaacuuucua

SEQ ID NO: 690374 - RNA, 19 nt, Artificial Sequence
  Description of Artificial Sequence: Synthetic oligonucleotide
  Sense strand starting at position 1469 of SEQ ID NO: 586077
gaaaguuccugaccgcaaa

SEQ ID NO: 690375 - RNA, 19 nt, Artificial Sequence
  Description of Artificial Sequence: Synthetic oligonucleotide
  Antisense strand to SEQ ID NO: 690374
uuugcggucaggaacuuuc

SEQ ID NO: 690376 - RNA, 19 nt, Artificial Sequence
  Description of Artificial Sequence: Synthetic oligonucleotide
  Sense strand starting at position 1986 of SEQ ID NO: 586077
cugggagggucauuucguu

SEQ ID NO: 690377 - RNA, 19 nt, Artificial Sequence
  Description of Artificial Sequence: Synthetic oligonucleotide
  Antisense strand to SEQ ID NO: 690376
aacgaaaugacccucccag

SEQ ID NO: 690378 - RNA, 19 nt, Artificial Sequence
  Description of Artificial Sequence: Synthetic oligonucleotide
  Sense strand starting at position 1990 of SEQ ID NO: 586077
gagggucauuucguuguga

SEQ ID NO: 690379 - RNA, 19 nt, Artificial Sequence
  Description of Artificial Sequence: Synthetic oligonucleotide
  Antisense strand to SEQ ID NO: 690378
ucacaacgaaaugacccuc

SEQ ID NO: 690380 - RNA, 19 nt, Artificial Sequence
  Description of Artificial Sequence: Synthetic oligonucleotide
  Sense strand starting at position 1992 of SEQ ID NO: 586077
gggucauuucguugugagc

SEQ ID NO: 690381 - RNA, 19 nt, Artificial Sequence
  Description of Artificial Sequence: Synthetic oligonucleotide
  Antisense strand to SEQ ID NO: 690380
gcucacaacgaaaugaccc

SEQ ID NO: 690382 - RNA, 19 nt, Artificial Sequence
  Description of Artificial Sequence: Synthetic oligonucleotide
  Sense strand starting at position 1999 of SEQ ID NO: 586077
uucguugugagcuaagauu

SEQ ID NO: 690383 - RNA, 19 nt, Artificial Sequence
  Description of Artificial Sequence: Synthetic oligonucleotide
  Antisense strand to SEQ ID NO: 690382
aaucuuagcucacaacgaa

SEQ ID NO: 690384 - RNA, 19 nt, Artificial Sequence
  Description of Artificial Sequence: Synthetic oligonucleotide
  Sense strand starting at position 2108 of SEQ ID NO: 586077
cguugaguguuaucacaaa

SEQ ID NO: 690385 - RNA, 19 nt, Artificial Sequence
  Description of Artificial Sequence: Synthetic oligonucleotide
  Antisense strand to SEQ ID NO: 690384
uuugugauaacacucaacg

SEQ ID NO: 690386 - RNA, 19 nt, Artificial Sequence
  Description of Artificial Sequence: Synthetic oligonucleotide
  Sense strand starting at position 2265 of SEQ ID NO: 586077
uuuggauugaaagguuuaa

SEQ ID NO: 690387 - RNA, 19 nt, Artificial Sequence
  Description of Artificial Sequence: Synthetic oligonucleotide
  Antisense strand to SEQ ID NO: 690386
uuaaaccuuucaauccaaa

SEQ ID NO: 690388 - RNA, 19 nt, Artificial Sequence
  Description of Artificial Sequence: Synthetic oligonucleotide
  Sense strand starting at position 2299 of SEQ ID NO: 586077
gggcuauuacugugagaga

SEQ ID NO: 690389 - RNA, 19 nt, Artificial Sequence
  Description of Artificial Sequence: Synthetic oligonucleotide
  Antisense strand to SEQ ID NO: 690388
ucucucacaguaauagccc

SEQ ID NO: 690390 - RNA, 19 nt, Artificial Sequence
  Description of Artificial Sequence: Synthetic oligonucleotide
  Sense strand starting at position 2334 of SEQ ID NO: 586077
cuuugcaaucaauguaagu

SEQ ID NO: 690391 - RNA, 19 nt, Artificial Sequence
  Description of Artificial Sequence: Synthetic oligonucleotide
  Antisense strand to SEQ ID NO: 690390
acuuacauugauugcaaag

SEQ ID NO: 690392 - RNA, 19 nt, Artificial Sequence
  Description of Artificial Sequence: Synthetic oligonucleotide
  Sense strand starting at position 2470 of SEQ ID NO: 586077
agauaaacucuuugaaugc

SEQ ID NO: 690393 - RNA, 19 nt, Artificial Sequence
  Description of Artificial Sequence: Synthetic oligonucleotide
  Antisense strand to SEQ ID NO: 690392
gcauucaaagaguuuaucu

SEQ ID NO: 690394 - RNA, 19 nt, Artificial Sequence
  Description of Artificial Sequence: Synthetic oligonucleotide
  Sense strand starting at position 2616 of SEQ ID NO: 586077
ggaauauacuguucuacca

SEQ ID NO: 690395 - RNA, 19 nt, Artificial Sequence
  Description of Artificial Sequence: Synthetic oligonucleotide
  Antisense strand to SEQ ID NO: 690394
ugguagaacaguauauucc

SEQ ID NO: 690396 - RNA, 19 nt, Artificial Sequence
  Description of Artificial Sequence: Synthetic oligonucleotide
  Sense strand starting at position 3146 of SEQ ID NO: 586077
uuguguuuaacugaucagu

SEQ ID NO: 690397 - RNA, 19 nt, Artificial Sequence
  Description of Artificial Sequence: Synthetic oligonucleotide
  Antisense strand to SEQ ID NO: 690396
acugaucaguuaaacacaa

SEQ ID NO: 690398 - RNA, 19 nt, Artificial Sequence
  Description of Artificial Sequence: Synthetic oligonucleotide
  Sense strand starting at position 3148 of SEQ ID NO: 586077
guguuuaacugaucaguug

SEQ ID NO: 690399 - RNA, 19 nt, Artificial Sequence
  Description of Artificial Sequence: Synthetic oligonucleotide
  Antisense strand to SEQ ID NO: 690398
caacugaucaguuaaacac

SEQ ID NO: 690400 - RNA, 19 nt, Artificial Sequence
  Description of Artificial Sequence: Synthetic oligonucleotide
  Sense strand starting at position 3149 of SEQ ID NO: 586077
uguuuaacugaucaguuga

SEQ ID NO: 690401 - RNA, 19 nt, Artificial Sequence
  Description of Artificial Sequence: Synthetic oligonucleotide
  Antisense strand to SEQ ID NO: 690400
ucaacugaucaguuaaaca

SEQ ID NO: 690402 - RNA, 19 nt, Artificial Sequence
  Description of Artificial Sequence: Synthetic oligonucleotide
  Sense strand starting at position 3151 of SEQ ID NO: 586077
uuuaacugaucaguugaca

SEQ ID NO: 690403 - RNA, 19 nt, Artificial Sequence
  Description of Artificial Sequence: Synthetic oligonucleotide
  Antisense strand to SEQ ID NO: 690402
ugucaacugaucaguuaaa

SEQ ID NO: 690404 - RNA, 19 nt, Artificial Sequence
  Description of Artificial Sequence: Synthetic oligonucleotide
  Sense strand starting at position 3212 of SEQ ID NO: 586077
cguguaauuuauucagugu

SEQ ID NO: 690405 - RNA, 19 nt, Artificial Sequence
  Description of Artificial Sequence: Synthetic oligonucleotide
  Antisense strand to SEQ ID NO: 690404
acacugaauaaauuacacg

SEQ ID NO: 690406 - RNA, 19 nt, Artificial Sequence
  Description of Artificial Sequence: Synthetic oligonucleotide
  Sense strand starting at position 3299 of SEQ ID NO: 586077
cuucuuaagugucugaaug

SEQ ID NO: 690407 - RNA, 19 nt, Artificial Sequence
  Description of Artificial Sequence: Synthetic oligonucleotide
  Antisense strand to SEQ ID NO: 690406
cauucagacacuuaagaag

SEQ ID NO: 690408 - RNA, 19 nt, Artificial Sequence
  Description of Artificial Sequence: Synthetic oligonucleotide
  Sense strand starting at position 3309 of SEQ ID NO: 586077
gucugaauguaucuuugaa

SEQ ID NO: 690409 - RNA, 19 nt, Artificial Sequence
  Description of Artificial Sequence: Synthetic oligonucleotide
  Antisense strand to SEQ ID NO: 690408
uucaaagauacauucagac

SEQ ID NO: 690410 - RNA, 19 nt, Artificial Sequence
  Description of Artificial Sequence: Synthetic oligonucleotide
  Sense strand starting at position 3311 of SEQ ID NO: 586077
cugaauguaucuuugaaag

SEQ ID NO: 690411 - RNA, 19 nt, Artificial Sequence
  Description of Artificial Sequence: Synthetic oligonucleotide
  Antisense strand to SEQ ID NO: 690410
cuuucaaagauacauucag

SEQ ID NO: 690412 - RNA, 19 nt, Artificial Sequence
  Description of Artificial Sequence: Synthetic oligonucleotide
  Sense strand starting at position 3400 of SEQ ID NO: 586077
auguguuacuaauuagaag

SEQ ID NO: 690413 - RNA, 19 nt, Artificial Sequence
  Description of Artificial Sequence: Synthetic oligonucleotide
  Antisense strand to SEQ ID NO: 690412
cuucuaauuaguaacacau

SEQ ID NO: 690414 - RNA, 19 nt, Artificial Sequence
  Description of Artificial Sequence: Synthetic oligonucleotide
  Sense strand starting at position 3607 of SEQ ID NO: 586077
uauugucaaggcugagauu

SEQ ID NO: 690415 - RNA, 19 nt, Artificial Sequence
  Description of Artificial Sequence: Synthetic oligonucleotide
  Antisense strand to SEQ ID NO: 690414
aaucucagccuugacaaua

SEQ ID NO: 690416 - RNA, 19 nt, Artificial Sequence
  Description of Artificial Sequence: Synthetic oligonucleotide
  Sense strand starting at position 3608 of SEQ ID NO: 586077
auugucaaggcugagauua

SEQ ID NO: 690417 - RNA, 19 nt, Artificial Sequence
  Description of Artificial Sequence: Synthetic oligonucleotide
  Antisense strand to SEQ ID NO: 690416
uaaucucagccuugacaau

SEQ ID NO: 690418 - RNA, 19 nt, Artificial Sequence
  Description of Artificial Sequence: Synthetic oligonucleotide
  Sense strand starting at position 3627 of SEQ ID NO: 586077
uugccauugcacuggauau

SEQ ID NO: 690419 - RNA, 19 nt, Artificial Sequence
  Description of Artificial Sequence: Synthetic oligonucleotide
  Antisense strand to SEQ ID NO: 690418
auauccagugcaauggcaa

SEQ ID NO: 690420 - RNA, 19 nt, Artificial Sequence
  Description of Artificial Sequence: Synthetic oligonucleotide
  Sense strand starting at position 3662 of SEQ ID NO: 586077
ccuuuaaaguagcuagaca

SEQ ID NO: 690421 - RNA, 19 nt, Artificial Sequence
  Description of Artificial Sequence: Synthetic oligonucleotide
  Antisense strand to SEQ ID NO: 690420
ugucuagcuacuuuaaagg

SEQ ID NO: 690422 - RNA, 19 nt, Artificial Sequence
  Description of Artificial Sequence: Synthetic oligonucleotide
  Sense strand starting at position 3721 of SEQ ID NO: 586077
uuuaaacagucuguuugua

SEQ ID NO: 690423 - RNA, 19 nt, Artificial Sequence
  Description of Artificial Sequence: Synthetic oligonucleotide
  Antisense strand to SEQ ID NO: 690422
uacaaacagacuguuuaaa

SEQ ID NO: 690424 - RNA, 19 nt, Artificial Sequence
  Description of Artificial Sequence: Synthetic oligonucleotide
  Sense strand starting at position 3787 of SEQ ID NO: 586077
cuguuaucaccaggagaga

SEQ ID NO: 690425 - RNA, 19 nt, Artificial Sequence
  Description of Artificial Sequence: Synthetic oligonucleotide
  Antisense strand to SEQ ID NO: 690424
ucucuccuggugauaacag

SEQ ID NO: 690426 - RNA, 19 nt, Artificial Sequence
  Description of Artificial Sequence: Synthetic oligonucleotide
  Sense strand starting at position 3940 of SEQ ID NO: 586077
uccauauuaucaguagaga

SEQ ID NO: 690427 - RNA, 19 nt, Artificial Sequence
  Description of Artificial Sequence: Synthetic oligonucleotide
  Antisense strand to SEQ ID NO: 690426
ucucuacugauaauaugga

SEQ ID NO: 690428 - RNA, 19 nt, Artificial Sequence
  Description of Artificial Sequence: Synthetic oligonucleotide
  Sense strand starting at position 3965 of SEQ ID NO: 586077
cgcauuaugagucauguca

SEQ ID NO: 690429 - RNA, 19 nt, Artificial Sequence
  Description of Artificial Sequence: Synthetic oligonucleotide
  Antisense strand to SEQ ID NO: 690428
ugacaugacucauaaugcg

SEQ ID NO: 690430 - RNA, 19 nt, Artificial Sequence
  Description of Artificial Sequence: Synthetic oligonucleotide
  Sense strand starting at position 3973 of SEQ ID NO: 586077
gagucaugucaccaugcuc

SEQ ID NO: 690431 - RNA, 19 nt, Artificial Sequence
  Description of Artificial Sequence: Synthetic oligonucleotide
  Antisense strand to SEQ ID NO: 690430
gagcauggugacaugacuc

SEQ ID NO: 690432 - RNA, 19 nt, Artificial Sequence
  Description of Artificial Sequence: Synthetic oligonucleotide
  Sense strand starting at position 28 of SEQ ID NO: 586078
cguauuauuguuuagguau

SEQ ID NO: 690433 - RNA, 19 nt, Artificial Sequence
  Description of Artificial Sequence: Synthetic oligonucleotide
  Antisense strand to SEQ ID NO: 690432
auaccuaaacaauaauacg

SEQ ID NO: 690434 - RNA, 19 nt, Artificial Sequence
  Description of Artificial Sequence: Synthetic oligonucleotide
  Sense strand starting at position 123 of SEQ ID NO: 586078
aguauauaucuaugccaca

SEQ ID NO: 690435 - RNA, 19 nt, Artificial Sequence
  Description of Artificial Sequence: Synthetic oligonucleotide
  Antisense strand to SEQ ID NO: 690434
uguggcauagauauauacu

SEQ ID NO: 690436 - RNA, 19 nt, Artificial Sequence
  Description of Artificial Sequence: Synthetic oligonucleotide
  Sense strand starting at position 124 of SEQ ID NO: 586078
guauauaucuaugccacau

SEQ ID NO: 690437 - RNA, 19 nt, Artificial Sequence
  Description of Artificial Sequence: Synthetic oligonucleotide
  Antisense strand to SEQ ID NO: 690436
auguggcauagauauauac

SEQ ID NO: 690438 - RNA, 19 nt, Artificial Sequence
  Description of Artificial Sequence: Synthetic oligonucleotide
  Sense strand starting at position 187 of SEQ ID NO: 586078
aaacaugugguaugauguu

SEQ ID NO: 690439 - RNA, 19 nt, Artificial Sequence
  Description of Artificial Sequence: Synthetic oligonucleotide
  Antisense strand to SEQ ID NO: 690438
aacaucauaccacauguuu

SEQ ID NO: 690440 - RNA, 19 nt, Artificial Sequence
  Description of Artificial Sequence: Synthetic oligonucleotide
  Sense strand starting at position 194 of SEQ ID NO: 586078
ugguaugauguugauaugu

SEQ ID NO: 690441 - RNA, 19 nt, Artificial Sequence
  Description of Artificial Sequence: Synthetic oligonucleotide
  Antisense strand to SEQ ID NO: 690440
acauaucaacaucauacca

SEQ ID NO: 690442 - RNA, 19 nt, Artificial Sequence
  Description of Artificial Sequence: Synthetic oligonucleotide
  Sense strand starting at position 529 of SEQ ID NO: 586078
uggguaugaggcugaauua

SEQ ID NO: 690443 - RNA, 19 nt, Artificial Sequence
  Description of Artificial Sequence: Synthetic oligonucleotide
  Antisense strand to SEQ ID NO: 690442
uaauucagccucauaccca

SEQ ID NO: 690444 - RNA, 19 nt, Artificial Sequence
  Description of Artificial Sequence: Synthetic oligonucleotide
  Sense strand starting at position 541 of SEQ ID NO: 586078
ugaauuaguggugaguuca

SEQ ID NO: 690445 - RNA, 19 nt, Artificial Sequence
  Description of Artificial Sequence: Synthetic oligonucleotide
  Antisense strand to SEQ ID NO: 690444
ugaacucaccacuaauuca

SEQ ID NO: 690446 - RNA, 19 nt, Artificial Sequence
  Description of Artificial Sequence: Synthetic oligonucleotide
  Sense strand starting at position 834 of SEQ ID NO: 586078
acacgcaaacagugaucau

SEQ ID NO: 690447 - RNA, 19 nt, Artificial Sequence
  Description of Artificial Sequence: Synthetic oligonucleotide
  Antisense strand to SEQ ID NO: 690446
augaucacuguuugcgugu

SEQ ID NO: 690448 - RNA, 19 nt, Artificial Sequence
  Description of Artificial Sequence: Synthetic oligonucleotide
  Sense strand starting at position 838 of SEQ ID NO: 586078
gcaaacagugaucauucua

SEQ ID NO: 690449 - RNA, 19 nt, Artificial Sequence
  Description of Artificial Sequence: Synthetic oligonucleotide
  Antisense strand to SEQ ID NO: 690448
uagaaugaucacuguuugc

SEQ ID NO: 690450 - RNA, 19 nt, Artificial Sequence
  Description of Artificial Sequence: Synthetic oligonucleotide
  Sense strand starting at position 855 of SEQ ID NO: 586078
uaaggaggauaugaaauau

SEQ ID NO: 690451 - RNA, 19 nt, Artificial Sequence
  Description of Artificial Sequence: Synthetic oligonucleotide
  Antisense strand to SEQ ID NO: 690450
auauuucauauccuccuua

SEQ ID NO: 690452 - RNA, 19 nt, Artificial Sequence
  Description of Artificial Sequence: Synthetic oligonucleotide
  Sense strand starting at position 872 of SEQ ID NO: 586078
auuauuaugucccugcuau

SEQ ID NO: 690453 - RNA, 19 nt, Artificial Sequence
  Description of Artificial Sequence: Synthetic oligonucleotide
  Antisense strand to SEQ ID NO: 690452
auagcagggacauaauaau

SEQ ID NO: 690454 - RNA, 19 nt, Artificial Sequence
  Description of Artificial Sequence: Synthetic oligonucleotide
  Sense strand starting at position 898 of SEQ ID NO: 586078
acauauaauggcugauuau

SEQ ID NO: 690455 - RNA, 19 nt, Artificial Sequence
  Description of Artificial Sequence: Synthetic oligonucleotide
  Antisense strand to SEQ ID NO: 690454
auaaucagccauuauaugu

SEQ ID NO: 690456 - RNA, 19 nt, Artificial Sequence
  Description of Artificial Sequence: Synthetic oligonucleotide
  Sense strand starting at position 1203 of SEQ ID NO: 586078
uuccuaauuucuucgugca

SEQ ID NO: 690457 - RNA, 19 nt, Artificial Sequence
  Description of Artificial Sequence: Synthetic oligonucleotide
  Antisense strand to SEQ ID NO: 690456
ugcacgaagaaauuaggaa

SEQ ID NO: 690458 - RNA, 19 nt, Artificial Sequence
  Description of Artificial Sequence: Synthetic oligonucleotide
  Sense strand starting at position 1205 of SEQ ID NO: 586078
ccuaauuucuucgugcaga

SEQ ID NO: 690459 - RNA, 19 nt, Artificial Sequence
  Description of Artificial Sequence: Synthetic oligonucleotide
  Antisense strand to SEQ ID NO: 690458
ucugcacgaagaaauuagg

SEQ ID NO: 690460 - RNA, 19 nt, Artificial Sequence
  Description of Artificial Sequence: Synthetic oligonucleotide
  Sense strand starting at position 1414 of SEQ ID NO: 586078
ucugaucacuggcucaaga

SEQ ID NO: 690461 - RNA, 19 nt, Artificial Sequence
  Description of Artificial Sequence: Synthetic oligonucleotide
  Antisense strand to SEQ ID NO: 690460
ucuugagccagugaucaga

SEQ ID NO: 690462 - RNA, 19 nt, Artificial Sequence
  Description of Artificial Sequence: Synthetic oligonucleotide
  Sense strand starting at position 1424 of SEQ ID NO: 586078
ggcucaagauauccuuauc

SEQ ID NO: 690463 - RNA, 19 nt, Artificial Sequence
  Description of Artificial Sequence: Synthetic oligonucleotide
  Antisense strand to SEQ ID NO: 690462
gauaaggauaucuugagcc

SEQ ID NO: 690464 - RNA, 19 nt, Artificial Sequence
  Description of Artificial Sequence: Synthetic oligonucleotide
  Sense strand starting at position 1816 of SEQ ID NO: 586078
uagaaaguuccugaccgca

SEQ ID NO: 690465 - RNA, 19 nt, Artificial Sequence
  Description of Artificial Sequence: Synthetic oligonucleotide
  Antisense strand to SEQ ID NO: 690464
ugcggucaggaacuuucua

SEQ ID NO: 690466 - RNA, 19 nt, Artificial Sequence
  Description of Artificial Sequence: Synthetic oligonucleotide
  Sense strand starting at position 1818 of SEQ ID NO: 586078
gaaaguuccugaccgcaaa

SEQ ID NO: 690467 - RNA, 19 nt, Artificial Sequence
  Description of Artificial Sequence: Synthetic oligonucleotide
  Antisense strand to SEQ ID NO: 690466
uuugcggucaggaacuuuc

SEQ ID NO: 690468 - RNA, 19 nt, Artificial Sequence
  Description of Artificial Sequence: Synthetic oligonucleotide
  Sense strand starting at position 2335 of SEQ ID NO: 586078
cugggagggucauuucguu

SEQ ID NO: 690469 - RNA, 19 nt, Artificial Sequence
  Description of Artificial Sequence: Synthetic oligonucleotide
  Antisense strand to SEQ ID NO: 690468
aacgaaaugacccucccag

SEQ ID NO: 690470 - RNA, 19 nt, Artificial Sequence
  Description of Artificial Sequence: Synthetic oligonucleotide
  Sense strand starting at position 2339 of SEQ ID NO: 586078
gagggucauuucguuguga

SEQ ID NO: 690471 - RNA, 19 nt, Artificial Sequence
  Description of Artificial Sequence: Synthetic oligonucleotide
  Antisense strand to SEQ ID NO: 690470
ucacaacgaaaugacccuc

SEQ ID NO: 690472 - RNA, 19 nt, Artificial Sequence
  Description of Artificial Sequence: Synthetic oligonucleotide
  Sense strand starting at position 2341 of SEQ ID NO: 586078
gggucauuucguugugagc

SEQ ID NO: 690473 - RNA, 19 nt, Artificial Sequence
  Description of Artificial Sequence: Synthetic oligonucleotide
  Antisense strand to SEQ ID NO: 690472
gcucacaacgaaaugaccc

SEQ ID NO: 690474 - RNA, 19 nt, Artificial Sequence
  Description of Artificial Sequence: Synthetic oligonucleotide
  Sense strand starting at position 2348 of SEQ ID NO: 586078
uucguugugagcuaagauu

SEQ ID NO: 690475 - RNA, 19 nt, Artificial Sequence
  Description of Artificial Sequence: Synthetic oligonucleotide
  Antisense strand to SEQ ID NO: 690474
aaucuuagcucacaacgaa

SEQ ID NO: 690476 - RNA, 19 nt, Artificial Sequence
  Description of Artificial Sequence: Synthetic oligonucleotide
  Sense strand starting at position 2457 of SEQ ID NO: 586078
cguugaguguuaucacaaa

SEQ ID NO: 690477 - RNA, 19 nt, Artificial Sequence
  Description of Artificial Sequence: Synthetic oligonucleotide
  Antisense strand to SEQ ID NO: 690476
uuugugauaacacucaacg

SEQ ID NO: 690478 - RNA, 19 nt, Artificial Sequence
  Description of Artificial Sequence: Synthetic oligonucleotide
  Sense strand starting at position 2614 of SEQ ID NO: 586078
uuuggauugaaagguuuaa

SEQ ID NO: 690479 - RNA, 19 nt, Artificial Sequence
  Description of Artificial Sequence: Synthetic oligonucleotide
  Antisense strand to SEQ ID NO: 690478
uuaaaccuuucaauccaaa

SEQ ID NO: 690480 - RNA, 19 nt, Artificial Sequence
  Description of Artificial Sequence: Synthetic oligonucleotide
  Sense strand starting at position 2648 of SEQ ID NO: 586078
gggcuauuacugugagaga

SEQ ID NO: 690481 - RNA, 19 nt, Artificial Sequence
  Description of Artificial Sequence: Synthetic oligonucleotide
  Antisense strand to SEQ ID NO: 690480
ucucucacaguaauagccc

SEQ ID NO: 690482 - RNA, 19 nt, Artificial Sequence
  Description of Artificial Sequence: Synthetic oligonucleotide
  Sense strand starting at position 2683 of SEQ ID NO: 586078
cuuugcaaucaauguaagu

SEQ ID NO: 690483 - RNA, 19 nt, Artificial Sequence
  Description of Artificial Sequence: Synthetic oligonucleotide
  Antisense strand to SEQ ID NO: 690482
acuuacauugauugcaaag

SEQ ID NO: 690484 - RNA, 19 nt, Artificial Sequence
  Description of Artificial Sequence: Synthetic oligonucleotide
  Sense strand starting at position 2819 of SEQ ID NO: 586078
agauaaacucuuugaaugc

SEQ ID NO: 690485 - RNA, 19 nt, Artificial Sequence
  Description of Artificial Sequence: Synthetic oligonucleotide
  Antisense strand to SEQ ID NO: 690484
gcauucaaagaguuuaucu

SEQ ID NO: 690486 - RNA, 19 nt, Artificial Sequence
  Description of Artificial Sequence: Synthetic oligonucleotide
  Sense strand starting at position 2965 of SEQ ID NO: 586078
ggaauauacuguucuacca

SEQ ID NO: 690487 - RNA, 19 nt, Artificial Sequence
  Description of Artificial Sequence: Synthetic oligonucleotide
  Antisense strand to SEQ ID NO: 690486
ugguagaacaguauauucc

SEQ ID NO: 690488 - RNA, 19 nt, Artificial Sequence
  Description of Artificial Sequence: Synthetic oligonucleotide
  Sense strand starting at position 3495 of SEQ ID NO: 586078
uuguguuuaacugaucagu

SEQ ID NO: 690489 - RNA, 19 nt, Artificial Sequence
  Description of Artificial Sequence: Synthetic oligonucleotide
  Antisense strand to SEQ ID NO: 690488
acugaucaguuaaacacaa

SEQ ID NO: 690490 - RNA, 19 nt, Artificial Sequence
  Description of Artificial Sequence: Synthetic oligonucleotide
  Sense strand starting at position 3497 of SEQ ID NO: 586078
guguuuaacugaucaguug

SEQ ID NO: 690491 - RNA, 19 nt, Artificial Sequence
  Description of Artificial Sequence: Synthetic oligonucleotide
  Antisense strand to SEQ ID NO: 690490
caacugaucaguuaaacac

SEQ ID NO: 690492 - RNA, 19 nt, Artificial Sequence
  Description of Artificial Sequence: Synthetic oligonucleotide
  Sense strand starting at position 3498 of SEQ ID NO: 586078
uguuuaacugaucaguuga

SEQ ID NO: 690493 - RNA, 19 nt, Artificial Sequence
  Description of Artificial Sequence: Synthetic oligonucleotide
  Antisense strand to SEQ ID NO: 690492
ucaacugaucaguuaaaca

SEQ ID NO: 690494 - RNA, 19 nt, Artificial Sequence
  Description of Artificial Sequence: Synthetic oligonucleotide
  Sense strand starting at position 3500 of SEQ ID NO: 586078
uuuaacugaucaguugaca

SEQ ID NO: 690495 - RNA, 19 nt, Artificial Sequence
  Description of Artificial Sequence: Synthetic oligonucleotide
  Antisense strand to SEQ ID NO: 690494
ugucaacugaucaguuaaa

SEQ ID NO: 690496 - RNA, 19 nt, Artificial Sequence
  Description of Artificial Sequence: Synthetic oligonucleotide
  Sense strand starting at position 3561 of SEQ ID NO: 586078
cguguaauuuauucagugu

SEQ ID NO: 690497 - RNA, 19 nt, Artificial Sequence
  Description of Artificial Sequence: Synthetic oligonucleotide
  Antisense strand to SEQ ID NO: 690496
acacugaauaaauuacacg

SEQ ID NO: 690498 - RNA, 19 nt, Artificial Sequence
  Description of Artificial Sequence: Synthetic oligonucleotide
  Sense strand starting at position 3648 of SEQ ID NO: 586078
cuucuuaagugucugaaug

SEQ ID NO: 690499 - RNA, 19 nt, Artificial Sequence
  Description of Artificial Sequence: Synthetic oligonucleotide
  Antisense strand to SEQ ID NO: 690498
cauucagacacuuaagaag

SEQ ID NO: 690500 - RNA, 19 nt, Artificial Sequence
  Description of Artificial Sequence: Synthetic oligonucleotide
  Sense strand starting at position 3658 of SEQ ID NO: 586078
gucugaauguaucuuugaa

SEQ ID NO: 690501 - RNA, 19 nt, Artificial Sequence
  Description of Artificial Sequence: Synthetic oligonucleotide
  Antisense strand to SEQ ID NO: 690500
uucaaagauacauucagac

SEQ ID NO: 690502 - RNA, 19 nt, Artificial Sequence
  Description of Artificial Sequence: Synthetic oligonucleotide
  Sense strand starting at position 3660 of SEQ ID NO: 586078
cugaauguaucuuugaaag

SEQ ID NO: 690503 - RNA, 19 nt, Artificial Sequence
  Description of Artificial Sequence: Synthetic oligonucleotide
  Antisense strand to SEQ ID NO: 690502
cuuucaaagauacauucag

SEQ ID NO: 690504 - RNA, 19 nt, Artificial Sequence
  Description of Artificial Sequence: Synthetic oligonucleotide
  Sense strand starting at position 3749 of SEQ ID NO: 586078
auguguuacuaauuagaag

SEQ ID NO: 690505 - RNA, 19 nt, Artificial Sequence
  Description of Artificial Sequence: Synthetic oligonucleotide
  Antisense strand to SEQ ID NO: 690504
cuucuaauuaguaacacau

SEQ ID NO: 690506 - RNA, 19 nt, Artificial Sequence
  Description of Artificial Sequence: Synthetic oligonucleotide
  Sense strand starting at position 3956 of SEQ ID NO: 586078
uauugucaaggcugagauu

SEQ ID NO: 690507 - RNA, 19 nt, Artificial Sequence
  Description of Artificial Sequence: Synthetic oligonucleotide
  Antisense strand to SEQ ID NO: 690506
aaucucagccuugacaaua

SEQ ID NO: 690508 - RNA, 19 nt, Artificial Sequence
  Description of Artificial Sequence: Synthetic oligonucleotide
  Sense strand starting at position 3957 of SEQ ID NO: 586078
auugucaaggcugagauua

SEQ ID NO: 690509 - RNA, 19 nt, Artificial Sequence
  Description of Artificial Sequence: Synthetic oligonucleotide
  Antisense strand to SEQ ID NO: 690508
uaaucucagccuugacaau

SEQ ID NO: 690510 - RNA, 19 nt, Artificial Sequence
  Description of Artificial Sequence: Synthetic oligonucleotide
  Sense strand starting at position 3976 of SEQ ID NO: 586078
uugccauugcacuggauau

SEQ ID NO: 690511 - RNA, 19 nt, Artificial Sequence
  Description of Artificial Sequence: Synthetic oligonucleotide
  Antisense strand to SEQ ID NO: 690510
auauccagugcaauggcaa

SEQ ID NO: 690512 - RNA, 19 nt, Artificial Sequence
  Description of Artificial Sequence: Synthetic oligonucleotide
  Sense strand starting at position 6 of SEQ ID NO: 586079
uuggaauauagagguguuu

SEQ ID NO: 690513 - RNA, 19 nt, Artificial Sequence
  Description of Artificial Sequence: Synthetic oligonucleotide
  Antisense strand to SEQ ID NO: 690512
aaacaccucuauauuccaa

SEQ ID NO: 690514 - RNA, 19 nt, Artificial Sequence
  Description of Artificial Sequence: Synthetic oligonucleotide
  Sense strand starting at position 8 of SEQ ID NO: 586079
ggaauauagagguguuuau

SEQ ID NO: 690515 - RNA, 19 nt, Artificial Sequence
  Description of Artificial Sequence: Synthetic oligonucleotide
  Antisense strand to SEQ ID NO: 690514
auaaacaccucuauauucc

SEQ ID NO: 690516 - RNA, 19 nt, Artificial Sequence
  Description of Artificial Sequence: Synthetic oligonucleotide
  Sense strand starting at position 12 of SEQ ID NO: 586079
uauagagguguuuauagcu

SEQ ID NO: 690517 - RNA, 19 nt, Artificial Sequence
  Description of Artificial Sequence: Synthetic oligonucleotide
  Antisense strand to SEQ ID NO: 690516
agcuauaaacaccucuaua

SEQ ID NO: 690518 - RNA, 19 nt, Artificial Sequence
  Description of Artificial Sequence: Synthetic oligonucleotide
  Sense strand starting at position 27 of SEQ ID NO: 586079
agcucaugaggauauaguu

SEQ ID NO: 690519 - RNA, 19 nt, Artificial Sequence
  Description of Artificial Sequence: Synthetic oligonucleotide
  Antisense strand to SEQ ID NO: 690518
aacuauauccucaugagcu

SEQ ID NO: 690520 - RNA, 19 nt, Artificial Sequence
  Description of Artificial Sequence: Synthetic oligonucleotide
  Sense strand starting at position 107 of SEQ ID NO: 586079
aguggaagagcucauccua

SEQ ID NO: 690521 - RNA, 19 nt, Artificial Sequence
  Description of Artificial Sequence: Synthetic oligonucleotide
  Antisense strand to SEQ ID NO: 690520
uaggaugagcucuuccacu

SEQ ID NO: 690522 - RNA, 19 nt, Artificial Sequence
  Description of Artificial Sequence: Synthetic oligonucleotide
  Sense strand starting at position 152 of SEQ ID NO: 586079
gccuguaauccacaaagga

SEQ ID NO: 690523 - RNA, 19 nt, Artificial Sequence
  Description of Artificial Sequence: Synthetic oligonucleotide
  Antisense strand to SEQ ID NO: 690522
uccuuuguggauuacaggc

SEQ ID NO: 690524 - RNA, 19 nt, Artificial Sequence
  Description of Artificial Sequence: Synthetic oligonucleotide
  Sense strand starting at position 202 of SEQ ID NO: 586079
cgaggugucagacagcaaa

SEQ ID NO: 690525 - RNA, 19 nt, Artificial Sequence
  Description of Artificial Sequence: Synthetic oligonucleotide
  Antisense strand to SEQ ID NO: 690524
uuugcugucugacaccucg

SEQ ID NO: 690526 - RNA, 19 nt, Artificial Sequence
  Description of Artificial Sequence: Synthetic oligonucleotide
  Sense strand starting at position 590 of SEQ ID NO: 586079
cagugaguggucuaugauu

SEQ ID NO: 690527 - RNA, 19 nt, Artificial Sequence
  Description of Artificial Sequence: Synthetic oligonucleotide
  Antisense strand to SEQ ID NO: 690526
aaucauagaccacucacug

SEQ ID NO: 690528 - RNA, 19 nt, Artificial Sequence
  Description of Artificial Sequence: Synthetic oligonucleotide
  Sense strand starting at position 609 of SEQ ID NO: 586079
ggauccuaguugguacaaa

SEQ ID NO: 690529 - RNA, 19 nt, Artificial Sequence
  Description of Artificial Sequence: Synthetic oligonucleotide
  Antisense strand to SEQ ID NO: 690528
uuuguaccaacuaggaucc

SEQ ID NO: 690530 - RNA, 19 nt, Artificial Sequence
  Description of Artificial Sequence: Synthetic oligonucleotide
  Sense strand starting at position 731 of SEQ ID NO: 586079
ugugguuauguagggaaau

SEQ ID NO: 690531 - RNA, 19 nt, Artificial Sequence
  Description of Artificial Sequence: Synthetic oligonucleotide
  Antisense strand to SEQ ID NO: 690530
auuucccuacauaaccaca

SEQ ID NO: 690532 - RNA, 19 nt, Artificial Sequence
  Description of Artificial Sequence: Synthetic oligonucleotide
  Sense strand starting at position 845 of SEQ ID NO: 586079
uugcauaauguugacuuau

SEQ ID NO: 690533 - RNA, 19 nt, Artificial Sequence
  Description of Artificial Sequence: Synthetic oligonucleotide
  Antisense strand to SEQ ID NO: 690532
auaagucaacauuaugcaa

SEQ ID NO: 690534 - RNA, 19 nt, Artificial Sequence
  Description of Artificial Sequence: Synthetic oligonucleotide
  Sense strand starting at position 871 of SEQ ID NO: 586079
aaauuacguguauauagga

SEQ ID NO: 690535 - RNA, 19 nt, Artificial Sequence
  Description of Artificial Sequence: Synthetic oligonucleotide
  Antisense strand to SEQ ID NO: 690534
uccuauauacacguaauuu

SEQ ID NO: 690536 - RNA, 19 nt, Artificial Sequence
  Description of Artificial Sequence: Synthetic oligonucleotide
  Sense strand starting at position 1698 of SEQ ID NO: 586079
uugugucugcgcuccuuua

SEQ ID NO: 690537 - RNA, 19 nt, Artificial Sequence
  Description of Artificial Sequence: Synthetic oligonucleotide
  Antisense strand to SEQ ID NO: 690536
uaaaggagcgcagacacaa

SEQ ID NO: 690538 - RNA, 19 nt, Artificial Sequence
  Description of Artificial Sequence: Synthetic oligonucleotide
  Sense strand starting at position 1899 of SEQ ID NO: 586079
ugaaaucuucugggaaccu

SEQ ID NO: 690539 - RNA, 19 nt, Artificial Sequence
  Description of Artificial Sequence: Synthetic oligonucleotide
  Antisense strand to SEQ ID NO: 690538
agguucccagaagauuuca

SEQ ID NO: 690540 - RNA, 19 nt, Artificial Sequence
  Description of Artificial Sequence: Synthetic oligonucleotide
  Sense strand starting at position 2166 of SEQ ID NO: 586079
gagaaauccggcgaggcau

SEQ ID NO: 690541 - RNA, 19 nt, Artificial Sequence
  Description of Artificial Sequence: Synthetic oligonucleotide
  Antisense strand to SEQ ID NO: 690540
augccucgccggauuucuc

SEQ ID NO: 690542 - RNA, 19 nt, Artificial Sequence
  Description of Artificial Sequence: Synthetic oligonucleotide
  Sense strand starting at position 2210 of SEQ ID NO: 586079
uuaggaguuagauggucau

SEQ ID NO: 690543 - RNA, 19 nt, Artificial Sequence
  Description of Artificial Sequence: Synthetic oligonucleotide
  Antisense strand to SEQ ID NO: 690542
augaccaucuaacuccuaa

SEQ ID NO: 690544 - RNA, 19 nt, Artificial Sequence
  Description of Artificial Sequence: Synthetic oligonucleotide
  Sense strand starting at position 2213 of SEQ ID NO: 586079
ggaguuagauggucaucga

SEQ ID NO: 690545 - RNA, 19 nt, Artificial Sequence
  Description of Artificial Sequence: Synthetic oligonucleotide
  Antisense strand to SEQ ID NO: 690544
ucgaugaccaucuaacucc

SEQ ID NO: 690546 - RNA, 19 nt, Artificial Sequence
  Description of Artificial Sequence: Synthetic oligonucleotide
  Sense strand starting at position 2214 of SEQ ID NO: 586079
gaguuagauggucaucgag

SEQ ID NO: 690547 - RNA, 19 nt, Artificial Sequence
  Description of Artificial Sequence: Synthetic oligonucleotide
  Antisense strand to SEQ ID NO: 690546
cucgaugaccaucuaacuc

SEQ ID NO: 690548 - RNA, 19 nt, Artificial Sequence
  Description of Artificial Sequence: Synthetic oligonucleotide
  Sense strand starting at position 2313 of SEQ ID NO: 586079
cagguuuauuuacaggaaa

SEQ ID NO: 690549 - RNA, 19 nt, Artificial Sequence
  Description of Artificial Sequence: Synthetic oligonucleotide
  Antisense strand to SEQ ID NO: 690548
uuuccuguaaauaaaccug

SEQ ID NO: 690550 - RNA, 19 nt, Artificial Sequence
  Description of Artificial Sequence: Synthetic oligonucleotide
  Sense strand starting at position 2351 of SEQ ID NO: 586079
uuaggaaucuggcugagau

SEQ ID NO: 690551 - RNA, 19 nt, Artificial Sequence
  Description of Artificial Sequence: Synthetic oligonucleotide
  Antisense strand to SEQ ID NO: 690550
aucucagccagauuccuaa

SEQ ID NO: 690552 - RNA, 19 nt, Artificial Sequence
  Description of Artificial Sequence: Synthetic oligonucleotide
  Sense strand starting at position 2352 of SEQ ID NO: 586079
uaggaaucuggcugagauc

SEQ ID NO: 690553 - RNA, 19 nt, Artificial Sequence
  Description of Artificial Sequence: Synthetic oligonucleotide
  Antisense strand to SEQ ID NO: 690552
gaucucagccagauuccua

SEQ ID NO: 690554 - RNA, 19 nt, Artificial Sequence
  Description of Artificial Sequence: Synthetic oligonucleotide
  Sense strand starting at position 2505 of SEQ ID NO: 586079
cgguuagagcuguuaugcu

SEQ ID NO: 690555 - RNA, 19 nt, Artificial Sequence
  Description of Artificial Sequence: Synthetic oligonucleotide
  Antisense strand to SEQ ID NO: 690554
agcauaacagcucuaaccg

SEQ ID NO: 690556 - RNA, 19 nt, Artificial Sequence
  Description of Artificial Sequence: Synthetic oligonucleotide
  Sense strand starting at position 2543 of SEQ ID NO: 586079
gguugacauuugcuuuguu

SEQ ID NO: 690557 - RNA, 19 nt, Artificial Sequence
  Description of Artificial Sequence: Synthetic oligonucleotide
  Antisense strand to SEQ ID NO: 690556
aacaaagcaaaugucaacc

SEQ ID NO: 690558 - RNA, 19 nt, Artificial Sequence
  Description of Artificial Sequence: Synthetic oligonucleotide
  Sense strand starting at position 2544 of SEQ ID NO: 586079
guugacauuugcuuuguuu

SEQ ID NO: 690559 - RNA, 19 nt, Artificial Sequence
  Description of Artificial Sequence: Synthetic oligonucleotide
  Antisense strand to SEQ ID NO: 690558
aaacaaagcaaaugucaac

SEQ ID NO: 690560 - RNA, 19 nt, Artificial Sequence
  Description of Artificial Sequence: Synthetic oligonucleotide
  Sense strand starting at position 2567 of SEQ ID NO: 586079
agaacacagucaucaaggu

SEQ ID NO: 690561 - RNA, 19 nt, Artificial Sequence
  Description of Artificial Sequence: Synthetic oligonucleotide
  Antisense strand to SEQ ID NO: 690560
accuugaugacuguguucu

SEQ ID NO: 690562 - RNA, 19 nt, Artificial Sequence
  Description of Artificial Sequence: Synthetic oligonucleotide
  Sense strand starting at position 2603 of SEQ ID NO: 586079
auuguuaguccucacagaa

SEQ ID NO: 690563 - RNA, 19 nt, Artificial Sequence
  Description of Artificial Sequence: Synthetic oligonucleotide
  Antisense strand to SEQ ID NO: 690562
uucugugaggacuaacaau

SEQ ID NO: 690564 - RNA, 19 nt, Artificial Sequence
  Description of Artificial Sequence: Synthetic oligonucleotide
  Sense strand starting at position 2885 of SEQ ID NO: 586079
cuuguaaaucgaugagaau

SEQ ID NO: 690565 - RNA, 19 nt, Artificial Sequence
  Description of Artificial Sequence: Synthetic oligonucleotide
  Antisense strand to SEQ ID NO: 690564
auucucaucgauuuacaag

SEQ ID NO: 690566 - RNA, 19 nt, Artificial Sequence
  Description of Artificial Sequence: Synthetic oligonucleotide
  Sense strand starting at position 2920 of SEQ ID NO: 586079
uaaguacguauguaggaaa

SEQ ID NO: 690567 - RNA, 19 nt, Artificial Sequence
  Description of Artificial Sequence: Synthetic oligonucleotide
  Antisense strand to SEQ ID NO: 690566
uuuccuacauacguacuua

SEQ ID NO: 690568 - RNA, 19 nt, Artificial Sequence
  Description of Artificial Sequence: Synthetic oligonucleotide
  Sense strand starting at position 2931 of SEQ ID NO: 586079
guaggaaauaaauguaugu

SEQ ID NO: 690569 - RNA, 19 nt, Artificial Sequence
  Description of Artificial Sequence: Synthetic oligonucleotide
  Antisense strand to SEQ ID NO: 690568
acauacauuuauuuccuac

SEQ ID NO: 690570 - RNA, 19 nt, Artificial Sequence
  Description of Artificial Sequence: Synthetic oligonucleotide
  Sense strand starting at position 3048 of SEQ ID NO: 586079
gaaauaaauuucugggaga

SEQ ID NO: 690571 - RNA, 19 nt, Artificial Sequence
  Description of Artificial Sequence: Synthetic oligonucleotide
  Antisense strand to SEQ ID NO: 690570
ucucccagaaauuuauuuc

SEQ ID NO: 690572 - RNA, 19 nt, Artificial Sequence
  Description of Artificial Sequence: Synthetic oligonucleotide
  Sense strand starting at position 3049 of SEQ ID NO: 586079
aaauaaauuucugggagag

SEQ ID NO: 690573 - RNA, 19 nt, Artificial Sequence
  Description of Artificial Sequence: Synthetic oligonucleotide
  Antisense strand to SEQ ID NO: 690572
cucucccagaaauuuauuu

SEQ ID NO: 690574 - RNA, 19 nt, Artificial Sequence
  Description of Artificial Sequence: Synthetic oligonucleotide
  Sense strand starting at position 3096 of SEQ ID NO: 586079
ggugaaauccuuugguaca

SEQ ID NO: 690575 - RNA, 19 nt, Artificial Sequence
  Description of Artificial Sequence: Synthetic oligonucleotide
  Antisense strand to SEQ ID NO: 690574
uguaccaaaggauuucacc

SEQ ID NO: 690576 - RNA, 19 nt, Artificial Sequence
  Description of Artificial Sequence: Synthetic oligonucleotide
  Sense strand starting at position 3138 of SEQ ID NO: 586079
augacuggagagugguaua

SEQ ID NO: 690577 - RNA, 19 nt, Artificial Sequence
  Description of Artificial Sequence: Synthetic oligonucleotide
  Antisense strand to SEQ ID NO: 690576
uauaccacucuccagucau

SEQ ID NO: 690578 - RNA, 19 nt, Artificial Sequence
  Description of Artificial Sequence: Synthetic oligonucleotide
  Sense strand starting at position 3208 of SEQ ID NO: 586079
ugagcagucugaucaaauu

SEQ ID NO: 690579 - RNA, 19 nt, Artificial Sequence
  Description of Artificial Sequence: Synthetic oligonucleotide
  Antisense strand to SEQ ID NO: 690578
aauuugaucagacugcuca

SEQ ID NO: 690580 - RNA, 19 nt, Artificial Sequence
  Description of Artificial Sequence: Synthetic oligonucleotide
  Sense strand starting at position 3233 of SEQ ID NO: 586079
uagaaauguuaucuuggca

SEQ ID NO: 690581 - RNA, 19 nt, Artificial Sequence
  Description of Artificial Sequence: Synthetic oligonucleotide
  Antisense strand to SEQ ID NO: 690580
ugccaagauaacauuucua

SEQ ID NO: 690582 - RNA, 19 nt, Artificial Sequence
  Description of Artificial Sequence: Synthetic oligonucleotide
  Sense strand starting at position 3348 of SEQ ID NO: 586079
gaaucaaggcaguagcaau

SEQ ID NO: 690583 - RNA, 19 nt, Artificial Sequence
  Description of Artificial Sequence: Synthetic oligonucleotide
  Antisense strand to SEQ ID NO: 690582
auugcuacugccuugauuc

SEQ ID NO: 690584 - RNA, 19 nt, Artificial Sequence
  Description of Artificial Sequence: Synthetic oligonucleotide
  Sense strand starting at position 3391 of SEQ ID NO: 586079
auguuaagagguugaauug

SEQ ID NO: 690585 - RNA, 19 nt, Artificial Sequence
  Description of Artificial Sequence: Synthetic oligonucleotide
  Antisense strand to SEQ ID NO: 690584
caauucaaccucuuaacau

SEQ ID NO: 690586 - RNA, 19 nt, Artificial Sequence
  Description of Artificial Sequence: Synthetic oligonucleotide
  Sense strand starting at position 3468 of SEQ ID NO: 586079
aagggcuugcuggauauaa

SEQ ID NO: 690587 - RNA, 19 nt, Artificial Sequence
  Description of Artificial Sequence: Synthetic oligonucleotide
  Antisense strand to SEQ ID NO: 690586
uuauauccagcaagcccuu

SEQ ID NO: 690588 - RNA, 19 nt, Artificial Sequence
  Description of Artificial Sequence: Synthetic oligonucleotide
  Sense strand starting at position 3470 of SEQ ID NO: 586079
gggcuugcuggauauaaua

SEQ ID NO: 690589 - RNA, 19 nt, Artificial Sequence
  Description of Artificial Sequence: Synthetic oligonucleotide
  Antisense strand to SEQ ID NO: 690588
uauuauauccagcaagccc

SEQ ID NO: 690590 - RNA, 19 nt, Artificial Sequence
  Description of Artificial Sequence: Synthetic oligonucleotide
  Sense strand starting at position 3653 of SEQ ID NO: 586079
guaauagcucacgccugua

SEQ ID NO: 690591 - RNA, 19 nt, Artificial Sequence
  Description of Artificial Sequence: Synthetic oligonucleotide
  Antisense strand to SEQ ID NO: 690590
uacaggcgugagcuauuac

SEQ ID NO: 690592 - RNA, 19 nt, Artificial Sequence
  Description of Artificial Sequence: Synthetic oligonucleotide
  Sense strand starting at position 349 of SEQ ID NO: 586080
cagugaguggucuaugauu

SEQ ID NO: 690593 - RNA, 19 nt, Artificial Sequence
  Description of Artificial Sequence: Synthetic oligonucleotide
  Antisense strand to SEQ ID NO: 690592
aaucauagaccacucacug

SEQ ID NO: 690594 - RNA, 19 nt, Artificial Sequence
  Description of Artificial Sequence: Synthetic oligonucleotide
  Sense strand starting at position 351 of SEQ ID NO: 586080
gugaguggucuaugauugg

SEQ ID NO: 690595 - RNA, 19 nt, Artificial Sequence
  Description of Artificial Sequence: Synthetic oligonucleotide
  Antisense strand to SEQ ID NO: 690594
ccaaucauagaccacucac

SEQ ID NO: 690596 - RNA, 19 nt, Artificial Sequence
  Description of Artificial Sequence: Synthetic oligonucleotide
  Sense strand starting at position 368 of SEQ ID NO: 586080
ggauccuaguugguacaaa

SEQ ID NO: 690597 - RNA, 19 nt, Artificial Sequence
  Description of Artificial Sequence: Synthetic oligonucleotide
  Antisense strand to SEQ ID NO: 690596
uuuguaccaacuaggaucc

SEQ ID NO: 690598 - RNA, 19 nt, Artificial Sequence
  Description of Artificial Sequence: Synthetic oligonucleotide
  Sense strand starting at position 490 of SEQ ID NO: 586080
ugugguuauguagggaaau

SEQ ID NO: 690599 - RNA, 19 nt, Artificial Sequence
  Description of Artificial Sequence: Synthetic oligonucleotide
  Antisense strand to SEQ ID NO: 690598
auuucccuacauaaccaca

SEQ ID NO: 690600 - RNA, 19 nt, Artificial Sequence
  Description of Artificial Sequence: Synthetic oligonucleotide
  Sense strand starting at position 604 of SEQ ID NO: 586080
uugcauaauguugacuuau

SEQ ID NO: 690601 - RNA, 19 nt, Artificial Sequence
  Description of Artificial Sequence: Synthetic oligonucleotide
  Antisense strand to SEQ ID NO: 690600
auaagucaacauuaugcaa

SEQ ID NO: 690602 - RNA, 19 nt, Artificial Sequence
  Description of Artificial Sequence: Synthetic oligonucleotide
  Sense strand starting at position 606 of SEQ ID NO: 586080
gcauaauguugacuuauua

SEQ ID NO: 690603 - RNA, 19 nt, Artificial Sequence
  Description of Artificial Sequence: Synthetic oligonucleotide
  Antisense strand to SEQ ID NO: 690602
uaauaagucaacauuaugc

SEQ ID NO: 690604 - RNA, 19 nt, Artificial Sequence
  Description of Artificial Sequence: Synthetic oligonucleotide
  Sense strand starting at position 630 of SEQ ID NO: 586080
aaauuacguguauauagga

SEQ ID NO: 690605 - RNA, 19 nt, Artificial Sequence
  Description of Artificial Sequence: Synthetic oligonucleotide
  Antisense strand to SEQ ID NO: 690604
uccuauauacacguaauuu

SEQ ID NO: 690606 - RNA, 19 nt, Artificial Sequence
  Description of Artificial Sequence: Synthetic oligonucleotide
  Sense strand starting at position 1457 of SEQ ID NO: 586080
uugugucugcgcuccuuua

SEQ ID NO: 690607 - RNA, 19 nt, Artificial Sequence
  Description of Artificial Sequence: Synthetic oligonucleotide
  Antisense strand to SEQ ID NO: 690606
uaaaggagcgcagacacaa

SEQ ID NO: 690608 - RNA, 19 nt, Artificial Sequence
  Description of Artificial Sequence: Synthetic oligonucleotide
  Sense strand starting at position 1658 of SEQ ID NO: 586080
ugaaaucuucugggaaccu

SEQ ID NO: 690609 - RNA, 19 nt, Artificial Sequence
  Description of Artificial Sequence: Synthetic oligonucleotide
  Antisense strand to SEQ ID NO: 690608
agguucccagaagauuuca

SEQ ID NO: 690610 - RNA, 19 nt, Artificial Sequence
  Description of Artificial Sequence: Synthetic oligonucleotide
  Sense strand starting at position 1864 of SEQ ID NO: 586080
uggugacucccuuauugca

SEQ ID NO: 690611 - RNA, 19 nt, Artificial Sequence
  Description of Artificial Sequence: Synthetic oligonucleotide
  Antisense strand to SEQ ID NO: 690610
ugcaauaagggagucacca

SEQ ID NO: 690612 - RNA, 19 nt, Artificial Sequence
  Description of Artificial Sequence: Synthetic oligonucleotide
  Sense strand starting at position 1925 of SEQ ID NO: 586080
gagaaauccggcgaggcau

SEQ ID NO: 690613 - RNA, 19 nt, Artificial Sequence
  Description of Artificial Sequence: Synthetic oligonucleotide
  Antisense strand to SEQ ID NO: 690612
augccucgccggauuucuc

SEQ ID NO: 690614 - RNA, 19 nt, Artificial Sequence
  Description of Artificial Sequence: Synthetic oligonucleotide
  Sense strand starting at position 1969 of SEQ ID NO: 586080
uuaggaguuagauggucau

SEQ ID NO: 690615 - RNA, 19 nt, Artificial Sequence
  Description of Artificial Sequence: Synthetic oligonucleotide
  Antisense strand to SEQ ID NO: 690614
augaccaucuaacuccuaa

SEQ ID NO: 690616 - RNA, 19 nt, Artificial Sequence
  Description of Artificial Sequence: Synthetic oligonucleotide
  Sense strand starting at position 1972 of SEQ ID NO: 586080
ggaguuagauggucaucga

SEQ ID NO: 690617 - RNA, 19 nt, Artificial Sequence
  Description of Artificial Sequence: Synthetic oligonucleotide
  Antisense strand to SEQ ID NO: 690616
ucgaugaccaucuaacucc

SEQ ID NO: 690618 - RNA, 19 nt, Artificial Sequence
  Description of Artificial Sequence: Synthetic oligonucleotide
  Sense strand starting at position 1973 of SEQ ID NO: 586080
gaguuagauggucaucgag

SEQ ID NO: 690619 - RNA, 19 nt, Artificial Sequence
  Description of Artificial Sequence: Synthetic oligonucleotide
  Antisense strand to SEQ ID NO: 690618
cucgaugaccaucuaacuc

SEQ ID NO: 690620 - RNA, 19 nt, Artificial Sequence
  Description of Artificial Sequence: Synthetic oligonucleotide
  Sense strand starting at position 1975 of SEQ ID NO: 586080
guuagauggucaucgagac

SEQ ID NO: 690621 - RNA, 19 nt, Artificial Sequence
  Description of Artificial Sequence: Synthetic oligonucleotide
  Antisense strand to SEQ ID NO: 690620
gucucgaugaccaucuaac

SEQ ID NO: 690622 - RNA, 19 nt, Artificial Sequence
  Description of Artificial Sequence: Synthetic oligonucleotide
  Sense strand starting at position 2072 of SEQ ID NO: 586080
cagguuuauuuacaggaaa

SEQ ID NO: 690623 - RNA, 19 nt, Artificial Sequence
  Description of Artificial Sequence: Synthetic oligonucleotide
  Antisense strand to SEQ ID NO: 690622
uuuccuguaaauaaaccug

SEQ ID NO: 690624 - RNA, 19 nt, Artificial Sequence
  Description of Artificial Sequence: Synthetic oligonucleotide
  Sense strand starting at position 2110 of SEQ ID NO: 586080
uuaggaaucuggcugagau

SEQ ID NO: 690625 - RNA, 19 nt, Artificial Sequence
  Description of Artificial Sequence: Synthetic oligonucleotide
  Antisense strand to SEQ ID NO: 690624
aucucagccagauuccuaa

SEQ ID NO: 690626 - RNA, 19 nt, Artificial Sequence
  Description of Artificial Sequence: Synthetic oligonucleotide
  Sense strand starting at position 2111 of SEQ ID NO: 586080
uaggaaucuggcugagauc

SEQ ID NO: 690627 - RNA, 19 nt, Artificial Sequence
  Description of Artificial Sequence: Synthetic oligonucleotide
  Antisense strand to SEQ ID NO: 690626
gaucucagccagauuccua

SEQ ID NO: 690628 - RNA, 19 nt, Artificial Sequence
  Description of Artificial Sequence: Synthetic oligonucleotide
  Sense strand starting at position 2125 of SEQ ID NO: 586080
agauccugaucgcuuacaa

SEQ ID NO: 690629 - RNA, 19 nt, Artificial Sequence
  Description of Artificial Sequence: Synthetic oligonucleotide
  Antisense strand to SEQ ID NO: 690628
uuguaagcgaucaggaucu

SEQ ID NO: 690630 - RNA, 19 nt, Artificial Sequence
  Description of Artificial Sequence: Synthetic oligonucleotide
  Sense strand starting at position 2264 of SEQ ID NO: 586080
cgguuagagcuguuaugcu

SEQ ID NO: 690631 - RNA, 19 nt, Artificial Sequence
  Description of Artificial Sequence: Synthetic oligonucleotide
  Antisense strand to SEQ ID NO: 690630
agcauaacagcucuaaccg

SEQ ID NO: 690632 - RNA, 19 nt, Artificial Sequence
  Description of Artificial Sequence: Synthetic oligonucleotide
  Sense strand starting at position 2302 of SEQ ID NO: 586080
gguugacauuugcuuuguu

SEQ ID NO: 690633 - RNA, 19 nt, Artificial Sequence
  Description of Artificial Sequence: Synthetic oligonucleotide
  Antisense strand to SEQ ID NO: 690632
aacaaagcaaaugucaacc

SEQ ID NO: 690634 - RNA, 19 nt, Artificial Sequence
  Description of Artificial Sequence: Synthetic oligonucleotide
  Sense strand starting at position 2303 of SEQ ID NO: 586080
guugacauuugcuuuguuu

SEQ ID NO: 690635 - RNA, 19 nt, Artificial Sequence
  Description of Artificial Sequence: Synthetic oligonucleotide
  Antisense strand to SEQ ID NO: 690634
aaacaaagcaaaugucaac

SEQ ID NO: 690636 - RNA, 19 nt, Artificial Sequence
  Description of Artificial Sequence: Synthetic oligonucleotide
  Sense strand starting at position 2326 of SEQ ID NO: 586080
agaacacagucaucaaggu

SEQ ID NO: 690637 - RNA, 19 nt, Artificial Sequence
  Description of Artificial Sequence: Synthetic oligonucleotide
  Antisense strand to SEQ ID NO: 690636
accuugaugacuguguucu

SEQ ID NO: 690638 - RNA, 19 nt, Artificial Sequence
  Description of Artificial Sequence: Synthetic oligonucleotide
  Sense strand starting at position 2330 of SEQ ID NO: 586080
cacagucaucaagguugua

SEQ ID NO: 690639 - RNA, 19 nt, Artificial Sequence
  Description of Artificial Sequence: Synthetic oligonucleotide
  Antisense strand to SEQ ID NO: 690638
uacaaccuugaugacugug

SEQ ID NO: 690640 - RNA, 19 nt, Artificial Sequence
  Description of Artificial Sequence: Synthetic oligonucleotide
  Sense strand starting at position 2362 of SEQ ID NO: 586080
auuguuaguccucacagaa

SEQ ID NO: 690641 - RNA, 19 nt, Artificial Sequence
  Description of Artificial Sequence: Synthetic oligonucleotide
  Antisense strand to SEQ ID NO: 690640
uucugugaggacuaacaau

SEQ ID NO: 690642 - RNA, 19 nt, Artificial Sequence
  Description of Artificial Sequence: Synthetic oligonucleotide
  Sense strand starting at position 2604 of SEQ ID NO: 586080
aacagacgugcaugugaaa

SEQ ID NO: 690643 - RNA, 19 nt, Artificial Sequence
  Description of Artificial Sequence: Synthetic oligonucleotide
  Antisense strand to SEQ ID NO: 690642
uuucacaugcacgucuguu

SEQ ID NO: 690644 - RNA, 19 nt, Artificial Sequence
  Description of Artificial Sequence: Synthetic oligonucleotide
  Sense strand starting at position 2644 of SEQ ID NO: 586080
cuuguaaaucgaugagaau

SEQ ID NO: 690645 - RNA, 19 nt, Artificial Sequence
  Description of Artificial Sequence: Synthetic oligonucleotide
  Antisense strand to SEQ ID NO: 690644
auucucaucgauuuacaag

SEQ ID NO: 690646 - RNA, 19 nt, Artificial Sequence
  Description of Artificial Sequence: Synthetic oligonucleotide
  Sense strand starting at position 2679 of SEQ ID NO: 586080
uaaguacguauguaggaaa

SEQ ID NO: 690647 - RNA, 19 nt, Artificial Sequence
  Description of Artificial Sequence: Synthetic oligonucleotide
  Antisense strand to SEQ ID NO: 690646
uuuccuacauacguacuua

SEQ ID NO: 690648 - RNA, 19 nt, Artificial Sequence
  Description of Artificial Sequence: Synthetic oligonucleotide
  Sense strand starting at position 2690 of SEQ ID NO: 586080
guaggaaauaaauguaugu

SEQ ID NO: 690649 - RNA, 19 nt, Artificial Sequence
  Description of Artificial Sequence: Synthetic oligonucleotide
  Antisense strand to SEQ ID NO: 690648
acauacauuuauuuccuac

SEQ ID NO: 690650 - RNA, 19 nt, Artificial Sequence
  Description of Artificial Sequence: Synthetic oligonucleotide
  Sense strand starting at position 2807 of SEQ ID NO: 586080
gaaauaaauuucugggaga

SEQ ID NO: 690651 - RNA, 19 nt, Artificial Sequence
  Description of Artificial Sequence: Synthetic oligonucleotide
  Antisense strand to SEQ ID NO: 690650
ucucccagaaauuuauuuc

SEQ ID NO: 690652 - RNA, 19 nt, Artificial Sequence
  Description of Artificial Sequence: Synthetic oligonucleotide
  Sense strand starting at position 2808 of SEQ ID NO: 586080
aaauaaauuucugggagag

SEQ ID NO: 690653 - RNA, 19 nt, Artificial Sequence
  Description of Artificial Sequence: Synthetic oligonucleotide
  Antisense strand to SEQ ID NO: 690652
cucucccagaaauuuauuu

SEQ ID NO: 690654 - RNA, 19 nt, Artificial Sequence
  Description of Artificial Sequence: Synthetic oligonucleotide
  Sense strand starting at position 2855 of SEQ ID NO: 586080
ggugaaauccuuugguaca

SEQ ID NO: 690655 - RNA, 19 nt, Artificial Sequence
  Description of Artificial Sequence: Synthetic oligonucleotide
  Antisense strand to SEQ ID NO: 690654
uguaccaaaggauuucacc

SEQ ID NO: 690656 - RNA, 19 nt, Artificial Sequence
  Description of Artificial Sequence: Synthetic oligonucleotide
  Sense strand starting at position 2897 of SEQ ID NO: 586080
augacuggagagugguaua

SEQ ID NO: 690657 - RNA, 19 nt, Artificial Sequence
  Description of Artificial Sequence: Synthetic oligonucleotide
  Antisense strand to SEQ ID NO: 690656
uauaccacucuccagucau

SEQ ID NO: 690658 - RNA, 19 nt, Artificial Sequence
  Description of Artificial Sequence: Synthetic oligonucleotide
  Sense strand starting at position 2967 of SEQ ID NO: 586080
ugagcagucugaucaaauu

SEQ ID NO: 690659 - RNA, 19 nt, Artificial Sequence
  Description of Artificial Sequence: Synthetic oligonucleotide
  Antisense strand to SEQ ID NO: 690658
aauuugaucagacugcuca

SEQ ID NO: 690660 - RNA, 19 nt, Artificial Sequence
  Description of Artificial Sequence: Synthetic oligonucleotide
  Sense strand starting at position 2992 of SEQ ID NO: 586080
uagaaauguuaucuuggca

SEQ ID NO: 690661 - RNA, 19 nt, Artificial Sequence
  Description of Artificial Sequence: Synthetic oligonucleotide
  Antisense strand to SEQ ID NO: 690660
ugccaagauaacauuucua

SEQ ID NO: 690662 - RNA, 19 nt, Artificial Sequence
  Description of Artificial Sequence: Synthetic oligonucleotide
  Sense strand starting at position 3107 of SEQ ID NO: 586080
gaaucaaggcaguagcaau

SEQ ID NO: 690663 - RNA, 19 nt, Artificial Sequence
  Description of Artificial Sequence: Synthetic oligonucleotide
  Antisense strand to SEQ ID NO: 690662
auugcuacugccuugauuc

SEQ ID NO: 690664 - RNA, 19 nt, Artificial Sequence
  Description of Artificial Sequence: Synthetic oligonucleotide
  Sense strand starting at position 3150 of SEQ ID NO: 586080
auguuaagagguugaauug

SEQ ID NO: 690665 - RNA, 19 nt, Artificial Sequence
  Description of Artificial Sequence: Synthetic oligonucleotide
  Antisense strand to SEQ ID NO: 690664
caauucaaccucuuaacau

SEQ ID NO: 690666 - RNA, 19 nt, Artificial Sequence
  Description of Artificial Sequence: Synthetic oligonucleotide
  Sense strand starting at position 3227 of SEQ ID NO: 586080
aagggcuugcuggauauaa

SEQ ID NO: 690667 - RNA, 19 nt, Artificial Sequence
  Description of Artificial Sequence: Synthetic oligonucleotide
  Antisense strand to SEQ ID NO: 690666
uuauauccagcaagcccuu

SEQ ID NO: 690668 - RNA, 19 nt, Artificial Sequence
  Description of Artificial Sequence: Synthetic oligonucleotide
  Sense strand starting at position 3229 of SEQ ID NO: 586080
gggcuugcuggauauaaua

SEQ ID NO: 690669 - RNA, 19 nt, Artificial Sequence
  Description of Artificial Sequence: Synthetic oligonucleotide
  Antisense strand to SEQ ID NO: 690668
uauuauauccagcaagccc

SEQ ID NO: 690670 - RNA, 19 nt, Artificial Sequence
  Description of Artificial Sequence: Synthetic oligonucleotide
  Sense strand starting at position 3412 of SEQ ID NO: 586080
guaauagcucacgccugua

SEQ ID NO: 690671 - RNA, 19 nt, Artificial Sequence
  Description of Artificial Sequence: Synthetic oligonucleotide
  Antisense strand to SEQ ID NO: 690670
uacaggcgugagcuauuac

SEQ ID NO: 690672 - RNA, 19 nt, Artificial Sequence
  Description of Artificial Sequence: Synthetic oligonucleotide
  Sense strand starting at position 397 of SEQ ID NO: 586081
gugcuaagagcauaagcuu

SEQ ID NO: 690673 - RNA, 19 nt, Artificial Sequence
  Description of Artificial Sequence: Synthetic oligonucleotide
  Antisense strand to SEQ ID NO: 690672
aagcuuaugcucuuagcac

SEQ ID NO: 690674 - RNA, 19 nt, Artificial Sequence
  Description of Artificial Sequence: Synthetic oligonucleotide
  Sense strand starting at position 575 of SEQ ID NO: 586081
gggauuacgucagccacca

SEQ ID NO: 690675 - RNA, 19 nt, Artificial Sequence
  Description of Artificial Sequence: Synthetic oligonucleotide
  Antisense strand to SEQ ID NO: 690674
ugguggcugacguaauccc

SEQ ID NO: 690676 - RNA, 19 nt, Artificial Sequence
  Description of Artificial Sequence: Synthetic oligonucleotide
  Sense strand starting at position 684 of SEQ ID NO: 586081
auuucuuuaugugaagaag

SEQ ID NO: 690677 - RNA, 19 nt, Artificial Sequence
  Description of Artificial Sequence: Synthetic oligonucleotide
  Antisense strand to SEQ ID NO: 690676
cuucuucacauaaagaaau

SEQ ID NO: 690678 - RNA, 19 nt, Artificial Sequence
  Description of Artificial Sequence: Synthetic oligonucleotide
  Sense strand starting at position 792 of SEQ ID NO: 586081
guuugaacucacuguauaa

SEQ ID NO: 690679 - RNA, 19 nt, Artificial Sequence
  Description of Artificial Sequence: Synthetic oligonucleotide
  Antisense strand to SEQ ID NO: 690678
uuauacagugaguucaaac

SEQ ID NO: 690680 - RNA, 19 nt, Artificial Sequence
  Description of Artificial Sequence: Synthetic oligonucleotide
  Sense strand starting at position 834 of SEQ ID NO: 586081
auggaaauauuguuacugu

SEQ ID NO: 690681 - RNA, 19 nt, Artificial Sequence
  Description of Artificial Sequence: Synthetic oligonucleotide
  Antisense strand to SEQ ID NO: 690680
acaguaacaauauuuccau

SEQ ID NO: 690682 - RNA, 19 nt, Artificial Sequence
  Description of Artificial Sequence: Synthetic oligonucleotide
  Sense strand starting at position 837 of SEQ ID NO: 586081
gaaauauuguuacugucga

SEQ ID NO: 690683 - RNA, 19 nt, Artificial Sequence
  Description of Artificial Sequence: Synthetic oligonucleotide
  Antisense strand to SEQ ID NO: 690682
ucgacaguaacaauauuuc

SEQ ID NO: 690684 - RNA, 19 nt, Artificial Sequence
  Description of Artificial Sequence: Synthetic oligonucleotide
  Sense strand starting at position 842 of SEQ ID NO: 586081
auuguuacugucgacuaaa

SEQ ID NO: 690685 - RNA, 19 nt, Artificial Sequence
  Description of Artificial Sequence: Synthetic oligonucleotide
  Antisense strand to SEQ ID NO: 690684
uuuagucgacaguaacaau

SEQ ID NO: 690686 - RNA, 19 nt, Artificial Sequence
  Description of Artificial Sequence: Synthetic oligonucleotide
  Sense strand starting at position 845 of SEQ ID NO: 586081
guuacugucgacuaaauga

SEQ ID NO: 690687 - RNA, 19 nt, Artificial Sequence
  Description of Artificial Sequence: Synthetic oligonucleotide
  Antisense strand to SEQ ID NO: 690686
ucauuuagucgacaguaac

SEQ ID NO: 690688 - RNA, 19 nt, Artificial Sequence
  Description of Artificial Sequence: Synthetic oligonucleotide
  Sense strand starting at position 974 of SEQ ID NO: 586081
uuccaaguccuggagcuuu

SEQ ID NO: 690689 - RNA, 19 nt, Artificial Sequence
  Description of Artificial Sequence: Synthetic oligonucleotide
  Antisense strand to SEQ ID NO: 690688
aaagcuccaggacuuggaa

SEQ ID NO: 690690 - RNA, 19 nt, Artificial Sequence
  Description of Artificial Sequence: Synthetic oligonucleotide
  Sense strand starting at position 1082 of SEQ ID NO: 586081
acaauuacccacugagguu

SEQ ID NO: 690691 - RNA, 19 nt, Artificial Sequence
  Description of Artificial Sequence: Synthetic oligonucleotide
  Antisense strand to SEQ ID NO: 690690
aaccucaguggguaauugu

SEQ ID NO: 690692 - RNA, 19 nt, Artificial Sequence
  Description of Artificial Sequence: Synthetic oligonucleotide
  Sense strand starting at position 1180 of SEQ ID NO: 586081
ugaggacaauccuaagaag

SEQ ID NO: 690693 - RNA, 19 nt, Artificial Sequence
  Description of Artificial Sequence: Synthetic oligonucleotide
  Antisense strand to SEQ ID NO: 690692
cuucuuaggauuguccuca

SEQ ID NO: 690694 - RNA, 19 nt, Artificial Sequence
  Description of Artificial Sequence: Synthetic oligonucleotide
  Sense strand starting at position 1406 of SEQ ID NO: 586081
acgggcuccucagugauuu

SEQ ID NO: 690695 - RNA, 19 nt, Artificial Sequence
  Description of Artificial Sequence: Synthetic oligonucleotide
  Antisense strand to SEQ ID NO: 690694
aaaucacugaggagcccgu

SEQ ID NO: 690696 - RNA, 19 nt, Artificial Sequence
  Description of Artificial Sequence: Synthetic oligonucleotide
  Sense strand starting at position 1557 of SEQ ID NO: 586081
cagguucuccaucgugaag

SEQ ID NO: 690697 - RNA, 19 nt, Artificial Sequence
  Description of Artificial Sequence: Synthetic oligonucleotide
  Antisense strand to SEQ ID NO: 690696
cuucacgauggagaaccug

SEQ ID NO: 690698 - RNA, 19 nt, Artificial Sequence
  Description of Artificial Sequence: Synthetic oligonucleotide
  Sense strand starting at position 1584 of SEQ ID NO: 586081
agucuuaauuguccuuaac

SEQ ID NO: 690699 - RNA, 19 nt, Artificial Sequence
  Description of Artificial Sequence: Synthetic oligonucleotide
  Antisense strand to SEQ ID NO: 690698
guuaaggacaauuaagacu

SEQ ID NO: 690700 - RNA, 19 nt, Artificial Sequence
  Description of Artificial Sequence: Synthetic oligonucleotide
  Sense strand starting at position 1617 of SEQ ID NO: 586081
guuucuuucccugaguccu

SEQ ID NO: 690701 - RNA, 19 nt, Artificial Sequence
  Description of Artificial Sequence: Synthetic oligonucleotide
  Antisense strand to SEQ ID NO: 690700
aggacucagggaaagaaac

SEQ ID NO: 690702 - RNA, 19 nt, Artificial Sequence
  Description of Artificial Sequence: Synthetic oligonucleotide
  Sense strand starting at position 1722 of SEQ ID NO: 586081
ggaugaccacucuggucua

SEQ ID NO: 690703 - RNA, 19 nt, Artificial Sequence
  Description of Artificial Sequence: Synthetic oligonucleotide
  Antisense strand to SEQ ID NO: 690702
uagaccagaguggucaucc

SEQ ID NO: 690704 - RNA, 19 nt, Artificial Sequence
  Description of Artificial Sequence: Synthetic oligonucleotide
  Sense strand starting at position 2181 of SEQ ID NO: 586081
agcauagaccguuaacuau

SEQ ID NO: 690705 - RNA, 19 nt, Artificial Sequence
  Description of Artificial Sequence: Synthetic oligonucleotide
  Antisense strand to SEQ ID NO: 690704
auaguuaacggucuaugcu

SEQ ID NO: 690706 - RNA, 19 nt, Artificial Sequence
  Description of Artificial Sequence: Synthetic oligonucleotide
  Sense strand starting at position 2344 of SEQ ID NO: 586081
caccguuagccuggaauuu

SEQ ID NO: 690707 - RNA, 19 nt, Artificial Sequence
  Description of Artificial Sequence: Synthetic oligonucleotide
  Antisense strand to SEQ ID NO: 690706
aaauuccaggcuaacggug

SEQ ID NO: 690708 - RNA, 19 nt, Artificial Sequence
  Description of Artificial Sequence: Synthetic oligonucleotide
  Sense strand starting at position 2360 of SEQ ID NO: 586081
uuuguauaucauugugauc

SEQ ID NO: 690709 - RNA, 19 nt, Artificial Sequence
  Description of Artificial Sequence: Synthetic oligonucleotide
  Antisense strand to SEQ ID NO: 690708
gaucacaaugauauacaaa

SEQ ID NO: 690710 - RNA, 19 nt, Artificial Sequence
  Description of Artificial Sequence: Synthetic oligonucleotide
  Sense strand starting at position 2493 of SEQ ID NO: 586081
auuguaugggugcauaaca

SEQ ID NO: 690711 - RNA, 19 nt, Artificial Sequence
  Description of Artificial Sequence: Synthetic oligonucleotide
  Antisense strand to SEQ ID NO: 690710
uguuaugcacccauacaau

SEQ ID NO: 690712 - RNA, 19 nt, Artificial Sequence
  Description of Artificial Sequence: Synthetic oligonucleotide
  Sense strand starting at position 2545 of SEQ ID NO: 586081
uguauucuuuauuuaggca

SEQ ID NO: 690713 - RNA, 19 nt, Artificial Sequence
  Description of Artificial Sequence: Synthetic oligonucleotide
  Antisense strand to SEQ ID NO: 690712
ugccuaaauaaagaauaca

SEQ ID NO: 690714 - RNA, 19 nt, Artificial Sequence
  Description of Artificial Sequence: Synthetic oligonucleotide
  Sense strand starting at position 3109 of SEQ ID NO: 586081
gauggugucacguagauua

SEQ ID NO: 690715 - RNA, 19 nt, Artificial Sequence
  Description of Artificial Sequence: Synthetic oligonucleotide
  Antisense strand to SEQ ID NO: 690714
uaaucuacgugacaccauc

SEQ ID NO: 690716 - RNA, 19 nt, Artificial Sequence
  Description of Artificial Sequence: Synthetic oligonucleotide
  Sense strand starting at position 3111 of SEQ ID NO: 586081
uggugucacguagauuaaa

SEQ ID NO: 690717 - RNA, 19 nt, Artificial Sequence
  Description of Artificial Sequence: Synthetic oligonucleotide
  Antisense strand to SEQ ID NO: 690716
uuuaaucuacgugacacca

SEQ ID NO: 690718 - RNA, 19 nt, Artificial Sequence
  Description of Artificial Sequence: Synthetic oligonucleotide
  Sense strand starting at position 3114 of SEQ ID NO: 586081
ugucacguagauuaaacua

SEQ ID NO: 690719 - RNA, 19 nt, Artificial Sequence
  Description of Artificial Sequence: Synthetic oligonucleotide
  Antisense strand to SEQ ID NO: 690718
uaguuuaaucuacgugaca

SEQ ID NO: 690720 - RNA, 19 nt, Artificial Sequence
  Description of Artificial Sequence: Synthetic oligonucleotide
  Sense strand starting at position 3180 of SEQ ID NO: 586081
guaagaaaguaucuugugu

SEQ ID NO: 690721 - RNA, 19 nt, Artificial Sequence
  Description of Artificial Sequence: Synthetic oligonucleotide
  Antisense strand to SEQ ID NO: 690720
acacaagauacuuucuuac

SEQ ID NO: 690722 - RNA, 19 nt, Artificial Sequence
  Description of Artificial Sequence: Synthetic oligonucleotide
  Sense strand starting at position 3277 of SEQ ID NO: 586081
uagccuucugagggcauua

SEQ ID NO: 690723 - RNA, 19 nt, Artificial Sequence
  Description of Artificial Sequence: Synthetic oligonucleotide
  Antisense strand to SEQ ID NO: 690722
uaaugcccucagaaggcua

SEQ ID NO: 690724 - RNA, 19 nt, Artificial Sequence
  Description of Artificial Sequence: Synthetic oligonucleotide
  Sense strand starting at position 3279 of SEQ ID NO: 586081
gccuucugagggcauuaaa

SEQ ID NO: 690725 - RNA, 19 nt, Artificial Sequence
  Description of Artificial Sequence: Synthetic oligonucleotide
  Antisense strand to SEQ ID NO: 690724
uuuaaugcccucagaaggc

SEQ ID NO: 690726 - RNA, 19 nt, Artificial Sequence
  Description of Artificial Sequence: Synthetic oligonucleotide
  Sense strand starting at position 3496 of SEQ ID NO: 586081
acuugaauagacuguuuaa

SEQ ID NO: 690727 - RNA, 19 nt, Artificial Sequence
  Description of Artificial Sequence: Synthetic oligonucleotide
  Antisense strand to SEQ ID NO: 690726
uuaaacagucuauucaagu

SEQ ID NO: 690728 - RNA, 19 nt, Artificial Sequence
  Description of Artificial Sequence: Synthetic oligonucleotide
  Sense strand starting at position 3537 of SEQ ID NO: 586081
guaugaccaucugugacaa

SEQ ID NO: 690729 - RNA, 19 nt, Artificial Sequence
  Description of Artificial Sequence: Synthetic oligonucleotide
  Antisense strand to SEQ ID NO: 690728
uugucacagauggucauac

SEQ ID NO: 690730 - RNA, 19 nt, Artificial Sequence
  Description of Artificial Sequence: Synthetic oligonucleotide
  Sense strand starting at position 3576 of SEQ ID NO: 586081
guaugaaacuucuuaaaug

SEQ ID NO: 690731 - RNA, 19 nt, Artificial Sequence
  Description of Artificial Sequence: Synthetic oligonucleotide
  Antisense strand to SEQ ID NO: 690730
cauuuaagaaguuucauac

SEQ ID NO: 690732 - RNA, 19 nt, Artificial Sequence
  Description of Artificial Sequence: Synthetic oligonucleotide
  Sense strand starting at position 3613 of SEQ ID NO: 586081
agggucucucacugguuua

SEQ ID NO: 690733 - RNA, 19 nt, Artificial Sequence
  Description of Artificial Sequence: Synthetic oligonucleotide
  Antisense strand to SEQ ID NO: 690732
uaaaccagugagagacccu

SEQ ID NO: 690734 - RNA, 19 nt, Artificial Sequence
  Description of Artificial Sequence: Synthetic oligonucleotide
  Sense strand starting at position 3614 of SEQ ID NO: 586081
gggucucucacugguuuau

SEQ ID NO: 690735 - RNA, 19 nt, Artificial Sequence
  Description of Artificial Sequence: Synthetic oligonucleotide
  Antisense strand to SEQ ID NO: 690734
auaaaccagugagagaccc

SEQ ID NO: 690736 - RNA, 19 nt, Artificial Sequence
  Description of Artificial Sequence: Synthetic oligonucleotide
  Sense strand starting at position 3640 of SEQ ID NO: 586081
ugcuaagugggucaacuau

SEQ ID NO: 690737 - RNA, 19 nt, Artificial Sequence
  Description of Artificial Sequence: Synthetic oligonucleotide
  Antisense strand to SEQ ID NO: 690736
auaguugacccacuuagca

SEQ ID NO: 690738 - RNA, 19 nt, Artificial Sequence
  Description of Artificial Sequence: Synthetic oligonucleotide
  Sense strand starting at position 3713 of SEQ ID NO: 586081
aaugguuagcccugagaga

SEQ ID NO: 690739 - RNA, 19 nt, Artificial Sequence
  Description of Artificial Sequence: Synthetic oligonucleotide
  Antisense strand to SEQ ID NO: 690738
ucucucagggcuaaccauu

SEQ ID NO: 690740 - RNA, 19 nt, Artificial Sequence
  Description of Artificial Sequence: Synthetic oligonucleotide
  Sense strand starting at position 3747 of SEQ ID NO: 586081
gucuguuuccgggaagauu

SEQ ID NO: 690741 - RNA, 19 nt, Artificial Sequence
  Description of Artificial Sequence: Synthetic oligonucleotide
  Antisense strand to SEQ ID NO: 690740
aaucuucccggaaacagac

SEQ ID NO: 690742 - RNA, 19 nt, Artificial Sequence
  Description of Artificial Sequence: Synthetic oligonucleotide
  Sense strand starting at position 3777 of SEQ ID NO: 586081
guacuuugaugaguauccu

SEQ ID NO: 690743 - RNA, 19 nt, Artificial Sequence
  Description of Artificial Sequence: Synthetic oligonucleotide
  Antisense strand to SEQ ID NO: 690742
aggauacucaucaaaguac

SEQ ID NO: 690744 - RNA, 19 nt, Artificial Sequence
  Description of Artificial Sequence: Synthetic oligonucleotide
  Sense strand starting at position 3829 of SEQ ID NO: 586081
ggaauccguacugaauauu

SEQ ID NO: 690745 - RNA, 19 nt, Artificial Sequence
  Description of Artificial Sequence: Synthetic oligonucleotide
  Antisense strand to SEQ ID NO: 690744
aauauucaguacggauucc

SEQ ID NO: 690746 - RNA, 19 nt, Artificial Sequence
  Description of Artificial Sequence: Synthetic oligonucleotide
  Sense strand starting at position 3832 of SEQ ID NO: 586081
auccguacugaauauugaa

SEQ ID NO: 690747 - RNA, 19 nt, Artificial Sequence
  Description of Artificial Sequence: Synthetic oligonucleotide
  Antisense strand to SEQ ID NO: 690746
uucaauauucaguacggau

SEQ ID NO: 690748 - RNA, 19 nt, Artificial Sequence
  Description of Artificial Sequence: Synthetic oligonucleotide
  Sense strand starting at position 3904 of SEQ ID NO: 586081
gguuaaggauuaccugaau

SEQ ID NO: 690749 - RNA, 19 nt, Artificial Sequence
  Description of Artificial Sequence: Synthetic oligonucleotide
  Antisense strand to SEQ ID NO: 690748
auucagguaauccuuaacc

SEQ ID NO: 690750 - RNA, 19 nt, Artificial Sequence
  Description of Artificial Sequence: Synthetic oligonucleotide
  Sense strand starting at position 3958 of SEQ ID NO: 586081
uggguuaugccauaagcua

SEQ ID NO: 690751 - RNA, 19 nt, Artificial Sequence
  Description of Artificial Sequence: Synthetic oligonucleotide
  Antisense strand to SEQ ID NO: 690750
uagcuuauggcauaaccca

SEQ ID NO: 690752 - RNA, 19 nt, Artificial Sequence
  Description of Artificial Sequence: Synthetic oligonucleotide
  Sense strand starting at position 9 of SEQ ID NO: 586082
ucaguuaaguucucugaau

SEQ ID NO: 690753 - RNA, 19 nt, Artificial Sequence
  Description of Artificial Sequence: Synthetic oligonucleotide
  Antisense strand to SEQ ID NO: 690752
auucagagaacuuaacuga

SEQ ID NO: 690754 - RNA, 19 nt, Artificial Sequence
  Description of Artificial Sequence: Synthetic oligonucleotide
  Sense strand starting at position 11 of SEQ ID NO: 586082
aguuaaguucucugaauag

SEQ ID NO: 690755 - RNA, 19 nt, Artificial Sequence
  Description of Artificial Sequence: Synthetic oligonucleotide
  Antisense strand to SEQ ID NO: 690754
cuauucagagaacuuaacu

SEQ ID NO: 690756 - RNA, 19 nt, Artificial Sequence
  Description of Artificial Sequence: Synthetic oligonucleotide
  Sense strand starting at position 150 of SEQ ID NO: 586082
ucuuucuuguuaucugaag

SEQ ID NO: 690757 - RNA, 19 nt, Artificial Sequence
  Description of Artificial Sequence: Synthetic oligonucleotide
  Antisense strand to SEQ ID NO: 690756
cuucagauaacaagaaaga

SEQ ID NO: 690758 - RNA, 19 nt, Artificial Sequence
  Description of Artificial Sequence: Synthetic oligonucleotide
  Sense strand starting at position 162 of SEQ ID NO: 586082
ucugaaguuccauauugua

SEQ ID NO: 690759 - RNA, 19 nt, Artificial Sequence
  Description of Artificial Sequence: Synthetic oligonucleotide
  Antisense strand to SEQ ID NO: 690758
uacaauauggaacuucaga

SEQ ID NO: 690760 - RNA, 19 nt, Artificial Sequence
  Description of Artificial Sequence: Synthetic oligonucleotide
  Sense strand starting at position 312 of SEQ ID NO: 586082
ugaacaauuaggugagcuu

SEQ ID NO: 690761 - RNA, 19 nt, Artificial Sequence
  Description of Artificial Sequence: Synthetic oligonucleotide
  Antisense strand to SEQ ID NO: 690760
aagcucaccuaauuguuca

SEQ ID NO: 690762 - RNA, 19 nt, Artificial Sequence
  Description of Artificial Sequence: Synthetic oligonucleotide
  Sense strand starting at position 313 of SEQ ID NO: 586082
gaacaauuaggugagcuuu

SEQ ID NO: 690763 - RNA, 19 nt, Artificial Sequence
  Description of Artificial Sequence: Synthetic oligonucleotide
  Antisense strand to SEQ ID NO: 690762
aaagcucaccuaauuguuc

SEQ ID NO: 690764 - RNA, 19 nt, Artificial Sequence
  Description of Artificial Sequence: Synthetic oligonucleotide
  Sense strand starting at position 386 of SEQ ID NO: 586082
auugacaaguagcuagaaa

SEQ ID NO: 690765 - RNA, 19 nt, Artificial Sequence
  Description of Artificial Sequence: Synthetic oligonucleotide
  Antisense strand to SEQ ID NO: 690764
uuucuagcuacuugucaau

SEQ ID NO: 690766 - RNA, 19 nt, Artificial Sequence
  Description of Artificial Sequence: Synthetic oligonucleotide
  Sense strand starting at position 464 of SEQ ID NO: 586082
agacaauuacuuggucuuu

SEQ ID NO: 690767 - RNA, 19 nt, Artificial Sequence
  Description of Artificial Sequence: Synthetic oligonucleotide
  Antisense strand to SEQ ID NO: 690766
aaagaccaaguaauugucu

SEQ ID NO: 690768 - RNA, 19 nt, Artificial Sequence
  Description of Artificial Sequence: Synthetic oligonucleotide
  Sense strand starting at position 478 of SEQ ID NO: 586082
ucuuuaacgcuggauuauu

SEQ ID NO: 690769 - RNA, 19 nt, Artificial Sequence
  Description of Artificial Sequence: Synthetic oligonucleotide
  Antisense strand to SEQ ID NO: 690768
aauaauccagcguuaaaga

SEQ ID NO: 690770 - RNA, 19 nt, Artificial Sequence
  Description of Artificial Sequence: Synthetic oligonucleotide
  Sense strand starting at position 516 of SEQ ID NO: 586082
uguacuuacuguuccucaa

SEQ ID NO: 690771 - RNA, 19 nt, Artificial Sequence
  Description of Artificial Sequence: Synthetic oligonucleotide
  Antisense strand to SEQ ID NO: 690770
uugaggaacaguaaguaca

SEQ ID NO: 690772 - RNA, 19 nt, Artificial Sequence
  Description of Artificial Sequence: Synthetic oligonucleotide
  Sense strand starting at position 801 of SEQ ID NO: 586082
aucuuacaaguagaguuua

SEQ ID NO: 690773 - RNA, 19 nt, Artificial Sequence
  Description of Artificial Sequence: Synthetic oligonucleotide
  Antisense strand to SEQ ID NO: 690772
uaaacucuacuuguaagau

SEQ ID NO: 690774 - RNA, 19 nt, Artificial Sequence
  Description of Artificial Sequence: Synthetic oligonucleotide
  Sense strand starting at position 812 of SEQ ID NO: 586082
agaguuuaacacuguaaac

SEQ ID NO: 690775 - RNA, 19 nt, Artificial Sequence
  Description of Artificial Sequence: Synthetic oligonucleotide
  Antisense strand to SEQ ID NO: 690774
guuuacaguguuaaacucu

SEQ ID NO: 690776 - RNA, 19 nt, Artificial Sequence
  Description of Artificial Sequence: Synthetic oligonucleotide
  Sense strand starting at position 814 of SEQ ID NO: 586082
aguuuaacacuguaaacuu

SEQ ID NO: 690777 - RNA, 19 nt, Artificial Sequence
  Description of Artificial Sequence: Synthetic oligonucleotide
  Antisense strand to SEQ ID NO: 690776
aaguuuacaguguuaaacu

SEQ ID NO: 690778 - RNA, 19 nt, Artificial Sequence
  Description of Artificial Sequence: Synthetic oligonucleotide
  Sense strand starting at position 851 of SEQ ID NO: 586082
agugcuauuuaagugcuau

SEQ ID NO: 690779 - RNA, 19 nt, Artificial Sequence
  Description of Artificial Sequence: Synthetic oligonucleotide
  Antisense strand to SEQ ID NO: 690778
auagcacuuaaauagcacu

SEQ ID NO: 690780 - RNA, 19 nt, Artificial Sequence
  Description of Artificial Sequence: Synthetic oligonucleotide
  Sense strand starting at position 1014 of SEQ ID NO: 586082
gcagaagugguauaguaga

SEQ ID NO: 690781 - RNA, 19 nt, Artificial Sequence
  Description of Artificial Sequence: Synthetic oligonucleotide
  Antisense strand to SEQ ID NO: 690780
ucuacuauaccacuucugc

SEQ ID NO: 690782 - RNA, 19 nt, Artificial Sequence
  Description of Artificial Sequence: Synthetic oligonucleotide
  Sense strand starting at position 1038 of SEQ ID NO: 586082
gcacuuauuccagagucaa

SEQ ID NO: 690783 - RNA, 19 nt, Artificial Sequence
  Description of Artificial Sequence: Synthetic oligonucleotide
  Antisense strand to SEQ ID NO: 690782
uugacucuggaauaagugc

SEQ ID NO: 690784 - RNA, 19 nt, Artificial Sequence
  Description of Artificial Sequence: Synthetic oligonucleotide
  Sense strand starting at position 1100 of SEQ ID NO: 586082
aucucaucucucugagguu

SEQ ID NO: 690785 - RNA, 19 nt, Artificial Sequence
  Description of Artificial Sequence: Synthetic oligonucleotide
  Antisense strand to SEQ ID NO: 690784
aaccucagagagaugagau

SEQ ID NO: 690786 - RNA, 19 nt, Artificial Sequence
  Description of Artificial Sequence: Synthetic oligonucleotide
  Sense strand starting at position 1519 of SEQ ID NO: 586082
ucagauuaagcggguaaga

SEQ ID NO: 690787 - RNA, 19 nt, Artificial Sequence
  Description of Artificial Sequence: Synthetic oligonucleotide
  Antisense strand to SEQ ID NO: 690786
ucuuacccgcuuaaucuga

SEQ ID NO: 690788 - RNA, 19 nt, Artificial Sequence
  Description of Artificial Sequence: Synthetic oligonucleotide
  Sense strand starting at position 1985 of SEQ ID NO: 586082
gaaguaaucccagaaugcg

SEQ ID NO: 690789 - RNA, 19 nt, Artificial Sequence
  Description of Artificial Sequence: Synthetic oligonucleotide
  Antisense strand to SEQ ID NO: 690788
cgcauucugggauuacuuc

SEQ ID NO: 690790 - RNA, 19 nt, Artificial Sequence
  Description of Artificial Sequence: Synthetic oligonucleotide
  Sense strand starting at position 2270 of SEQ ID NO: 586082
ucucgaucuccugagagau

SEQ ID NO: 690791 - RNA, 19 nt, Artificial Sequence
  Description of Artificial Sequence: Synthetic oligonucleotide
  Antisense strand to SEQ ID NO: 690790
aucucucaggagaucgaga

SEQ ID NO: 690792 - RNA, 19 nt, Artificial Sequence
  Description of Artificial Sequence: Synthetic oligonucleotide
  Sense strand starting at position 2278 of SEQ ID NO: 586082
uccugagagauguagucau

SEQ ID NO: 690793 - RNA, 19 nt, Artificial Sequence
  Description of Artificial Sequence: Synthetic oligonucleotide
  Antisense strand to SEQ ID NO: 690792
augacuacaucucucagga

SEQ ID NO: 690794 - RNA, 19 nt, Artificial Sequence
  Description of Artificial Sequence: Synthetic oligonucleotide
  Sense strand starting at position 2350 of SEQ ID NO: 586082
acucaauugcuaggagaga

SEQ ID NO: 690795 - RNA, 19 nt, Artificial Sequence
  Description of Artificial Sequence: Synthetic oligonucleotide
  Antisense strand to SEQ ID NO: 690794
ucucuccuagcaauugagu

SEQ ID NO: 690796 - RNA, 19 nt, Artificial Sequence
  Description of Artificial Sequence: Synthetic oligonucleotide
  Sense strand starting at position 2374 of SEQ ID NO: 586082
gggcucugaggucauucau

SEQ ID NO: 690797 - RNA, 19 nt, Artificial Sequence
  Description of Artificial Sequence: Synthetic oligonucleotide
  Antisense strand to SEQ ID NO: 690796
augaaugaccucagagccc

SEQ ID NO: 690798 - RNA, 19 nt, Artificial Sequence
  Description of Artificial Sequence: Synthetic oligonucleotide
  Sense strand starting at position 2393 of SEQ ID NO: 586082
acuuaaucugaaugaguuc

SEQ ID NO: 690799 - RNA, 19 nt, Artificial Sequence
  Description of Artificial Sequence: Synthetic oligonucleotide
  Antisense strand to SEQ ID NO: 690798
gaacucauucagauuaagu

SEQ ID NO: 690800 - RNA, 19 nt, Artificial Sequence
  Description of Artificial Sequence: Synthetic oligonucleotide
  Sense strand starting at position 2494 of SEQ ID NO: 586082
uaaugcugcuagguaucaa

SEQ ID NO: 690801 - RNA, 19 nt, Artificial Sequence
  Description of Artificial Sequence: Synthetic oligonucleotide
  Antisense strand to SEQ ID NO: 690800
uugauaccuagcagcauua

SEQ ID NO: 690802 - RNA, 19 nt, Artificial Sequence
  Description of Artificial Sequence: Synthetic oligonucleotide
  Sense strand starting at position 2545 of SEQ ID NO: 586082
cagguucuuuccucaaggu

SEQ ID NO: 690803 - RNA, 19 nt, Artificial Sequence
  Description of Artificial Sequence: Synthetic oligonucleotide
  Antisense strand to SEQ ID NO: 690802
accuugaggaaagaaccug

SEQ ID NO: 690804 - RNA, 19 nt, Artificial Sequence
  Description of Artificial Sequence: Synthetic oligonucleotide
  Sense strand starting at position 2546 of SEQ ID NO: 586082
agguucuuuccucaagguu

SEQ ID NO: 690805 - RNA, 19 nt, Artificial Sequence
  Description of Artificial Sequence: Synthetic oligonucleotide
  Antisense strand to SEQ ID NO: 690804
aaccuugaggaaagaaccu

SEQ ID NO: 690806 - RNA, 19 nt, Artificial Sequence
  Description of Artificial Sequence: Synthetic oligonucleotide
  Sense strand starting at position 2573 of SEQ ID NO: 586082
acaaauaucuugguuugua

SEQ ID NO: 690807 - RNA, 19 nt, Artificial Sequence
  Description of Artificial Sequence: Synthetic oligonucleotide
  Antisense strand to SEQ ID NO: 690806
uacaaaccaagauauuugu

SEQ ID NO: 690808 - RNA, 19 nt, Artificial Sequence
  Description of Artificial Sequence: Synthetic oligonucleotide
  Sense strand starting at position 2926 of SEQ ID NO: 586082
ggaggacucuuucugucac

SEQ ID NO: 690809 - RNA, 19 nt, Artificial Sequence
  Description of Artificial Sequence: Synthetic oligonucleotide
  Antisense strand to SEQ ID NO: 690808
gugacagaaagaguccucc

SEQ ID NO: 690810 - RNA, 19 nt, Artificial Sequence
  Description of Artificial Sequence: Synthetic oligonucleotide
  Sense strand starting at position 3100 of SEQ ID NO: 586082
uuuaaagagugucuauuag

SEQ ID NO: 690811 - RNA, 19 nt, Artificial Sequence
  Description of Artificial Sequence: Synthetic oligonucleotide
  Antisense strand to SEQ ID NO: 690810
cuaauagacacucuuuaaa

SEQ ID NO: 690812 - RNA, 19 nt, Artificial Sequence
  Description of Artificial Sequence: Synthetic oligonucleotide
  Sense strand starting at position 3229 of SEQ ID NO: 586082
ugaucaugauaagugcuau

SEQ ID NO: 690813 - RNA, 19 nt, Artificial Sequence
  Description of Artificial Sequence: Synthetic oligonucleotide
  Antisense strand to SEQ ID NO: 690812
auagcacuuaucaugauca

SEQ ID NO: 690814 - RNA, 19 nt, Artificial Sequence
  Description of Artificial Sequence: Synthetic oligonucleotide
  Sense strand starting at position 3273 of SEQ ID NO: 586082
ggcucaguggcucacauau

SEQ ID NO: 690815 - RNA, 19 nt, Artificial Sequence
  Description of Artificial Sequence: Synthetic oligonucleotide
  Antisense strand to SEQ ID NO: 690814
auaugugagccacugagcc

SEQ ID NO: 690816 - RNA, 19 nt, Artificial Sequence
  Description of Artificial Sequence: Synthetic oligonucleotide
  Sense strand starting at position 3610 of SEQ ID NO: 586082
uagagauacgaauguuuag

SEQ ID NO: 690817 - RNA, 19 nt, Artificial Sequence
  Description of Artificial Sequence: Synthetic oligonucleotide
  Antisense strand to SEQ ID NO: 690816
cuaaacauucguaucucua

SEQ ID NO: 690818 - RNA, 19 nt, Artificial Sequence
  Description of Artificial Sequence: Synthetic oligonucleotide
  Sense strand starting at position 3633 of SEQ ID NO: 586082
ggucuugaugaaggguuga

SEQ ID NO: 690819 - RNA, 19 nt, Artificial Sequence
  Description of Artificial Sequence: Synthetic oligonucleotide
  Antisense strand to SEQ ID NO: 690818
ucaacccuucaucaagacc

SEQ ID NO: 690820 - RNA, 19 nt, Artificial Sequence
  Description of Artificial Sequence: Synthetic oligonucleotide
  Sense strand starting at position 3650 of SEQ ID NO: 586082
gagugugcugaugaacaaa

SEQ ID NO: 690821 - RNA, 19 nt, Artificial Sequence
  Description of Artificial Sequence: Synthetic oligonucleotide
  Antisense strand to SEQ ID NO: 690820
uuuguucaucagcacacuc

SEQ ID NO: 690822 - RNA, 19 nt, Artificial Sequence
  Description of Artificial Sequence: Synthetic oligonucleotide
  Sense strand starting at position 3825 of SEQ ID NO: 586082
ucauguaggaccugguaga

SEQ ID NO: 690823 - RNA, 19 nt, Artificial Sequence
  Description of Artificial Sequence: Synthetic oligonucleotide
  Antisense strand to SEQ ID NO: 690822
ucuaccagguccuacauga

SEQ ID NO: 690824 - RNA, 19 nt, Artificial Sequence
  Description of Artificial Sequence: Synthetic oligonucleotide
  Sense strand starting at position 3826 of SEQ ID NO: 586082
cauguaggaccugguagaa

SEQ ID NO: 690825 - RNA, 19 nt, Artificial Sequence
  Description of Artificial Sequence: Synthetic oligonucleotide
  Antisense strand to SEQ ID NO: 690824
uucuaccagguccuacaug

SEQ ID NO: 690826 - RNA, 19 nt, Artificial Sequence
  Description of Artificial Sequence: Synthetic oligonucleotide
  Sense strand starting at position 3860 of SEQ ID NO: 586082
uaaauaggagggugauguu

SEQ ID NO: 690827 - RNA, 19 nt, Artificial Sequence
  Description of Artificial Sequence: Synthetic oligonucleotide
  Antisense strand to SEQ ID NO: 690826
aacaucacccuccuauuua

SEQ ID NO: 690828 - RNA, 19 nt, Artificial Sequence
  Description of Artificial Sequence: Synthetic oligonucleotide
  Sense strand starting at position 3869 of SEQ ID NO: 586082
gggugauguuaucugauga

SEQ ID NO: 690829 - RNA, 19 nt, Artificial Sequence
  Description of Artificial Sequence: Synthetic oligonucleotide
  Antisense strand to SEQ ID NO: 690828
ucaucagauaacaucaccc

SEQ ID NO: 690830 - RNA, 19 nt, Artificial Sequence
  Description of Artificial Sequence: Synthetic oligonucleotide
  Sense strand starting at position 3870 of SEQ ID NO: 586082
ggugauguuaucugaugau

SEQ ID NO: 690831 - RNA, 19 nt, Artificial Sequence
  Description of Artificial Sequence: Synthetic oligonucleotide
  Antisense strand to SEQ ID NO: 690830
aucaucagauaacaucacc

SEQ ID NO: 690832 - RNA, 19 nt, Artificial Sequence
  Description of Artificial Sequence: Synthetic oligonucleotide
  Sense strand starting at position 109 of SEQ ID NO: 586083
ucacgauggcuccauauua

SEQ ID NO: 690833 - RNA, 19 nt, Artificial Sequence
  Description of Artificial Sequence: Synthetic oligonucleotide
  Antisense strand to SEQ ID NO: 690832
uaauauggagccaucguga

SEQ ID NO: 690834 - RNA, 19 nt, Artificial Sequence
  Description of Artificial Sequence: Synthetic oligonucleotide
  Sense strand starting at position 290 of SEQ ID NO: 586083
gugaaauagggaugcaucu

SEQ ID NO: 690835 - RNA, 19 nt, Artificial Sequence
  Description of Artificial Sequence: Synthetic oligonucleotide
  Antisense strand to SEQ ID NO: 690834
agaugcaucccuauuucac

SEQ ID NO: 690836 - RNA, 19 nt, Artificial Sequence
  Description of Artificial Sequence: Synthetic oligonucleotide
  Sense strand starting at position 327 of SEQ ID NO: 586083
agaucagaugaauguggua

SEQ ID NO: 690837 - RNA, 19 nt, Artificial Sequence
  Description of Artificial Sequence: Synthetic oligonucleotide
  Antisense strand to SEQ ID NO: 690836
uaccacauucaucugaucu

SEQ ID NO: 690838 - RNA, 19 nt, Artificial Sequence
  Description of Artificial Sequence: Synthetic oligonucleotide
  Sense strand starting at position 329 of SEQ ID NO: 586083
aucagaugaaugugguaau

SEQ ID NO: 690839 - RNA, 19 nt, Artificial Sequence
  Description of Artificial Sequence: Synthetic oligonucleotide
  Antisense strand to SEQ ID NO: 690838
auuaccacauucaucugau

SEQ ID NO: 690840 - RNA, 19 nt, Artificial Sequence
  Description of Artificial Sequence: Synthetic oligonucleotide
  Sense strand starting at position 512 of SEQ ID NO: 586083
aaugguggcuucuuaaaca

SEQ ID NO: 690841 - RNA, 19 nt, Artificial Sequence
  Description of Artificial Sequence: Synthetic oligonucleotide
  Antisense strand to SEQ ID NO: 690840
uguuuaagaagccaccauu

SEQ ID NO: 690842 - RNA, 19 nt, Artificial Sequence
  Description of Artificial Sequence: Synthetic oligonucleotide
  Sense strand starting at position 553 of SEQ ID NO: 586083
cgaaccaaggucuguuaaa

SEQ ID NO: 690843 - RNA, 19 nt, Artificial Sequence
  Description of Artificial Sequence: Synthetic oligonucleotide
  Antisense strand to SEQ ID NO: 690842
uuuaacagaccuugguucg

SEQ ID NO: 690844 - RNA, 19 nt, Artificial Sequence
  Description of Artificial Sequence: Synthetic oligonucleotide
  Sense strand starting at position 554 of SEQ ID NO: 586083
gaaccaaggucuguuaaac

SEQ ID NO: 690845 - RNA, 19 nt, Artificial Sequence
  Description of Artificial Sequence: Synthetic oligonucleotide
  Antisense strand to SEQ ID NO: 690844
guuuaacagaccuugguuc

SEQ ID NO: 690846 - RNA, 19 nt, Artificial Sequence
  Description of Artificial Sequence: Synthetic oligonucleotide
  Sense strand starting at position 616 of SEQ ID NO: 586083
ugaucacgccaucaucaau

SEQ ID NO: 690847 - RNA, 19 nt, Artificial Sequence
  Description of Artificial Sequence: Synthetic oligonucleotide
  Antisense strand to SEQ ID NO: 690846
auugaugauggcgugauca

SEQ ID NO: 690848 - RNA, 19 nt, Artificial Sequence
  Description of Artificial Sequence: Synthetic oligonucleotide
  Sense strand starting at position 921 of SEQ ID NO: 586083
uguguauaacuacaucuca

SEQ ID NO: 690849 - RNA, 19 nt, Artificial Sequence
  Description of Artificial Sequence: Synthetic oligonucleotide
  Antisense strand to SEQ ID NO: 690848
ugagauguaguuauacaca

SEQ ID NO: 690850 - RNA, 19 nt, Artificial Sequence
  Description of Artificial Sequence: Synthetic oligonucleotide
  Sense strand starting at position 1075 of SEQ ID NO: 586083
cccugaaaucaaugucuga

SEQ ID NO: 690851 - RNA, 19 nt, Artificial Sequence
  Description of Artificial Sequence: Synthetic oligonucleotide
  Antisense strand to SEQ ID NO: 690850
ucagacauugauuucaggg

SEQ ID NO: 690852 - RNA, 19 nt, Artificial Sequence
  Description of Artificial Sequence: Synthetic oligonucleotide
  Sense strand starting at position 1348 of SEQ ID NO: 586083
gaaguuugugaucaguuug

SEQ ID NO: 690853 - RNA, 19 nt, Artificial Sequence
  Description of Artificial Sequence: Synthetic oligonucleotide
  Antisense strand to SEQ ID NO: 690852
caaacugaucacaaacuuc

SEQ ID NO: 690854 - RNA, 19 nt, Artificial Sequence
  Description of Artificial Sequence: Synthetic oligonucleotide
  Sense strand starting at position 2178 of SEQ ID NO: 586083
cgaguucucccaggauaau

SEQ ID NO: 690855 - RNA, 19 nt, Artificial Sequence
  Description of Artificial Sequence: Synthetic oligonucleotide
  Antisense strand to SEQ ID NO: 690854
auuauccugggagaacucg

SEQ ID NO: 690856 - RNA, 19 nt, Artificial Sequence
  Description of Artificial Sequence: Synthetic oligonucleotide
  Sense strand starting at position 2187 of SEQ ID NO: 586083
ccaggauaauuaucgacca

SEQ ID NO: 690857 - RNA, 19 nt, Artificial Sequence
  Description of Artificial Sequence: Synthetic oligonucleotide
  Antisense strand to SEQ ID NO: 690856
uggucgauaauuauccugg

SEQ ID NO: 690858 - RNA, 19 nt, Artificial Sequence
  Description of Artificial Sequence: Synthetic oligonucleotide
  Sense strand starting at position 2192 of SEQ ID NO: 586083
auaauuaucgaccagguuu

SEQ ID NO: 690859 - RNA, 19 nt, Artificial Sequence
  Description of Artificial Sequence: Synthetic oligonucleotide
  Antisense strand to SEQ ID NO: 690858
aaaccuggucgauaauuau

SEQ ID NO: 690860 - RNA, 19 nt, Artificial Sequence
  Description of Artificial Sequence: Synthetic oligonucleotide
  Sense strand starting at position 2265 of SEQ ID NO: 586083
ggcauuacgcucuaaauag

SEQ ID NO: 690861 - RNA, 19 nt, Artificial Sequence
  Description of Artificial Sequence: Synthetic oligonucleotide
  Antisense strand to SEQ ID NO: 690860
cuauuuagagcguaaugcc

SEQ ID NO: 690862 - RNA, 19 nt, Artificial Sequence
  Description of Artificial Sequence: Synthetic oligonucleotide
  Sense strand starting at position 2330 of SEQ ID NO: 586083
uuuguuuagcuauagacac

SEQ ID NO: 690863 - RNA, 19 nt, Artificial Sequence
  Description of Artificial Sequence: Synthetic oligonucleotide
  Antisense strand to SEQ ID NO: 690862
gugucuauagcuaaacaaa

SEQ ID NO: 690864 - RNA, 19 nt, Artificial Sequence
  Description of Artificial Sequence: Synthetic oligonucleotide
  Sense strand starting at position 2382 of SEQ ID NO: 586083
ugugaagccagauaacagu

SEQ ID NO: 690865 - RNA, 19 nt, Artificial Sequence
  Description of Artificial Sequence: Synthetic oligonucleotide
  Antisense strand to SEQ ID NO: 690864
acuguuaucuggcuucaca

SEQ ID NO: 690866 - RNA, 19 nt, Artificial Sequence
  Description of Artificial Sequence: Synthetic oligonucleotide
  Sense strand starting at position 2568 of SEQ ID NO: 586083
acugaagaaucgucugaag

SEQ ID NO: 690867 - RNA, 19 nt, Artificial Sequence
  Description of Artificial Sequence: Synthetic oligonucleotide
  Antisense strand to SEQ ID NO: 690866
cuucagacgauucuucagu

SEQ ID NO: 690868 - RNA, 19 nt, Artificial Sequence
  Description of Artificial Sequence: Synthetic oligonucleotide
  Sense strand starting at position 2607 of SEQ ID NO: 586083
gcgucaacggucagaaguu

SEQ ID NO: 690869 - RNA, 19 nt, Artificial Sequence
  Description of Artificial Sequence: Synthetic oligonucleotide
  Antisense strand to SEQ ID NO: 690868
aacuucugaccguugacgc

SEQ ID NO: 690870 - RNA, 19 nt, Artificial Sequence
  Description of Artificial Sequence: Synthetic oligonucleotide
  Sense strand starting at position 2717 of SEQ ID NO: 586083
aaucuauagccagaacguu

SEQ ID NO: 690871 - RNA, 19 nt, Artificial Sequence
  Description of Artificial Sequence: Synthetic oligonucleotide
  Antisense strand to SEQ ID NO: 690870
aacguucuggcuauagauu

SEQ ID NO: 690872 - RNA, 19 nt, Artificial Sequence
  Description of Artificial Sequence: Synthetic oligonucleotide
  Sense strand starting at position 2781 of SEQ ID NO: 586083
uuauuuauuugugguagac

SEQ ID NO: 690873 - RNA, 19 nt, Artificial Sequence
  Description of Artificial Sequence: Synthetic oligonucleotide
  Antisense strand to SEQ ID NO: 690872
gucuaccacaaauaaauaa

SEQ ID NO: 690874 - RNA, 19 nt, Artificial Sequence
  Description of Artificial Sequence: Synthetic oligonucleotide
  Sense strand starting at position 2783 of SEQ ID NO: 586083
auuuauuugugguagacau

SEQ ID NO: 690875 - RNA, 19 nt, Artificial Sequence
  Description of Artificial Sequence: Synthetic oligonucleotide
  Antisense strand to SEQ ID NO: 690874
augucuaccacaaauaaau

SEQ ID NO: 690876 - RNA, 19 nt, Artificial Sequence
  Description of Artificial Sequence: Synthetic oligonucleotide
  Sense strand starting at position 2811 of SEQ ID NO: 586083
cuguguugaccaggacacu

SEQ ID NO: 690877 - RNA, 19 nt, Artificial Sequence
  Description of Artificial Sequence: Synthetic oligonucleotide
  Antisense strand to SEQ ID NO: 690876
aguguccuggucaacacag

SEQ ID NO: 690878 - RNA, 19 nt, Artificial Sequence
  Description of Artificial Sequence: Synthetic oligonucleotide
  Sense strand starting at position 2820 of SEQ ID NO: 586083
ccaggacacuggucuggaa

SEQ ID NO: 690879 - RNA, 19 nt, Artificial Sequence
  Description of Artificial Sequence: Synthetic oligonucleotide
  Antisense strand to SEQ ID NO: 690878
uuccagaccaguguccugg

SEQ ID NO: 690880 - RNA, 19 nt, Artificial Sequence
  Description of Artificial Sequence: Synthetic oligonucleotide
  Sense strand starting at position 2928 of SEQ ID NO: 586083
uuuaucuguaaguagaguu

SEQ ID NO: 690881 - RNA, 19 nt, Artificial Sequence
  Description of Artificial Sequence: Synthetic oligonucleotide
  Antisense strand to SEQ ID NO: 690880
aacucuacuuacagauaaa

SEQ ID NO: 690882 - RNA, 19 nt, Artificial Sequence
  Description of Artificial Sequence: Synthetic oligonucleotide
  Sense strand starting at position 2994 of SEQ ID NO: 586083
cuuaucauucuuggaaagu

SEQ ID NO: 690883 - RNA, 19 nt, Artificial Sequence
  Description of Artificial Sequence: Synthetic oligonucleotide
  Antisense strand to SEQ ID NO: 690882
acuuuccaagaaugauaag

SEQ ID NO: 690884 - RNA, 19 nt, Artificial Sequence
  Description of Artificial Sequence: Synthetic oligonucleotide
  Sense strand starting at position 3596 of SEQ ID NO: 586083
gagacuacccaguacuugu

SEQ ID NO: 690885 - RNA, 19 nt, Artificial Sequence
  Description of Artificial Sequence: Synthetic oligonucleotide
  Antisense strand to SEQ ID NO: 690884
acaaguacuggguagucuc

SEQ ID NO: 690886 - RNA, 19 nt, Artificial Sequence
  Description of Artificial Sequence: Synthetic oligonucleotide
  Sense strand starting at position 3604 of SEQ ID NO: 586083
ccaguacuuguggaacauu

SEQ ID NO: 690887 - RNA, 19 nt, Artificial Sequence
  Description of Artificial Sequence: Synthetic oligonucleotide
  Antisense strand to SEQ ID NO: 690886
aauguuccacaaguacugg

SEQ ID NO: 690888 - RNA, 19 nt, Artificial Sequence
  Description of Artificial Sequence: Synthetic oligonucleotide
  Sense strand starting at position 3615 of SEQ ID NO: 586083
ggaacauuagcccaacguu

SEQ ID NO: 690889 - RNA, 19 nt, Artificial Sequence
  Description of Artificial Sequence: Synthetic oligonucleotide
  Antisense strand to SEQ ID NO: 690888
aacguugggcuaauguucc

SEQ ID NO: 690890 - RNA, 19 nt, Artificial Sequence
  Description of Artificial Sequence: Synthetic oligonucleotide
  Sense strand starting at position 3683 of SEQ ID NO: 586083
gcuuuauuucugcagcaga

SEQ ID NO: 690891 - RNA, 19 nt, Artificial Sequence
  Description of Artificial Sequence: Synthetic oligonucleotide
  Antisense strand to SEQ ID NO: 690890
ucugcugcagaaauaaagc

SEQ ID NO: 690892 - RNA, 19 nt, Artificial Sequence
  Description of Artificial Sequence: Synthetic oligonucleotide
  Sense strand starting at position 3738 of SEQ ID NO: 586083
cuugcuaucuuccuaagga

SEQ ID NO: 690893 - RNA, 19 nt, Artificial Sequence
  Description of Artificial Sequence: Synthetic oligonucleotide
  Antisense strand to SEQ ID NO: 690892
uccuuaggaagauagcaag

SEQ ID NO: 690894 - RNA, 19 nt, Artificial Sequence
  Description of Artificial Sequence: Synthetic oligonucleotide
  Sense strand starting at position 3746 of SEQ ID NO: 586083
cuuccuaaggauuaagcau

SEQ ID NO: 690895 - RNA, 19 nt, Artificial Sequence
  Description of Artificial Sequence: Synthetic oligonucleotide
  Antisense strand to SEQ ID NO: 690894
augcuuaauccuuaggaag

SEQ ID NO: 690896 - RNA, 19 nt, Artificial Sequence
  Description of Artificial Sequence: Synthetic oligonucleotide
  Sense strand starting at position 3754 of SEQ ID NO: 586083
ggauuaagcaucuggguaa

SEQ ID NO: 690897 - RNA, 19 nt, Artificial Sequence
  Description of Artificial Sequence: Synthetic oligonucleotide
  Antisense strand to SEQ ID NO: 690896
uuacccagaugcuuaaucc

SEQ ID NO: 690898 - RNA, 19 nt, Artificial Sequence
  Description of Artificial Sequence: Synthetic oligonucleotide
  Sense strand starting at position 3757 of SEQ ID NO: 586083
uuaagcaucuggguaagaa

SEQ ID NO: 690899 - RNA, 19 nt, Artificial Sequence
  Description of Artificial Sequence: Synthetic oligonucleotide
  Antisense strand to SEQ ID NO: 690898
uucuuacccagaugcuuaa

SEQ ID NO: 690900 - RNA, 19 nt, Artificial Sequence
  Description of Artificial Sequence: Synthetic oligonucleotide
  Sense strand starting at position 3804 of SEQ ID NO: 586083
guuguaaaucaugggcaag

SEQ ID NO: 690901 - RNA, 19 nt, Artificial Sequence
  Description of Artificial Sequence: Synthetic oligonucleotide
  Antisense strand to SEQ ID NO: 690900
cuugcccaugauuuacaac

SEQ ID NO: 690902 - RNA, 19 nt, Artificial Sequence
  Description of Artificial Sequence: Synthetic oligonucleotide
  Sense strand starting at position 3807 of SEQ ID NO: 586083
guaaaucaugggcaaguua

SEQ ID NO: 690903 - RNA, 19 nt, Artificial Sequence
  Description of Artificial Sequence: Synthetic oligonucleotide
  Antisense strand to SEQ ID NO: 690902
uaacuugcccaugauuuac

SEQ ID NO: 690904 - RNA, 19 nt, Artificial Sequence
  Description of Artificial Sequence: Synthetic oligonucleotide
  Sense strand starting at position 3857 of SEQ ID NO: 586083
aucuguuaauggguuaaua

SEQ ID NO: 690905 - RNA, 19 nt, Artificial Sequence
  Description of Artificial Sequence: Synthetic oligonucleotide
  Antisense strand to SEQ ID NO: 690904
uauuaacccauuaacagau

SEQ ID NO: 690906 - RNA, 19 nt, Artificial Sequence
  Description of Artificial Sequence: Synthetic oligonucleotide
  Sense strand starting at position 3859 of SEQ ID NO: 586083
cuguuaauggguuaauaau

SEQ ID NO: 690907 - RNA, 19 nt, Artificial Sequence
  Description of Artificial Sequence: Synthetic oligonucleotide
  Antisense strand to SEQ ID NO: 690906
auuauuaacccauuaacag

SEQ ID NO: 690908 - RNA, 19 nt, Artificial Sequence
  Description of Artificial Sequence: Synthetic oligonucleotide
  Sense strand starting at position 3881 of SEQ ID NO: 586083
cacuacuucguggagucau

SEQ ID NO: 690909 - RNA, 19 nt, Artificial Sequence
  Description of Artificial Sequence: Synthetic oligonucleotide
  Antisense strand to SEQ ID NO: 690908
augacuccacgaaguagug

SEQ ID NO: 690910 - RNA, 19 nt, Artificial Sequence
  Description of Artificial Sequence: Synthetic oligonucleotide
  Sense strand starting at position 3934 of SEQ ID NO: 586083
uuaauugucucacugaaga

SEQ ID NO: 690911 - RNA, 19 nt, Artificial Sequence
  Description of Artificial Sequence: Synthetic oligonucleotide
  Antisense strand to SEQ ID NO: 690910
ucuucagugagacaauuaa

SEQ ID NO: 690912 - RNA, 19 nt, Artificial Sequence
  Description of Artificial Sequence: Synthetic oligonucleotide
  Sense strand starting at position 173 of SEQ ID NO: 586084
agaggcaaucggcaaauaa

SEQ ID NO: 690913 - RNA, 19 nt, Artificial Sequence
  Description of Artificial Sequence: Synthetic oligonucleotide
  Antisense strand to SEQ ID NO: 690912
uuauuugccgauugccucu

SEQ ID NO: 690914 - RNA, 19 nt, Artificial Sequence
  Description of Artificial Sequence: Synthetic oligonucleotide
  Sense strand starting at position 416 of SEQ ID NO: 586084
ugagguagauaugcauaaa

SEQ ID NO: 690915 - RNA, 19 nt, Artificial Sequence
  Description of Artificial Sequence: Synthetic oligonucleotide
  Antisense strand to SEQ ID NO: 690914
uuuaugcauaucuaccuca

SEQ ID NO: 690916 - RNA, 19 nt, Artificial Sequence
  Description of Artificial Sequence: Synthetic oligonucleotide
  Sense strand starting at position 419 of SEQ ID NO: 586084
gguagauaugcauaaagca

SEQ ID NO: 690917 - RNA, 19 nt, Artificial Sequence
  Description of Artificial Sequence: Synthetic oligonucleotide
  Antisense strand to SEQ ID NO: 690916
ugcuuuaugcauaucuacc

SEQ ID NO: 690918 - RNA, 19 nt, Artificial Sequence
  Description of Artificial Sequence: Synthetic oligonucleotide
  Sense strand starting at position 1057 of SEQ ID NO: 586084
agaauauucuggcucggag

SEQ ID NO: 690919 - RNA, 19 nt, Artificial Sequence
  Description of Artificial Sequence: Synthetic oligonucleotide
  Antisense strand to SEQ ID NO: 690918
cuccgagccagaauauucu

SEQ ID NO: 690920 - RNA, 19 nt, Artificial Sequence
  Description of Artificial Sequence: Synthetic oligonucleotide
  Sense strand starting at position 1060 of SEQ ID NO: 586084
auauucuggcucggaggau

SEQ ID NO: 690921 - RNA, 19 nt, Artificial Sequence
  Description of Artificial Sequence: Synthetic oligonucleotide
  Antisense strand to SEQ ID NO: 690920
auccuccgagccagaauau

SEQ ID NO: 690922 - RNA, 19 nt, Artificial Sequence
  Description of Artificial Sequence: Synthetic oligonucleotide
  Sense strand starting at position 1152 of SEQ ID NO: 586084
agguuaacuguagaccuua

SEQ ID NO: 690923 - RNA, 19 nt, Artificial Sequence
  Description of Artificial Sequence: Synthetic oligonucleotide
  Antisense strand to SEQ ID NO: 690922
uaaggucuacaguuaaccu

SEQ ID NO: 690924 - RNA, 19 nt, Artificial Sequence
  Description of Artificial Sequence: Synthetic oligonucleotide
  Sense strand starting at position 1176 of SEQ ID NO: 586084
agaaacgaugcagguaaau

SEQ ID NO: 690925 - RNA, 19 nt, Artificial Sequence
  Description of Artificial Sequence: Synthetic oligonucleotide
  Antisense strand to SEQ ID NO: 690924
auuuaccugcaucguuucu

SEQ ID NO: 690926 - RNA, 19 nt, Artificial Sequence
  Description of Artificial Sequence: Synthetic oligonucleotide
  Sense strand starting at position 1188 of SEQ ID NO: 586084
gguaaauuacugcacaucu

SEQ ID NO: 690927 - RNA, 19 nt, Artificial Sequence
  Description of Artificial Sequence: Synthetic oligonucleotide
  Antisense strand to SEQ ID NO: 690926
agaugugcaguaauuuacc

SEQ ID NO: 690928 - RNA, 19 nt, Artificial Sequence
  Description of Artificial Sequence: Synthetic oligonucleotide
  Sense strand starting at position 1318 of SEQ ID NO: 586084
acaggauauuugcauaagu

SEQ ID NO: 690929 - RNA, 19 nt, Artificial Sequence
  Description of Artificial Sequence: Synthetic oligonucleotide
  Antisense strand to SEQ ID NO: 690928
acuuaugcaaauauccugu

SEQ ID NO: 690930 - RNA, 19 nt, Artificial Sequence
  Description of Artificial Sequence: Synthetic oligonucleotide
  Sense strand starting at position 1499 of SEQ ID NO: 586084
cagucuugugcuucggagu

SEQ ID NO: 690931 - RNA, 19 nt, Artificial Sequence
  Description of Artificial Sequence: Synthetic oligonucleotide
  Antisense strand to SEQ ID NO: 690930
acuccgaagcacaagacug

SEQ ID NO: 690932 - RNA, 19 nt, Artificial Sequence
  Description of Artificial Sequence: Synthetic oligonucleotide
  Sense strand starting at position 1713 of SEQ ID NO: 586084
ucauccuggucauuaaagu

SEQ ID NO: 690933 - RNA, 19 nt, Artificial Sequence
  Description of Artificial Sequence: Synthetic oligonucleotide
  Antisense strand to SEQ ID NO: 690932
acuuuaaugaccaggauga

SEQ ID NO: 690934 - RNA, 19 nt, Artificial Sequence
  Description of Artificial Sequence: Synthetic oligonucleotide
  Sense strand starting at position 2004 of SEQ ID NO: 586084
gaagccagccuguaaggau

SEQ ID NO: 690935 - RNA, 19 nt, Artificial Sequence
  Description of Artificial Sequence: Synthetic oligonucleotide
  Antisense strand to SEQ ID NO: 690934
auccuuacaggcuggcuuc

SEQ ID NO: 690936 - RNA, 19 nt, Artificial Sequence
  Description of Artificial Sequence: Synthetic oligonucleotide
  Sense strand starting at position 2016 of SEQ ID NO: 586084
uaaggauggugcuuauauc

SEQ ID NO: 690937 - RNA, 19 nt, Artificial Sequence
  Description of Artificial Sequence: Synthetic oligonucleotide
  Antisense strand to SEQ ID NO: 690936
gauauaagcaccauccuua

SEQ ID NO: 690938 - RNA, 19 nt, Artificial Sequence
  Description of Artificial Sequence: Synthetic oligonucleotide
  Sense strand starting at position 2017 of SEQ ID NO: 586084
aaggauggugcuuauaucu

SEQ ID NO: 690939 - RNA, 19 nt, Artificial Sequence
  Description of Artificial Sequence: Synthetic oligonucleotide
  Antisense strand to SEQ ID NO: 690938
agauauaagcaccauccuu

SEQ ID NO: 690940 - RNA, 19 nt, Artificial Sequence
  Description of Artificial Sequence: Synthetic oligonucleotide
  Sense strand starting at position 2049 of SEQ ID NO: 586084
gaaggcauguugccuauua

SEQ ID NO: 690941 - RNA, 19 nt, Artificial Sequence
  Description of Artificial Sequence: Synthetic oligonucleotide
  Antisense strand to SEQ ID NO: 690940
uaauaggcaacaugccuuc

SEQ ID NO: 690942 - RNA, 19 nt, Artificial Sequence
  Description of Artificial Sequence: Synthetic oligonucleotide
  Sense strand starting at position 2101 of SEQ ID NO: 586084
gauuacuggugacugaaua

SEQ ID NO: 690943 - RNA, 19 nt, Artificial Sequence
  Description of Artificial Sequence: Synthetic oligonucleotide
  Antisense strand to SEQ ID NO: 690942
uauucagucaccaguaauc

SEQ ID NO: 690944 - RNA, 19 nt, Artificial Sequence
  Description of Artificial Sequence: Synthetic oligonucleotide
  Sense strand starting at position 2102 of SEQ ID NO: 586084
auuacuggugacugaauaa

SEQ ID NO: 690945 - RNA, 19 nt, Artificial Sequence
  Description of Artificial Sequence: Synthetic oligonucleotide
  Antisense strand to SEQ ID NO: 690944
uuauucagucaccaguaau

SEQ ID NO: 690946 - RNA, 19 nt, Artificial Sequence
  Description of Artificial Sequence: Synthetic oligonucleotide
  Sense strand starting at position 2184 of SEQ ID NO: 586084
guguuucaggaggguugaa

SEQ ID NO: 690947 - RNA, 19 nt, Artificial Sequence
  Description of Artificial Sequence: Synthetic oligonucleotide
  Antisense strand to SEQ ID NO: 690946
uucaacccuccugaaacac

SEQ ID NO: 690948 - RNA, 19 nt, Artificial Sequence
  Description of Artificial Sequence: Synthetic oligonucleotide
  Sense strand starting at position 2221 of SEQ ID NO: 586084
agggacuuucucgggcaua

SEQ ID NO: 690949 - RNA, 19 nt, Artificial Sequence
  Description of Artificial Sequence: Synthetic oligonucleotide
  Antisense strand to SEQ ID NO: 690948
uaugcccgagaaagucccu

SEQ ID NO: 690950 - RNA, 19 nt, Artificial Sequence
  Description of Artificial Sequence: Synthetic oligonucleotide
  Sense strand starting at position 2283 of SEQ ID NO: 586084
agaacugaucugugcgaca

SEQ ID NO: 690951 - RNA, 19 nt, Artificial Sequence
  Description of Artificial Sequence: Synthetic oligonucleotide
  Antisense strand to SEQ ID NO: 690950
ugucgcacagaucaguucu

SEQ ID NO: 690952 - RNA, 19 nt, Artificial Sequence
  Description of Artificial Sequence: Synthetic oligonucleotide
  Sense strand starting at position 2285 of SEQ ID NO: 586084
aacugaucugugcgacaag

SEQ ID NO: 690953 - RNA, 19 nt, Artificial Sequence
  Description of Artificial Sequence: Synthetic oligonucleotide
  Antisense strand to SEQ ID NO: 690952
cuugucgcacagaucaguu

SEQ ID NO: 690954 - RNA, 19 nt, Artificial Sequence
  Description of Artificial Sequence: Synthetic oligonucleotide
  Sense strand starting at position 2288 of SEQ ID NO: 586084
ugaucugugcgacaagaag

SEQ ID NO: 690955 - RNA, 19 nt, Artificial Sequence
  Description of Artificial Sequence: Synthetic oligonucleotide
  Antisense strand to SEQ ID NO: 690954
cuucuugucgcacagauca

SEQ ID NO: 690956 - RNA, 19 nt, Artificial Sequence
  Description of Artificial Sequence: Synthetic oligonucleotide
  Sense strand starting at position 2344 of SEQ ID NO: 586084
ggauauuaauuagauggaa

SEQ ID NO: 690957 - RNA, 19 nt, Artificial Sequence
  Description of Artificial Sequence: Synthetic oligonucleotide
  Antisense strand to SEQ ID NO: 690956
uuccaucuaauuaauaucc

SEQ ID NO: 690958 - RNA, 19 nt, Artificial Sequence
  Description of Artificial Sequence: Synthetic oligonucleotide
  Sense strand starting at position 2377 of SEQ ID NO: 586084
ucugaagcauugguuauua

SEQ ID NO: 690959 - RNA, 19 nt, Artificial Sequence
  Description of Artificial Sequence: Synthetic oligonucleotide
  Antisense strand to SEQ ID NO: 690958
uaauaaccaaugcuucaga

SEQ ID NO: 690960 - RNA, 19 nt, Artificial Sequence
  Description of Artificial Sequence: Synthetic oligonucleotide
  Sense strand starting at position 2379 of SEQ ID NO: 586084
ugaagcauugguuauuaca

SEQ ID NO: 690961 - RNA, 19 nt, Artificial Sequence
  Description of Artificial Sequence: Synthetic oligonucleotide
  Antisense strand to SEQ ID NO: 690960
uguaauaaccaaugcuuca

SEQ ID NO: 690962 - RNA, 19 nt, Artificial Sequence
  Description of Artificial Sequence: Synthetic oligonucleotide
  Sense strand starting at position 2644 of SEQ ID NO: 586084
aguccuguuugauuccuga

SEQ ID NO: 690963 - RNA, 19 nt, Artificial Sequence
  Description of Artificial Sequence: Synthetic oligonucleotide
  Antisense strand to SEQ ID NO: 690962
ucaggaaucaaacaggacu

SEQ ID NO: 690964 - RNA, 19 nt, Artificial Sequence
  Description of Artificial Sequence: Synthetic oligonucleotide
  Sense strand starting at position 2647 of SEQ ID NO: 586084
ccuguuugauuccugaaca

SEQ ID NO: 690965 - RNA, 19 nt, Artificial Sequence
  Description of Artificial Sequence: Synthetic oligonucleotide
  Antisense strand to SEQ ID NO: 690964
uguucaggaaucaaacagg

SEQ ID NO: 690966 - RNA, 19 nt, Artificial Sequence
  Description of Artificial Sequence: Synthetic oligonucleotide
  Sense strand starting at position 2827 of SEQ ID NO: 586084
agcugugaaugcuugauaa

SEQ ID NO: 690967 - RNA, 19 nt, Artificial Sequence
  Description of Artificial Sequence: Synthetic oligonucleotide
  Antisense strand to SEQ ID NO: 690966
uuaucaagcauucacagcu

SEQ ID NO: 690968 - RNA, 19 nt, Artificial Sequence
  Description of Artificial Sequence: Synthetic oligonucleotide
  Sense strand starting at position 2829 of SEQ ID NO: 586084
cugugaaugcuugauaaau

SEQ ID NO: 690969 - RNA, 19 nt, Artificial Sequence
  Description of Artificial Sequence: Synthetic oligonucleotide
  Antisense strand to SEQ ID NO: 690968
auuuaucaagcauucacag

SEQ ID NO: 690970 - RNA, 19 nt, Artificial Sequence
  Description of Artificial Sequence: Synthetic oligonucleotide
  Sense strand starting at position 2981 of SEQ ID NO: 586084
ggccauuacuuagcaggau

SEQ ID NO: 690971 - RNA, 19 nt, Artificial Sequence
  Description of Artificial Sequence: Synthetic oligonucleotide
  Antisense strand to SEQ ID NO: 690970
auccugcuaaguaauggcc

SEQ ID NO: 690972 - RNA, 19 nt, Artificial Sequence
  Description of Artificial Sequence: Synthetic oligonucleotide
  Sense strand starting at position 3102 of SEQ ID NO: 586084
cugguucucuuugcagaua

SEQ ID NO: 690973 - RNA, 19 nt, Artificial Sequence
  Description of Artificial Sequence: Synthetic oligonucleotide
  Antisense strand to SEQ ID NO: 690972
uaucugcaaagagaaccag

SEQ ID NO: 690974 - RNA, 19 nt, Artificial Sequence
  Description of Artificial Sequence: Synthetic oligonucleotide
  Sense strand starting at position 3105 of SEQ ID NO: 586084
guucucuuugcagauaaca

SEQ ID NO: 690975 - RNA, 19 nt, Artificial Sequence
  Description of Artificial Sequence: Synthetic oligonucleotide
  Antisense strand to SEQ ID NO: 690974
uguuaucugcaaagagaac

SEQ ID NO: 690976 - RNA, 19 nt, Artificial Sequence
  Description of Artificial Sequence: Synthetic oligonucleotide
  Sense strand starting at position 3233 of SEQ ID NO: 586084
gcugcuaugccagaauuau

SEQ ID NO: 690977 - RNA, 19 nt, Artificial Sequence
  Description of Artificial Sequence: Synthetic oligonucleotide
  Antisense strand to SEQ ID NO: 690976
auaauucuggcauagcagc

SEQ ID NO: 690978 - RNA, 19 nt, Artificial Sequence
  Description of Artificial Sequence: Synthetic oligonucleotide
  Sense strand starting at position 3290 of SEQ ID NO: 586084
ggaacaaugcuguguuagg

SEQ ID NO: 690979 - RNA, 19 nt, Artificial Sequence
  Description of Artificial Sequence: Synthetic oligonucleotide
  Antisense strand to SEQ ID NO: 690978
ccuaacacagcauuguucc

SEQ ID NO: 690980 - RNA, 19 nt, Artificial Sequence
  Description of Artificial Sequence: Synthetic oligonucleotide
  Sense strand starting at position 3291 of SEQ ID NO: 586084
gaacaaugcuguguuagga

SEQ ID NO: 690981 - RNA, 19 nt, Artificial Sequence
  Description of Artificial Sequence: Synthetic oligonucleotide
  Antisense strand to SEQ ID NO: 690980
uccuaacacagcauuguuc

SEQ ID NO: 690982 - RNA, 19 nt, Artificial Sequence
  Description of Artificial Sequence: Synthetic oligonucleotide
  Sense strand starting at position 3334 of SEQ ID NO: 586084
gugauucauugaucgauug

SEQ ID NO: 690983 - RNA, 19 nt, Artificial Sequence
  Description of Artificial Sequence: Synthetic oligonucleotide
  Antisense strand to SEQ ID NO: 690982
caaucgaucaaugaaucac

SEQ ID NO: 690984 - RNA, 19 nt, Artificial Sequence
  Description of Artificial Sequence: Synthetic oligonucleotide
  Sense strand starting at position 3401 of SEQ ID NO: 586084
guccuaagaucugcaaggu

SEQ ID NO: 690985 - RNA, 19 nt, Artificial Sequence
  Description of Artificial Sequence: Synthetic oligonucleotide
  Antisense strand to SEQ ID NO: 690984
accuugcagaucuuaggac

SEQ ID NO: 690986 - RNA, 19 nt, Artificial Sequence
  Description of Artificial Sequence: Synthetic oligonucleotide
  Sense strand starting at position 3405 of SEQ ID NO: 586084
uaagaucugcaaggugaau

SEQ ID NO: 690987 - RNA, 19 nt, Artificial Sequence
  Description of Artificial Sequence: Synthetic oligonucleotide
  Antisense strand to SEQ ID NO: 690986
auucaccuugcagaucuua

SEQ ID NO: 690988 - RNA, 19 nt, Artificial Sequence
  Description of Artificial Sequence: Synthetic oligonucleotide
  Sense strand starting at position 3407 of SEQ ID NO: 586084
agaucugcaaggugaauua

SEQ ID NO: 690989 - RNA, 19 nt, Artificial Sequence
  Description of Artificial Sequence: Synthetic oligonucleotide
  Antisense strand to SEQ ID NO: 690988
uaauucaccuugcagaucu

SEQ ID NO: 690990 - RNA, 19 nt, Artificial Sequence
  Description of Artificial Sequence: Synthetic oligonucleotide
  Sense strand starting at position 3873 of SEQ ID NO: 586084
agaauaacugcuuagugac

SEQ ID NO: 690991 - RNA, 19 nt, Artificial Sequence
  Description of Artificial Sequence: Synthetic oligonucleotide
  Antisense strand to SEQ ID NO: 690990
gucacuaagcaguuauucu

SEQ ID NO: 690992 - RNA, 19 nt, Artificial Sequence
  Description of Artificial Sequence: Synthetic oligonucleotide
  Sense strand starting at position 190 of SEQ ID NO: 586085
ggacaacagucauuccuaa

SEQ ID NO: 690993 - RNA, 19 nt, Artificial Sequence
  Description of Artificial Sequence: Synthetic oligonucleotide
  Antisense strand to SEQ ID NO: 690992
uuaggaaugacuguugucc

SEQ ID NO: 690994 - RNA, 19 nt, Artificial Sequence
  Description of Artificial Sequence: Synthetic oligonucleotide
  Sense strand starting at position 221 of SEQ ID NO: 586085
ugcugaucuuuauuuguaa

SEQ ID NO: 690995 - RNA, 19 nt, Artificial Sequence
  Description of Artificial Sequence: Synthetic oligonucleotide
  Antisense strand to SEQ ID NO: 690994
uuacaaauaaagaucagca

SEQ ID NO: 690996 - RNA, 19 nt, Artificial Sequence
  Description of Artificial Sequence: Synthetic oligonucleotide
  Sense strand starting at position 388 of SEQ ID NO: 586085
ucucaagugcuguaucaca

SEQ ID NO: 690997 - RNA, 19 nt, Artificial Sequence
  Description of Artificial Sequence: Synthetic oligonucleotide
  Antisense strand to SEQ ID NO: 690996
ugugauacagcacuugaga

SEQ ID NO: 690998 - RNA, 19 nt, Artificial Sequence
  Description of Artificial Sequence: Synthetic oligonucleotide
  Sense strand starting at position 450 of SEQ ID NO: 586085
uggacagauuuagaguguu

SEQ ID NO: 690999 - RNA, 19 nt, Artificial Sequence
  Description of Artificial Sequence: Synthetic oligonucleotide
  Antisense strand to SEQ ID NO: 690998
aacacucuaaaucugucca

SEQ ID NO: 691000 - RNA, 19 nt, Artificial Sequence
  Description of Artificial Sequence: Synthetic oligonucleotide
  Sense strand starting at position 481 of SEQ ID NO: 586085
gaagguucuauuggucgga

SEQ ID NO: 691001 - RNA, 19 nt, Artificial Sequence
  Description of Artificial Sequence: Synthetic oligonucleotide
  Antisense strand to SEQ ID NO: 691000
uccgaccaauagaaccuuc

SEQ ID NO: 691002 - RNA, 19 nt, Artificial Sequence
  Description of Artificial Sequence: Synthetic oligonucleotide
  Sense strand starting at position 653 of SEQ ID NO: 586085
uaauacaggguuugacauu

SEQ ID NO: 691003 - RNA, 19 nt, Artificial Sequence
  Description of Artificial Sequence: Synthetic oligonucleotide
  Antisense strand to SEQ ID NO: 691002
aaugucaaacccuguauua

SEQ ID NO: 691004 - RNA, 19 nt, Artificial Sequence
  Description of Artificial Sequence: Synthetic oligonucleotide
  Sense strand starting at position 689 of SEQ ID NO: 586085
cugggcauuuauuaugaca

SEQ ID NO: 691005 - RNA, 19 nt, Artificial Sequence
  Description of Artificial Sequence: Synthetic oligonucleotide
  Antisense strand to SEQ ID NO: 691004
ugucauaauaaaugcccag

SEQ ID NO: 691006 - RNA, 19 nt, Artificial Sequence
  Description of Artificial Sequence: Synthetic oligonucleotide
  Sense strand starting at position 692 of SEQ ID NO: 586085
ggcauuuauuaugacacau

SEQ ID NO: 691007 - RNA, 19 nt, Artificial Sequence
  Description of Artificial Sequence: Synthetic oligonucleotide
  Antisense strand to SEQ ID NO: 691006
augugucauaauaaaugcc

SEQ ID NO: 691008 - RNA, 19 nt, Artificial Sequence
  Description of Artificial Sequence: Synthetic oligonucleotide
  Sense strand starting at position 816 of SEQ ID NO: 586085
aauugucaugauuguaagu

SEQ ID NO: 691009 - RNA, 19 nt, Artificial Sequence
  Description of Artificial Sequence: Synthetic oligonucleotide
  Antisense strand to SEQ ID NO: 691008
acuuacaaucaugacaauu

SEQ ID NO: 691010 - RNA, 19 nt, Artificial Sequence
  Description of Artificial Sequence: Synthetic oligonucleotide
  Sense strand starting at position 827 of SEQ ID NO: 586085
uuguaaguuugaccaggau

SEQ ID NO: 691011 - RNA, 19 nt, Artificial Sequence
  Description of Artificial Sequence: Synthetic oligonucleotide
  Antisense strand to SEQ ID NO: 691010
auccuggucaaacuuacaa

SEQ ID NO: 691012 - RNA, 19 nt, Artificial Sequence
  Description of Artificial Sequence: Synthetic oligonucleotide
  Sense strand starting at position 930 of SEQ ID NO: 586085
ucgagauauuucuaaagau

SEQ ID NO: 691013 - RNA, 19 nt, Artificial Sequence
  Description of Artificial Sequence: Synthetic oligonucleotide
  Antisense strand to SEQ ID NO: 691012
aucuuuagaaauaucucga

SEQ ID NO: 691014 - RNA, 19 nt, Artificial Sequence
  Description of Artificial Sequence: Synthetic oligonucleotide
  Sense strand starting at position 1036 of SEQ ID NO: 586085
cuugauaagcauugaggau

SEQ ID NO: 691015 - RNA, 19 nt, Artificial Sequence
  Description of Artificial Sequence: Synthetic oligonucleotide
  Antisense strand to SEQ ID NO: 691014
auccucaaugcuuaucaag

SEQ ID NO: 691016 - RNA, 19 nt, Artificial Sequence
  Description of Artificial Sequence: Synthetic oligonucleotide
  Sense strand starting at position 1088 of SEQ ID NO: 586085
aucagaaucgaguagcuca

SEQ ID NO: 691017 - RNA, 19 nt, Artificial Sequence
  Description of Artificial Sequence: Synthetic oligonucleotide
  Antisense strand to SEQ ID NO: 691016
ugagcuacucgauucugau

SEQ ID NO: 691018 - RNA, 19 nt, Artificial Sequence
  Description of Artificial Sequence: Synthetic oligonucleotide
  Sense strand starting at position 1091 of SEQ ID NO: 586085
agaaucgaguagcucaaau

SEQ ID NO: 691019 - RNA, 19 nt, Artificial Sequence
  Description of Artificial Sequence: Synthetic oligonucleotide
  Antisense strand to SEQ ID NO: 691018
auuugagcuacucgauucu

SEQ ID NO: 691020 - RNA, 19 nt, Artificial Sequence
  Description of Artificial Sequence: Synthetic oligonucleotide
  Sense strand starting at position 1093 of SEQ ID NO: 586085
aaucgaguagcucaaaucu

SEQ ID NO: 691021 - RNA, 19 nt, Artificial Sequence
  Description of Artificial Sequence: Synthetic oligonucleotide
  Antisense strand to SEQ ID NO: 691020
agauuugagcuacucgauu

SEQ ID NO: 691022 - RNA, 19 nt, Artificial Sequence
  Description of Artificial Sequence: Synthetic oligonucleotide
  Sense strand starting at position 1340 of SEQ ID NO: 586085
gcuuucugccuuguucuua

SEQ ID NO: 691023 - RNA, 19 nt, Artificial Sequence
  Description of Artificial Sequence: Synthetic oligonucleotide
  Antisense strand to SEQ ID NO: 691022
uaagaacaaggcagaaagc

SEQ ID NO: 691024 - RNA, 19 nt, Artificial Sequence
  Description of Artificial Sequence: Synthetic oligonucleotide
  Sense strand starting at position 1575 of SEQ ID NO: 586085
ugaauauaauggcuuugga

SEQ ID NO: 691025 - RNA, 19 nt, Artificial Sequence
  Description of Artificial Sequence: Synthetic oligonucleotide
  Antisense strand to SEQ ID NO: 691024
uccaaagccauuauauuca

SEQ ID NO: 691026 - RNA, 19 nt, Artificial Sequence
  Description of Artificial Sequence: Synthetic oligonucleotide
  Sense strand starting at position 1578 of SEQ ID NO: 586085
auauaauggcuuuggaacu

SEQ ID NO: 691027 - RNA, 19 nt, Artificial Sequence
  Description of Artificial Sequence: Synthetic oligonucleotide
  Antisense strand to SEQ ID NO: 691026
aguuccaaagccauuauau

SEQ ID NO: 691028 - RNA, 19 nt, Artificial Sequence
  Description of Artificial Sequence: Synthetic oligonucleotide
  Sense strand starting at position 1590 of SEQ ID NO: 586085
uggaacucuuaagaaagga

SEQ ID NO: 691029 - RNA, 19 nt, Artificial Sequence
  Description of Artificial Sequence: Synthetic oligonucleotide
  Antisense strand to SEQ ID NO: 691028
uccuuucuuaagaguucca

SEQ ID NO: 691030 - RNA, 19 nt, Artificial Sequence
  Description of Artificial Sequence: Synthetic oligonucleotide
  Sense strand starting at position 1756 of SEQ ID NO: 586085
gcaaacuucuagucaagac

SEQ ID NO: 691031 - RNA, 19 nt, Artificial Sequence
  Description of Artificial Sequence: Synthetic oligonucleotide
  Antisense strand to SEQ ID NO: 691030
gucuugacuagaaguuugc

SEQ ID NO: 691032 - RNA, 19 nt, Artificial Sequence
  Description of Artificial Sequence: Synthetic oligonucleotide
  Sense strand starting at position 1862 of SEQ ID NO: 586085
ugaguacuccuaggagaau

SEQ ID NO: 691033 - RNA, 19 nt, Artificial Sequence
  Description of Artificial Sequence: Synthetic oligonucleotide
  Antisense strand to SEQ ID NO: 691032
auucuccuaggaguacuca

SEQ ID NO: 691034 - RNA, 19 nt, Artificial Sequence
  Description of Artificial Sequence: Synthetic oligonucleotide
  Sense strand starting at position 1871 of SEQ ID NO: 586085
cuaggagaaugagaaauga

SEQ ID NO: 691035 - RNA, 19 nt, Artificial Sequence
  Description of Artificial Sequence: Synthetic oligonucleotide
  Antisense strand to SEQ ID NO: 691034
ucauuucucauucuccuag

SEQ ID NO: 691036 - RNA, 19 nt, Artificial Sequence
  Description of Artificial Sequence: Synthetic oligonucleotide
  Sense strand starting at position 1909 of SEQ ID NO: 586085
uggagaauaucugaauaaa

SEQ ID NO: 691037 - RNA, 19 nt, Artificial Sequence
  Description of Artificial Sequence: Synthetic oligonucleotide
  Antisense strand to SEQ ID NO: 691036
uuuauucagauauucucca

SEQ ID NO: 691038 - RNA, 19 nt, Artificial Sequence
  Description of Artificial Sequence: Synthetic oligonucleotide
  Sense strand starting at position 1963 of SEQ ID NO: 586085
gaguaaugauagccuuuaa

SEQ ID NO: 691039 - RNA, 19 nt, Artificial Sequence
  Description of Artificial Sequence: Synthetic oligonucleotide
  Antisense strand to SEQ ID NO: 691038
uuaaaggcuaucauuacuc

SEQ ID NO: 691040 - RNA, 19 nt, Artificial Sequence
  Description of Artificial Sequence: Synthetic oligonucleotide
  Sense strand starting at position 2044 of SEQ ID NO: 586085
gcuugaaagcacuaaucag

SEQ ID NO: 691041 - RNA, 19 nt, Artificial Sequence
  Description of Artificial Sequence: Synthetic oligonucleotide
  Antisense strand to SEQ ID NO: 691040
cugauuagugcuuucaagc

SEQ ID NO: 691042 - RNA, 19 nt, Artificial Sequence
  Description of Artificial Sequence: Synthetic oligonucleotide
  Sense strand starting at position 2076 of SEQ ID NO: 586085
auaaguuuggguggaggaa

SEQ ID NO: 691043 - RNA, 19 nt, Artificial Sequence
  Description of Artificial Sequence: Synthetic oligonucleotide
  Antisense strand to SEQ ID NO: 691042
uuccuccacccaaacuuau

SEQ ID NO: 691044 - RNA, 19 nt, Artificial Sequence
  Description of Artificial Sequence: Synthetic oligonucleotide
  Sense strand starting at position 2127 of SEQ ID NO: 586085
acaugacuauggcuccaaa

SEQ ID NO: 691045 - RNA, 19 nt, Artificial Sequence
  Description of Artificial Sequence: Synthetic oligonucleotide
  Antisense strand to SEQ ID NO: 691044
uuuggagccauagucaugu

SEQ ID NO: 691046 - RNA, 19 nt, Artificial Sequence
  Description of Artificial Sequence: Synthetic oligonucleotide
  Sense strand starting at position 2130 of SEQ ID NO: 586085
ugacuauggcuccaaagca

SEQ ID NO: 691047 - RNA, 19 nt, Artificial Sequence
  Description of Artificial Sequence: Synthetic oligonucleotide
  Antisense strand to SEQ ID NO: 691046
ugcuuuggagccauaguca

SEQ ID NO: 691048 - RNA, 19 nt, Artificial Sequence
  Description of Artificial Sequence: Synthetic oligonucleotide
  Sense strand starting at position 2138 of SEQ ID NO: 586085
gcuccaaagcauugaagaa

SEQ ID NO: 691049 - RNA, 19 nt, Artificial Sequence
  Description of Artificial Sequence: Synthetic oligonucleotide
  Antisense strand to SEQ ID NO: 691048
uucuucaaugcuuuggagc

SEQ ID NO: 691050 - RNA, 19 nt, Artificial Sequence
  Description of Artificial Sequence: Synthetic oligonucleotide
  Sense strand starting at position 2148 of SEQ ID NO: 586085
auugaagaaauauguguga

SEQ ID NO: 691051 - RNA, 19 nt, Artificial Sequence
  Description of Artificial Sequence: Synthetic oligonucleotide
  Antisense strand to SEQ ID NO: 691050
ucacacauauuucuucaau

SEQ ID NO: 691052 - RNA, 19 nt, Artificial Sequence
  Description of Artificial Sequence: Synthetic oligonucleotide
  Sense strand starting at position 2150 of SEQ ID NO: 586085
ugaagaaauaugugugauc

SEQ ID NO: 691053 - RNA, 19 nt, Artificial Sequence
  Description of Artificial Sequence: Synthetic oligonucleotide
  Antisense strand to SEQ ID NO: 691052
gaucacacauauuucuuca

SEQ ID NO: 691054 - RNA, 19 nt, Artificial Sequence
  Description of Artificial Sequence: Synthetic oligonucleotide
  Sense strand starting at position 2152 of SEQ ID NO: 586085
aagaaauaugugugaucuu

SEQ ID NO: 691055 - RNA, 19 nt, Artificial Sequence
  Description of Artificial Sequence: Synthetic oligonucleotide
  Antisense strand to SEQ ID NO: 691054
aagaucacacauauuucuu

SEQ ID NO: 691056 - RNA, 19 nt, Artificial Sequence
  Description of Artificial Sequence: Synthetic oligonucleotide
  Sense strand starting at position 2185 of SEQ ID NO: 586085
ggacgucuuaaugagcagu

SEQ ID NO: 691057 - RNA, 19 nt, Artificial Sequence
  Description of Artificial Sequence: Synthetic oligonucleotide
  Antisense strand to SEQ ID NO: 691056
acugcucauuaagacgucc

SEQ ID NO: 691058 - RNA, 19 nt, Artificial Sequence
  Description of Artificial Sequence: Synthetic oligonucleotide
  Sense strand starting at position 2225 of SEQ ID NO: 586085
cgaagaguuacauggcuua

SEQ ID NO: 691059 - RNA, 19 nt, Artificial Sequence
  Description of Artificial Sequence: Synthetic oligonucleotide
  Antisense strand to SEQ ID NO: 691058
uaagccauguaacucuucg

SEQ ID NO: 691060 - RNA, 19 nt, Artificial Sequence
  Description of Artificial Sequence: Synthetic oligonucleotide
  Sense strand starting at position 2230 of SEQ ID NO: 586085
aguuacauggcuuagggau

SEQ ID NO: 691061 - RNA, 19 nt, Artificial Sequence
  Description of Artificial Sequence: Synthetic oligonucleotide
  Antisense strand to SEQ ID NO: 691060
aucccuaagccauguaacu

SEQ ID NO: 691062 - RNA, 19 nt, Artificial Sequence
  Description of Artificial Sequence: Synthetic oligonucleotide
  Sense strand starting at position 2700 of SEQ ID NO: 586085
guaaaugacugagcuguca

SEQ ID NO: 691063 - RNA, 19 nt, Artificial Sequence
  Description of Artificial Sequence: Synthetic oligonucleotide
  Antisense strand to SEQ ID NO: 691062
ugacagcucagucauuuac

SEQ ID NO: 691064 - RNA, 19 nt, Artificial Sequence
  Description of Artificial Sequence: Synthetic oligonucleotide
  Sense strand starting at position 2819 of SEQ ID NO: 586085
uuggaaucuguguauguau

SEQ ID NO: 691065 - RNA, 19 nt, Artificial Sequence
  Description of Artificial Sequence: Synthetic oligonucleotide
  Antisense strand to SEQ ID NO: 691064
auacauacacagauuccaa

SEQ ID NO: 691066 - RNA, 19 nt, Artificial Sequence
  Description of Artificial Sequence: Synthetic oligonucleotide
  Sense strand starting at position 3191 of SEQ ID NO: 586085
guuaguaauuucuaacaga

SEQ ID NO: 691067 - RNA, 19 nt, Artificial Sequence
  Description of Artificial Sequence: Synthetic oligonucleotide
  Antisense strand to SEQ ID NO: 691066
ucuguuagaaauuacuaac

SEQ ID NO: 691068 - RNA, 19 nt, Artificial Sequence
  Description of Artificial Sequence: Synthetic oligonucleotide
  Sense strand starting at position 3342 of SEQ ID NO: 586085
gagaaauucucagaaagga

SEQ ID NO: 691069 - RNA, 19 nt, Artificial Sequence
  Description of Artificial Sequence: Synthetic oligonucleotide
  Antisense strand to SEQ ID NO: 691068
uccuuucugagaauuucuc

SEQ ID NO: 691070 - RNA, 19 nt, Artificial Sequence
  Description of Artificial Sequence: Synthetic oligonucleotide
  Sense strand starting at position 3371 of SEQ ID NO: 586085
acccuaaagagguguagaa

SEQ ID NO: 691071 - RNA, 19 nt, Artificial Sequence
  Description of Artificial Sequence: Synthetic oligonucleotide
  Antisense strand to SEQ ID NO: 691070
uucuacaccucuuuagggu

SEQ ID NO: 691072 - RNA, 19 nt, Artificial Sequence
  Description of Artificial Sequence: Synthetic oligonucleotide
  Sense strand starting at position 163 of SEQ ID NO: 586086
ggacaaacaucugccacua

SEQ ID NO: 691073 - RNA, 19 nt, Artificial Sequence
  Description of Artificial Sequence: Synthetic oligonucleotide
  Antisense strand to SEQ ID NO: 691072
uaguggcagauguuugucc

SEQ ID NO: 691074 - RNA, 19 nt, Artificial Sequence
  Description of Artificial Sequence: Synthetic oligonucleotide
  Sense strand starting at position 193 of SEQ ID NO: 586086
aagaaugugccaugggcaa

SEQ ID NO: 691075 - RNA, 19 nt, Artificial Sequence
  Description of Artificial Sequence: Synthetic oligonucleotide
  Antisense strand to SEQ ID NO: 691074
uugcccauggcacauucuu

SEQ ID NO: 691076 - RNA, 19 nt, Artificial Sequence
  Description of Artificial Sequence: Synthetic oligonucleotide
  Sense strand starting at position 206 of SEQ ID NO: 586086
gggcaauagcaacauaauu

SEQ ID NO: 691077 - RNA, 19 nt, Artificial Sequence
  Description of Artificial Sequence: Synthetic oligonucleotide
  Antisense strand to SEQ ID NO: 691076
aauuauguugcuauugccc

SEQ ID NO: 691078 - RNA, 19 nt, Artificial Sequence
  Description of Artificial Sequence: Synthetic oligonucleotide
  Sense strand starting at position 245 of SEQ ID NO: 586086
uugauugaagcaggcuuaa

SEQ ID NO: 691079 - RNA, 19 nt, Artificial Sequence
  Description of Artificial Sequence: Synthetic oligonucleotide
  Antisense strand to SEQ ID NO: 691078
uuaagccugcuucaaucaa

SEQ ID NO: 691080 - RNA, 19 nt, Artificial Sequence
  Description of Artificial Sequence: Synthetic oligonucleotide
  Sense strand starting at position 328 of SEQ ID NO: 586086
auaaucauguggucuuaac

SEQ ID NO: 691081 - RNA, 19 nt, Artificial Sequence
  Description of Artificial Sequence: Synthetic oligonucleotide
  Antisense strand to SEQ ID NO: 691080
guuaagaccacaugauuau

SEQ ID NO: 691082 - RNA, 19 nt, Artificial Sequence
  Description of Artificial Sequence: Synthetic oligonucleotide
  Sense strand starting at position 338 of SEQ ID NO: 586086
ggucuuaacuuauuguuaa

SEQ ID NO: 691083 - RNA, 19 nt, Artificial Sequence
  Description of Artificial Sequence: Synthetic oligonucleotide
  Antisense strand to SEQ ID NO: 691082
uuaacaauaaguuaagacc

SEQ ID NO: 691084 - RNA, 19 nt, Artificial Sequence
  Description of Artificial Sequence: Synthetic oligonucleotide
  Sense strand starting at position 351 of SEQ ID NO: 586086
uguuaacuuucuguauuuc

SEQ ID NO: 691085 - RNA, 19 nt, Artificial Sequence
  Description of Artificial Sequence: Synthetic oligonucleotide
  Antisense strand to SEQ ID NO: 691084
gaaauacagaaaguuaaca

SEQ ID NO: 691086 - RNA, 19 nt, Artificial Sequence
  Description of Artificial Sequence: Synthetic oligonucleotide
  Sense strand starting at position 422 of SEQ ID NO: 586086
ggacuuuccuggguucuga

SEQ ID NO: 691087 - RNA, 19 nt, Artificial Sequence
  Description of Artificial Sequence: Synthetic oligonucleotide
  Antisense strand to SEQ ID NO: 691086
ucagaacccaggaaagucc

SEQ ID NO: 691088 - RNA, 19 nt, Artificial Sequence
  Description of Artificial Sequence: Synthetic oligonucleotide
  Sense strand starting at position 596 of SEQ ID NO: 586086
uuucuauugcguguguaag

SEQ ID NO: 691089 - RNA, 19 nt, Artificial Sequence
  Description of Artificial Sequence: Synthetic oligonucleotide
  Antisense strand to SEQ ID NO: 691088
cuuacacacgcaauagaaa

SEQ ID NO: 691090 - RNA, 19 nt, Artificial Sequence
  Description of Artificial Sequence: Synthetic oligonucleotide
  Sense strand starting at position 612 of SEQ ID NO: 586086
aaguacuuccauuggaagu

SEQ ID NO: 691091 - RNA, 19 nt, Artificial Sequence
  Description of Artificial Sequence: Synthetic oligonucleotide
  Antisense strand to SEQ ID NO: 691090
acuuccaauggaaguacuu

SEQ ID NO: 691092 - RNA, 19 nt, Artificial Sequence
  Description of Artificial Sequence: Synthetic oligonucleotide
  Sense strand starting at position 688 of SEQ ID NO: 586086
auacaauggugcuuagaag

SEQ ID NO: 691093 - RNA, 19 nt, Artificial Sequence
  Description of Artificial Sequence: Synthetic oligonucleotide
  Antisense strand to SEQ ID NO: 691092
cuucuaagcaccauuguau

SEQ ID NO: 691094 - RNA, 19 nt, Artificial Sequence
  Description of Artificial Sequence: Synthetic oligonucleotide
  Sense strand starting at position 898 of SEQ ID NO: 586086
gaacucagagaccguaaua

SEQ ID NO: 691095 - RNA, 19 nt, Artificial Sequence
  Description of Artificial Sequence: Synthetic oligonucleotide
  Antisense strand to SEQ ID NO: 691094
uauuacggucucugaguuc

SEQ ID NO: 691096 - RNA, 19 nt, Artificial Sequence
  Description of Artificial Sequence: Synthetic oligonucleotide
  Sense strand starting at position 909 of SEQ ID NO: 586086
ccguaauagccucauaaac

SEQ ID NO: 691097 - RNA, 19 nt, Artificial Sequence
  Description of Artificial Sequence: Synthetic oligonucleotide
  Antisense strand to SEQ ID NO: 691096
guuuaugaggcuauuacgg

SEQ ID NO: 691098 - RNA, 19 nt, Artificial Sequence
  Description of Artificial Sequence: Synthetic oligonucleotide
  Sense strand starting at position 957 of SEQ ID NO: 586086
cuauucccacagugaaaga

SEQ ID NO: 691099 - RNA, 19 nt, Artificial Sequence
  Description of Artificial Sequence: Synthetic oligonucleotide
  Antisense strand to SEQ ID NO: 691098
ucuuucacugugggaauag

SEQ ID NO: 691100 - RNA, 19 nt, Artificial Sequence
  Description of Artificial Sequence: Synthetic oligonucleotide
  Sense strand starting at position 990 of SEQ ID NO: 586086
acgccauugacugggaacu

SEQ ID NO: 691101 - RNA, 19 nt, Artificial Sequence
  Description of Artificial Sequence: Synthetic oligonucleotide
  Antisense strand to SEQ ID NO: 691100
aguucccagucaauggcgu

SEQ ID NO: 691102 - RNA, 19 nt, Artificial Sequence
  Description of Artificial Sequence: Synthetic oligonucleotide
  Sense strand starting at position 1114 of SEQ ID NO: 586086
aacugauucggauguacag

SEQ ID NO: 691103 - RNA, 19 nt, Artificial Sequence
  Description of Artificial Sequence: Synthetic oligonucleotide
  Antisense strand to SEQ ID NO: 691102
cuguacauccgaaucaguu

SEQ ID NO: 691104 - RNA, 19 nt, Artificial Sequence
  Description of Artificial Sequence: Synthetic oligonucleotide
  Sense strand starting at position 1376 of SEQ ID NO: 586086
uacguaauacaaugaaugu

SEQ ID NO: 691105 - RNA, 19 nt, Artificial Sequence
  Description of Artificial Sequence: Synthetic oligonucleotide
  Antisense strand to SEQ ID NO: 691104
acauucauuguauuacgua

SEQ ID NO: 691106 - RNA, 19 nt, Artificial Sequence
  Description of Artificial Sequence: Synthetic oligonucleotide
  Sense strand starting at position 1483 of SEQ ID NO: 586086
aaaggagccucagugacau

SEQ ID NO: 691107 - RNA, 19 nt, Artificial Sequence
  Description of Artificial Sequence: Synthetic oligonucleotide
  Antisense strand to SEQ ID NO: 691106
augucacugaggcuccuuu

SEQ ID NO: 691108 - RNA, 19 nt, Artificial Sequence
  Description of Artificial Sequence: Synthetic oligonucleotide
  Sense strand starting at position 1609 of SEQ ID NO: 586086
acuucuuuccaagggugaa

SEQ ID NO: 691109 - RNA, 19 nt, Artificial Sequence
  Description of Artificial Sequence: Synthetic oligonucleotide
  Antisense strand to SEQ ID NO: 691108
uucacccuuggaaagaagu

SEQ ID NO: 691110 - RNA, 19 nt, Artificial Sequence
  Description of Artificial Sequence: Synthetic oligonucleotide
  Sense strand starting at position 1739 of SEQ ID NO: 586086
guucuuugccgccucaaga

SEQ ID NO: 691111 - RNA, 19 nt, Artificial Sequence
  Description of Artificial Sequence: Synthetic oligonucleotide
  Antisense strand to SEQ ID NO: 691110
ucuugaggcggcaaagaac

SEQ ID NO: 691112 - RNA, 19 nt, Artificial Sequence
  Description of Artificial Sequence: Synthetic oligonucleotide
  Sense strand starting at position 2764 of SEQ ID NO: 586086
aagacuucugucuguauug

SEQ ID NO: 691113 - RNA, 19 nt, Artificial Sequence
  Description of Artificial Sequence: Synthetic oligonucleotide
  Antisense strand to SEQ ID NO: 691112
caauacagacagaagucuu

SEQ ID NO: 691114 - RNA, 19 nt, Artificial Sequence
  Description of Artificial Sequence: Synthetic oligonucleotide
  Sense strand starting at position 2765 of SEQ ID NO: 586086
agacuucugucuguauuga

SEQ ID NO: 691115 - RNA, 19 nt, Artificial Sequence
  Description of Artificial Sequence: Synthetic oligonucleotide
  Antisense strand to SEQ ID NO: 691114
ucaauacagacagaagucu

SEQ ID NO: 691116 - RNA, 19 nt, Artificial Sequence
  Description of Artificial Sequence: Synthetic oligonucleotide
  Sense strand starting at position 2766 of SEQ ID NO: 586086
gacuucugucuguauugaa

SEQ ID NO: 691117 - RNA, 19 nt, Artificial Sequence
  Description of Artificial Sequence: Synthetic oligonucleotide
  Antisense strand to SEQ ID NO: 691116
uucaauacagacagaaguc

SEQ ID NO: 691118 - RNA, 19 nt, Artificial Sequence
  Description of Artificial Sequence: Synthetic oligonucleotide
  Sense strand starting at position 3023 of SEQ ID NO: 586086
agguuauugcgaggaauaa

SEQ ID NO: 691119 - RNA, 19 nt, Artificial Sequence
  Description of Artificial Sequence: Synthetic oligonucleotide
  Antisense strand to SEQ ID NO: 691118
uuauuccucgcaauaaccu

SEQ ID NO: 691120 - RNA, 19 nt, Artificial Sequence
  Description of Artificial Sequence: Synthetic oligonucleotide
  Sense strand starting at position 3024 of SEQ ID NO: 586086
gguuauugcgaggaauaaa

SEQ ID NO: 691121 - RNA, 19 nt, Artificial Sequence
  Description of Artificial Sequence: Synthetic oligonucleotide
  Antisense strand to SEQ ID NO: 691120
uuuauuccucgcaauaacc

SEQ ID NO: 691122 - RNA, 19 nt, Artificial Sequence
  Description of Artificial Sequence: Synthetic oligonucleotide
  Sense strand starting at position 3130 of SEQ ID NO: 586086
ccuuccuucugaucaggua

SEQ ID NO: 691123 - RNA, 19 nt, Artificial Sequence
  Description of Artificial Sequence: Synthetic oligonucleotide
  Antisense strand to SEQ ID NO: 691122
uaccugaucagaaggaagg

SEQ ID NO: 691124 - RNA, 19 nt, Artificial Sequence
  Description of Artificial Sequence: Synthetic oligonucleotide
  Sense strand starting at position 3212 of SEQ ID NO: 586086
uugucugaguucucagaga

SEQ ID NO: 691125 - RNA, 19 nt, Artificial Sequence
  Description of Artificial Sequence: Synthetic oligonucleotide
  Antisense strand to SEQ ID NO: 691124
ucucugagaacucagacaa

SEQ ID NO: 691126 - RNA, 19 nt, Artificial Sequence
  Description of Artificial Sequence: Synthetic oligonucleotide
  Sense strand starting at position 3316 of SEQ ID NO: 586086
cagguuauguaauucuuga

SEQ ID NO: 691127 - RNA, 19 nt, Artificial Sequence
  Description of Artificial Sequence: Synthetic oligonucleotide
  Antisense strand to SEQ ID NO: 691126
ucaagaauuacauaaccug

SEQ ID NO: 691128 - RNA, 19 nt, Artificial Sequence
  Description of Artificial Sequence: Synthetic oligonucleotide
  Sense strand starting at position 3332 of SEQ ID NO: 586086
ugacucagucauuggaucu

SEQ ID NO: 691129 - RNA, 19 nt, Artificial Sequence
  Description of Artificial Sequence: Synthetic oligonucleotide
  Antisense strand to SEQ ID NO: 691128
agauccaaugacugaguca

SEQ ID NO: 691130 - RNA, 19 nt, Artificial Sequence
  Description of Artificial Sequence: Synthetic oligonucleotide
  Sense strand starting at position 3375 of SEQ ID NO: 586086
uagggauacuguguguaaa

SEQ ID NO: 691131 - RNA, 19 nt, Artificial Sequence
  Description of Artificial Sequence: Synthetic oligonucleotide
  Antisense strand to SEQ ID NO: 691130
uuuacacacaguaucccua

SEQ ID NO: 691132 - RNA, 19 nt, Artificial Sequence
  Description of Artificial Sequence: Synthetic oligonucleotide
  Sense strand starting at position 3376 of SEQ ID NO: 586086
agggauacuguguguaaag

SEQ ID NO: 691133 - RNA, 19 nt, Artificial Sequence
  Description of Artificial Sequence: Synthetic oligonucleotide
  Antisense strand to SEQ ID NO: 691132
cuuuacacacaguaucccu

SEQ ID NO: 691134 - RNA, 19 nt, Artificial Sequence
  Description of Artificial Sequence: Synthetic oligonucleotide
  Sense strand starting at position 3385 of SEQ ID NO: 586086
guguguaaaguguccugca

SEQ ID NO: 691135 - RNA, 19 nt, Artificial Sequence
  Description of Artificial Sequence: Synthetic oligonucleotide
  Antisense strand to SEQ ID NO: 691134
ugcaggacacuuuacacac

SEQ ID NO: 691136 - RNA, 19 nt, Artificial Sequence
  Description of Artificial Sequence: Synthetic oligonucleotide
  Sense strand starting at position 3424 of SEQ ID NO: 586086
uggugacuauuauuauagu

SEQ ID NO: 691137 - RNA, 19 nt, Artificial Sequence
  Description of Artificial Sequence: Synthetic oligonucleotide
  Antisense strand to SEQ ID NO: 691136
acuauaauaauagucacca

SEQ ID NO: 691138 - RNA, 19 nt, Artificial Sequence
  Description of Artificial Sequence: Synthetic oligonucleotide
  Sense strand starting at position 3639 of SEQ ID NO: 586086
aucagucuaccaugaccau

SEQ ID NO: 691139 - RNA, 19 nt, Artificial Sequence
  Description of Artificial Sequence: Synthetic oligonucleotide
  Antisense strand to SEQ ID NO: 691138
auggucaugguagacugau

SEQ ID NO: 691140 - RNA, 19 nt, Artificial Sequence
  Description of Artificial Sequence: Synthetic oligonucleotide
  Sense strand starting at position 3654 of SEQ ID NO: 586086
ccaugaggauucucuucuu

SEQ ID NO: 691141 - RNA, 19 nt, Artificial Sequence
  Description of Artificial Sequence: Synthetic oligonucleotide
  Antisense strand to SEQ ID NO: 691140
aagaagagaauccucaugg

SEQ ID NO: 691142 - RNA, 19 nt, Artificial Sequence
  Description of Artificial Sequence: Synthetic oligonucleotide
  Sense strand starting at position 3657 of SEQ ID NO: 586086
ugaggauucucuucuuaaa

SEQ ID NO: 691143 - RNA, 19 nt, Artificial Sequence
  Description of Artificial Sequence: Synthetic oligonucleotide
  Antisense strand to SEQ ID NO: 691142
uuuaagaagagaauccuca

SEQ ID NO: 691144 - RNA, 19 nt, Artificial Sequence
  Description of Artificial Sequence: Synthetic oligonucleotide
  Sense strand starting at position 3711 of SEQ ID NO: 586086
gcggucagaucauuauuuc

SEQ ID NO: 691145 - RNA, 19 nt, Artificial Sequence
  Description of Artificial Sequence: Synthetic oligonucleotide
  Antisense strand to SEQ ID NO: 691144
gaaauaaugaucugaccgc

SEQ ID NO: 691146 - RNA, 19 nt, Artificial Sequence
  Description of Artificial Sequence: Synthetic oligonucleotide
  Sense strand starting at position 3742 of SEQ ID NO: 586086
gacggaagcaguuggaauu

SEQ ID NO: 691147 - RNA, 19 nt, Artificial Sequence
  Description of Artificial Sequence: Synthetic oligonucleotide
  Antisense strand to SEQ ID NO: 691146
aauuccaacugcuuccguc

SEQ ID NO: 691148 - RNA, 19 nt, Artificial Sequence
  Description of Artificial Sequence: Synthetic oligonucleotide
  Sense strand starting at position 3755 of SEQ ID NO: 586086
ggaauuguguaguuugaaa

SEQ ID NO: 691149 - RNA, 19 nt, Artificial Sequence
  Description of Artificial Sequence: Synthetic oligonucleotide
  Antisense strand to SEQ ID NO: 691148
uuucaaacuacacaauucc

SEQ ID NO: 691150 - RNA, 19 nt, Artificial Sequence
  Description of Artificial Sequence: Synthetic oligonucleotide
  Sense strand starting at position 3757 of SEQ ID NO: 586086
aauuguguaguuugaaaga

SEQ ID NO: 691151 - RNA, 19 nt, Artificial Sequence
  Description of Artificial Sequence: Synthetic oligonucleotide
  Antisense strand to SEQ ID NO: 691150
ucuuucaaacuacacaauu

SEQ ID NO: 691152 - RNA, 19 nt, Artificial Sequence
  Description of Artificial Sequence: Synthetic oligonucleotide
  Sense strand starting at position 21 of SEQ ID NO: 586087
guuuguaaugcauaucaaa

SEQ ID NO: 691153 - RNA, 19 nt, Artificial Sequence
  Description of Artificial Sequence: Synthetic oligonucleotide
  Antisense strand to SEQ ID NO: 691152
uuugauaugcauuacaaac

SEQ ID NO: 691154 - RNA, 19 nt, Artificial Sequence
  Description of Artificial Sequence: Synthetic oligonucleotide
  Sense strand starting at position 68 of SEQ ID NO: 586087
agcacaaagccuugagaaa

SEQ ID NO: 691155 - RNA, 19 nt, Artificial Sequence
  Description of Artificial Sequence: Synthetic oligonucleotide
  Antisense strand to SEQ ID NO: 691154
uuucucaaggcuuugugcu

SEQ ID NO: 691156 - RNA, 19 nt, Artificial Sequence
  Description of Artificial Sequence: Synthetic oligonucleotide
  Sense strand starting at position 69 of SEQ ID NO: 586087
gcacaaagccuugagaaac

SEQ ID NO: 691157 - RNA, 19 nt, Artificial Sequence
  Description of Artificial Sequence: Synthetic oligonucleotide
  Antisense strand to SEQ ID NO: 691156
guuucucaaggcuuugugc

SEQ ID NO: 691158 - RNA, 19 nt, Artificial Sequence
  Description of Artificial Sequence: Synthetic oligonucleotide
  Sense strand starting at position 465 of SEQ ID NO: 586087
acuccauuacagggagagu

SEQ ID NO: 691159 - RNA, 19 nt, Artificial Sequence
  Description of Artificial Sequence: Synthetic oligonucleotide
  Antisense strand to SEQ ID NO: 691158
acucucccuguaauggagu

SEQ ID NO: 691160 - RNA, 19 nt, Artificial Sequence
  Description of Artificial Sequence: Synthetic oligonucleotide
  Sense strand starting at position 518 of SEQ ID NO: 586087
aaauuagagaguggucagu

SEQ ID NO: 691161 - RNA, 19 nt, Artificial Sequence
  Description of Artificial Sequence: Synthetic oligonucleotide
  Antisense strand to SEQ ID NO: 691160
acugaccacucucuaauuu

SEQ ID NO: 691162 - RNA, 19 nt, Artificial Sequence
  Description of Artificial Sequence: Synthetic oligonucleotide
  Sense strand starting at position 589 of SEQ ID NO: 586087
auauacaucuggucagaga

SEQ ID NO: 691163 - RNA, 19 nt, Artificial Sequence
  Description of Artificial Sequence: Synthetic oligonucleotide
  Antisense strand to SEQ ID NO: 691162
ucucugaccagauguauau

SEQ ID NO: 691164 - RNA, 19 nt, Artificial Sequence
  Description of Artificial Sequence: Synthetic oligonucleotide
  Sense strand starting at position 705 of SEQ ID NO: 586087
cuauuuagauaguagagaa

SEQ ID NO: 691165 - RNA, 19 nt, Artificial Sequence
  Description of Artificial Sequence: Synthetic oligonucleotide
  Antisense strand to SEQ ID NO: 691164
uucucuacuaucuaaauag

SEQ ID NO: 691166 - RNA, 19 nt, Artificial Sequence
  Description of Artificial Sequence: Synthetic oligonucleotide
  Sense strand starting at position 756 of SEQ ID NO: 586087
agcaauuugugagccaguu

SEQ ID NO: 691167 - RNA, 19 nt, Artificial Sequence
  Description of Artificial Sequence: Synthetic oligonucleotide
  Antisense strand to SEQ ID NO: 691166
aacuggcucacaaauugcu

SEQ ID NO: 691168 - RNA, 19 nt, Artificial Sequence
  Description of Artificial Sequence: Synthetic oligonucleotide
  Sense strand starting at position 879 of SEQ ID NO: 586087
acuugucaaguuugagaua

SEQ ID NO: 691169 - RNA, 19 nt, Artificial Sequence
  Description of Artificial Sequence: Synthetic oligonucleotide
  Antisense strand to SEQ ID NO: 691168
uaucucaaacuugacaagu

SEQ ID NO: 691170 - RNA, 19 nt, Artificial Sequence
  Description of Artificial Sequence: Synthetic oligonucleotide
  Sense strand starting at position 891 of SEQ ID NO: 586087
ugagauauuugugagauaa

SEQ ID NO: 691171 - RNA, 19 nt, Artificial Sequence
  Description of Artificial Sequence: Synthetic oligonucleotide
  Antisense strand to SEQ ID NO: 691170
uuaucucacaaauaucuca

SEQ ID NO: 691172 - RNA, 19 nt, Artificial Sequence
  Description of Artificial Sequence: Synthetic oligonucleotide
  Sense strand starting at position 893 of SEQ ID NO: 586087
agauauuugugagauaauc

SEQ ID NO: 691173 - RNA, 19 nt, Artificial Sequence
  Description of Artificial Sequence: Synthetic oligonucleotide
  Antisense strand to SEQ ID NO: 691172
gauuaucucacaaauaucu

SEQ ID NO: 691174 - RNA, 19 nt, Artificial Sequence
  Description of Artificial Sequence: Synthetic oligonucleotide
  Sense strand starting at position 916 of SEQ ID NO: 586087
aguaauauccagcacuaag

SEQ ID NO: 691175 - RNA, 19 nt, Artificial Sequence
  Description of Artificial Sequence: Synthetic oligonucleotide
  Antisense strand to SEQ ID NO: 691174
cuuagugcuggauauuacu

SEQ ID NO: 691176 - RNA, 19 nt, Artificial Sequence
  Description of Artificial Sequence: Synthetic oligonucleotide
  Sense strand starting at position 1035 of SEQ ID NO: 586087
uggcaaguacuauggaaca

SEQ ID NO: 691177 - RNA, 19 nt, Artificial Sequence
  Description of Artificial Sequence: Synthetic oligonucleotide
  Antisense strand to SEQ ID NO: 691176
uguuccauaguacuugcca

SEQ ID NO: 691178 - RNA, 19 nt, Artificial Sequence
  Description of Artificial Sequence: Synthetic oligonucleotide
  Sense strand starting at position 1177 of SEQ ID NO: 586087
augagaugcacuuaacguu

SEQ ID NO: 691179 - RNA, 19 nt, Artificial Sequence
  Description of Artificial Sequence: Synthetic oligonucleotide
  Antisense strand to SEQ ID NO: 691178
aacguuaagugcaucucau

SEQ ID NO: 691180 - RNA, 19 nt, Artificial Sequence
  Description of Artificial Sequence: Synthetic oligonucleotide
  Sense strand starting at position 1230 of SEQ ID NO: 586087
cuaagauauacugguugga

SEQ ID NO: 691181 - RNA, 19 nt, Artificial Sequence
  Description of Artificial Sequence: Synthetic oligonucleotide
  Antisense strand to SEQ ID NO: 691180
uccaaccaguauaucuuag

SEQ ID NO: 691182 - RNA, 19 nt, Artificial Sequence
  Description of Artificial Sequence: Synthetic oligonucleotide
  Sense strand starting at position 1257 of SEQ ID NO: 586087
augggaucuuugguuagau

SEQ ID NO: 691183 - RNA, 19 nt, Artificial Sequence
  Description of Artificial Sequence: Synthetic oligonucleotide
  Antisense strand to SEQ ID NO: 691182
aucuaaccaaagaucccau

SEQ ID NO: 691184 - RNA, 19 nt, Artificial Sequence
  Description of Artificial Sequence: Synthetic oligonucleotide
  Sense strand starting at position 1258 of SEQ ID NO: 586087
ugggaucuuugguuagaug

SEQ ID NO: 691185 - RNA, 19 nt, Artificial Sequence
  Description of Artificial Sequence: Synthetic oligonucleotide
  Antisense strand to SEQ ID NO: 691184
caucuaaccaaagauccca

SEQ ID NO: 691186 - RNA, 19 nt, Artificial Sequence
  Description of Artificial Sequence: Synthetic oligonucleotide
  Sense strand starting at position 2070 of SEQ ID NO: 586087
ccuaauauaccuggcaaga

SEQ ID NO: 691187 - RNA, 19 nt, Artificial Sequence
  Description of Artificial Sequence: Synthetic oligonucleotide
  Antisense strand to SEQ ID NO: 691186
ucuugccagguauauuagg

SEQ ID NO: 691188 - RNA, 19 nt, Artificial Sequence
  Description of Artificial Sequence: Synthetic oligonucleotide
  Sense strand starting at position 2087 of SEQ ID NO: 586087
gacagacguuaugugauga

SEQ ID NO: 691189 - RNA, 19 nt, Artificial Sequence
  Description of Artificial Sequence: Synthetic oligonucleotide
  Antisense strand to SEQ ID NO: 691188
ucaucacauaacgucuguc

SEQ ID NO: 691190 - RNA, 19 nt, Artificial Sequence
  Description of Artificial Sequence: Synthetic oligonucleotide
  Sense strand starting at position 2088 of SEQ ID NO: 586087
acagacguuaugugaugaa

SEQ ID NO: 691191 - RNA, 19 nt, Artificial Sequence
  Description of Artificial Sequence: Synthetic oligonucleotide
  Antisense strand to SEQ ID NO: 691190
uucaucacauaacgucugu

SEQ ID NO: 691192 - RNA, 19 nt, Artificial Sequence
  Description of Artificial Sequence: Synthetic oligonucleotide
  Sense strand starting at position 2114 of SEQ ID NO: 586087
aagagugacuauucuagua

SEQ ID NO: 691193 - RNA, 19 nt, Artificial Sequence
  Description of Artificial Sequence: Synthetic oligonucleotide
  Antisense strand to SEQ ID NO: 691192
uacuagaauagucacucuu

SEQ ID NO: 691194 - RNA, 19 nt, Artificial Sequence
  Description of Artificial Sequence: Synthetic oligonucleotide
  Sense strand starting at position 2186 of SEQ ID NO: 586087
gaggauggcccugagguua

SEQ ID NO: 691195 - RNA, 19 nt, Artificial Sequence
  Description of Artificial Sequence: Synthetic oligonucleotide
  Antisense strand to SEQ ID NO: 691194
uaaccucagggccauccuc

SEQ ID NO: 691196 - RNA, 19 nt, Artificial Sequence
  Description of Artificial Sequence: Synthetic oligonucleotide
  Sense strand starting at position 2270 of SEQ ID NO: 586087
uuaggaaugcaaggugaau

SEQ ID NO: 691197 - RNA, 19 nt, Artificial Sequence
  Description of Artificial Sequence: Synthetic oligonucleotide
  Antisense strand to SEQ ID NO: 691196
auucaccuugcauuccuaa

SEQ ID NO: 691198 - RNA, 19 nt, Artificial Sequence
  Description of Artificial Sequence: Synthetic oligonucleotide
  Sense strand starting at position 2272 of SEQ ID NO: 586087
aggaaugcaaggugaauua

SEQ ID NO: 691199 - RNA, 19 nt, Artificial Sequence
  Description of Artificial Sequence: Synthetic oligonucleotide
  Antisense strand to SEQ ID NO: 691198
uaauucaccuugcauuccu

SEQ ID NO: 691200 - RNA, 19 nt, Artificial Sequence
  Description of Artificial Sequence: Synthetic oligonucleotide
  Sense strand starting at position 2279 of SEQ ID NO: 586087
caaggugaauuaucucaug

SEQ ID NO: 691201 - RNA, 19 nt, Artificial Sequence
  Description of Artificial Sequence: Synthetic oligonucleotide
  Antisense strand to SEQ ID NO: 691200
caugagauaauucaccuug

SEQ ID NO: 691202 - RNA, 19 nt, Artificial Sequence
  Description of Artificial Sequence: Synthetic oligonucleotide
  Sense strand starting at position 2285 of SEQ ID NO: 586087
gaauuaucucaugguagag

SEQ ID NO: 691203 - RNA, 19 nt, Artificial Sequence
  Description of Artificial Sequence: Synthetic oligonucleotide
  Antisense strand to SEQ ID NO: 691202
cucuaccaugagauaauuc

SEQ ID NO: 691204 - RNA, 19 nt, Artificial Sequence
  Description of Artificial Sequence: Synthetic oligonucleotide
  Sense strand starting at position 2306 of SEQ ID NO: 586087
augagaacgguuuggauag

SEQ ID NO: 691205 - RNA, 19 nt, Artificial Sequence
  Description of Artificial Sequence: Synthetic oligonucleotide
  Antisense strand to SEQ ID NO: 691204
cuauccaaaccguucucau

SEQ ID NO: 691206 - RNA, 19 nt, Artificial Sequence
  Description of Artificial Sequence: Synthetic oligonucleotide
  Sense strand starting at position 2430 of SEQ ID NO: 586087
agacaaagccauugguauu

SEQ ID NO: 691207 - RNA, 19 nt, Artificial Sequence
  Description of Artificial Sequence: Synthetic oligonucleotide
  Antisense strand to SEQ ID NO: 691206
aauaccaauggcuuugucu

SEQ ID NO: 691208 - RNA, 19 nt, Artificial Sequence
  Description of Artificial Sequence: Synthetic oligonucleotide
  Sense strand starting at position 2437 of SEQ ID NO: 586087
gccauugguauuugguaca

SEQ ID NO: 691209 - RNA, 19 nt, Artificial Sequence
  Description of Artificial Sequence: Synthetic oligonucleotide
  Antisense strand to SEQ ID NO: 691208
uguaccaaauaccaauggc

SEQ ID NO: 691210 - RNA, 19 nt, Artificial Sequence
  Description of Artificial Sequence: Synthetic oligonucleotide
  Sense strand starting at position 2449 of SEQ ID NO: 586087
ugguacaauuaaccugauu

SEQ ID NO: 691211 - RNA, 19 nt, Artificial Sequence
  Description of Artificial Sequence: Synthetic oligonucleotide
  Antisense strand to SEQ ID NO: 691210
aaucagguuaauuguacca

SEQ ID NO: 691212 - RNA, 19 nt, Artificial Sequence
  Description of Artificial Sequence: Synthetic oligonucleotide
  Sense strand starting at position 2473 of SEQ ID NO: 586087
acauuacagccauggauau

SEQ ID NO: 691213 - RNA, 19 nt, Artificial Sequence
  Description of Artificial Sequence: Synthetic oligonucleotide
  Antisense strand to SEQ ID NO: 691212
auauccauggcuguaaugu

SEQ ID NO: 691214 - RNA, 19 nt, Artificial Sequence
  Description of Artificial Sequence: Synthetic oligonucleotide
  Sense strand starting at position 2543 of SEQ ID NO: 586087
guuugauagcaguaaguaa

SEQ ID NO: 691215 - RNA, 19 nt, Artificial Sequence
  Description of Artificial Sequence: Synthetic oligonucleotide
  Antisense strand to SEQ ID NO: 691214
uuacuuacugcuaucaaac

SEQ ID NO: 691216 - RNA, 19 nt, Artificial Sequence
  Description of Artificial Sequence: Synthetic oligonucleotide
  Sense strand starting at position 2560 of SEQ ID NO: 586087
aagacuauuugagagguau

SEQ ID NO: 691217 - RNA, 19 nt, Artificial Sequence
  Description of Artificial Sequence: Synthetic oligonucleotide
  Antisense strand to SEQ ID NO: 691216
auaccucucaaauagucuu

SEQ ID NO: 691218 - RNA, 19 nt, Artificial Sequence
  Description of Artificial Sequence: Synthetic oligonucleotide
  Sense strand starting at position 2671 of SEQ ID NO: 586087
aguaguaaagaugguaaua

SEQ ID NO: 691219 - RNA, 19 nt, Artificial Sequence
  Description of Artificial Sequence: Synthetic oligonucleotide
  Antisense strand to SEQ ID NO: 691218
uauuaccaucuuuacuacu

SEQ ID NO: 691220 - RNA, 19 nt, Artificial Sequence
  Description of Artificial Sequence: Synthetic oligonucleotide
  Sense strand starting at position 2759 of SEQ ID NO: 586087
gauauugguguccaaguga

SEQ ID NO: 691221 - RNA, 19 nt, Artificial Sequence
  Description of Artificial Sequence: Synthetic oligonucleotide
  Antisense strand to SEQ ID NO: 691220
ucacuuggacaccaauauc

SEQ ID NO: 691222 - RNA, 19 nt, Artificial Sequence
  Description of Artificial Sequence: Synthetic oligonucleotide
  Sense strand starting at position 2786 of SEQ ID NO: 586087
ggcaaacagauguaaaugu

SEQ ID NO: 691223 - RNA, 19 nt, Artificial Sequence
  Description of Artificial Sequence: Synthetic oligonucleotide
  Antisense strand to SEQ ID NO: 691222
acauuuacaucuguuugcc

SEQ ID NO: 691224 - RNA, 19 nt, Artificial Sequence
  Description of Artificial Sequence: Synthetic oligonucleotide
  Sense strand starting at position 2915 of SEQ ID NO: 586087
acagaagugguguaaugua

SEQ ID NO: 691225 - RNA, 19 nt, Artificial Sequence
  Description of Artificial Sequence: Synthetic oligonucleotide
  Antisense strand to SEQ ID NO: 691224
uacauuacaccacuucugu

SEQ ID NO: 691226 - RNA, 19 nt, Artificial Sequence
  Description of Artificial Sequence: Synthetic oligonucleotide
  Sense strand starting at position 3256 of SEQ ID NO: 586087
ugugcgugucuggugagaa

SEQ ID NO: 691227 - RNA, 19 nt, Artificial Sequence
  Description of Artificial Sequence: Synthetic oligonucleotide
  Antisense strand to SEQ ID NO: 691226
uucucaccagacacgcaca

SEQ ID NO: 691228 - RNA, 19 nt, Artificial Sequence
  Description of Artificial Sequence: Synthetic oligonucleotide
  Sense strand starting at position 3634 of SEQ ID NO: 586087
agaauaaugccgcaaugga

SEQ ID NO: 691229 - RNA, 19 nt, Artificial Sequence
  Description of Artificial Sequence: Synthetic oligonucleotide
  Antisense strand to SEQ ID NO: 691228
uccauugcggcauuauucu

SEQ ID NO: 691230 - RNA, 19 nt, Artificial Sequence
  Description of Artificial Sequence: Synthetic oligonucleotide
  Sense strand starting at position 3779 of SEQ ID NO: 586087
ccauaauggcaguaccaau

SEQ ID NO: 691231 - RNA, 19 nt, Artificial Sequence
  Description of Artificial Sequence: Synthetic oligonucleotide
  Antisense strand to SEQ ID NO: 691230
auugguacugccauuaugg

SEQ ID NO: 691232 - RNA, 19 nt, Artificial Sequence
  Description of Artificial Sequence: Synthetic oligonucleotide
  Sense strand starting at position 6 of SEQ ID NO: 586088
ggaaucucccuuugaauuc

SEQ ID NO: 691233 - RNA, 19 nt, Artificial Sequence
  Description of Artificial Sequence: Synthetic oligonucleotide
  Antisense strand to SEQ ID NO: 691232
gaauucaaagggagauucc

SEQ ID NO: 691234 - RNA, 19 nt, Artificial Sequence
  Description of Artificial Sequence: Synthetic oligonucleotide
  Sense strand starting at position 147 of SEQ ID NO: 586088
aggaguaccucuucucaca

SEQ ID NO: 691235 - RNA, 19 nt, Artificial Sequence
  Description of Artificial Sequence: Synthetic oligonucleotide
  Antisense strand to SEQ ID NO: 691234
ugugagaagagguacuccu

SEQ ID NO: 691236 - RNA, 19 nt, Artificial Sequence
  Description of Artificial Sequence: Synthetic oligonucleotide
  Sense strand starting at position 192 of SEQ ID NO: 586088
ucuggucauuccuugaaag

SEQ ID NO: 691237 - RNA, 19 nt, Artificial Sequence
  Description of Artificial Sequence: Synthetic oligonucleotide
  Antisense strand to SEQ ID NO: 691236
cuuucaaggaaugaccaga

SEQ ID NO: 691238 - RNA, 19 nt, Artificial Sequence
  Description of Artificial Sequence: Synthetic oligonucleotide
  Sense strand starting at position 193 of SEQ ID NO: 586088
cuggucauuccuugaaaga

SEQ ID NO: 691239 - RNA, 19 nt, Artificial Sequence
  Description of Artificial Sequence: Synthetic oligonucleotide
  Antisense strand to SEQ ID NO: 691238
ucuuucaaggaaugaccag

SEQ ID NO: 691240 - RNA, 19 nt, Artificial Sequence
  Description of Artificial Sequence: Synthetic oligonucleotide
  Sense strand starting at position 397 of SEQ ID NO: 586088
uguaguuugaaauacugua

SEQ ID NO: 691241 - RNA, 19 nt, Artificial Sequence
  Description of Artificial Sequence: Synthetic oligonucleotide
  Antisense strand to SEQ ID NO: 691240
uacaguauuucaaacuaca

SEQ ID NO: 691242 - RNA, 19 nt, Artificial Sequence
  Description of Artificial Sequence: Synthetic oligonucleotide
  Sense strand starting at position 402 of SEQ ID NO: 586088
uuugaaauacuguacaguu

SEQ ID NO: 691243 - RNA, 19 nt, Artificial Sequence
  Description of Artificial Sequence: Synthetic oligonucleotide
  Antisense strand to SEQ ID NO: 691242
aacuguacaguauuucaaa

SEQ ID NO: 691244 - RNA, 19 nt, Artificial Sequence
  Description of Artificial Sequence: Synthetic oligonucleotide
  Sense strand starting at position 450 of SEQ ID NO: 586088
caauaaugguaaucgguaa

SEQ ID NO: 691245 - RNA, 19 nt, Artificial Sequence
  Description of Artificial Sequence: Synthetic oligonucleotide
  Antisense strand to SEQ ID NO: 691244
uuaccgauuaccauuauug

SEQ ID NO: 691246 - RNA, 19 nt, Artificial Sequence
  Description of Artificial Sequence: Synthetic oligonucleotide
  Sense strand starting at position 454 of SEQ ID NO: 586088
aaugguaaucgguaauuaa

SEQ ID NO: 691247 - RNA, 19 nt, Artificial Sequence
  Description of Artificial Sequence: Synthetic oligonucleotide
  Antisense strand to SEQ ID NO: 691246
uuaauuaccgauuaccauu

SEQ ID NO: 691248 - RNA, 19 nt, Artificial Sequence
  Description of Artificial Sequence: Synthetic oligonucleotide
  Sense strand starting at position 458 of SEQ ID NO: 586088
guaaucgguaauuaaguaa

SEQ ID NO: 691249 - RNA, 19 nt, Artificial Sequence
  Description of Artificial Sequence: Synthetic oligonucleotide
  Antisense strand to SEQ ID NO: 691248
uuacuuaauuaccgauuac

SEQ ID NO: 691250 - RNA, 19 nt, Artificial Sequence
  Description of Artificial Sequence: Synthetic oligonucleotide
  Sense strand starting at position 461 of SEQ ID NO: 586088
aucgguaauuaaguaacaa

SEQ ID NO: 691251 - RNA, 19 nt, Artificial Sequence
  Description of Artificial Sequence: Synthetic oligonucleotide
  Antisense strand to SEQ ID NO: 691250
uuguuacuuaauuaccgau

SEQ ID NO: 691252 - RNA, 19 nt, Artificial Sequence
  Description of Artificial Sequence: Synthetic oligonucleotide
  Sense strand starting at position 550 of SEQ ID NO: 586088
aggaguagguaggucuuua

SEQ ID NO: 691253 - RNA, 19 nt, Artificial Sequence
  Description of Artificial Sequence: Synthetic oligonucleotide
  Antisense strand to SEQ ID NO: 691252
uaaagaccuaccuacuccu

SEQ ID NO: 691254 - RNA, 19 nt, Artificial Sequence
  Description of Artificial Sequence: Synthetic oligonucleotide
  Sense strand starting at position 555 of SEQ ID NO: 586088
uagguaggucuuuauacaa

SEQ ID NO: 691255 - RNA, 19 nt, Artificial Sequence
  Description of Artificial Sequence: Synthetic oligonucleotide
  Antisense strand to SEQ ID NO: 691254
uuguauaaagaccuaccua

SEQ ID NO: 691256 - RNA, 19 nt, Artificial Sequence
  Description of Artificial Sequence: Synthetic oligonucleotide
  Sense strand starting at position 568 of SEQ ID NO: 586088
auacaaauucuguagcaga

SEQ ID NO: 691257 - RNA, 19 nt, Artificial Sequence
  Description of Artificial Sequence: Synthetic oligonucleotide
  Antisense strand to SEQ ID NO: 691256
ucugcuacagaauuuguau

SEQ ID NO: 691258 - RNA, 19 nt, Artificial Sequence
  Description of Artificial Sequence: Synthetic oligonucleotide
  Sense strand starting at position 664 of SEQ ID NO: 586088
uuaguaaucgccuugugca

SEQ ID NO: 691259 - RNA, 19 nt, Artificial Sequence
  Description of Artificial Sequence: Synthetic oligonucleotide
  Antisense strand to SEQ ID NO: 691258
ugcacaaggcgauuacuaa

SEQ ID NO: 691260 - RNA, 19 nt, Artificial Sequence
  Description of Artificial Sequence: Synthetic oligonucleotide
  Sense strand starting at position 666 of SEQ ID NO: 586088
aguaaucgccuugugcaau

SEQ ID NO: 691261 - RNA, 19 nt, Artificial Sequence
  Description of Artificial Sequence: Synthetic oligonucleotide
  Antisense strand to SEQ ID NO: 691260
auugcacaaggcgauuacu

SEQ ID NO: 691262 - RNA, 19 nt, Artificial Sequence
  Description of Artificial Sequence: Synthetic oligonucleotide
  Sense strand starting at position 770 of SEQ ID NO: 586088
cuugucaaagacugaauga

SEQ ID NO: 691263 - RNA, 19 nt, Artificial Sequence
  Description of Artificial Sequence: Synthetic oligonucleotide
  Antisense strand to SEQ ID NO: 691262
ucauucagucuuugacaag

SEQ ID NO: 691264 - RNA, 19 nt, Artificial Sequence
  Description of Artificial Sequence: Synthetic oligonucleotide
  Sense strand starting at position 823 of SEQ ID NO: 586088
guguaaaggcgauaaagua

SEQ ID NO: 691265 - RNA, 19 nt, Artificial Sequence
  Description of Artificial Sequence: Synthetic oligonucleotide
  Antisense strand to SEQ ID NO: 691264
uacuuuaucgccuuuacac

SEQ ID NO: 691266 - RNA, 19 nt, Artificial Sequence
  Description of Artificial Sequence: Synthetic oligonucleotide
  Sense strand starting at position 848 of SEQ ID NO: 586088
gcaauugcugcugcaguaa

SEQ ID NO: 691267 - RNA, 19 nt, Artificial Sequence
  Description of Artificial Sequence: Synthetic oligonucleotide
  Antisense strand to SEQ ID NO: 691266
uuacugcagcagcaauugc

SEQ ID NO: 691268 - RNA, 19 nt, Artificial Sequence
  Description of Artificial Sequence: Synthetic oligonucleotide
  Sense strand starting at position 999 of SEQ ID NO: 586088
acauuuagguguguuccca

SEQ ID NO: 691269 - RNA, 19 nt, Artificial Sequence
  Description of Artificial Sequence: Synthetic oligonucleotide
  Antisense strand to SEQ ID NO: 691268
ugggaacacaccuaaaugu

SEQ ID NO: 691270 - RNA, 19 nt, Artificial Sequence
  Description of Artificial Sequence: Synthetic oligonucleotide
  Sense strand starting at position 1095 of SEQ ID NO: 586088
cuaguugauccagaguuau

SEQ ID NO: 691271 - RNA, 19 nt, Artificial Sequence
  Description of Artificial Sequence: Synthetic oligonucleotide
  Antisense strand to SEQ ID NO: 691270
auaacucuggaucaacuag

SEQ ID NO: 691272 - RNA, 19 nt, Artificial Sequence
  Description of Artificial Sequence: Synthetic oligonucleotide
  Sense strand starting at position 1197 of SEQ ID NO: 586088
agagaagaucuuggccagu

SEQ ID NO: 691273 - RNA, 19 nt, Artificial Sequence
  Description of Artificial Sequence: Synthetic oligonucleotide
  Antisense strand to SEQ ID NO: 691272
acuggccaagaucuucucu

SEQ ID NO: 691274 - RNA, 19 nt, Artificial Sequence
  Description of Artificial Sequence: Synthetic oligonucleotide
  Sense strand starting at position 1199 of SEQ ID NO: 586088
agaagaucuuggccaguag

SEQ ID NO: 691275 - RNA, 19 nt, Artificial Sequence
  Description of Artificial Sequence: Synthetic oligonucleotide
  Antisense strand to SEQ ID NO: 691274
cuacuggccaagaucuucu

SEQ ID NO: 691276 - RNA, 19 nt, Artificial Sequence
  Description of Artificial Sequence: Synthetic oligonucleotide
  Sense strand starting at position 1235 of SEQ ID NO: 586088
cugcacaauugcguaauuu

SEQ ID NO: 691277 - RNA, 19 nt, Artificial Sequence
  Description of Artificial Sequence: Synthetic oligonucleotide
  Antisense strand to SEQ ID NO: 691276
aaauuacgcaauugugcag

SEQ ID NO: 691278 - RNA, 19 nt, Artificial Sequence
  Description of Artificial Sequence: Synthetic oligonucleotide
  Sense strand starting at position 1236 of SEQ ID NO: 586088
ugcacaauugcguaauuug

SEQ ID NO: 691279 - RNA, 19 nt, Artificial Sequence
  Description of Artificial Sequence: Synthetic oligonucleotide
  Antisense strand to SEQ ID NO: 691278
caaauuacgcaauugugca

SEQ ID NO: 691280 - RNA, 19 nt, Artificial Sequence
  Description of Artificial Sequence: Synthetic oligonucleotide
  Sense strand starting at position 1239 of SEQ ID NO: 586088
acaauugcguaauuuguuu

SEQ ID NO: 691281 - RNA, 19 nt, Artificial Sequence
  Description of Artificial Sequence: Synthetic oligonucleotide
  Antisense strand to SEQ ID NO: 691280
aaacaaauuacgcaauugu

SEQ ID NO: 691282 - RNA, 19 nt, Artificial Sequence
  Description of Artificial Sequence: Synthetic oligonucleotide
  Sense strand starting at position 1493 of SEQ ID NO: 586088
agugcauugaguuagacau

SEQ ID NO: 691283 - RNA, 19 nt, Artificial Sequence
  Description of Artificial Sequence: Synthetic oligonucleotide
  Antisense strand to SEQ ID NO: 691282
augucuaacucaaugcacu

SEQ ID NO: 691284 - RNA, 19 nt, Artificial Sequence
  Description of Artificial Sequence: Synthetic oligonucleotide
  Sense strand starting at position 1499 of SEQ ID NO: 586088
uugaguuagacaugaaggu

SEQ ID NO: 691285 - RNA, 19 nt, Artificial Sequence
  Description of Artificial Sequence: Synthetic oligonucleotide
  Antisense strand to SEQ ID NO: 691284
accuucaugucuaacucaa

SEQ ID NO: 691286 - RNA, 19 nt, Artificial Sequence
  Description of Artificial Sequence: Synthetic oligonucleotide
  Sense strand starting at position 2090 of SEQ ID NO: 586088
ugggaugugugaccagaaa

SEQ ID NO: 691287 - RNA, 19 nt, Artificial Sequence
  Description of Artificial Sequence: Synthetic oligonucleotide
  Antisense strand to SEQ ID NO: 691286
uuucuggucacacauccca

SEQ ID NO: 691288 - RNA, 19 nt, Artificial Sequence
  Description of Artificial Sequence: Synthetic oligonucleotide
  Sense strand starting at position 2219 of SEQ ID NO: 586088
uuggcucagagacauugua

SEQ ID NO: 691289 - RNA, 19 nt, Artificial Sequence
  Description of Artificial Sequence: Synthetic oligonucleotide
  Antisense strand to SEQ ID NO: 691288
uacaaugucucugagccaa

SEQ ID NO: 691290 - RNA, 19 nt, Artificial Sequence
  Description of Artificial Sequence: Synthetic oligonucleotide
  Sense strand starting at position 2376 of SEQ ID NO: 586088
gaugcuuaggcuuaguaag

SEQ ID NO: 691291 - RNA, 19 nt, Artificial Sequence
  Description of Artificial Sequence: Synthetic oligonucleotide
  Antisense strand to SEQ ID NO: 691290
cuuacuaagccuaagcauc

SEQ ID NO: 691292 - RNA, 19 nt, Artificial Sequence
  Description of Artificial Sequence: Synthetic oligonucleotide
  Sense strand starting at position 2384 of SEQ ID NO: 586088
ggcuuaguaagccagauac

SEQ ID NO: 691293 - RNA, 19 nt, Artificial Sequence
  Description of Artificial Sequence: Synthetic oligonucleotide
  Antisense strand to SEQ ID NO: 691292
guaucuggcuuacuaagcc

SEQ ID NO: 691294 - RNA, 19 nt, Artificial Sequence
  Description of Artificial Sequence: Synthetic oligonucleotide
  Sense strand starting at position 2521 of SEQ ID NO: 586088
agaugaauuuaauggaaag

SEQ ID NO: 691295 - RNA, 19 nt, Artificial Sequence
  Description of Artificial Sequence: Synthetic oligonucleotide
  Antisense strand to SEQ ID NO: 691294
cuuuccauuaaauucaucu

SEQ ID NO: 691296 - RNA, 19 nt, Artificial Sequence
  Description of Artificial Sequence: Synthetic oligonucleotide
  Sense strand starting at position 2631 of SEQ ID NO: 586088
cugaacugaucuguuuauu

SEQ ID NO: 691297 - RNA, 19 nt, Artificial Sequence
  Description of Artificial Sequence: Synthetic oligonucleotide
  Antisense strand to SEQ ID NO: 691296
aauaaacagaucaguucag

SEQ ID NO: 691298 - RNA, 19 nt, Artificial Sequence
  Description of Artificial Sequence: Synthetic oligonucleotide
  Sense strand starting at position 2798 of SEQ ID NO: 586088
guguaaacucuacagacca

SEQ ID NO: 691299 - RNA, 19 nt, Artificial Sequence
  Description of Artificial Sequence: Synthetic oligonucleotide
  Antisense strand to SEQ ID NO: 691298
uggucuguagaguuuacac

SEQ ID NO: 691300 - RNA, 19 nt, Artificial Sequence
  Description of Artificial Sequence: Synthetic oligonucleotide
  Sense strand starting at position 3068 of SEQ ID NO: 586088
cagauaauuugagggaaac

SEQ ID NO: 691301 - RNA, 19 nt, Artificial Sequence
  Description of Artificial Sequence: Synthetic oligonucleotide
  Antisense strand to SEQ ID NO: 691300
guuucccucaaauuaucug

SEQ ID NO: 691302 - RNA, 19 nt, Artificial Sequence
  Description of Artificial Sequence: Synthetic oligonucleotide
  Sense strand starting at position 3617 of SEQ ID NO: 586088
aaugacucuguguaguaau

SEQ ID NO: 691303 - RNA, 19 nt, Artificial Sequence
  Description of Artificial Sequence: Synthetic oligonucleotide
  Antisense strand to SEQ ID NO: 691302
auuacuacacagagucauu

SEQ ID NO: 691304 - RNA, 19 nt, Artificial Sequence
  Description of Artificial Sequence: Synthetic oligonucleotide
  Sense strand starting at position 3665 of SEQ ID NO: 586088
uuugaauucuaaguagacu

SEQ ID NO: 691305 - RNA, 19 nt, Artificial Sequence
  Description of Artificial Sequence: Synthetic oligonucleotide
  Antisense strand to SEQ ID NO: 691304
agucuacuuagaauucaaa

SEQ ID NO: 691306 - RNA, 19 nt, Artificial Sequence
  Description of Artificial Sequence: Synthetic oligonucleotide
  Sense strand starting at position 3771 of SEQ ID NO: 586088
auaucacuauuggugacua

SEQ ID NO: 691307 - RNA, 19 nt, Artificial Sequence
  Description of Artificial Sequence: Synthetic oligonucleotide
  Antisense strand to SEQ ID NO: 691306
uagucaccaauagugauau

SEQ ID NO: 691308 - RNA, 19 nt, Artificial Sequence
  Description of Artificial Sequence: Synthetic oligonucleotide
  Sense strand starting at position 3775 of SEQ ID NO: 586088
cacuauuggugacuagaca

SEQ ID NO: 691309 - RNA, 19 nt, Artificial Sequence
  Description of Artificial Sequence: Synthetic oligonucleotide
  Antisense strand to SEQ ID NO: 691308
ugucuagucaccaauagug

SEQ ID NO: 691310 - RNA, 19 nt, Artificial Sequence
  Description of Artificial Sequence: Synthetic oligonucleotide
  Sense strand starting at position 3788 of SEQ ID NO: 586088
uagacagguuuaccugauu

SEQ ID NO: 691311 - RNA, 19 nt, Artificial Sequence
  Description of Artificial Sequence: Synthetic oligonucleotide
  Antisense strand to SEQ ID NO: 691310
aaucagguaaaccugucua

SEQ ID NO: 691312 - RNA, 19 nt, Artificial Sequence
  Description of Artificial Sequence: Synthetic oligonucleotide
  Sense strand starting at position 298 of SEQ ID NO: 586089
uggguuucucucugguuua

SEQ ID NO: 691313 - RNA, 19 nt, Artificial Sequence
  Description of Artificial Sequence: Synthetic oligonucleotide
  Antisense strand to SEQ ID NO: 691312
uaaaccagagagaaaccca

SEQ ID NO: 691314 - RNA, 19 nt, Artificial Sequence
  Description of Artificial Sequence: Synthetic oligonucleotide
  Sense strand starting at position 301 of SEQ ID NO: 586089
guuucucucugguuuaaau

SEQ ID NO: 691315 - RNA, 19 nt, Artificial Sequence
  Description of Artificial Sequence: Synthetic oligonucleotide
  Antisense strand to SEQ ID NO: 691314
auuuaaaccagagagaaac

SEQ ID NO: 691316 - RNA, 19 nt, Artificial Sequence
  Description of Artificial Sequence: Synthetic oligonucleotide
  Sense strand starting at position 422 of SEQ ID NO: 586089
uaagaaagucuuggucguu

SEQ ID NO: 691317 - RNA, 19 nt, Artificial Sequence
  Description of Artificial Sequence: Synthetic oligonucleotide
  Antisense strand to SEQ ID NO: 691316
aacgaccaagacuuucuua

SEQ ID NO: 691318 - RNA, 19 nt, Artificial Sequence
  Description of Artificial Sequence: Synthetic oligonucleotide
  Sense strand starting at position 452 of SEQ ID NO: 586089
guggauuacuucccaguac

SEQ ID NO: 691319 - RNA, 19 nt, Artificial Sequence
  Description of Artificial Sequence: Synthetic oligonucleotide
  Antisense strand to SEQ ID NO: 691318
guacugggaaguaauccac

SEQ ID NO: 691320 - RNA, 19 nt, Artificial Sequence
  Description of Artificial Sequence: Synthetic oligonucleotide
  Sense strand starting at position 509 of SEQ ID NO: 586089
ccaucagucagaugggcuu

SEQ ID NO: 691321 - RNA, 19 nt, Artificial Sequence
  Description of Artificial Sequence: Synthetic oligonucleotide
  Antisense strand to SEQ ID NO: 691320
aagcccaucugacugaugg

SEQ ID NO: 691322 - RNA, 19 nt, Artificial Sequence
  Description of Artificial Sequence: Synthetic oligonucleotide
  Sense strand starting at position 971 of SEQ ID NO: 586089
agcauuuacauucgaguug

SEQ ID NO: 691323 - RNA, 19 nt, Artificial Sequence
  Description of Artificial Sequence: Synthetic oligonucleotide
  Antisense strand to SEQ ID NO: 691322
caacucgaauguaaaugcu

SEQ ID NO: 691324 - RNA, 19 nt, Artificial Sequence
  Description of Artificial Sequence: Synthetic oligonucleotide
  Sense strand starting at position 1045 of SEQ ID NO: 586089
cgaccaaccuguguagagu

SEQ ID NO: 691325 - RNA, 19 nt, Artificial Sequence
  Description of Artificial Sequence: Synthetic oligonucleotide
  Antisense strand to SEQ ID NO: 691324
acucuacacagguuggucg

SEQ ID NO: 691326 - RNA, 19 nt, Artificial Sequence
  Description of Artificial Sequence: Synthetic oligonucleotide
  Sense strand starting at position 1381 of SEQ ID NO: 586089
cuauuagauuggcucuuua

SEQ ID NO: 691327 - RNA, 19 nt, Artificial Sequence
  Description of Artificial Sequence: Synthetic oligonucleotide
  Antisense strand to SEQ ID NO: 691326
uaaagagccaaucuaauag

SEQ ID NO: 691328 - RNA, 19 nt, Artificial Sequence
  Description of Artificial Sequence: Synthetic oligonucleotide
  Sense strand starting at position 1392 of SEQ ID NO: 586089
gcucuuuaucccugcugaa

SEQ ID NO: 691329 - RNA, 19 nt, Artificial Sequence
  Description of Artificial Sequence: Synthetic oligonucleotide
  Antisense strand to SEQ ID NO: 691328
uucagcagggauaaagagc

SEQ ID NO: 691330 - RNA, 19 nt, Artificial Sequence
  Description of Artificial Sequence: Synthetic oligonucleotide
  Sense strand starting at position 1405 of SEQ ID NO: 586089
gcugaacaucucuaguucu

SEQ ID NO: 691331 - RNA, 19 nt, Artificial Sequence
  Description of Artificial Sequence: Synthetic oligonucleotide
  Antisense strand to SEQ ID NO: 691330
agaacuagagauguucagc

SEQ ID NO: 691332 - RNA, 19 nt, Artificial Sequence
  Description of Artificial Sequence: Synthetic oligonucleotide
  Sense strand starting at position 1416 of SEQ ID NO: 586089
cuaguucuucuucgacuca

SEQ ID NO: 691333 - RNA, 19 nt, Artificial Sequence
  Description of Artificial Sequence: Synthetic oligonucleotide
  Antisense strand to SEQ ID NO: 691332
ugagucgaagaagaacuag

SEQ ID NO: 691334 - RNA, 19 nt, Artificial Sequence
  Description of Artificial Sequence: Synthetic oligonucleotide
  Sense strand starting at position 1423 of SEQ ID NO: 586089
uucuucgacucacuuugaa

SEQ ID NO: 691335 - RNA, 19 nt, Artificial Sequence
  Description of Artificial Sequence: Synthetic oligonucleotide
  Antisense strand to SEQ ID NO: 691334
uucaaagugagucgaagaa

SEQ ID NO: 691336 - RNA, 19 nt, Artificial Sequence
  Description of Artificial Sequence: Synthetic oligonucleotide
  Sense strand starting at position 1435 of SEQ ID NO: 586089
cuuugaauccuggaagcac

SEQ ID NO: 691337 - RNA, 19 nt, Artificial Sequence
  Description of Artificial Sequence: Synthetic oligonucleotide
  Antisense strand to SEQ ID NO: 691336
gugcuuccaggauucaaag

SEQ ID NO: 691338 - RNA, 19 nt, Artificial Sequence
  Description of Artificial Sequence: Synthetic oligonucleotide
  Sense strand starting at position 1632 of SEQ ID NO: 586089
acuggagugucacuauaaa

SEQ ID NO: 691339 - RNA, 19 nt, Artificial Sequence
  Description of Artificial Sequence: Synthetic oligonucleotide
  Antisense strand to SEQ ID NO: 691338
uuuauagugacacuccagu

SEQ ID NO: 691340 - RNA, 19 nt, Artificial Sequence
  Description of Artificial Sequence: Synthetic oligonucleotide
  Sense strand starting at position 2050 of SEQ ID NO: 586089
caagcugugauuggaggau

SEQ ID NO: 691341 - RNA, 19 nt, Artificial Sequence
  Description of Artificial Sequence: Synthetic oligonucleotide
  Antisense strand to SEQ ID NO: 691340
auccuccaaucacagcuug

SEQ ID NO: 691342 - RNA, 19 nt, Artificial Sequence
  Description of Artificial Sequence: Synthetic oligonucleotide
  Sense strand starting at position 2054 of SEQ ID NO: 586089
cugugauuggaggauaugu

SEQ ID NO: 691343 - RNA, 19 nt, Artificial Sequence
  Description of Artificial Sequence: Synthetic oligonucleotide
  Antisense strand to SEQ ID NO: 691342
acauauccuccaaucacag

SEQ ID NO: 691344 - RNA, 19 nt, Artificial Sequence
  Description of Artificial Sequence: Synthetic oligonucleotide
  Sense strand starting at position 2229 of SEQ ID NO: 586089
caagcuauggaguauccau

SEQ ID NO: 691345 - RNA, 19 nt, Artificial Sequence
  Description of Artificial Sequence: Synthetic oligonucleotide
  Antisense strand to SEQ ID NO: 691344
auggauacuccauagcuug

SEQ ID NO: 691346 - RNA, 19 nt, Artificial Sequence
  Description of Artificial Sequence: Synthetic oligonucleotide
  Sense strand starting at position 2427 of SEQ ID NO: 586089
gucagaacugcugggacau

SEQ ID NO: 691347 - RNA, 19 nt, Artificial Sequence
  Description of Artificial Sequence: Synthetic oligonucleotide
  Antisense strand to SEQ ID NO: 691346
augucccagcaguucugac

SEQ ID NO: 691348 - RNA, 19 nt, Artificial Sequence
  Description of Artificial Sequence: Synthetic oligonucleotide
  Sense strand starting at position 2573 of SEQ ID NO: 586089
cggaguucaguuuacggaa

SEQ ID NO: 691349 - RNA, 19 nt, Artificial Sequence
  Description of Artificial Sequence: Synthetic oligonucleotide
  Antisense strand to SEQ ID NO: 691348
uuccguaaacugaacuccg

SEQ ID NO: 691350 - RNA, 19 nt, Artificial Sequence
  Description of Artificial Sequence: Synthetic oligonucleotide
  Sense strand starting at position 2631 of SEQ ID NO: 586089
uauugaucauuaucgggua

SEQ ID NO: 691351 - RNA, 19 nt, Artificial Sequence
  Description of Artificial Sequence: Synthetic oligonucleotide
  Antisense strand to SEQ ID NO: 691350
uacccgauaaugaucaaua

SEQ ID NO: 691352 - RNA, 19 nt, Artificial Sequence
  Description of Artificial Sequence: Synthetic oligonucleotide
  Sense strand starting at position 2636 of SEQ ID NO: 586089
aucauuaucggguauggca

SEQ ID NO: 691353 - RNA, 19 nt, Artificial Sequence
  Description of Artificial Sequence: Synthetic oligonucleotide
  Antisense strand to SEQ ID NO: 691352
ugccauacccgauaaugau

SEQ ID NO: 691354 - RNA, 19 nt, Artificial Sequence
  Description of Artificial Sequence: Synthetic oligonucleotide
  Sense strand starting at position 2643 of SEQ ID NO: 586089
ucggguauggcaggauaau

SEQ ID NO: 691355 - RNA, 19 nt, Artificial Sequence
  Description of Artificial Sequence: Synthetic oligonucleotide
  Antisense strand to SEQ ID NO: 691354
auuauccugccauacccga

SEQ ID NO: 691356 - RNA, 19 nt, Artificial Sequence
  Description of Artificial Sequence: Synthetic oligonucleotide
  Sense strand starting at position 2644 of SEQ ID NO: 586089
cggguauggcaggauaaua

SEQ ID NO: 691357 - RNA, 19 nt, Artificial Sequence
  Description of Artificial Sequence: Synthetic oligonucleotide
  Antisense strand to SEQ ID NO: 691356
uauuauccugccauacccg

SEQ ID NO: 691358 - RNA, 19 nt, Artificial Sequence
  Description of Artificial Sequence: Synthetic oligonucleotide
  Sense strand starting at position 2845 of SEQ ID NO: 586089
ucaguagagauaggcuuua

SEQ ID NO: 691359 - RNA, 19 nt, Artificial Sequence
  Description of Artificial Sequence: Synthetic oligonucleotide
  Antisense strand to SEQ ID NO: 691358
uaaagccuaucucuacuga

SEQ ID NO: 691360 - RNA, 19 nt, Artificial Sequence
  Description of Artificial Sequence: Synthetic oligonucleotide
  Sense strand starting at position 2855 of SEQ ID NO: 586089
uaggcuuuacaccgagaca

SEQ ID NO: 691361 - RNA, 19 nt, Artificial Sequence
  Description of Artificial Sequence: Synthetic oligonucleotide
  Antisense strand to SEQ ID NO: 691360
ugucucgguguaaagccua

SEQ ID NO: 691362 - RNA, 19 nt, Artificial Sequence
  Description of Artificial Sequence: Synthetic oligonucleotide
  Sense strand starting at position 3109 of SEQ ID NO: 586089
gugucuggguacuugagau

SEQ ID NO: 691363 - RNA, 19 nt, Artificial Sequence
  Description of Artificial Sequence: Synthetic oligonucleotide
  Antisense strand to SEQ ID NO: 691362
aucucaaguacccagacac

SEQ ID NO: 691364 - RNA, 19 nt, Artificial Sequence
  Description of Artificial Sequence: Synthetic oligonucleotide
  Sense strand starting at position 3470 of SEQ ID NO: 586089
gccauugagaacuauuggu

SEQ ID NO: 691365 - RNA, 19 nt, Artificial Sequence
  Description of Artificial Sequence: Synthetic oligonucleotide
  Antisense strand to SEQ ID NO: 691364
accaauaguucucaauggc

SEQ ID NO: 691366 - RNA, 19 nt, Artificial Sequence
  Description of Artificial Sequence: Synthetic oligonucleotide
  Sense strand starting at position 3526 of SEQ ID NO: 586089
ucugucugccucgcagaua

SEQ ID NO: 691367 - RNA, 19 nt, Artificial Sequence
  Description of Artificial Sequence: Synthetic oligonucleotide
  Antisense strand to SEQ ID NO: 691366
uaucugcgaggcagacaga

SEQ ID NO: 691368 - RNA, 19 nt, Artificial Sequence
  Description of Artificial Sequence: Synthetic oligonucleotide
  Sense strand starting at position 3748 of SEQ ID NO: 586089
ugaauugggagugguggua

SEQ ID NO: 691369 - RNA, 19 nt, Artificial Sequence
  Description of Artificial Sequence: Synthetic oligonucleotide
  Antisense strand to SEQ ID NO: 691368
uaccaccacucccaauuca

SEQ ID NO: 691370 - RNA, 19 nt, Artificial Sequence
  Description of Artificial Sequence: Synthetic oligonucleotide
  Sense strand starting at position 3768 of SEQ ID NO: 586089
ggaggcugucaaugagaau

SEQ ID NO: 691371 - RNA, 19 nt, Artificial Sequence
  Description of Artificial Sequence: Synthetic oligonucleotide
  Antisense strand to SEQ ID NO: 691370
auucucauugacagccucc

SEQ ID NO: 691372 - RNA, 19 nt, Artificial Sequence
  Description of Artificial Sequence: Synthetic oligonucleotide
  Sense strand starting at position 3774 of SEQ ID NO: 586089
ugucaaugagaaugaauuc

SEQ ID NO: 691373 - RNA, 19 nt, Artificial Sequence
  Description of Artificial Sequence: Synthetic oligonucleotide
  Antisense strand to SEQ ID NO: 691372
gaauucauucucauugaca

SEQ ID NO: 691374 - RNA, 19 nt, Artificial Sequence
  Description of Artificial Sequence: Synthetic oligonucleotide
  Sense strand starting at position 3810 of SEQ ID NO: 586089
gacaaugucccaggauuag

SEQ ID NO: 691375 - RNA, 19 nt, Artificial Sequence
  Description of Artificial Sequence: Synthetic oligonucleotide
  Antisense strand to SEQ ID NO: 691374
cuaauccugggacauuguc

SEQ ID NO: 691376 - RNA, 19 nt, Artificial Sequence
  Description of Artificial Sequence: Synthetic oligonucleotide
  Sense strand starting at position 3867 of SEQ ID NO: 586089
guccuauugugacuauggu

SEQ ID NO: 691377 - RNA, 19 nt, Artificial Sequence
  Description of Artificial Sequence: Synthetic oligonucleotide
  Antisense strand to SEQ ID NO: 691376
accauagucacaauaggac

SEQ ID NO: 691378 - RNA, 19 nt, Artificial Sequence
  Description of Artificial Sequence: Synthetic oligonucleotide
  Sense strand starting at position 3884 of SEQ ID NO: 586089
guggaauagccacgauacu

SEQ ID NO: 691379 - RNA, 19 nt, Artificial Sequence
  Description of Artificial Sequence: Synthetic oligonucleotide
  Antisense strand to SEQ ID NO: 691378
aguaucguggcuauuccac

SEQ ID NO: 691380 - RNA, 19 nt, Artificial Sequence
  Description of Artificial Sequence: Synthetic oligonucleotide
  Sense strand starting at position 3893 of SEQ ID NO: 586089
ccacgauacugagugacau

SEQ ID NO: 691381 - RNA, 19 nt, Artificial Sequence
  Description of Artificial Sequence: Synthetic oligonucleotide
  Antisense strand to SEQ ID NO: 691380
augucacucaguaucgugg

SEQ ID NO: 691382 - RNA, 19 nt, Artificial Sequence
  Description of Artificial Sequence: Synthetic oligonucleotide
  Sense strand starting at position 3894 of SEQ ID NO: 586089
cacgauacugagugacauu

SEQ ID NO: 691383 - RNA, 19 nt, Artificial Sequence
  Description of Artificial Sequence: Synthetic oligonucleotide
  Antisense strand to SEQ ID NO: 691382
aaugucacucaguaucgug

SEQ ID NO: 691384 - RNA, 19 nt, Artificial Sequence
  Description of Artificial Sequence: Synthetic oligonucleotide
  Sense strand starting at position 3961 of SEQ ID NO: 586089
cuugacagaugucucagaa

SEQ ID NO: 691385 - RNA, 19 nt, Artificial Sequence
  Description of Artificial Sequence: Synthetic oligonucleotide
  Antisense strand to SEQ ID NO: 691384
uucugagacaucugucaag

SEQ ID NO: 691386 - RNA, 19 nt, Artificial Sequence
  Description of Artificial Sequence: Synthetic oligonucleotide
  Sense strand starting at position 3965 of SEQ ID NO: 586089
acagaugucucagaaagau

SEQ ID NO: 691387 - RNA, 19 nt, Artificial Sequence
  Description of Artificial Sequence: Synthetic oligonucleotide
  Antisense strand to SEQ ID NO: 691386
aucuuucugagacaucugu

SEQ ID NO: 691388 - RNA, 19 nt, Artificial Sequence
  Description of Artificial Sequence: Synthetic oligonucleotide
  Sense strand starting at position 3974 of SEQ ID NO: 586089
ucagaaagauuaugggaau

SEQ ID NO: 691389 - RNA, 19 nt, Artificial Sequence
  Description of Artificial Sequence: Synthetic oligonucleotide
  Antisense strand to SEQ ID NO: 691388
auucccauaaucuuucuga

SEQ ID NO: 691390 - RNA, 19 nt, Artificial Sequence
  Description of Artificial Sequence: Synthetic oligonucleotide
  Sense strand starting at position 3975 of SEQ ID NO: 586089
cagaaagauuaugggaauu

SEQ ID NO: 691391 - RNA, 19 nt, Artificial Sequence
  Description of Artificial Sequence: Synthetic oligonucleotide
  Antisense strand to SEQ ID NO: 691390
aauucccauaaucuuucug

SEQ ID NO: 691392 - RNA, 19 nt, Artificial Sequence
  Description of Artificial Sequence: Synthetic oligonucleotide
  Sense strand starting at position 129 of SEQ ID NO: 586090
uguggucagguuugacuga

SEQ ID NO: 691393 - RNA, 19 nt, Artificial Sequence
  Description of Artificial Sequence: Synthetic oligonucleotide
  Antisense strand to SEQ ID NO: 691392
ucagucaaaccugaccaca

SEQ ID NO: 691394 - RNA, 19 nt, Artificial Sequence
  Description of Artificial Sequence: Synthetic oligonucleotide
  Sense strand starting at position 170 of SEQ ID NO: 586090
ugggccuugacagaaaugu

SEQ ID NO: 691395 - RNA, 19 nt, Artificial Sequence
  Description of Artificial Sequence: Synthetic oligonucleotide
  Antisense strand to SEQ ID NO: 691394
acauuucugucaaggccca

SEQ ID NO: 691396 - RNA, 19 nt, Artificial Sequence
  Description of Artificial Sequence: Synthetic oligonucleotide
  Sense strand starting at position 186 of SEQ ID NO: 586090
ugucaaauguagcuagcaa

SEQ ID NO: 691397 - RNA, 19 nt, Artificial Sequence
  Description of Artificial Sequence: Synthetic oligonucleotide
  Antisense strand to SEQ ID NO: 691396
uugcuagcuacauuugaca

SEQ ID NO: 691398 - RNA, 19 nt, Artificial Sequence
  Description of Artificial Sequence: Synthetic oligonucleotide
  Sense strand starting at position 241 of SEQ ID NO: 586090
cagagauguggugacuauc

SEQ ID NO: 691399 - RNA, 19 nt, Artificial Sequence
  Description of Artificial Sequence: Synthetic oligonucleotide
  Antisense strand to SEQ ID NO: 691398
gauagucaccacaucucug

SEQ ID NO: 691400 - RNA, 19 nt, Artificial Sequence
  Description of Artificial Sequence: Synthetic oligonucleotide
  Sense strand starting at position 353 of SEQ ID NO: 586090
uggaauagucuuuaccgca

SEQ ID NO: 691401 - RNA, 19 nt, Artificial Sequence
  Description of Artificial Sequence: Synthetic oligonucleotide
  Antisense strand to SEQ ID NO: 691400
ugcgguaaagacuauucca

SEQ ID NO: 691402 - RNA, 19 nt, Artificial Sequence
  Description of Artificial Sequence: Synthetic oligonucleotide
  Sense strand starting at position 387 of SEQ ID NO: 586090
cagucuagacgguaaguuu

SEQ ID NO: 691403 - RNA, 19 nt, Artificial Sequence
  Description of Artificial Sequence: Synthetic oligonucleotide
  Antisense strand to SEQ ID NO: 691402
aaacuuaccgucuagacug

SEQ ID NO: 691404 - RNA, 19 nt, Artificial Sequence
  Description of Artificial Sequence: Synthetic oligonucleotide
  Sense strand starting at position 444 of SEQ ID NO: 586090
ugucuagcacuugagaaau

SEQ ID NO: 691405 - RNA, 19 nt, Artificial Sequence
  Description of Artificial Sequence: Synthetic oligonucleotide
  Antisense strand to SEQ ID NO: 691404
auuucucaagugcuagaca

SEQ ID NO: 691406 - RNA, 19 nt, Artificial Sequence
  Description of Artificial Sequence: Synthetic oligonucleotide
  Sense strand starting at position 534 of SEQ ID NO: 586090
auaaguuacucucuuguag

SEQ ID NO: 691407 - RNA, 19 nt, Artificial Sequence
  Description of Artificial Sequence: Synthetic oligonucleotide
  Antisense strand to SEQ ID NO: 691406
cuacaagagaguaacuuau

SEQ ID NO: 691408 - RNA, 19 nt, Artificial Sequence
  Description of Artificial Sequence: Synthetic oligonucleotide
  Sense strand starting at position 575 of SEQ ID NO: 586090
aggacaagcuuauuguaua

SEQ ID NO: 691409 - RNA, 19 nt, Artificial Sequence
  Description of Artificial Sequence: Synthetic oligonucleotide
  Antisense strand to SEQ ID NO: 691408
uauacaauaagcuuguccu

SEQ ID NO: 691410 - RNA, 19 nt, Artificial Sequence
  Description of Artificial Sequence: Synthetic oligonucleotide
  Sense strand starting at position 618 of SEQ ID NO: 586090
ggucaccaugcauagaaau

SEQ ID NO: 691411 - RNA, 19 nt, Artificial Sequence
  Description of Artificial Sequence: Synthetic oligonucleotide
  Antisense strand to SEQ ID NO: 691410
auuucuaugcauggugacc

SEQ ID NO: 691412 - RNA, 19 nt, Artificial Sequence
  Description of Artificial Sequence: Synthetic oligonucleotide
  Sense strand starting at position 723 of SEQ ID NO: 586090
gccacugaguaugugagaa

SEQ ID NO: 691413 - RNA, 19 nt, Artificial Sequence
  Description of Artificial Sequence: Synthetic oligonucleotide
  Antisense strand to SEQ ID NO: 691412
uucucacauacucaguggc

SEQ ID NO: 691414 - RNA, 19 nt, Artificial Sequence
  Description of Artificial Sequence: Synthetic oligonucleotide
  Sense strand starting at position 969 of SEQ ID NO: 586090
accugugguucugugacaa

SEQ ID NO: 691415 - RNA, 19 nt, Artificial Sequence
  Description of Artificial Sequence: Synthetic oligonucleotide
  Antisense strand to SEQ ID NO: 691414
uugucacagaaccacaggu

SEQ ID NO: 691416 - RNA, 19 nt, Artificial Sequence
  Description of Artificial Sequence: Synthetic oligonucleotide
  Sense strand starting at position 1201 of SEQ ID NO: 586090
ucaggaaucuucguaucaa

SEQ ID NO: 691417 - RNA, 19 nt, Artificial Sequence
  Description of Artificial Sequence: Synthetic oligonucleotide
  Antisense strand to SEQ ID NO: 691416
uugauacgaagauuccuga

SEQ ID NO: 691418 - RNA, 19 nt, Artificial Sequence
  Description of Artificial Sequence: Synthetic oligonucleotide
  Sense strand starting at position 1818 of SEQ ID NO: 586090
cagagcugcuccuuaggau

SEQ ID NO: 691419 - RNA, 19 nt, Artificial Sequence
  Description of Artificial Sequence: Synthetic oligonucleotide
  Antisense strand to SEQ ID NO: 691418
auccuaaggagcagcucug

SEQ ID NO: 691420 - RNA, 19 nt, Artificial Sequence
  Description of Artificial Sequence: Synthetic oligonucleotide
  Sense strand starting at position 1906 of SEQ ID NO: 586090
uuggaaguguaguccucaa

SEQ ID NO: 691421 - RNA, 19 nt, Artificial Sequence
  Description of Artificial Sequence: Synthetic oligonucleotide
  Antisense strand to SEQ ID NO: 691420
uugaggacuacacuuccaa

SEQ ID NO: 691422 - RNA, 19 nt, Artificial Sequence
  Description of Artificial Sequence: Synthetic oligonucleotide
  Sense strand starting at position 1910 of SEQ ID NO: 586090
aaguguaguccucaaguug

SEQ ID NO: 691423 - RNA, 19 nt, Artificial Sequence
  Description of Artificial Sequence: Synthetic oligonucleotide
  Antisense strand to SEQ ID NO: 691422
caacuugaggacuacacuu

SEQ ID NO: 691424 - RNA, 19 nt, Artificial Sequence
  Description of Artificial Sequence: Synthetic oligonucleotide
  Sense strand starting at position 1963 of SEQ ID NO: 586090
cuauguaucccacagaccu

SEQ ID NO: 691425 - RNA, 19 nt, Artificial Sequence
  Description of Artificial Sequence: Synthetic oligonucleotide
  Antisense strand to SEQ ID NO: 691424
aggucugugggauacauag

SEQ ID NO: 691426 - RNA, 19 nt, Artificial Sequence
  Description of Artificial Sequence: Synthetic oligonucleotide
  Sense strand starting at position 2084 of SEQ ID NO: 586090
cugcaaaucccagauugcu

SEQ ID NO: 691427 - RNA, 19 nt, Artificial Sequence
  Description of Artificial Sequence: Synthetic oligonucleotide
  Antisense strand to SEQ ID NO: 691426
agcaaucugggauuugcag

SEQ ID NO: 691428 - RNA, 19 nt, Artificial Sequence
  Description of Artificial Sequence: Synthetic oligonucleotide
  Sense strand starting at position 2093 of SEQ ID NO: 586090
ccagauugcucguuggaua

SEQ ID NO: 691429 - RNA, 19 nt, Artificial Sequence
  Description of Artificial Sequence: Synthetic oligonucleotide
  Antisense strand to SEQ ID NO: 691428
uauccaacgagcaaucugg

SEQ ID NO: 691430 - RNA, 19 nt, Artificial Sequence
  Description of Artificial Sequence: Synthetic oligonucleotide
  Sense strand starting at position 2094 of SEQ ID NO: 586090
cagauugcucguuggauaa

SEQ ID NO: 691431 - RNA, 19 nt, Artificial Sequence
  Description of Artificial Sequence: Synthetic oligonucleotide
  Antisense strand to SEQ ID NO: 691430
uuauccaacgagcaaucug

SEQ ID NO: 691432 - RNA, 19 nt, Artificial Sequence
  Description of Artificial Sequence: Synthetic oligonucleotide
  Sense strand starting at position 2243 of SEQ ID NO: 586090
gcgggaguagaucgaaaca

SEQ ID NO: 691433 - RNA, 19 nt, Artificial Sequence
  Description of Artificial Sequence: Synthetic oligonucleotide
  Antisense strand to SEQ ID NO: 691432
uguuucgaucuacucccgc

SEQ ID NO: 691434 - RNA, 19 nt, Artificial Sequence
  Description of Artificial Sequence: Synthetic oligonucleotide
  Sense strand starting at position 2354 of SEQ ID NO: 586090
agauguugccaacggaauu

SEQ ID NO: 691435 - RNA, 19 nt, Artificial Sequence
  Description of Artificial Sequence: Synthetic oligonucleotide
  Antisense strand to SEQ ID NO: 691434
aauuccguuggcaacaucu

SEQ ID NO: 691436 - RNA, 19 nt, Artificial Sequence
  Description of Artificial Sequence: Synthetic oligonucleotide
  Sense strand starting at position 2498 of SEQ ID NO: 586090
auuguuagguuuccacuga

SEQ ID NO: 691437 - RNA, 19 nt, Artificial Sequence
  Description of Artificial Sequence: Synthetic oligonucleotide
  Antisense strand to SEQ ID NO: 691436
ucaguggaaaccuaacaau

SEQ ID NO: 691438 - RNA, 19 nt, Artificial Sequence
  Description of Artificial Sequence: Synthetic oligonucleotide
  Sense strand starting at position 2520 of SEQ ID NO: 586090
caugcaaguuugguggaaa

SEQ ID NO: 691439 - RNA, 19 nt, Artificial Sequence
  Description of Artificial Sequence: Synthetic oligonucleotide
  Antisense strand to SEQ ID NO: 691438
uuuccaccaaacuugcaug

SEQ ID NO: 691440 - RNA, 19 nt, Artificial Sequence
  Description of Artificial Sequence: Synthetic oligonucleotide
  Sense strand starting at position 2609 of SEQ ID NO: 586090
uuacuuucccuuugagucu

SEQ ID NO: 691441 - RNA, 19 nt, Artificial Sequence
  Description of Artificial Sequence: Synthetic oligonucleotide
  Antisense strand to SEQ ID NO: 691440
agacucaaagggaaaguaa

SEQ ID NO: 691442 - RNA, 19 nt, Artificial Sequence
  Description of Artificial Sequence: Synthetic oligonucleotide
  Sense strand starting at position 2618 of SEQ ID NO: 586090
cuuugagucucacuguuua

SEQ ID NO: 691443 - RNA, 19 nt, Artificial Sequence
  Description of Artificial Sequence: Synthetic oligonucleotide
  Antisense strand to SEQ ID NO: 691442
uaaacagugagacucaaag

SEQ ID NO: 691444 - RNA, 19 nt, Artificial Sequence
  Description of Artificial Sequence: Synthetic oligonucleotide
  Sense strand starting at position 2847 of SEQ ID NO: 586090
ugagcauauucuccaaaug

SEQ ID NO: 691445 - RNA, 19 nt, Artificial Sequence
  Description of Artificial Sequence: Synthetic oligonucleotide
  Antisense strand to SEQ ID NO: 691444
cauuuggagaauaugcuca

SEQ ID NO: 691446 - RNA, 19 nt, Artificial Sequence
  Description of Artificial Sequence: Synthetic oligonucleotide
  Sense strand starting at position 2950 of SEQ ID NO: 586090
acuuaaauaguucggagau

SEQ ID NO: 691447 - RNA, 19 nt, Artificial Sequence
  Description of Artificial Sequence: Synthetic oligonucleotide
  Antisense strand to SEQ ID NO: 691446
aucuccgaacuauuuaagu

SEQ ID NO: 691448 - RNA, 19 nt, Artificial Sequence
  Description of Artificial Sequence: Synthetic oligonucleotide
  Sense strand starting at position 3046 of SEQ ID NO: 586090
aucugucaggcucagauau

SEQ ID NO: 691449 - RNA, 19 nt, Artificial Sequence
  Description of Artificial Sequence: Synthetic oligonucleotide
  Antisense strand to SEQ ID NO: 691448
auaucugagccugacagau

SEQ ID NO: 691450 - RNA, 19 nt, Artificial Sequence
  Description of Artificial Sequence: Synthetic oligonucleotide
  Sense strand starting at position 3056 of SEQ ID NO: 586090
cucagauauaugugcugga

SEQ ID NO: 691451 - RNA, 19 nt, Artificial Sequence
  Description of Artificial Sequence: Synthetic oligonucleotide
  Antisense strand to SEQ ID NO: 691450
uccagcacauauaucugag

SEQ ID NO: 691452 - RNA, 19 nt, Artificial Sequence
  Description of Artificial Sequence: Synthetic oligonucleotide
  Sense strand starting at position 3060 of SEQ ID NO: 586090
gauauaugugcuggaguug

SEQ ID NO: 691453 - RNA, 19 nt, Artificial Sequence
  Description of Artificial Sequence: Synthetic oligonucleotide
  Antisense strand to SEQ ID NO: 691452
caacuccagcacauauauc

SEQ ID NO: 691454 - RNA, 19 nt, Artificial Sequence
  Description of Artificial Sequence: Synthetic oligonucleotide
  Sense strand starting at position 3108 of SEQ ID NO: 586090
gggagcucauaauaaagaa

SEQ ID NO: 691455 - RNA, 19 nt, Artificial Sequence
  Description of Artificial Sequence: Synthetic oligonucleotide
  Antisense strand to SEQ ID NO: 691454
uucuuuauuaugagcuccc

SEQ ID NO: 691456 - RNA, 19 nt, Artificial Sequence
  Description of Artificial Sequence: Synthetic oligonucleotide
  Sense strand starting at position 3193 of SEQ ID NO: 586090
gccguagugggaggaucau

SEQ ID NO: 691457 - RNA, 19 nt, Artificial Sequence
  Description of Artificial Sequence: Synthetic oligonucleotide
  Antisense strand to SEQ ID NO: 691456
augauccucccacuacggc

SEQ ID NO: 691458 - RNA, 19 nt, Artificial Sequence
  Description of Artificial Sequence: Synthetic oligonucleotide
  Sense strand starting at position 3389 of SEQ ID NO: 586090
ggagaccucacuuggcaua

SEQ ID NO: 691459 - RNA, 19 nt, Artificial Sequence
  Description of Artificial Sequence: Synthetic oligonucleotide
  Antisense strand to SEQ ID NO: 691458
uaugccaagugaggucucc

SEQ ID NO: 691460 - RNA, 19 nt, Artificial Sequence
  Description of Artificial Sequence: Synthetic oligonucleotide
  Sense strand starting at position 3394 of SEQ ID NO: 586090
ccucacuuggcauagcaua

SEQ ID NO: 691461 - RNA, 19 nt, Artificial Sequence
  Description of Artificial Sequence: Synthetic oligonucleotide
  Antisense strand to SEQ ID NO: 691460
uaugcuaugccaagugagg

SEQ ID NO: 691462 - RNA, 19 nt, Artificial Sequence
  Description of Artificial Sequence: Synthetic oligonucleotide
  Sense strand starting at position 3399 of SEQ ID NO: 586090
cuuggcauagcauaauuaa

SEQ ID NO: 691463 - RNA, 19 nt, Artificial Sequence
  Description of Artificial Sequence: Synthetic oligonucleotide
  Antisense strand to SEQ ID NO: 691462
uuaauuaugcuaugccaag

SEQ ID NO: 691464 - RNA, 19 nt, Artificial Sequence
  Description of Artificial Sequence: Synthetic oligonucleotide
  Sense strand starting at position 3402 of SEQ ID NO: 586090
ggcauagcauaauuaagag

SEQ ID NO: 691465 - RNA, 19 nt, Artificial Sequence
  Description of Artificial Sequence: Synthetic oligonucleotide
  Antisense strand to SEQ ID NO: 691464
cucuuaauuaugcuaugcc

SEQ ID NO: 691466 - RNA, 19 nt, Artificial Sequence
  Description of Artificial Sequence: Synthetic oligonucleotide
  Sense strand starting at position 3509 of SEQ ID NO: 586090
acaguuaaaugacuguaaa

SEQ ID NO: 691467 - RNA, 19 nt, Artificial Sequence
  Description of Artificial Sequence: Synthetic oligonucleotide
  Antisense strand to SEQ ID NO: 691466
uuuacagucauuuaacugu

SEQ ID NO: 691468 - RNA, 19 nt, Artificial Sequence
  Description of Artificial Sequence: Synthetic oligonucleotide
  Sense strand starting at position 3858 of SEQ ID NO: 586090
uauuuaugauuguggauca

SEQ ID NO: 691469 - RNA, 19 nt, Artificial Sequence
  Description of Artificial Sequence: Synthetic oligonucleotide
  Antisense strand to SEQ ID NO: 691468
ugauccacaaucauaaaua

SEQ ID NO: 691470 - RNA, 19 nt, Artificial Sequence
  Description of Artificial Sequence: Synthetic oligonucleotide
  Sense strand starting at position 3886 of SEQ ID NO: 586090
cacucauuuggcugagugu

SEQ ID NO: 691471 - RNA, 19 nt, Artificial Sequence
  Description of Artificial Sequence: Synthetic oligonucleotide
  Antisense strand to SEQ ID NO: 691470
acacucagccaaaugagug

SEQ ID NO: 691472 - RNA, 19 nt, Artificial Sequence
  Description of Artificial Sequence: Synthetic oligonucleotide
  Sense strand starting at position 106 of SEQ ID NO: 586091
agaguguuggcccgaggua

SEQ ID NO: 691473 - RNA, 19 nt, Artificial Sequence
  Description of Artificial Sequence: Synthetic oligonucleotide
  Antisense strand to SEQ ID NO: 691472
uaccucgggccaacacucu

SEQ ID NO: 691474 - RNA, 19 nt, Artificial Sequence
  Description of Artificial Sequence: Synthetic oligonucleotide
  Sense strand starting at position 148 of SEQ ID NO: 586091
ccaagaucuugucuaggug

SEQ ID NO: 691475 - RNA, 19 nt, Artificial Sequence
  Description of Artificial Sequence: Synthetic oligonucleotide
  Antisense strand to SEQ ID NO: 691474
caccuagacaagaucuugg

SEQ ID NO: 691476 - RNA, 19 nt, Artificial Sequence
  Description of Artificial Sequence: Synthetic oligonucleotide
  Sense strand starting at position 321 of SEQ ID NO: 586091
cagguccuggucuacaaua

SEQ ID NO: 691477 - RNA, 19 nt, Artificial Sequence
  Description of Artificial Sequence: Synthetic oligonucleotide
  Antisense strand to SEQ ID NO: 691476
uauuguagaccaggaccug

SEQ ID NO: 691478 - RNA, 19 nt, Artificial Sequence
  Description of Artificial Sequence: Synthetic oligonucleotide
  Sense strand starting at position 354 of SEQ ID NO: 586091
uuggguguaucaccuggau

SEQ ID NO: 691479 - RNA, 19 nt, Artificial Sequence
  Description of Artificial Sequence: Synthetic oligonucleotide
  Antisense strand to SEQ ID NO: 691478
auccaggugauacacccaa

SEQ ID NO: 691480 - RNA, 19 nt, Artificial Sequence
  Description of Artificial Sequence: Synthetic oligonucleotide
  Sense strand starting at position 356 of SEQ ID NO: 586091
ggguguaucaccuggauga

SEQ ID NO: 691481 - RNA, 19 nt, Artificial Sequence
  Description of Artificial Sequence: Synthetic oligonucleotide
  Antisense strand to SEQ ID NO: 691480
ucauccaggugauacaccc

SEQ ID NO: 691482 - RNA, 19 nt, Artificial Sequence
  Description of Artificial Sequence: Synthetic oligonucleotide
  Sense strand starting at position 357 of SEQ ID NO: 586091
gguguaucaccuggaugac

SEQ ID NO: 691483 - RNA, 19 nt, Artificial Sequence
  Description of Artificial Sequence: Synthetic oligonucleotide
  Antisense strand to SEQ ID NO: 691482
gucauccaggugauacacc

SEQ ID NO: 691484 - RNA, 19 nt, Artificial Sequence
  Description of Artificial Sequence: Synthetic oligonucleotide
  Sense strand starting at position 358 of SEQ ID NO: 586091
guguaucaccuggaugaca

SEQ ID NO: 691485 - RNA, 19 nt, Artificial Sequence
  Description of Artificial Sequence: Synthetic oligonucleotide
  Antisense strand to SEQ ID NO: 691484
ugucauccaggugauacac

SEQ ID NO: 691486 - RNA, 19 nt, Artificial Sequence
  Description of Artificial Sequence: Synthetic oligonucleotide
  Sense strand starting at position 360 of SEQ ID NO: 586091
guaucaccuggaugacaga

SEQ ID NO: 691487 - RNA, 19 nt, Artificial Sequence
  Description of Artificial Sequence: Synthetic oligonucleotide
  Antisense strand to SEQ ID NO: 691486
ucugucauccaggugauac

SEQ ID NO: 691488 - RNA, 19 nt, Artificial Sequence
  Description of Artificial Sequence: Synthetic oligonucleotide
  Sense strand starting at position 420 of SEQ ID NO: 586091
gcagcucaucugcgauguu

SEQ ID NO: 691489 - RNA, 19 nt, Artificial Sequence
  Description of Artificial Sequence: Synthetic oligonucleotide
  Antisense strand to SEQ ID NO: 691488
aacaucgcagaugagcugc

SEQ ID NO: 691490 - RNA, 19 nt, Artificial Sequence
  Description of Artificial Sequence: Synthetic oligonucleotide
  Sense strand starting at position 423 of SEQ ID NO: 586091
gcucaucugcgauguugau

SEQ ID NO: 691491 - RNA, 19 nt, Artificial Sequence
  Description of Artificial Sequence: Synthetic oligonucleotide
  Antisense strand to SEQ ID NO: 691490
aucaacaucgcagaugagc

SEQ ID NO: 691492 - RNA, 19 nt, Artificial Sequence
  Description of Artificial Sequence: Synthetic oligonucleotide
  Sense strand starting at position 472 of SEQ ID NO: 586091
gugggagacaccugugcuu

SEQ ID NO: 691493 - RNA, 19 nt, Artificial Sequence
  Description of Artificial Sequence: Synthetic oligonucleotide
  Antisense strand to SEQ ID NO: 691492
aagcacaggugucucccac

SEQ ID NO: 691494 - RNA, 19 nt, Artificial Sequence
  Description of Artificial Sequence: Synthetic oligonucleotide
  Sense strand starting at position 487 of SEQ ID NO: 586091
gcuuuccacugggcugaua

SEQ ID NO: 691495 - RNA, 19 nt, Artificial Sequence
  Description of Artificial Sequence: Synthetic oligonucleotide
  Antisense strand to SEQ ID NO: 691494
uaucagcccaguggaaagc

SEQ ID NO: 691496 - RNA, 19 nt, Artificial Sequence
  Description of Artificial Sequence: Synthetic oligonucleotide
  Sense strand starting at position 498 of SEQ ID NO: 586091
ggcugauaucuacagcaau

SEQ ID NO: 691497 - RNA, 19 nt, Artificial Sequence
  Description of Artificial Sequence: Synthetic oligonucleotide
  Antisense strand to SEQ ID NO: 691496
auugcuguagauaucagcc

SEQ ID NO: 691498 - RNA, 19 nt, Artificial Sequence
  Description of Artificial Sequence: Synthetic oligonucleotide
  Sense strand starting at position 606 of SEQ ID NO: 586091
gccugaacuuggucaucca

SEQ ID NO: 691499 - RNA, 19 nt, Artificial Sequence
  Description of Artificial Sequence: Synthetic oligonucleotide
  Antisense strand to SEQ ID NO: 691498
uggaugaccaaguucaggc

SEQ ID NO: 691500 - RNA, 19 nt, Artificial Sequence
  Description of Artificial Sequence: Synthetic oligonucleotide
  Sense strand starting at position 607 of SEQ ID NO: 586091
ccugaacuuggucauccaa

SEQ ID NO: 691501 - RNA, 19 nt, Artificial Sequence
  Description of Artificial Sequence: Synthetic oligonucleotide
  Antisense strand to SEQ ID NO: 691500
uuggaugaccaaguucagg

SEQ ID NO: 691502 - RNA, 19 nt, Artificial Sequence
  Description of Artificial Sequence: Synthetic oligonucleotide
  Sense strand starting at position 614 of SEQ ID NO: 586091
uuggucauccaacgaucau

SEQ ID NO: 691503 - RNA, 19 nt, Artificial Sequence
  Description of Artificial Sequence: Synthetic oligonucleotide
  Antisense strand to SEQ ID NO: 691502
augaucguuggaugaccaa

SEQ ID NO: 691504 - RNA, 19 nt, Artificial Sequence
  Description of Artificial Sequence: Synthetic oligonucleotide
  Sense strand starting at position 1047 of SEQ ID NO: 586091
gggccacucugccagagaa

SEQ ID NO: 691505 - RNA, 19 nt, Artificial Sequence
  Description of Artificial Sequence: Synthetic oligonucleotide
  Antisense strand to SEQ ID NO: 691504
uucucuggcagaguggccc

SEQ ID NO: 691506 - RNA, 19 nt, Artificial Sequence
  Description of Artificial Sequence: Synthetic oligonucleotide
  Sense strand starting at position 1049 of SEQ ID NO: 586091
gccacucugccagagaaga

SEQ ID NO: 691507 - RNA, 19 nt, Artificial Sequence
  Description of Artificial Sequence: Synthetic oligonucleotide
  Antisense strand to SEQ ID NO: 691506
ucuucucuggcagaguggc

SEQ ID NO: 691508 - RNA, 19 nt, Artificial Sequence
  Description of Artificial Sequence: Synthetic oligonucleotide
  Sense strand starting at position 1115 of SEQ ID NO: 586091
gguggcaaucucggagaau

SEQ ID NO: 691509 - RNA, 19 nt, Artificial Sequence
  Description of Artificial Sequence: Synthetic oligonucleotide
  Antisense strand to SEQ ID NO: 691508
auucuccgagauugccacc

SEQ ID NO: 691510 - RNA, 19 nt, Artificial Sequence
  Description of Artificial Sequence: Synthetic oligonucleotide
  Sense strand starting at position 1116 of SEQ ID NO: 586091
guggcaaucucggagaaug

SEQ ID NO: 691511 - RNA, 19 nt, Artificial Sequence
  Description of Artificial Sequence: Synthetic oligonucleotide
  Antisense strand to SEQ ID NO: 691510
cauucuccgagauugccac

SEQ ID NO: 691512 - RNA, 19 nt, Artificial Sequence
  Description of Artificial Sequence: Synthetic oligonucleotide
  Sense strand starting at position 1175 of SEQ ID NO: 586091
agaagaaugggcugccaua

SEQ ID NO: 691513 - RNA, 19 nt, Artificial Sequence
  Description of Artificial Sequence: Synthetic oligonucleotide
  Antisense strand to SEQ ID NO: 691512
uauggcagcccauucuucu

SEQ ID NO: 691514 - RNA, 19 nt, Artificial Sequence
  Description of Artificial Sequence: Synthetic oligonucleotide
  Sense strand starting at position 1208 of SEQ ID NO: 586091
cccggucaucccuagugaa

SEQ ID NO: 691515 - RNA, 19 nt, Artificial Sequence
  Description of Artificial Sequence: Synthetic oligonucleotide
  Antisense strand to SEQ ID NO: 691514
uucacuagggaugaccggg

SEQ ID NO: 691516 - RNA, 19 nt, Artificial Sequence
  Description of Artificial Sequence: Synthetic oligonucleotide
  Sense strand starting at position 1211 of SEQ ID NO: 586091
ggucaucccuagugaacaa

SEQ ID NO: 691517 - RNA, 19 nt, Artificial Sequence
  Description of Artificial Sequence: Synthetic oligonucleotide
  Antisense strand to SEQ ID NO: 691516
uuguucacuagggaugacc

SEQ ID NO: 691518 - RNA, 19 nt, Artificial Sequence
  Description of Artificial Sequence: Synthetic oligonucleotide
  Sense strand starting at position 1359 of SEQ ID NO: 586091
gagugagggaucuggaagu

SEQ ID NO: 691519 - RNA, 19 nt, Artificial Sequence
  Description of Artificial Sequence: Synthetic oligonucleotide
  Antisense strand to SEQ ID NO: 691518
acuuccagaucccucacuc

SEQ ID NO: 691520 - RNA, 19 nt, Artificial Sequence
  Description of Artificial Sequence: Synthetic oligonucleotide
  Sense strand starting at position 1492 of SEQ ID NO: 586091
ggccaagaucuuggcgaug

SEQ ID NO: 691521 - RNA, 19 nt, Artificial Sequence
  Description of Artificial Sequence: Synthetic oligonucleotide
  Antisense strand to SEQ ID NO: 691520
caucgccaagaucuuggcc

SEQ ID NO: 691522 - RNA, 19 nt, Artificial Sequence
  Description of Artificial Sequence: Synthetic oligonucleotide
  Sense strand starting at position 1497 of SEQ ID NO: 586091
agaucuuggcgauggaguu

SEQ ID NO: 691523 - RNA, 19 nt, Artificial Sequence
  Description of Artificial Sequence: Synthetic oligonucleotide
  Antisense strand to SEQ ID NO: 691522
aacuccaucgccaagaucu

SEQ ID NO: 691524 - RNA, 19 nt, Artificial Sequence
  Description of Artificial Sequence: Synthetic oligonucleotide
  Sense strand starting at position 1503 of SEQ ID NO: 586091
uggcgauggaguugaaguu

SEQ ID NO: 691525 - RNA, 19 nt, Artificial Sequence
  Description of Artificial Sequence: Synthetic oligonucleotide
  Antisense strand to SEQ ID NO: 691524
aacuucaacuccaucgcca

SEQ ID NO: 691526 - RNA, 19 nt, Artificial Sequence
  Description of Artificial Sequence: Synthetic oligonucleotide
  Sense strand starting at position 1504 of SEQ ID NO: 586091
ggcgauggaguugaaguua

SEQ ID NO: 691527 - RNA, 19 nt, Artificial Sequence
  Description of Artificial Sequence: Synthetic oligonucleotide
  Antisense strand to SEQ ID NO: 691526
uaacuucaacuccaucgcc

SEQ ID NO: 691528 - RNA, 19 nt, Artificial Sequence
  Description of Artificial Sequence: Synthetic oligonucleotide
  Sense strand starting at position 2082 of SEQ ID NO: 586091
ggucccguuuccuuacgua

SEQ ID NO: 691529 - RNA, 19 nt, Artificial Sequence
  Description of Artificial Sequence: Synthetic oligonucleotide
  Antisense strand to SEQ ID NO: 691528
uacguaaggaaacgggacc

SEQ ID NO: 691530 - RNA, 19 nt, Artificial Sequence
  Description of Artificial Sequence: Synthetic oligonucleotide
  Sense strand starting at position 2256 of SEQ ID NO: 586091
gugcguagaaucugggaau

SEQ ID NO: 691531 - RNA, 19 nt, Artificial Sequence
  Description of Artificial Sequence: Synthetic oligonucleotide
  Antisense strand to SEQ ID NO: 691530
auucccagauucuacgcac

SEQ ID NO: 691532 - RNA, 19 nt, Artificial Sequence
  Description of Artificial Sequence: Synthetic oligonucleotide
  Sense strand starting at position 2504 of SEQ ID NO: 586091
ccuggagucgucgaucuag

SEQ ID NO: 691533 - RNA, 19 nt, Artificial Sequence
  Description of Artificial Sequence: Synthetic oligonucleotide
  Antisense strand to SEQ ID NO: 691532
cuagaucgacgacuccagg

SEQ ID NO: 691534 - RNA, 19 nt, Artificial Sequence
  Description of Artificial Sequence: Synthetic oligonucleotide
  Sense strand starting at position 2509 of SEQ ID NO: 586091
agucgucgaucuagaagga

SEQ ID NO: 691535 - RNA, 19 nt, Artificial Sequence
  Description of Artificial Sequence: Synthetic oligonucleotide
  Antisense strand to SEQ ID NO: 691534
uccuucuagaucgacgacu

SEQ ID NO: 691536 - RNA, 19 nt, Artificial Sequence
  Description of Artificial Sequence: Synthetic oligonucleotide
  Sense strand starting at position 2700 of SEQ ID NO: 586091
ugcugucugucuuccagau

SEQ ID NO: 691537 - RNA, 19 nt, Artificial Sequence
  Description of Artificial Sequence: Synthetic oligonucleotide
  Antisense strand to SEQ ID NO: 691536
aucuggaagacagacagca

SEQ ID NO: 691538 - RNA, 19 nt, Artificial Sequence
  Description of Artificial Sequence: Synthetic oligonucleotide
  Sense strand starting at position 2840 of SEQ ID NO: 586091
cgccuuugccucccgagaa

SEQ ID NO: 691539 - RNA, 19 nt, Artificial Sequence
  Description of Artificial Sequence: Synthetic oligonucleotide
  Antisense strand to SEQ ID NO: 691538
uucucgggaggcaaaggcg

SEQ ID NO: 691540 - RNA, 19 nt, Artificial Sequence
  Description of Artificial Sequence: Synthetic oligonucleotide
  Sense strand starting at position 2914 of SEQ ID NO: 586091
acugaaucaugguuacaau

SEQ ID NO: 691541 - RNA, 19 nt, Artificial Sequence
  Description of Artificial Sequence: Synthetic oligonucleotide
  Antisense strand to SEQ ID NO: 691540
auuguaaccaugauucagu

SEQ ID NO: 691542 - RNA, 19 nt, Artificial Sequence
  Description of Artificial Sequence: Synthetic oligonucleotide
  Sense strand starting at position 3208 of SEQ ID NO: 586091
ggagacagacuccguuuaa

SEQ ID NO: 691543 - RNA, 19 nt, Artificial Sequence
  Description of Artificial Sequence: Synthetic oligonucleotide
  Antisense strand to SEQ ID NO: 691542
uuaaacggagucugucucc

SEQ ID NO: 691544 - RNA, 19 nt, Artificial Sequence
  Description of Artificial Sequence: Synthetic oligonucleotide
  Sense strand starting at position 3300 of SEQ ID NO: 586091
ucgugugaacuugggagau

SEQ ID NO: 691545 - RNA, 19 nt, Artificial Sequence
  Description of Artificial Sequence: Synthetic oligonucleotide
  Antisense strand to SEQ ID NO: 691544
aucucccaaguucacacga

SEQ ID NO: 691546 - RNA, 19 nt, Artificial Sequence
  Description of Artificial Sequence: Synthetic oligonucleotide
  Sense strand starting at position 3790 of SEQ ID NO: 586091
agagucuuacuauguucua

SEQ ID NO: 691547 - RNA, 19 nt, Artificial Sequence
  Description of Artificial Sequence: Synthetic oligonucleotide
  Antisense strand to SEQ ID NO: 691546
uagaacauaguaagacucu

SEQ ID NO: 691548 - RNA, 19 nt, Artificial Sequence
  Description of Artificial Sequence: Synthetic oligonucleotide
  Sense strand starting at position 3791 of SEQ ID NO: 586091
gagucuuacuauguucuag

SEQ ID NO: 691549 - RNA, 19 nt, Artificial Sequence
  Description of Artificial Sequence: Synthetic oligonucleotide
  Antisense strand to SEQ ID NO: 691548
cuagaacauaguaagacuc

SEQ ID NO: 691550 - RNA, 19 nt, Artificial Sequence
  Description of Artificial Sequence: Synthetic oligonucleotide
  Sense strand starting at position 3974 of SEQ ID NO: 586091
uucgcagacuuucugaguu

SEQ ID NO: 691551 - RNA, 19 nt, Artificial Sequence
  Description of Artificial Sequence: Synthetic oligonucleotide
  Antisense strand to SEQ ID NO: 691550
aacucagaaagucugcgaa

SEQ ID NO: 691552 - RNA, 19 nt, Artificial Sequence
  Description of Artificial Sequence: Synthetic oligonucleotide
  Sense strand starting at position 93 of SEQ ID NO: 586092
agaguguuggcccgaggua

SEQ ID NO: 691553 - RNA, 19 nt, Artificial Sequence
  Description of Artificial Sequence: Synthetic oligonucleotide
  Antisense strand to SEQ ID NO: 691552
uaccucgggccaacacucu

SEQ ID NO: 691554 - RNA, 19 nt, Artificial Sequence
  Description of Artificial Sequence: Synthetic oligonucleotide
  Sense strand starting at position 135 of SEQ ID NO: 586092
ccaagaucuugucuaggug

SEQ ID NO: 691555 - RNA, 19 nt, Artificial Sequence
  Description of Artificial Sequence: Synthetic oligonucleotide
  Antisense strand to SEQ ID NO: 691554
caccuagacaagaucuugg

SEQ ID NO: 691556 - RNA, 19 nt, Artificial Sequence
  Description of Artificial Sequence: Synthetic oligonucleotide
  Sense strand starting at position 308 of SEQ ID NO: 586092
cagguccuggucuacaaua

SEQ ID NO: 691557 - RNA, 19 nt, Artificial Sequence
  Description of Artificial Sequence: Synthetic oligonucleotide
  Antisense strand to SEQ ID NO: 691556
uauuguagaccaggaccug

SEQ ID NO: 691558 - RNA, 19 nt, Artificial Sequence
  Description of Artificial Sequence: Synthetic oligonucleotide
  Sense strand starting at position 341 of SEQ ID NO: 586092
uuggguguaucaccuggau

SEQ ID NO: 691559 - RNA, 19 nt, Artificial Sequence
  Description of Artificial Sequence: Synthetic oligonucleotide
  Antisense strand to SEQ ID NO: 691558
auccaggugauacacccaa

SEQ ID NO: 691560 - RNA, 19 nt, Artificial Sequence
  Description of Artificial Sequence: Synthetic oligonucleotide
  Sense strand starting at position 343 of SEQ ID NO: 586092
ggguguaucaccuggauga

SEQ ID NO: 691561 - RNA, 19 nt, Artificial Sequence
  Description of Artificial Sequence: Synthetic oligonucleotide
  Antisense strand to SEQ ID NO: 691560
ucauccaggugauacaccc

SEQ ID NO: 691562 - RNA, 19 nt, Artificial Sequence
  Description of Artificial Sequence: Synthetic oligonucleotide
  Sense strand starting at position 344 of SEQ ID NO: 586092
gguguaucaccuggaugac

SEQ ID NO: 691563 - RNA, 19 nt, Artificial Sequence
  Description of Artificial Sequence: Synthetic oligonucleotide
  Antisense strand to SEQ ID NO: 691562
gucauccaggugauacacc

SEQ ID NO: 691564 - RNA, 19 nt, Artificial Sequence
  Description of Artificial Sequence: Synthetic oligonucleotide
  Sense strand starting at position 345 of SEQ ID NO: 586092
guguaucaccuggaugaca

SEQ ID NO: 691565 - RNA, 19 nt, Artificial Sequence
  Description of Artificial Sequence: Synthetic oligonucleotide
  Antisense strand to SEQ ID NO: 691564
ugucauccaggugauacac

SEQ ID NO: 691566 - RNA, 19 nt, Artificial Sequence
  Description of Artificial Sequence: Synthetic oligonucleotide
  Sense strand starting at position 347 of SEQ ID NO: 586092
guaucaccuggaugacaga

SEQ ID NO: 691567 - RNA, 19 nt, Artificial Sequence
  Description of Artificial Sequence: Synthetic oligonucleotide
  Antisense strand to SEQ ID NO: 691566
ucugucauccaggugauac

SEQ ID NO: 691568 - RNA, 19 nt, Artificial Sequence
  Description of Artificial Sequence: Synthetic oligonucleotide
  Sense strand starting at position 407 of SEQ ID NO: 586092
gcagcucaucugcgauguu

SEQ ID NO: 691569 - RNA, 19 nt, Artificial Sequence
  Description of Artificial Sequence: Synthetic oligonucleotide
  Antisense strand to SEQ ID NO: 691568
aacaucgcagaugagcugc

SEQ ID NO: 691570 - RNA, 19 nt, Artificial Sequence
  Description of Artificial Sequence: Synthetic oligonucleotide
  Sense strand starting at position 410 of SEQ ID NO: 586092
gcucaucugcgauguugau

SEQ ID NO: 691571 - RNA, 19 nt, Artificial Sequence
  Description of Artificial Sequence: Synthetic oligonucleotide
  Antisense strand to SEQ ID NO: 691570
aucaacaucgcagaugagc

SEQ ID NO: 691572 - RNA, 19 nt, Artificial Sequence
  Description of Artificial Sequence: Synthetic oligonucleotide
  Sense strand starting at position 459 of SEQ ID NO: 586092
gugggagacaccugugcuu

SEQ ID NO: 691573 - RNA, 19 nt, Artificial Sequence
  Description of Artificial Sequence: Synthetic oligonucleotide
  Antisense strand to SEQ ID NO: 691572
aagcacaggugucucccac

SEQ ID NO: 691574 - RNA, 19 nt, Artificial Sequence
  Description of Artificial Sequence: Synthetic oligonucleotide
  Sense strand starting at position 474 of SEQ ID NO: 586092
gcuuuccacugggcugaua

SEQ ID NO: 691575 - RNA, 19 nt, Artificial Sequence
  Description of Artificial Sequence: Synthetic oligonucleotide
  Antisense strand to SEQ ID NO: 691574
uaucagcccaguggaaagc

SEQ ID NO: 691576 - RNA, 19 nt, Artificial Sequence
  Description of Artificial Sequence: Synthetic oligonucleotide
  Sense strand starting at position 485 of SEQ ID NO: 586092
ggcugauaucuacagcaau

SEQ ID NO: 691577 - RNA, 19 nt, Artificial Sequence
  Description of Artificial Sequence: Synthetic oligonucleotide
  Antisense strand to SEQ ID NO: 691576
auugcuguagauaucagcc

SEQ ID NO: 691578 - RNA, 19 nt, Artificial Sequence
  Description of Artificial Sequence: Synthetic oligonucleotide
  Sense strand starting at position 593 of SEQ ID NO: 586092
gccugaacuuggucaucca

SEQ ID NO: 691579 - RNA, 19 nt, Artificial Sequence
  Description of Artificial Sequence: Synthetic oligonucleotide
  Antisense strand to SEQ ID NO: 691578
uggaugaccaaguucaggc

SEQ ID NO: 691580 - RNA, 19 nt, Artificial Sequence
  Description of Artificial Sequence: Synthetic oligonucleotide
  Sense strand starting at position 594 of SEQ ID NO: 586092
ccugaacuuggucauccaa

SEQ ID NO: 691581 - RNA, 19 nt, Artificial Sequence
  Description of Artificial Sequence: Synthetic oligonucleotide
  Antisense strand to SEQ ID NO: 691580
uuggaugaccaaguucagg

SEQ ID NO: 691582 - RNA, 19 nt, Artificial Sequence
  Description of Artificial Sequence: Synthetic oligonucleotide
  Sense strand starting at position 601 of SEQ ID NO: 586092
uuggucauccaacgaucau

SEQ ID NO: 691583 - RNA, 19 nt, Artificial Sequence
  Description of Artificial Sequence: Synthetic oligonucleotide
  Antisense strand to SEQ ID NO: 691582
augaucguuggaugaccaa

SEQ ID NO: 691584 - RNA, 19 nt, Artificial Sequence
  Description of Artificial Sequence: Synthetic oligonucleotide
  Sense strand starting at position 1034 of SEQ ID NO: 586092
gggccacucugccagagaa

SEQ ID NO: 691585 - RNA, 19 nt, Artificial Sequence
  Description of Artificial Sequence: Synthetic oligonucleotide
  Antisense strand to SEQ ID NO: 691584
uucucuggcagaguggccc

SEQ ID NO: 691586 - RNA, 19 nt, Artificial Sequence
  Description of Artificial Sequence: Synthetic oligonucleotide
  Sense strand starting at position 1036 of SEQ ID NO: 586092
gccacucugccagagaaga

SEQ ID NO: 691587 - RNA, 19 nt, Artificial Sequence
  Description of Artificial Sequence: Synthetic oligonucleotide
  Antisense strand to SEQ ID NO: 691586
ucuucucuggcagaguggc

SEQ ID NO: 691588 - RNA, 19 nt, Artificial Sequence
  Description of Artificial Sequence: Synthetic oligonucleotide
  Sense strand starting at position 1102 of SEQ ID NO: 586092
gguggcaaucucggagaau

SEQ ID NO: 691589 - RNA, 19 nt, Artificial Sequence
  Description of Artificial Sequence: Synthetic oligonucleotide
  Antisense strand to SEQ ID NO: 691588
auucuccgagauugccacc

SEQ ID NO: 691590 - RNA, 19 nt, Artificial Sequence
  Description of Artificial Sequence: Synthetic oligonucleotide
  Sense strand starting at position 1103 of SEQ ID NO: 586092
guggcaaucucggagaaug

SEQ ID NO: 691591 - RNA, 19 nt, Artificial Sequence
  Description of Artificial Sequence: Synthetic oligonucleotide
  Antisense strand to SEQ ID NO: 691590
cauucuccgagauugccac

SEQ ID NO: 691592 - RNA, 19 nt, Artificial Sequence
  Description of Artificial Sequence: Synthetic oligonucleotide
  Sense strand starting at position 1162 of SEQ ID NO: 586092
agaagaaugggcugccaua

SEQ ID NO: 691593 - RNA, 19 nt, Artificial Sequence
  Description of Artificial Sequence: Synthetic oligonucleotide
  Antisense strand to SEQ ID NO: 691592
uauggcagcccauucuucu

SEQ ID NO: 691594 - RNA, 19 nt, Artificial Sequence
  Description of Artificial Sequence: Synthetic oligonucleotide
  Sense strand starting at position 1195 of SEQ ID NO: 586092
cccggucaucccuagugaa

SEQ ID NO: 691595 - RNA, 19 nt, Artificial Sequence
  Description of Artificial Sequence: Synthetic oligonucleotide
  Antisense strand to SEQ ID NO: 691594
uucacuagggaugaccggg

SEQ ID NO: 691596 - RNA, 19 nt, Artificial Sequence
  Description of Artificial Sequence: Synthetic oligonucleotide
  Sense strand starting at position 1198 of SEQ ID NO: 586092
ggucaucccuagugaacaa

SEQ ID NO: 691597 - RNA, 19 nt, Artificial Sequence
  Description of Artificial Sequence: Synthetic oligonucleotide
  Antisense strand to SEQ ID NO: 691596
uuguucacuagggaugacc

SEQ ID NO: 691598 - RNA, 19 nt, Artificial Sequence
  Description of Artificial Sequence: Synthetic oligonucleotide
  Sense strand starting at position 1346 of SEQ ID NO: 586092
gagugagggaucuggaagu

SEQ ID NO: 691599 - RNA, 19 nt, Artificial Sequence
  Description of Artificial Sequence: Synthetic oligonucleotide
  Antisense strand to SEQ ID NO: 691598
acuuccagaucccucacuc

SEQ ID NO: 691600 - RNA, 19 nt, Artificial Sequence
  Description of Artificial Sequence: Synthetic oligonucleotide
  Sense strand starting at position 1479 of SEQ ID NO: 586092
ggccaagaucuuggcgaug

SEQ ID NO: 691601 - RNA, 19 nt, Artificial Sequence
  Description of Artificial Sequence: Synthetic oligonucleotide
  Antisense strand to SEQ ID NO: 691600
caucgccaagaucuuggcc

SEQ ID NO: 691602 - RNA, 19 nt, Artificial Sequence
  Description of Artificial Sequence: Synthetic oligonucleotide
  Sense strand starting at position 1484 of SEQ ID NO: 586092
agaucuuggcgauggaguu

SEQ ID NO: 691603 - RNA, 19 nt, Artificial Sequence
  Description of Artificial Sequence: Synthetic oligonucleotide
  Antisense strand to SEQ ID NO: 691602
aacuccaucgccaagaucu

SEQ ID NO: 691604 - RNA, 19 nt, Artificial Sequence
  Description of Artificial Sequence: Synthetic oligonucleotide
  Sense strand starting at position 1490 of SEQ ID NO: 586092
uggcgauggaguugaaguu

SEQ ID NO: 691605 - RNA, 19 nt, Artificial Sequence
  Description of Artificial Sequence: Synthetic oligonucleotide
  Antisense strand to SEQ ID NO: 691604
aacuucaacuccaucgcca

SEQ ID NO: 691606 - RNA, 19 nt, Artificial Sequence
  Description of Artificial Sequence: Synthetic oligonucleotide
  Sense strand starting at position 1491 of SEQ ID NO: 586092
ggcgauggaguugaaguua

SEQ ID NO: 691607 - RNA, 19 nt, Artificial Sequence
  Description of Artificial Sequence: Synthetic oligonucleotide
  Antisense strand to SEQ ID NO: 691606
uaacuucaacuccaucgcc

SEQ ID NO: 691608 - RNA, 19 nt, Artificial Sequence
  Description of Artificial Sequence: Synthetic oligonucleotide
  Sense strand starting at position 2069 of SEQ ID NO: 586092
ggucccguuuccuuacgua

SEQ ID NO: 691609 - RNA, 19 nt, Artificial Sequence
  Description of Artificial Sequence: Synthetic oligonucleotide
  Antisense strand to SEQ ID NO: 691608
uacguaaggaaacgggacc

SEQ ID NO: 691610 - RNA, 19 nt, Artificial Sequence
  Description of Artificial Sequence: Synthetic oligonucleotide
  Sense strand starting at position 2243 of SEQ ID NO: 586092
gugcguagaaucugggaau

SEQ ID NO: 691611 - RNA, 19 nt, Artificial Sequence
  Description of Artificial Sequence: Synthetic oligonucleotide
  Antisense strand to SEQ ID NO: 691610
auucccagauucuacgcac

SEQ ID NO: 691612 - RNA, 19 nt, Artificial Sequence
  Description of Artificial Sequence: Synthetic oligonucleotide
  Sense strand starting at position 2491 of SEQ ID NO: 586092
ccuggagucgucgaucuag

SEQ ID NO: 691613 - RNA, 19 nt, Artificial Sequence
  Description of Artificial Sequence: Synthetic oligonucleotide
  Antisense strand to SEQ ID NO: 691612
cuagaucgacgacuccagg

SEQ ID NO: 691614 - RNA, 19 nt, Artificial Sequence
  Description of Artificial Sequence: Synthetic oligonucleotide
  Sense strand starting at position 2496 of SEQ ID NO: 586092
agucgucgaucuagaagga

SEQ ID NO: 691615 - RNA, 19 nt, Artificial Sequence
  Description of Artificial Sequence: Synthetic oligonucleotide
  Antisense strand to SEQ ID NO: 691614
uccuucuagaucgacgacu

SEQ ID NO: 691616 - RNA, 19 nt, Artificial Sequence
  Description of Artificial Sequence: Synthetic oligonucleotide
  Sense strand starting at position 2687 of SEQ ID NO: 586092
ugcugucugucuuccagau

SEQ ID NO: 691617 - RNA, 19 nt, Artificial Sequence
  Description of Artificial Sequence: Synthetic oligonucleotide
  Antisense strand to SEQ ID NO: 691616
aucuggaagacagacagca

SEQ ID NO: 691618 - RNA, 19 nt, Artificial Sequence
  Description of Artificial Sequence: Synthetic oligonucleotide
  Sense strand starting at position 2827 of SEQ ID NO: 586092
cgccuuugccucccgagaa

SEQ ID NO: 691619 - RNA, 19 nt, Artificial Sequence
  Description of Artificial Sequence: Synthetic oligonucleotide
  Antisense strand to SEQ ID NO: 691618
uucucgggaggcaaaggcg

SEQ ID NO: 691620 - RNA, 19 nt, Artificial Sequence
  Description of Artificial Sequence: Synthetic oligonucleotide
  Sense strand starting at position 2901 of SEQ ID NO: 586092
acugaaucaugguuacaau

SEQ ID NO: 691621 - RNA, 19 nt, Artificial Sequence
  Description of Artificial Sequence: Synthetic oligonucleotide
  Antisense strand to SEQ ID NO: 691620
auuguaaccaugauucagu

SEQ ID NO: 691622 - RNA, 19 nt, Artificial Sequence
  Description of Artificial Sequence: Synthetic oligonucleotide
  Sense strand starting at position 3195 of SEQ ID NO: 586092
ggagacagacuccguuuaa

SEQ ID NO: 691623 - RNA, 19 nt, Artificial Sequence
  Description of Artificial Sequence: Synthetic oligonucleotide
  Antisense strand to SEQ ID NO: 691622
uuaaacggagucugucucc

SEQ ID NO: 691624 - RNA, 19 nt, Artificial Sequence
  Description of Artificial Sequence: Synthetic oligonucleotide
  Sense strand starting at position 3287 of SEQ ID NO: 586092
ucgugugaacuugggagau

SEQ ID NO: 691625 - RNA, 19 nt, Artificial Sequence
  Description of Artificial Sequence: Synthetic oligonucleotide
  Antisense strand to SEQ ID NO: 691624
aucucccaaguucacacga

SEQ ID NO: 691626 - RNA, 19 nt, Artificial Sequence
  Description of Artificial Sequence: Synthetic oligonucleotide
  Sense strand starting at position 3777 of SEQ ID NO: 586092
agagucuuacuauguucua

SEQ ID NO: 691627 - RNA, 19 nt, Artificial Sequence
  Description of Artificial Sequence: Synthetic oligonucleotide
  Antisense strand to SEQ ID NO: 691626
uagaacauaguaagacucu

SEQ ID NO: 691628 - RNA, 19 nt, Artificial Sequence
  Description of Artificial Sequence: Synthetic oligonucleotide
  Sense strand starting at position 3778 of SEQ ID NO: 586092
gagucuuacuauguucuag

SEQ ID NO: 691629 - RNA, 19 nt, Artificial Sequence
  Description of Artificial Sequence: Synthetic oligonucleotide
  Antisense strand to SEQ ID NO: 691628
cuagaacauaguaagacuc

SEQ ID NO: 691630 - RNA, 19 nt, Artificial Sequence
  Description of Artificial Sequence: Synthetic oligonucleotide
  Sense strand starting at position 3961 of SEQ ID NO: 586092
uucgcagacuuucugaguu

SEQ ID NO: 691631 - RNA, 19 nt, Artificial Sequence
  Description of Artificial Sequence: Synthetic oligonucleotide
  Antisense strand to SEQ ID NO: 691630
aacucagaaagucugcgaa

SEQ ID NO: 691632 - RNA, 19 nt, Artificial Sequence
  Description of Artificial Sequence: Synthetic oligonucleotide
  Sense strand starting at position 276 of SEQ ID NO: 586093
cggcgucugcugggagaaa

SEQ ID NO: 691633 - RNA, 19 nt, Artificial Sequence
  Description of Artificial Sequence: Synthetic oligonucleotide
  Antisense strand to SEQ ID NO: 691632
uuucucccagcagacgccg

SEQ ID NO: 691634 - RNA, 19 nt, Artificial Sequence
  Description of Artificial Sequence: Synthetic oligonucleotide
  Sense strand starting at position 754 of SEQ ID NO: 586093
gggcauucaggguguggaa

SEQ ID NO: 691635 - RNA, 19 nt, Artificial Sequence
  Description of Artificial Sequence: Synthetic oligonucleotide
  Antisense strand to SEQ ID NO: 691634
uuccacacccugaaugccc

SEQ ID NO: 691636 - RNA, 19 nt, Artificial Sequence
  Description of Artificial Sequence: Synthetic oligonucleotide
  Sense strand starting at position 996 of SEQ ID NO: 586093
ggcaguagagaccgagaaa

SEQ ID NO: 691637 - RNA, 19 nt, Artificial Sequence
  Description of Artificial Sequence: Synthetic oligonucleotide
  Antisense strand to SEQ ID NO: 691636
uuucucggucucuacugcc

SEQ ID NO: 691638 - RNA, 19 nt, Artificial Sequence
  Description of Artificial Sequence: Synthetic oligonucleotide
  Sense strand starting at position 1292 of SEQ ID NO: 586093
gguggugcugcuggagauu

SEQ ID NO: 691639 - RNA, 19 nt, Artificial Sequence
  Description of Artificial Sequence: Synthetic oligonucleotide
  Antisense strand to SEQ ID NO: 691638
aaucuccagcagcaccacc

SEQ ID NO: 691640 - RNA, 19 nt, Artificial Sequence
  Description of Artificial Sequence: Synthetic oligonucleotide
  Sense strand starting at position 1673 of SEQ ID NO: 586093
ggaagaguuccggacgagu

SEQ ID NO: 691641 - RNA, 19 nt, Artificial Sequence
  Description of Artificial Sequence: Synthetic oligonucleotide
  Antisense strand to SEQ ID NO: 691640
acucguccggaacucuucc

SEQ ID NO: 691642 - RNA, 19 nt, Artificial Sequence
  Description of Artificial Sequence: Synthetic oligonucleotide
  Sense strand starting at position 2303 of SEQ ID NO: 586093
gcucgaggcuggugaaguu

SEQ ID NO: 691643 - RNA, 19 nt, Artificial Sequence
  Description of Artificial Sequence: Synthetic oligonucleotide
  Antisense strand to SEQ ID NO: 691642
aacuucaccagccucgagc

SEQ ID NO: 691644 - RNA, 19 nt, Artificial Sequence
  Description of Artificial Sequence: Synthetic oligonucleotide
  Sense strand starting at position 2504 of SEQ ID NO: 586093
ugggaucgcuaguggaaau

SEQ ID NO: 691645 - RNA, 19 nt, Artificial Sequence
  Description of Artificial Sequence: Synthetic oligonucleotide
  Antisense strand to SEQ ID NO: 691644
auuuccacuagcgauccca

SEQ ID NO: 691646 - RNA, 19 nt, Artificial Sequence
  Description of Artificial Sequence: Synthetic oligonucleotide
  Sense strand starting at position 2696 of SEQ ID NO: 586093
acgggugacuucggacuuu

SEQ ID NO: 691647 - RNA, 19 nt, Artificial Sequence
  Description of Artificial Sequence: Synthetic oligonucleotide
  Antisense strand to SEQ ID NO: 691646
aaaguccgaagucacccgu

SEQ ID NO: 691648 - RNA, 19 nt, Artificial Sequence
  Description of Artificial Sequence: Synthetic oligonucleotide
  Sense strand starting at position 2863 of SEQ ID NO: 586093
ggaguucacccguguggac

SEQ ID NO: 691649 - RNA, 19 nt, Artificial Sequence
  Description of Artificial Sequence: Synthetic oligonucleotide
  Antisense strand to SEQ ID NO: 691648
guccacacgggugaacucc

SEQ ID NO: 691650 - RNA, 19 nt, Artificial Sequence
  Description of Artificial Sequence: Synthetic oligonucleotide
  Sense strand starting at position 3529 of SEQ ID NO: 586093
gaccaugugcccuaguuga

SEQ ID NO: 691651 - RNA, 19 nt, Artificial Sequence
  Description of Artificial Sequence: Synthetic oligonucleotide
  Antisense strand to SEQ ID NO: 691650
ucaacuagggcacaugguc

SEQ ID NO: 691652 - RNA, 19 nt, Artificial Sequence
  Description of Artificial Sequence: Synthetic oligonucleotide
  Sense strand starting at position 3625 of SEQ ID NO: 586093
gaaugaaucugaggcaggu

SEQ ID NO: 691653 - RNA, 19 nt, Artificial Sequence
  Description of Artificial Sequence: Synthetic oligonucleotide
  Antisense strand to SEQ ID NO: 691652
accugccucagauucauuc

SEQ ID NO: 691654 - RNA, 19 nt, Artificial Sequence
  Description of Artificial Sequence: Synthetic oligonucleotide
  Sense strand starting at position 3639 of SEQ ID NO: 586093
cagguuucuaagcguggua

SEQ ID NO: 691655 - RNA, 19 nt, Artificial Sequence
  Description of Artificial Sequence: Synthetic oligonucleotide
  Antisense strand to SEQ ID NO: 691654
uaccacgcuuagaaaccug

SEQ ID NO: 691656 - RNA, 19 nt, Artificial Sequence
  Description of Artificial Sequence: Synthetic oligonucleotide
  Sense strand starting at position 3641 of SEQ ID NO: 586093
gguuucuaagcgugguaau

SEQ ID NO: 691657 - RNA, 19 nt, Artificial Sequence
  Description of Artificial Sequence: Synthetic oligonucleotide
  Antisense strand to SEQ ID NO: 691656
auuaccacgcuuagaaacc

SEQ ID NO: 691658 - RNA, 19 nt, Artificial Sequence
  Description of Artificial Sequence: Synthetic oligonucleotide
  Sense strand starting at position 3642 of SEQ ID NO: 586093
guuucuaagcgugguaauu

SEQ ID NO: 691659 - RNA, 19 nt, Artificial Sequence
  Description of Artificial Sequence: Synthetic oligonucleotide
  Antisense strand to SEQ ID NO: 691658
aauuaccacgcuuagaaac

SEQ ID NO: 691660 - RNA, 19 nt, Artificial Sequence
  Description of Artificial Sequence: Synthetic oligonucleotide
  Sense strand starting at position 3644 of SEQ ID NO: 586093
uucuaagcgugguaauuau

SEQ ID NO: 691661 - RNA, 19 nt, Artificial Sequence
  Description of Artificial Sequence: Synthetic oligonucleotide
  Antisense strand to SEQ ID NO: 691660
auaauuaccacgcuuagaa

SEQ ID NO: 691662 - RNA, 19 nt, Artificial Sequence
  Description of Artificial Sequence: Synthetic oligonucleotide
  Sense strand starting at position 3651 of SEQ ID NO: 586093
cgugguaauuaugaauuau

SEQ ID NO: 691663 - RNA, 19 nt, Artificial Sequence
  Description of Artificial Sequence: Synthetic oligonucleotide
  Antisense strand to SEQ ID NO: 691662
auaauucauaauuaccacg

SEQ ID NO: 691664 - RNA, 19 nt, Artificial Sequence
  Description of Artificial Sequence: Synthetic oligonucleotide
  Sense strand starting at position 3737 of SEQ ID NO: 586093
acaggaggaucgcuucagu

SEQ ID NO: 691665 - RNA, 19 nt, Artificial Sequence
  Description of Artificial Sequence: Synthetic oligonucleotide
  Antisense strand to SEQ ID NO: 691664
acugaagcgauccuccugu

SEQ ID NO: 691666 - RNA, 19 nt, Artificial Sequence
  Description of Artificial Sequence: Synthetic oligonucleotide
  Sense strand starting at position 3883 of SEQ ID NO: 586093
uggcccugcuagugaugaa

SEQ ID NO: 691667 - RNA, 19 nt, Artificial Sequence
  Description of Artificial Sequence: Synthetic oligonucleotide
  Antisense strand to SEQ ID NO: 691666
uucaucacuagcagggcca

SEQ ID NO: 691668 - RNA, 19 nt, Artificial Sequence
  Description of Artificial Sequence: Synthetic oligonucleotide
  Sense strand starting at position 3965 of SEQ ID NO: 586093
acgaguuucuaggccugua

SEQ ID NO: 691669 - RNA, 19 nt, Artificial Sequence
  Description of Artificial Sequence: Synthetic oligonucleotide
  Antisense strand to SEQ ID NO: 691668
uacaggccuagaaacucgu

SEQ ID NO: 691670 - RNA, 19 nt, Artificial Sequence
  Description of Artificial Sequence: Synthetic oligonucleotide
  Sense strand starting at position 3968 of SEQ ID NO: 586093
aguuucuaggccuguacaa

SEQ ID NO: 691671 - RNA, 19 nt, Artificial Sequence
  Description of Artificial Sequence: Synthetic oligonucleotide
  Antisense strand to SEQ ID NO: 691670
uuguacaggccuagaaacu

SEQ ID NO: 691672 - RNA, 19 nt, Artificial Sequence
  Description of Artificial Sequence: Synthetic oligonucleotide
  Sense strand starting at position 3975 of SEQ ID NO: 586093
aggccuguacaaugaagau

SEQ ID NO: 691673 - RNA, 19 nt, Artificial Sequence
  Description of Artificial Sequence: Synthetic oligonucleotide
  Antisense strand to SEQ ID NO: 691672
aucuucauuguacaggccu

SEQ ID NO: 691674 - RNA, 19 nt, Artificial Sequence
  Description of Artificial Sequence: Synthetic oligonucleotide
  Sense strand starting at position 114 of SEQ ID NO: 586094
cggcgucugcugggagaaa

SEQ ID NO: 691675 - RNA, 19 nt, Artificial Sequence
  Description of Artificial Sequence: Synthetic oligonucleotide
  Antisense strand to SEQ ID NO: 691674
uuucucccagcagacgccg

SEQ ID NO: 691676 - RNA, 19 nt, Artificial Sequence
  Description of Artificial Sequence: Synthetic oligonucleotide
  Sense strand starting at position 592 of SEQ ID NO: 586094
gggcauucaggguguggaa

SEQ ID NO: 691677 - RNA, 19 nt, Artificial Sequence
  Description of Artificial Sequence: Synthetic oligonucleotide
  Antisense strand to SEQ ID NO: 691676
uuccacacccugaaugccc

SEQ ID NO: 691678 - RNA, 19 nt, Artificial Sequence
  Description of Artificial Sequence: Synthetic oligonucleotide
  Sense strand starting at position 834 of SEQ ID NO: 586094
ggcaguagagaccgagaaa

SEQ ID NO: 691679 - RNA, 19 nt, Artificial Sequence
  Description of Artificial Sequence: Synthetic oligonucleotide
  Antisense strand to SEQ ID NO: 691678
uuucucggucucuacugcc

SEQ ID NO: 691680 - RNA, 19 nt, Artificial Sequence
  Description of Artificial Sequence: Synthetic oligonucleotide
  Sense strand starting at position 1130 of SEQ ID NO: 586094
gguggugcugcuggagauu

SEQ ID NO: 691681 - RNA, 19 nt, Artificial Sequence
  Description of Artificial Sequence: Synthetic oligonucleotide
  Antisense strand to SEQ ID NO: 691680
aaucuccagcagcaccacc

SEQ ID NO: 691682 - RNA, 19 nt, Artificial Sequence
  Description of Artificial Sequence: Synthetic oligonucleotide
  Sense strand starting at position 1511 of SEQ ID NO: 586094
ggaagaguuccggacgagu

SEQ ID NO: 691683 - RNA, 19 nt, Artificial Sequence
  Description of Artificial Sequence: Synthetic oligonucleotide
  Antisense strand to SEQ ID NO: 691682
acucguccggaacucuucc

SEQ ID NO: 691684 - RNA, 19 nt, Artificial Sequence
  Description of Artificial Sequence: Synthetic oligonucleotide
  Sense strand starting at position 2141 of SEQ ID NO: 586094
gcucgaggcuggugaaguu

SEQ ID NO: 691685 - RNA, 19 nt, Artificial Sequence
  Description of Artificial Sequence: Synthetic oligonucleotide
  Antisense strand to SEQ ID NO: 691684
aacuucaccagccucgagc

SEQ ID NO: 691686 - RNA, 19 nt, Artificial Sequence
  Description of Artificial Sequence: Synthetic oligonucleotide
  Sense strand starting at position 2342 of SEQ ID NO: 586094
ugggaucgcuaguggaaau

SEQ ID NO: 691687 - RNA, 19 nt, Artificial Sequence
  Description of Artificial Sequence: Synthetic oligonucleotide
  Antisense strand to SEQ ID NO: 691686
auuuccacuagcgauccca

SEQ ID NO: 691688 - RNA, 19 nt, Artificial Sequence
  Description of Artificial Sequence: Synthetic oligonucleotide
  Sense strand starting at position 2534 of SEQ ID NO: 586094
acgggugacuucggacuuu

SEQ ID NO: 691689 - RNA, 19 nt, Artificial Sequence
  Description of Artificial Sequence: Synthetic oligonucleotide
  Antisense strand to SEQ ID NO: 691688
aaaguccgaagucacccgu

SEQ ID NO: 691690 - RNA, 19 nt, Artificial Sequence
  Description of Artificial Sequence: Synthetic oligonucleotide
  Sense strand starting at position 2701 of SEQ ID NO: 586094
ggaguucacccguguggac

SEQ ID NO: 691691 - RNA, 19 nt, Artificial Sequence
  Description of Artificial Sequence: Synthetic oligonucleotide
  Antisense strand to SEQ ID NO: 691690
guccacacgggugaacucc

SEQ ID NO: 691692 - RNA, 19 nt, Artificial Sequence
  Description of Artificial Sequence: Synthetic oligonucleotide
  Sense strand starting at position 3367 of SEQ ID NO: 586094
gaccaugugcccuaguuga

SEQ ID NO: 691693 - RNA, 19 nt, Artificial Sequence
  Description of Artificial Sequence: Synthetic oligonucleotide
  Antisense strand to SEQ ID NO: 691692
ucaacuagggcacaugguc

SEQ ID NO: 691694 - RNA, 19 nt, Artificial Sequence
  Description of Artificial Sequence: Synthetic oligonucleotide
  Sense strand starting at position 3463 of SEQ ID NO: 586094
gaaugaaucugaggcaggu

SEQ ID NO: 691695 - RNA, 19 nt, Artificial Sequence
  Description of Artificial Sequence: Synthetic oligonucleotide
  Antisense strand to SEQ ID NO: 691694
accugccucagauucauuc

SEQ ID NO: 691696 - RNA, 19 nt, Artificial Sequence
  Description of Artificial Sequence: Synthetic oligonucleotide
  Sense strand starting at position 3477 of SEQ ID NO: 586094
cagguuucuaagcguggua

SEQ ID NO: 691697 - RNA, 19 nt, Artificial Sequence
  Description of Artificial Sequence: Synthetic oligonucleotide
  Antisense strand to SEQ ID NO: 691696
uaccacgcuuagaaaccug

SEQ ID NO: 691698 - RNA, 19 nt, Artificial Sequence
  Description of Artificial Sequence: Synthetic oligonucleotide
  Sense strand starting at position 3479 of SEQ ID NO: 586094
gguuucuaagcgugguaau

SEQ ID NO: 691699 - RNA, 19 nt, Artificial Sequence
  Description of Artificial Sequence: Synthetic oligonucleotide
  Antisense strand to SEQ ID NO: 691698
auuaccacgcuuagaaacc

SEQ ID NO: 691700 - RNA, 19 nt, Artificial Sequence
  Description of Artificial Sequence: Synthetic oligonucleotide
  Sense strand starting at position 3480 of SEQ ID NO: 586094
guuucuaagcgugguaauu

SEQ ID NO: 691701 - RNA, 19 nt, Artificial Sequence
  Description of Artificial Sequence: Synthetic oligonucleotide
  Antisense strand to SEQ ID NO: 691700
aauuaccacgcuuagaaac

SEQ ID NO: 691702 - RNA, 19 nt, Artificial Sequence
  Description of Artificial Sequence: Synthetic oligonucleotide
  Sense strand starting at position 3482 of SEQ ID NO: 586094
uucuaagcgugguaauuau

SEQ ID NO: 691703 - RNA, 19 nt, Artificial Sequence
  Description of Artificial Sequence: Synthetic oligonucleotide
  Antisense strand to SEQ ID NO: 691702
auaauuaccacgcuuagaa

SEQ ID NO: 691704 - RNA, 19 nt, Artificial Sequence
  Description of Artificial Sequence: Synthetic oligonucleotide
  Sense strand starting at position 3489 of SEQ ID NO: 586094
cgugguaauuaugaauuau

SEQ ID NO: 691705 - RNA, 19 nt, Artificial Sequence
  Description of Artificial Sequence: Synthetic oligonucleotide
  Antisense strand to SEQ ID NO: 691704
auaauucauaauuaccacg

SEQ ID NO: 691706 - RNA, 19 nt, Artificial Sequence
  Description of Artificial Sequence: Synthetic oligonucleotide
  Sense strand starting at position 3575 of SEQ ID NO: 586094
acaggaggaucgcuucagu

SEQ ID NO: 691707 - RNA, 19 nt, Artificial Sequence
  Description of Artificial Sequence: Synthetic oligonucleotide
  Antisense strand to SEQ ID NO: 691706
acugaagcgauccuccugu

SEQ ID NO: 691708 - RNA, 19 nt, Artificial Sequence
  Description of Artificial Sequence: Synthetic oligonucleotide
  Sense strand starting at position 3721 of SEQ ID NO: 586094
uggcccugcuagugaugaa

SEQ ID NO: 691709 - RNA, 19 nt, Artificial Sequence
  Description of Artificial Sequence: Synthetic oligonucleotide
  Antisense strand to SEQ ID NO: 691708
uucaucacuagcagggcca

SEQ ID NO: 691710 - RNA, 19 nt, Artificial Sequence
  Description of Artificial Sequence: Synthetic oligonucleotide
  Sense strand starting at position 3803 of SEQ ID NO: 586094
acgaguuucuaggccugua

SEQ ID NO: 691711 - RNA, 19 nt, Artificial Sequence
  Description of Artificial Sequence: Synthetic oligonucleotide
  Antisense strand to SEQ ID NO: 691710
uacaggccuagaaacucgu

SEQ ID NO: 691712 - RNA, 19 nt, Artificial Sequence
  Description of Artificial Sequence: Synthetic oligonucleotide
  Sense strand starting at position 3806 of SEQ ID NO: 586094
aguuucuaggccuguacaa

SEQ ID NO: 691713 - RNA, 19 nt, Artificial Sequence
  Description of Artificial Sequence: Synthetic oligonucleotide
  Antisense strand to SEQ ID NO: 691712
uuguacaggccuagaaacu

SEQ ID NO: 691714 - RNA, 19 nt, Artificial Sequence
  Description of Artificial Sequence: Synthetic oligonucleotide
  Sense strand starting at position 3813 of SEQ ID NO: 586094
aggccuguacaaugaagau

SEQ ID NO: 691715 - RNA, 19 nt, Artificial Sequence
  Description of Artificial Sequence: Synthetic oligonucleotide
  Antisense strand to SEQ ID NO: 691714
aucuucauuguacaggccu

SEQ ID NO: 691716 - RNA, 19 nt, Artificial Sequence
  Description of Artificial Sequence: Synthetic oligonucleotide
  Sense strand starting at position 3844 of SEQ ID NO: 586094
gauaguuuaucaccagggu

SEQ ID NO: 691717 - RNA, 19 nt, Artificial Sequence
  Description of Artificial Sequence: Synthetic oligonucleotide
  Antisense strand to SEQ ID NO: 691716
acccuggugauaaacuauc

SEQ ID NO: 691718 - RNA, 19 nt, Artificial Sequence
  Description of Artificial Sequence: Synthetic oligonucleotide
  Sense strand starting at position 3845 of SEQ ID NO: 586094
auaguuuaucaccaggguu

SEQ ID NO: 691719 - RNA, 19 nt, Artificial Sequence
  Description of Artificial Sequence: Synthetic oligonucleotide
  Antisense strand to SEQ ID NO: 691718
aacccuggugauaaacuau

SEQ ID NO: 691720 - RNA, 19 nt, Artificial Sequence
  Description of Artificial Sequence: Synthetic oligonucleotide
  Sense strand starting at position 3847 of SEQ ID NO: 586094
aguuuaucaccaggguuau

SEQ ID NO: 691721 - RNA, 19 nt, Artificial Sequence
  Description of Artificial Sequence: Synthetic oligonucleotide
  Antisense strand to SEQ ID NO: 691720
auaacccuggugauaaacu

SEQ ID NO: 691722 - RNA, 19 nt, Artificial Sequence
  Description of Artificial Sequence: Synthetic oligonucleotide
  Sense strand starting at position 3848 of SEQ ID NO: 586094
guuuaucaccaggguuauc

SEQ ID NO: 691723 - RNA, 19 nt, Artificial Sequence
  Description of Artificial Sequence: Synthetic oligonucleotide
  Antisense strand to SEQ ID NO: 691722
gauaacccuggugauaaac

SEQ ID NO: 691724 - RNA, 19 nt, Artificial Sequence
  Description of Artificial Sequence: Synthetic oligonucleotide
  Sense strand starting at position 3861 of SEQ ID NO: 586094
guuaucauuuccuggaacu

SEQ ID NO: 691725 - RNA, 19 nt, Artificial Sequence
  Description of Artificial Sequence: Synthetic oligonucleotide
  Antisense strand to SEQ ID NO: 691724
aguuccaggaaaugauaac

SEQ ID NO: 691726 - RNA, 19 nt, Artificial Sequence
  Description of Artificial Sequence: Synthetic oligonucleotide
  Sense strand starting at position 3945 of SEQ ID NO: 586094
ggaggcguuucccuacaua

SEQ ID NO: 691727 - RNA, 19 nt, Artificial Sequence
  Description of Artificial Sequence: Synthetic oligonucleotide
  Antisense strand to SEQ ID NO: 691726
uauguagggaaacgccucc

SEQ ID NO: 691728 - RNA, 19 nt, Artificial Sequence
  Description of Artificial Sequence: Synthetic oligonucleotide
  Sense strand starting at position 3955 of SEQ ID NO: 586094
cccuacauagucuagcaua

SEQ ID NO: 691729 - RNA, 19 nt, Artificial Sequence
  Description of Artificial Sequence: Synthetic oligonucleotide
  Antisense strand to SEQ ID NO: 691728
uaugcuagacuauguaggg

SEQ ID NO: 691730 - RNA, 19 nt, Artificial Sequence
  Description of Artificial Sequence: Synthetic oligonucleotide
  Sense strand starting at position 13 of SEQ ID NO: 586095
gcagacacucuggaagguu

SEQ ID NO: 691731 - RNA, 19 nt, Artificial Sequence
  Description of Artificial Sequence: Synthetic oligonucleotide
  Antisense strand to SEQ ID NO: 691730
aaccuuccagagugucugc

SEQ ID NO: 691732 - RNA, 19 nt, Artificial Sequence
  Description of Artificial Sequence: Synthetic oligonucleotide
  Sense strand starting at position 327 of SEQ ID NO: 586095
cggcgucugcugggagaaa

SEQ ID NO: 691733 - RNA, 19 nt, Artificial Sequence
  Description of Artificial Sequence: Synthetic oligonucleotide
  Antisense strand to SEQ ID NO: 691732
uuucucccagcagacgccg

SEQ ID NO: 691734 - RNA, 19 nt, Artificial Sequence
  Description of Artificial Sequence: Synthetic oligonucleotide
  Sense strand starting at position 805 of SEQ ID NO: 586095
gggcauucaggguguggaa

SEQ ID NO: 691735 - RNA, 19 nt, Artificial Sequence
  Description of Artificial Sequence: Synthetic oligonucleotide
  Antisense strand to SEQ ID NO: 691734
uuccacacccugaaugccc

SEQ ID NO: 691736 - RNA, 19 nt, Artificial Sequence
  Description of Artificial Sequence: Synthetic oligonucleotide
  Sense strand starting at position 1047 of SEQ ID NO: 586095
ggcaguagagaccgagaaa

SEQ ID NO: 691737 - RNA, 19 nt, Artificial Sequence
  Description of Artificial Sequence: Synthetic oligonucleotide
  Antisense strand to SEQ ID NO: 691736
uuucucggucucuacugcc

SEQ ID NO: 691738 - RNA, 19 nt, Artificial Sequence
  Description of Artificial Sequence: Synthetic oligonucleotide
  Sense strand starting at position 1343 of SEQ ID NO: 586095
gguggugcugcuggagauu

SEQ ID NO: 691739 - RNA, 19 nt, Artificial Sequence
  Description of Artificial Sequence: Synthetic oligonucleotide
  Antisense strand to SEQ ID NO: 691738
aaucuccagcagcaccacc

SEQ ID NO: 691740 - RNA, 19 nt, Artificial Sequence
  Description of Artificial Sequence: Synthetic oligonucleotide
  Sense strand starting at position 1724 of SEQ ID NO: 586095
ggaagaguuccggacgagu

SEQ ID NO: 691741 - RNA, 19 nt, Artificial Sequence
  Description of Artificial Sequence: Synthetic oligonucleotide
  Antisense strand to SEQ ID NO: 691740
acucguccggaacucuucc

SEQ ID NO: 691742 - RNA, 19 nt, Artificial Sequence
  Description of Artificial Sequence: Synthetic oligonucleotide
  Sense strand starting at position 2354 of SEQ ID NO: 586095
gcucgaggcuggugaaguu

SEQ ID NO: 691743 - RNA, 19 nt, Artificial Sequence
  Description of Artificial Sequence: Synthetic oligonucleotide
  Antisense strand to SEQ ID NO: 691742
aacuucaccagccucgagc

SEQ ID NO: 691744 - RNA, 19 nt, Artificial Sequence
  Description of Artificial Sequence: Synthetic oligonucleotide
  Sense strand starting at position 2555 of SEQ ID NO: 586095
ugggaucgcuaguggaaau

SEQ ID NO: 691745 - RNA, 19 nt, Artificial Sequence
  Description of Artificial Sequence: Synthetic oligonucleotide
  Antisense strand to SEQ ID NO: 691744
auuuccacuagcgauccca

SEQ ID NO: 691746 - RNA, 19 nt, Artificial Sequence
  Description of Artificial Sequence: Synthetic oligonucleotide
  Sense strand starting at position 2747 of SEQ ID NO: 586095
acgggugacuucggacuuu

SEQ ID NO: 691747 - RNA, 19 nt, Artificial Sequence
  Description of Artificial Sequence: Synthetic oligonucleotide
  Antisense strand to SEQ ID NO: 691746
aaaguccgaagucacccgu

SEQ ID NO: 691748 - RNA, 19 nt, Artificial Sequence
  Description of Artificial Sequence: Synthetic oligonucleotide
  Sense strand starting at position 2914 of SEQ ID NO: 586095
ggaguucacccguguggac

SEQ ID NO: 691749 - RNA, 19 nt, Artificial Sequence
  Description of Artificial Sequence: Synthetic oligonucleotide
  Antisense strand to SEQ ID NO: 691748
guccacacgggugaacucc

SEQ ID NO: 691750 - RNA, 19 nt, Artificial Sequence
  Description of Artificial Sequence: Synthetic oligonucleotide
  Sense strand starting at position 3580 of SEQ ID NO: 586095
gaccaugugcccuaguuga

SEQ ID NO: 691751 - RNA, 19 nt, Artificial Sequence
  Description of Artificial Sequence: Synthetic oligonucleotide
  Antisense strand to SEQ ID NO: 691750
ucaacuagggcacaugguc

SEQ ID NO: 691752 - RNA, 19 nt, Artificial Sequence
  Description of Artificial Sequence: Synthetic oligonucleotide
  Sense strand starting at position 3676 of SEQ ID NO: 586095
gaaugaaucugaggcaggu

SEQ ID NO: 691753 - RNA, 19 nt, Artificial Sequence
  Description of Artificial Sequence: Synthetic oligonucleotide
  Antisense strand to SEQ ID NO: 691752
accugccucagauucauuc

SEQ ID NO: 691754 - RNA, 19 nt, Artificial Sequence
  Description of Artificial Sequence: Synthetic oligonucleotide
  Sense strand starting at position 3690 of SEQ ID NO: 586095
cagguuucuaagcguggua

SEQ ID NO: 691755 - RNA, 19 nt, Artificial Sequence
  Description of Artificial Sequence: Synthetic oligonucleotide
  Antisense strand to SEQ ID NO: 691754
uaccacgcuuagaaaccug

SEQ ID NO: 691756 - RNA, 19 nt, Artificial Sequence
  Description of Artificial Sequence: Synthetic oligonucleotide
  Sense strand starting at position 3692 of SEQ ID NO: 586095
gguuucuaagcgugguaau

SEQ ID NO: 691757 - RNA, 19 nt, Artificial Sequence
  Description of Artificial Sequence: Synthetic oligonucleotide
  Antisense strand to SEQ ID NO: 691756
auuaccacgcuuagaaacc

SEQ ID NO: 691758 - RNA, 19 nt, Artificial Sequence
  Description of Artificial Sequence: Synthetic oligonucleotide
  Sense strand starting at position 3693 of SEQ ID NO: 586095
guuucuaagcgugguaauu

SEQ ID NO: 691759 - RNA, 19 nt, Artificial Sequence
  Description of Artificial Sequence: Synthetic oligonucleotide
  Antisense strand to SEQ ID NO: 691758
aauuaccacgcuuagaaac

SEQ ID NO: 691760 - RNA, 19 nt, Artificial Sequence
  Description of Artificial Sequence: Synthetic oligonucleotide
  Sense strand starting at position 3695 of SEQ ID NO: 586095
uucuaagcgugguaauuau

SEQ ID NO: 691761 - RNA, 19 nt, Artificial Sequence
  Description of Artificial Sequence: Synthetic oligonucleotide
  Antisense strand to SEQ ID NO: 691760
auaauuaccacgcuuagaa

SEQ ID NO: 691762 - RNA, 19 nt, Artificial Sequence
  Description of Artificial Sequence: Synthetic oligonucleotide
  Sense strand starting at position 3702 of SEQ ID NO: 586095
cgugguaauuaugaauuau

SEQ ID NO: 691763 - RNA, 19 nt, Artificial Sequence
  Description of Artificial Sequence: Synthetic oligonucleotide
  Antisense strand to SEQ ID NO: 691762
auaauucauaauuaccacg

SEQ ID NO: 691764 - RNA, 19 nt, Artificial Sequence
  Description of Artificial Sequence: Synthetic oligonucleotide
  Sense strand starting at position 3788 of SEQ ID NO: 586095
acaggaggaucgcuucagu

SEQ ID NO: 691765 - RNA, 19 nt, Artificial Sequence
  Description of Artificial Sequence: Synthetic oligonucleotide
  Antisense strand to SEQ ID NO: 691764
acugaagcgauccuccugu

SEQ ID NO: 691766 - RNA, 19 nt, Artificial Sequence
  Description of Artificial Sequence: Synthetic oligonucleotide
  Sense strand starting at position 3934 of SEQ ID NO: 586095
uggcccugcuagugaugaa

SEQ ID NO: 691767 - RNA, 19 nt, Artificial Sequence
  Description of Artificial Sequence: Synthetic oligonucleotide
  Antisense strand to SEQ ID NO: 691766
uucaucacuagcagggcca

SEQ ID NO: 691768 - RNA, 19 nt, Artificial Sequence
  Description of Artificial Sequence: Synthetic oligonucleotide
  Sense strand starting at position 46 of SEQ ID NO: 586096
ucaaacgacuuauugcuaa

SEQ ID NO: 691769 - RNA, 19 nt, Artificial Sequence
  Description of Artificial Sequence: Synthetic oligonucleotide
  Antisense strand to SEQ ID NO: 691768
uuagcaauaagucguuuga

SEQ ID NO: 691770 - RNA, 19 nt, Artificial Sequence
  Description of Artificial Sequence: Synthetic oligonucleotide
  Sense strand starting at position 76 of SEQ ID NO: 586096
guuuaauauuuagcgcaau

SEQ ID NO: 691771 - RNA, 19 nt, Artificial Sequence
  Description of Artificial Sequence: Synthetic oligonucleotide
  Antisense strand to SEQ ID NO: 691770
auugcgcuaaauauuaaac

SEQ ID NO: 691772 - RNA, 19 nt, Artificial Sequence
  Description of Artificial Sequence: Synthetic oligonucleotide
  Sense strand starting at position 181 of SEQ ID NO: 586096
guuuguaaucuccaaccuu

SEQ ID NO: 691773 - RNA, 19 nt, Artificial Sequence
  Description of Artificial Sequence: Synthetic oligonucleotide
  Antisense strand to SEQ ID NO: 691772
aagguuggagauuacaaac

SEQ ID NO: 691774 - RNA, 19 nt, Artificial Sequence
  Description of Artificial Sequence: Synthetic oligonucleotide
  Sense strand starting at position 230 of SEQ ID NO: 586096
guaucagccaagugagaaa

SEQ ID NO: 691775 - RNA, 19 nt, Artificial Sequence
  Description of Artificial Sequence: Synthetic oligonucleotide
  Antisense strand to SEQ ID NO: 691774
uuucucacuuggcugauac

SEQ ID NO: 691776 - RNA, 19 nt, Artificial Sequence
  Description of Artificial Sequence: Synthetic oligonucleotide
  Sense strand starting at position 268 of SEQ ID NO: 586096
aagcgcugagauuaaauaa

SEQ ID NO: 691777 - RNA, 19 nt, Artificial Sequence
  Description of Artificial Sequence: Synthetic oligonucleotide
  Antisense strand to SEQ ID NO: 691776
uuauuuaaucucagcgcuu

SEQ ID NO: 691778 - RNA, 19 nt, Artificial Sequence
  Description of Artificial Sequence: Synthetic oligonucleotide
  Sense strand starting at position 338 of SEQ ID NO: 586096
auuuauuaaugggcgcuua

SEQ ID NO: 691779 - RNA, 19 nt, Artificial Sequence
  Description of Artificial Sequence: Synthetic oligonucleotide
  Antisense strand to SEQ ID NO: 691778
uaagcgcccauuaauaaau

SEQ ID NO: 691780 - RNA, 19 nt, Artificial Sequence
  Description of Artificial Sequence: Synthetic oligonucleotide
  Sense strand starting at position 527 of SEQ ID NO: 586096
gugagaaacccgugggaga

SEQ ID NO: 691781 - RNA, 19 nt, Artificial Sequence
  Description of Artificial Sequence: Synthetic oligonucleotide
  Antisense strand to SEQ ID NO: 691780
ucucccacggguuucucac

SEQ ID NO: 691782 - RNA, 19 nt, Artificial Sequence
  Description of Artificial Sequence: Synthetic oligonucleotide
  Sense strand starting at position 551 of SEQ ID NO: 586096
uggaaaguguuaccugaac

SEQ ID NO: 691783 - RNA, 19 nt, Artificial Sequence
  Description of Artificial Sequence: Synthetic oligonucleotide
  Antisense strand to SEQ ID NO: 691782
guucagguaacacuuucca

SEQ ID NO: 691784 - RNA, 19 nt, Artificial Sequence
  Description of Artificial Sequence: Synthetic oligonucleotide
  Sense strand starting at position 557 of SEQ ID NO: 586096
guguuaccugaacagcauu

SEQ ID NO: 691785 - RNA, 19 nt, Artificial Sequence
  Description of Artificial Sequence: Synthetic oligonucleotide
  Antisense strand to SEQ ID NO: 691784
aaugcuguucagguaacac

SEQ ID NO: 691786 - RNA, 19 nt, Artificial Sequence
  Description of Artificial Sequence: Synthetic oligonucleotide
  Sense strand starting at position 594 of SEQ ID NO: 586096
cagguugcugcucuguuua

SEQ ID NO: 691787 - RNA, 19 nt, Artificial Sequence
  Description of Artificial Sequence: Synthetic oligonucleotide
  Antisense strand to SEQ ID NO: 691786
uaaacagagcagcaaccug

SEQ ID NO: 691788 - RNA, 19 nt, Artificial Sequence
  Description of Artificial Sequence: Synthetic oligonucleotide
  Sense strand starting at position 2011 of SEQ ID NO: 586096
ugaucagacuaugugcaua

SEQ ID NO: 691789 - RNA, 19 nt, Artificial Sequence
  Description of Artificial Sequence: Synthetic oligonucleotide
  Antisense strand to SEQ ID NO: 691788
uaugcacauagucugauca

SEQ ID NO: 691790 - RNA, 19 nt, Artificial Sequence
  Description of Artificial Sequence: Synthetic oligonucleotide
  Sense strand starting at position 2013 of SEQ ID NO: 586096
aucagacuaugugcauaua

SEQ ID NO: 691791 - RNA, 19 nt, Artificial Sequence
  Description of Artificial Sequence: Synthetic oligonucleotide
  Antisense strand to SEQ ID NO: 691790
uauaugcacauagucugau

SEQ ID NO: 691792 - RNA, 19 nt, Artificial Sequence
  Description of Artificial Sequence: Synthetic oligonucleotide
  Sense strand starting at position 2014 of SEQ ID NO: 586096
ucagacuaugugcauauaa

SEQ ID NO: 691793 - RNA, 19 nt, Artificial Sequence
  Description of Artificial Sequence: Synthetic oligonucleotide
  Antisense strand to SEQ ID NO: 691792
uuauaugcacauagucuga

SEQ ID NO: 691794 - RNA, 19 nt, Artificial Sequence
  Description of Artificial Sequence: Synthetic oligonucleotide
  Sense strand starting at position 2032 of SEQ ID NO: 586096
aggcaaauacgucauaaug

SEQ ID NO: 691795 - RNA, 19 nt, Artificial Sequence
  Description of Artificial Sequence: Synthetic oligonucleotide
  Antisense strand to SEQ ID NO: 691794
cauuaugacguauuugccu

SEQ ID NO: 691796 - RNA, 19 nt, Artificial Sequence
  Description of Artificial Sequence: Synthetic oligonucleotide
  Sense strand starting at position 2188 of SEQ ID NO: 586096
ccugaugaaugccucauaa

SEQ ID NO: 691797 - RNA, 19 nt, Artificial Sequence
  Description of Artificial Sequence: Synthetic oligonucleotide
  Antisense strand to SEQ ID NO: 691796
uuaugaggcauucaucagg

SEQ ID NO: 691798 - RNA, 19 nt, Artificial Sequence
  Description of Artificial Sequence: Synthetic oligonucleotide
  Sense strand starting at position 2224 of SEQ ID NO: 586096
acgugcgcucgugcaaaua

SEQ ID NO: 691799 - RNA, 19 nt, Artificial Sequence
  Description of Artificial Sequence: Synthetic oligonucleotide
  Antisense strand to SEQ ID NO: 691798
uauuugcacgagcgcacgu

SEQ ID NO: 691800 - RNA, 19 nt, Artificial Sequence
  Description of Artificial Sequence: Synthetic oligonucleotide
  Sense strand starting at position 2362 of SEQ ID NO: 586096
gucucuagcccuuaaaggu

SEQ ID NO: 691801 - RNA, 19 nt, Artificial Sequence
  Description of Artificial Sequence: Synthetic oligonucleotide
  Antisense strand to SEQ ID NO: 691800
accuuuaagggcuagagac

SEQ ID NO: 691802 - RNA, 19 nt, Artificial Sequence
  Description of Artificial Sequence: Synthetic oligonucleotide
  Sense strand starting at position 2396 of SEQ ID NO: 586096
uugcuuucucccuaguuag

SEQ ID NO: 691803 - RNA, 19 nt, Artificial Sequence
  Description of Artificial Sequence: Synthetic oligonucleotide
  Antisense strand to SEQ ID NO: 691802
cuaacuagggagaaagcaa

SEQ ID NO: 691804 - RNA, 19 nt, Artificial Sequence
  Description of Artificial Sequence: Synthetic oligonucleotide
  Sense strand starting at position 2613 of SEQ ID NO: 586096
uugaaacccugcuugaagu

SEQ ID NO: 691805 - RNA, 19 nt, Artificial Sequence
  Description of Artificial Sequence: Synthetic oligonucleotide
  Antisense strand to SEQ ID NO: 691804
acuucaagcaggguuucaa

SEQ ID NO: 691806 - RNA, 19 nt, Artificial Sequence
  Description of Artificial Sequence: Synthetic oligonucleotide
  Sense strand starting at position 2614 of SEQ ID NO: 586096
ugaaacccugcuugaaguu

SEQ ID NO: 691807 - RNA, 19 nt, Artificial Sequence
  Description of Artificial Sequence: Synthetic oligonucleotide
  Antisense strand to SEQ ID NO: 691806
aacuucaagcaggguuuca

SEQ ID NO: 691808 - RNA, 19 nt, Artificial Sequence
  Description of Artificial Sequence: Synthetic oligonucleotide
  Sense strand starting at position 2711 of SEQ ID NO: 586096
ugugcuuauucuccauuua

SEQ ID NO: 691809 - RNA, 19 nt, Artificial Sequence
  Description of Artificial Sequence: Synthetic oligonucleotide
  Antisense strand to SEQ ID NO: 691808
uaaauggagaauaagcaca

SEQ ID NO: 691810 - RNA, 19 nt, Artificial Sequence
  Description of Artificial Sequence: Synthetic oligonucleotide
  Sense strand starting at position 2773 of SEQ ID NO: 586096
ugugauuuguuagugaccu

SEQ ID NO: 691811 - RNA, 19 nt, Artificial Sequence
  Description of Artificial Sequence: Synthetic oligonucleotide
  Antisense strand to SEQ ID NO: 691810
aggucacuaacaaaucaca

SEQ ID NO: 691812 - RNA, 19 nt, Artificial Sequence
  Description of Artificial Sequence: Synthetic oligonucleotide
  Sense strand starting at position 2792 of SEQ ID NO: 586096
gcacuaggucuguaguaag

SEQ ID NO: 691813 - RNA, 19 nt, Artificial Sequence
  Description of Artificial Sequence: Synthetic oligonucleotide
  Antisense strand to SEQ ID NO: 691812
cuuacuacagaccuagugc

SEQ ID NO: 691814 - RNA, 19 nt, Artificial Sequence
  Description of Artificial Sequence: Synthetic oligonucleotide
  Sense strand starting at position 2827 of SEQ ID NO: 586096
guugaauuaaugugugaaa

SEQ ID NO: 691815 - RNA, 19 nt, Artificial Sequence
  Description of Artificial Sequence: Synthetic oligonucleotide
  Antisense strand to SEQ ID NO: 691814
uuucacacauuaauucaac

SEQ ID NO: 691816 - RNA, 19 nt, Artificial Sequence
  Description of Artificial Sequence: Synthetic oligonucleotide
  Sense strand starting at position 2828 of SEQ ID NO: 586096
uugaauuaaugugugaaac

SEQ ID NO: 691817 - RNA, 19 nt, Artificial Sequence
  Description of Artificial Sequence: Synthetic oligonucleotide
  Antisense strand to SEQ ID NO: 691816
guuucacacauuaauucaa

SEQ ID NO: 691818 - RNA, 19 nt, Artificial Sequence
  Description of Artificial Sequence: Synthetic oligonucleotide
  Sense strand starting at position 2829 of SEQ ID NO: 586096
ugaauuaaugugugaaacu

SEQ ID NO: 691819 - RNA, 19 nt, Artificial Sequence
  Description of Artificial Sequence: Synthetic oligonucleotide
  Antisense strand to SEQ ID NO: 691818
aguuucacacauuaauuca

SEQ ID NO: 691820 - RNA, 19 nt, Artificial Sequence
  Description of Artificial Sequence: Synthetic oligonucleotide
  Sense strand starting at position 2839 of SEQ ID NO: 586096
ugugaaacucacuaacggu

SEQ ID NO: 691821 - RNA, 19 nt, Artificial Sequence
  Description of Artificial Sequence: Synthetic oligonucleotide
  Antisense strand to SEQ ID NO: 691820
accguuagugaguuucaca

SEQ ID NO: 691822 - RNA, 19 nt, Artificial Sequence
  Description of Artificial Sequence: Synthetic oligonucleotide
  Sense strand starting at position 2845 of SEQ ID NO: 586096
acucacuaacggugucaga

SEQ ID NO: 691823 - RNA, 19 nt, Artificial Sequence
  Description of Artificial Sequence: Synthetic oligonucleotide
  Antisense strand to SEQ ID NO: 691822
ucugacaccguuagugagu

SEQ ID NO: 691824 - RNA, 19 nt, Artificial Sequence
  Description of Artificial Sequence: Synthetic oligonucleotide
  Sense strand starting at position 2933 of SEQ ID NO: 586096
agacuucuuucugugcaaa

SEQ ID NO: 691825 - RNA, 19 nt, Artificial Sequence
  Description of Artificial Sequence: Synthetic oligonucleotide
  Antisense strand to SEQ ID NO: 691824
uuugcacagaaagaagucu

SEQ ID NO: 691826 - RNA, 19 nt, Artificial Sequence
  Description of Artificial Sequence: Synthetic oligonucleotide
  Sense strand starting at position 3172 of SEQ ID NO: 586096
cauuaauggcaaggauuga

SEQ ID NO: 691827 - RNA, 19 nt, Artificial Sequence
  Description of Artificial Sequence: Synthetic oligonucleotide
  Antisense strand to SEQ ID NO: 691826
ucaauccuugccauuaaug

SEQ ID NO: 691828 - RNA, 19 nt, Artificial Sequence
  Description of Artificial Sequence: Synthetic oligonucleotide
  Sense strand starting at position 3241 of SEQ ID NO: 586096
aucuguuaauaucccugua

SEQ ID NO: 691829 - RNA, 19 nt, Artificial Sequence
  Description of Artificial Sequence: Synthetic oligonucleotide
  Antisense strand to SEQ ID NO: 691828
uacagggauauuaacagau

SEQ ID NO: 691830 - RNA, 19 nt, Artificial Sequence
  Description of Artificial Sequence: Synthetic oligonucleotide
  Sense strand starting at position 3243 of SEQ ID NO: 586096
cuguuaauaucccuguaaa

SEQ ID NO: 691831 - RNA, 19 nt, Artificial Sequence
  Description of Artificial Sequence: Synthetic oligonucleotide
  Antisense strand to SEQ ID NO: 691830
uuuacagggauauuaacag

SEQ ID NO: 691832 - RNA, 19 nt, Artificial Sequence
  Description of Artificial Sequence: Synthetic oligonucleotide
  Sense strand starting at position 3310 of SEQ ID NO: 586096
ggaguuaaagaacaugugu

SEQ ID NO: 691833 - RNA, 19 nt, Artificial Sequence
  Description of Artificial Sequence: Synthetic oligonucleotide
  Antisense strand to SEQ ID NO: 691832
acacauguucuuuaacucc

SEQ ID NO: 691834 - RNA, 19 nt, Artificial Sequence
  Description of Artificial Sequence: Synthetic oligonucleotide
  Sense strand starting at position 3442 of SEQ ID NO: 586096
uccacaaagcauuggagaa

SEQ ID NO: 691835 - RNA, 19 nt, Artificial Sequence
  Description of Artificial Sequence: Synthetic oligonucleotide
  Antisense strand to SEQ ID NO: 691834
uucuccaaugcuuugugga

SEQ ID NO: 691836 - RNA, 19 nt, Artificial Sequence
  Description of Artificial Sequence: Synthetic oligonucleotide
  Sense strand starting at position 3503 of SEQ ID NO: 586096
gacauaguggugugguuag

SEQ ID NO: 691837 - RNA, 19 nt, Artificial Sequence
  Description of Artificial Sequence: Synthetic oligonucleotide
  Antisense strand to SEQ ID NO: 691836
cuaaccacaccacuauguc

SEQ ID NO: 691838 - RNA, 19 nt, Artificial Sequence
  Description of Artificial Sequence: Synthetic oligonucleotide
  Sense strand starting at position 3515 of SEQ ID NO: 586096
ugguuaggccuugagaagu

SEQ ID NO: 691839 - RNA, 19 nt, Artificial Sequence
  Description of Artificial Sequence: Synthetic oligonucleotide
  Antisense strand to SEQ ID NO: 691838
acuucucaaggccuaacca

SEQ ID NO: 691840 - RNA, 19 nt, Artificial Sequence
  Description of Artificial Sequence: Synthetic oligonucleotide
  Sense strand starting at position 3521 of SEQ ID NO: 586096
ggccuugagaaguggaaua

SEQ ID NO: 691841 - RNA, 19 nt, Artificial Sequence
  Description of Artificial Sequence: Synthetic oligonucleotide
  Antisense strand to SEQ ID NO: 691840
uauuccacuucucaaggcc

SEQ ID NO: 691842 - RNA, 19 nt, Artificial Sequence
  Description of Artificial Sequence: Synthetic oligonucleotide
  Sense strand starting at position 3599 of SEQ ID NO: 586096
uggacagugagcuauguuu

SEQ ID NO: 691843 - RNA, 19 nt, Artificial Sequence
  Description of Artificial Sequence: Synthetic oligonucleotide
  Antisense strand to SEQ ID NO: 691842
aaacauagcucacugucca

SEQ ID NO: 691844 - RNA, 19 nt, Artificial Sequence
  Description of Artificial Sequence: Synthetic oligonucleotide
  Sense strand starting at position 3797 of SEQ ID NO: 586096
uauguuacucugcaaguga

SEQ ID NO: 691845 - RNA, 19 nt, Artificial Sequence
  Description of Artificial Sequence: Synthetic oligonucleotide
  Antisense strand to SEQ ID NO: 691844
ucacuugcagaguaacaua

SEQ ID NO: 691846 - RNA, 19 nt, Artificial Sequence
  Description of Artificial Sequence: Synthetic oligonucleotide
  Sense strand starting at position 3846 of SEQ ID NO: 586096
uuguaaaugagcuggguua

SEQ ID NO: 691847 - RNA, 19 nt, Artificial Sequence
  Description of Artificial Sequence: Synthetic oligonucleotide
  Antisense strand to SEQ ID NO: 691846
uaacccagcucauuuacaa

SEQ ID NO: 691848 - RNA, 19 nt, Artificial Sequence
  Description of Artificial Sequence: Synthetic oligonucleotide
  Sense strand starting at position 298 of SEQ ID NO: 586097
gccucauggccuugucaca

SEQ ID NO: 691849 - RNA, 19 nt, Artificial Sequence
  Description of Artificial Sequence: Synthetic oligonucleotide
  Antisense strand to SEQ ID NO: 691848
ugugacaaggccaugaggc

SEQ ID NO: 691850 - RNA, 19 nt, Artificial Sequence
  Description of Artificial Sequence: Synthetic oligonucleotide
  Sense strand starting at position 318 of SEQ ID NO: 586097
gagccaguguuaguaccua

SEQ ID NO: 691851 - RNA, 19 nt, Artificial Sequence
  Description of Artificial Sequence: Synthetic oligonucleotide
  Antisense strand to SEQ ID NO: 691850
uagguacuaacacuggcuc

SEQ ID NO: 691852 - RNA, 19 nt, Artificial Sequence
  Description of Artificial Sequence: Synthetic oligonucleotide
  Sense strand starting at position 353 of SEQ ID NO: 586097
uuagacaccuagucagaga

SEQ ID NO: 691853 - RNA, 19 nt, Artificial Sequence
  Description of Artificial Sequence: Synthetic oligonucleotide
  Antisense strand to SEQ ID NO: 691852
ucucugacuaggugucuaa

SEQ ID NO: 691854 - RNA, 19 nt, Artificial Sequence
  Description of Artificial Sequence: Synthetic oligonucleotide
  Sense strand starting at position 448 of SEQ ID NO: 586097
agaagagaguccuacggaa

SEQ ID NO: 691855 - RNA, 19 nt, Artificial Sequence
  Description of Artificial Sequence: Synthetic oligonucleotide
  Antisense strand to SEQ ID NO: 691854
uuccguaggacucucuucu

SEQ ID NO: 691856 - RNA, 19 nt, Artificial Sequence
  Description of Artificial Sequence: Synthetic oligonucleotide
  Sense strand starting at position 1038 of SEQ ID NO: 586097
cggcgauaucaucauccau

SEQ ID NO: 691857 - RNA, 19 nt, Artificial Sequence
  Description of Artificial Sequence: Synthetic oligonucleotide
  Antisense strand to SEQ ID NO: 691856
auggaugaugauaucgccg

SEQ ID NO: 691858 - RNA, 19 nt, Artificial Sequence
  Description of Artificial Sequence: Synthetic oligonucleotide
  Sense strand starting at position 1054 of SEQ ID NO: 586097
cauggugagcugcgagaau

SEQ ID NO: 691859 - RNA, 19 nt, Artificial Sequence
  Description of Artificial Sequence: Synthetic oligonucleotide
  Antisense strand to SEQ ID NO: 691858
auucucgcagcucaccaug

SEQ ID NO: 691860 - RNA, 19 nt, Artificial Sequence
  Description of Artificial Sequence: Synthetic oligonucleotide
  Sense strand starting at position 1479 of SEQ ID NO: 586097
cgcaguuagcgccuugagu

SEQ ID NO: 691861 - RNA, 19 nt, Artificial Sequence
  Description of Artificial Sequence: Synthetic oligonucleotide
  Antisense strand to SEQ ID NO: 691860
acucaaggcgcuaacugcg

SEQ ID NO: 691862 - RNA, 19 nt, Artificial Sequence
  Description of Artificial Sequence: Synthetic oligonucleotide
  Sense strand starting at position 1540 of SEQ ID NO: 586097
gcaguuagcgcccaaagga

SEQ ID NO: 691863 - RNA, 19 nt, Artificial Sequence
  Description of Artificial Sequence: Synthetic oligonucleotide
  Antisense strand to SEQ ID NO: 691862
uccuuugggcgcuaacugc

SEQ ID NO: 691864 - RNA, 19 nt, Artificial Sequence
  Description of Artificial Sequence: Synthetic oligonucleotide
  Sense strand starting at position 2448 of SEQ ID NO: 586097
ucuguacgcuccugcagaa

SEQ ID NO: 691865 - RNA, 19 nt, Artificial Sequence
  Description of Artificial Sequence: Synthetic oligonucleotide
  Antisense strand to SEQ ID NO: 691864
uucugcaggagcguacaga

SEQ ID NO: 691866 - RNA, 19 nt, Artificial Sequence
  Description of Artificial Sequence: Synthetic oligonucleotide
  Sense strand starting at position 2566 of SEQ ID NO: 586097
ggcucagcuagcuaaaugu

SEQ ID NO: 691867 - RNA, 19 nt, Artificial Sequence
  Description of Artificial Sequence: Synthetic oligonucleotide
  Antisense strand to SEQ ID NO: 691866
acauuuagcuagcugagcc

SEQ ID NO: 691868 - RNA, 19 nt, Artificial Sequence
  Description of Artificial Sequence: Synthetic oligonucleotide
  Sense strand starting at position 2722 of SEQ ID NO: 586097
ggagguggcccgugaugaa

SEQ ID NO: 691869 - RNA, 19 nt, Artificial Sequence
  Description of Artificial Sequence: Synthetic oligonucleotide
  Antisense strand to SEQ ID NO: 691868
uucaucacgggccaccucc

SEQ ID NO: 691870 - RNA, 19 nt, Artificial Sequence
  Description of Artificial Sequence: Synthetic oligonucleotide
  Sense strand starting at position 2865 of SEQ ID NO: 586097
ggcguuagugggugaccua

SEQ ID NO: 691871 - RNA, 19 nt, Artificial Sequence
  Description of Artificial Sequence: Synthetic oligonucleotide
  Antisense strand to SEQ ID NO: 691870
uaggucacccacuaacgcc

SEQ ID NO: 691872 - RNA, 19 nt, Artificial Sequence
  Description of Artificial Sequence: Synthetic oligonucleotide
  Sense strand starting at position 2936 of SEQ ID NO: 586097
guccguuguaugucugcua

SEQ ID NO: 691873 - RNA, 19 nt, Artificial Sequence
  Description of Artificial Sequence: Synthetic oligonucleotide
  Antisense strand to SEQ ID NO: 691872
uagcagacauacaacggac

SEQ ID NO: 691874 - RNA, 19 nt, Artificial Sequence
  Description of Artificial Sequence: Synthetic oligonucleotide
  Sense strand starting at position 3025 of SEQ ID NO: 586097
ccaugugccacagaggauu

SEQ ID NO: 691875 - RNA, 19 nt, Artificial Sequence
  Description of Artificial Sequence: Synthetic oligonucleotide
  Antisense strand to SEQ ID NO: 691874
aauccucuguggcacaugg

SEQ ID NO: 691876 - RNA, 19 nt, Artificial Sequence
  Description of Artificial Sequence: Synthetic oligonucleotide
  Sense strand starting at position 3115 of SEQ ID NO: 586097
gggucuguccacugaguag

SEQ ID NO: 691877 - RNA, 19 nt, Artificial Sequence
  Description of Artificial Sequence: Synthetic oligonucleotide
  Antisense strand to SEQ ID NO: 691876
cuacucaguggacagaccc

SEQ ID NO: 691878 - RNA, 19 nt, Artificial Sequence
  Description of Artificial Sequence: Synthetic oligonucleotide
  Sense strand starting at position 3156 of SEQ ID NO: 586097
guccguucugcuccgggaa

SEQ ID NO: 691879 - RNA, 19 nt, Artificial Sequence
  Description of Artificial Sequence: Synthetic oligonucleotide
  Antisense strand to SEQ ID NO: 691878
uucccggagcagaacggac

SEQ ID NO: 691880 - RNA, 19 nt, Artificial Sequence
  Description of Artificial Sequence: Synthetic oligonucleotide
  Sense strand starting at position 3157 of SEQ ID NO: 586097
uccguucugcuccgggaau

SEQ ID NO: 691881 - RNA, 19 nt, Artificial Sequence
  Description of Artificial Sequence: Synthetic oligonucleotide
  Antisense strand to SEQ ID NO: 691880
auucccggagcagaacgga

SEQ ID NO: 691882 - RNA, 19 nt, Artificial Sequence
  Description of Artificial Sequence: Synthetic oligonucleotide
  Sense strand starting at position 3159 of SEQ ID NO: 586097
cguucugcuccgggaauca

SEQ ID NO: 691883 - RNA, 19 nt, Artificial Sequence
  Description of Artificial Sequence: Synthetic oligonucleotide
  Antisense strand to SEQ ID NO: 691882
ugauucccggagcagaacg

SEQ ID NO: 691884 - RNA, 19 nt, Artificial Sequence
  Description of Artificial Sequence: Synthetic oligonucleotide
  Sense strand starting at position 3378 of SEQ ID NO: 586097
cguaguagguguucacuga

SEQ ID NO: 691885 - RNA, 19 nt, Artificial Sequence
  Description of Artificial Sequence: Synthetic oligonucleotide
  Antisense strand to SEQ ID NO: 691884
ucagugaacaccuacuacg

SEQ ID NO: 691886 - RNA, 19 nt, Artificial Sequence
  Description of Artificial Sequence: Synthetic oligonucleotide
  Sense strand starting at position 3382 of SEQ ID NO: 586097
guagguguucacugagugu

SEQ ID NO: 691887 - RNA, 19 nt, Artificial Sequence
  Description of Artificial Sequence: Synthetic oligonucleotide
  Antisense strand to SEQ ID NO: 691886
acacucagugaacaccuac

SEQ ID NO: 691888 - RNA, 19 nt, Artificial Sequence
  Description of Artificial Sequence: Synthetic oligonucleotide
  Sense strand starting at position 3402 of SEQ ID NO: 586097
ugucgcaauaggcaaagau

SEQ ID NO: 691889 - RNA, 19 nt, Artificial Sequence
  Description of Artificial Sequence: Synthetic oligonucleotide
  Antisense strand to SEQ ID NO: 691888
aucuuugccuauugcgaca

SEQ ID NO: 691890 - RNA, 19 nt, Artificial Sequence
  Description of Artificial Sequence: Synthetic oligonucleotide
  Sense strand starting at position 3406 of SEQ ID NO: 586097
gcaauaggcaaagaugagu

SEQ ID NO: 691891 - RNA, 19 nt, Artificial Sequence
  Description of Artificial Sequence: Synthetic oligonucleotide
  Antisense strand to SEQ ID NO: 691890
acucaucuuugccuauugc

SEQ ID NO: 691892 - RNA, 19 nt, Artificial Sequence
  Description of Artificial Sequence: Synthetic oligonucleotide
  Sense strand starting at position 225 of SEQ ID NO: 586098
gcaggagauuccuuugaug

SEQ ID NO: 691893 - RNA, 19 nt, Artificial Sequence
  Description of Artificial Sequence: Synthetic oligonucleotide
  Antisense strand to SEQ ID NO: 691892
caucaaaggaaucuccugc

SEQ ID NO: 691894 - RNA, 19 nt, Artificial Sequence
  Description of Artificial Sequence: Synthetic oligonucleotide
  Sense strand starting at position 227 of SEQ ID NO: 586098
aggagauuccuuugauguc

SEQ ID NO: 691895 - RNA, 19 nt, Artificial Sequence
  Description of Artificial Sequence: Synthetic oligonucleotide
  Antisense strand to SEQ ID NO: 691894
gacaucaaaggaaucuccu

SEQ ID NO: 691896 - RNA, 19 nt, Artificial Sequence
  Description of Artificial Sequence: Synthetic oligonucleotide
  Sense strand starting at position 410 of SEQ ID NO: 586098
gaaauuguuugggaugggu

SEQ ID NO: 691897 - RNA, 19 nt, Artificial Sequence
  Description of Artificial Sequence: Synthetic oligonucleotide
  Antisense strand to SEQ ID NO: 691896
acccaucccaaacaauuuc

SEQ ID NO: 691898 - RNA, 19 nt, Artificial Sequence
  Description of Artificial Sequence: Synthetic oligonucleotide
  Sense strand starting at position 412 of SEQ ID NO: 586098
aauuguuugggauggguga

SEQ ID NO: 691899 - RNA, 19 nt, Artificial Sequence
  Description of Artificial Sequence: Synthetic oligonucleotide
  Antisense strand to SEQ ID NO: 691898
ucacccaucccaaacaauu

SEQ ID NO: 691900 - RNA, 19 nt, Artificial Sequence
  Description of Artificial Sequence: Synthetic oligonucleotide
  Sense strand starting at position 586 of SEQ ID NO: 586098
agguuuggcucagacuuga

SEQ ID NO: 691901 - RNA, 19 nt, Artificial Sequence
  Description of Artificial Sequence: Synthetic oligonucleotide
  Antisense strand to SEQ ID NO: 691900
ucaagucugagccaaaccu

SEQ ID NO: 691902 - RNA, 19 nt, Artificial Sequence
  Description of Artificial Sequence: Synthetic oligonucleotide
  Sense strand starting at position 599 of SEQ ID NO: 586098
acuugacguguuugcugua

SEQ ID NO: 691903 - RNA, 19 nt, Artificial Sequence
  Description of Artificial Sequence: Synthetic oligonucleotide
  Antisense strand to SEQ ID NO: 691902
uacagcaaacacgucaagu

SEQ ID NO: 691904 - RNA, 19 nt, Artificial Sequence
  Description of Artificial Sequence: Synthetic oligonucleotide
  Sense strand starting at position 604 of SEQ ID NO: 586098
acguguuugcuguaggugu

SEQ ID NO: 691905 - RNA, 19 nt, Artificial Sequence
  Description of Artificial Sequence: Synthetic oligonucleotide
  Antisense strand to SEQ ID NO: 691904
acaccuacagcaaacacgu

SEQ ID NO: 691906 - RNA, 19 nt, Artificial Sequence
  Description of Artificial Sequence: Synthetic oligonucleotide
  Sense strand starting at position 606 of SEQ ID NO: 586098
guguuugcuguagguguga

SEQ ID NO: 691907 - RNA, 19 nt, Artificial Sequence
  Description of Artificial Sequence: Synthetic oligonucleotide
  Antisense strand to SEQ ID NO: 691906
ucacaccuacagcaaacac

SEQ ID NO: 691908 - RNA, 19 nt, Artificial Sequence
  Description of Artificial Sequence: Synthetic oligonucleotide
  Sense strand starting at position 615 of SEQ ID NO: 586098
guaggugugauccaggaug

SEQ ID NO: 691909 - RNA, 19 nt, Artificial Sequence
  Description of Artificial Sequence: Synthetic oligonucleotide
  Antisense strand to SEQ ID NO: 691908
cauccuggaucacaccuac

SEQ ID NO: 691910 - RNA, 19 nt, Artificial Sequence
  Description of Artificial Sequence: Synthetic oligonucleotide
  Sense strand starting at position 1020 of SEQ ID NO: 586098
uggugucgauguggaagau

SEQ ID NO: 691911 - RNA, 19 nt, Artificial Sequence
  Description of Artificial Sequence: Synthetic oligonucleotide
  Antisense strand to SEQ ID NO: 691910
aucuuccacaucgacacca

SEQ ID NO: 691912 - RNA, 19 nt, Artificial Sequence
  Description of Artificial Sequence: Synthetic oligonucleotide
  Sense strand starting at position 1145 of SEQ ID NO: 586098
ggaguauuggcagggagag

SEQ ID NO: 691913 - RNA, 19 nt, Artificial Sequence
  Description of Artificial Sequence: Synthetic oligonucleotide
  Antisense strand to SEQ ID NO: 691912
cucucccugccaauacucc

SEQ ID NO: 691914 - RNA, 19 nt, Artificial Sequence
  Description of Artificial Sequence: Synthetic oligonucleotide
  Sense strand starting at position 1146 of SEQ ID NO: 586098
gaguauuggcagggagaga

SEQ ID NO: 691915 - RNA, 19 nt, Artificial Sequence
  Description of Artificial Sequence: Synthetic oligonucleotide
  Antisense strand to SEQ ID NO: 691914
ucucucccugccaauacuc

SEQ ID NO: 691916 - RNA, 19 nt, Artificial Sequence
  Description of Artificial Sequence: Synthetic oligonucleotide
  Sense strand starting at position 1216 of SEQ ID NO: 586098
cuggguuuauucccauauu

SEQ ID NO: 691917 - RNA, 19 nt, Artificial Sequence
  Description of Artificial Sequence: Synthetic oligonucleotide
  Antisense strand to SEQ ID NO: 691916
aauaugggaauaaacccag

SEQ ID NO: 691918 - RNA, 19 nt, Artificial Sequence
  Description of Artificial Sequence: Synthetic oligonucleotide
  Sense strand starting at position 1217 of SEQ ID NO: 586098
uggguuuauucccauauuc

SEQ ID NO: 691919 - RNA, 19 nt, Artificial Sequence
  Description of Artificial Sequence: Synthetic oligonucleotide
  Antisense strand to SEQ ID NO: 691918
gaauaugggaauaaaccca

SEQ ID NO: 691920 - RNA, 19 nt, Artificial Sequence
  Description of Artificial Sequence: Synthetic oligonucleotide
  Sense strand starting at position 1469 of SEQ ID NO: 586098
cuagguagcuccgagagaa

SEQ ID NO: 691921 - RNA, 19 nt, Artificial Sequence
  Description of Artificial Sequence: Synthetic oligonucleotide
  Antisense strand to SEQ ID NO: 691920
uucucucggagcuaccuag

SEQ ID NO: 691922 - RNA, 19 nt, Artificial Sequence
  Description of Artificial Sequence: Synthetic oligonucleotide
  Sense strand starting at position 2373 of SEQ ID NO: 586098
ccagcacgccuggauuaaa

SEQ ID NO: 691923 - RNA, 19 nt, Artificial Sequence
  Description of Artificial Sequence: Synthetic oligonucleotide
  Antisense strand to SEQ ID NO: 691922
uuuaauccaggcgugcugg

SEQ ID NO: 691924 - RNA, 19 nt, Artificial Sequence
  Description of Artificial Sequence: Synthetic oligonucleotide
  Sense strand starting at position 2480 of SEQ ID NO: 586098
cucgaaaugccagaauuac

SEQ ID NO: 691925 - RNA, 19 nt, Artificial Sequence
  Description of Artificial Sequence: Synthetic oligonucleotide
  Antisense strand to SEQ ID NO: 691924
guaauucuggcauuucgag

SEQ ID NO: 691926 - RNA, 19 nt, Artificial Sequence
  Description of Artificial Sequence: Synthetic oligonucleotide
  Sense strand starting at position 2571 of SEQ ID NO: 586098
ccagaaggguuaucuaucu

SEQ ID NO: 691927 - RNA, 19 nt, Artificial Sequence
  Description of Artificial Sequence: Synthetic oligonucleotide
  Antisense strand to SEQ ID NO: 691926
agauagauaacccuucugg

SEQ ID NO: 691928 - RNA, 19 nt, Artificial Sequence
  Description of Artificial Sequence: Synthetic oligonucleotide
  Sense strand starting at position 2632 of SEQ ID NO: 586098
uggaaucaccaaggucuaa

SEQ ID NO: 691929 - RNA, 19 nt, Artificial Sequence
  Description of Artificial Sequence: Synthetic oligonucleotide
  Antisense strand to SEQ ID NO: 691928
uuagaccuuggugauucca

SEQ ID NO: 691930 - RNA, 19 nt, Artificial Sequence
  Description of Artificial Sequence: Synthetic oligonucleotide
  Sense strand starting at position 2911 of SEQ ID NO: 586098
guaccuaggccuuauacau

SEQ ID NO: 691931 - RNA, 19 nt, Artificial Sequence
  Description of Artificial Sequence: Synthetic oligonucleotide
  Antisense strand to SEQ ID NO: 691930
auguauaaggccuagguac

SEQ ID NO: 691932 - RNA, 19 nt, Artificial Sequence
  Description of Artificial Sequence: Synthetic oligonucleotide
  Sense strand starting at position 2920 of SEQ ID NO: 586098
ccuuauacauguguacaca

SEQ ID NO: 691933 - RNA, 19 nt, Artificial Sequence
  Description of Artificial Sequence: Synthetic oligonucleotide
  Antisense strand to SEQ ID NO: 691932
uguguacacauguauaagg

SEQ ID NO: 691934 - RNA, 19 nt, Artificial Sequence
  Description of Artificial Sequence: Synthetic oligonucleotide
  Sense strand starting at position 2921 of SEQ ID NO: 586098
cuuauacauguguacacau

SEQ ID NO: 691935 - RNA, 19 nt, Artificial Sequence
  Description of Artificial Sequence: Synthetic oligonucleotide
  Antisense strand to SEQ ID NO: 691934
auguguacacauguauaag

SEQ ID NO: 691936 - RNA, 19 nt, Artificial Sequence
  Description of Artificial Sequence: Synthetic oligonucleotide
  Sense strand starting at position 2940 of SEQ ID NO: 586098
gcuuacacauguguacaua

SEQ ID NO: 691937 - RNA, 19 nt, Artificial Sequence
  Description of Artificial Sequence: Synthetic oligonucleotide
  Antisense strand to SEQ ID NO: 691936
uauguacacauguguaagc

SEQ ID NO: 691938 - RNA, 19 nt, Artificial Sequence
  Description of Artificial Sequence: Synthetic oligonucleotide
  Sense strand starting at position 3038 of SEQ ID NO: 586098
ggaggcauuuaucaacaag

SEQ ID NO: 691939 - RNA, 19 nt, Artificial Sequence
  Description of Artificial Sequence: Synthetic oligonucleotide
  Antisense strand to SEQ ID NO: 691938
cuuguugauaaaugccucc

SEQ ID NO: 691940 - RNA, 19 nt, Artificial Sequence
  Description of Artificial Sequence: Synthetic oligonucleotide
  Sense strand starting at position 3081 of SEQ ID NO: 586098
gaguuagggucuuccguca

SEQ ID NO: 691941 - RNA, 19 nt, Artificial Sequence
  Description of Artificial Sequence: Synthetic oligonucleotide
  Antisense strand to SEQ ID NO: 691940
ugacggaagacccuaacuc

SEQ ID NO: 691942 - RNA, 19 nt, Artificial Sequence
  Description of Artificial Sequence: Synthetic oligonucleotide
  Sense strand starting at position 3121 of SEQ ID NO: 586098
acacuuauagcucacugua

SEQ ID NO: 691943 - RNA, 19 nt, Artificial Sequence
  Description of Artificial Sequence: Synthetic oligonucleotide
  Antisense strand to SEQ ID NO: 691942
uacagugagcuauaagugu

SEQ ID NO: 691944 - RNA, 19 nt, Artificial Sequence
  Description of Artificial Sequence: Synthetic oligonucleotide
  Sense strand starting at position 3467 of SEQ ID NO: 586098
gggacucuuaugugagggu

SEQ ID NO: 691945 - RNA, 19 nt, Artificial Sequence
  Description of Artificial Sequence: Synthetic oligonucleotide
  Antisense strand to SEQ ID NO: 691944
acccucacauaagaguccc

SEQ ID NO: 691946 - RNA, 19 nt, Artificial Sequence
  Description of Artificial Sequence: Synthetic oligonucleotide
  Sense strand starting at position 3506 of SEQ ID NO: 586098
gugucuauguguguuggca

SEQ ID NO: 691947 - RNA, 19 nt, Artificial Sequence
  Description of Artificial Sequence: Synthetic oligonucleotide
  Antisense strand to SEQ ID NO: 691946
ugccaacacacauagacac

SEQ ID NO: 691948 - RNA, 19 nt, Artificial Sequence
  Description of Artificial Sequence: Synthetic oligonucleotide
  Sense strand starting at position 3507 of SEQ ID NO: 586098
ugucuauguguguuggcau

SEQ ID NO: 691949 - RNA, 19 nt, Artificial Sequence
  Description of Artificial Sequence: Synthetic oligonucleotide
  Antisense strand to SEQ ID NO: 691948
augccaacacacauagaca

SEQ ID NO: 691950 - RNA, 19 nt, Artificial Sequence
  Description of Artificial Sequence: Synthetic oligonucleotide
  Sense strand starting at position 3508 of SEQ ID NO: 586098
gucuauguguguuggcaua

SEQ ID NO: 691951 - RNA, 19 nt, Artificial Sequence
  Description of Artificial Sequence: Synthetic oligonucleotide
  Antisense strand to SEQ ID NO: 691950
uaugccaacacacauagac

SEQ ID NO: 691952 - RNA, 19 nt, Artificial Sequence
  Description of Artificial Sequence: Synthetic oligonucleotide
  Sense strand starting at position 3510 of SEQ ID NO: 586098
cuauguguguuggcauaug

SEQ ID NO: 691953 - RNA, 19 nt, Artificial Sequence
  Description of Artificial Sequence: Synthetic oligonucleotide
  Antisense strand to SEQ ID NO: 691952
cauaugccaacacacauag

SEQ ID NO: 691954 - RNA, 19 nt, Artificial Sequence
  Description of Artificial Sequence: Synthetic oligonucleotide
  Sense strand starting at position 3566 of SEQ ID NO: 586098
guguguugacuaugcccau

SEQ ID NO: 691955 - RNA, 19 nt, Artificial Sequence
  Description of Artificial Sequence: Synthetic oligonucleotide
  Antisense strand to SEQ ID NO: 691954
augggcauagucaacacac

SEQ ID NO: 691956 - RNA, 19 nt, Artificial Sequence
  Description of Artificial Sequence: Synthetic oligonucleotide
  Sense strand starting at position 3630 of SEQ ID NO: 586098
ggaaguggauacuauguga

SEQ ID NO: 691957 - RNA, 19 nt, Artificial Sequence
  Description of Artificial Sequence: Synthetic oligonucleotide
  Antisense strand to SEQ ID NO: 691956
ucacauaguauccacuucc

SEQ ID NO: 691958 - RNA, 19 nt, Artificial Sequence
  Description of Artificial Sequence: Synthetic oligonucleotide
  Sense strand starting at position 3736 of SEQ ID NO: 586098
uuagcuggcucauggauua

SEQ ID NO: 691959 - RNA, 19 nt, Artificial Sequence
  Description of Artificial Sequence: Synthetic oligonucleotide
  Antisense strand to SEQ ID NO: 691958
uaauccaugagccagcuaa

SEQ ID NO: 691960 - RNA, 19 nt, Artificial Sequence
  Description of Artificial Sequence: Synthetic oligonucleotide
  Sense strand starting at position 3803 of SEQ ID NO: 586098
agacuuggcuucuaagacu

SEQ ID NO: 691961 - RNA, 19 nt, Artificial Sequence
  Description of Artificial Sequence: Synthetic oligonucleotide
  Antisense strand to SEQ ID NO: 691960
agucuuagaagccaagucu

SEQ ID NO: 691962 - RNA, 19 nt, Artificial Sequence
  Description of Artificial Sequence: Synthetic oligonucleotide
  Sense strand starting at position 3806 of SEQ ID NO: 586098
cuuggcuucuaagacugaa

SEQ ID NO: 691963 - RNA, 19 nt, Artificial Sequence
  Description of Artificial Sequence: Synthetic oligonucleotide
  Antisense strand to SEQ ID NO: 691962
uucagucuuagaagccaag

SEQ ID NO: 691964 - RNA, 19 nt, Artificial Sequence
  Description of Artificial Sequence: Synthetic oligonucleotide
  Sense strand starting at position 3819 of SEQ ID NO: 586098
acugaaaggguccagguuu

SEQ ID NO: 691965 - RNA, 19 nt, Artificial Sequence
  Description of Artificial Sequence: Synthetic oligonucleotide
  Antisense strand to SEQ ID NO: 691964
aaaccuggacccuuucagu

SEQ ID NO: 691966 - RNA, 19 nt, Artificial Sequence
  Description of Artificial Sequence: Synthetic oligonucleotide
  Sense strand starting at position 3840 of SEQ ID NO: 586098
gcaggaguggugagcugua

SEQ ID NO: 691967 - RNA, 19 nt, Artificial Sequence
  Description of Artificial Sequence: Synthetic oligonucleotide
  Antisense strand to SEQ ID NO: 691966
uacagcucaccacuccugc

SEQ ID NO: 691968 - RNA, 19 nt, Artificial Sequence
  Description of Artificial Sequence: Synthetic oligonucleotide
  Sense strand starting at position 3920 of SEQ ID NO: 586098
uccauugaggucuggaaga

SEQ ID NO: 691969 - RNA, 19 nt, Artificial Sequence
  Description of Artificial Sequence: Synthetic oligonucleotide
  Antisense strand to SEQ ID NO: 691968
ucuuccagaccucaaugga

SEQ ID NO: 691970 - RNA, 19 nt, Artificial Sequence
  Description of Artificial Sequence: Synthetic oligonucleotide
  Sense strand starting at position 3940 of SEQ ID NO: 586098
uugaguggaucucuuaaag

SEQ ID NO: 691971 - RNA, 19 nt, Artificial Sequence
  Description of Artificial Sequence: Synthetic oligonucleotide
  Antisense strand to SEQ ID NO: 691970
cuuuaagagauccacucaa

SEQ ID NO: 691972 - RNA, 19 nt, Artificial Sequence
  Description of Artificial Sequence: Synthetic oligonucleotide
  Sense strand starting at position 42 of SEQ ID NO: 586099
uggccauacacucgauaug

SEQ ID NO: 691973 - RNA, 19 nt, Artificial Sequence
  Description of Artificial Sequence: Synthetic oligonucleotide
  Antisense strand to SEQ ID NO: 691972
cauaucgaguguauggcca

SEQ ID NO: 691974 - RNA, 19 nt, Artificial Sequence
  Description of Artificial Sequence: Synthetic oligonucleotide
  Sense strand starting at position 119 of SEQ ID NO: 586099
gcaugacuuugggccacaa

SEQ ID NO: 691975 - RNA, 19 nt, Artificial Sequence
  Description of Artificial Sequence: Synthetic oligonucleotide
  Antisense strand to SEQ ID NO: 691974
uuguggcccaaagucaugc

SEQ ID NO: 691976 - RNA, 19 nt, Artificial Sequence
  Description of Artificial Sequence: Synthetic oligonucleotide
  Sense strand starting at position 152 of SEQ ID NO: 586099
gaaguugaaucuccaaguu

SEQ ID NO: 691977 - RNA, 19 nt, Artificial Sequence
  Description of Artificial Sequence: Synthetic oligonucleotide
  Antisense strand to SEQ ID NO: 691976
aacuuggagauucaacuuc

SEQ ID NO: 691978 - RNA, 19 nt, Artificial Sequence
  Description of Artificial Sequence: Synthetic oligonucleotide
  Sense strand starting at position 248 of SEQ ID NO: 586099
gaguaagguccacgacuua

SEQ ID NO: 691979 - RNA, 19 nt, Artificial Sequence
  Description of Artificial Sequence: Synthetic oligonucleotide
  Antisense strand to SEQ ID NO: 691978
uaagucguggaccuuacuc

SEQ ID NO: 691980 - RNA, 19 nt, Artificial Sequence
  Description of Artificial Sequence: Synthetic oligonucleotide
  Sense strand starting at position 281 of SEQ ID NO: 586099
augacaacucugugagcau

SEQ ID NO: 691981 - RNA, 19 nt, Artificial Sequence
  Description of Artificial Sequence: Synthetic oligonucleotide
  Antisense strand to SEQ ID NO: 691980
augcucacagaguugucau

SEQ ID NO: 691982 - RNA, 19 nt, Artificial Sequence
  Description of Artificial Sequence: Synthetic oligonucleotide
  Sense strand starting at position 284 of SEQ ID NO: 586099
acaacucugugagcauuau

SEQ ID NO: 691983 - RNA, 19 nt, Artificial Sequence
  Description of Artificial Sequence: Synthetic oligonucleotide
  Antisense strand to SEQ ID NO: 691982
auaaugcucacagaguugu

SEQ ID NO: 691984 - RNA, 19 nt, Artificial Sequence
  Description of Artificial Sequence: Synthetic oligonucleotide
  Sense strand starting at position 334 of SEQ ID NO: 586099
uuuaauaguucugcaagac

SEQ ID NO: 691985 - RNA, 19 nt, Artificial Sequence
  Description of Artificial Sequence: Synthetic oligonucleotide
  Antisense strand to SEQ ID NO: 691984
gucuugcagaacuauuaaa

SEQ ID NO: 691986 - RNA, 19 nt, Artificial Sequence
  Description of Artificial Sequence: Synthetic oligonucleotide
  Sense strand starting at position 335 of SEQ ID NO: 586099
uuaauaguucugcaagacu

SEQ ID NO: 691987 - RNA, 19 nt, Artificial Sequence
  Description of Artificial Sequence: Synthetic oligonucleotide
  Antisense strand to SEQ ID NO: 691986
agucuugcagaacuauuaa

SEQ ID NO: 691988 - RNA, 19 nt, Artificial Sequence
  Description of Artificial Sequence: Synthetic oligonucleotide
  Sense strand starting at position 338 of SEQ ID NO: 586099
auaguucugcaagacuaaa

SEQ ID NO: 691989 - RNA, 19 nt, Artificial Sequence
  Description of Artificial Sequence: Synthetic oligonucleotide
  Antisense strand to SEQ ID NO: 691988
uuuagucuugcagaacuau

SEQ ID NO: 691990 - RNA, 19 nt, Artificial Sequence
  Description of Artificial Sequence: Synthetic oligonucleotide
  Sense strand starting at position 473 of SEQ ID NO: 586099
gcaugaguuaaggguguca

SEQ ID NO: 691991 - RNA, 19 nt, Artificial Sequence
  Description of Artificial Sequence: Synthetic oligonucleotide
  Antisense strand to SEQ ID NO: 691990
ugacacccuuaacucaugc

SEQ ID NO: 691992 - RNA, 19 nt, Artificial Sequence
  Description of Artificial Sequence: Synthetic oligonucleotide
  Sense strand starting at position 485 of SEQ ID NO: 586099
ggugucaauaauugaggga

SEQ ID NO: 691993 - RNA, 19 nt, Artificial Sequence
  Description of Artificial Sequence: Synthetic oligonucleotide
  Antisense strand to SEQ ID NO: 691992
ucccucaauuauugacacc

SEQ ID NO: 691994 - RNA, 19 nt, Artificial Sequence
  Description of Artificial Sequence: Synthetic oligonucleotide
  Sense strand starting at position 576 of SEQ ID NO: 586099
gcuacaaagcuugauauga

SEQ ID NO: 691995 - RNA, 19 nt, Artificial Sequence
  Description of Artificial Sequence: Synthetic oligonucleotide
  Antisense strand to SEQ ID NO: 691994
ucauaucaagcuuuguagc

SEQ ID NO: 691996 - RNA, 19 nt, Artificial Sequence
  Description of Artificial Sequence: Synthetic oligonucleotide
  Sense strand starting at position 585 of SEQ ID NO: 586099
cuugauaugacguguauuu

SEQ ID NO: 691997 - RNA, 19 nt, Artificial Sequence
  Description of Artificial Sequence: Synthetic oligonucleotide
  Antisense strand to SEQ ID NO: 691996
aaauacacgucauaucaag

SEQ ID NO: 691998 - RNA, 19 nt, Artificial Sequence
  Description of Artificial Sequence: Synthetic oligonucleotide
  Sense strand starting at position 789 of SEQ ID NO: 586099
gugaacaugccauguuaca

SEQ ID NO: 691999 - RNA, 19 nt, Artificial Sequence
  Description of Artificial Sequence: Synthetic oligonucleotide
  Antisense strand to SEQ ID NO: 691998
uguaacauggcauguucac

SEQ ID NO: 692000 - RNA, 19 nt, Artificial Sequence
  Description of Artificial Sequence: Synthetic oligonucleotide
  Sense strand starting at position 912 of SEQ ID NO: 586099
gcaagcuuguauucccaaa

SEQ ID NO: 692001 - RNA, 19 nt, Artificial Sequence
  Description of Artificial Sequence: Synthetic oligonucleotide
  Antisense strand to SEQ ID NO: 692000
uuugggaauacaagcuugc

SEQ ID NO: 692002 - RNA, 19 nt, Artificial Sequence
  Description of Artificial Sequence: Synthetic oligonucleotide
  Sense strand starting at position 998 of SEQ ID NO: 586099
ggcauuuccuaagaucucu

SEQ ID NO: 692003 - RNA, 19 nt, Artificial Sequence
  Description of Artificial Sequence: Synthetic oligonucleotide
  Antisense strand to SEQ ID NO: 692002
agagaucuuaggaaaugcc

SEQ ID NO: 692004 - RNA, 19 nt, Artificial Sequence
  Description of Artificial Sequence: Synthetic oligonucleotide
  Sense strand starting at position 1247 of SEQ ID NO: 586099
augguaucaaguugggaga

SEQ ID NO: 692005 - RNA, 19 nt, Artificial Sequence
  Description of Artificial Sequence: Synthetic oligonucleotide
  Antisense strand to SEQ ID NO: 692004
ucucccaacuugauaccau

SEQ ID NO: 692006 - RNA, 19 nt, Artificial Sequence
  Description of Artificial Sequence: Synthetic oligonucleotide
  Sense strand starting at position 1258 of SEQ ID NO: 586099
uugggagaucgaugcuauu

SEQ ID NO: 692007 - RNA, 19 nt, Artificial Sequence
  Description of Artificial Sequence: Synthetic oligonucleotide
  Antisense strand to SEQ ID NO: 692006
aauagcaucgaucucccaa

SEQ ID NO: 692008 - RNA, 19 nt, Artificial Sequence
  Description of Artificial Sequence: Synthetic oligonucleotide
  Sense strand starting at position 1267 of SEQ ID NO: 586099
cgaugcuauucucuccaca

SEQ ID NO: 692009 - RNA, 19 nt, Artificial Sequence
  Description of Artificial Sequence: Synthetic oligonucleotide
  Antisense strand to SEQ ID NO: 692008
uguggagagaauagcaucg

SEQ ID NO: 692010 - RNA, 19 nt, Artificial Sequence
  Description of Artificial Sequence: Synthetic oligonucleotide
  Sense strand starting at position 1293 of SEQ ID NO: 586099
gguaaagaauccucagcca

SEQ ID NO: 692011 - RNA, 19 nt, Artificial Sequence
  Description of Artificial Sequence: Synthetic oligonucleotide
  Antisense strand to SEQ ID NO: 692010
uggcugaggauucuuuacc

SEQ ID NO: 692012 - RNA, 19 nt, Artificial Sequence
  Description of Artificial Sequence: Synthetic oligonucleotide
  Sense strand starting at position 1387 of SEQ ID NO: 586099
cuaggagaugagugacguu

SEQ ID NO: 692013 - RNA, 19 nt, Artificial Sequence
  Description of Artificial Sequence: Synthetic oligonucleotide
  Antisense strand to SEQ ID NO: 692012
aacgucacucaucuccuag

SEQ ID NO: 692014 - RNA, 19 nt, Artificial Sequence
  Description of Artificial Sequence: Synthetic oligonucleotide
  Sense strand starting at position 1403 of SEQ ID NO: 586099
guuaaaggaucugcaguga

SEQ ID NO: 692015 - RNA, 19 nt, Artificial Sequence
  Description of Artificial Sequence: Synthetic oligonucleotide
  Antisense strand to SEQ ID NO: 692014
ucacugcagauccuuuaac

SEQ ID NO: 692016 - RNA, 19 nt, Artificial Sequence
  Description of Artificial Sequence: Synthetic oligonucleotide
  Sense strand starting at position 1407 of SEQ ID NO: 586099
aaggaucugcagugaugau

SEQ ID NO: 692017 - RNA, 19 nt, Artificial Sequence
  Description of Artificial Sequence: Synthetic oligonucleotide
  Antisense strand to SEQ ID NO: 692016
aucaucacugcagauccuu

SEQ ID NO: 692018 - RNA, 19 nt, Artificial Sequence
  Description of Artificial Sequence: Synthetic oligonucleotide
  Sense strand starting at position 1417 of SEQ ID NO: 586099
agugaugaucugugccuca

SEQ ID NO: 692019 - RNA, 19 nt, Artificial Sequence
  Description of Artificial Sequence: Synthetic oligonucleotide
  Antisense strand to SEQ ID NO: 692018
ugaggcacagaucaucacu

SEQ ID NO: 692020 - RNA, 19 nt, Artificial Sequence
  Description of Artificial Sequence: Synthetic oligonucleotide
  Sense strand starting at position 1439 of SEQ ID NO: 586099
uggcgaauauuccuaggag

SEQ ID NO: 692021 - RNA, 19 nt, Artificial Sequence
  Description of Artificial Sequence: Synthetic oligonucleotide
  Antisense strand to SEQ ID NO: 692020
cuccuaggaauauucgcca

SEQ ID NO: 692022 - RNA, 19 nt, Artificial Sequence
  Description of Artificial Sequence: Synthetic oligonucleotide
  Sense strand starting at position 2256 of SEQ ID NO: 586099
gagggaaguuguuccugau

SEQ ID NO: 692023 - RNA, 19 nt, Artificial Sequence
  Description of Artificial Sequence: Synthetic oligonucleotide
  Antisense strand to SEQ ID NO: 692022
aucaggaacaacuucccuc

SEQ ID NO: 692024 - RNA, 19 nt, Artificial Sequence
  Description of Artificial Sequence: Synthetic oligonucleotide
  Sense strand starting at position 2462 of SEQ ID NO: 586099
aggugcuuagcacaguauu

SEQ ID NO: 692025 - RNA, 19 nt, Artificial Sequence
  Description of Artificial Sequence: Synthetic oligonucleotide
  Antisense strand to SEQ ID NO: 692024
aauacugugcuaagcaccu

SEQ ID NO: 692026 - RNA, 19 nt, Artificial Sequence
  Description of Artificial Sequence: Synthetic oligonucleotide
  Sense strand starting at position 2490 of SEQ ID NO: 586099
uguggaagugcccaaaugu

SEQ ID NO: 692027 - RNA, 19 nt, Artificial Sequence
  Description of Artificial Sequence: Synthetic oligonucleotide
  Antisense strand to SEQ ID NO: 692026
acauuugggcacuuccaca

SEQ ID NO: 692028 - RNA, 19 nt, Artificial Sequence
  Description of Artificial Sequence: Synthetic oligonucleotide
  Sense strand starting at position 2498 of SEQ ID NO: 586099
ugcccaaauguuuguugaa

SEQ ID NO: 692029 - RNA, 19 nt, Artificial Sequence
  Description of Artificial Sequence: Synthetic oligonucleotide
  Antisense strand to SEQ ID NO: 692028
uucaacaaacauuugggca

SEQ ID NO: 692030 - RNA, 19 nt, Artificial Sequence
  Description of Artificial Sequence: Synthetic oligonucleotide
  Sense strand starting at position 2499 of SEQ ID NO: 586099
gcccaaauguuuguugaau

SEQ ID NO: 692031 - RNA, 19 nt, Artificial Sequence
  Description of Artificial Sequence: Synthetic oligonucleotide
  Antisense strand to SEQ ID NO: 692030
auucaacaaacauuugggc

SEQ ID NO: 692032 - RNA, 19 nt, Artificial Sequence
  Description of Artificial Sequence: Synthetic oligonucleotide
  Sense strand starting at position 2500 of SEQ ID NO: 586099
cccaaauguuuguugaaug

SEQ ID NO: 692033 - RNA, 19 nt, Artificial Sequence
  Description of Artificial Sequence: Synthetic oligonucleotide
  Antisense strand to SEQ ID NO: 692032
cauucaacaaacauuuggg

SEQ ID NO: 692034 - RNA, 19 nt, Artificial Sequence
  Description of Artificial Sequence: Synthetic oligonucleotide
  Sense strand starting at position 2508 of SEQ ID NO: 586099
uuuguugaaugacugagua

SEQ ID NO: 692035 - RNA, 19 nt, Artificial Sequence
  Description of Artificial Sequence: Synthetic oligonucleotide
  Antisense strand to SEQ ID NO: 692034
uacucagucauucaacaaa

SEQ ID NO: 692036 - RNA, 19 nt, Artificial Sequence
  Description of Artificial Sequence: Synthetic oligonucleotide
  Sense strand starting at position 2957 of SEQ ID NO: 586099
auggccuuagacugaguaa

SEQ ID NO: 692037 - RNA, 19 nt, Artificial Sequence
  Description of Artificial Sequence: Synthetic oligonucleotide
  Antisense strand to SEQ ID NO: 692036
uuacucagucuaaggccau

SEQ ID NO: 692038 - RNA, 19 nt, Artificial Sequence
  Description of Artificial Sequence: Synthetic oligonucleotide
  Sense strand starting at position 2958 of SEQ ID NO: 586099
uggccuuagacugaguaaa

SEQ ID NO: 692039 - RNA, 19 nt, Artificial Sequence
  Description of Artificial Sequence: Synthetic oligonucleotide
  Antisense strand to SEQ ID NO: 692038
uuuacucagucuaaggcca

SEQ ID NO: 692040 - RNA, 19 nt, Artificial Sequence
  Description of Artificial Sequence: Synthetic oligonucleotide
  Sense strand starting at position 3131 of SEQ ID NO: 586099
gaucguaaauucuugauac

SEQ ID NO: 692041 - RNA, 19 nt, Artificial Sequence
  Description of Artificial Sequence: Synthetic oligonucleotide
  Antisense strand to SEQ ID NO: 692040
guaucaagaauuuacgauc

SEQ ID NO: 692042 - RNA, 19 nt, Artificial Sequence
  Description of Artificial Sequence: Synthetic oligonucleotide
  Sense strand starting at position 3133 of SEQ ID NO: 586099
ucguaaauucuugauacua

SEQ ID NO: 692043 - RNA, 19 nt, Artificial Sequence
  Description of Artificial Sequence: Synthetic oligonucleotide
  Antisense strand to SEQ ID NO: 692042
uaguaucaagaauuuacga

SEQ ID NO: 692044 - RNA, 19 nt, Artificial Sequence
  Description of Artificial Sequence: Synthetic oligonucleotide
  Sense strand starting at position 3537 of SEQ ID NO: 586099
aauagauacguugaccacu

SEQ ID NO: 692045 - RNA, 19 nt, Artificial Sequence
  Description of Artificial Sequence: Synthetic oligonucleotide
  Antisense strand to SEQ ID NO: 692044
aguggucaacguaucuauu

SEQ ID NO: 692046 - RNA, 19 nt, Artificial Sequence
  Description of Artificial Sequence: Synthetic oligonucleotide
  Sense strand starting at position 3714 of SEQ ID NO: 586099
guuaaagauuggcuggcuu

SEQ ID NO: 692047 - RNA, 19 nt, Artificial Sequence
  Description of Artificial Sequence: Synthetic oligonucleotide
  Antisense strand to SEQ ID NO: 692046
aagccagccaaucuuuaac

SEQ ID NO: 692048 - RNA, 19 nt, Artificial Sequence
  Description of Artificial Sequence: Synthetic oligonucleotide
  Sense strand starting at position 3785 of SEQ ID NO: 586099
auugcuuguuucuuagaga

SEQ ID NO: 692049 - RNA, 19 nt, Artificial Sequence
  Description of Artificial Sequence: Synthetic oligonucleotide
  Antisense strand to SEQ ID NO: 692048
ucucuaagaaacaagcaau

SEQ ID NO: 692050 - RNA, 19 nt, Artificial Sequence
  Description of Artificial Sequence: Synthetic oligonucleotide
  Sense strand starting at position 3864 of SEQ ID NO: 586099
uacugaucugcaugagagu

SEQ ID NO: 692051 - RNA, 19 nt, Artificial Sequence
  Description of Artificial Sequence: Synthetic oligonucleotide
  Antisense strand to SEQ ID NO: 692050
acucucaugcagaucagua

SEQ ID NO: 692052 - RNA, 19 nt, Artificial Sequence
  Description of Artificial Sequence: Synthetic oligonucleotide
  Sense strand starting at position 475 of SEQ ID NO: 586100
cccagauguucucuggguu

SEQ ID NO: 692053 - RNA, 19 nt, Artificial Sequence
  Description of Artificial Sequence: Synthetic oligonucleotide
  Antisense strand to SEQ ID NO: 692052
aacccagagaacaucuggg

SEQ ID NO: 692054 - RNA, 19 nt, Artificial Sequence
  Description of Artificial Sequence: Synthetic oligonucleotide
  Sense strand starting at position 476 of SEQ ID NO: 586100
ccagauguucucuggguua

SEQ ID NO: 692055 - RNA, 19 nt, Artificial Sequence
  Description of Artificial Sequence: Synthetic oligonucleotide
  Antisense strand to SEQ ID NO: 692054
uaacccagagaacaucugg

SEQ ID NO: 692056 - RNA, 19 nt, Artificial Sequence
  Description of Artificial Sequence: Synthetic oligonucleotide
  Sense strand starting at position 479 of SEQ ID NO: 586100
gauguucucuggguuaggu

SEQ ID NO: 692057 - RNA, 19 nt, Artificial Sequence
  Description of Artificial Sequence: Synthetic oligonucleotide
  Antisense strand to SEQ ID NO: 692056
accuaacccagagaacauc

SEQ ID NO: 692058 - RNA, 19 nt, Artificial Sequence
  Description of Artificial Sequence: Synthetic oligonucleotide
  Sense strand starting at position 496 of SEQ ID NO: 586100
guguuaaggacuuguggga

SEQ ID NO: 692059 - RNA, 19 nt, Artificial Sequence
  Description of Artificial Sequence: Synthetic oligonucleotide
  Antisense strand to SEQ ID NO: 692058
ucccacaaguccuuaacac

SEQ ID NO: 692060 - RNA, 19 nt, Artificial Sequence
  Description of Artificial Sequence: Synthetic oligonucleotide
  Sense strand starting at position 500 of SEQ ID NO: 586100
uaaggacuugugggaguca

SEQ ID NO: 692061 - RNA, 19 nt, Artificial Sequence
  Description of Artificial Sequence: Synthetic oligonucleotide
  Antisense strand to SEQ ID NO: 692060
ugacucccacaaguccuua

SEQ ID NO: 692062 - RNA, 19 nt, Artificial Sequence
  Description of Artificial Sequence: Synthetic oligonucleotide
  Sense strand starting at position 540 of SEQ ID NO: 586100
cagugucagagguguuuaa

SEQ ID NO: 692063 - RNA, 19 nt, Artificial Sequence
  Description of Artificial Sequence: Synthetic oligonucleotide
  Antisense strand to SEQ ID NO: 692062
uuaaacaccucugacacug

SEQ ID NO: 692064 - RNA, 19 nt, Artificial Sequence
  Description of Artificial Sequence: Synthetic oligonucleotide
  Sense strand starting at position 544 of SEQ ID NO: 586100
gucagagguguuuaagcca

SEQ ID NO: 692065 - RNA, 19 nt, Artificial Sequence
  Description of Artificial Sequence: Synthetic oligonucleotide
  Antisense strand to SEQ ID NO: 692064
uggcuuaaacaccucugac

SEQ ID NO: 692066 - RNA, 19 nt, Artificial Sequence
  Description of Artificial Sequence: Synthetic oligonucleotide
  Sense strand starting at position 547 of SEQ ID NO: 586100
agagguguuuaagccagaa

SEQ ID NO: 692067 - RNA, 19 nt, Artificial Sequence
  Description of Artificial Sequence: Synthetic oligonucleotide
  Antisense strand to SEQ ID NO: 692066
uucuggcuuaaacaccucu

SEQ ID NO: 692068 - RNA, 19 nt, Artificial Sequence
  Description of Artificial Sequence: Synthetic oligonucleotide
  Sense strand starting at position 549 of SEQ ID NO: 586100
agguguuuaagccagaauu

SEQ ID NO: 692069 - RNA, 19 nt, Artificial Sequence
  Description of Artificial Sequence: Synthetic oligonucleotide
  Antisense strand to SEQ ID NO: 692068
aauucuggcuuaaacaccu

SEQ ID NO: 692070 - RNA, 19 nt, Artificial Sequence
  Description of Artificial Sequence: Synthetic oligonucleotide
  Sense strand starting at position 551 of SEQ ID NO: 586100
guguuuaagccagaauuac

SEQ ID NO: 692071 - RNA, 19 nt, Artificial Sequence
  Description of Artificial Sequence: Synthetic oligonucleotide
  Antisense strand to SEQ ID NO: 692070
guaauucuggcuuaaacac

SEQ ID NO: 692072 - RNA, 19 nt, Artificial Sequence
  Description of Artificial Sequence: Synthetic oligonucleotide
  Sense strand starting at position 1185 of SEQ ID NO: 586100
uccugaaccgaccgauaga

SEQ ID NO: 692073 - RNA, 19 nt, Artificial Sequence
  Description of Artificial Sequence: Synthetic oligonucleotide
  Antisense strand to SEQ ID NO: 692072
ucuaucggucgguucagga

SEQ ID NO: 692074 - RNA, 19 nt, Artificial Sequence
  Description of Artificial Sequence: Synthetic oligonucleotide
  Sense strand starting at position 1186 of SEQ ID NO: 586100
ccugaaccgaccgauagau

SEQ ID NO: 692075 - RNA, 19 nt, Artificial Sequence
  Description of Artificial Sequence: Synthetic oligonucleotide
  Antisense strand to SEQ ID NO: 692074
aucuaucggucgguucagg

SEQ ID NO: 692076 - RNA, 19 nt, Artificial Sequence
  Description of Artificial Sequence: Synthetic oligonucleotide
  Sense strand starting at position 1216 of SEQ ID NO: 586100
gcgggagaccuggauccuu

SEQ ID NO: 692077 - RNA, 19 nt, Artificial Sequence
  Description of Artificial Sequence: Synthetic oligonucleotide
  Antisense strand to SEQ ID NO: 692076
aaggauccaggucucccgc

SEQ ID NO: 692078 - RNA, 19 nt, Artificial Sequence
  Description of Artificial Sequence: Synthetic oligonucleotide
  Sense strand starting at position 2009 of SEQ ID NO: 586100
aggccagaaucuuccggaa

SEQ ID NO: 692079 - RNA, 19 nt, Artificial Sequence
  Description of Artificial Sequence: Synthetic oligonucleotide
  Antisense strand to SEQ ID NO: 692078
uuccggaagauucuggccu

SEQ ID NO: 692080 - RNA, 19 nt, Artificial Sequence
  Description of Artificial Sequence: Synthetic oligonucleotide
  Sense strand starting at position 2060 of SEQ ID NO: 586100
cgagaacugcccugaaaua

SEQ ID NO: 692081 - RNA, 19 nt, Artificial Sequence
  Description of Artificial Sequence: Synthetic oligonucleotide
  Antisense strand to SEQ ID NO: 692080
uauuucagggcaguucucg

SEQ ID NO: 692082 - RNA, 19 nt, Artificial Sequence
  Description of Artificial Sequence: Synthetic oligonucleotide
  Sense strand starting at position 2070 of SEQ ID NO: 586100
ccugaaauacugugguauu

SEQ ID NO: 692083 - RNA, 19 nt, Artificial Sequence
  Description of Artificial Sequence: Synthetic oligonucleotide
  Antisense strand to SEQ ID NO: 692082
aauaccacaguauuucagg

SEQ ID NO: 692084 - RNA, 19 nt, Artificial Sequence
  Description of Artificial Sequence: Synthetic oligonucleotide
  Sense strand starting at position 2083 of SEQ ID NO: 586100
gguauuaauuaacucguuu

SEQ ID NO: 692085 - RNA, 19 nt, Artificial Sequence
  Description of Artificial Sequence: Synthetic oligonucleotide
  Antisense strand to SEQ ID NO: 692084
aaacgaguuaauuaauacc

SEQ ID NO: 692086 - RNA, 19 nt, Artificial Sequence
  Description of Artificial Sequence: Synthetic oligonucleotide
  Sense strand starting at position 2132 of SEQ ID NO: 586100
uuacuauucccguaaugua

SEQ ID NO: 692087 - RNA, 19 nt, Artificial Sequence
  Description of Artificial Sequence: Synthetic oligonucleotide
  Antisense strand to SEQ ID NO: 692086
uacauuacgggaauaguaa

SEQ ID NO: 692088 - RNA, 19 nt, Artificial Sequence
  Description of Artificial Sequence: Synthetic oligonucleotide
  Sense strand starting at position 2141 of SEQ ID NO: 586100
ccguaauguagacgaggaa

SEQ ID NO: 692089 - RNA, 19 nt, Artificial Sequence
  Description of Artificial Sequence: Synthetic oligonucleotide
  Antisense strand to SEQ ID NO: 692088
uuccucgucuacauuacgg

SEQ ID NO: 692090 - RNA, 19 nt, Artificial Sequence
  Description of Artificial Sequence: Synthetic oligonucleotide
  Sense strand starting at position 2142 of SEQ ID NO: 586100
cguaauguagacgaggaaa

SEQ ID NO: 692091 - RNA, 19 nt, Artificial Sequence
  Description of Artificial Sequence: Synthetic oligonucleotide
  Antisense strand to SEQ ID NO: 692090
uuuccucgucuacauuacg

SEQ ID NO: 692092 - RNA, 19 nt, Artificial Sequence
  Description of Artificial Sequence: Synthetic oligonucleotide
  Sense strand starting at position 2286 of SEQ ID NO: 586100
agaucucacuuugugucau

SEQ ID NO: 692093 - RNA, 19 nt, Artificial Sequence
  Description of Artificial Sequence: Synthetic oligonucleotide
  Antisense strand to SEQ ID NO: 692092
augacacaaagugagaucu

SEQ ID NO: 692094 - RNA, 19 nt, Artificial Sequence
  Description of Artificial Sequence: Synthetic oligonucleotide
  Sense strand starting at position 2325 of SEQ ID NO: 586100
ccuaaugaugcaugauuau

SEQ ID NO: 692095 - RNA, 19 nt, Artificial Sequence
  Description of Artificial Sequence: Synthetic oligonucleotide
  Antisense strand to SEQ ID NO: 692094
auaaucaugcaucauuagg

SEQ ID NO: 692096 - RNA, 19 nt, Artificial Sequence
  Description of Artificial Sequence: Synthetic oligonucleotide
  Sense strand starting at position 2357 of SEQ ID NO: 586100
uugcuuagacuuuauaagu

SEQ ID NO: 692097 - RNA, 19 nt, Artificial Sequence
  Description of Artificial Sequence: Synthetic oligonucleotide
  Antisense strand to SEQ ID NO: 692096
acuuauaaagucuaagcaa

SEQ ID NO: 692098 - RNA, 19 nt, Artificial Sequence
  Description of Artificial Sequence: Synthetic oligonucleotide
  Sense strand starting at position 2377 of SEQ ID NO: 586100
gucaaauuugcguguggga

SEQ ID NO: 692099 - RNA, 19 nt, Artificial Sequence
  Description of Artificial Sequence: Synthetic oligonucleotide
  Antisense strand to SEQ ID NO: 692098
ucccacacgcaaauuugac

SEQ ID NO: 692100 - RNA, 19 nt, Artificial Sequence
  Description of Artificial Sequence: Synthetic oligonucleotide
  Sense strand starting at position 2379 of SEQ ID NO: 586100
caaauuugcgugugggaca

SEQ ID NO: 692101 - RNA, 19 nt, Artificial Sequence
  Description of Artificial Sequence: Synthetic oligonucleotide
  Antisense strand to SEQ ID NO: 692100
ugucccacacgcaaauuug

SEQ ID NO: 692102 - RNA, 19 nt, Artificial Sequence
  Description of Artificial Sequence: Synthetic oligonucleotide
  Sense strand starting at position 2493 of SEQ ID NO: 586100
agauguuguggaggaagau

SEQ ID NO: 692103 - RNA, 19 nt, Artificial Sequence
  Description of Artificial Sequence: Synthetic oligonucleotide
  Antisense strand to SEQ ID NO: 692102
aucuuccuccacaacaucu

SEQ ID NO: 692104 - RNA, 19 nt, Artificial Sequence
  Description of Artificial Sequence: Synthetic oligonucleotide
  Sense strand starting at position 2630 of SEQ ID NO: 586100
gugagaaaggccuggcaua

SEQ ID NO: 692105 - RNA, 19 nt, Artificial Sequence
  Description of Artificial Sequence: Synthetic oligonucleotide
  Antisense strand to SEQ ID NO: 692104
uaugccaggccuuucucac

SEQ ID NO: 692106 - RNA, 19 nt, Artificial Sequence
  Description of Artificial Sequence: Synthetic oligonucleotide
  Sense strand starting at position 2631 of SEQ ID NO: 586100
ugagaaaggccuggcauaa

SEQ ID NO: 692107 - RNA, 19 nt, Artificial Sequence
  Description of Artificial Sequence: Synthetic oligonucleotide
  Antisense strand to SEQ ID NO: 692106
uuaugccaggccuuucuca

SEQ ID NO: 692108 - RNA, 19 nt, Artificial Sequence
  Description of Artificial Sequence: Synthetic oligonucleotide
  Sense strand starting at position 2759 of SEQ ID NO: 586100
gcgagaagaauaggucuaa

SEQ ID NO: 692109 - RNA, 19 nt, Artificial Sequence
  Description of Artificial Sequence: Synthetic oligonucleotide
  Antisense strand to SEQ ID NO: 692108
uuagaccuauucuucucgc

SEQ ID NO: 692110 - RNA, 19 nt, Artificial Sequence
  Description of Artificial Sequence: Synthetic oligonucleotide
  Sense strand starting at position 2760 of SEQ ID NO: 586100
cgagaagaauaggucuaau

SEQ ID NO: 692111 - RNA, 19 nt, Artificial Sequence
  Description of Artificial Sequence: Synthetic oligonucleotide
  Antisense strand to SEQ ID NO: 692110
auuagaccuauucuucucg

SEQ ID NO: 692112 - RNA, 19 nt, Artificial Sequence
  Description of Artificial Sequence: Synthetic oligonucleotide
  Sense strand starting at position 2962 of SEQ ID NO: 586100
ccuacuuucucugucagga

SEQ ID NO: 692113 - RNA, 19 nt, Artificial Sequence
  Description of Artificial Sequence: Synthetic oligonucleotide
  Antisense strand to SEQ ID NO: 692112
uccugacagagaaaguagg

SEQ ID NO: 692114 - RNA, 19 nt, Artificial Sequence
  Description of Artificial Sequence: Synthetic oligonucleotide
  Sense strand starting at position 3037 of SEQ ID NO: 586100
ggaucccuuucuccaggaa

SEQ ID NO: 692115 - RNA, 19 nt, Artificial Sequence
  Description of Artificial Sequence: Synthetic oligonucleotide
  Antisense strand to SEQ ID NO: 692114
uuccuggagaaagggaucc

SEQ ID NO: 692116 - RNA, 19 nt, Artificial Sequence
  Description of Artificial Sequence: Synthetic oligonucleotide
  Sense strand starting at position 3041 of SEQ ID NO: 586100
cccuuucuccaggaagcuu

SEQ ID NO: 692117 - RNA, 19 nt, Artificial Sequence
  Description of Artificial Sequence: Synthetic oligonucleotide
  Antisense strand to SEQ ID NO: 692116
aagcuuccuggagaaaggg

SEQ ID NO: 692118 - RNA, 19 nt, Artificial Sequence
  Description of Artificial Sequence: Synthetic oligonucleotide
  Sense strand starting at position 3101 of SEQ ID NO: 586100
ccuucucucuguuuaggga

SEQ ID NO: 692119 - RNA, 19 nt, Artificial Sequence
  Description of Artificial Sequence: Synthetic oligonucleotide
  Antisense strand to SEQ ID NO: 692118
ucccuaaacagagagaagg

SEQ ID NO: 692120 - RNA, 19 nt, Artificial Sequence
  Description of Artificial Sequence: Synthetic oligonucleotide
  Sense strand starting at position 3306 of SEQ ID NO: 586100
cucagucaccuuugagauc

SEQ ID NO: 692121 - RNA, 19 nt, Artificial Sequence
  Description of Artificial Sequence: Synthetic oligonucleotide
  Antisense strand to SEQ ID NO: 692120
gaucucaaaggugacugag

SEQ ID NO: 692122 - RNA, 19 nt, Artificial Sequence
  Description of Artificial Sequence: Synthetic oligonucleotide
  Sense strand starting at position 3397 of SEQ ID NO: 586100
ucuagaaacuugccugaag

SEQ ID NO: 692123 - RNA, 19 nt, Artificial Sequence
  Description of Artificial Sequence: Synthetic oligonucleotide
  Antisense strand to SEQ ID NO: 692122
cuucaggcaaguuucuaga

SEQ ID NO: 692124 - RNA, 19 nt, Artificial Sequence
  Description of Artificial Sequence: Synthetic oligonucleotide
  Sense strand starting at position 3398 of SEQ ID NO: 586100
cuagaaacuugccugaaga

SEQ ID NO: 692125 - RNA, 19 nt, Artificial Sequence
  Description of Artificial Sequence: Synthetic oligonucleotide
  Antisense strand to SEQ ID NO: 692124
ucuucaggcaaguuucuag

SEQ ID NO: 692126 - RNA, 19 nt, Artificial Sequence
  Description of Artificial Sequence: Synthetic oligonucleotide
  Sense strand starting at position 3468 of SEQ ID NO: 586100
ggaggcgcucuccaucauu

SEQ ID NO: 692127 - RNA, 19 nt, Artificial Sequence
  Description of Artificial Sequence: Synthetic oligonucleotide
  Antisense strand to SEQ ID NO: 692126
aaugauggagagcgccucc

SEQ ID NO: 692128 - RNA, 19 nt, Artificial Sequence
  Description of Artificial Sequence: Synthetic oligonucleotide
  Sense strand starting at position 3722 of SEQ ID NO: 586100
cuuagaagcccuuggaauc

SEQ ID NO: 692129 - RNA, 19 nt, Artificial Sequence
  Description of Artificial Sequence: Synthetic oligonucleotide
  Antisense strand to SEQ ID NO: 692128
gauuccaagggcuucuaag

SEQ ID NO: 692130 - RNA, 19 nt, Artificial Sequence
  Description of Artificial Sequence: Synthetic oligonucleotide
  Sense strand starting at position 3732 of SEQ ID NO: 586100
cuuggaaucuugucuuguu

SEQ ID NO: 692131 - RNA, 19 nt, Artificial Sequence
  Description of Artificial Sequence: Synthetic oligonucleotide
  Antisense strand to SEQ ID NO: 692130
aacaagacaagauuccaag

SEQ ID NO: 692132 - RNA, 19 nt, Artificial Sequence
  Description of Artificial Sequence: Synthetic oligonucleotide
  Sense strand starting at position 180 of SEQ ID NO: 586101
ugaagaaaccuauguuugu

SEQ ID NO: 692133 - RNA, 19 nt, Artificial Sequence
  Description of Artificial Sequence: Synthetic oligonucleotide
  Antisense strand to SEQ ID NO: 692132
acaaacauagguuucuuca

SEQ ID NO: 692134 - RNA, 19 nt, Artificial Sequence
  Description of Artificial Sequence: Synthetic oligonucleotide
  Sense strand starting at position 181 of SEQ ID NO: 586101
gaagaaaccuauguuuguc

SEQ ID NO: 692135 - RNA, 19 nt, Artificial Sequence
  Description of Artificial Sequence: Synthetic oligonucleotide
  Antisense strand to SEQ ID NO: 692134
gacaaacauagguuucuuc

SEQ ID NO: 692136 - RNA, 19 nt, Artificial Sequence
  Description of Artificial Sequence: Synthetic oligonucleotide
  Sense strand starting at position 189 of SEQ ID NO: 586101
cuauguuugucaucuugaa

SEQ ID NO: 692137 - RNA, 19 nt, Artificial Sequence
  Description of Artificial Sequence: Synthetic oligonucleotide
  Antisense strand to SEQ ID NO: 692136
uucaagaugacaaacauag

SEQ ID NO: 692138 - RNA, 19 nt, Artificial Sequence
  Description of Artificial Sequence: Synthetic oligonucleotide
  Sense strand starting at position 540 of SEQ ID NO: 586101
uaaaguuauggauguccaa

SEQ ID NO: 692139 - RNA, 19 nt, Artificial Sequence
  Description of Artificial Sequence: Synthetic oligonucleotide
  Antisense strand to SEQ ID NO: 692138
uuggacauccauaacuuua

SEQ ID NO: 692140 - RNA, 19 nt, Artificial Sequence
  Description of Artificial Sequence: Synthetic oligonucleotide
  Sense strand starting at position 543 of SEQ ID NO: 586101
aguuauggauguccaaaug

SEQ ID NO: 692141 - RNA, 19 nt, Artificial Sequence
  Description of Artificial Sequence: Synthetic oligonucleotide
  Antisense strand to SEQ ID NO: 692140
cauuuggacauccauaacu

SEQ ID NO: 692142 - RNA, 19 nt, Artificial Sequence
  Description of Artificial Sequence: Synthetic oligonucleotide
  Sense strand starting at position 679 of SEQ ID NO: 586101
ugugguaucuauguacaau

SEQ ID NO: 692143 - RNA, 19 nt, Artificial Sequence
  Description of Artificial Sequence: Synthetic oligonucleotide
  Antisense strand to SEQ ID NO: 692142
auuguacauagauaccaca

SEQ ID NO: 692144 - RNA, 19 nt, Artificial Sequence
  Description of Artificial Sequence: Synthetic oligonucleotide
  Sense strand starting at position 680 of SEQ ID NO: 586101
gugguaucuauguacaaug

SEQ ID NO: 692145 - RNA, 19 nt, Artificial Sequence
  Description of Artificial Sequence: Synthetic oligonucleotide
  Antisense strand to SEQ ID NO: 692144
cauuguacauagauaccac

SEQ ID NO: 692146 - RNA, 19 nt, Artificial Sequence
  Description of Artificial Sequence: Synthetic oligonucleotide
  Sense strand starting at position 757 of SEQ ID NO: 586101
gcaugaagacgcuaaguga

SEQ ID NO: 692147 - RNA, 19 nt, Artificial Sequence
  Description of Artificial Sequence: Synthetic oligonucleotide
  Antisense strand to SEQ ID NO: 692146
ucacuuagcgucuucaugc

SEQ ID NO: 692148 - RNA, 19 nt, Artificial Sequence
  Description of Artificial Sequence: Synthetic oligonucleotide
  Sense strand starting at position 774 of SEQ ID NO: 586101
gaaguaagcuggucacaaa

SEQ ID NO: 692149 - RNA, 19 nt, Artificial Sequence
  Description of Artificial Sequence: Synthetic oligonucleotide
  Antisense strand to SEQ ID NO: 692148
uuugugaccagcuuacuuc

SEQ ID NO: 692150 - RNA, 19 nt, Artificial Sequence
  Description of Artificial Sequence: Synthetic oligonucleotide
  Sense strand starting at position 825 of SEQ ID NO: 586101
gggcccuagagucaucaaa

SEQ ID NO: 692151 - RNA, 19 nt, Artificial Sequence
  Description of Artificial Sequence: Synthetic oligonucleotide
  Antisense strand to SEQ ID NO: 692150
uuugaugacucuagggccc

SEQ ID NO: 692152 - RNA, 19 nt, Artificial Sequence
  Description of Artificial Sequence: Synthetic oligonucleotide
  Sense strand starting at position 827 of SEQ ID NO: 586101
gcccuagagucaucaaaug

SEQ ID NO: 692153 - RNA, 19 nt, Artificial Sequence
  Description of Artificial Sequence: Synthetic oligonucleotide
  Antisense strand to SEQ ID NO: 692152
cauuugaugacucuagggc

SEQ ID NO: 692154 - RNA, 19 nt, Artificial Sequence
  Description of Artificial Sequence: Synthetic oligonucleotide
  Sense strand starting at position 965 of SEQ ID NO: 586101
uggcaaugguuugugaaug

SEQ ID NO: 692155 - RNA, 19 nt, Artificial Sequence
  Description of Artificial Sequence: Synthetic oligonucleotide
  Antisense strand to SEQ ID NO: 692154
cauucacaaaccauugcca

SEQ ID NO: 692156 - RNA, 19 nt, Artificial Sequence
  Description of Artificial Sequence: Synthetic oligonucleotide
  Sense strand starting at position 1191 of SEQ ID NO: 586101
aacguauaaggucaaaguu

SEQ ID NO: 692157 - RNA, 19 nt, Artificial Sequence
  Description of Artificial Sequence: Synthetic oligonucleotide
  Antisense strand to SEQ ID NO: 692156
aacuuugaccuuauacguu

SEQ ID NO: 692158 - RNA, 19 nt, Artificial Sequence
  Description of Artificial Sequence: Synthetic oligonucleotide
  Sense strand starting at position 1580 of SEQ ID NO: 586101
gaguauaauauugggugua

SEQ ID NO: 692159 - RNA, 19 nt, Artificial Sequence
  Description of Artificial Sequence: Synthetic oligonucleotide
  Antisense strand to SEQ ID NO: 692158
uacacccaauauuauacuc

SEQ ID NO: 692160 - RNA, 19 nt, Artificial Sequence
  Description of Artificial Sequence: Synthetic oligonucleotide
  Sense strand starting at position 1582 of SEQ ID NO: 586101
guauaauauuggguguaaa

SEQ ID NO: 692161 - RNA, 19 nt, Artificial Sequence
  Description of Artificial Sequence: Synthetic oligonucleotide
  Antisense strand to SEQ ID NO: 692160
uuuacacccaauauuauac

SEQ ID NO: 692162 - RNA, 19 nt, Artificial Sequence
  Description of Artificial Sequence: Synthetic oligonucleotide
  Sense strand starting at position 1723 of SEQ ID NO: 586101
acaauucuacuguagugaa

SEQ ID NO: 692163 - RNA, 19 nt, Artificial Sequence
  Description of Artificial Sequence: Synthetic oligonucleotide
  Antisense strand to SEQ ID NO: 692162
uucacuacaguagaauugu

SEQ ID NO: 692164 - RNA, 19 nt, Artificial Sequence
  Description of Artificial Sequence: Synthetic oligonucleotide
  Sense strand starting at position 1744 of SEQ ID NO: 586101
gggaaaugaucucuaugug

SEQ ID NO: 692165 - RNA, 19 nt, Artificial Sequence
  Description of Artificial Sequence: Synthetic oligonucleotide
  Antisense strand to SEQ ID NO: 692164
cacauagagaucauuuccc

SEQ ID NO: 692166 - RNA, 19 nt, Artificial Sequence
  Description of Artificial Sequence: Synthetic oligonucleotide
  Sense strand starting at position 1747 of SEQ ID NO: 586101
aaaugaucucuaugugaag

SEQ ID NO: 692167 - RNA, 19 nt, Artificial Sequence
  Description of Artificial Sequence: Synthetic oligonucleotide
  Antisense strand to SEQ ID NO: 692166
cuucacauagagaucauuu

SEQ ID NO: 692168 - RNA, 19 nt, Artificial Sequence
  Description of Artificial Sequence: Synthetic oligonucleotide
  Sense strand starting at position 1748 of SEQ ID NO: 586101
aaugaucucuaugugaagu

SEQ ID NO: 692169 - RNA, 19 nt, Artificial Sequence
  Description of Artificial Sequence: Synthetic oligonucleotide
  Antisense strand to SEQ ID NO: 692168
acuucacauagagaucauu

SEQ ID NO: 692170 - RNA, 19 nt, Artificial Sequence
  Description of Artificial Sequence: Synthetic oligonucleotide
  Sense strand starting at position 1922 of SEQ ID NO: 586101
gccagaggcucccuaacau

SEQ ID NO: 692171 - RNA, 19 nt, Artificial Sequence
  Description of Artificial Sequence: Synthetic oligonucleotide
  Antisense strand to SEQ ID NO: 692170
auguuagggagccucuggc

SEQ ID NO: 692172 - RNA, 19 nt, Artificial Sequence
  Description of Artificial Sequence: Synthetic oligonucleotide
  Sense strand starting at position 1941 of SEQ ID NO: 586101
gggugacacucuccacaua

SEQ ID NO: 692173 - RNA, 19 nt, Artificial Sequence
  Description of Artificial Sequence: Synthetic oligonucleotide
  Antisense strand to SEQ ID NO: 692172
uauguggagagugucaccc

SEQ ID NO: 692174 - RNA, 19 nt, Artificial Sequence
  Description of Artificial Sequence: Synthetic oligonucleotide
  Sense strand starting at position 1967 of SEQ ID NO: 586101
uccagccagaguugugaaa

SEQ ID NO: 692175 - RNA, 19 nt, Artificial Sequence
  Description of Artificial Sequence: Synthetic oligonucleotide
  Antisense strand to SEQ ID NO: 692174
uuucacaacucuggcugga

SEQ ID NO: 692176 - RNA, 19 nt, Artificial Sequence
  Description of Artificial Sequence: Synthetic oligonucleotide
  Sense strand starting at position 2070 of SEQ ID NO: 586101
gcaaguuugugacugacag

SEQ ID NO: 692177 - RNA, 19 nt, Artificial Sequence
  Description of Artificial Sequence: Synthetic oligonucleotide
  Antisense strand to SEQ ID NO: 692176
cugucagucacaaacuugc

SEQ ID NO: 692178 - RNA, 19 nt, Artificial Sequence
  Description of Artificial Sequence: Synthetic oligonucleotide
  Sense strand starting at position 2071 of SEQ ID NO: 586101
caaguuugugacugacaga

SEQ ID NO: 692179 - RNA, 19 nt, Artificial Sequence
  Description of Artificial Sequence: Synthetic oligonucleotide
  Antisense strand to SEQ ID NO: 692178
ucugucagucacaaacuug

SEQ ID NO: 692180 - RNA, 19 nt, Artificial Sequence
  Description of Artificial Sequence: Synthetic oligonucleotide
  Sense strand starting at position 2082 of SEQ ID NO: 586101
cugacagaccacugaucua

SEQ ID NO: 692181 - RNA, 19 nt, Artificial Sequence
  Description of Artificial Sequence: Synthetic oligonucleotide
  Antisense strand to SEQ ID NO: 692180
uagaucaguggucugucag

SEQ ID NO: 692182 - RNA, 19 nt, Artificial Sequence
  Description of Artificial Sequence: Synthetic oligonucleotide
  Sense strand starting at position 2138 of SEQ ID NO: 586101
cccagacuuccuuguggac

SEQ ID NO: 692183 - RNA, 19 nt, Artificial Sequence
  Description of Artificial Sequence: Synthetic oligonucleotide
  Antisense strand to SEQ ID NO: 692182
guccacaaggaagucuggg

SEQ ID NO: 692184 - RNA, 19 nt, Artificial Sequence
  Description of Artificial Sequence: Synthetic oligonucleotide
  Sense strand starting at position 2157 of SEQ ID NO: 586101
agggaugacuaaguaaguu

SEQ ID NO: 692185 - RNA, 19 nt, Artificial Sequence
  Description of Artificial Sequence: Synthetic oligonucleotide
  Antisense strand to SEQ ID NO: 692184
aacuuacuuagucaucccu

SEQ ID NO: 692186 - RNA, 19 nt, Artificial Sequence
  Description of Artificial Sequence: Synthetic oligonucleotide
  Sense strand starting at position 2325 of SEQ ID NO: 586101
acuugugaucaugaggcau

SEQ ID NO: 692187 - RNA, 19 nt, Artificial Sequence
  Description of Artificial Sequence: Synthetic oligonucleotide
  Antisense strand to SEQ ID NO: 692186
augccucaugaucacaagu

SEQ ID NO: 692188 - RNA, 19 nt, Artificial Sequence
  Description of Artificial Sequence: Synthetic oligonucleotide
  Sense strand starting at position 2382 of SEQ ID NO: 586101
gagagauuguuagccacac

SEQ ID NO: 692189 - RNA, 19 nt, Artificial Sequence
  Description of Artificial Sequence: Synthetic oligonucleotide
  Antisense strand to SEQ ID NO: 692188
guguggcuaacaaucucuc

SEQ ID NO: 692190 - RNA, 19 nt, Artificial Sequence
  Description of Artificial Sequence: Synthetic oligonucleotide
  Sense strand starting at position 2386 of SEQ ID NO: 586101
gauuguuagccacaccaga

SEQ ID NO: 692191 - RNA, 19 nt, Artificial Sequence
  Description of Artificial Sequence: Synthetic oligonucleotide
  Antisense strand to SEQ ID NO: 692190
ucugguguggcuaacaauc

SEQ ID NO: 692192 - RNA, 19 nt, Artificial Sequence
  Description of Artificial Sequence: Synthetic oligonucleotide
  Sense strand starting at position 2574 of SEQ ID NO: 586101
uaaugauguucuccugguu

SEQ ID NO: 692193 - RNA, 19 nt, Artificial Sequence
  Description of Artificial Sequence: Synthetic oligonucleotide
  Antisense strand to SEQ ID NO: 692192
aaccaggagaacaucauua

SEQ ID NO: 692194 - RNA, 19 nt, Artificial Sequence
  Description of Artificial Sequence: Synthetic oligonucleotide
  Sense strand starting at position 2772 of SEQ ID NO: 586101
auuggagauguccaguuau

SEQ ID NO: 692195 - RNA, 19 nt, Artificial Sequence
  Description of Artificial Sequence: Synthetic oligonucleotide
  Antisense strand to SEQ ID NO: 692194
auaacuggacaucuccaau

SEQ ID NO: 692196 - RNA, 19 nt, Artificial Sequence
  Description of Artificial Sequence: Synthetic oligonucleotide
  Sense strand starting at position 3161 of SEQ ID NO: 586101
ggaggugacuuagcaaauc

SEQ ID NO: 692197 - RNA, 19 nt, Artificial Sequence
  Description of Artificial Sequence: Synthetic oligonucleotide
  Antisense strand to SEQ ID NO: 692196
gauuugcuaagucaccucc

SEQ ID NO: 692198 - RNA, 19 nt, Artificial Sequence
  Description of Artificial Sequence: Synthetic oligonucleotide
  Sense strand starting at position 3222 of SEQ ID NO: 586101
ggucuacacugguuaguga

SEQ ID NO: 692199 - RNA, 19 nt, Artificial Sequence
  Description of Artificial Sequence: Synthetic oligonucleotide
  Antisense strand to SEQ ID NO: 692198
ucacuaaccaguguagacc

SEQ ID NO: 692200 - RNA, 19 nt, Artificial Sequence
  Description of Artificial Sequence: Synthetic oligonucleotide
  Sense strand starting at position 3223 of SEQ ID NO: 586101
gucuacacugguuagugaa

SEQ ID NO: 692201 - RNA, 19 nt, Artificial Sequence
  Description of Artificial Sequence: Synthetic oligonucleotide
  Antisense strand to SEQ ID NO: 692200
uucacuaaccaguguagac

SEQ ID NO: 692202 - RNA, 19 nt, Artificial Sequence
  Description of Artificial Sequence: Synthetic oligonucleotide
  Sense strand starting at position 3279 of SEQ ID NO: 586101
gaaggaaacuaggacauaa

SEQ ID NO: 692203 - RNA, 19 nt, Artificial Sequence
  Description of Artificial Sequence: Synthetic oligonucleotide
  Antisense strand to SEQ ID NO: 692202
uuauguccuaguuuccuuc

SEQ ID NO: 692204 - RNA, 19 nt, Artificial Sequence
  Description of Artificial Sequence: Synthetic oligonucleotide
  Sense strand starting at position 3645 of SEQ ID NO: 586101
ucaagugaguuucuucuca

SEQ ID NO: 692205 - RNA, 19 nt, Artificial Sequence
  Description of Artificial Sequence: Synthetic oligonucleotide
  Antisense strand to SEQ ID NO: 692204
ugagaagaaacucacuuga

SEQ ID NO: 692206 - RNA, 19 nt, Artificial Sequence
  Description of Artificial Sequence: Synthetic oligonucleotide
  Sense strand starting at position 3647 of SEQ ID NO: 586101
aagugaguuucuucucaug

SEQ ID NO: 692207 - RNA, 19 nt, Artificial Sequence
  Description of Artificial Sequence: Synthetic oligonucleotide
  Antisense strand to SEQ ID NO: 692206
caugagaagaaacucacuu

SEQ ID NO: 692208 - RNA, 19 nt, Artificial Sequence
  Description of Artificial Sequence: Synthetic oligonucleotide
  Sense strand starting at position 3911 of SEQ ID NO: 586101
gcgaaauaacuccaugagu

SEQ ID NO: 692209 - RNA, 19 nt, Artificial Sequence
  Description of Artificial Sequence: Synthetic oligonucleotide
  Antisense strand to SEQ ID NO: 692208
acucauggaguuauuucgc

SEQ ID NO: 692210 - RNA, 19 nt, Artificial Sequence
  Description of Artificial Sequence: Synthetic oligonucleotide
  Sense strand starting at position 3977 of SEQ ID NO: 586101
cugauugcucaauacaaug

SEQ ID NO: 692211 - RNA, 19 nt, Artificial Sequence
  Description of Artificial Sequence: Synthetic oligonucleotide
  Antisense strand to SEQ ID NO: 692210
cauuguauugagcaaucag

SEQ ID NO: 692212 - RNA, 19 nt, Artificial Sequence
  Description of Artificial Sequence: Synthetic oligonucleotide
  Sense strand starting at position 256 of SEQ ID NO: 586102
ggacuuacaggugggugaa

SEQ ID NO: 692213 - RNA, 19 nt, Artificial Sequence
  Description of Artificial Sequence: Synthetic oligonucleotide
  Antisense strand to SEQ ID NO: 692212
uucacccaccuguaagucc

SEQ ID NO: 692214 - RNA, 19 nt, Artificial Sequence
  Description of Artificial Sequence: Synthetic oligonucleotide
  Sense strand starting at position 268 of SEQ ID NO: 586102
gggugaacugccugaucag

SEQ ID NO: 692215 - RNA, 19 nt, Artificial Sequence
  Description of Artificial Sequence: Synthetic oligonucleotide
  Antisense strand to SEQ ID NO: 692214
cugaucaggcaguucaccc

SEQ ID NO: 692216 - RNA, 19 nt, Artificial Sequence
  Description of Artificial Sequence: Synthetic oligonucleotide
  Sense strand starting at position 282 of SEQ ID NO: 586102
aucagcugauguguagaaa

SEQ ID NO: 692217 - RNA, 19 nt, Artificial Sequence
  Description of Artificial Sequence: Synthetic oligonucleotide
  Antisense strand to SEQ ID NO: 692216
uuucuacacaucagcugau

SEQ ID NO: 692218 - RNA, 19 nt, Artificial Sequence
  Description of Artificial Sequence: Synthetic oligonucleotide
  Sense strand starting at position 283 of SEQ ID NO: 586102
ucagcugauguguagaaau

SEQ ID NO: 692219 - RNA, 19 nt, Artificial Sequence
  Description of Artificial Sequence: Synthetic oligonucleotide
  Antisense strand to SEQ ID NO: 692218
auuucuacacaucagcuga

SEQ ID NO: 692220 - RNA, 19 nt, Artificial Sequence
  Description of Artificial Sequence: Synthetic oligonucleotide
  Sense strand starting at position 285 of SEQ ID NO: 586102
agcugauguguagaaauaa

SEQ ID NO: 692221 - RNA, 19 nt, Artificial Sequence
  Description of Artificial Sequence: Synthetic oligonucleotide
  Antisense strand to SEQ ID NO: 692220
uuauuucuacacaucagcu

SEQ ID NO: 692222 - RNA, 19 nt, Artificial Sequence
  Description of Artificial Sequence: Synthetic oligonucleotide
  Sense strand starting at position 362 of SEQ ID NO: 586102
ucaggcauaucugugaaug

SEQ ID NO: 692223 - RNA, 19 nt, Artificial Sequence
  Description of Artificial Sequence: Synthetic oligonucleotide
  Antisense strand to SEQ ID NO: 692222
cauucacagauaugccuga

SEQ ID NO: 692224 - RNA, 19 nt, Artificial Sequence
  Description of Artificial Sequence: Synthetic oligonucleotide
  Sense strand starting at position 367 of SEQ ID NO: 586102
cauaucugugaauguguga

SEQ ID NO: 692225 - RNA, 19 nt, Artificial Sequence
  Description of Artificial Sequence: Synthetic oligonucleotide
  Antisense strand to SEQ ID NO: 692224
ucacacauucacagauaug

SEQ ID NO: 692226 - RNA, 19 nt, Artificial Sequence
  Description of Artificial Sequence: Synthetic oligonucleotide
  Sense strand starting at position 374 of SEQ ID NO: 586102
gugaaugugugaucuugau

SEQ ID NO: 692227 - RNA, 19 nt, Artificial Sequence
  Description of Artificial Sequence: Synthetic oligonucleotide
  Antisense strand to SEQ ID NO: 692226
aucaagaucacacauucac

SEQ ID NO: 692228 - RNA, 19 nt, Artificial Sequence
  Description of Artificial Sequence: Synthetic oligonucleotide
  Sense strand starting at position 535 of SEQ ID NO: 586102
ggugaaugggcauaucucu

SEQ ID NO: 692229 - RNA, 19 nt, Artificial Sequence
  Description of Artificial Sequence: Synthetic oligonucleotide
  Antisense strand to SEQ ID NO: 692228
agagauaugcccauucacc

SEQ ID NO: 692230 - RNA, 19 nt, Artificial Sequence
  Description of Artificial Sequence: Synthetic oligonucleotide
  Sense strand starting at position 548 of SEQ ID NO: 586102
aucucugguguccacaaau

SEQ ID NO: 692231 - RNA, 19 nt, Artificial Sequence
  Description of Artificial Sequence: Synthetic oligonucleotide
  Antisense strand to SEQ ID NO: 692230
auuuguggacaccagagau

SEQ ID NO: 692232 - RNA, 19 nt, Artificial Sequence
  Description of Artificial Sequence: Synthetic oligonucleotide
  Sense strand starting at position 603 of SEQ ID NO: 586102
acaguuggguuucuuaaga

SEQ ID NO: 692233 - RNA, 19 nt, Artificial Sequence
  Description of Artificial Sequence: Synthetic oligonucleotide
  Antisense strand to SEQ ID NO: 692232
ucuuaagaaacccaacugu

SEQ ID NO: 692234 - RNA, 19 nt, Artificial Sequence
  Description of Artificial Sequence: Synthetic oligonucleotide
  Sense strand starting at position 657 of SEQ ID NO: 586102
agugucaaccuuggguuaa

SEQ ID NO: 692235 - RNA, 19 nt, Artificial Sequence
  Description of Artificial Sequence: Synthetic oligonucleotide
  Antisense strand to SEQ ID NO: 692234
uuaacccaagguugacacu

SEQ ID NO: 692236 - RNA, 19 nt, Artificial Sequence
  Description of Artificial Sequence: Synthetic oligonucleotide
  Sense strand starting at position 659 of SEQ ID NO: 586102
ugucaaccuuggguuaaau

SEQ ID NO: 692237 - RNA, 19 nt, Artificial Sequence
  Description of Artificial Sequence: Synthetic oligonucleotide
  Antisense strand to SEQ ID NO: 692236
auuuaacccaagguugaca

SEQ ID NO: 692238 - RNA, 19 nt, Artificial Sequence
  Description of Artificial Sequence: Synthetic oligonucleotide
  Sense strand starting at position 668 of SEQ ID NO: 586102
uggguuaaaucacuuauga

SEQ ID NO: 692239 - RNA, 19 nt, Artificial Sequence
  Description of Artificial Sequence: Synthetic oligonucleotide
  Antisense strand to SEQ ID NO: 692238
ucauaagugauuuaaccca

SEQ ID NO: 692240 - RNA, 19 nt, Artificial Sequence
  Description of Artificial Sequence: Synthetic oligonucleotide
  Sense strand starting at position 682 of SEQ ID NO: 586102
uaugaagucucuuugagga

SEQ ID NO: 692241 - RNA, 19 nt, Artificial Sequence
  Description of Artificial Sequence: Synthetic oligonucleotide
  Antisense strand to SEQ ID NO: 692240
uccucaaagagacuucaua

SEQ ID NO: 692242 - RNA, 19 nt, Artificial Sequence
  Description of Artificial Sequence: Synthetic oligonucleotide
  Sense strand starting at position 773 of SEQ ID NO: 586102
uugcuugacagaugucaga

SEQ ID NO: 692243 - RNA, 19 nt, Artificial Sequence
  Description of Artificial Sequence: Synthetic oligonucleotide
  Antisense strand to SEQ ID NO: 692242
ucugacaucugucaagcaa

SEQ ID NO: 692244 - RNA, 19 nt, Artificial Sequence
  Description of Artificial Sequence: Synthetic oligonucleotide
  Sense strand starting at position 1636 of SEQ ID NO: 586102
gccugagggcuccaaagau

SEQ ID NO: 692245 - RNA, 19 nt, Artificial Sequence
  Description of Artificial Sequence: Synthetic oligonucleotide
  Antisense strand to SEQ ID NO: 692244
aucuuuggagcccucaggc

SEQ ID NO: 692246 - RNA, 19 nt, Artificial Sequence
  Description of Artificial Sequence: Synthetic oligonucleotide
  Sense strand starting at position 2147 of SEQ ID NO: 586102
aggagagucagcugggaaa

SEQ ID NO: 692247 - RNA, 19 nt, Artificial Sequence
  Description of Artificial Sequence: Synthetic oligonucleotide
  Antisense strand to SEQ ID NO: 692246
uuucccagcugacucuccu

SEQ ID NO: 692248 - RNA, 19 nt, Artificial Sequence
  Description of Artificial Sequence: Synthetic oligonucleotide
  Sense strand starting at position 2149 of SEQ ID NO: 586102
gagagucagcugggaaaug

SEQ ID NO: 692249 - RNA, 19 nt, Artificial Sequence
  Description of Artificial Sequence: Synthetic oligonucleotide
  Antisense strand to SEQ ID NO: 692248
cauuucccagcugacucuc

SEQ ID NO: 692250 - RNA, 19 nt, Artificial Sequence
  Description of Artificial Sequence: Synthetic oligonucleotide
  Sense strand starting at position 2356 of SEQ ID NO: 586102
cugcaucguccuuaaagag

SEQ ID NO: 692251 - RNA, 19 nt, Artificial Sequence
  Description of Artificial Sequence: Synthetic oligonucleotide
  Antisense strand to SEQ ID NO: 692250
cucuuuaaggacgaugcag

SEQ ID NO: 692252 - RNA, 19 nt, Artificial Sequence
  Description of Artificial Sequence: Synthetic oligonucleotide
  Sense strand starting at position 2373 of SEQ ID NO: 586102
agcuguucuguuuaccaca

SEQ ID NO: 692253 - RNA, 19 nt, Artificial Sequence
  Description of Artificial Sequence: Synthetic oligonucleotide
  Antisense strand to SEQ ID NO: 692252
ugugguaaacagaacagcu

SEQ ID NO: 692254 - RNA, 19 nt, Artificial Sequence
  Description of Artificial Sequence: Synthetic oligonucleotide
  Sense strand starting at position 2375 of SEQ ID NO: 586102
cuguucuguuuaccacaga

SEQ ID NO: 692255 - RNA, 19 nt, Artificial Sequence
  Description of Artificial Sequence: Synthetic oligonucleotide
  Antisense strand to SEQ ID NO: 692254
ucugugguaaacagaacag

SEQ ID NO: 692256 - RNA, 19 nt, Artificial Sequence
  Description of Artificial Sequence: Synthetic oligonucleotide
  Sense strand starting at position 2378 of SEQ ID NO: 586102
uucuguuuaccacagauua

SEQ ID NO: 692257 - RNA, 19 nt, Artificial Sequence
  Description of Artificial Sequence: Synthetic oligonucleotide
  Antisense strand to SEQ ID NO: 692256
uaaucugugguaaacagaa

SEQ ID NO: 692258 - RNA, 19 nt, Artificial Sequence
  Description of Artificial Sequence: Synthetic oligonucleotide
  Sense strand starting at position 2389 of SEQ ID NO: 586102
acagauuaguaguuacuua

SEQ ID NO: 692259 - RNA, 19 nt, Artificial Sequence
  Description of Artificial Sequence: Synthetic oligonucleotide
  Antisense strand to SEQ ID NO: 692258
uaaguaacuacuaaucugu

SEQ ID NO: 692260 - RNA, 19 nt, Artificial Sequence
  Description of Artificial Sequence: Synthetic oligonucleotide
  Sense strand starting at position 2402 of SEQ ID NO: 586102
uacuuaaguuauccggaga

SEQ ID NO: 692261 - RNA, 19 nt, Artificial Sequence
  Description of Artificial Sequence: Synthetic oligonucleotide
  Antisense strand to SEQ ID NO: 692260
ucuccggauaacuuaagua

SEQ ID NO: 692262 - RNA, 19 nt, Artificial Sequence
  Description of Artificial Sequence: Synthetic oligonucleotide
  Sense strand starting at position 2403 of SEQ ID NO: 586102
acuuaaguuauccggagaa

SEQ ID NO: 692263 - RNA, 19 nt, Artificial Sequence
  Description of Artificial Sequence: Synthetic oligonucleotide
  Antisense strand to SEQ ID NO: 692262
uucuccggauaacuuaagu

SEQ ID NO: 692264 - RNA, 19 nt, Artificial Sequence
  Description of Artificial Sequence: Synthetic oligonucleotide
  Sense strand starting at position 2405 of SEQ ID NO: 586102
uuaaguuauccggagaacc

SEQ ID NO: 692265 - RNA, 19 nt, Artificial Sequence
  Description of Artificial Sequence: Synthetic oligonucleotide
  Antisense strand to SEQ ID NO: 692264
gguucuccggauaacuuaa

SEQ ID NO: 692266 - RNA, 19 nt, Artificial Sequence
  Description of Artificial Sequence: Synthetic oligonucleotide
  Sense strand starting at position 2529 of SEQ ID NO: 586102
ccuguucuuggguaaaguu

SEQ ID NO: 692267 - RNA, 19 nt, Artificial Sequence
  Description of Artificial Sequence: Synthetic oligonucleotide
  Antisense strand to SEQ ID NO: 692266
aacuuuacccaagaacagg

SEQ ID NO: 692268 - RNA, 19 nt, Artificial Sequence
  Description of Artificial Sequence: Synthetic oligonucleotide
  Sense strand starting at position 2538 of SEQ ID NO: 586102
ggguaaaguugagcagaca

SEQ ID NO: 692269 - RNA, 19 nt, Artificial Sequence
  Description of Artificial Sequence: Synthetic oligonucleotide
  Antisense strand to SEQ ID NO: 692268
ugucugcucaacuuuaccc

SEQ ID NO: 692270 - RNA, 19 nt, Artificial Sequence
  Description of Artificial Sequence: Synthetic oligonucleotide
  Sense strand starting at position 2652 of SEQ ID NO: 586102
aaggucucugcagguaaua

SEQ ID NO: 692271 - RNA, 19 nt, Artificial Sequence
  Description of Artificial Sequence: Synthetic oligonucleotide
  Antisense strand to SEQ ID NO: 692270
uauuaccugcagagaccuu

SEQ ID NO: 692272 - RNA, 19 nt, Artificial Sequence
  Description of Artificial Sequence: Synthetic oligonucleotide
  Sense strand starting at position 2654 of SEQ ID NO: 586102
ggucucugcagguaauaga

SEQ ID NO: 692273 - RNA, 19 nt, Artificial Sequence
  Description of Artificial Sequence: Synthetic oligonucleotide
  Antisense strand to SEQ ID NO: 692272
ucuauuaccugcagagacc

SEQ ID NO: 692274 - RNA, 19 nt, Artificial Sequence
  Description of Artificial Sequence: Synthetic oligonucleotide
  Sense strand starting at position 2661 of SEQ ID NO: 586102
gcagguaauagagggauga

SEQ ID NO: 692275 - RNA, 19 nt, Artificial Sequence
  Description of Artificial Sequence: Synthetic oligonucleotide
  Antisense strand to SEQ ID NO: 692274
ucaucccucuauuaccugc

SEQ ID NO: 692276 - RNA, 19 nt, Artificial Sequence
  Description of Artificial Sequence: Synthetic oligonucleotide
  Sense strand starting at position 2683 of SEQ ID NO: 586102
agcuuaacucuacgggaua

SEQ ID NO: 692277 - RNA, 19 nt, Artificial Sequence
  Description of Artificial Sequence: Synthetic oligonucleotide
  Antisense strand to SEQ ID NO: 692276
uaucccguagaguuaagcu

SEQ ID NO: 692278 - RNA, 19 nt, Artificial Sequence
  Description of Artificial Sequence: Synthetic oligonucleotide
  Sense strand starting at position 2880 of SEQ ID NO: 586102
ucacauguauuaucugauc

SEQ ID NO: 692279 - RNA, 19 nt, Artificial Sequence
  Description of Artificial Sequence: Synthetic oligonucleotide
  Antisense strand to SEQ ID NO: 692278
gaucagauaauacauguga

SEQ ID NO: 692280 - RNA, 19 nt, Artificial Sequence
  Description of Artificial Sequence: Synthetic oligonucleotide
  Sense strand starting at position 2885 of SEQ ID NO: 586102
uguauuaucugauccuuug

SEQ ID NO: 692281 - RNA, 19 nt, Artificial Sequence
  Description of Artificial Sequence: Synthetic oligonucleotide
  Antisense strand to SEQ ID NO: 692280
caaaggaucagauaauaca

SEQ ID NO: 692282 - RNA, 19 nt, Artificial Sequence
  Description of Artificial Sequence: Synthetic oligonucleotide
  Sense strand starting at position 2892 of SEQ ID NO: 586102
ucugauccuuuggucaaga

SEQ ID NO: 692283 - RNA, 19 nt, Artificial Sequence
  Description of Artificial Sequence: Synthetic oligonucleotide
  Antisense strand to SEQ ID NO: 692282
ucuugaccaaaggaucaga

SEQ ID NO: 692284 - RNA, 19 nt, Artificial Sequence
  Description of Artificial Sequence: Synthetic oligonucleotide
  Sense strand starting at position 2893 of SEQ ID NO: 586102
cugauccuuuggucaagaa

SEQ ID NO: 692285 - RNA, 19 nt, Artificial Sequence
  Description of Artificial Sequence: Synthetic oligonucleotide
  Antisense strand to SEQ ID NO: 692284
uucuugaccaaaggaucag

SEQ ID NO: 692286 - RNA, 19 nt, Artificial Sequence
  Description of Artificial Sequence: Synthetic oligonucleotide
  Sense strand starting at position 2903 of SEQ ID NO: 586102
ggucaagaauuugauuaua

SEQ ID NO: 692287 - RNA, 19 nt, Artificial Sequence
  Description of Artificial Sequence: Synthetic oligonucleotide
  Antisense strand to SEQ ID NO: 692286
uauaaucaaauucuugacc

SEQ ID NO: 692288 - RNA, 19 nt, Artificial Sequence
  Description of Artificial Sequence: Synthetic oligonucleotide
  Sense strand starting at position 3176 of SEQ ID NO: 586102
ugaucaggaugcucuugaa

SEQ ID NO: 692289 - RNA, 19 nt, Artificial Sequence
  Description of Artificial Sequence: Synthetic oligonucleotide
  Antisense strand to SEQ ID NO: 692288
uucaagagcauccugauca

SEQ ID NO: 692290 - RNA, 19 nt, Artificial Sequence
  Description of Artificial Sequence: Synthetic oligonucleotide
  Sense strand starting at position 3289 of SEQ ID NO: 586102
gauuuagaggugugccuuu

SEQ ID NO: 692291 - RNA, 19 nt, Artificial Sequence
  Description of Artificial Sequence: Synthetic oligonucleotide
  Antisense strand to SEQ ID NO: 692290
aaaggcacaccucuaaauc

SEQ ID NO: 692292 - RNA, 19 nt, Artificial Sequence
  Description of Artificial Sequence: Synthetic oligonucleotide
  Sense strand starting at position 104 of SEQ ID NO: 586103
cggugaguuuagguuuguu

SEQ ID NO: 692293 - RNA, 19 nt, Artificial Sequence
  Description of Artificial Sequence: Synthetic oligonucleotide
  Antisense strand to SEQ ID NO: 692292
aacaaaccuaaacucaccg

SEQ ID NO: 692294 - RNA, 19 nt, Artificial Sequence
  Description of Artificial Sequence: Synthetic oligonucleotide
  Sense strand starting at position 108 of SEQ ID NO: 586103
gaguuuagguuuguuccga

SEQ ID NO: 692295 - RNA, 19 nt, Artificial Sequence
  Description of Artificial Sequence: Synthetic oligonucleotide
  Antisense strand to SEQ ID NO: 692294
ucggaacaaaccuaaacuc

SEQ ID NO: 692296 - RNA, 19 nt, Artificial Sequence
  Description of Artificial Sequence: Synthetic oligonucleotide
  Sense strand starting at position 322 of SEQ ID NO: 586103
ggacuccagugccuugaaa

SEQ ID NO: 692297 - RNA, 19 nt, Artificial Sequence
  Description of Artificial Sequence: Synthetic oligonucleotide
  Antisense strand to SEQ ID NO: 692296
uuucaaggcacuggagucc

SEQ ID NO: 692298 - RNA, 19 nt, Artificial Sequence
  Description of Artificial Sequence: Synthetic oligonucleotide
  Sense strand starting at position 324 of SEQ ID NO: 586103
acuccagugccuugaaauc

SEQ ID NO: 692299 - RNA, 19 nt, Artificial Sequence
  Description of Artificial Sequence: Synthetic oligonucleotide
  Antisense strand to SEQ ID NO: 692298
gauuucaaggcacuggagu

SEQ ID NO: 692300 - RNA, 19 nt, Artificial Sequence
  Description of Artificial Sequence: Synthetic oligonucleotide
  Sense strand starting at position 1618 of SEQ ID NO: 586103
gugugcguguccugugcua

SEQ ID NO: 692301 - RNA, 19 nt, Artificial Sequence
  Description of Artificial Sequence: Synthetic oligonucleotide
  Antisense strand to SEQ ID NO: 692300
uagcacaggacacgcacac

SEQ ID NO: 692302 - RNA, 19 nt, Artificial Sequence
  Description of Artificial Sequence: Synthetic oligonucleotide
  Sense strand starting at position 1948 of SEQ ID NO: 586103
uuucuucuugcaggguuaa

SEQ ID NO: 692303 - RNA, 19 nt, Artificial Sequence
  Description of Artificial Sequence: Synthetic oligonucleotide
  Antisense strand to SEQ ID NO: 692302
uuaacccugcaagaagaaa

SEQ ID NO: 692304 - RNA, 19 nt, Artificial Sequence
  Description of Artificial Sequence: Synthetic oligonucleotide
  Sense strand starting at position 1949 of SEQ ID NO: 586103
uucuucuugcaggguuaau

SEQ ID NO: 692305 - RNA, 19 nt, Artificial Sequence
  Description of Artificial Sequence: Synthetic oligonucleotide
  Antisense strand to SEQ ID NO: 692304
auuaacccugcaagaagaa

SEQ ID NO: 692306 - RNA, 19 nt, Artificial Sequence
  Description of Artificial Sequence: Synthetic oligonucleotide
  Sense strand starting at position 2041 of SEQ ID NO: 586103
ggcaaccacuguuaacaaa

SEQ ID NO: 692307 - RNA, 19 nt, Artificial Sequence
  Description of Artificial Sequence: Synthetic oligonucleotide
  Antisense strand to SEQ ID NO: 692306
uuuguuaacagugguugcc

SEQ ID NO: 692308 - RNA, 19 nt, Artificial Sequence
  Description of Artificial Sequence: Synthetic oligonucleotide
  Sense strand starting at position 2519 of SEQ ID NO: 586103
gcaucagaaucauggucua

SEQ ID NO: 692309 - RNA, 19 nt, Artificial Sequence
  Description of Artificial Sequence: Synthetic oligonucleotide
  Antisense strand to SEQ ID NO: 692308
uagaccaugauucugaugc

SEQ ID NO: 692310 - RNA, 19 nt, Artificial Sequence
  Description of Artificial Sequence: Synthetic oligonucleotide
  Sense strand starting at position 2522 of SEQ ID NO: 586103
ucagaaucauggucuacac

SEQ ID NO: 692311 - RNA, 19 nt, Artificial Sequence
  Description of Artificial Sequence: Synthetic oligonucleotide
  Antisense strand to SEQ ID NO: 692310
guguagaccaugauucuga

SEQ ID NO: 692312 - RNA, 19 nt, Artificial Sequence
  Description of Artificial Sequence: Synthetic oligonucleotide
  Sense strand starting at position 2542 of SEQ ID NO: 586103
accucaucuuugcaagagu

SEQ ID NO: 692313 - RNA, 19 nt, Artificial Sequence
  Description of Artificial Sequence: Synthetic oligonucleotide
  Antisense strand to SEQ ID NO: 692312
acucuugcaaagaugaggu

SEQ ID NO: 692314 - RNA, 19 nt, Artificial Sequence
  Description of Artificial Sequence: Synthetic oligonucleotide
  Sense strand starting at position 2567 of SEQ ID NO: 586103
uggauuugcucucaaagug

SEQ ID NO: 692315 - RNA, 19 nt, Artificial Sequence
  Description of Artificial Sequence: Synthetic oligonucleotide
  Antisense strand to SEQ ID NO: 692314
cacuuugagagcaaaucca

SEQ ID NO: 692316 - RNA, 19 nt, Artificial Sequence
  Description of Artificial Sequence: Synthetic oligonucleotide
  Sense strand starting at position 2599 of SEQ ID NO: 586103
aaugguaugggauguggaa

SEQ ID NO: 692317 - RNA, 19 nt, Artificial Sequence
  Description of Artificial Sequence: Synthetic oligonucleotide
  Antisense strand to SEQ ID NO: 692316
uuccacaucccauaccauu

SEQ ID NO: 692318 - RNA, 19 nt, Artificial Sequence
  Description of Artificial Sequence: Synthetic oligonucleotide
  Sense strand starting at position 2676 of SEQ ID NO: 586103
ccagcugacguggaaucau

SEQ ID NO: 692319 - RNA, 19 nt, Artificial Sequence
  Description of Artificial Sequence: Synthetic oligonucleotide
  Antisense strand to SEQ ID NO: 692318
augauuccacgucagcugg

SEQ ID NO: 692320 - RNA, 19 nt, Artificial Sequence
  Description of Artificial Sequence: Synthetic oligonucleotide
  Sense strand starting at position 2698 of SEQ ID NO: 586103
gcugcuuaagcucugucua

SEQ ID NO: 692321 - RNA, 19 nt, Artificial Sequence
  Description of Artificial Sequence: Synthetic oligonucleotide
  Antisense strand to SEQ ID NO: 692320
uagacagagcuuaagcagc

SEQ ID NO: 692322 - RNA, 19 nt, Artificial Sequence
  Description of Artificial Sequence: Synthetic oligonucleotide
  Sense strand starting at position 2744 of SEQ ID NO: 586103
uggucugugucucugggau

SEQ ID NO: 692323 - RNA, 19 nt, Artificial Sequence
  Description of Artificial Sequence: Synthetic oligonucleotide
  Antisense strand to SEQ ID NO: 692322
aucccagagacacagacca

SEQ ID NO: 692324 - RNA, 19 nt, Artificial Sequence
  Description of Artificial Sequence: Synthetic oligonucleotide
  Sense strand starting at position 2780 of SEQ ID NO: 586103
acgugcucuuucccuguaa

SEQ ID NO: 692325 - RNA, 19 nt, Artificial Sequence
  Description of Artificial Sequence: Synthetic oligonucleotide
  Antisense strand to SEQ ID NO: 692324
uuacagggaaagagcacgu

SEQ ID NO: 692326 - RNA, 19 nt, Artificial Sequence
  Description of Artificial Sequence: Synthetic oligonucleotide
  Sense strand starting at position 2784 of SEQ ID NO: 586103
gcucuuucccuguaaccgu

SEQ ID NO: 692327 - RNA, 19 nt, Artificial Sequence
  Description of Artificial Sequence: Synthetic oligonucleotide
  Antisense strand to SEQ ID NO: 692326
acgguuacagggaaagagc

SEQ ID NO: 692328 - RNA, 19 nt, Artificial Sequence
  Description of Artificial Sequence: Synthetic oligonucleotide
  Sense strand starting at position 2809 of SEQ ID NO: 586103
gggucuuucuccucccuca

SEQ ID NO: 692329 - RNA, 19 nt, Artificial Sequence
  Description of Artificial Sequence: Synthetic oligonucleotide
  Antisense strand to SEQ ID NO: 692328
ugagggaggagaaagaccc

SEQ ID NO: 692330 - RNA, 19 nt, Artificial Sequence
  Description of Artificial Sequence: Synthetic oligonucleotide
  Sense strand starting at position 2902 of SEQ ID NO: 586103
acagcaugagcuuggagaa

SEQ ID NO: 692331 - RNA, 19 nt, Artificial Sequence
  Description of Artificial Sequence: Synthetic oligonucleotide
  Antisense strand to SEQ ID NO: 692330
uucuccaagcucaugcugu

SEQ ID NO: 692332 - RNA, 19 nt, Artificial Sequence
  Description of Artificial Sequence: Synthetic oligonucleotide
  Sense strand starting at position 2903 of SEQ ID NO: 586103
cagcaugagcuuggagaau

SEQ ID NO: 692333 - RNA, 19 nt, Artificial Sequence
  Description of Artificial Sequence: Synthetic oligonucleotide
  Antisense strand to SEQ ID NO: 692332
auucuccaagcucaugcug

SEQ ID NO: 692334 - RNA, 19 nt, Artificial Sequence
  Description of Artificial Sequence: Synthetic oligonucleotide
  Sense strand starting at position 2912 of SEQ ID NO: 586103
cuuggagaaugucgccuaa

SEQ ID NO: 692335 - RNA, 19 nt, Artificial Sequence
  Description of Artificial Sequence: Synthetic oligonucleotide
  Antisense strand to SEQ ID NO: 692334
uuaggcgacauucuccaag

SEQ ID NO: 692336 - RNA, 19 nt, Artificial Sequence
  Description of Artificial Sequence: Synthetic oligonucleotide
  Sense strand starting at position 2914 of SEQ ID NO: 586103
uggagaaugucgccuaaua

SEQ ID NO: 692337 - RNA, 19 nt, Artificial Sequence
  Description of Artificial Sequence: Synthetic oligonucleotide
  Antisense strand to SEQ ID NO: 692336
uauuaggcgacauucucca

SEQ ID NO: 692338 - RNA, 19 nt, Artificial Sequence
  Description of Artificial Sequence: Synthetic oligonucleotide
  Sense strand starting at position 2916 of SEQ ID NO: 586103
gagaaugucgccuaauaaa

SEQ ID NO: 692339 - RNA, 19 nt, Artificial Sequence
  Description of Artificial Sequence: Synthetic oligonucleotide
  Antisense strand to SEQ ID NO: 692338
uuuauuaggcgacauucuc

SEQ ID NO: 692340 - RNA, 19 nt, Artificial Sequence
  Description of Artificial Sequence: Synthetic oligonucleotide
  Sense strand starting at position 2958 of SEQ ID NO: 586103
agcucagcacuagguauua

SEQ ID NO: 692341 - RNA, 19 nt, Artificial Sequence
  Description of Artificial Sequence: Synthetic oligonucleotide
  Antisense strand to SEQ ID NO: 692340
uaauaccuagugcugagcu

SEQ ID NO: 692342 - RNA, 19 nt, Artificial Sequence
  Description of Artificial Sequence: Synthetic oligonucleotide
  Sense strand starting at position 2963 of SEQ ID NO: 586103
agcacuagguauuaggaga

SEQ ID NO: 692343 - RNA, 19 nt, Artificial Sequence
  Description of Artificial Sequence: Synthetic oligonucleotide
  Antisense strand to SEQ ID NO: 692342
ucuccuaauaccuagugcu

SEQ ID NO: 692344 - RNA, 19 nt, Artificial Sequence
  Description of Artificial Sequence: Synthetic oligonucleotide
  Sense strand starting at position 2977 of SEQ ID NO: 586103
ggagaaauagccugacuug

SEQ ID NO: 692345 - RNA, 19 nt, Artificial Sequence
  Description of Artificial Sequence: Synthetic oligonucleotide
  Antisense strand to SEQ ID NO: 692344
caagucaggcuauuucucc

SEQ ID NO: 692346 - RNA, 19 nt, Artificial Sequence
  Description of Artificial Sequence: Synthetic oligonucleotide
  Sense strand starting at position 2978 of SEQ ID NO: 586103
gagaaauagccugacuugu

SEQ ID NO: 692347 - RNA, 19 nt, Artificial Sequence
  Description of Artificial Sequence: Synthetic oligonucleotide
  Antisense strand to SEQ ID NO: 692346
acaagucaggcuauuucuc

SEQ ID NO: 692348 - RNA, 19 nt, Artificial Sequence
  Description of Artificial Sequence: Synthetic oligonucleotide
  Sense strand starting at position 2980 of SEQ ID NO: 586103
gaaauagccugacuuguau

SEQ ID NO: 692349 - RNA, 19 nt, Artificial Sequence
  Description of Artificial Sequence: Synthetic oligonucleotide
  Antisense strand to SEQ ID NO: 692348
auacaagucaggcuauuuc

SEQ ID NO: 692350 - RNA, 19 nt, Artificial Sequence
  Description of Artificial Sequence: Synthetic oligonucleotide
  Sense strand starting at position 3185 of SEQ ID NO: 586103
ccaccaugcccagguauau

SEQ ID NO: 692351 - RNA, 19 nt, Artificial Sequence
  Description of Artificial Sequence: Synthetic oligonucleotide
  Antisense strand to SEQ ID NO: 692350
auauaccugggcauggugg

SEQ ID NO: 692352 - RNA, 19 nt, Artificial Sequence
  Description of Artificial Sequence: Synthetic oligonucleotide
  Sense strand starting at position 3328 of SEQ ID NO: 586103
ccuggcuugacguguauuu

SEQ ID NO: 692353 - RNA, 19 nt, Artificial Sequence
  Description of Artificial Sequence: Synthetic oligonucleotide
  Antisense strand to SEQ ID NO: 692352
aaauacacgucaagccagg

SEQ ID NO: 692354 - RNA, 19 nt, Artificial Sequence
  Description of Artificial Sequence: Synthetic oligonucleotide
  Sense strand starting at position 3883 of SEQ ID NO: 586103
gccagagcuucuggcacaa

SEQ ID NO: 692355 - RNA, 19 nt, Artificial Sequence
  Description of Artificial Sequence: Synthetic oligonucleotide
  Antisense strand to SEQ ID NO: 692354
uugugccagaagcucuggc

SEQ ID NO: 692356 - RNA, 19 nt, Artificial Sequence
  Description of Artificial Sequence: Synthetic oligonucleotide
  Sense strand starting at position 285 of SEQ ID NO: 586104
gaaacaagguauugcuaua

SEQ ID NO: 692357 - RNA, 19 nt, Artificial Sequence
  Description of Artificial Sequence: Synthetic oligonucleotide
  Antisense strand to SEQ ID NO: 692356
uauagcaauaccuuguuuc

SEQ ID NO: 692358 - RNA, 19 nt, Artificial Sequence
  Description of Artificial Sequence: Synthetic oligonucleotide
  Sense strand starting at position 771 of SEQ ID NO: 586104
ggguacauaagagguguau

SEQ ID NO: 692359 - RNA, 19 nt, Artificial Sequence
  Description of Artificial Sequence: Synthetic oligonucleotide
  Antisense strand to SEQ ID NO: 692358
auacaccucuuauguaccc

SEQ ID NO: 692360 - RNA, 19 nt, Artificial Sequence
  Description of Artificial Sequence: Synthetic oligonucleotide
  Sense strand starting at position 870 of SEQ ID NO: 586104
accucaagcguguaucauu

SEQ ID NO: 692361 - RNA, 19 nt, Artificial Sequence
  Description of Artificial Sequence: Synthetic oligonucleotide
  Antisense strand to SEQ ID NO: 692360
aaugauacacgcuugaggu

SEQ ID NO: 692362 - RNA, 19 nt, Artificial Sequence
  Description of Artificial Sequence: Synthetic oligonucleotide
  Sense strand starting at position 875 of SEQ ID NO: 586104
aagcguguaucauuucuuu

SEQ ID NO: 692363 - RNA, 19 nt, Artificial Sequence
  Description of Artificial Sequence: Synthetic oligonucleotide
  Antisense strand to SEQ ID NO: 692362
aaagaaaugauacacgcuu

SEQ ID NO: 692364 - RNA, 19 nt, Artificial Sequence
  Description of Artificial Sequence: Synthetic oligonucleotide
  Sense strand starting at position 879 of SEQ ID NO: 586104
guguaucauuucuuugugu

SEQ ID NO: 692365 - RNA, 19 nt, Artificial Sequence
  Description of Artificial Sequence: Synthetic oligonucleotide
  Antisense strand to SEQ ID NO: 692364
acacaaagaaaugauacac

SEQ ID NO: 692366 - RNA, 19 nt, Artificial Sequence
  Description of Artificial Sequence: Synthetic oligonucleotide
  Sense strand starting at position 955 of SEQ ID NO: 586104
ugacaaucgucacccuguu

SEQ ID NO: 692367 - RNA, 19 nt, Artificial Sequence
  Description of Artificial Sequence: Synthetic oligonucleotide
  Antisense strand to SEQ ID NO: 692366
aacagggugacgauuguca

SEQ ID NO: 692368 - RNA, 19 nt, Artificial Sequence
  Description of Artificial Sequence: Synthetic oligonucleotide
  Sense strand starting at position 961 of SEQ ID NO: 586104
ucgucacccuguugugaua

SEQ ID NO: 692369 - RNA, 19 nt, Artificial Sequence
  Description of Artificial Sequence: Synthetic oligonucleotide
  Antisense strand to SEQ ID NO: 692368
uaucacaacagggugacga

SEQ ID NO: 692370 - RNA, 19 nt, Artificial Sequence
  Description of Artificial Sequence: Synthetic oligonucleotide
  Sense strand starting at position 1106 of SEQ ID NO: 586104
gacucugggcgaugucuua

SEQ ID NO: 692371 - RNA, 19 nt, Artificial Sequence
  Description of Artificial Sequence: Synthetic oligonucleotide
  Antisense strand to SEQ ID NO: 692370
uaagacaucgcccagaguc

SEQ ID NO: 692372 - RNA, 19 nt, Artificial Sequence
  Description of Artificial Sequence: Synthetic oligonucleotide
  Sense strand starting at position 1127 of SEQ ID NO: 586104
gccucuggucucugggaga

SEQ ID NO: 692373 - RNA, 19 nt, Artificial Sequence
  Description of Artificial Sequence: Synthetic oligonucleotide
  Antisense strand to SEQ ID NO: 692372
ucucccagagaccagaggc

SEQ ID NO: 692374 - RNA, 19 nt, Artificial Sequence
  Description of Artificial Sequence: Synthetic oligonucleotide
  Sense strand starting at position 1160 of SEQ ID NO: 586104
ccuugaaggcacugaaaua

SEQ ID NO: 692375 - RNA, 19 nt, Artificial Sequence
  Description of Artificial Sequence: Synthetic oligonucleotide
  Antisense strand to SEQ ID NO: 692374
uauuucagugccuucaagg

SEQ ID NO: 692376 - RNA, 19 nt, Artificial Sequence
  Description of Artificial Sequence: Synthetic oligonucleotide
  Sense strand starting at position 1183 of SEQ ID NO: 586104
guggccuucugauuugagu

SEQ ID NO: 692377 - RNA, 19 nt, Artificial Sequence
  Description of Artificial Sequence: Synthetic oligonucleotide
  Antisense strand to SEQ ID NO: 692376
acucaaaucagaaggccac

SEQ ID NO: 692378 - RNA, 19 nt, Artificial Sequence
  Description of Artificial Sequence: Synthetic oligonucleotide
  Sense strand starting at position 1644 of SEQ ID NO: 586104
uucccaggacuguggaauu

SEQ ID NO: 692379 - RNA, 19 nt, Artificial Sequence
  Description of Artificial Sequence: Synthetic oligonucleotide
  Antisense strand to SEQ ID NO: 692378
aauuccacaguccugggaa

SEQ ID NO: 692380 - RNA, 19 nt, Artificial Sequence
  Description of Artificial Sequence: Synthetic oligonucleotide
  Sense strand starting at position 2012 of SEQ ID NO: 586104
gcaggugagccacauucuu

SEQ ID NO: 692381 - RNA, 19 nt, Artificial Sequence
  Description of Artificial Sequence: Synthetic oligonucleotide
  Antisense strand to SEQ ID NO: 692380
aagaauguggcucaccugc

SEQ ID NO: 692382 - RNA, 19 nt, Artificial Sequence
  Description of Artificial Sequence: Synthetic oligonucleotide
  Sense strand starting at position 2167 of SEQ ID NO: 586104
agcagagaucccggugcaa

SEQ ID NO: 692383 - RNA, 19 nt, Artificial Sequence
  Description of Artificial Sequence: Synthetic oligonucleotide
  Antisense strand to SEQ ID NO: 692382
uugcaccgggaucucugcu

SEQ ID NO: 692384 - RNA, 19 nt, Artificial Sequence
  Description of Artificial Sequence: Synthetic oligonucleotide
  Sense strand starting at position 2169 of SEQ ID NO: 586104
cagagaucccggugcaauc

SEQ ID NO: 692385 - RNA, 19 nt, Artificial Sequence
  Description of Artificial Sequence: Synthetic oligonucleotide
  Antisense strand to SEQ ID NO: 692384
gauugcaccgggaucucug

SEQ ID NO: 692386 - RNA, 19 nt, Artificial Sequence
  Description of Artificial Sequence: Synthetic oligonucleotide
  Sense strand starting at position 2387 of SEQ ID NO: 586104
cgcauauugucucccaguu

SEQ ID NO: 692387 - RNA, 19 nt, Artificial Sequence
  Description of Artificial Sequence: Synthetic oligonucleotide
  Antisense strand to SEQ ID NO: 692386
aacugggagacaauaugcg

SEQ ID NO: 692388 - RNA, 19 nt, Artificial Sequence
  Description of Artificial Sequence: Synthetic oligonucleotide
  Sense strand starting at position 2563 of SEQ ID NO: 586104
cccauuccauugugaggau

SEQ ID NO: 692389 - RNA, 19 nt, Artificial Sequence
  Description of Artificial Sequence: Synthetic oligonucleotide
  Antisense strand to SEQ ID NO: 692388
auccucacaauggaauggg

SEQ ID NO: 692390 - RNA, 19 nt, Artificial Sequence
  Description of Artificial Sequence: Synthetic oligonucleotide
  Sense strand starting at position 2926 of SEQ ID NO: 586104
uggucucucggcugucaaa

SEQ ID NO: 692391 - RNA, 19 nt, Artificial Sequence
  Description of Artificial Sequence: Synthetic oligonucleotide
  Antisense strand to SEQ ID NO: 692390
uuugacagccgagagacca

SEQ ID NO: 692392 - RNA, 19 nt, Artificial Sequence
  Description of Artificial Sequence: Synthetic oligonucleotide
  Sense strand starting at position 2952 of SEQ ID NO: 586104
uuuggaacucgauagaggu

SEQ ID NO: 692393 - RNA, 19 nt, Artificial Sequence
  Description of Artificial Sequence: Synthetic oligonucleotide
  Antisense strand to SEQ ID NO: 692392
accucuaucgaguuccaaa

SEQ ID NO: 692394 - RNA, 19 nt, Artificial Sequence
  Description of Artificial Sequence: Synthetic oligonucleotide
  Sense strand starting at position 3145 of SEQ ID NO: 586104
gcgacuccauccuuaugaa

SEQ ID NO: 692395 - RNA, 19 nt, Artificial Sequence
  Description of Artificial Sequence: Synthetic oligonucleotide
  Antisense strand to SEQ ID NO: 692394
uucauaaggauggagucgc

SEQ ID NO: 692396 - RNA, 19 nt, Artificial Sequence
  Description of Artificial Sequence: Synthetic oligonucleotide
  Sense strand starting at position 3653 of SEQ ID NO: 586104
caccguggcuucucacaga

SEQ ID NO: 692397 - RNA, 19 nt, Artificial Sequence
  Description of Artificial Sequence: Synthetic oligonucleotide
  Antisense strand to SEQ ID NO: 692396
ucugugagaagccacggug

SEQ ID NO: 692398 - RNA, 19 nt, Artificial Sequence
  Description of Artificial Sequence: Synthetic oligonucleotide
  Sense strand starting at position 3731 of SEQ ID NO: 586104
cgagugaggugcuggcuaa

SEQ ID NO: 692399 - RNA, 19 nt, Artificial Sequence
  Description of Artificial Sequence: Synthetic oligonucleotide
  Antisense strand to SEQ ID NO: 692398
uuagccagcaccucacucg

SEQ ID NO: 692400 - RNA, 19 nt, Artificial Sequence
  Description of Artificial Sequence: Synthetic oligonucleotide
  Sense strand starting at position 3732 of SEQ ID NO: 586104
gagugaggugcuggcuaaa

SEQ ID NO: 692401 - RNA, 19 nt, Artificial Sequence
  Description of Artificial Sequence: Synthetic oligonucleotide
  Antisense strand to SEQ ID NO: 692400
uuuagccagcaccucacuc

SEQ ID NO: 692402 - RNA, 19 nt, Artificial Sequence
  Description of Artificial Sequence: Synthetic oligonucleotide
  Sense strand starting at position 3796 of SEQ ID NO: 586104
cccguugaccagcaaauau

SEQ ID NO: 692403 - RNA, 19 nt, Artificial Sequence
  Description of Artificial Sequence: Synthetic oligonucleotide
  Antisense strand to SEQ ID NO: 692402
auauuugcuggucaacggg

SEQ ID NO: 692404 - RNA, 19 nt, Artificial Sequence
  Description of Artificial Sequence: Synthetic oligonucleotide
  Sense strand starting at position 3976 of SEQ ID NO: 586104
cuccucggcucacagaauu

SEQ ID NO: 692405 - RNA, 19 nt, Artificial Sequence
  Description of Artificial Sequence: Synthetic oligonucleotide
  Antisense strand to SEQ ID NO: 692404
aauucugugagccgaggag

SEQ ID NO: 692406 - RNA, 19 nt, Artificial Sequence
  Description of Artificial Sequence: Synthetic oligonucleotide
  Sense strand starting at position 837 of SEQ ID NO: 586105
gaaggcggcugaugugaua

SEQ ID NO: 692407 - RNA, 19 nt, Artificial Sequence
  Description of Artificial Sequence: Synthetic oligonucleotide
  Antisense strand to SEQ ID NO: 692406
uaucacaucagccgccuuc

SEQ ID NO: 692408 - RNA, 19 nt, Artificial Sequence
  Description of Artificial Sequence: Synthetic oligonucleotide
  Sense strand starting at position 896 of SEQ ID NO: 586105
ccaggaugcucagaggacu

SEQ ID NO: 692409 - RNA, 19 nt, Artificial Sequence
  Description of Artificial Sequence: Synthetic oligonucleotide
  Antisense strand to SEQ ID NO: 692408
aguccucugagcauccugg

SEQ ID NO: 692410 - RNA, 19 nt, Artificial Sequence
  Description of Artificial Sequence: Synthetic oligonucleotide
  Sense strand starting at position 1370 of SEQ ID NO: 586105
gaggguacuuuggacucaa

SEQ ID NO: 692411 - RNA, 19 nt, Artificial Sequence
  Description of Artificial Sequence: Synthetic oligonucleotide
  Antisense strand to SEQ ID NO: 692410
uugaguccaaaguacccuc

SEQ ID NO: 692412 - RNA, 19 nt, Artificial Sequence
  Description of Artificial Sequence: Synthetic oligonucleotide
  Sense strand starting at position 1587 of SEQ ID NO: 586105
ggacaccauuucugaguga

SEQ ID NO: 692413 - RNA, 19 nt, Artificial Sequence
  Description of Artificial Sequence: Synthetic oligonucleotide
  Antisense strand to SEQ ID NO: 692412
ucacucagaaauggugucc

SEQ ID NO: 692414 - RNA, 19 nt, Artificial Sequence
  Description of Artificial Sequence: Synthetic oligonucleotide
  Sense strand starting at position 1588 of SEQ ID NO: 586105
gacaccauuucugagugau

SEQ ID NO: 692415 - RNA, 19 nt, Artificial Sequence
  Description of Artificial Sequence: Synthetic oligonucleotide
  Antisense strand to SEQ ID NO: 692414
aucacucagaaaugguguc

SEQ ID NO: 692416 - RNA, 19 nt, Artificial Sequence
  Description of Artificial Sequence: Synthetic oligonucleotide
  Sense strand starting at position 1690 of SEQ ID NO: 586105
ugaggaugggucugagguu

SEQ ID NO: 692417 - RNA, 19 nt, Artificial Sequence
  Description of Artificial Sequence: Synthetic oligonucleotide
  Antisense strand to SEQ ID NO: 692416
aaccucagacccauccuca

SEQ ID NO: 692418 - RNA, 19 nt, Artificial Sequence
  Description of Artificial Sequence: Synthetic oligonucleotide
  Sense strand starting at position 1691 of SEQ ID NO: 586105
gaggaugggucugagguuu

SEQ ID NO: 692419 - RNA, 19 nt, Artificial Sequence
  Description of Artificial Sequence: Synthetic oligonucleotide
  Antisense strand to SEQ ID NO: 692418
aaaccucagacccauccuc

SEQ ID NO: 692420 - RNA, 19 nt, Artificial Sequence
  Description of Artificial Sequence: Synthetic oligonucleotide
  Sense strand starting at position 1903 of SEQ ID NO: 586105
cccagauguggcuaggaca

SEQ ID NO: 692421 - RNA, 19 nt, Artificial Sequence
  Description of Artificial Sequence: Synthetic oligonucleotide
  Antisense strand to SEQ ID NO: 692420
uguccuagccacaucuggg

SEQ ID NO: 692422 - RNA, 19 nt, Artificial Sequence
  Description of Artificial Sequence: Synthetic oligonucleotide
  Sense strand starting at position 1961 of SEQ ID NO: 586105
cccagaacauguuuacgaa

SEQ ID NO: 692423 - RNA, 19 nt, Artificial Sequence
  Description of Artificial Sequence: Synthetic oligonucleotide
  Antisense strand to SEQ ID NO: 692422
uucguaaacauguucuggg

SEQ ID NO: 692424 - RNA, 19 nt, Artificial Sequence
  Description of Artificial Sequence: Synthetic oligonucleotide
  Sense strand starting at position 1964 of SEQ ID NO: 586105
agaacauguuuacgaaaca

SEQ ID NO: 692425 - RNA, 19 nt, Artificial Sequence
  Description of Artificial Sequence: Synthetic oligonucleotide
  Antisense strand to SEQ ID NO: 692424
uguuucguaaacauguucu

SEQ ID NO: 692426 - RNA, 19 nt, Artificial Sequence
  Description of Artificial Sequence: Synthetic oligonucleotide
  Sense strand starting at position 1965 of SEQ ID NO: 586105
gaacauguuuacgaaacag

SEQ ID NO: 692427 - RNA, 19 nt, Artificial Sequence
  Description of Artificial Sequence: Synthetic oligonucleotide
  Antisense strand to SEQ ID NO: 692426
cuguuucguaaacauguuc

SEQ ID NO: 692428 - RNA, 19 nt, Artificial Sequence
  Description of Artificial Sequence: Synthetic oligonucleotide
  Sense strand starting at position 2207 of SEQ ID NO: 586105
agagguucugcuugcuaug

SEQ ID NO: 692429 - RNA, 19 nt, Artificial Sequence
  Description of Artificial Sequence: Synthetic oligonucleotide
  Antisense strand to SEQ ID NO: 692428
cauagcaagcagaaccucu

SEQ ID NO: 692430 - RNA, 19 nt, Artificial Sequence
  Description of Artificial Sequence: Synthetic oligonucleotide
  Sense strand starting at position 2465 of SEQ ID NO: 586105
gagagauccugucaccaac

SEQ ID NO: 692431 - RNA, 19 nt, Artificial Sequence
  Description of Artificial Sequence: Synthetic oligonucleotide
  Antisense strand to SEQ ID NO: 692430
guuggugacaggaucucuc

SEQ ID NO: 692432 - RNA, 19 nt, Artificial Sequence
  Description of Artificial Sequence: Synthetic oligonucleotide
  Sense strand starting at position 2515 of SEQ ID NO: 586105
ugagaaaugucccaggucu

SEQ ID NO: 692433 - RNA, 19 nt, Artificial Sequence
  Description of Artificial Sequence: Synthetic oligonucleotide
  Antisense strand to SEQ ID NO: 692432
agaccugggacauuucuca

SEQ ID NO: 692434 - RNA, 19 nt, Artificial Sequence
  Description of Artificial Sequence: Synthetic oligonucleotide
  Sense strand starting at position 2600 of SEQ ID NO: 586105
aaugucuccuuaugggagu

SEQ ID NO: 692435 - RNA, 19 nt, Artificial Sequence
  Description of Artificial Sequence: Synthetic oligonucleotide
  Antisense strand to SEQ ID NO: 692434
acucccauaaggagacauu

SEQ ID NO: 692436 - RNA, 19 nt, Artificial Sequence
  Description of Artificial Sequence: Synthetic oligonucleotide
  Sense strand starting at position 2680 of SEQ ID NO: 586105
uagaaaugguucuaaaguu

SEQ ID NO: 692437 - RNA, 19 nt, Artificial Sequence
  Description of Artificial Sequence: Synthetic oligonucleotide
  Antisense strand to SEQ ID NO: 692436
aacuuuagaaccauuucua

SEQ ID NO: 692438 - RNA, 19 nt, Artificial Sequence
  Description of Artificial Sequence: Synthetic oligonucleotide
  Sense strand starting at position 2918 of SEQ ID NO: 586105
ggccucaaccugggaguuu

SEQ ID NO: 692439 - RNA, 19 nt, Artificial Sequence
  Description of Artificial Sequence: Synthetic oligonucleotide
  Antisense strand to SEQ ID NO: 692438
aaacucccagguugaggcc

SEQ ID NO: 692440 - RNA, 19 nt, Artificial Sequence
  Description of Artificial Sequence: Synthetic oligonucleotide
  Sense strand starting at position 2948 of SEQ ID NO: 586105
gggcuauggucgcaccacu

SEQ ID NO: 692441 - RNA, 19 nt, Artificial Sequence
  Description of Artificial Sequence: Synthetic oligonucleotide
  Antisense strand to SEQ ID NO: 692440
aguggugcgaccauagccc

SEQ ID NO: 692442 - RNA, 19 nt, Artificial Sequence
  Description of Artificial Sequence: Synthetic oligonucleotide
  Sense strand starting at position 3079 of SEQ ID NO: 586105
aggucaaggcuaugagcua

SEQ ID NO: 692443 - RNA, 19 nt, Artificial Sequence
  Description of Artificial Sequence: Synthetic oligonucleotide
  Antisense strand to SEQ ID NO: 692442
uagcucauagccuugaccu

SEQ ID NO: 692444 - RNA, 19 nt, Artificial Sequence
  Description of Artificial Sequence: Synthetic oligonucleotide
  Sense strand starting at position 3086 of SEQ ID NO: 586105
ggcuaugagcuaugguuac

SEQ ID NO: 692445 - RNA, 19 nt, Artificial Sequence
  Description of Artificial Sequence: Synthetic oligonucleotide
  Antisense strand to SEQ ID NO: 692444
guaaccauagcucauagcc

SEQ ID NO: 692446 - RNA, 19 nt, Artificial Sequence
  Description of Artificial Sequence: Synthetic oligonucleotide
  Sense strand starting at position 3550 of SEQ ID NO: 586105
ggcucuggugacuaacagu

SEQ ID NO: 692447 - RNA, 19 nt, Artificial Sequence
  Description of Artificial Sequence: Synthetic oligonucleotide
  Antisense strand to SEQ ID NO: 692446
acuguuagucaccagagcc

SEQ ID NO: 692448 - RNA, 19 nt, Artificial Sequence
  Description of Artificial Sequence: Synthetic oligonucleotide
  Sense strand starting at position 3559 of SEQ ID NO: 586105
gacuaacagucuggcaguu

SEQ ID NO: 692449 - RNA, 19 nt, Artificial Sequence
  Description of Artificial Sequence: Synthetic oligonucleotide
  Antisense strand to SEQ ID NO: 692448
aacugccagacuguuaguc

SEQ ID NO: 692450 - RNA, 19 nt, Artificial Sequence
  Description of Artificial Sequence: Synthetic oligonucleotide
  Sense strand starting at position 3615 of SEQ ID NO: 586105
gcgauuccucugcaccgua

SEQ ID NO: 692451 - RNA, 19 nt, Artificial Sequence
  Description of Artificial Sequence: Synthetic oligonucleotide
  Antisense strand to SEQ ID NO: 692450
uacggugcagaggaaucgc

SEQ ID NO: 692452 - RNA, 19 nt, Artificial Sequence
  Description of Artificial Sequence: Synthetic oligonucleotide
  Sense strand starting at position 3618 of SEQ ID NO: 586105
auuccucugcaccguaaga

SEQ ID NO: 692453 - RNA, 19 nt, Artificial Sequence
  Description of Artificial Sequence: Synthetic oligonucleotide
  Antisense strand to SEQ ID NO: 692452
ucuuacggugcagaggaau

SEQ ID NO: 692454 - RNA, 19 nt, Artificial Sequence
  Description of Artificial Sequence: Synthetic oligonucleotide
  Sense strand starting at position 3620 of SEQ ID NO: 586105
uccucugcaccguaagaga

SEQ ID NO: 692455 - RNA, 19 nt, Artificial Sequence
  Description of Artificial Sequence: Synthetic oligonucleotide
  Antisense strand to SEQ ID NO: 692454
ucucuuacggugcagagga

SEQ ID NO: 692456 - RNA, 19 nt, Artificial Sequence
  Description of Artificial Sequence: Synthetic oligonucleotide
  Sense strand starting at position 3651 of SEQ ID NO: 586105
gagacaugcacaugagugu

SEQ ID NO: 692457 - RNA, 19 nt, Artificial Sequence
  Description of Artificial Sequence: Synthetic oligonucleotide
  Antisense strand to SEQ ID NO: 692456
acacucaugugcaugucuc

SEQ ID NO: 692458 - RNA, 19 nt, Artificial Sequence
  Description of Artificial Sequence: Synthetic oligonucleotide
  Sense strand starting at position 3673 of SEQ ID NO: 586105
cagcacauucuucgugaca

SEQ ID NO: 692459 - RNA, 19 nt, Artificial Sequence
  Description of Artificial Sequence: Synthetic oligonucleotide
  Antisense strand to SEQ ID NO: 692458
ugucacgaagaaugugcug

SEQ ID NO: 692460 - RNA, 19 nt, Artificial Sequence
  Description of Artificial Sequence: Synthetic oligonucleotide
  Sense strand starting at position 3675 of SEQ ID NO: 586105
gcacauucuucgugacagc

SEQ ID NO: 692461 - RNA, 19 nt, Artificial Sequence
  Description of Artificial Sequence: Synthetic oligonucleotide
  Antisense strand to SEQ ID NO: 692460
gcugucacgaagaaugugc

SEQ ID NO: 692462 - RNA, 19 nt, Artificial Sequence
  Description of Artificial Sequence: Synthetic oligonucleotide
  Sense strand starting at position 3678 of SEQ ID NO: 586105
cauucuucgugacagcuga

SEQ ID NO: 692463 - RNA, 19 nt, Artificial Sequence
  Description of Artificial Sequence: Synthetic oligonucleotide
  Antisense strand to SEQ ID NO: 692462
ucagcugucacgaagaaug

SEQ ID NO: 692464 - RNA, 19 nt, Artificial Sequence
  Description of Artificial Sequence: Synthetic oligonucleotide
  Sense strand starting at position 3740 of SEQ ID NO: 586105
acuaaaugugaucgagcca

SEQ ID NO: 692465 - RNA, 19 nt, Artificial Sequence
  Description of Artificial Sequence: Synthetic oligonucleotide
  Antisense strand to SEQ ID NO: 692464
uggcucgaucacauuuagu

SEQ ID NO: 692466 - RNA, 19 nt, Artificial Sequence
  Description of Artificial Sequence: Synthetic oligonucleotide
  Sense strand starting at position 3766 of SEQ ID NO: 586105
gaggguuccucggccauaa

SEQ ID NO: 692467 - RNA, 19 nt, Artificial Sequence
  Description of Artificial Sequence: Synthetic oligonucleotide
  Antisense strand to SEQ ID NO: 692466
uuauggccgaggaacccuc

SEQ ID NO: 692468 - RNA, 19 nt, Artificial Sequence
  Description of Artificial Sequence: Synthetic oligonucleotide
  Sense strand starting at position 228 of SEQ ID NO: 586106
ggauguuucugccacccga

SEQ ID NO: 692469 - RNA, 19 nt, Artificial Sequence
  Description of Artificial Sequence: Synthetic oligonucleotide
  Antisense strand to SEQ ID NO: 692468
ucggguggcagaaacaucc

SEQ ID NO: 692470 - RNA, 19 nt, Artificial Sequence
  Description of Artificial Sequence: Synthetic oligonucleotide
  Sense strand starting at position 580 of SEQ ID NO: 586106
gguucaaacucacgagugu

SEQ ID NO: 692471 - RNA, 19 nt, Artificial Sequence
  Description of Artificial Sequence: Synthetic oligonucleotide
  Antisense strand to SEQ ID NO: 692470
acacucgugaguuugaacc

SEQ ID NO: 692472 - RNA, 19 nt, Artificial Sequence
  Description of Artificial Sequence: Synthetic oligonucleotide
  Sense strand starting at position 584 of SEQ ID NO: 586106
caaacucacgaguguguua

SEQ ID NO: 692473 - RNA, 19 nt, Artificial Sequence
  Description of Artificial Sequence: Synthetic oligonucleotide
  Antisense strand to SEQ ID NO: 692472
uaacacacucgugaguuug

SEQ ID NO: 692474 - RNA, 19 nt, Artificial Sequence
  Description of Artificial Sequence: Synthetic oligonucleotide
  Sense strand starting at position 593 of SEQ ID NO: 586106
gaguguguuacccagguua

SEQ ID NO: 692475 - RNA, 19 nt, Artificial Sequence
  Description of Artificial Sequence: Synthetic oligonucleotide
  Antisense strand to SEQ ID NO: 692474
uaaccuggguaacacacuc

SEQ ID NO: 692476 - RNA, 19 nt, Artificial Sequence
  Description of Artificial Sequence: Synthetic oligonucleotide
  Sense strand starting at position 595 of SEQ ID NO: 586106
guguguuacccagguuaau

SEQ ID NO: 692477 - RNA, 19 nt, Artificial Sequence
  Description of Artificial Sequence: Synthetic oligonucleotide
  Antisense strand to SEQ ID NO: 692476
auuaaccuggguaacacac

SEQ ID NO: 692478 - RNA, 19 nt, Artificial Sequence
  Description of Artificial Sequence: Synthetic oligonucleotide
  Sense strand starting at position 598 of SEQ ID NO: 586106
uguuacccagguuaauaau

SEQ ID NO: 692479 - RNA, 19 nt, Artificial Sequence
  Description of Artificial Sequence: Synthetic oligonucleotide
  Antisense strand to SEQ ID NO: 692478
auuauuaaccuggguaaca

SEQ ID NO: 692480 - RNA, 19 nt, Artificial Sequence
  Description of Artificial Sequence: Synthetic oligonucleotide
  Sense strand starting at position 616 of SEQ ID NO: 586106
ugacucuguccacacgaga

SEQ ID NO: 692481 - RNA, 19 nt, Artificial Sequence
  Description of Artificial Sequence: Synthetic oligonucleotide
  Antisense strand to SEQ ID NO: 692480
ucucguguggacagaguca

SEQ ID NO: 692482 - RNA, 19 nt, Artificial Sequence
  Description of Artificial Sequence: Synthetic oligonucleotide
  Sense strand starting at position 1093 of SEQ ID NO: 586106
uccugcuucuccggguaga

SEQ ID NO: 692483 - RNA, 19 nt, Artificial Sequence
  Description of Artificial Sequence: Synthetic oligonucleotide
  Antisense strand to SEQ ID NO: 692482
ucuacccggagaagcagga

SEQ ID NO: 692484 - RNA, 19 nt, Artificial Sequence
  Description of Artificial Sequence: Synthetic oligonucleotide
  Sense strand starting at position 1094 of SEQ ID NO: 586106
ccugcuucuccggguagau

SEQ ID NO: 692485 - RNA, 19 nt, Artificial Sequence
  Description of Artificial Sequence: Synthetic oligonucleotide
  Antisense strand to SEQ ID NO: 692484
aucuacccggagaagcagg

SEQ ID NO: 692486 - RNA, 19 nt, Artificial Sequence
  Description of Artificial Sequence: Synthetic oligonucleotide
  Sense strand starting at position 1096 of SEQ ID NO: 586106
ugcuucuccggguagauga

SEQ ID NO: 692487 - RNA, 19 nt, Artificial Sequence
  Description of Artificial Sequence: Synthetic oligonucleotide
  Antisense strand to SEQ ID NO: 692486
ucaucuacccggagaagca

SEQ ID NO: 692488 - RNA, 19 nt, Artificial Sequence
  Description of Artificial Sequence: Synthetic oligonucleotide
  Sense strand starting at position 1295 of SEQ ID NO: 586106
gcacaagaucccggaagaa

SEQ ID NO: 692489 - RNA, 19 nt, Artificial Sequence
  Description of Artificial Sequence: Synthetic oligonucleotide
  Antisense strand to SEQ ID NO: 692488
uucuuccgggaucuugugc

SEQ ID NO: 692490 - RNA, 19 nt, Artificial Sequence
  Description of Artificial Sequence: Synthetic oligonucleotide
  Sense strand starting at position 1337 of SEQ ID NO: 586106
ggacgcuucucacucugau

SEQ ID NO: 692491 - RNA, 19 nt, Artificial Sequence
  Description of Artificial Sequence: Synthetic oligonucleotide
  Antisense strand to SEQ ID NO: 692490
aucagagugagaagcgucc

SEQ ID NO: 692492 - RNA, 19 nt, Artificial Sequence
  Description of Artificial Sequence: Synthetic oligonucleotide
  Sense strand starting at position 1340 of SEQ ID NO: 586106
cgcuucucacucugauauu

SEQ ID NO: 692493 - RNA, 19 nt, Artificial Sequence
  Description of Artificial Sequence: Synthetic oligonucleotide
  Antisense strand to SEQ ID NO: 692492
aauaucagagugagaagcg

SEQ ID NO: 692494 - RNA, 19 nt, Artificial Sequence
  Description of Artificial Sequence: Synthetic oligonucleotide
  Sense strand starting at position 1343 of SEQ ID NO: 586106
uucucacucugauauuagu

SEQ ID NO: 692495 - RNA, 19 nt, Artificial Sequence
  Description of Artificial Sequence: Synthetic oligonucleotide
  Antisense strand to SEQ ID NO: 692494
acuaauaucagagugagaa

SEQ ID NO: 692496 - RNA, 19 nt, Artificial Sequence
  Description of Artificial Sequence: Synthetic oligonucleotide
  Sense strand starting at position 1346 of SEQ ID NO: 586106
ucacucugauauuaguuua

SEQ ID NO: 692497 - RNA, 19 nt, Artificial Sequence
  Description of Artificial Sequence: Synthetic oligonucleotide
  Antisense strand to SEQ ID NO: 692496
uaaacuaauaucagaguga

SEQ ID NO: 692498 - RNA, 19 nt, Artificial Sequence
  Description of Artificial Sequence: Synthetic oligonucleotide
  Sense strand starting at position 1734 of SEQ ID NO: 586106
ggagaaacuaccggcaaau

SEQ ID NO: 692499 - RNA, 19 nt, Artificial Sequence
  Description of Artificial Sequence: Synthetic oligonucleotide
  Antisense strand to SEQ ID NO: 692498
auuugccgguaguuucucc

SEQ ID NO: 692500 - RNA, 19 nt, Artificial Sequence
  Description of Artificial Sequence: Synthetic oligonucleotide
  Sense strand starting at position 1884 of SEQ ID NO: 586106
ccgugacucacucgaguga

SEQ ID NO: 692501 - RNA, 19 nt, Artificial Sequence
  Description of Artificial Sequence: Synthetic oligonucleotide
  Antisense strand to SEQ ID NO: 692500
ucacucgagugagucacgg

SEQ ID NO: 692502 - RNA, 19 nt, Artificial Sequence
  Description of Artificial Sequence: Synthetic oligonucleotide
  Sense strand starting at position 1885 of SEQ ID NO: 586106
cgugacucacucgagugaa

SEQ ID NO: 692503 - RNA, 19 nt, Artificial Sequence
  Description of Artificial Sequence: Synthetic oligonucleotide
  Antisense strand to SEQ ID NO: 692502
uucacucgagugagucacg

SEQ ID NO: 692504 - RNA, 19 nt, Artificial Sequence
  Description of Artificial Sequence: Synthetic oligonucleotide
  Sense strand starting at position 1903 of SEQ ID NO: 586106
agccaauaccauugcagaa

SEQ ID NO: 692505 - RNA, 19 nt, Artificial Sequence
  Description of Artificial Sequence: Synthetic oligonucleotide
  Antisense strand to SEQ ID NO: 692504
uucugcaaugguauuggcu

SEQ ID NO: 692506 - RNA, 19 nt, Artificial Sequence
  Description of Artificial Sequence: Synthetic oligonucleotide
  Sense strand starting at position 1980 of SEQ ID NO: 586106
uuuccacucccagggaauu

SEQ ID NO: 692507 - RNA, 19 nt, Artificial Sequence
  Description of Artificial Sequence: Synthetic oligonucleotide
  Antisense strand to SEQ ID NO: 692506
aauucccugggaguggaaa

SEQ ID NO: 692508 - RNA, 19 nt, Artificial Sequence
  Description of Artificial Sequence: Synthetic oligonucleotide
  Sense strand starting at position 1981 of SEQ ID NO: 586106
uuccacucccagggaauua

SEQ ID NO: 692509 - RNA, 19 nt, Artificial Sequence
  Description of Artificial Sequence: Synthetic oligonucleotide
  Antisense strand to SEQ ID NO: 692508
uaauucccugggaguggaa

SEQ ID NO: 692510 - RNA, 19 nt, Artificial Sequence
  Description of Artificial Sequence: Synthetic oligonucleotide
  Sense strand starting at position 1990 of SEQ ID NO: 586106
cagggaauuacgcggcaaa

SEQ ID NO: 692511 - RNA, 19 nt, Artificial Sequence
  Description of Artificial Sequence: Synthetic oligonucleotide
  Antisense strand to SEQ ID NO: 692510
uuugccgcguaauucccug

SEQ ID NO: 692512 - RNA, 19 nt, Artificial Sequence
  Description of Artificial Sequence: Synthetic oligonucleotide
  Sense strand starting at position 1993 of SEQ ID NO: 586106
ggaauuacgcggcaaagaa

SEQ ID NO: 692513 - RNA, 19 nt, Artificial Sequence
  Description of Artificial Sequence: Synthetic oligonucleotide
  Antisense strand to SEQ ID NO: 692512
uucuuugccgcguaauucc

SEQ ID NO: 692514 - RNA, 19 nt, Artificial Sequence
  Description of Artificial Sequence: Synthetic oligonucleotide
  Sense strand starting at position 2084 of SEQ ID NO: 586106
acaggaucugaugggugau

SEQ ID NO: 692515 - RNA, 19 nt, Artificial Sequence
  Description of Artificial Sequence: Synthetic oligonucleotide
  Antisense strand to SEQ ID NO: 692514
aucacccaucagauccugu

SEQ ID NO: 692516 - RNA, 19 nt, Artificial Sequence
  Description of Artificial Sequence: Synthetic oligonucleotide
  Sense strand starting at position 2198 of SEQ ID NO: 586106
agaaauguaucaucucggu

SEQ ID NO: 692517 - RNA, 19 nt, Artificial Sequence
  Description of Artificial Sequence: Synthetic oligonucleotide
  Antisense strand to SEQ ID NO: 692516
accgagaugauacauuucu

SEQ ID NO: 692518 - RNA, 19 nt, Artificial Sequence
  Description of Artificial Sequence: Synthetic oligonucleotide
  Sense strand starting at position 2222 of SEQ ID NO: 586106
aggccaaacgucugagauc

SEQ ID NO: 692519 - RNA, 19 nt, Artificial Sequence
  Description of Artificial Sequence: Synthetic oligonucleotide
  Antisense strand to SEQ ID NO: 692518
gaucucagacguuuggccu

SEQ ID NO: 692520 - RNA, 19 nt, Artificial Sequence
  Description of Artificial Sequence: Synthetic oligonucleotide
  Sense strand starting at position 2223 of SEQ ID NO: 586106
ggccaaacgucugagauca

SEQ ID NO: 692521 - RNA, 19 nt, Artificial Sequence
  Description of Artificial Sequence: Synthetic oligonucleotide
  Antisense strand to SEQ ID NO: 692520
ugaucucagacguuuggcc

SEQ ID NO: 692522 - RNA, 19 nt, Artificial Sequence
  Description of Artificial Sequence: Synthetic oligonucleotide
  Sense strand starting at position 2225 of SEQ ID NO: 586106
ccaaacgucugagaucaag

SEQ ID NO: 692523 - RNA, 19 nt, Artificial Sequence
  Description of Artificial Sequence: Synthetic oligonucleotide
  Antisense strand to SEQ ID NO: 692522
cuugaucucagacguuugg

SEQ ID NO: 692524 - RNA, 19 nt, Artificial Sequence
  Description of Artificial Sequence: Synthetic oligonucleotide
  Sense strand starting at position 2581 of SEQ ID NO: 586106
ccaccacgacuugguaauu

SEQ ID NO: 692525 - RNA, 19 nt, Artificial Sequence
  Description of Artificial Sequence: Synthetic oligonucleotide
  Antisense strand to SEQ ID NO: 692524
aauuaccaagucguggugg

SEQ ID NO: 692526 - RNA, 19 nt, Artificial Sequence
  Description of Artificial Sequence: Synthetic oligonucleotide
  Sense strand starting at position 3726 of SEQ ID NO: 586106
gcccgaguucugccaguuu

SEQ ID NO: 692527 - RNA, 19 nt, Artificial Sequence
  Description of Artificial Sequence: Synthetic oligonucleotide
  Antisense strand to SEQ ID NO: 692526
aaacuggcagaacucgggc

SEQ ID NO: 692528 - RNA, 19 nt, Artificial Sequence
  Description of Artificial Sequence: Synthetic oligonucleotide
  Sense strand starting at position 3785 of SEQ ID NO: 586106
gaggcuuugccucuugcga

SEQ ID NO: 692529 - RNA, 19 nt, Artificial Sequence
  Description of Artificial Sequence: Synthetic oligonucleotide
  Antisense strand to SEQ ID NO: 692528
ucgcaagaggcaaagccuc

SEQ ID NO: 692530 - RNA, 19 nt, Artificial Sequence
  Description of Artificial Sequence: Synthetic oligonucleotide
  Sense strand starting at position 3786 of SEQ ID NO: 586106
aggcuuugccucuugcgaa

SEQ ID NO: 692531 - RNA, 19 nt, Artificial Sequence
  Description of Artificial Sequence: Synthetic oligonucleotide
  Antisense strand to SEQ ID NO: 692530
uucgcaagaggcaaagccu

SEQ ID NO: 692532 - RNA, 19 nt, Artificial Sequence
  Description of Artificial Sequence: Synthetic oligonucleotide
  Sense strand starting at position 3787 of SEQ ID NO: 586106
ggcuuugccucuugcgaaa

SEQ ID NO: 692533 - RNA, 19 nt, Artificial Sequence
  Description of Artificial Sequence: Synthetic oligonucleotide
  Antisense strand to SEQ ID NO: 692532
uuucgcaagaggcaaagcc

SEQ ID NO: 692534 - RNA, 19 nt, Artificial Sequence
  Description of Artificial Sequence: Synthetic oligonucleotide
  Sense strand starting at position 3789 of SEQ ID NO: 586106
cuuugccucuugcgaaagu

SEQ ID NO: 692535 - RNA, 19 nt, Artificial Sequence
  Description of Artificial Sequence: Synthetic oligonucleotide
  Antisense strand to SEQ ID NO: 692534
acuuucgcaagaggcaaag

SEQ ID NO: 692536 - RNA, 19 nt, Artificial Sequence
  Description of Artificial Sequence: Synthetic oligonucleotide
  Sense strand starting at position 2 of SEQ ID NO: 586107
cuggcugugaaaugagagu

SEQ ID NO: 692537 - RNA, 19 nt, Artificial Sequence
  Description of Artificial Sequence: Synthetic oligonucleotide
  Antisense strand to SEQ ID NO: 692536
acucucauuucacagccag

SEQ ID NO: 692538 - RNA, 19 nt, Artificial Sequence
  Description of Artificial Sequence: Synthetic oligonucleotide
  Sense strand starting at position 576 of SEQ ID NO: 586107
cugccugucuuuccagaaa

SEQ ID NO: 692539 - RNA, 19 nt, Artificial Sequence
  Description of Artificial Sequence: Synthetic oligonucleotide
  Antisense strand to SEQ ID NO: 692538
uuucuggaaagacaggcag

SEQ ID NO: 692540 - RNA, 19 nt, Artificial Sequence
  Description of Artificial Sequence: Synthetic oligonucleotide
  Sense strand starting at position 828 of SEQ ID NO: 586107
cggugaguuuagguuuguu

SEQ ID NO: 692541 - RNA, 19 nt, Artificial Sequence
  Description of Artificial Sequence: Synthetic oligonucleotide
  Antisense strand to SEQ ID NO: 692540
aacaaaccuaaacucaccg

SEQ ID NO: 692542 - RNA, 19 nt, Artificial Sequence
  Description of Artificial Sequence: Synthetic oligonucleotide
  Sense strand starting at position 832 of SEQ ID NO: 586107
gaguuuagguuuguuccga

SEQ ID NO: 692543 - RNA, 19 nt, Artificial Sequence
  Description of Artificial Sequence: Synthetic oligonucleotide
  Antisense strand to SEQ ID NO: 692542
ucggaacaaaccuaaacuc

SEQ ID NO: 692544 - RNA, 19 nt, Artificial Sequence
  Description of Artificial Sequence: Synthetic oligonucleotide
  Sense strand starting at position 1046 of SEQ ID NO: 586107
ggacuccagugccuugaaa

SEQ ID NO: 692545 - RNA, 19 nt, Artificial Sequence
  Description of Artificial Sequence: Synthetic oligonucleotide
  Antisense strand to SEQ ID NO: 692544
uuucaaggcacuggagucc

SEQ ID NO: 692546 - RNA, 19 nt, Artificial Sequence
  Description of Artificial Sequence: Synthetic oligonucleotide
  Sense strand starting at position 1048 of SEQ ID NO: 586107
acuccagugccuugaaauc

SEQ ID NO: 692547 - RNA, 19 nt, Artificial Sequence
  Description of Artificial Sequence: Synthetic oligonucleotide
  Antisense strand to SEQ ID NO: 692546
gauuucaaggcacuggagu

SEQ ID NO: 692548 - RNA, 19 nt, Artificial Sequence
  Description of Artificial Sequence: Synthetic oligonucleotide
  Sense strand starting at position 2342 of SEQ ID NO: 586107
gugugcguguccugugcua

SEQ ID NO: 692549 - RNA, 19 nt, Artificial Sequence
  Description of Artificial Sequence: Synthetic oligonucleotide
  Antisense strand to SEQ ID NO: 692548
uagcacaggacacgcacac

SEQ ID NO: 692550 - RNA, 19 nt, Artificial Sequence
  Description of Artificial Sequence: Synthetic oligonucleotide
  Sense strand starting at position 2672 of SEQ ID NO: 586107
uuucuucuugcaggguuaa

SEQ ID NO: 692551 - RNA, 19 nt, Artificial Sequence
  Description of Artificial Sequence: Synthetic oligonucleotide
  Antisense strand to SEQ ID NO: 692550
uuaacccugcaagaagaaa

SEQ ID NO: 692552 - RNA, 19 nt, Artificial Sequence
  Description of Artificial Sequence: Synthetic oligonucleotide
  Sense strand starting at position 2673 of SEQ ID NO: 586107
uucuucuugcaggguuaau

SEQ ID NO: 692553 - RNA, 19 nt, Artificial Sequence
  Description of Artificial Sequence: Synthetic oligonucleotide
  Antisense strand to SEQ ID NO: 692552
auuaacccugcaagaagaa

SEQ ID NO: 692554 - RNA, 19 nt, Artificial Sequence
  Description of Artificial Sequence: Synthetic oligonucleotide
  Sense strand starting at position 2765 of SEQ ID NO: 586107
ggcaaccacuguuaacaaa

SEQ ID NO: 692555 - RNA, 19 nt, Artificial Sequence
  Description of Artificial Sequence: Synthetic oligonucleotide
  Antisense strand to SEQ ID NO: 692554
uuuguuaacagugguugcc

SEQ ID NO: 692556 - RNA, 19 nt, Artificial Sequence
  Description of Artificial Sequence: Synthetic oligonucleotide
  Sense strand starting at position 3243 of SEQ ID NO: 586107
gcaucagaaucauggucua

SEQ ID NO: 692557 - RNA, 19 nt, Artificial Sequence
  Description of Artificial Sequence: Synthetic oligonucleotide
  Antisense strand to SEQ ID NO: 692556
uagaccaugauucugaugc

SEQ ID NO: 692558 - RNA, 19 nt, Artificial Sequence
  Description of Artificial Sequence: Synthetic oligonucleotide
  Sense strand starting at position 3246 of SEQ ID NO: 586107
ucagaaucauggucuacac

SEQ ID NO: 692559 - RNA, 19 nt, Artificial Sequence
  Description of Artificial Sequence: Synthetic oligonucleotide
  Antisense strand to SEQ ID NO: 692558
guguagaccaugauucuga

SEQ ID NO: 692560 - RNA, 19 nt, Artificial Sequence
  Description of Artificial Sequence: Synthetic oligonucleotide
  Sense strand starting at position 3266 of SEQ ID NO: 586107
accucaucuuugcaagagu

SEQ ID NO: 692561 - RNA, 19 nt, Artificial Sequence
  Description of Artificial Sequence: Synthetic oligonucleotide
  Antisense strand to SEQ ID NO: 692560
acucuugcaaagaugaggu

SEQ ID NO: 692562 - RNA, 19 nt, Artificial Sequence
  Description of Artificial Sequence: Synthetic oligonucleotide
  Sense strand starting at position 3291 of SEQ ID NO: 586107
uggauuugcucucaaagug

SEQ ID NO: 692563 - RNA, 19 nt, Artificial Sequence
  Description of Artificial Sequence: Synthetic oligonucleotide
  Antisense strand to SEQ ID NO: 692562
cacuuugagagcaaaucca

SEQ ID NO: 692564 - RNA, 19 nt, Artificial Sequence
  Description of Artificial Sequence: Synthetic oligonucleotide
  Sense strand starting at position 3323 of SEQ ID NO: 586107
aaugguaugggauguggaa

SEQ ID NO: 692565 - RNA, 19 nt, Artificial Sequence
  Description of Artificial Sequence: Synthetic oligonucleotide
  Antisense strand to SEQ ID NO: 692564
uuccacaucccauaccauu

SEQ ID NO: 692566 - RNA, 19 nt, Artificial Sequence
  Description of Artificial Sequence: Synthetic oligonucleotide
  Sense strand starting at position 3400 of SEQ ID NO: 586107
ccagcugacguggaaucau

SEQ ID NO: 692567 - RNA, 19 nt, Artificial Sequence
  Description of Artificial Sequence: Synthetic oligonucleotide
  Antisense strand to SEQ ID NO: 692566
augauuccacgucagcugg

SEQ ID NO: 692568 - RNA, 19 nt, Artificial Sequence
  Description of Artificial Sequence: Synthetic oligonucleotide
  Sense strand starting at position 3422 of SEQ ID NO: 586107
gcugcuuaagcucugucua

SEQ ID NO: 692569 - RNA, 19 nt, Artificial Sequence
  Description of Artificial Sequence: Synthetic oligonucleotide
  Antisense strand to SEQ ID NO: 692568
uagacagagcuuaagcagc

SEQ ID NO: 692570 - RNA, 19 nt, Artificial Sequence
  Description of Artificial Sequence: Synthetic oligonucleotide
  Sense strand starting at position 3468 of SEQ ID NO: 586107
uggucugugucucugggau

SEQ ID NO: 692571 - RNA, 19 nt, Artificial Sequence
  Description of Artificial Sequence: Synthetic oligonucleotide
  Antisense strand to SEQ ID NO: 692570
aucccagagacacagacca

SEQ ID NO: 692572 - RNA, 19 nt, Artificial Sequence
  Description of Artificial Sequence: Synthetic oligonucleotide
  Sense strand starting at position 3504 of SEQ ID NO: 586107
acgugcucuuucccuguaa

SEQ ID NO: 692573 - RNA, 19 nt, Artificial Sequence
  Description of Artificial Sequence: Synthetic oligonucleotide
  Antisense strand to SEQ ID NO: 692572
uuacagggaaagagcacgu

SEQ ID NO: 692574 - RNA, 19 nt, Artificial Sequence
  Description of Artificial Sequence: Synthetic oligonucleotide
  Sense strand starting at position 3508 of SEQ ID NO: 586107
gcucuuucccuguaaccgu

SEQ ID NO: 692575 - RNA, 19 nt, Artificial Sequence
  Description of Artificial Sequence: Synthetic oligonucleotide
  Antisense strand to SEQ ID NO: 692574
acgguuacagggaaagagc

SEQ ID NO: 692576 - RNA, 19 nt, Artificial Sequence
  Description of Artificial Sequence: Synthetic oligonucleotide
  Sense strand starting at position 3533 of SEQ ID NO: 586107
gggucuuucuccucccuca

SEQ ID NO: 692577 - RNA, 19 nt, Artificial Sequence
  Description of Artificial Sequence: Synthetic oligonucleotide
  Antisense strand to SEQ ID NO: 692576
ugagggaggagaaagaccc

SEQ ID NO: 692578 - RNA, 19 nt, Artificial Sequence
  Description of Artificial Sequence: Synthetic oligonucleotide
  Sense strand starting at position 3626 of SEQ ID NO: 586107
acagcaugagcuuggagaa

SEQ ID NO: 692579 - RNA, 19 nt, Artificial Sequence
  Description of Artificial Sequence: Synthetic oligonucleotide
  Antisense strand to SEQ ID NO: 692578
uucuccaagcucaugcugu

SEQ ID NO: 692580 - RNA, 19 nt, Artificial Sequence
  Description of Artificial Sequence: Synthetic oligonucleotide
  Sense strand starting at position 3627 of SEQ ID NO: 586107
cagcaugagcuuggagaau

SEQ ID NO: 692581 - RNA, 19 nt, Artificial Sequence
  Description of Artificial Sequence: Synthetic oligonucleotide
  Antisense strand to SEQ ID NO: 692580
auucuccaagcucaugcug

SEQ ID NO: 692582 - RNA, 19 nt, Artificial Sequence
  Description of Artificial Sequence: Synthetic oligonucleotide
  Sense strand starting at position 3636 of SEQ ID NO: 586107
cuuggagaaugucgccuaa

SEQ ID NO: 692583 - RNA, 19 nt, Artificial Sequence
  Description of Artificial Sequence: Synthetic oligonucleotide
  Antisense strand to SEQ ID NO: 692582
uuaggcgacauucuccaag

SEQ ID NO: 692584 - RNA, 19 nt, Artificial Sequence
  Description of Artificial Sequence: Synthetic oligonucleotide
  Sense strand starting at position 3638 of SEQ ID NO: 586107
uggagaaugucgccuaaua

SEQ ID NO: 692585 - RNA, 19 nt, Artificial Sequence
  Description of Artificial Sequence: Synthetic oligonucleotide
  Antisense strand to SEQ ID NO: 692584
uauuaggcgacauucucca

SEQ ID NO: 692586 - RNA, 19 nt, Artificial Sequence
  Description of Artificial Sequence: Synthetic oligonucleotide
  Sense strand starting at position 3640 of SEQ ID NO: 586107
gagaaugucgccuaauaaa

SEQ ID NO: 692587 - RNA, 19 nt, Artificial Sequence
  Description of Artificial Sequence: Synthetic oligonucleotide
  Antisense strand to SEQ ID NO: 692586
uuuauuaggcgacauucuc

SEQ ID NO: 692588 - RNA, 19 nt, Artificial Sequence
  Description of Artificial Sequence: Synthetic oligonucleotide
  Sense strand starting at position 3682 of SEQ ID NO: 586107
agcucagcacuagguauua

SEQ ID NO: 692589 - RNA, 19 nt, Artificial Sequence
  Description of Artificial Sequence: Synthetic oligonucleotide
  Antisense strand to SEQ ID NO: 692588
uaauaccuagugcugagcu

SEQ ID NO: 692590 - RNA, 19 nt, Artificial Sequence
  Description of Artificial Sequence: Synthetic oligonucleotide
  Sense strand starting at position 3687 of SEQ ID NO: 586107
agcacuagguauuaggaga

SEQ ID NO: 692591 - RNA, 19 nt, Artificial Sequence
  Description of Artificial Sequence: Synthetic oligonucleotide
  Antisense strand to SEQ ID NO: 692590
ucuccuaauaccuagugcu

SEQ ID NO: 692592 - RNA, 19 nt, Artificial Sequence
  Description of Artificial Sequence: Synthetic oligonucleotide
  Sense strand starting at position 3701 of SEQ ID NO: 586107
ggagaaauagccugacuug

SEQ ID NO: 692593 - RNA, 19 nt, Artificial Sequence
  Description of Artificial Sequence: Synthetic oligonucleotide
  Antisense strand to SEQ ID NO: 692592
caagucaggcuauuucucc

SEQ ID NO: 692594 - RNA, 19 nt, Artificial Sequence
  Description of Artificial Sequence: Synthetic oligonucleotide
  Sense strand starting at position 3702 of SEQ ID NO: 586107
gagaaauagccugacuugu

SEQ ID NO: 692595 - RNA, 19 nt, Artificial Sequence
  Description of Artificial Sequence: Synthetic oligonucleotide
  Antisense strand to SEQ ID NO: 692594
acaagucaggcuauuucuc

SEQ ID NO: 692596 - RNA, 19 nt, Artificial Sequence
  Description of Artificial Sequence: Synthetic oligonucleotide
  Sense strand starting at position 3704 of SEQ ID NO: 586107
gaaauagccugacuuguau

SEQ ID NO: 692597 - RNA, 19 nt, Artificial Sequence
  Description of Artificial Sequence: Synthetic oligonucleotide
  Antisense strand to SEQ ID NO: 692596
auacaagucaggcuauuuc

SEQ ID NO: 692598 - RNA, 19 nt, Artificial Sequence
  Description of Artificial Sequence: Synthetic oligonucleotide
  Sense strand starting at position 3909 of SEQ ID NO: 586107
ccaccaugcccagguauau

SEQ ID NO: 692599 - RNA, 19 nt, Artificial Sequence
  Description of Artificial Sequence: Synthetic oligonucleotide
  Antisense strand to SEQ ID NO: 692598
auauaccugggcauggugg

SEQ ID NO: 692600 - RNA, 19 nt, Artificial Sequence
  Description of Artificial Sequence: Synthetic oligonucleotide
  Sense strand starting at position 189 of SEQ ID NO: 586108
cggccagaacuuugauaua

SEQ ID NO: 692601 - RNA, 19 nt, Artificial Sequence
  Description of Artificial Sequence: Synthetic oligonucleotide
  Antisense strand to SEQ ID NO: 692600
uauaucaaaguucuggccg

SEQ ID NO: 692602 - RNA, 19 nt, Artificial Sequence
  Description of Artificial Sequence: Synthetic oligonucleotide
  Sense strand starting at position 244 of SEQ ID NO: 586108
uuuggauguucuuuaucag

SEQ ID NO: 692603 - RNA, 19 nt, Artificial Sequence
  Description of Artificial Sequence: Synthetic oligonucleotide
  Antisense strand to SEQ ID NO: 692602
cugauaaagaacauccaaa

SEQ ID NO: 692604 - RNA, 19 nt, Artificial Sequence
  Description of Artificial Sequence: Synthetic oligonucleotide
  Sense strand starting at position 247 of SEQ ID NO: 586108
ggauguucuuuaucagcua

SEQ ID NO: 692605 - RNA, 19 nt, Artificial Sequence
  Description of Artificial Sequence: Synthetic oligonucleotide
  Antisense strand to SEQ ID NO: 692604
uagcugauaaagaacaucc

SEQ ID NO: 692606 - RNA, 19 nt, Artificial Sequence
  Description of Artificial Sequence: Synthetic oligonucleotide
  Sense strand starting at position 286 of SEQ ID NO: 586108
ucacaugaguuaugacaua

SEQ ID NO: 692607 - RNA, 19 nt, Artificial Sequence
  Description of Artificial Sequence: Synthetic oligonucleotide
  Antisense strand to SEQ ID NO: 692606
uaugucauaacucauguga

SEQ ID NO: 692608 - RNA, 19 nt, Artificial Sequence
  Description of Artificial Sequence: Synthetic oligonucleotide
  Sense strand starting at position 340 of SEQ ID NO: 586108
agcuaauggcaagaacuau

SEQ ID NO: 692609 - RNA, 19 nt, Artificial Sequence
  Description of Artificial Sequence: Synthetic oligonucleotide
  Antisense strand to SEQ ID NO: 692608
auaguucuugccauuagcu

SEQ ID NO: 692610 - RNA, 19 nt, Artificial Sequence
  Description of Artificial Sequence: Synthetic oligonucleotide
  Sense strand starting at position 352 of SEQ ID NO: 586108
gaacuauguuaggugcuau

SEQ ID NO: 692611 - RNA, 19 nt, Artificial Sequence
  Description of Artificial Sequence: Synthetic oligonucleotide
  Antisense strand to SEQ ID NO: 692610
auagcaccuaacauaguuc

SEQ ID NO: 692612 - RNA, 19 nt, Artificial Sequence
  Description of Artificial Sequence: Synthetic oligonucleotide
  Sense strand starting at position 386 of SEQ ID NO: 586108
ggagaacucaccuguugga

SEQ ID NO: 692613 - RNA, 19 nt, Artificial Sequence
  Description of Artificial Sequence: Synthetic oligonucleotide
  Antisense strand to SEQ ID NO: 692612
uccaacaggugaguucucc

SEQ ID NO: 692614 - RNA, 19 nt, Artificial Sequence
  Description of Artificial Sequence: Synthetic oligonucleotide
  Sense strand starting at position 533 of SEQ ID NO: 586108
gggugcaacaccugucaga

SEQ ID NO: 692615 - RNA, 19 nt, Artificial Sequence
  Description of Artificial Sequence: Synthetic oligonucleotide
  Antisense strand to SEQ ID NO: 692614
ucugacagguguugcaccc

SEQ ID NO: 692616 - RNA, 19 nt, Artificial Sequence
  Description of Artificial Sequence: Synthetic oligonucleotide
  Sense strand starting at position 631 of SEQ ID NO: 586108
ccagguggcuucuuaucaa

SEQ ID NO: 692617 - RNA, 19 nt, Artificial Sequence
  Description of Artificial Sequence: Synthetic oligonucleotide
  Antisense strand to SEQ ID NO: 692616
uugauaagaagccaccugg

SEQ ID NO: 692618 - RNA, 19 nt, Artificial Sequence
  Description of Artificial Sequence: Synthetic oligonucleotide
  Sense strand starting at position 634 of SEQ ID NO: 586108
gguggcuucuuaucaaaga

SEQ ID NO: 692619 - RNA, 19 nt, Artificial Sequence
  Description of Artificial Sequence: Synthetic oligonucleotide
  Antisense strand to SEQ ID NO: 692618
ucuuugauaagaagccacc

SEQ ID NO: 692620 - RNA, 19 nt, Artificial Sequence
  Description of Artificial Sequence: Synthetic oligonucleotide
  Sense strand starting at position 635 of SEQ ID NO: 586108
guggcuucuuaucaaagaa

SEQ ID NO: 692621 - RNA, 19 nt, Artificial Sequence
  Description of Artificial Sequence: Synthetic oligonucleotide
  Antisense strand to SEQ ID NO: 692620
uucuuugauaagaagccac

SEQ ID NO: 692622 - RNA, 19 nt, Artificial Sequence
  Description of Artificial Sequence: Synthetic oligonucleotide
  Sense strand starting at position 752 of SEQ ID NO: 586108
ugaaacagcuugcaugaaa

SEQ ID NO: 692623 - RNA, 19 nt, Artificial Sequence
  Description of Artificial Sequence: Synthetic oligonucleotide
  Antisense strand to SEQ ID NO: 692622
uuucaugcaagcuguuuca

SEQ ID NO: 692624 - RNA, 19 nt, Artificial Sequence
  Description of Artificial Sequence: Synthetic oligonucleotide
  Sense strand starting at position 777 of SEQ ID NO: 586108
cucagauauuggucaggca

SEQ ID NO: 692625 - RNA, 19 nt, Artificial Sequence
  Description of Artificial Sequence: Synthetic oligonucleotide
  Antisense strand to SEQ ID NO: 692624
ugccugaccaauaucugag

SEQ ID NO: 692626 - RNA, 19 nt, Artificial Sequence
  Description of Artificial Sequence: Synthetic oligonucleotide
  Sense strand starting at position 778 of SEQ ID NO: 586108
ucagauauuggucaggcaa

SEQ ID NO: 692627 - RNA, 19 nt, Artificial Sequence
  Description of Artificial Sequence: Synthetic oligonucleotide
  Antisense strand to SEQ ID NO: 692626
uugccugaccaauaucuga

SEQ ID NO: 692628 - RNA, 19 nt, Artificial Sequence
  Description of Artificial Sequence: Synthetic oligonucleotide
  Sense strand starting at position 780 of SEQ ID NO: 586108
agauauuggucaggcaaau

SEQ ID NO: 692629 - RNA, 19 nt, Artificial Sequence
  Description of Artificial Sequence: Synthetic oligonucleotide
  Antisense strand to SEQ ID NO: 692628
auuugccugaccaauaucu

SEQ ID NO: 692630 - RNA, 19 nt, Artificial Sequence
  Description of Artificial Sequence: Synthetic oligonucleotide
  Sense strand starting at position 813 of SEQ ID NO: 586108
gggcgauuugcauggcggu

SEQ ID NO: 692631 - RNA, 19 nt, Artificial Sequence
  Description of Artificial Sequence: Synthetic oligonucleotide
  Antisense strand to SEQ ID NO: 692630
accgccaugcaaaucgccc

SEQ ID NO: 692632 - RNA, 19 nt, Artificial Sequence
  Description of Artificial Sequence: Synthetic oligonucleotide
  Sense strand starting at position 829 of SEQ ID NO: 586108
gguuguuucugaucuggga

SEQ ID NO: 692633 - RNA, 19 nt, Artificial Sequence
  Description of Artificial Sequence: Synthetic oligonucleotide
  Antisense strand to SEQ ID NO: 692632
ucccagaucagaaacaacc

SEQ ID NO: 692634 - RNA, 19 nt, Artificial Sequence
  Description of Artificial Sequence: Synthetic oligonucleotide
  Sense strand starting at position 831 of SEQ ID NO: 586108
uuguuucugaucugggaua

SEQ ID NO: 692635 - RNA, 19 nt, Artificial Sequence
  Description of Artificial Sequence: Synthetic oligonucleotide
  Antisense strand to SEQ ID NO: 692634
uaucccagaucagaaacaa

SEQ ID NO: 692636 - RNA, 19 nt, Artificial Sequence
  Description of Artificial Sequence: Synthetic oligonucleotide
  Sense strand starting at position 843 of SEQ ID NO: 586108
ugggauagcucagugggua

SEQ ID NO: 692637 - RNA, 19 nt, Artificial Sequence
  Description of Artificial Sequence: Synthetic oligonucleotide
  Antisense strand to SEQ ID NO: 692636
uacccacugagcuauccca

SEQ ID NO: 692638 - RNA, 19 nt, Artificial Sequence
  Description of Artificial Sequence: Synthetic oligonucleotide
  Sense strand starting at position 2396 of SEQ ID NO: 586108
gguugaaaccgccauugca

SEQ ID NO: 692639 - RNA, 19 nt, Artificial Sequence
  Description of Artificial Sequence: Synthetic oligonucleotide
  Antisense strand to SEQ ID NO: 692638
ugcaauggcgguuucaacc

SEQ ID NO: 692640 - RNA, 19 nt, Artificial Sequence
  Description of Artificial Sequence: Synthetic oligonucleotide
  Sense strand starting at position 2648 of SEQ ID NO: 586108
aaguaugauuuaggaguca

SEQ ID NO: 692641 - RNA, 19 nt, Artificial Sequence
  Description of Artificial Sequence: Synthetic oligonucleotide
  Antisense strand to SEQ ID NO: 692640
ugacuccuaaaucauacuu

SEQ ID NO: 692642 - RNA, 19 nt, Artificial Sequence
  Description of Artificial Sequence: Synthetic oligonucleotide
  Sense strand starting at position 2705 of SEQ ID NO: 586108
cuaauaagaucagugcuca

SEQ ID NO: 692643 - RNA, 19 nt, Artificial Sequence
  Description of Artificial Sequence: Synthetic oligonucleotide
  Antisense strand to SEQ ID NO: 692642
ugagcacugaucuuauuag

SEQ ID NO: 692644 - RNA, 19 nt, Artificial Sequence
  Description of Artificial Sequence: Synthetic oligonucleotide
  Sense strand starting at position 2709 of SEQ ID NO: 586108
uaagaucagugcucaagau

SEQ ID NO: 692645 - RNA, 19 nt, Artificial Sequence
  Description of Artificial Sequence: Synthetic oligonucleotide
  Antisense strand to SEQ ID NO: 692644
aucuugagcacugaucuua

SEQ ID NO: 692646 - RNA, 19 nt, Artificial Sequence
  Description of Artificial Sequence: Synthetic oligonucleotide
  Sense strand starting at position 2945 of SEQ ID NO: 586108
gcagccugaucugugugaa

SEQ ID NO: 692647 - RNA, 19 nt, Artificial Sequence
  Description of Artificial Sequence: Synthetic oligonucleotide
  Antisense strand to SEQ ID NO: 692646
uucacacagaucaggcugc

SEQ ID NO: 692648 - RNA, 19 nt, Artificial Sequence
  Description of Artificial Sequence: Synthetic oligonucleotide
  Sense strand starting at position 2946 of SEQ ID NO: 586108
cagccugaucugugugaau

SEQ ID NO: 692649 - RNA, 19 nt, Artificial Sequence
  Description of Artificial Sequence: Synthetic oligonucleotide
  Antisense strand to SEQ ID NO: 692648
auucacacagaucaggcug

SEQ ID NO: 692650 - RNA, 19 nt, Artificial Sequence
  Description of Artificial Sequence: Synthetic oligonucleotide
  Sense strand starting at position 2948 of SEQ ID NO: 586108
gccugaucugugugaauua

SEQ ID NO: 692651 - RNA, 19 nt, Artificial Sequence
  Description of Artificial Sequence: Synthetic oligonucleotide
  Antisense strand to SEQ ID NO: 692650
uaauucacacagaucaggc

SEQ ID NO: 692652 - RNA, 19 nt, Artificial Sequence
  Description of Artificial Sequence: Synthetic oligonucleotide
  Sense strand starting at position 3252 of SEQ ID NO: 586108
augucuaucuucccacuga

SEQ ID NO: 692653 - RNA, 19 nt, Artificial Sequence
  Description of Artificial Sequence: Synthetic oligonucleotide
  Antisense strand to SEQ ID NO: 692652
ucagugggaagauagacau

SEQ ID NO: 692654 - RNA, 19 nt, Artificial Sequence
  Description of Artificial Sequence: Synthetic oligonucleotide
  Sense strand starting at position 3263 of SEQ ID NO: 586108
cccacugacuucuucguau

SEQ ID NO: 692655 - RNA, 19 nt, Artificial Sequence
  Description of Artificial Sequence: Synthetic oligonucleotide
  Antisense strand to SEQ ID NO: 692654
auacgaagaagucaguggg

SEQ ID NO: 692656 - RNA, 19 nt, Artificial Sequence
  Description of Artificial Sequence: Synthetic oligonucleotide
  Sense strand starting at position 3266 of SEQ ID NO: 586108
acugacuucuucguaucuu

SEQ ID NO: 692657 - RNA, 19 nt, Artificial Sequence
  Description of Artificial Sequence: Synthetic oligonucleotide
  Antisense strand to SEQ ID NO: 692656
aagauacgaagaagucagu

SEQ ID NO: 692658 - RNA, 19 nt, Artificial Sequence
  Description of Artificial Sequence: Synthetic oligonucleotide
  Sense strand starting at position 3419 of SEQ ID NO: 586108
uguccucggcugcauuaau

SEQ ID NO: 692659 - RNA, 19 nt, Artificial Sequence
  Description of Artificial Sequence: Synthetic oligonucleotide
  Antisense strand to SEQ ID NO: 692658
auuaaugcagccgaggaca

SEQ ID NO: 692660 - RNA, 19 nt, Artificial Sequence
  Description of Artificial Sequence: Synthetic oligonucleotide
  Sense strand starting at position 3429 of SEQ ID NO: 586108
ugcauuaauucggcaauug

SEQ ID NO: 692661 - RNA, 19 nt, Artificial Sequence
  Description of Artificial Sequence: Synthetic oligonucleotide
  Antisense strand to SEQ ID NO: 692660
caauugccgaauuaaugca

SEQ ID NO: 692662 - RNA, 19 nt, Artificial Sequence
  Description of Artificial Sequence: Synthetic oligonucleotide
  Sense strand starting at position 3430 of SEQ ID NO: 586108
gcauuaauucggcaauugu

SEQ ID NO: 692663 - RNA, 19 nt, Artificial Sequence
  Description of Artificial Sequence: Synthetic oligonucleotide
  Antisense strand to SEQ ID NO: 692662
acaauugccgaauuaaugc

SEQ ID NO: 692664 - RNA, 19 nt, Artificial Sequence
  Description of Artificial Sequence: Synthetic oligonucleotide
  Sense strand starting at position 3440 of SEQ ID NO: 586108
ggcaauuguguuggaccuu

SEQ ID NO: 692665 - RNA, 19 nt, Artificial Sequence
  Description of Artificial Sequence: Synthetic oligonucleotide
  Antisense strand to SEQ ID NO: 692664
aagguccaacacaauugcc

SEQ ID NO: 692666 - RNA, 19 nt, Artificial Sequence
  Description of Artificial Sequence: Synthetic oligonucleotide
  Sense strand starting at position 3539 of SEQ ID NO: 586108
cauauuugucgaggcucaa

SEQ ID NO: 692667 - RNA, 19 nt, Artificial Sequence
  Description of Artificial Sequence: Synthetic oligonucleotide
  Antisense strand to SEQ ID NO: 692666
uugagccucgacaaauaug

SEQ ID NO: 692668 - RNA, 19 nt, Artificial Sequence
  Description of Artificial Sequence: Synthetic oligonucleotide
  Sense strand starting at position 3543 of SEQ ID NO: 586108
uuugucgaggcucaauaau

SEQ ID NO: 692669 - RNA, 19 nt, Artificial Sequence
  Description of Artificial Sequence: Synthetic oligonucleotide
  Antisense strand to SEQ ID NO: 692668
auuauugagccucgacaaa

SEQ ID NO: 692670 - RNA, 19 nt, Artificial Sequence
  Description of Artificial Sequence: Synthetic oligonucleotide
  Sense strand starting at position 3552 of SEQ ID NO: 586108
gcucaauaauauguacuga

SEQ ID NO: 692671 - RNA, 19 nt, Artificial Sequence
  Description of Artificial Sequence: Synthetic oligonucleotide
  Antisense strand to SEQ ID NO: 692670
ucaguacauauuauugagc

SEQ ID NO: 692672 - RNA, 19 nt, Artificial Sequence
  Description of Artificial Sequence: Synthetic oligonucleotide
  Sense strand starting at position 3560 of SEQ ID NO: 586108
auauguacugaucaagcua

SEQ ID NO: 692673 - RNA, 19 nt, Artificial Sequence
  Description of Artificial Sequence: Synthetic oligonucleotide
  Antisense strand to SEQ ID NO: 692672
uagcuugaucaguacauau

SEQ ID NO: 692674 - RNA, 19 nt, Artificial Sequence
  Description of Artificial Sequence: Synthetic oligonucleotide
  Sense strand starting at position 3584 of SEQ ID NO: 586108
ugugcuggacccugggaaa

SEQ ID NO: 692675 - RNA, 19 nt, Artificial Sequence
  Description of Artificial Sequence: Synthetic oligonucleotide
  Antisense strand to SEQ ID NO: 692674
uuucccaggguccagcaca

SEQ ID NO: 692676 - RNA, 19 nt, Artificial Sequence
  Description of Artificial Sequence: Synthetic oligonucleotide
  Sense strand starting at position 3619 of SEQ ID NO: 586108
ugcccuuacuggcugaaua

SEQ ID NO: 692677 - RNA, 19 nt, Artificial Sequence
  Description of Artificial Sequence: Synthetic oligonucleotide
  Antisense strand to SEQ ID NO: 692676
uauucagccaguaagggca

SEQ ID NO: 692678 - RNA, 19 nt, Artificial Sequence
  Description of Artificial Sequence: Synthetic oligonucleotide
  Sense strand starting at position 3917 of SEQ ID NO: 586108
ccuguagucccagauuauu

SEQ ID NO: 692679 - RNA, 19 nt, Artificial Sequence
  Description of Artificial Sequence: Synthetic oligonucleotide
  Antisense strand to SEQ ID NO: 692678
aauaaucugggacuacagg

SEQ ID NO: 692680 - RNA, 19 nt, Artificial Sequence
  Description of Artificial Sequence: Synthetic oligonucleotide
  Sense strand starting at position 3 of SEQ ID NO: 586109
ccauuugagucauaccauc

SEQ ID NO: 692681 - RNA, 19 nt, Artificial Sequence
  Description of Artificial Sequence: Synthetic oligonucleotide
  Antisense strand to SEQ ID NO: 692680
gaugguaugacucaaaugg

SEQ ID NO: 692682 - RNA, 19 nt, Artificial Sequence
  Description of Artificial Sequence: Synthetic oligonucleotide
  Sense strand starting at position 354 of SEQ ID NO: 586109
cagggacuagacuguguuu

SEQ ID NO: 692683 - RNA, 19 nt, Artificial Sequence
  Description of Artificial Sequence: Synthetic oligonucleotide
  Antisense strand to SEQ ID NO: 692682
aaacacagucuagucccug

SEQ ID NO: 692684 - RNA, 19 nt, Artificial Sequence
  Description of Artificial Sequence: Synthetic oligonucleotide
  Sense strand starting at position 356 of SEQ ID NO: 586109
gggacuagacuguguuuga

SEQ ID NO: 692685 - RNA, 19 nt, Artificial Sequence
  Description of Artificial Sequence: Synthetic oligonucleotide
  Antisense strand to SEQ ID NO: 692684
ucaaacacagucuaguccc

SEQ ID NO: 692686 - RNA, 19 nt, Artificial Sequence
  Description of Artificial Sequence: Synthetic oligonucleotide
  Sense strand starting at position 357 of SEQ ID NO: 586109
ggacuagacuguguuugac

SEQ ID NO: 692687 - RNA, 19 nt, Artificial Sequence
  Description of Artificial Sequence: Synthetic oligonucleotide
  Antisense strand to SEQ ID NO: 692686
gucaaacacagucuagucc

SEQ ID NO: 692688 - RNA, 19 nt, Artificial Sequence
  Description of Artificial Sequence: Synthetic oligonucleotide
  Sense strand starting at position 740 of SEQ ID NO: 586109
ggcgcuucguggauuguaa

SEQ ID NO: 692689 - RNA, 19 nt, Artificial Sequence
  Description of Artificial Sequence: Synthetic oligonucleotide
  Antisense strand to SEQ ID NO: 692688
uuacaauccacgaagcgcc

SEQ ID NO: 692690 - RNA, 19 nt, Artificial Sequence
  Description of Artificial Sequence: Synthetic oligonucleotide
  Sense strand starting at position 747 of SEQ ID NO: 586109
cguggauuguaacucugaa

SEQ ID NO: 692691 - RNA, 19 nt, Artificial Sequence
  Description of Artificial Sequence: Synthetic oligonucleotide
  Antisense strand to SEQ ID NO: 692690
uucagaguuacaauccacg

SEQ ID NO: 692692 - RNA, 19 nt, Artificial Sequence
  Description of Artificial Sequence: Synthetic oligonucleotide
  Sense strand starting at position 916 of SEQ ID NO: 586109
aaguguguccgagaccaga

SEQ ID NO: 692693 - RNA, 19 nt, Artificial Sequence
  Description of Artificial Sequence: Synthetic oligonucleotide
  Antisense strand to SEQ ID NO: 692692
ucuggucucggacacacuu

SEQ ID NO: 692694 - RNA, 19 nt, Artificial Sequence
  Description of Artificial Sequence: Synthetic oligonucleotide
  Sense strand starting at position 1937 of SEQ ID NO: 586109
gcgugaccucgaguaccuu

SEQ ID NO: 692695 - RNA, 19 nt, Artificial Sequence
  Description of Artificial Sequence: Synthetic oligonucleotide
  Antisense strand to SEQ ID NO: 692694
aagguacucgaggucacgc

SEQ ID NO: 692696 - RNA, 19 nt, Artificial Sequence
  Description of Artificial Sequence: Synthetic oligonucleotide
  Sense strand starting at position 2036 of SEQ ID NO: 586109
acugaaauccugcgaaauu

SEQ ID NO: 692697 - RNA, 19 nt, Artificial Sequence
  Description of Artificial Sequence: Synthetic oligonucleotide
  Antisense strand to SEQ ID NO: 692696
aauuucgcaggauuucagu

SEQ ID NO: 692698 - RNA, 19 nt, Artificial Sequence
  Description of Artificial Sequence: Synthetic oligonucleotide
  Sense strand starting at position 2180 of SEQ ID NO: 586109
agaaucgacguccaagaau

SEQ ID NO: 692699 - RNA, 19 nt, Artificial Sequence
  Description of Artificial Sequence: Synthetic oligonucleotide
  Antisense strand to SEQ ID NO: 692698
auucuuggacgucgauucu

SEQ ID NO: 692700 - RNA, 19 nt, Artificial Sequence
  Description of Artificial Sequence: Synthetic oligonucleotide
  Sense strand starting at position 2270 of SEQ ID NO: 586109
cucggcaauucuucccuaa

SEQ ID NO: 692701 - RNA, 19 nt, Artificial Sequence
  Description of Artificial Sequence: Synthetic oligonucleotide
  Antisense strand to SEQ ID NO: 692700
uuagggaagaauugccgag

SEQ ID NO: 692702 - RNA, 19 nt, Artificial Sequence
  Description of Artificial Sequence: Synthetic oligonucleotide
  Sense strand starting at position 2273 of SEQ ID NO: 586109
ggcaauucuucccuaagcu

SEQ ID NO: 692703 - RNA, 19 nt, Artificial Sequence
  Description of Artificial Sequence: Synthetic oligonucleotide
  Antisense strand to SEQ ID NO: 692702
agcuuagggaagaauugcc

SEQ ID NO: 692704 - RNA, 19 nt, Artificial Sequence
  Description of Artificial Sequence: Synthetic oligonucleotide
  Sense strand starting at position 2395 of SEQ ID NO: 586109
gggauuccuccuggguacu

SEQ ID NO: 692705 - RNA, 19 nt, Artificial Sequence
  Description of Artificial Sequence: Synthetic oligonucleotide
  Antisense strand to SEQ ID NO: 692704
aguacccaggaggaauccc

SEQ ID NO: 692706 - RNA, 19 nt, Artificial Sequence
  Description of Artificial Sequence: Synthetic oligonucleotide
  Sense strand starting at position 2525 of SEQ ID NO: 586109
cuuaacgauuagcuggaua

SEQ ID NO: 692707 - RNA, 19 nt, Artificial Sequence
  Description of Artificial Sequence: Synthetic oligonucleotide
  Antisense strand to SEQ ID NO: 692706
uauccagcuaaucguuaag

SEQ ID NO: 692708 - RNA, 19 nt, Artificial Sequence
  Description of Artificial Sequence: Synthetic oligonucleotide
  Sense strand starting at position 2564 of SEQ ID NO: 586109
uuucuucuagcaggacaau

SEQ ID NO: 692709 - RNA, 19 nt, Artificial Sequence
  Description of Artificial Sequence: Synthetic oligonucleotide
  Antisense strand to SEQ ID NO: 692708
auuguccugcuagaagaaa

SEQ ID NO: 692710 - RNA, 19 nt, Artificial Sequence
  Description of Artificial Sequence: Synthetic oligonucleotide
  Sense strand starting at position 2565 of SEQ ID NO: 586109
uucuucuagcaggacaauu

SEQ ID NO: 692711 - RNA, 19 nt, Artificial Sequence
  Description of Artificial Sequence: Synthetic oligonucleotide
  Antisense strand to SEQ ID NO: 692710
aauuguccugcuagaagaa

SEQ ID NO: 692712 - RNA, 19 nt, Artificial Sequence
  Description of Artificial Sequence: Synthetic oligonucleotide
  Sense strand starting at position 2671 of SEQ ID NO: 586109
ugugcuggugcuucaagua

SEQ ID NO: 692713 - RNA, 19 nt, Artificial Sequence
  Description of Artificial Sequence: Synthetic oligonucleotide
  Antisense strand to SEQ ID NO: 692712
uacuugaagcaccagcaca

SEQ ID NO: 692714 - RNA, 19 nt, Artificial Sequence
  Description of Artificial Sequence: Synthetic oligonucleotide
  Sense strand starting at position 2742 of SEQ ID NO: 586109
cagugaggaucucucauga

SEQ ID NO: 692715 - RNA, 19 nt, Artificial Sequence
  Description of Artificial Sequence: Synthetic oligonucleotide
  Antisense strand to SEQ ID NO: 692714
ucaugagagauccucacug

SEQ ID NO: 692716 - RNA, 19 nt, Artificial Sequence
  Description of Artificial Sequence: Synthetic oligonucleotide
  Sense strand starting at position 2786 of SEQ ID NO: 586109
aggaguagccacugcaaga

SEQ ID NO: 692717 - RNA, 19 nt, Artificial Sequence
  Description of Artificial Sequence: Synthetic oligonucleotide
  Antisense strand to SEQ ID NO: 692716
ucuugcaguggcuacuccu

SEQ ID NO: 692718 - RNA, 19 nt, Artificial Sequence
  Description of Artificial Sequence: Synthetic oligonucleotide
  Sense strand starting at position 3015 of SEQ ID NO: 586109
uguuguuauacggaacaaa

SEQ ID NO: 692719 - RNA, 19 nt, Artificial Sequence
  Description of Artificial Sequence: Synthetic oligonucleotide
  Antisense strand to SEQ ID NO: 692718
uuuguuccguauaacaaca

SEQ ID NO: 692720 - RNA, 19 nt, Artificial Sequence
  Description of Artificial Sequence: Synthetic oligonucleotide
  Sense strand starting at position 3033 of SEQ ID NO: 586109
agguuagaauuugaggcau

SEQ ID NO: 692721 - RNA, 19 nt, Artificial Sequence
  Description of Artificial Sequence: Synthetic oligonucleotide
  Antisense strand to SEQ ID NO: 692720
augccucaaauucuaaccu

SEQ ID NO: 692722 - RNA, 19 nt, Artificial Sequence
  Description of Artificial Sequence: Synthetic oligonucleotide
  Sense strand starting at position 3035 of SEQ ID NO: 586109
guuagaauuugaggcauuu

SEQ ID NO: 692723 - RNA, 19 nt, Artificial Sequence
  Description of Artificial Sequence: Synthetic oligonucleotide
  Antisense strand to SEQ ID NO: 692722
aaaugccucaaauucuaac

SEQ ID NO: 692724 - RNA, 19 nt, Artificial Sequence
  Description of Artificial Sequence: Synthetic oligonucleotide
  Sense strand starting at position 3112 of SEQ ID NO: 586109
gggccaaaguugucacaug

SEQ ID NO: 692725 - RNA, 19 nt, Artificial Sequence
  Description of Artificial Sequence: Synthetic oligonucleotide
  Antisense strand to SEQ ID NO: 692724
caugugacaacuuuggccc

SEQ ID NO: 692726 - RNA, 19 nt, Artificial Sequence
  Description of Artificial Sequence: Synthetic oligonucleotide
  Sense strand starting at position 3149 of SEQ ID NO: 586109
ucaacuuaauaguugcaga

SEQ ID NO: 692727 - RNA, 19 nt, Artificial Sequence
  Description of Artificial Sequence: Synthetic oligonucleotide
  Antisense strand to SEQ ID NO: 692726
ucugcaacuauuaaguuga

SEQ ID NO: 692728 - RNA, 19 nt, Artificial Sequence
  Description of Artificial Sequence: Synthetic oligonucleotide
  Sense strand starting at position 3154 of SEQ ID NO: 586109
uuaauaguugcagaugaug

SEQ ID NO: 692729 - RNA, 19 nt, Artificial Sequence
  Description of Artificial Sequence: Synthetic oligonucleotide
  Antisense strand to SEQ ID NO: 692728
caucaucugcaacuauuaa

SEQ ID NO: 692730 - RNA, 19 nt, Artificial Sequence
  Description of Artificial Sequence: Synthetic oligonucleotide
  Sense strand starting at position 3168 of SEQ ID NO: 586109
ugaugacaccucuaggcuu

SEQ ID NO: 692731 - RNA, 19 nt, Artificial Sequence
  Description of Artificial Sequence: Synthetic oligonucleotide
  Antisense strand to SEQ ID NO: 692730
aagccuagaggugucauca

SEQ ID NO: 692732 - RNA, 19 nt, Artificial Sequence
  Description of Artificial Sequence: Synthetic oligonucleotide
  Sense strand starting at position 3176 of SEQ ID NO: 586109
ccucuaggcuuugucuaga

SEQ ID NO: 692733 - RNA, 19 nt, Artificial Sequence
  Description of Artificial Sequence: Synthetic oligonucleotide
  Antisense strand to SEQ ID NO: 692732
ucuagacaaagccuagagg

SEQ ID NO: 692734 - RNA, 19 nt, Artificial Sequence
  Description of Artificial Sequence: Synthetic oligonucleotide
  Sense strand starting at position 3179 of SEQ ID NO: 586109
cuaggcuuugucuagagua

SEQ ID NO: 692735 - RNA, 19 nt, Artificial Sequence
  Description of Artificial Sequence: Synthetic oligonucleotide
  Antisense strand to SEQ ID NO: 692734
uacucuagacaaagccuag

SEQ ID NO: 692736 - RNA, 19 nt, Artificial Sequence
  Description of Artificial Sequence: Synthetic oligonucleotide
  Sense strand starting at position 3489 of SEQ ID NO: 586109
cucugucacugacuugaga

SEQ ID NO: 692737 - RNA, 19 nt, Artificial Sequence
  Description of Artificial Sequence: Synthetic oligonucleotide
  Antisense strand to SEQ ID NO: 692736
ucucaagucagugacagag

SEQ ID NO: 692738 - RNA, 19 nt, Artificial Sequence
  Description of Artificial Sequence: Synthetic oligonucleotide
  Sense strand starting at position 3552 of SEQ ID NO: 586109
ggagcaaagucugcaagau

SEQ ID NO: 692739 - RNA, 19 nt, Artificial Sequence
  Description of Artificial Sequence: Synthetic oligonucleotide
  Antisense strand to SEQ ID NO: 692738
aucuugcagacuuugcucc

SEQ ID NO: 692740 - RNA, 19 nt, Artificial Sequence
  Description of Artificial Sequence: Synthetic oligonucleotide
  Sense strand starting at position 3553 of SEQ ID NO: 586109
gagcaaagucugcaagauu

SEQ ID NO: 692741 - RNA, 19 nt, Artificial Sequence
  Description of Artificial Sequence: Synthetic oligonucleotide
  Antisense strand to SEQ ID NO: 692740
aaucuugcagacuuugcuc

SEQ ID NO: 692742 - RNA, 19 nt, Artificial Sequence
  Description of Artificial Sequence: Synthetic oligonucleotide
  Sense strand starting at position 3581 of SEQ ID NO: 586109
aaguguuaagauugaagug

SEQ ID NO: 692743 - RNA, 19 nt, Artificial Sequence
  Description of Artificial Sequence: Synthetic oligonucleotide
  Antisense strand to SEQ ID NO: 692742
cacuucaaucuuaacacuu

SEQ ID NO: 692744 - RNA, 19 nt, Artificial Sequence
  Description of Artificial Sequence: Synthetic oligonucleotide
  Sense strand starting at position 3582 of SEQ ID NO: 586109
aguguuaagauugaaguga

SEQ ID NO: 692745 - RNA, 19 nt, Artificial Sequence
  Description of Artificial Sequence: Synthetic oligonucleotide
  Antisense strand to SEQ ID NO: 692744
ucacuucaaucuuaacacu

SEQ ID NO: 692746 - RNA, 19 nt, Artificial Sequence
  Description of Artificial Sequence: Synthetic oligonucleotide
  Sense strand starting at position 3712 of SEQ ID NO: 586109
aaaguuaaucugggugcaa

SEQ ID NO: 692747 - RNA, 19 nt, Artificial Sequence
  Description of Artificial Sequence: Synthetic oligonucleotide
  Antisense strand to SEQ ID NO: 692746
uugcacccagauuaacuuu

SEQ ID NO: 692748 - RNA, 19 nt, Artificial Sequence
  Description of Artificial Sequence: Synthetic oligonucleotide
  Sense strand starting at position 3713 of SEQ ID NO: 586109
aaguuaaucugggugcaaa

SEQ ID NO: 692749 - RNA, 19 nt, Artificial Sequence
  Description of Artificial Sequence: Synthetic oligonucleotide
  Antisense strand to SEQ ID NO: 692748
uuugcacccagauuaacuu

SEQ ID NO: 692750 - RNA, 19 nt, Artificial Sequence
  Description of Artificial Sequence: Synthetic oligonucleotide
  Sense strand starting at position 3714 of SEQ ID NO: 586109
aguuaaucugggugcaaag

SEQ ID NO: 692751 - RNA, 19 nt, Artificial Sequence
  Description of Artificial Sequence: Synthetic oligonucleotide
  Antisense strand to SEQ ID NO: 692750
cuuugcacccagauuaacu

SEQ ID NO: 692752 - RNA, 19 nt, Artificial Sequence
  Description of Artificial Sequence: Synthetic oligonucleotide
  Sense strand starting at position 3716 of SEQ ID NO: 586109
uuaaucugggugcaaaguu

SEQ ID NO: 692753 - RNA, 19 nt, Artificial Sequence
  Description of Artificial Sequence: Synthetic oligonucleotide
  Antisense strand to SEQ ID NO: 692752
aacuuugcacccagauuaa

SEQ ID NO: 692754 - RNA, 19 nt, Artificial Sequence
  Description of Artificial Sequence: Synthetic oligonucleotide
  Sense strand starting at position 3723 of SEQ ID NO: 586109
gggugcaaaguuuacaaau

SEQ ID NO: 692755 - RNA, 19 nt, Artificial Sequence
  Description of Artificial Sequence: Synthetic oligonucleotide
  Antisense strand to SEQ ID NO: 692754
auuuguaaacuuugcaccc

SEQ ID NO: 692756 - RNA, 19 nt, Artificial Sequence
  Description of Artificial Sequence: Synthetic oligonucleotide
  Sense strand starting at position 3940 of SEQ ID NO: 586109
gcugaaagugaugguacau

SEQ ID NO: 692757 - RNA, 19 nt, Artificial Sequence
  Description of Artificial Sequence: Synthetic oligonucleotide
  Antisense strand to SEQ ID NO: 692756
auguaccaucacuuucagc

SEQ ID NO: 692758 - RNA, 19 nt, Artificial Sequence
  Description of Artificial Sequence: Synthetic oligonucleotide
  Sense strand starting at position 3949 of SEQ ID NO: 586109
gaugguacauaucuuuagu

SEQ ID NO: 692759 - RNA, 19 nt, Artificial Sequence
  Description of Artificial Sequence: Synthetic oligonucleotide
  Antisense strand to SEQ ID NO: 692758
acuaaagauauguaccauc

SEQ ID NO: 692760 - RNA, 19 nt, Artificial Sequence
  Description of Artificial Sequence: Synthetic oligonucleotide
  Sense strand starting at position 122 of SEQ ID NO: 586110
acacaaguccagugaugug

SEQ ID NO: 692761 - RNA, 19 nt, Artificial Sequence
  Description of Artificial Sequence: Synthetic oligonucleotide
  Antisense strand to SEQ ID NO: 692760
cacaucacuggacuugugu

SEQ ID NO: 692762 - RNA, 19 nt, Artificial Sequence
  Description of Artificial Sequence: Synthetic oligonucleotide
  Sense strand starting at position 131 of SEQ ID NO: 586110
cagugaugugucuaucccu

SEQ ID NO: 692763 - RNA, 19 nt, Artificial Sequence
  Description of Artificial Sequence: Synthetic oligonucleotide
  Antisense strand to SEQ ID NO: 692762
agggauagacacaucacug

SEQ ID NO: 692764 - RNA, 19 nt, Artificial Sequence
  Description of Artificial Sequence: Synthetic oligonucleotide
  Sense strand starting at position 197 of SEQ ID NO: 586110
ggcaucacagucuaaggau

SEQ ID NO: 692765 - RNA, 19 nt, Artificial Sequence
  Description of Artificial Sequence: Synthetic oligonucleotide
  Antisense strand to SEQ ID NO: 692764
auccuuagacugugaugcc

SEQ ID NO: 692766 - RNA, 19 nt, Artificial Sequence
  Description of Artificial Sequence: Synthetic oligonucleotide
  Sense strand starting at position 389 of SEQ ID NO: 586110
ccauuugagucauaccauc

SEQ ID NO: 692767 - RNA, 19 nt, Artificial Sequence
  Description of Artificial Sequence: Synthetic oligonucleotide
  Antisense strand to SEQ ID NO: 692766
gaugguaugacucaaaugg

SEQ ID NO: 692768 - RNA, 19 nt, Artificial Sequence
  Description of Artificial Sequence: Synthetic oligonucleotide
  Sense strand starting at position 740 of SEQ ID NO: 586110
cagggacuagacuguguuu

SEQ ID NO: 692769 - RNA, 19 nt, Artificial Sequence
  Description of Artificial Sequence: Synthetic oligonucleotide
  Antisense strand to SEQ ID NO: 692768
aaacacagucuagucccug

SEQ ID NO: 692770 - RNA, 19 nt, Artificial Sequence
  Description of Artificial Sequence: Synthetic oligonucleotide
  Sense strand starting at position 742 of SEQ ID NO: 586110
gggacuagacuguguuuga

SEQ ID NO: 692771 - RNA, 19 nt, Artificial Sequence
  Description of Artificial Sequence: Synthetic oligonucleotide
  Antisense strand to SEQ ID NO: 692770
ucaaacacagucuaguccc

SEQ ID NO: 692772 - RNA, 19 nt, Artificial Sequence
  Description of Artificial Sequence: Synthetic oligonucleotide
  Sense strand starting at position 743 of SEQ ID NO: 586110
ggacuagacuguguuugac

SEQ ID NO: 692773 - RNA, 19 nt, Artificial Sequence
  Description of Artificial Sequence: Synthetic oligonucleotide
  Antisense strand to SEQ ID NO: 692772
gucaaacacagucuagucc

SEQ ID NO: 692774 - RNA, 19 nt, Artificial Sequence
  Description of Artificial Sequence: Synthetic oligonucleotide
  Sense strand starting at position 752 of SEQ ID NO: 586110
uguguuugaccuuggcaaa

SEQ ID NO: 692775 - RNA, 19 nt, Artificial Sequence
  Description of Artificial Sequence: Synthetic oligonucleotide
  Antisense strand to SEQ ID NO: 692774
uuugccaaggucaaacaca

SEQ ID NO: 692776 - RNA, 19 nt, Artificial Sequence
  Description of Artificial Sequence: Synthetic oligonucleotide
  Sense strand starting at position 753 of SEQ ID NO: 586110
guguuugaccuuggcaaac

SEQ ID NO: 692777 - RNA, 19 nt, Artificial Sequence
  Description of Artificial Sequence: Synthetic oligonucleotide
  Antisense strand to SEQ ID NO: 692776
guuugccaaggucaaacac

SEQ ID NO: 692778 - RNA, 19 nt, Artificial Sequence
  Description of Artificial Sequence: Synthetic oligonucleotide
  Sense strand starting at position 1126 of SEQ ID NO: 586110
ggcgcuucguggauuguaa

SEQ ID NO: 692779 - RNA, 19 nt, Artificial Sequence
  Description of Artificial Sequence: Synthetic oligonucleotide
  Antisense strand to SEQ ID NO: 692778
uuacaauccacgaagcgcc

SEQ ID NO: 692780 - RNA, 19 nt, Artificial Sequence
  Description of Artificial Sequence: Synthetic oligonucleotide
  Sense strand starting at position 1133 of SEQ ID NO: 586110
cguggauuguaacucugaa

SEQ ID NO: 692781 - RNA, 19 nt, Artificial Sequence
  Description of Artificial Sequence: Synthetic oligonucleotide
  Antisense strand to SEQ ID NO: 692780
uucagaguuacaauccacg

SEQ ID NO: 692782 - RNA, 19 nt, Artificial Sequence
  Description of Artificial Sequence: Synthetic oligonucleotide
  Sense strand starting at position 1137 of SEQ ID NO: 586110
gauuguaacucugaagaga

SEQ ID NO: 692783 - RNA, 19 nt, Artificial Sequence
  Description of Artificial Sequence: Synthetic oligonucleotide
  Antisense strand to SEQ ID NO: 692782
ucucuucagaguuacaauc

SEQ ID NO: 692784 - RNA, 19 nt, Artificial Sequence
  Description of Artificial Sequence: Synthetic oligonucleotide
  Sense strand starting at position 1302 of SEQ ID NO: 586110
aaguguguccgagaccaga

SEQ ID NO: 692785 - RNA, 19 nt, Artificial Sequence
  Description of Artificial Sequence: Synthetic oligonucleotide
  Antisense strand to SEQ ID NO: 692784
ucuggucucggacacacuu

SEQ ID NO: 692786 - RNA, 19 nt, Artificial Sequence
  Description of Artificial Sequence: Synthetic oligonucleotide
  Sense strand starting at position 2323 of SEQ ID NO: 586110
gcgugaccucgaguaccuu

SEQ ID NO: 692787 - RNA, 19 nt, Artificial Sequence
  Description of Artificial Sequence: Synthetic oligonucleotide
  Antisense strand to SEQ ID NO: 692786
aagguacucgaggucacgc

SEQ ID NO: 692788 - RNA, 19 nt, Artificial Sequence
  Description of Artificial Sequence: Synthetic oligonucleotide
  Sense strand starting at position 2422 of SEQ ID NO: 586110
acugaaauccugcgaaauu

SEQ ID NO: 692789 - RNA, 19 nt, Artificial Sequence
  Description of Artificial Sequence: Synthetic oligonucleotide
  Antisense strand to SEQ ID NO: 692788
aauuucgcaggauuucagu

SEQ ID NO: 692790 - RNA, 19 nt, Artificial Sequence
  Description of Artificial Sequence: Synthetic oligonucleotide
  Sense strand starting at position 2566 of SEQ ID NO: 586110
agaaucgacguccaagaau

SEQ ID NO: 692791 - RNA, 19 nt, Artificial Sequence
  Description of Artificial Sequence: Synthetic oligonucleotide
  Antisense strand to SEQ ID NO: 692790
auucuuggacgucgauucu

SEQ ID NO: 692792 - RNA, 19 nt, Artificial Sequence
  Description of Artificial Sequence: Synthetic oligonucleotide
  Sense strand starting at position 2656 of SEQ ID NO: 586110
cucggcaauucuucccuaa

SEQ ID NO: 692793 - RNA, 19 nt, Artificial Sequence
  Description of Artificial Sequence: Synthetic oligonucleotide
  Antisense strand to SEQ ID NO: 692792
uuagggaagaauugccgag

SEQ ID NO: 692794 - RNA, 19 nt, Artificial Sequence
  Description of Artificial Sequence: Synthetic oligonucleotide
  Sense strand starting at position 2659 of SEQ ID NO: 586110
ggcaauucuucccuaagcu

SEQ ID NO: 692795 - RNA, 19 nt, Artificial Sequence
  Description of Artificial Sequence: Synthetic oligonucleotide
  Antisense strand to SEQ ID NO: 692794
agcuuagggaagaauugcc

SEQ ID NO: 692796 - RNA, 19 nt, Artificial Sequence
  Description of Artificial Sequence: Synthetic oligonucleotide
  Sense strand starting at position 2781 of SEQ ID NO: 586110
gggauuccuccuggguacu

SEQ ID NO: 692797 - RNA, 19 nt, Artificial Sequence
  Description of Artificial Sequence: Synthetic oligonucleotide
  Antisense strand to SEQ ID NO: 692796
aguacccaggaggaauccc

SEQ ID NO: 692798 - RNA, 19 nt, Artificial Sequence
  Description of Artificial Sequence: Synthetic oligonucleotide
  Sense strand starting at position 2828 of SEQ ID NO: 586110
ugcugugucccgggaagaa

SEQ ID NO: 692799 - RNA, 19 nt, Artificial Sequence
  Description of Artificial Sequence: Synthetic oligonucleotide
  Antisense strand to SEQ ID NO: 692798
uucuucccgggacacagca

SEQ ID NO: 692800 - RNA, 19 nt, Artificial Sequence
  Description of Artificial Sequence: Synthetic oligonucleotide
  Sense strand starting at position 2911 of SEQ ID NO: 586110
cuuaacgauuagcuggaua

SEQ ID NO: 692801 - RNA, 19 nt, Artificial Sequence
  Description of Artificial Sequence: Synthetic oligonucleotide
  Antisense strand to SEQ ID NO: 692800
uauccagcuaaucguuaag

SEQ ID NO: 692802 - RNA, 19 nt, Artificial Sequence
  Description of Artificial Sequence: Synthetic oligonucleotide
  Sense strand starting at position 2950 of SEQ ID NO: 586110
uuucuucuagcaggacaau

SEQ ID NO: 692803 - RNA, 19 nt, Artificial Sequence
  Description of Artificial Sequence: Synthetic oligonucleotide
  Antisense strand to SEQ ID NO: 692802
auuguccugcuagaagaaa

SEQ ID NO: 692804 - RNA, 19 nt, Artificial Sequence
  Description of Artificial Sequence: Synthetic oligonucleotide
  Sense strand starting at position 2951 of SEQ ID NO: 586110
uucuucuagcaggacaauu

SEQ ID NO: 692805 - RNA, 19 nt, Artificial Sequence
  Description of Artificial Sequence: Synthetic oligonucleotide
  Antisense strand to SEQ ID NO: 692804
aauuguccugcuagaagaa

SEQ ID NO: 692806 - RNA, 19 nt, Artificial Sequence
  Description of Artificial Sequence: Synthetic oligonucleotide
  Sense strand starting at position 3057 of SEQ ID NO: 586110
ugugcuggugcuucaagua

SEQ ID NO: 692807 - RNA, 19 nt, Artificial Sequence
  Description of Artificial Sequence: Synthetic oligonucleotide
  Antisense strand to SEQ ID NO: 692806
uacuugaagcaccagcaca

SEQ ID NO: 692808 - RNA, 19 nt, Artificial Sequence
  Description of Artificial Sequence: Synthetic oligonucleotide
  Sense strand starting at position 3128 of SEQ ID NO: 586110
cagugaggaucucucauga

SEQ ID NO: 692809 - RNA, 19 nt, Artificial Sequence
  Description of Artificial Sequence: Synthetic oligonucleotide
  Antisense strand to SEQ ID NO: 692808
ucaugagagauccucacug

SEQ ID NO: 692810 - RNA, 19 nt, Artificial Sequence
  Description of Artificial Sequence: Synthetic oligonucleotide
  Sense strand starting at position 3172 of SEQ ID NO: 586110
aggaguagccacugcaaga

SEQ ID NO: 692811 - RNA, 19 nt, Artificial Sequence
  Description of Artificial Sequence: Synthetic oligonucleotide
  Antisense strand to SEQ ID NO: 692810
ucuugcaguggcuacuccu

SEQ ID NO: 692812 - RNA, 19 nt, Artificial Sequence
  Description of Artificial Sequence: Synthetic oligonucleotide
  Sense strand starting at position 3401 of SEQ ID NO: 586110
uguuguuauacggaacaaa

SEQ ID NO: 692813 - RNA, 19 nt, Artificial Sequence
  Description of Artificial Sequence: Synthetic oligonucleotide
  Antisense strand to SEQ ID NO: 692812
uuuguuccguauaacaaca

SEQ ID NO: 692814 - RNA, 19 nt, Artificial Sequence
  Description of Artificial Sequence: Synthetic oligonucleotide
  Sense strand starting at position 3419 of SEQ ID NO: 586110
agguuagaauuugaggcau

SEQ ID NO: 692815 - RNA, 19 nt, Artificial Sequence
  Description of Artificial Sequence: Synthetic oligonucleotide
  Antisense strand to SEQ ID NO: 692814
augccucaaauucuaaccu

SEQ ID NO: 692816 - RNA, 19 nt, Artificial Sequence
  Description of Artificial Sequence: Synthetic oligonucleotide
  Sense strand starting at position 3421 of SEQ ID NO: 586110
guuagaauuugaggcauuu

SEQ ID NO: 692817 - RNA, 19 nt, Artificial Sequence
  Description of Artificial Sequence: Synthetic oligonucleotide
  Antisense strand to SEQ ID NO: 692816
aaaugccucaaauucuaac

SEQ ID NO: 692818 - RNA, 19 nt, Artificial Sequence
  Description of Artificial Sequence: Synthetic oligonucleotide
  Sense strand starting at position 3498 of SEQ ID NO: 586110
gggccaaaguugucacaug

SEQ ID NO: 692819 - RNA, 19 nt, Artificial Sequence
  Description of Artificial Sequence: Synthetic oligonucleotide
  Antisense strand to SEQ ID NO: 692818
caugugacaacuuuggccc

SEQ ID NO: 692820 - RNA, 19 nt, Artificial Sequence
  Description of Artificial Sequence: Synthetic oligonucleotide
  Sense strand starting at position 3535 of SEQ ID NO: 586110
ucaacuuaauaguugcaga

SEQ ID NO: 692821 - RNA, 19 nt, Artificial Sequence
  Description of Artificial Sequence: Synthetic oligonucleotide
  Antisense strand to SEQ ID NO: 692820
ucugcaacuauuaaguuga

SEQ ID NO: 692822 - RNA, 19 nt, Artificial Sequence
  Description of Artificial Sequence: Synthetic oligonucleotide
  Sense strand starting at position 3540 of SEQ ID NO: 586110
uuaauaguugcagaugaug

SEQ ID NO: 692823 - RNA, 19 nt, Artificial Sequence
  Description of Artificial Sequence: Synthetic oligonucleotide
  Antisense strand to SEQ ID NO: 692822
caucaucugcaacuauuaa

SEQ ID NO: 692824 - RNA, 19 nt, Artificial Sequence
  Description of Artificial Sequence: Synthetic oligonucleotide
  Sense strand starting at position 3554 of SEQ ID NO: 586110
ugaugacaccucuaggcuu

SEQ ID NO: 692825 - RNA, 19 nt, Artificial Sequence
  Description of Artificial Sequence: Synthetic oligonucleotide
  Antisense strand to SEQ ID NO: 692824
aagccuagaggugucauca

SEQ ID NO: 692826 - RNA, 19 nt, Artificial Sequence
  Description of Artificial Sequence: Synthetic oligonucleotide
  Sense strand starting at position 3562 of SEQ ID NO: 586110
ccucuaggcuuugucuaga

SEQ ID NO: 692827 - RNA, 19 nt, Artificial Sequence
  Description of Artificial Sequence: Synthetic oligonucleotide
  Antisense strand to SEQ ID NO: 692826
ucuagacaaagccuagagg

SEQ ID NO: 692828 - RNA, 19 nt, Artificial Sequence
  Description of Artificial Sequence: Synthetic oligonucleotide
  Sense strand starting at position 3565 of SEQ ID NO: 586110
cuaggcuuugucuagagua

SEQ ID NO: 692829 - RNA, 19 nt, Artificial Sequence
  Description of Artificial Sequence: Synthetic oligonucleotide
  Antisense strand to SEQ ID NO: 692828
uacucuagacaaagccuag

SEQ ID NO: 692830 - RNA, 19 nt, Artificial Sequence
  Description of Artificial Sequence: Synthetic oligonucleotide
  Sense strand starting at position 3875 of SEQ ID NO: 586110
cucugucacugacuugaga

SEQ ID NO: 692831 - RNA, 19 nt, Artificial Sequence
  Description of Artificial Sequence: Synthetic oligonucleotide
  Antisense strand to SEQ ID NO: 692830
ucucaagucagugacagag

SEQ ID NO: 692832 - RNA, 19 nt, Artificial Sequence
  Description of Artificial Sequence: Synthetic oligonucleotide
  Sense strand starting at position 3938 of SEQ ID NO: 586110
ggagcaaagucugcaagau

SEQ ID NO: 692833 - RNA, 19 nt, Artificial Sequence
  Description of Artificial Sequence: Synthetic oligonucleotide
  Antisense strand to SEQ ID NO: 692832
aucuugcagacuuugcucc

SEQ ID NO: 692834 - RNA, 19 nt, Artificial Sequence
  Description of Artificial Sequence: Synthetic oligonucleotide
  Sense strand starting at position 3939 of SEQ ID NO: 586110
gagcaaagucugcaagauu

SEQ ID NO: 692835 - RNA, 19 nt, Artificial Sequence
  Description of Artificial Sequence: Synthetic oligonucleotide
  Antisense strand to SEQ ID NO: 692834
aaucuugcagacuuugcuc

SEQ ID NO: 692836 - RNA, 19 nt, Artificial Sequence
  Description of Artificial Sequence: Synthetic oligonucleotide
  Sense strand starting at position 3967 of SEQ ID NO: 586110
aaguguuaagauugaagug

SEQ ID NO: 692837 - RNA, 19 nt, Artificial Sequence
  Description of Artificial Sequence: Synthetic oligonucleotide
  Antisense strand to SEQ ID NO: 692836
cacuucaaucuuaacacuu

SEQ ID NO: 692838 - RNA, 19 nt, Artificial Sequence
  Description of Artificial Sequence: Synthetic oligonucleotide
  Sense strand starting at position 3968 of SEQ ID NO: 586110
aguguuaagauugaaguga

SEQ ID NO: 692839 - RNA, 19 nt, Artificial Sequence
  Description of Artificial Sequence: Synthetic oligonucleotide
  Antisense strand to SEQ ID NO: 692838
ucacuucaaucuuaacacu

SEQ ID NO: 692840 - RNA, 19 nt, Artificial Sequence
  Description of Artificial Sequence: Synthetic oligonucleotide
  Sense strand starting at position 11 of SEQ ID NO: 586111
gucccaaaguguuucucca

SEQ ID NO: 692841 - RNA, 19 nt, Artificial Sequence
  Description of Artificial Sequence: Synthetic oligonucleotide
  Antisense strand to SEQ ID NO: 692840
uggagaaacacuuugggac

SEQ ID NO: 692842 - RNA, 19 nt, Artificial Sequence
  Description of Artificial Sequence: Synthetic oligonucleotide
  Sense strand starting at position 13 of SEQ ID NO: 586111
cccaaaguguuucuccaau

SEQ ID NO: 692843 - RNA, 19 nt, Artificial Sequence
  Description of Artificial Sequence: Synthetic oligonucleotide
  Antisense strand to SEQ ID NO: 692842
auuggagaaacacuuuggg

SEQ ID NO: 692844 - RNA, 19 nt, Artificial Sequence
  Description of Artificial Sequence: Synthetic oligonucleotide
  Sense strand starting at position 87 of SEQ ID NO: 586111
uuagaucagucccgagagu

SEQ ID NO: 692845 - RNA, 19 nt, Artificial Sequence
  Description of Artificial Sequence: Synthetic oligonucleotide
  Antisense strand to SEQ ID NO: 692844
acucucgggacugaucuaa

SEQ ID NO: 692846 - RNA, 19 nt, Artificial Sequence
  Description of Artificial Sequence: Synthetic oligonucleotide
  Sense strand starting at position 268 of SEQ ID NO: 586111
cacacuuguugauggauca

SEQ ID NO: 692847 - RNA, 19 nt, Artificial Sequence
  Description of Artificial Sequence: Synthetic oligonucleotide
  Antisense strand to SEQ ID NO: 692846
ugauccaucaacaagugug

SEQ ID NO: 692848 - RNA, 19 nt, Artificial Sequence
  Description of Artificial Sequence: Synthetic oligonucleotide
  Sense strand starting at position 275 of SEQ ID NO: 586111
guugauggaucaguuggaa

SEQ ID NO: 692849 - RNA, 19 nt, Artificial Sequence
  Description of Artificial Sequence: Synthetic oligonucleotide
  Antisense strand to SEQ ID NO: 692848
uuccaacugauccaucaac

SEQ ID NO: 692850 - RNA, 19 nt, Artificial Sequence
  Description of Artificial Sequence: Synthetic oligonucleotide
  Sense strand starting at position 345 of SEQ ID NO: 586111
gauuucggcuuguguccaa

SEQ ID NO: 692851 - RNA, 19 nt, Artificial Sequence
  Description of Artificial Sequence: Synthetic oligonucleotide
  Antisense strand to SEQ ID NO: 692850
uuggacacaagccgaaauc

SEQ ID NO: 692852 - RNA, 19 nt, Artificial Sequence
  Description of Artificial Sequence: Synthetic oligonucleotide
  Sense strand starting at position 402 of SEQ ID NO: 586111
agcagaacuuagcuuagga

SEQ ID NO: 692853 - RNA, 19 nt, Artificial Sequence
  Description of Artificial Sequence: Synthetic oligonucleotide
  Antisense strand to SEQ ID NO: 692852
uccuaagcuaaguucugcu

SEQ ID NO: 692854 - RNA, 19 nt, Artificial Sequence
  Description of Artificial Sequence: Synthetic oligonucleotide
  Sense strand starting at position 732 of SEQ ID NO: 586111
ggcuuugcgggacauugua

SEQ ID NO: 692855 - RNA, 19 nt, Artificial Sequence
  Description of Artificial Sequence: Synthetic oligonucleotide
  Antisense strand to SEQ ID NO: 692854
uacaaugucccgcaaagcc

SEQ ID NO: 692856 - RNA, 19 nt, Artificial Sequence
  Description of Artificial Sequence: Synthetic oligonucleotide
  Sense strand starting at position 888 of SEQ ID NO: 586111
uccucagcuccacgugaaa

SEQ ID NO: 692857 - RNA, 19 nt, Artificial Sequence
  Description of Artificial Sequence: Synthetic oligonucleotide
  Antisense strand to SEQ ID NO: 692856
uuucacguggagcugagga

SEQ ID NO: 692858 - RNA, 19 nt, Artificial Sequence
  Description of Artificial Sequence: Synthetic oligonucleotide
  Sense strand starting at position 1037 of SEQ ID NO: 586111
aggagcuucugccucuaaa

SEQ ID NO: 692859 - RNA, 19 nt, Artificial Sequence
  Description of Artificial Sequence: Synthetic oligonucleotide
  Antisense strand to SEQ ID NO: 692858
uuuagaggcagaagcuccu

SEQ ID NO: 692860 - RNA, 19 nt, Artificial Sequence
  Description of Artificial Sequence: Synthetic oligonucleotide
  Sense strand starting at position 1212 of SEQ ID NO: 586111
ugaacaaucccggaugugu

SEQ ID NO: 692861 - RNA, 19 nt, Artificial Sequence
  Description of Artificial Sequence: Synthetic oligonucleotide
  Antisense strand to SEQ ID NO: 692860
acacauccgggauuguuca

SEQ ID NO: 692862 - RNA, 19 nt, Artificial Sequence
  Description of Artificial Sequence: Synthetic oligonucleotide
  Sense strand starting at position 1221 of SEQ ID NO: 586111
ccggaugugucaccacaga

SEQ ID NO: 692863 - RNA, 19 nt, Artificial Sequence
  Description of Artificial Sequence: Synthetic oligonucleotide
  Antisense strand to SEQ ID NO: 692862
ucuguggugacacauccgg

SEQ ID NO: 692864 - RNA, 19 nt, Artificial Sequence
  Description of Artificial Sequence: Synthetic oligonucleotide
  Sense strand starting at position 2478 of SEQ ID NO: 586111
cucccuagguccucaagau

SEQ ID NO: 692865 - RNA, 19 nt, Artificial Sequence
  Description of Artificial Sequence: Synthetic oligonucleotide
  Antisense strand to SEQ ID NO: 692864
aucuugaggaccuagggag

SEQ ID NO: 692866 - RNA, 19 nt, Artificial Sequence
  Description of Artificial Sequence: Synthetic oligonucleotide
  Sense strand starting at position 2479 of SEQ ID NO: 586111
ucccuagguccucaagauu

SEQ ID NO: 692867 - RNA, 19 nt, Artificial Sequence
  Description of Artificial Sequence: Synthetic oligonucleotide
  Antisense strand to SEQ ID NO: 692866
aaucuugaggaccuaggga

SEQ ID NO: 692868 - RNA, 19 nt, Artificial Sequence
  Description of Artificial Sequence: Synthetic oligonucleotide
  Sense strand starting at position 2750 of SEQ ID NO: 586111
gccacagcucugugagcuu

SEQ ID NO: 692869 - RNA, 19 nt, Artificial Sequence
  Description of Artificial Sequence: Synthetic oligonucleotide
  Antisense strand to SEQ ID NO: 692868
aagcucacagagcuguggc

SEQ ID NO: 692870 - RNA, 19 nt, Artificial Sequence
  Description of Artificial Sequence: Synthetic oligonucleotide
  Sense strand starting at position 2886 of SEQ ID NO: 586111
aguaguuucucccugguau

SEQ ID NO: 692871 - RNA, 19 nt, Artificial Sequence
  Description of Artificial Sequence: Synthetic oligonucleotide
  Antisense strand to SEQ ID NO: 692870
auaccagggagaaacuacu

SEQ ID NO: 692872 - RNA, 19 nt, Artificial Sequence
  Description of Artificial Sequence: Synthetic oligonucleotide
  Sense strand starting at position 2887 of SEQ ID NO: 586111
guaguuucucccugguauc

SEQ ID NO: 692873 - RNA, 19 nt, Artificial Sequence
  Description of Artificial Sequence: Synthetic oligonucleotide
  Antisense strand to SEQ ID NO: 692872
gauaccagggagaaacuac

SEQ ID NO: 692874 - RNA, 19 nt, Artificial Sequence
  Description of Artificial Sequence: Synthetic oligonucleotide
  Sense strand starting at position 2890 of SEQ ID NO: 586111
guuucucccugguaucauu

SEQ ID NO: 692875 - RNA, 19 nt, Artificial Sequence
  Description of Artificial Sequence: Synthetic oligonucleotide
  Antisense strand to SEQ ID NO: 692874
aaugauaccagggagaaac

SEQ ID NO: 692876 - RNA, 19 nt, Artificial Sequence
  Description of Artificial Sequence: Synthetic oligonucleotide
  Sense strand starting at position 2901 of SEQ ID NO: 586111
guaucauugauucgccgau

SEQ ID NO: 692877 - RNA, 19 nt, Artificial Sequence
  Description of Artificial Sequence: Synthetic oligonucleotide
  Antisense strand to SEQ ID NO: 692876
aucggcgaaucaaugauac

SEQ ID NO: 692878 - RNA, 19 nt, Artificial Sequence
  Description of Artificial Sequence: Synthetic oligonucleotide
  Sense strand starting at position 2907 of SEQ ID NO: 586111
uugauucgccgaugcugaa

SEQ ID NO: 692879 - RNA, 19 nt, Artificial Sequence
  Description of Artificial Sequence: Synthetic oligonucleotide
  Antisense strand to SEQ ID NO: 692878
uucagcaucggcgaaucaa

SEQ ID NO: 692880 - RNA, 19 nt, Artificial Sequence
  Description of Artificial Sequence: Synthetic oligonucleotide
  Sense strand starting at position 2914 of SEQ ID NO: 586111
gccgaugcugaauaaauua

SEQ ID NO: 692881 - RNA, 19 nt, Artificial Sequence
  Description of Artificial Sequence: Synthetic oligonucleotide
  Antisense strand to SEQ ID NO: 692880
uaauuuauucagcaucggc

SEQ ID NO: 692882 - RNA, 19 nt, Artificial Sequence
  Description of Artificial Sequence: Synthetic oligonucleotide
  Sense strand starting at position 2945 of SEQ ID NO: 586111
uuauuacaguccuguccaa

SEQ ID NO: 692883 - RNA, 19 nt, Artificial Sequence
  Description of Artificial Sequence: Synthetic oligonucleotide
  Antisense strand to SEQ ID NO: 692882
uuggacaggacuguaauaa

SEQ ID NO: 692884 - RNA, 19 nt, Artificial Sequence
  Description of Artificial Sequence: Synthetic oligonucleotide
  Sense strand starting at position 2972 of SEQ ID NO: 586111
uagugcaaauggcuuaaua

SEQ ID NO: 692885 - RNA, 19 nt, Artificial Sequence
  Description of Artificial Sequence: Synthetic oligonucleotide
  Antisense strand to SEQ ID NO: 692884
uauuaagccauuugcacua

SEQ ID NO: 692886 - RNA, 19 nt, Artificial Sequence
  Description of Artificial Sequence: Synthetic oligonucleotide
  Sense strand starting at position 2974 of SEQ ID NO: 586111
gugcaaauggcuuaauaag

SEQ ID NO: 692887 - RNA, 19 nt, Artificial Sequence
  Description of Artificial Sequence: Synthetic oligonucleotide
  Antisense strand to SEQ ID NO: 692886
cuuauuaagccauuugcac

SEQ ID NO: 692888 - RNA, 19 nt, Artificial Sequence
  Description of Artificial Sequence: Synthetic oligonucleotide
  Sense strand starting at position 3040 of SEQ ID NO: 586111
aaacuuaacugagaguagu

SEQ ID NO: 692889 - RNA, 19 nt, Artificial Sequence
  Description of Artificial Sequence: Synthetic oligonucleotide
  Antisense strand to SEQ ID NO: 692888
acuacucucaguuaaguuu

SEQ ID NO: 692890 - RNA, 19 nt, Artificial Sequence
  Description of Artificial Sequence: Synthetic oligonucleotide
  Sense strand starting at position 3046 of SEQ ID NO: 586111
aacugagaguaguuaguua

SEQ ID NO: 692891 - RNA, 19 nt, Artificial Sequence
  Description of Artificial Sequence: Synthetic oligonucleotide
  Antisense strand to SEQ ID NO: 692890
uaacuaacuacucucaguu

SEQ ID NO: 692892 - RNA, 19 nt, Artificial Sequence
  Description of Artificial Sequence: Synthetic oligonucleotide
  Sense strand starting at position 3050 of SEQ ID NO: 586111
gagaguaguuaguuaccca

SEQ ID NO: 692893 - RNA, 19 nt, Artificial Sequence
  Description of Artificial Sequence: Synthetic oligonucleotide
  Antisense strand to SEQ ID NO: 692892
uggguaacuaacuacucuc

SEQ ID NO: 692894 - RNA, 19 nt, Artificial Sequence
  Description of Artificial Sequence: Synthetic oligonucleotide
  Sense strand starting at position 3167 of SEQ ID NO: 586111
gcgucagucucugagagcu

SEQ ID NO: 692895 - RNA, 19 nt, Artificial Sequence
  Description of Artificial Sequence: Synthetic oligonucleotide
  Antisense strand to SEQ ID NO: 692894
agcucucagagacugacgc

SEQ ID NO: 692896 - RNA, 19 nt, Artificial Sequence
  Description of Artificial Sequence: Synthetic oligonucleotide
  Sense strand starting at position 3220 of SEQ ID NO: 586111
ucaaguaaauucucgcuca

SEQ ID NO: 692897 - RNA, 19 nt, Artificial Sequence
  Description of Artificial Sequence: Synthetic oligonucleotide
  Antisense strand to SEQ ID NO: 692896
ugagcgagaauuuacuuga

SEQ ID NO: 692898 - RNA, 19 nt, Artificial Sequence
  Description of Artificial Sequence: Synthetic oligonucleotide
  Sense strand starting at position 3221 of SEQ ID NO: 586111
caaguaaauucucgcucag

SEQ ID NO: 692899 - RNA, 19 nt, Artificial Sequence
  Description of Artificial Sequence: Synthetic oligonucleotide
  Antisense strand to SEQ ID NO: 692898
cugagcgagaauuuacuug

SEQ ID NO: 692900 - RNA, 19 nt, Artificial Sequence
  Description of Artificial Sequence: Synthetic oligonucleotide
  Sense strand starting at position 3223 of SEQ ID NO: 586111
aguaaauucucgcucagcu

SEQ ID NO: 692901 - RNA, 19 nt, Artificial Sequence
  Description of Artificial Sequence: Synthetic oligonucleotide
  Antisense strand to SEQ ID NO: 692900
agcugagcgagaauuuacu

SEQ ID NO: 692902 - RNA, 19 nt, Artificial Sequence
  Description of Artificial Sequence: Synthetic oligonucleotide
  Sense strand starting at position 3249 of SEQ ID NO: 586111
ggguccaaguucuagguau

SEQ ID NO: 692903 - RNA, 19 nt, Artificial Sequence
  Description of Artificial Sequence: Synthetic oligonucleotide
  Antisense strand to SEQ ID NO: 692902
auaccuagaacuuggaccc

SEQ ID NO: 692904 - RNA, 19 nt, Artificial Sequence
  Description of Artificial Sequence: Synthetic oligonucleotide
  Sense strand starting at position 3441 of SEQ ID NO: 586111
guccauguuucucuuuacu

SEQ ID NO: 692905 - RNA, 19 nt, Artificial Sequence
  Description of Artificial Sequence: Synthetic oligonucleotide
  Antisense strand to SEQ ID NO: 692904
aguaaagagaaacauggac

SEQ ID NO: 692906 - RNA, 19 nt, Artificial Sequence
  Description of Artificial Sequence: Synthetic oligonucleotide
  Sense strand starting at position 3443 of SEQ ID NO: 586111
ccauguuucucuuuacuga

SEQ ID NO: 692907 - RNA, 19 nt, Artificial Sequence
  Description of Artificial Sequence: Synthetic oligonucleotide
  Antisense strand to SEQ ID NO: 692906
ucaguaaagagaaacaugg

SEQ ID NO: 692908 - RNA, 19 nt, Artificial Sequence
  Description of Artificial Sequence: Synthetic oligonucleotide
  Sense strand starting at position 3490 of SEQ ID NO: 586111
acacacugguagucugauu

SEQ ID NO: 692909 - RNA, 19 nt, Artificial Sequence
  Description of Artificial Sequence: Synthetic oligonucleotide
  Antisense strand to SEQ ID NO: 692908
aaucagacuaccagugugu

SEQ ID NO: 692910 - RNA, 19 nt, Artificial Sequence
  Description of Artificial Sequence: Synthetic oligonucleotide
  Sense strand starting at position 3546 of SEQ ID NO: 586111
ggaggagaauaucagucuu

SEQ ID NO: 692911 - RNA, 19 nt, Artificial Sequence
  Description of Artificial Sequence: Synthetic oligonucleotide
  Antisense strand to SEQ ID NO: 692910
aagacugauauucuccucc

SEQ ID NO: 692912 - RNA, 19 nt, Artificial Sequence
  Description of Artificial Sequence: Synthetic oligonucleotide
  Sense strand starting at position 3548 of SEQ ID NO: 586111
aggagaauaucagucuuau

SEQ ID NO: 692913 - RNA, 19 nt, Artificial Sequence
  Description of Artificial Sequence: Synthetic oligonucleotide
  Antisense strand to SEQ ID NO: 692912
auaagacugauauucuccu

SEQ ID NO: 692914 - RNA, 19 nt, Artificial Sequence
  Description of Artificial Sequence: Synthetic oligonucleotide
  Sense strand starting at position 3709 of SEQ ID NO: 586111
agcugagagccgcuuucuu

SEQ ID NO: 692915 - RNA, 19 nt, Artificial Sequence
  Description of Artificial Sequence: Synthetic oligonucleotide
  Antisense strand to SEQ ID NO: 692914
aagaaagcggcucucagcu

SEQ ID NO: 692916 - RNA, 19 nt, Artificial Sequence
  Description of Artificial Sequence: Synthetic oligonucleotide
  Sense strand starting at position 3826 of SEQ ID NO: 586111
ccaggagucucagagucaa

SEQ ID NO: 692917 - RNA, 19 nt, Artificial Sequence
  Description of Artificial Sequence: Synthetic oligonucleotide
  Antisense strand to SEQ ID NO: 692916
uugacucugagacuccugg

SEQ ID NO: 692918 - RNA, 19 nt, Artificial Sequence
  Description of Artificial Sequence: Synthetic oligonucleotide
  Sense strand starting at position 3901 of SEQ ID NO: 586111
caaggucaucuauggcaga

SEQ ID NO: 692919 - RNA, 19 nt, Artificial Sequence
  Description of Artificial Sequence: Synthetic oligonucleotide
  Antisense strand to SEQ ID NO: 692918
ucugccauagaugaccuug

SEQ ID NO: 692920 - RNA, 19 nt, Artificial Sequence
  Description of Artificial Sequence: Synthetic oligonucleotide
  Sense strand starting at position 35 of SEQ ID NO: 586112
ucucuaaagacugagcgua

SEQ ID NO: 692921 - RNA, 19 nt, Artificial Sequence
  Description of Artificial Sequence: Synthetic oligonucleotide
  Antisense strand to SEQ ID NO: 692920
uacgcucagucuuuagaga

SEQ ID NO: 692922 - RNA, 19 nt, Artificial Sequence
  Description of Artificial Sequence: Synthetic oligonucleotide
  Sense strand starting at position 139 of SEQ ID NO: 586112
uucuguucugggcacagaa

SEQ ID NO: 692923 - RNA, 19 nt, Artificial Sequence
  Description of Artificial Sequence: Synthetic oligonucleotide
  Antisense strand to SEQ ID NO: 692922
uucugugcccagaacagaa

SEQ ID NO: 692924 - RNA, 19 nt, Artificial Sequence
  Description of Artificial Sequence: Synthetic oligonucleotide
  Sense strand starting at position 293 of SEQ ID NO: 586112
agggacacuugguugagua

SEQ ID NO: 692925 - RNA, 19 nt, Artificial Sequence
  Description of Artificial Sequence: Synthetic oligonucleotide
  Antisense strand to SEQ ID NO: 692924
uacucaaccaagugucccu

SEQ ID NO: 692926 - RNA, 19 nt, Artificial Sequence
  Description of Artificial Sequence: Synthetic oligonucleotide
  Sense strand starting at position 294 of SEQ ID NO: 586112
gggacacuugguugaguau

SEQ ID NO: 692927 - RNA, 19 nt, Artificial Sequence
  Description of Artificial Sequence: Synthetic oligonucleotide
  Antisense strand to SEQ ID NO: 692926
auacucaaccaaguguccc

SEQ ID NO: 692928 - RNA, 19 nt, Artificial Sequence
  Description of Artificial Sequence: Synthetic oligonucleotide
  Sense strand starting at position 295 of SEQ ID NO: 586112
ggacacuugguugaguauu

SEQ ID NO: 692929 - RNA, 19 nt, Artificial Sequence
  Description of Artificial Sequence: Synthetic oligonucleotide
  Antisense strand to SEQ ID NO: 692928
aauacucaaccaagugucc

SEQ ID NO: 692930 - RNA, 19 nt, Artificial Sequence
  Description of Artificial Sequence: Synthetic oligonucleotide
  Sense strand starting at position 297 of SEQ ID NO: 586112
acacuugguugaguauuga

SEQ ID NO: 692931 - RNA, 19 nt, Artificial Sequence
  Description of Artificial Sequence: Synthetic oligonucleotide
  Antisense strand to SEQ ID NO: 692930
ucaauacucaaccaagugu

SEQ ID NO: 692932 - RNA, 19 nt, Artificial Sequence
  Description of Artificial Sequence: Synthetic oligonucleotide
  Sense strand starting at position 333 of SEQ ID NO: 586112
guggucuccuuucgagaag

SEQ ID NO: 692933 - RNA, 19 nt, Artificial Sequence
  Description of Artificial Sequence: Synthetic oligonucleotide
  Antisense strand to SEQ ID NO: 692932
cuucucgaaaggagaccac

SEQ ID NO: 692934 - RNA, 19 nt, Artificial Sequence
  Description of Artificial Sequence: Synthetic oligonucleotide
  Sense strand starting at position 334 of SEQ ID NO: 586112
uggucuccuuucgagaagu

SEQ ID NO: 692935 - RNA, 19 nt, Artificial Sequence
  Description of Artificial Sequence: Synthetic oligonucleotide
  Antisense strand to SEQ ID NO: 692934
acuucucgaaaggagacca

SEQ ID NO: 692936 - RNA, 19 nt, Artificial Sequence
  Description of Artificial Sequence: Synthetic oligonucleotide
  Sense strand starting at position 336 of SEQ ID NO: 586112
gucuccuuucgagaaguaa

SEQ ID NO: 692937 - RNA, 19 nt, Artificial Sequence
  Description of Artificial Sequence: Synthetic oligonucleotide
  Antisense strand to SEQ ID NO: 692936
uuacuucucgaaaggagac

SEQ ID NO: 692938 - RNA, 19 nt, Artificial Sequence
  Description of Artificial Sequence: Synthetic oligonucleotide
  Sense strand starting at position 361 of SEQ ID NO: 586112
uggaauugauuggaaggau

SEQ ID NO: 692939 - RNA, 19 nt, Artificial Sequence
  Description of Artificial Sequence: Synthetic oligonucleotide
  Antisense strand to SEQ ID NO: 692938
auccuuccaaucaauucca

SEQ ID NO: 692940 - RNA, 19 nt, Artificial Sequence
  Description of Artificial Sequence: Synthetic oligonucleotide
  Sense strand starting at position 477 of SEQ ID NO: 586112
agggacugguugugaggau

SEQ ID NO: 692941 - RNA, 19 nt, Artificial Sequence
  Description of Artificial Sequence: Synthetic oligonucleotide
  Antisense strand to SEQ ID NO: 692940
auccucacaaccagucccu

SEQ ID NO: 692942 - RNA, 19 nt, Artificial Sequence
  Description of Artificial Sequence: Synthetic oligonucleotide
  Sense strand starting at position 478 of SEQ ID NO: 586112
gggacugguugugaggauu

SEQ ID NO: 692943 - RNA, 19 nt, Artificial Sequence
  Description of Artificial Sequence: Synthetic oligonucleotide
  Antisense strand to SEQ ID NO: 692942
aauccucacaaccaguccc

SEQ ID NO: 692944 - RNA, 19 nt, Artificial Sequence
  Description of Artificial Sequence: Synthetic oligonucleotide
  Sense strand starting at position 573 of SEQ ID NO: 586112
gagggaaguuuggcagaaa

SEQ ID NO: 692945 - RNA, 19 nt, Artificial Sequence
  Description of Artificial Sequence: Synthetic oligonucleotide
  Antisense strand to SEQ ID NO: 692944
uuucugccaaacuucccuc

SEQ ID NO: 692946 - RNA, 19 nt, Artificial Sequence
  Description of Artificial Sequence: Synthetic oligonucleotide
  Sense strand starting at position 574 of SEQ ID NO: 586112
agggaaguuuggcagaaac

SEQ ID NO: 692947 - RNA, 19 nt, Artificial Sequence
  Description of Artificial Sequence: Synthetic oligonucleotide
  Antisense strand to SEQ ID NO: 692946
guuucugccaaacuucccu

SEQ ID NO: 692948 - RNA, 19 nt, Artificial Sequence
  Description of Artificial Sequence: Synthetic oligonucleotide
  Sense strand starting at position 761 of SEQ ID NO: 586112
ggcugcugacaucaggaau

SEQ ID NO: 692949 - RNA, 19 nt, Artificial Sequence
  Description of Artificial Sequence: Synthetic oligonucleotide
  Antisense strand to SEQ ID NO: 692948
auuccugaugucagcagcc

SEQ ID NO: 692950 - RNA, 19 nt, Artificial Sequence
  Description of Artificial Sequence: Synthetic oligonucleotide
  Sense strand starting at position 764 of SEQ ID NO: 586112
ugcugacaucaggaauguu

SEQ ID NO: 692951 - RNA, 19 nt, Artificial Sequence
  Description of Artificial Sequence: Synthetic oligonucleotide
  Antisense strand to SEQ ID NO: 692950
aacauuccugaugucagca

SEQ ID NO: 692952 - RNA, 19 nt, Artificial Sequence
  Description of Artificial Sequence: Synthetic oligonucleotide
  Sense strand starting at position 780 of SEQ ID NO: 586112
guuggauggugccuuggaa

SEQ ID NO: 692953 - RNA, 19 nt, Artificial Sequence
  Description of Artificial Sequence: Synthetic oligonucleotide
  Antisense strand to SEQ ID NO: 692952
uuccaaggcaccauccaac

SEQ ID NO: 692954 - RNA, 19 nt, Artificial Sequence
  Description of Artificial Sequence: Synthetic oligonucleotide
  Sense strand starting at position 887 of SEQ ID NO: 586112
gcaagaggccguggguuaa

SEQ ID NO: 692955 - RNA, 19 nt, Artificial Sequence
  Description of Artificial Sequence: Synthetic oligonucleotide
  Antisense strand to SEQ ID NO: 692954
uuaacccacggccucuugc

SEQ ID NO: 692956 - RNA, 19 nt, Artificial Sequence
  Description of Artificial Sequence: Synthetic oligonucleotide
  Sense strand starting at position 1019 of SEQ ID NO: 586112
gugagaccuccuggaguag

SEQ ID NO: 692957 - RNA, 19 nt, Artificial Sequence
  Description of Artificial Sequence: Synthetic oligonucleotide
  Antisense strand to SEQ ID NO: 692956
cuacuccaggaggucucac

SEQ ID NO: 692958 - RNA, 19 nt, Artificial Sequence
  Description of Artificial Sequence: Synthetic oligonucleotide
  Sense strand starting at position 1084 of SEQ ID NO: 586112
cagggagaguggucccauu

SEQ ID NO: 692959 - RNA, 19 nt, Artificial Sequence
  Description of Artificial Sequence: Synthetic oligonucleotide
  Antisense strand to SEQ ID NO: 692958
aaugggaccacucucccug

SEQ ID NO: 692960 - RNA, 19 nt, Artificial Sequence
  Description of Artificial Sequence: Synthetic oligonucleotide
  Sense strand starting at position 1176 of SEQ ID NO: 586112
ggauaagcgacccguacaa

SEQ ID NO: 692961 - RNA, 19 nt, Artificial Sequence
  Description of Artificial Sequence: Synthetic oligonucleotide
  Antisense strand to SEQ ID NO: 692960
uuguacgggucgcuuaucc

SEQ ID NO: 692962 - RNA, 19 nt, Artificial Sequence
  Description of Artificial Sequence: Synthetic oligonucleotide
  Sense strand starting at position 1313 of SEQ ID NO: 586112
gcucgcgugcgcauuagua

SEQ ID NO: 692963 - RNA, 19 nt, Artificial Sequence
  Description of Artificial Sequence: Synthetic oligonucleotide
  Antisense strand to SEQ ID NO: 692962
uacuaaugcgcacgcgagc

SEQ ID NO: 692964 - RNA, 19 nt, Artificial Sequence
  Description of Artificial Sequence: Synthetic oligonucleotide
  Sense strand starting at position 1990 of SEQ ID NO: 586112
cgcggauagccgucuccaa

SEQ ID NO: 692965 - RNA, 19 nt, Artificial Sequence
  Description of Artificial Sequence: Synthetic oligonucleotide
  Antisense strand to SEQ ID NO: 692964
uuggagacggcuauccgcg

SEQ ID NO: 692966 - RNA, 19 nt, Artificial Sequence
  Description of Artificial Sequence: Synthetic oligonucleotide
  Sense strand starting at position 2199 of SEQ ID NO: 586112
gagacuugcgccuaggaca

SEQ ID NO: 692967 - RNA, 19 nt, Artificial Sequence
  Description of Artificial Sequence: Synthetic oligonucleotide
  Antisense strand to SEQ ID NO: 692966
uguccuaggcgcaagucuc

SEQ ID NO: 692968 - RNA, 19 nt, Artificial Sequence
  Description of Artificial Sequence: Synthetic oligonucleotide
  Sense strand starting at position 2510 of SEQ ID NO: 586112
gcugcaucccagcgucaau

SEQ ID NO: 692969 - RNA, 19 nt, Artificial Sequence
  Description of Artificial Sequence: Synthetic oligonucleotide
  Antisense strand to SEQ ID NO: 692968
auugacgcugggaugcagc

SEQ ID NO: 692970 - RNA, 19 nt, Artificial Sequence
  Description of Artificial Sequence: Synthetic oligonucleotide
  Sense strand starting at position 2678 of SEQ ID NO: 586112
guaggagucccauguaagg

SEQ ID NO: 692971 - RNA, 19 nt, Artificial Sequence
  Description of Artificial Sequence: Synthetic oligonucleotide
  Antisense strand to SEQ ID NO: 692970
ccuuacaugggacuccuac

SEQ ID NO: 692972 - RNA, 19 nt, Artificial Sequence
  Description of Artificial Sequence: Synthetic oligonucleotide
  Sense strand starting at position 2843 of SEQ ID NO: 586112
uggauugagugucaacuga

SEQ ID NO: 692973 - RNA, 19 nt, Artificial Sequence
  Description of Artificial Sequence: Synthetic oligonucleotide
  Antisense strand to SEQ ID NO: 692972
ucaguugacacucaaucca

SEQ ID NO: 692974 - RNA, 19 nt, Artificial Sequence
  Description of Artificial Sequence: Synthetic oligonucleotide
  Sense strand starting at position 2892 of SEQ ID NO: 586112
gugccugguguuugccaua

SEQ ID NO: 692975 - RNA, 19 nt, Artificial Sequence
  Description of Artificial Sequence: Synthetic oligonucleotide
  Antisense strand to SEQ ID NO: 692974
uauggcaaacaccaggcac

SEQ ID NO: 692976 - RNA, 19 nt, Artificial Sequence
  Description of Artificial Sequence: Synthetic oligonucleotide
  Sense strand starting at position 2897 of SEQ ID NO: 586112
ugguguuugccauaaggcu

SEQ ID NO: 692977 - RNA, 19 nt, Artificial Sequence
  Description of Artificial Sequence: Synthetic oligonucleotide
  Antisense strand to SEQ ID NO: 692976
agccuuauggcaaacacca

SEQ ID NO: 692978 - RNA, 19 nt, Artificial Sequence
  Description of Artificial Sequence: Synthetic oligonucleotide
  Sense strand starting at position 2910 of SEQ ID NO: 586112
aaggcuucuccagggcaaa

SEQ ID NO: 692979 - RNA, 19 nt, Artificial Sequence
  Description of Artificial Sequence: Synthetic oligonucleotide
  Antisense strand to SEQ ID NO: 692978
uuugcccuggagaagccuu

SEQ ID NO: 692980 - RNA, 19 nt, Artificial Sequence
  Description of Artificial Sequence: Synthetic oligonucleotide
  Sense strand starting at position 2911 of SEQ ID NO: 586112
aggcuucuccagggcaaau

SEQ ID NO: 692981 - RNA, 19 nt, Artificial Sequence
  Description of Artificial Sequence: Synthetic oligonucleotide
  Antisense strand to SEQ ID NO: 692980
auuugcccuggagaagccu

SEQ ID NO: 692982 - RNA, 19 nt, Artificial Sequence
  Description of Artificial Sequence: Synthetic oligonucleotide
  Sense strand starting at position 2924 of SEQ ID NO: 586112
gcaaauguuggcugcccua

SEQ ID NO: 692983 - RNA, 19 nt, Artificial Sequence
  Description of Artificial Sequence: Synthetic oligonucleotide
  Antisense strand to SEQ ID NO: 692982
uagggcagccaacauuugc

SEQ ID NO: 692984 - RNA, 19 nt, Artificial Sequence
  Description of Artificial Sequence: Synthetic oligonucleotide
  Sense strand starting at position 2956 of SEQ ID NO: 586112
caggcagaguggucccauu

SEQ ID NO: 692985 - RNA, 19 nt, Artificial Sequence
  Description of Artificial Sequence: Synthetic oligonucleotide
  Antisense strand to SEQ ID NO: 692984
aaugggaccacucugccug

SEQ ID NO: 692986 - RNA, 19 nt, Artificial Sequence
  Description of Artificial Sequence: Synthetic oligonucleotide
  Sense strand starting at position 3026 of SEQ ID NO: 586112
cugucucauacuggaggaa

SEQ ID NO: 692987 - RNA, 19 nt, Artificial Sequence
  Description of Artificial Sequence: Synthetic oligonucleotide
  Antisense strand to SEQ ID NO: 692986
uuccuccaguaugagacag

SEQ ID NO: 692988 - RNA, 19 nt, Artificial Sequence
  Description of Artificial Sequence: Synthetic oligonucleotide
  Sense strand starting at position 3815 of SEQ ID NO: 586112
ucugcaaagcucugaauca

SEQ ID NO: 692989 - RNA, 19 nt, Artificial Sequence
  Description of Artificial Sequence: Synthetic oligonucleotide
  Antisense strand to SEQ ID NO: 692988
ugauucagagcuuugcaga

SEQ ID NO: 692990 - RNA, 19 nt, Artificial Sequence
  Description of Artificial Sequence: Synthetic oligonucleotide
  Sense strand starting at position 3816 of SEQ ID NO: 586112
cugcaaagcucugaaucau

SEQ ID NO: 692991 - RNA, 19 nt, Artificial Sequence
  Description of Artificial Sequence: Synthetic oligonucleotide
  Antisense strand to SEQ ID NO: 692990
augauucagagcuuugcag

SEQ ID NO: 692992 - RNA, 19 nt, Artificial Sequence
  Description of Artificial Sequence: Synthetic oligonucleotide
  Sense strand starting at position 3927 of SEQ ID NO: 586112
cgucacuucccugggaaca

SEQ ID NO: 692993 - RNA, 19 nt, Artificial Sequence
  Description of Artificial Sequence: Synthetic oligonucleotide
  Antisense strand to SEQ ID NO: 692992
uguucccagggaagugacg

SEQ ID NO: 692994 - RNA, 19 nt, Artificial Sequence
  Description of Artificial Sequence: Synthetic oligonucleotide
  Sense strand starting at position 3928 of SEQ ID NO: 586112
gucacuucccugggaacaa

SEQ ID NO: 692995 - RNA, 19 nt, Artificial Sequence
  Description of Artificial Sequence: Synthetic oligonucleotide
  Antisense strand to SEQ ID NO: 692994
uuguucccagggaagugac

SEQ ID NO: 692996 - RNA, 19 nt, Artificial Sequence
  Description of Artificial Sequence: Synthetic oligonucleotide
  Sense strand starting at position 23 of SEQ ID NO: 586113
cucucccugcucugggaaa

SEQ ID NO: 692997 - RNA, 19 nt, Artificial Sequence
  Description of Artificial Sequence: Synthetic oligonucleotide
  Antisense strand to SEQ ID NO: 692996
uuucccagagcagggagag

SEQ ID NO: 692998 - RNA, 19 nt, Artificial Sequence
  Description of Artificial Sequence: Synthetic oligonucleotide
  Sense strand starting at position 117 of SEQ ID NO: 586113
gaagguaagcuuggagcaa

SEQ ID NO: 692999 - RNA, 19 nt, Artificial Sequence
  Description of Artificial Sequence: Synthetic oligonucleotide
  Antisense strand to SEQ ID NO: 692998
uugcuccaagcuuaccuuc

SEQ ID NO: 693000 - RNA, 19 nt, Artificial Sequence
  Description of Artificial Sequence: Synthetic oligonucleotide
  Sense strand starting at position 118 of SEQ ID NO: 586113
aagguaagcuuggagcaaa

SEQ ID NO: 693001 - RNA, 19 nt, Artificial Sequence
  Description of Artificial Sequence: Synthetic oligonucleotide
  Antisense strand to SEQ ID NO: 693000
uuugcuccaagcuuaccuu

SEQ ID NO: 693002 - RNA, 19 nt, Artificial Sequence
  Description of Artificial Sequence: Synthetic oligonucleotide
  Sense strand starting at position 121 of SEQ ID NO: 586113
guaagcuuggagcaaauca

SEQ ID NO: 693003 - RNA, 19 nt, Artificial Sequence
  Description of Artificial Sequence: Synthetic oligonucleotide
  Antisense strand to SEQ ID NO: 693002
ugauuugcuccaagcuuac

SEQ ID NO: 693004 - RNA, 19 nt, Artificial Sequence
  Description of Artificial Sequence: Synthetic oligonucleotide
  Sense strand starting at position 132 of SEQ ID NO: 586113
gcaaaucaggaaugucuuu

SEQ ID NO: 693005 - RNA, 19 nt, Artificial Sequence
  Description of Artificial Sequence: Synthetic oligonucleotide
  Antisense strand to SEQ ID NO: 693004
aaagacauuccugauuugc

SEQ ID NO: 693006 - RNA, 19 nt, Artificial Sequence
  Description of Artificial Sequence: Synthetic oligonucleotide
  Sense strand starting at position 137 of SEQ ID NO: 586113
ucaggaaugucuuuacuuc

SEQ ID NO: 693007 - RNA, 19 nt, Artificial Sequence
  Description of Artificial Sequence: Synthetic oligonucleotide
  Antisense strand to SEQ ID NO: 693006
gaaguaaagacauuccuga

SEQ ID NO: 693008 - RNA, 19 nt, Artificial Sequence
  Description of Artificial Sequence: Synthetic oligonucleotide
  Sense strand starting at position 421 of SEQ ID NO: 586113
acuggcaugucacaacaaa

SEQ ID NO: 693009 - RNA, 19 nt, Artificial Sequence
  Description of Artificial Sequence: Synthetic oligonucleotide
  Antisense strand to SEQ ID NO: 693008
uuuguugugacaugccagu

SEQ ID NO: 693010 - RNA, 19 nt, Artificial Sequence
  Description of Artificial Sequence: Synthetic oligonucleotide
  Sense strand starting at position 1482 of SEQ ID NO: 586113
ccgguucugcaacacagau

SEQ ID NO: 693011 - RNA, 19 nt, Artificial Sequence
  Description of Artificial Sequence: Synthetic oligonucleotide
  Antisense strand to SEQ ID NO: 693010
aucuguguugcagaaccgg

SEQ ID NO: 693012 - RNA, 19 nt, Artificial Sequence
  Description of Artificial Sequence: Synthetic oligonucleotide
  Sense strand starting at position 2598 of SEQ ID NO: 586113
gucggaucucuaggcaaug

SEQ ID NO: 693013 - RNA, 19 nt, Artificial Sequence
  Description of Artificial Sequence: Synthetic oligonucleotide
  Antisense strand to SEQ ID NO: 693012
cauugccuagagauccgac

SEQ ID NO: 693014 - RNA, 19 nt, Artificial Sequence
  Description of Artificial Sequence: Synthetic oligonucleotide
  Sense strand starting at position 2656 of SEQ ID NO: 586113
ggcugauuggccgaggagu

SEQ ID NO: 693015 - RNA, 19 nt, Artificial Sequence
  Description of Artificial Sequence: Synthetic oligonucleotide
  Antisense strand to SEQ ID NO: 693014
acuccucggccaaucagcc

SEQ ID NO: 693016 - RNA, 19 nt, Artificial Sequence
  Description of Artificial Sequence: Synthetic oligonucleotide
  Sense strand starting at position 2657 of SEQ ID NO: 586113
gcugauuggccgaggaguc

SEQ ID NO: 693017 - RNA, 19 nt, Artificial Sequence
  Description of Artificial Sequence: Synthetic oligonucleotide
  Antisense strand to SEQ ID NO: 693016
gacuccucggccaaucagc

SEQ ID NO: 693018 - RNA, 19 nt, Artificial Sequence
  Description of Artificial Sequence: Synthetic oligonucleotide
  Sense strand starting at position 2865 of SEQ ID NO: 586113
uugggagauuagcuaaaug

SEQ ID NO: 693019 - RNA, 19 nt, Artificial Sequence
  Description of Artificial Sequence: Synthetic oligonucleotide
  Antisense strand to SEQ ID NO: 693018
cauuuagcuaaucucccaa

SEQ ID NO: 693020 - RNA, 19 nt, Artificial Sequence
  Description of Artificial Sequence: Synthetic oligonucleotide
  Sense strand starting at position 3049 of SEQ ID NO: 586113
cagggagcucccugaaaug

SEQ ID NO: 693021 - RNA, 19 nt, Artificial Sequence
  Description of Artificial Sequence: Synthetic oligonucleotide
  Antisense strand to SEQ ID NO: 693020
cauuucagggagcucccug

SEQ ID NO: 693022 - RNA, 19 nt, Artificial Sequence
  Description of Artificial Sequence: Synthetic oligonucleotide
  Sense strand starting at position 3098 of SEQ ID NO: 586113
gugggcugcaguucuguua

SEQ ID NO: 693023 - RNA, 19 nt, Artificial Sequence
  Description of Artificial Sequence: Synthetic oligonucleotide
  Antisense strand to SEQ ID NO: 693022
uaacagaacugcagcccac

SEQ ID NO: 693024 - RNA, 19 nt, Artificial Sequence
  Description of Artificial Sequence: Synthetic oligonucleotide
  Sense strand starting at position 3191 of SEQ ID NO: 586113
auaaaucugccagagaugu

SEQ ID NO: 693025 - RNA, 19 nt, Artificial Sequence
  Description of Artificial Sequence: Synthetic oligonucleotide
  Antisense strand to SEQ ID NO: 693024
acaucucuggcagauuuau

SEQ ID NO: 693026 - RNA, 19 nt, Artificial Sequence
  Description of Artificial Sequence: Synthetic oligonucleotide
  Sense strand starting at position 3202 of SEQ ID NO: 586113
agagauguugcaggguauc

SEQ ID NO: 693027 - RNA, 19 nt, Artificial Sequence
  Description of Artificial Sequence: Synthetic oligonucleotide
  Antisense strand to SEQ ID NO: 693026
gauacccugcaacaucucu

SEQ ID NO: 693028 - RNA, 19 nt, Artificial Sequence
  Description of Artificial Sequence: Synthetic oligonucleotide
  Sense strand starting at position 3229 of SEQ ID NO: 586113
ccagauauccuagggcauc

SEQ ID NO: 693029 - RNA, 19 nt, Artificial Sequence
  Description of Artificial Sequence: Synthetic oligonucleotide
  Antisense strand to SEQ ID NO: 693028
gaugcccuaggauaucugg

SEQ ID NO: 693030 - RNA, 19 nt, Artificial Sequence
  Description of Artificial Sequence: Synthetic oligonucleotide
  Sense strand starting at position 3230 of SEQ ID NO: 586113
cagauauccuagggcauca

SEQ ID NO: 693031 - RNA, 19 nt, Artificial Sequence
  Description of Artificial Sequence: Synthetic oligonucleotide
  Antisense strand to SEQ ID NO: 693030
ugaugcccuaggauaucug

SEQ ID NO: 693032 - RNA, 19 nt, Artificial Sequence
  Description of Artificial Sequence: Synthetic oligonucleotide
  Sense strand starting at position 3241 of SEQ ID NO: 586113
gggcaucagugacacacau

SEQ ID NO: 693033 - RNA, 19 nt, Artificial Sequence
  Description of Artificial Sequence: Synthetic oligonucleotide
  Antisense strand to SEQ ID NO: 693032
augugugucacugaugccc

SEQ ID NO: 693034 - RNA, 19 nt, Artificial Sequence
  Description of Artificial Sequence: Synthetic oligonucleotide
  Sense strand starting at position 3312 of SEQ ID NO: 586113
gcaugaagcuguccacugu

SEQ ID NO: 693035 - RNA, 19 nt, Artificial Sequence
  Description of Artificial Sequence: Synthetic oligonucleotide
  Antisense strand to SEQ ID NO: 693034
acaguggacagcuucaugc

SEQ ID NO: 693036 - RNA, 19 nt, Artificial Sequence
  Description of Artificial Sequence: Synthetic oligonucleotide
  Sense strand starting at position 3316 of SEQ ID NO: 586113
gaagcuguccacuguuuga

SEQ ID NO: 693037 - RNA, 19 nt, Artificial Sequence
  Description of Artificial Sequence: Synthetic oligonucleotide
  Antisense strand to SEQ ID NO: 693036
ucaaacaguggacagcuuc

SEQ ID NO: 693038 - RNA, 19 nt, Artificial Sequence
  Description of Artificial Sequence: Synthetic oligonucleotide
  Sense strand starting at position 3319 of SEQ ID NO: 586113
gcuguccacuguuugauua

SEQ ID NO: 693039 - RNA, 19 nt, Artificial Sequence
  Description of Artificial Sequence: Synthetic oligonucleotide
  Antisense strand to SEQ ID NO: 693038
uaaucaaacaguggacagc

SEQ ID NO: 693040 - RNA, 19 nt, Artificial Sequence
  Description of Artificial Sequence: Synthetic oligonucleotide
  Sense strand starting at position 3327 of SEQ ID NO: 586113
cuguuugauuacccacaca

SEQ ID NO: 693041 - RNA, 19 nt, Artificial Sequence
  Description of Artificial Sequence: Synthetic oligonucleotide
  Antisense strand to SEQ ID NO: 693040
uguguggguaaucaaacag

SEQ ID NO: 693042 - RNA, 19 nt, Artificial Sequence
  Description of Artificial Sequence: Synthetic oligonucleotide
  Sense strand starting at position 3376 of SEQ ID NO: 586113
ucccgaguuccuuguaccu

SEQ ID NO: 693043 - RNA, 19 nt, Artificial Sequence
  Description of Artificial Sequence: Synthetic oligonucleotide
  Antisense strand to SEQ ID NO: 693042
agguacaaggaacucggga

SEQ ID NO: 693044 - RNA, 19 nt, Artificial Sequence
  Description of Artificial Sequence: Synthetic oligonucleotide
  Sense strand starting at position 3442 of SEQ ID NO: 586113
uccugaggaaccuguguuu

SEQ ID NO: 693045 - RNA, 19 nt, Artificial Sequence
  Description of Artificial Sequence: Synthetic oligonucleotide
  Antisense strand to SEQ ID NO: 693044
aaacacagguuccucagga

SEQ ID NO: 693046 - RNA, 19 nt, Artificial Sequence
  Description of Artificial Sequence: Synthetic oligonucleotide
  Sense strand starting at position 3445 of SEQ ID NO: 586113
ugaggaaccuguguuucua

SEQ ID NO: 693047 - RNA, 19 nt, Artificial Sequence
  Description of Artificial Sequence: Synthetic oligonucleotide
  Antisense strand to SEQ ID NO: 693046
uagaaacacagguuccuca

SEQ ID NO: 693048 - RNA, 19 nt, Artificial Sequence
  Description of Artificial Sequence: Synthetic oligonucleotide
  Sense strand starting at position 3457 of SEQ ID NO: 586113
guuucuaucucccugcaua

SEQ ID NO: 693049 - RNA, 19 nt, Artificial Sequence
  Description of Artificial Sequence: Synthetic oligonucleotide
  Antisense strand to SEQ ID NO: 693048
uaugcagggagauagaaac

SEQ ID NO: 693050 - RNA, 19 nt, Artificial Sequence
  Description of Artificial Sequence: Synthetic oligonucleotide
  Sense strand starting at position 3468 of SEQ ID NO: 586113
ccugcauaagcuuaaggau

SEQ ID NO: 693051 - RNA, 19 nt, Artificial Sequence
  Description of Artificial Sequence: Synthetic oligonucleotide
  Antisense strand to SEQ ID NO: 693050
auccuuaagcuuaugcagg

SEQ ID NO: 693052 - RNA, 19 nt, Artificial Sequence
  Description of Artificial Sequence: Synthetic oligonucleotide
  Sense strand starting at position 3502 of SEQ ID NO: 586113
uggguuucaucugcgaaau

SEQ ID NO: 693053 - RNA, 19 nt, Artificial Sequence
  Description of Artificial Sequence: Synthetic oligonucleotide
  Antisense strand to SEQ ID NO: 693052
auuucgcagaugaaaccca

SEQ ID NO: 693054 - RNA, 19 nt, Artificial Sequence
  Description of Artificial Sequence: Synthetic oligonucleotide
  Sense strand starting at position 3503 of SEQ ID NO: 586113
ggguuucaucugcgaaaua

SEQ ID NO: 693055 - RNA, 19 nt, Artificial Sequence
  Description of Artificial Sequence: Synthetic oligonucleotide
  Antisense strand to SEQ ID NO: 693054
uauuucgcagaugaaaccc

SEQ ID NO: 693056 - RNA, 19 nt, Artificial Sequence
  Description of Artificial Sequence: Synthetic oligonucleotide
  Sense strand starting at position 3514 of SEQ ID NO: 586113
gcgaaauauagugguugaa

SEQ ID NO: 693057 - RNA, 19 nt, Artificial Sequence
  Description of Artificial Sequence: Synthetic oligonucleotide
  Antisense strand to SEQ ID NO: 693056
uucaaccacuauauuucgc

SEQ ID NO: 693058 - RNA, 19 nt, Artificial Sequence
  Description of Artificial Sequence: Synthetic oligonucleotide
  Sense strand starting at position 3516 of SEQ ID NO: 586113
gaaauauagugguugaaca

SEQ ID NO: 693059 - RNA, 19 nt, Artificial Sequence
  Description of Artificial Sequence: Synthetic oligonucleotide
  Antisense strand to SEQ ID NO: 693058
uguucaaccacuauauuuc

SEQ ID NO: 693060 - RNA, 19 nt, Artificial Sequence
  Description of Artificial Sequence: Synthetic oligonucleotide
  Sense strand starting at position 3517 of SEQ ID NO: 586113
aaauauagugguugaacau

SEQ ID NO: 693061 - RNA, 19 nt, Artificial Sequence
  Description of Artificial Sequence: Synthetic oligonucleotide
  Antisense strand to SEQ ID NO: 693060
auguucaaccacuauauuu

SEQ ID NO: 693062 - RNA, 19 nt, Artificial Sequence
  Description of Artificial Sequence: Synthetic oligonucleotide
  Sense strand starting at position 3588 of SEQ ID NO: 586113
uuaggugcuuaauuagaau

SEQ ID NO: 693063 - RNA, 19 nt, Artificial Sequence
  Description of Artificial Sequence: Synthetic oligonucleotide
  Antisense strand to SEQ ID NO: 693062
auucuaauuaagcaccuaa

SEQ ID NO: 693064 - RNA, 19 nt, Artificial Sequence
  Description of Artificial Sequence: Synthetic oligonucleotide
  Sense strand starting at position 3591 of SEQ ID NO: 586113
ggugcuuaauuagaauuga

SEQ ID NO: 693065 - RNA, 19 nt, Artificial Sequence
  Description of Artificial Sequence: Synthetic oligonucleotide
  Antisense strand to SEQ ID NO: 693064
ucaauucuaauuaagcacc

SEQ ID NO: 693066 - RNA, 19 nt, Artificial Sequence
  Description of Artificial Sequence: Synthetic oligonucleotide
  Sense strand starting at position 3627 of SEQ ID NO: 586113
agguauaccucccaagaga

SEQ ID NO: 693067 - RNA, 19 nt, Artificial Sequence
  Description of Artificial Sequence: Synthetic oligonucleotide
  Antisense strand to SEQ ID NO: 693066
ucucuugggagguauaccu

SEQ ID NO: 693068 - RNA, 19 nt, Artificial Sequence
  Description of Artificial Sequence: Synthetic oligonucleotide
  Sense strand starting at position 3727 of SEQ ID NO: 586113
acgucuagcucuucuacua

SEQ ID NO: 693069 - RNA, 19 nt, Artificial Sequence
  Description of Artificial Sequence: Synthetic oligonucleotide
  Antisense strand to SEQ ID NO: 693068
uaguagaagagcuagacgu

SEQ ID NO: 693070 - RNA, 19 nt, Artificial Sequence
  Description of Artificial Sequence: Synthetic oligonucleotide
  Sense strand starting at position 3806 of SEQ ID NO: 586113
uugcacaaugccugggaua

SEQ ID NO: 693071 - RNA, 19 nt, Artificial Sequence
  Description of Artificial Sequence: Synthetic oligonucleotide
  Antisense strand to SEQ ID NO: 693070
uaucccaggcauugugcaa

SEQ ID NO: 693072 - RNA, 19 nt, Artificial Sequence
  Description of Artificial Sequence: Synthetic oligonucleotide
  Sense strand starting at position 3807 of SEQ ID NO: 586113
ugcacaaugccugggauau

SEQ ID NO: 693073 - RNA, 19 nt, Artificial Sequence
  Description of Artificial Sequence: Synthetic oligonucleotide
  Antisense strand to SEQ ID NO: 693072
auaucccaggcauugugca

SEQ ID NO: 693074 - RNA, 19 nt, Artificial Sequence
  Description of Artificial Sequence: Synthetic oligonucleotide
  Sense strand starting at position 3808 of SEQ ID NO: 586113
gcacaaugccugggauaua

SEQ ID NO: 693075 - RNA, 19 nt, Artificial Sequence
  Description of Artificial Sequence: Synthetic oligonucleotide
  Antisense strand to SEQ ID NO: 693074
uauaucccaggcauugugc

SEQ ID NO: 693076 - RNA, 19 nt, Artificial Sequence
  Description of Artificial Sequence: Synthetic oligonucleotide
  Sense strand starting at position 601 of SEQ ID NO: 586114
ccgguucugcaacacagau

SEQ ID NO: 693077 - RNA, 19 nt, Artificial Sequence
  Description of Artificial Sequence: Synthetic oligonucleotide
  Antisense strand to SEQ ID NO: 693076
aucuguguugcagaaccgg

SEQ ID NO: 693078 - RNA, 19 nt, Artificial Sequence
  Description of Artificial Sequence: Synthetic oligonucleotide
  Sense strand starting at position 1717 of SEQ ID NO: 586114
gucggaucucuaggcaaug

SEQ ID NO: 693079 - RNA, 19 nt, Artificial Sequence
  Description of Artificial Sequence: Synthetic oligonucleotide
  Antisense strand to SEQ ID NO: 693078
cauugccuagagauccgac

SEQ ID NO: 693080 - RNA, 19 nt, Artificial Sequence
  Description of Artificial Sequence: Synthetic oligonucleotide
  Sense strand starting at position 1775 of SEQ ID NO: 586114
ggcugauuggccgaggagu

SEQ ID NO: 693081 - RNA, 19 nt, Artificial Sequence
  Description of Artificial Sequence: Synthetic oligonucleotide
  Antisense strand to SEQ ID NO: 693080
acuccucggccaaucagcc

SEQ ID NO: 693082 - RNA, 19 nt, Artificial Sequence
  Description of Artificial Sequence: Synthetic oligonucleotide
  Sense strand starting at position 1776 of SEQ ID NO: 586114
gcugauuggccgaggaguc

SEQ ID NO: 693083 - RNA, 19 nt, Artificial Sequence
  Description of Artificial Sequence: Synthetic oligonucleotide
  Antisense strand to SEQ ID NO: 693082
gacuccucggccaaucagc

SEQ ID NO: 693084 - RNA, 19 nt, Artificial Sequence
  Description of Artificial Sequence: Synthetic oligonucleotide
  Sense strand starting at position 1984 of SEQ ID NO: 586114
uugggagauuagcuaaaug

SEQ ID NO: 693085 - RNA, 19 nt, Artificial Sequence
  Description of Artificial Sequence: Synthetic oligonucleotide
  Antisense strand to SEQ ID NO: 693084
cauuuagcuaaucucccaa

SEQ ID NO: 693086 - RNA, 19 nt, Artificial Sequence
  Description of Artificial Sequence: Synthetic oligonucleotide
  Sense strand starting at position 2168 of SEQ ID NO: 586114
cagggagcucccugaaaug

SEQ ID NO: 693087 - RNA, 19 nt, Artificial Sequence
  Description of Artificial Sequence: Synthetic oligonucleotide
  Antisense strand to SEQ ID NO: 693086
cauuucagggagcucccug

SEQ ID NO: 693088 - RNA, 19 nt, Artificial Sequence
  Description of Artificial Sequence: Synthetic oligonucleotide
  Sense strand starting at position 2217 of SEQ ID NO: 586114
gugggcugcaguucuguua

SEQ ID NO: 693089 - RNA, 19 nt, Artificial Sequence
  Description of Artificial Sequence: Synthetic oligonucleotide
  Antisense strand to SEQ ID NO: 693088
uaacagaacugcagcccac

SEQ ID NO: 693090 - RNA, 19 nt, Artificial Sequence
  Description of Artificial Sequence: Synthetic oligonucleotide
  Sense strand starting at position 2310 of SEQ ID NO: 586114
auaaaucugccagagaugu

SEQ ID NO: 693091 - RNA, 19 nt, Artificial Sequence
  Description of Artificial Sequence: Synthetic oligonucleotide
  Antisense strand to SEQ ID NO: 693090
acaucucuggcagauuuau

SEQ ID NO: 693092 - RNA, 19 nt, Artificial Sequence
  Description of Artificial Sequence: Synthetic oligonucleotide
  Sense strand starting at position 2321 of SEQ ID NO: 586114
agagauguugcaggguauc

SEQ ID NO: 693093 - RNA, 19 nt, Artificial Sequence
  Description of Artificial Sequence: Synthetic oligonucleotide
  Antisense strand to SEQ ID NO: 693092
gauacccugcaacaucucu

SEQ ID NO: 693094 - RNA, 19 nt, Artificial Sequence
  Description of Artificial Sequence: Synthetic oligonucleotide
  Sense strand starting at position 2348 of SEQ ID NO: 586114
ccagauauccuagggcauc

SEQ ID NO: 693095 - RNA, 19 nt, Artificial Sequence
  Description of Artificial Sequence: Synthetic oligonucleotide
  Antisense strand to SEQ ID NO: 693094
gaugcccuaggauaucugg

SEQ ID NO: 693096 - RNA, 19 nt, Artificial Sequence
  Description of Artificial Sequence: Synthetic oligonucleotide
  Sense strand starting at position 2435 of SEQ ID NO: 586114
gaagcuguccacuguuuga

SEQ ID NO: 693097 - RNA, 19 nt, Artificial Sequence
  Description of Artificial Sequence: Synthetic oligonucleotide
  Antisense strand to SEQ ID NO: 693096
ucaaacaguggacagcuuc

SEQ ID NO: 693098 - RNA, 19 nt, Artificial Sequence
  Description of Artificial Sequence: Synthetic oligonucleotide
  Sense strand starting at position 2446 of SEQ ID NO: 586114
cuguuugauuacccacaca

SEQ ID NO: 693099 - RNA, 19 nt, Artificial Sequence
  Description of Artificial Sequence: Synthetic oligonucleotide
  Antisense strand to SEQ ID NO: 693098
uguguggguaaucaaacag

SEQ ID NO: 693100 - RNA, 19 nt, Artificial Sequence
  Description of Artificial Sequence: Synthetic oligonucleotide
  Sense strand starting at position 2561 of SEQ ID NO: 586114
uccugaggaaccuguguuu

SEQ ID NO: 693101 - RNA, 19 nt, Artificial Sequence
  Description of Artificial Sequence: Synthetic oligonucleotide
  Antisense strand to SEQ ID NO: 693100
aaacacagguuccucagga

SEQ ID NO: 693102 - RNA, 19 nt, Artificial Sequence
  Description of Artificial Sequence: Synthetic oligonucleotide
  Sense strand starting at position 2564 of SEQ ID NO: 586114
ugaggaaccuguguuucua

SEQ ID NO: 693103 - RNA, 19 nt, Artificial Sequence
  Description of Artificial Sequence: Synthetic oligonucleotide
  Antisense strand to SEQ ID NO: 693102
uagaaacacagguuccuca

SEQ ID NO: 693104 - RNA, 19 nt, Artificial Sequence
  Description of Artificial Sequence: Synthetic oligonucleotide
  Sense strand starting at position 2576 of SEQ ID NO: 586114
guuucuaucucccugcaua

SEQ ID NO: 693105 - RNA, 19 nt, Artificial Sequence
  Description of Artificial Sequence: Synthetic oligonucleotide
  Antisense strand to SEQ ID NO: 693104
uaugcagggagauagaaac

SEQ ID NO: 693106 - RNA, 19 nt, Artificial Sequence
  Description of Artificial Sequence: Synthetic oligonucleotide
  Sense strand starting at position 2587 of SEQ ID NO: 586114
ccugcauaagcuuaaggau

SEQ ID NO: 693107 - RNA, 19 nt, Artificial Sequence
  Description of Artificial Sequence: Synthetic oligonucleotide
  Antisense strand to SEQ ID NO: 693106
auccuuaagcuuaugcagg

SEQ ID NO: 693108 - RNA, 19 nt, Artificial Sequence
  Description of Artificial Sequence: Synthetic oligonucleotide
  Sense strand starting at position 2621 of SEQ ID NO: 586114
uggguuucaucugcgaaau

SEQ ID NO: 693109 - RNA, 19 nt, Artificial Sequence
  Description of Artificial Sequence: Synthetic oligonucleotide
  Antisense strand to SEQ ID NO: 693108
auuucgcagaugaaaccca

SEQ ID NO: 693110 - RNA, 19 nt, Artificial Sequence
  Description of Artificial Sequence: Synthetic oligonucleotide
  Sense strand starting at position 2622 of SEQ ID NO: 586114
ggguuucaucugcgaaaua

SEQ ID NO: 693111 - RNA, 19 nt, Artificial Sequence
  Description of Artificial Sequence: Synthetic oligonucleotide
  Antisense strand to SEQ ID NO: 693110
uauuucgcagaugaaaccc

SEQ ID NO: 693112 - RNA, 19 nt, Artificial Sequence
  Description of Artificial Sequence: Synthetic oligonucleotide
  Sense strand starting at position 2633 of SEQ ID NO: 586114
gcgaaauauagugguugaa

SEQ ID NO: 693113 - RNA, 19 nt, Artificial Sequence
  Description of Artificial Sequence: Synthetic oligonucleotide
  Antisense strand to SEQ ID NO: 693112
uucaaccacuauauuucgc

SEQ ID NO: 693114 - RNA, 19 nt, Artificial Sequence
  Description of Artificial Sequence: Synthetic oligonucleotide
  Sense strand starting at position 2635 of SEQ ID NO: 586114
gaaauauagugguugaaca

SEQ ID NO: 693115 - RNA, 19 nt, Artificial Sequence
  Description of Artificial Sequence: Synthetic oligonucleotide
  Antisense strand to SEQ ID NO: 693114
uguucaaccacuauauuuc

SEQ ID NO: 693116 - RNA, 19 nt, Artificial Sequence
  Description of Artificial Sequence: Synthetic oligonucleotide
  Sense strand starting at position 2636 of SEQ ID NO: 586114
aaauauagugguugaacau

SEQ ID NO: 693117 - RNA, 19 nt, Artificial Sequence
  Description of Artificial Sequence: Synthetic oligonucleotide
  Antisense strand to SEQ ID NO: 693116
auguucaaccacuauauuu

SEQ ID NO: 693118 - RNA, 19 nt, Artificial Sequence
  Description of Artificial Sequence: Synthetic oligonucleotide
  Sense strand starting at position 2707 of SEQ ID NO: 586114
uuaggugcuuaauuagaau

SEQ ID NO: 693119 - RNA, 19 nt, Artificial Sequence
  Description of Artificial Sequence: Synthetic oligonucleotide
  Antisense strand to SEQ ID NO: 693118
auucuaauuaagcaccuaa

SEQ ID NO: 693120 - RNA, 19 nt, Artificial Sequence
  Description of Artificial Sequence: Synthetic oligonucleotide
  Sense strand starting at position 2925 of SEQ ID NO: 586114
uugcacaaugccugggaua

SEQ ID NO: 693121 - RNA, 19 nt, Artificial Sequence
  Description of Artificial Sequence: Synthetic oligonucleotide
  Antisense strand to SEQ ID NO: 693120
uaucccaggcauugugcaa

SEQ ID NO: 693122 - RNA, 19 nt, Artificial Sequence
  Description of Artificial Sequence: Synthetic oligonucleotide
  Sense strand starting at position 2926 of SEQ ID NO: 586114
ugcacaaugccugggauau

SEQ ID NO: 693123 - RNA, 19 nt, Artificial Sequence
  Description of Artificial Sequence: Synthetic oligonucleotide
  Antisense strand to SEQ ID NO: 693122
auaucccaggcauugugca

SEQ ID NO: 693124 - RNA, 19 nt, Artificial Sequence
  Description of Artificial Sequence: Synthetic oligonucleotide
  Sense strand starting at position 2927 of SEQ ID NO: 586114
gcacaaugccugggauaua

SEQ ID NO: 693125 - RNA, 19 nt, Artificial Sequence
  Description of Artificial Sequence: Synthetic oligonucleotide
  Antisense strand to SEQ ID NO: 693124
uauaucccaggcauugugc

SEQ ID NO: 693126 - RNA, 19 nt, Artificial Sequence
  Description of Artificial Sequence: Synthetic oligonucleotide
  Sense strand starting at position 3331 of SEQ ID NO: 586114
gaacuagagguagguuagu

SEQ ID NO: 693127 - RNA, 19 nt, Artificial Sequence
  Description of Artificial Sequence: Synthetic oligonucleotide
  Antisense strand to SEQ ID NO: 693126
acuaaccuaccucuaguuc

SEQ ID NO: 693128 - RNA, 19 nt, Artificial Sequence
  Description of Artificial Sequence: Synthetic oligonucleotide
  Sense strand starting at position 3337 of SEQ ID NO: 586114
gagguagguuaguucugua

SEQ ID NO: 693129 - RNA, 19 nt, Artificial Sequence
  Description of Artificial Sequence: Synthetic oligonucleotide
  Antisense strand to SEQ ID NO: 693128
uacagaacuaaccuaccuc

SEQ ID NO: 693130 - RNA, 19 nt, Artificial Sequence
  Description of Artificial Sequence: Synthetic oligonucleotide
  Sense strand starting at position 3342 of SEQ ID NO: 586114
agguuaguucuguauggua

SEQ ID NO: 693131 - RNA, 19 nt, Artificial Sequence
  Description of Artificial Sequence: Synthetic oligonucleotide
  Antisense strand to SEQ ID NO: 693130
uaccauacagaacuaaccu

SEQ ID NO: 693132 - RNA, 19 nt, Artificial Sequence
  Description of Artificial Sequence: Synthetic oligonucleotide
  Sense strand starting at position 3426 of SEQ ID NO: 586114
ugggaagacuaggauagau

SEQ ID NO: 693133 - RNA, 19 nt, Artificial Sequence
  Description of Artificial Sequence: Synthetic oligonucleotide
  Antisense strand to SEQ ID NO: 693132
aucuauccuagucuuccca

SEQ ID NO: 693134 - RNA, 19 nt, Artificial Sequence
  Description of Artificial Sequence: Synthetic oligonucleotide
  Sense strand starting at position 3479 of SEQ ID NO: 586114
augugagaucucuguggcu

SEQ ID NO: 693135 - RNA, 19 nt, Artificial Sequence
  Description of Artificial Sequence: Synthetic oligonucleotide
  Antisense strand to SEQ ID NO: 693134
agccacagagaucucacau

SEQ ID NO: 693136 - RNA, 19 nt, Artificial Sequence
  Description of Artificial Sequence: Synthetic oligonucleotide
  Sense strand starting at position 3481 of SEQ ID NO: 586114
gugagaucucuguggcuac

SEQ ID NO: 693137 - RNA, 19 nt, Artificial Sequence
  Description of Artificial Sequence: Synthetic oligonucleotide
  Antisense strand to SEQ ID NO: 693136
guagccacagagaucucac

SEQ ID NO: 693138 - RNA, 19 nt, Artificial Sequence
  Description of Artificial Sequence: Synthetic oligonucleotide
  Sense strand starting at position 3620 of SEQ ID NO: 586114
cugugugacauguaccuua

SEQ ID NO: 693139 - RNA, 19 nt, Artificial Sequence
  Description of Artificial Sequence: Synthetic oligonucleotide
  Antisense strand to SEQ ID NO: 693138
uaagguacaugucacacag

SEQ ID NO: 693140 - RNA, 19 nt, Artificial Sequence
  Description of Artificial Sequence: Synthetic oligonucleotide
  Sense strand starting at position 3623 of SEQ ID NO: 586114
ugugacauguaccuuaguu

SEQ ID NO: 693141 - RNA, 19 nt, Artificial Sequence
  Description of Artificial Sequence: Synthetic oligonucleotide
  Antisense strand to SEQ ID NO: 693140
aacuaagguacaugucaca

SEQ ID NO: 693142 - RNA, 19 nt, Artificial Sequence
  Description of Artificial Sequence: Synthetic oligonucleotide
  Sense strand starting at position 3674 of SEQ ID NO: 586114
ccuuaugauugacuuacga

SEQ ID NO: 693143 - RNA, 19 nt, Artificial Sequence
  Description of Artificial Sequence: Synthetic oligonucleotide
  Antisense strand to SEQ ID NO: 693142
ucguaagucaaucauaagg

SEQ ID NO: 693144 - RNA, 19 nt, Artificial Sequence
  Description of Artificial Sequence: Synthetic oligonucleotide
  Sense strand starting at position 3747 of SEQ ID NO: 586114
aaggucauauagcugagaa

SEQ ID NO: 693145 - RNA, 19 nt, Artificial Sequence
  Description of Artificial Sequence: Synthetic oligonucleotide
  Antisense strand to SEQ ID NO: 693144
uucucagcuauaugaccuu

SEQ ID NO: 693146 - RNA, 19 nt, Artificial Sequence
  Description of Artificial Sequence: Synthetic oligonucleotide
  Sense strand starting at position 3748 of SEQ ID NO: 586114
aggucauauagcugagaag

SEQ ID NO: 693147 - RNA, 19 nt, Artificial Sequence
  Description of Artificial Sequence: Synthetic oligonucleotide
  Antisense strand to SEQ ID NO: 693146
cuucucagcuauaugaccu

SEQ ID NO: 693148 - RNA, 19 nt, Artificial Sequence
  Description of Artificial Sequence: Synthetic oligonucleotide
  Sense strand starting at position 3804 of SEQ ID NO: 586114
ggucuaugcuucuuccaca

SEQ ID NO: 693149 - RNA, 19 nt, Artificial Sequence
  Description of Artificial Sequence: Synthetic oligonucleotide
  Antisense strand to SEQ ID NO: 693148
uguggaagaagcauagacc

SEQ ID NO: 693150 - RNA, 19 nt, Artificial Sequence
  Description of Artificial Sequence: Synthetic oligonucleotide
  Sense strand starting at position 3930 of SEQ ID NO: 586114
ugggcucugggcugaagaa

SEQ ID NO: 693151 - RNA, 19 nt, Artificial Sequence
  Description of Artificial Sequence: Synthetic oligonucleotide
  Antisense strand to SEQ ID NO: 693150
uucuucagcccagagccca

SEQ ID NO: 693152 - RNA, 19 nt, Artificial Sequence
  Description of Artificial Sequence: Synthetic oligonucleotide
  Sense strand starting at position 3931 of SEQ ID NO: 586114
gggcucugggcugaagaau

SEQ ID NO: 693153 - RNA, 19 nt, Artificial Sequence
  Description of Artificial Sequence: Synthetic oligonucleotide
  Antisense strand to SEQ ID NO: 693152
auucuucagcccagagccc

SEQ ID NO: 693154 - RNA, 19 nt, Artificial Sequence
  Description of Artificial Sequence: Synthetic oligonucleotide
  Sense strand starting at position 3975 of SEQ ID NO: 586114
uggcguccacucugacaua

SEQ ID NO: 693155 - RNA, 19 nt, Artificial Sequence
  Description of Artificial Sequence: Synthetic oligonucleotide
  Antisense strand to SEQ ID NO: 693154
uaugucagaguggacgcca

SEQ ID NO: 693156 - RNA, 19 nt, Artificial Sequence
  Description of Artificial Sequence: Synthetic oligonucleotide
  Sense strand starting at position 76 of SEQ ID NO: 586115
ugucucuuccuuuaugaca

SEQ ID NO: 693157 - RNA, 19 nt, Artificial Sequence
  Description of Artificial Sequence: Synthetic oligonucleotide
  Antisense strand to SEQ ID NO: 693156
ugucauaaaggaagagaca

SEQ ID NO: 693158 - RNA, 19 nt, Artificial Sequence
  Description of Artificial Sequence: Synthetic oligonucleotide
  Sense strand starting at position 341 of SEQ ID NO: 586115
aguguucccagugauagcu

SEQ ID NO: 693159 - RNA, 19 nt, Artificial Sequence
  Description of Artificial Sequence: Synthetic oligonucleotide
  Antisense strand to SEQ ID NO: 693158
agcuaucacugggaacacu

SEQ ID NO: 693160 - RNA, 19 nt, Artificial Sequence
  Description of Artificial Sequence: Synthetic oligonucleotide
  Sense strand starting at position 668 of SEQ ID NO: 586115
gcuguagguguuuacuaca

SEQ ID NO: 693161 - RNA, 19 nt, Artificial Sequence
  Description of Artificial Sequence: Synthetic oligonucleotide
  Antisense strand to SEQ ID NO: 693160
uguaguaaacaccuacagc

SEQ ID NO: 693162 - RNA, 19 nt, Artificial Sequence
  Description of Artificial Sequence: Synthetic oligonucleotide
  Sense strand starting at position 673 of SEQ ID NO: 586115
agguguuuacuacauuaaa

SEQ ID NO: 693163 - RNA, 19 nt, Artificial Sequence
  Description of Artificial Sequence: Synthetic oligonucleotide
  Antisense strand to SEQ ID NO: 693162
uuuaauguaguaaacaccu

SEQ ID NO: 693164 - RNA, 19 nt, Artificial Sequence
  Description of Artificial Sequence: Synthetic oligonucleotide
  Sense strand starting at position 1146 of SEQ ID NO: 586115
gaagguuguauugguaaug

SEQ ID NO: 693165 - RNA, 19 nt, Artificial Sequence
  Description of Artificial Sequence: Synthetic oligonucleotide
  Antisense strand to SEQ ID NO: 693164
cauuaccaauacaaccuuc

SEQ ID NO: 693166 - RNA, 19 nt, Artificial Sequence
  Description of Artificial Sequence: Synthetic oligonucleotide
  Sense strand starting at position 1147 of SEQ ID NO: 586115
aagguuguauugguaauga

SEQ ID NO: 693167 - RNA, 19 nt, Artificial Sequence
  Description of Artificial Sequence: Synthetic oligonucleotide
  Antisense strand to SEQ ID NO: 693166
ucauuaccaauacaaccuu

SEQ ID NO: 693168 - RNA, 19 nt, Artificial Sequence
  Description of Artificial Sequence: Synthetic oligonucleotide
  Sense strand starting at position 1189 of SEQ ID NO: 586115
cuucccauguggguaauau

SEQ ID NO: 693169 - RNA, 19 nt, Artificial Sequence
  Description of Artificial Sequence: Synthetic oligonucleotide
  Antisense strand to SEQ ID NO: 693168
auauuacccacaugggaag

SEQ ID NO: 693170 - RNA, 19 nt, Artificial Sequence
  Description of Artificial Sequence: Synthetic oligonucleotide
  Sense strand starting at position 1190 of SEQ ID NO: 586115
uucccauguggguaauauc

SEQ ID NO: 693171 - RNA, 19 nt, Artificial Sequence
  Description of Artificial Sequence: Synthetic oligonucleotide
  Antisense strand to SEQ ID NO: 693170
gauauuacccacaugggaa

SEQ ID NO: 693172 - RNA, 19 nt, Artificial Sequence
  Description of Artificial Sequence: Synthetic oligonucleotide
  Sense strand starting at position 1225 of SEQ ID NO: 586115
cgaaauuucuugucaaguu

SEQ ID NO: 693173 - RNA, 19 nt, Artificial Sequence
  Description of Artificial Sequence: Synthetic oligonucleotide
  Antisense strand to SEQ ID NO: 693172
aacuugacaagaaauuucg

SEQ ID NO: 693174 - RNA, 19 nt, Artificial Sequence
  Description of Artificial Sequence: Synthetic oligonucleotide
  Sense strand starting at position 1248 of SEQ ID NO: 586115
ucguucuugagagaccaaa

SEQ ID NO: 693175 - RNA, 19 nt, Artificial Sequence
  Description of Artificial Sequence: Synthetic oligonucleotide
  Antisense strand to SEQ ID NO: 693174
uuuggucucucaagaacga

SEQ ID NO: 693176 - RNA, 19 nt, Artificial Sequence
  Description of Artificial Sequence: Synthetic oligonucleotide
  Sense strand starting at position 1325 of SEQ ID NO: 586115
gagcguggacuacauauaa

SEQ ID NO: 693177 - RNA, 19 nt, Artificial Sequence
  Description of Artificial Sequence: Synthetic oligonucleotide
  Antisense strand to SEQ ID NO: 693176
uuauauguaguccacgcuc

SEQ ID NO: 693178 - RNA, 19 nt, Artificial Sequence
  Description of Artificial Sequence: Synthetic oligonucleotide
  Sense strand starting at position 1360 of SEQ ID NO: 586115
auggcaaaucacugccaau

SEQ ID NO: 693179 - RNA, 19 nt, Artificial Sequence
  Description of Artificial Sequence: Synthetic oligonucleotide
  Antisense strand to SEQ ID NO: 693178
auuggcagugauuugccau

SEQ ID NO: 693180 - RNA, 19 nt, Artificial Sequence
  Description of Artificial Sequence: Synthetic oligonucleotide
  Sense strand starting at position 2205 of SEQ ID NO: 586115
gcagcuauuuauucccagu

SEQ ID NO: 693181 - RNA, 19 nt, Artificial Sequence
  Description of Artificial Sequence: Synthetic oligonucleotide
  Antisense strand to SEQ ID NO: 693180
acugggaauaaauagcugc

SEQ ID NO: 693182 - RNA, 19 nt, Artificial Sequence
  Description of Artificial Sequence: Synthetic oligonucleotide
  Sense strand starting at position 2357 of SEQ ID NO: 586115
uguaacuacuacuuggaga

SEQ ID NO: 693183 - RNA, 19 nt, Artificial Sequence
  Description of Artificial Sequence: Synthetic oligonucleotide
  Antisense strand to SEQ ID NO: 693182
ucuccaaguaguaguuaca

SEQ ID NO: 693184 - RNA, 19 nt, Artificial Sequence
  Description of Artificial Sequence: Synthetic oligonucleotide
  Sense strand starting at position 2364 of SEQ ID NO: 586115
acuacuuggagauguuaga

SEQ ID NO: 693185 - RNA, 19 nt, Artificial Sequence
  Description of Artificial Sequence: Synthetic oligonucleotide
  Antisense strand to SEQ ID NO: 693184
ucuaacaucuccaaguagu

SEQ ID NO: 693186 - RNA, 19 nt, Artificial Sequence
  Description of Artificial Sequence: Synthetic oligonucleotide
  Sense strand starting at position 2431 of SEQ ID NO: 586115
cuacacaauugugcgauua

SEQ ID NO: 693187 - RNA, 19 nt, Artificial Sequence
  Description of Artificial Sequence: Synthetic oligonucleotide
  Antisense strand to SEQ ID NO: 693186
uaaucgcacaauuguguag

SEQ ID NO: 693188 - RNA, 19 nt, Artificial Sequence
  Description of Artificial Sequence: Synthetic oligonucleotide
  Sense strand starting at position 2432 of SEQ ID NO: 586115
uacacaauugugcgauuaa

SEQ ID NO: 693189 - RNA, 19 nt, Artificial Sequence
  Description of Artificial Sequence: Synthetic oligonucleotide
  Antisense strand to SEQ ID NO: 693188
uuaaucgcacaauugugua

SEQ ID NO: 693190 - RNA, 19 nt, Artificial Sequence
  Description of Artificial Sequence: Synthetic oligonucleotide
  Sense strand starting at position 2445 of SEQ ID NO: 586115
gauuaauucgcuuauucga

SEQ ID NO: 693191 - RNA, 19 nt, Artificial Sequence
  Description of Artificial Sequence: Synthetic oligonucleotide
  Antisense strand to SEQ ID NO: 693190
ucgaauaagcgaauuaauc

SEQ ID NO: 693192 - RNA, 19 nt, Artificial Sequence
  Description of Artificial Sequence: Synthetic oligonucleotide
  Sense strand starting at position 2498 of SEQ ID NO: 586115
aauggagagucauagauga

SEQ ID NO: 693193 - RNA, 19 nt, Artificial Sequence
  Description of Artificial Sequence: Synthetic oligonucleotide
  Antisense strand to SEQ ID NO: 693192
ucaucuaugacucuccauu

SEQ ID NO: 693194 - RNA, 19 nt, Artificial Sequence
  Description of Artificial Sequence: Synthetic oligonucleotide
  Sense strand starting at position 2544 of SEQ ID NO: 586115
cucagagauucuuuauagc

SEQ ID NO: 693195 - RNA, 19 nt, Artificial Sequence
  Description of Artificial Sequence: Synthetic oligonucleotide
  Antisense strand to SEQ ID NO: 693194
gcuauaaagaaucucugag

SEQ ID NO: 693196 - RNA, 19 nt, Artificial Sequence
  Description of Artificial Sequence: Synthetic oligonucleotide
  Sense strand starting at position 2591 of SEQ ID NO: 586115
uuuccugaugacugcaaau

SEQ ID NO: 693197 - RNA, 19 nt, Artificial Sequence
  Description of Artificial Sequence: Synthetic oligonucleotide
  Antisense strand to SEQ ID NO: 693196
auuugcagucaucaggaaa

SEQ ID NO: 693198 - RNA, 19 nt, Artificial Sequence
  Description of Artificial Sequence: Synthetic oligonucleotide
  Sense strand starting at position 2593 of SEQ ID NO: 586115
uccugaugacugcaaauca

SEQ ID NO: 693199 - RNA, 19 nt, Artificial Sequence
  Description of Artificial Sequence: Synthetic oligonucleotide
  Antisense strand to SEQ ID NO: 693198
ugauuugcagucaucagga

SEQ ID NO: 693200 - RNA, 19 nt, Artificial Sequence
  Description of Artificial Sequence: Synthetic oligonucleotide
  Sense strand starting at position 2678 of SEQ ID NO: 586115
ucuuuagcucuacagggua

SEQ ID NO: 693201 - RNA, 19 nt, Artificial Sequence
  Description of Artificial Sequence: Synthetic oligonucleotide
  Antisense strand to SEQ ID NO: 693200
uacccuguagagcuaaaga

SEQ ID NO: 693202 - RNA, 19 nt, Artificial Sequence
  Description of Artificial Sequence: Synthetic oligonucleotide
  Sense strand starting at position 2790 of SEQ ID NO: 586115
guuauaugucaugagauuc

SEQ ID NO: 693203 - RNA, 19 nt, Artificial Sequence
  Description of Artificial Sequence: Synthetic oligonucleotide
  Antisense strand to SEQ ID NO: 693202
gaaucucaugacauauaac

SEQ ID NO: 693204 - RNA, 19 nt, Artificial Sequence
  Description of Artificial Sequence: Synthetic oligonucleotide
  Sense strand starting at position 2796 of SEQ ID NO: 586115
ugucaugagauucgugaua

SEQ ID NO: 693205 - RNA, 19 nt, Artificial Sequence
  Description of Artificial Sequence: Synthetic oligonucleotide
  Antisense strand to SEQ ID NO: 693204
uaucacgaaucucaugaca

SEQ ID NO: 693206 - RNA, 19 nt, Artificial Sequence
  Description of Artificial Sequence: Synthetic oligonucleotide
  Sense strand starting at position 2870 of SEQ ID NO: 586115
agcacuauggcuuaagcau

SEQ ID NO: 693207 - RNA, 19 nt, Artificial Sequence
  Description of Artificial Sequence: Synthetic oligonucleotide
  Antisense strand to SEQ ID NO: 693206
augcuuaagccauagugcu

SEQ ID NO: 693208 - RNA, 19 nt, Artificial Sequence
  Description of Artificial Sequence: Synthetic oligonucleotide
  Sense strand starting at position 2876 of SEQ ID NO: 586115
auggcuuaagcauggaaau

SEQ ID NO: 693209 - RNA, 19 nt, Artificial Sequence
  Description of Artificial Sequence: Synthetic oligonucleotide
  Antisense strand to SEQ ID NO: 693208
auuuccaugcuuaagccau

SEQ ID NO: 693210 - RNA, 19 nt, Artificial Sequence
  Description of Artificial Sequence: Synthetic oligonucleotide
  Sense strand starting at position 2877 of SEQ ID NO: 586115
uggcuuaagcauggaaaug

SEQ ID NO: 693211 - RNA, 19 nt, Artificial Sequence
  Description of Artificial Sequence: Synthetic oligonucleotide
  Antisense strand to SEQ ID NO: 693210
cauuuccaugcuuaagcca

SEQ ID NO: 693212 - RNA, 19 nt, Artificial Sequence
  Description of Artificial Sequence: Synthetic oligonucleotide
  Sense strand starting at position 2895 of SEQ ID NO: 586115
ggguuaacauaaucucuuu

SEQ ID NO: 693213 - RNA, 19 nt, Artificial Sequence
  Description of Artificial Sequence: Synthetic oligonucleotide
  Antisense strand to SEQ ID NO: 693212
aaagagauuauguuaaccc

SEQ ID NO: 693214 - RNA, 19 nt, Artificial Sequence
  Description of Artificial Sequence: Synthetic oligonucleotide
  Sense strand starting at position 2978 of SEQ ID NO: 586115
agauuagaccuuggccaga

SEQ ID NO: 693215 - RNA, 19 nt, Artificial Sequence
  Description of Artificial Sequence: Synthetic oligonucleotide
  Antisense strand to SEQ ID NO: 693214
ucuggccaaggucuaaucu

SEQ ID NO: 693216 - RNA, 19 nt, Artificial Sequence
  Description of Artificial Sequence: Synthetic oligonucleotide
  Sense strand starting at position 3040 of SEQ ID NO: 586115
gcucuuauaguugaagcuu

SEQ ID NO: 693217 - RNA, 19 nt, Artificial Sequence
  Description of Artificial Sequence: Synthetic oligonucleotide
  Antisense strand to SEQ ID NO: 693216
aagcuucaacuauaagagc

SEQ ID NO: 693218 - RNA, 19 nt, Artificial Sequence
  Description of Artificial Sequence: Synthetic oligonucleotide
  Sense strand starting at position 3192 of SEQ ID NO: 586115
auggucuaaccagguuaua

SEQ ID NO: 693219 - RNA, 19 nt, Artificial Sequence
  Description of Artificial Sequence: Synthetic oligonucleotide
  Antisense strand to SEQ ID NO: 693218
uauaaccugguuagaccau

SEQ ID NO: 693220 - RNA, 19 nt, Artificial Sequence
  Description of Artificial Sequence: Synthetic oligonucleotide
  Sense strand starting at position 3195 of SEQ ID NO: 586115
gucuaaccagguuauauaa

SEQ ID NO: 693221 - RNA, 19 nt, Artificial Sequence
  Description of Artificial Sequence: Synthetic oligonucleotide
  Antisense strand to SEQ ID NO: 693220
uuauauaaccugguuagac

SEQ ID NO: 693222 - RNA, 19 nt, Artificial Sequence
  Description of Artificial Sequence: Synthetic oligonucleotide
  Sense strand starting at position 3228 of SEQ ID NO: 586115
ggcugagagacuuaagucu

SEQ ID NO: 693223 - RNA, 19 nt, Artificial Sequence
  Description of Artificial Sequence: Synthetic oligonucleotide
  Antisense strand to SEQ ID NO: 693222
agacuuaagucucucagcc

SEQ ID NO: 693224 - RNA, 19 nt, Artificial Sequence
  Description of Artificial Sequence: Synthetic oligonucleotide
  Sense strand starting at position 3283 of SEQ ID NO: 586115
ccaaguaguccaugggaag

SEQ ID NO: 693225 - RNA, 19 nt, Artificial Sequence
  Description of Artificial Sequence: Synthetic oligonucleotide
  Antisense strand to SEQ ID NO: 693224
cuucccauggacuacuugg

SEQ ID NO: 693226 - RNA, 19 nt, Artificial Sequence
  Description of Artificial Sequence: Synthetic oligonucleotide
  Sense strand starting at position 3284 of SEQ ID NO: 586115
caaguaguccaugggaaga

SEQ ID NO: 693227 - RNA, 19 nt, Artificial Sequence
  Description of Artificial Sequence: Synthetic oligonucleotide
  Antisense strand to SEQ ID NO: 693226
ucuucccauggacuacuug

SEQ ID NO: 693228 - RNA, 19 nt, Artificial Sequence
  Description of Artificial Sequence: Synthetic oligonucleotide
  Sense strand starting at position 3728 of SEQ ID NO: 586115
gguguagaggcacaaucau

SEQ ID NO: 693229 - RNA, 19 nt, Artificial Sequence
  Description of Artificial Sequence: Synthetic oligonucleotide
  Antisense strand to SEQ ID NO: 693228
augauugugccucuacacc

SEQ ID NO: 693230 - RNA, 19 nt, Artificial Sequence
  Description of Artificial Sequence: Synthetic oligonucleotide
  Sense strand starting at position 3783 of SEQ ID NO: 586115
uccucaugccuugguauaa

SEQ ID NO: 693231 - RNA, 19 nt, Artificial Sequence
  Description of Artificial Sequence: Synthetic oligonucleotide
  Antisense strand to SEQ ID NO: 693230
uuauaccaaggcaugagga

SEQ ID NO: 693232 - RNA, 19 nt, Artificial Sequence
  Description of Artificial Sequence: Synthetic oligonucleotide
  Sense strand starting at position 3880 of SEQ ID NO: 586115
uuauguucuggugggagua

SEQ ID NO: 693233 - RNA, 19 nt, Artificial Sequence
  Description of Artificial Sequence: Synthetic oligonucleotide
  Antisense strand to SEQ ID NO: 693232
uacucccaccagaacauaa

SEQ ID NO: 693234 - RNA, 19 nt, Artificial Sequence
  Description of Artificial Sequence: Synthetic oligonucleotide
  Sense strand starting at position 3881 of SEQ ID NO: 586115
uauguucuggugggaguaa

SEQ ID NO: 693235 - RNA, 19 nt, Artificial Sequence
  Description of Artificial Sequence: Synthetic oligonucleotide
  Antisense strand to SEQ ID NO: 693234
uuacucccaccagaacaua

SEQ ID NO: 693236 - RNA, 19 nt, Artificial Sequence
  Description of Artificial Sequence: Synthetic oligonucleotide
  Sense strand starting at position 65 of SEQ ID NO: 586116
cccauauggcacuggauaa

SEQ ID NO: 693237 - RNA, 19 nt, Artificial Sequence
  Description of Artificial Sequence: Synthetic oligonucleotide
  Antisense strand to SEQ ID NO: 693236
uuauccagugccauauggg

SEQ ID NO: 693238 - RNA, 19 nt, Artificial Sequence
  Description of Artificial Sequence: Synthetic oligonucleotide
  Sense strand starting at position 69 of SEQ ID NO: 586116
uauggcacuggauaaguua

SEQ ID NO: 693239 - RNA, 19 nt, Artificial Sequence
  Description of Artificial Sequence: Synthetic oligonucleotide
  Antisense strand to SEQ ID NO: 693238
uaacuuauccagugccaua

SEQ ID NO: 693240 - RNA, 19 nt, Artificial Sequence
  Description of Artificial Sequence: Synthetic oligonucleotide
  Sense strand starting at position 153 of SEQ ID NO: 586116
uccuaaagguaucaagaca

SEQ ID NO: 693241 - RNA, 19 nt, Artificial Sequence
  Description of Artificial Sequence: Synthetic oligonucleotide
  Antisense strand to SEQ ID NO: 693240
ugucuugauaccuuuagga

SEQ ID NO: 693242 - RNA, 19 nt, Artificial Sequence
  Description of Artificial Sequence: Synthetic oligonucleotide
  Sense strand starting at position 580 of SEQ ID NO: 586116
gagauccaggccugauauc

SEQ ID NO: 693243 - RNA, 19 nt, Artificial Sequence
  Description of Artificial Sequence: Synthetic oligonucleotide
  Antisense strand to SEQ ID NO: 693242
gauaucaggccuggaucuc

SEQ ID NO: 693244 - RNA, 19 nt, Artificial Sequence
  Description of Artificial Sequence: Synthetic oligonucleotide
  Sense strand starting at position 596 of SEQ ID NO: 586116
aucagauguuaaucaugca

SEQ ID NO: 693245 - RNA, 19 nt, Artificial Sequence
  Description of Artificial Sequence: Synthetic oligonucleotide
  Antisense strand to SEQ ID NO: 693244
ugcaugauuaacaucugau

SEQ ID NO: 693246 - RNA, 19 nt, Artificial Sequence
  Description of Artificial Sequence: Synthetic oligonucleotide
  Sense strand starting at position 627 of SEQ ID NO: 586116
auaucuuaauuugggagua

SEQ ID NO: 693247 - RNA, 19 nt, Artificial Sequence
  Description of Artificial Sequence: Synthetic oligonucleotide
  Antisense strand to SEQ ID NO: 693246
uacucccaaauuaagauau

SEQ ID NO: 693248 - RNA, 19 nt, Artificial Sequence
  Description of Artificial Sequence: Synthetic oligonucleotide
  Sense strand starting at position 686 of SEQ ID NO: 586116
accagaaaucuaggcuaga

SEQ ID NO: 693249 - RNA, 19 nt, Artificial Sequence
  Description of Artificial Sequence: Synthetic oligonucleotide
  Antisense strand to SEQ ID NO: 693248
ucuagccuagauuucuggu

SEQ ID NO: 693250 - RNA, 19 nt, Artificial Sequence
  Description of Artificial Sequence: Synthetic oligonucleotide
  Sense strand starting at position 691 of SEQ ID NO: 586116
aaaucuaggcuagaauugu

SEQ ID NO: 693251 - RNA, 19 nt, Artificial Sequence
  Description of Artificial Sequence: Synthetic oligonucleotide
  Antisense strand to SEQ ID NO: 693250
acaauucuagccuagauuu

SEQ ID NO: 693252 - RNA, 19 nt, Artificial Sequence
  Description of Artificial Sequence: Synthetic oligonucleotide
  Sense strand starting at position 700 of SEQ ID NO: 586116
cuagaauuguggcuguaaa

SEQ ID NO: 693253 - RNA, 19 nt, Artificial Sequence
  Description of Artificial Sequence: Synthetic oligonucleotide
  Antisense strand to SEQ ID NO: 693252
uuuacagccacaauucuag

SEQ ID NO: 693254 - RNA, 19 nt, Artificial Sequence
  Description of Artificial Sequence: Synthetic oligonucleotide
  Sense strand starting at position 701 of SEQ ID NO: 586116
uagaauuguggcuguaaau

SEQ ID NO: 693255 - RNA, 19 nt, Artificial Sequence
  Description of Artificial Sequence: Synthetic oligonucleotide
  Antisense strand to SEQ ID NO: 693254
auuuacagccacaauucua

SEQ ID NO: 693256 - RNA, 19 nt, Artificial Sequence
  Description of Artificial Sequence: Synthetic oligonucleotide
  Sense strand starting at position 790 of SEQ ID NO: 586116
aaucuagaguuuccuggau

SEQ ID NO: 693257 - RNA, 19 nt, Artificial Sequence
  Description of Artificial Sequence: Synthetic oligonucleotide
  Antisense strand to SEQ ID NO: 693256
auccaggaaacucuagauu

SEQ ID NO: 693258 - RNA, 19 nt, Artificial Sequence
  Description of Artificial Sequence: Synthetic oligonucleotide
  Sense strand starting at position 794 of SEQ ID NO: 586116
uagaguuuccuggaugcua

SEQ ID NO: 693259 - RNA, 19 nt, Artificial Sequence
  Description of Artificial Sequence: Synthetic oligonucleotide
  Antisense strand to SEQ ID NO: 693258
uagcauccaggaaacucua

SEQ ID NO: 693260 - RNA, 19 nt, Artificial Sequence
  Description of Artificial Sequence: Synthetic oligonucleotide
  Sense strand starting at position 819 of SEQ ID NO: 586116
ggauccagucauggcaaca

SEQ ID NO: 693261 - RNA, 19 nt, Artificial Sequence
  Description of Artificial Sequence: Synthetic oligonucleotide
  Antisense strand to SEQ ID NO: 693260
uguugccaugacuggaucc

SEQ ID NO: 693262 - RNA, 19 nt, Artificial Sequence
  Description of Artificial Sequence: Synthetic oligonucleotide
  Sense strand starting at position 837 of SEQ ID NO: 586116
agggaucuuaaagguguaa

SEQ ID NO: 693263 - RNA, 19 nt, Artificial Sequence
  Description of Artificial Sequence: Synthetic oligonucleotide
  Antisense strand to SEQ ID NO: 693262
uuacaccuuuaagaucccu

SEQ ID NO: 693264 - RNA, 19 nt, Artificial Sequence
  Description of Artificial Sequence: Synthetic oligonucleotide
  Sense strand starting at position 839 of SEQ ID NO: 586116
ggaucuuaaagguguaaau

SEQ ID NO: 693265 - RNA, 19 nt, Artificial Sequence
  Description of Artificial Sequence: Synthetic oligonucleotide
  Antisense strand to SEQ ID NO: 693264
auuuacaccuuuaagaucc

SEQ ID NO: 693266 - RNA, 19 nt, Artificial Sequence
  Description of Artificial Sequence: Synthetic oligonucleotide
  Sense strand starting at position 848 of SEQ ID NO: 586116
agguguaaaugauuaaccu

SEQ ID NO: 693267 - RNA, 19 nt, Artificial Sequence
  Description of Artificial Sequence: Synthetic oligonucleotide
  Antisense strand to SEQ ID NO: 693266
agguuaaucauuuacaccu

SEQ ID NO: 693268 - RNA, 19 nt, Artificial Sequence
  Description of Artificial Sequence: Synthetic oligonucleotide
  Sense strand starting at position 849 of SEQ ID NO: 586116
gguguaaaugauuaaccuu

SEQ ID NO: 693269 - RNA, 19 nt, Artificial Sequence
  Description of Artificial Sequence: Synthetic oligonucleotide
  Antisense strand to SEQ ID NO: 693268
aagguuaaucauuuacacc

SEQ ID NO: 693270 - RNA, 19 nt, Artificial Sequence
  Description of Artificial Sequence: Synthetic oligonucleotide
  Sense strand starting at position 932 of SEQ ID NO: 586116
uggcucucaucucuuagau

SEQ ID NO: 693271 - RNA, 19 nt, Artificial Sequence
  Description of Artificial Sequence: Synthetic oligonucleotide
  Antisense strand to SEQ ID NO: 693270
aucuaagagaugagagcca

SEQ ID NO: 693272 - RNA, 19 nt, Artificial Sequence
  Description of Artificial Sequence: Synthetic oligonucleotide
  Sense strand starting at position 990 of SEQ ID NO: 586116
cugcuaagauuaguaucua

SEQ ID NO: 693273 - RNA, 19 nt, Artificial Sequence
  Description of Artificial Sequence: Synthetic oligonucleotide
  Antisense strand to SEQ ID NO: 693272
uagauacuaaucuuagcag

SEQ ID NO: 693274 - RNA, 19 nt, Artificial Sequence
  Description of Artificial Sequence: Synthetic oligonucleotide
  Sense strand starting at position 1044 of SEQ ID NO: 586116
cuaucucuaggcugucaau

SEQ ID NO: 693275 - RNA, 19 nt, Artificial Sequence
  Description of Artificial Sequence: Synthetic oligonucleotide
  Antisense strand to SEQ ID NO: 693274
auugacagccuagagauag

SEQ ID NO: 693276 - RNA, 19 nt, Artificial Sequence
  Description of Artificial Sequence: Synthetic oligonucleotide
  Sense strand starting at position 1179 of SEQ ID NO: 586116
aagaaaggugcccguccau

SEQ ID NO: 693277 - RNA, 19 nt, Artificial Sequence
  Description of Artificial Sequence: Synthetic oligonucleotide
  Antisense strand to SEQ ID NO: 693276
auggacgggcaccuuucuu

SEQ ID NO: 693278 - RNA, 19 nt, Artificial Sequence
  Description of Artificial Sequence: Synthetic oligonucleotide
  Sense strand starting at position 1243 of SEQ ID NO: 586116
gcaugaaguucccucuaaa

SEQ ID NO: 693279 - RNA, 19 nt, Artificial Sequence
  Description of Artificial Sequence: Synthetic oligonucleotide
  Antisense strand to SEQ ID NO: 693278
uuuagagggaacuucaugc

SEQ ID NO: 693280 - RNA, 19 nt, Artificial Sequence
  Description of Artificial Sequence: Synthetic oligonucleotide
  Sense strand starting at position 1246 of SEQ ID NO: 586116
ugaaguucccucuaaaggu

SEQ ID NO: 693281 - RNA, 19 nt, Artificial Sequence
  Description of Artificial Sequence: Synthetic oligonucleotide
  Antisense strand to SEQ ID NO: 693280
accuuuagagggaacuuca

SEQ ID NO: 693282 - RNA, 19 nt, Artificial Sequence
  Description of Artificial Sequence: Synthetic oligonucleotide
  Sense strand starting at position 1256 of SEQ ID NO: 586116
ucuaaaggugcaugucauu

SEQ ID NO: 693283 - RNA, 19 nt, Artificial Sequence
  Description of Artificial Sequence: Synthetic oligonucleotide
  Antisense strand to SEQ ID NO: 693282
aaugacaugcaccuuuaga

SEQ ID NO: 693284 - RNA, 19 nt, Artificial Sequence
  Description of Artificial Sequence: Synthetic oligonucleotide
  Sense strand starting at position 2241 of SEQ ID NO: 586116
cuaguuccgauuggugagu

SEQ ID NO: 693285 - RNA, 19 nt, Artificial Sequence
  Description of Artificial Sequence: Synthetic oligonucleotide
  Antisense strand to SEQ ID NO: 693284
acucaccaaucggaacuag

SEQ ID NO: 693286 - RNA, 19 nt, Artificial Sequence
  Description of Artificial Sequence: Synthetic oligonucleotide
  Sense strand starting at position 2354 of SEQ ID NO: 586116
ugucguccucccgacugau

SEQ ID NO: 693287 - RNA, 19 nt, Artificial Sequence
  Description of Artificial Sequence: Synthetic oligonucleotide
  Antisense strand to SEQ ID NO: 693286
aucagucgggaggacgaca

SEQ ID NO: 693288 - RNA, 19 nt, Artificial Sequence
  Description of Artificial Sequence: Synthetic oligonucleotide
  Sense strand starting at position 2372 of SEQ ID NO: 586116
ugacguuaauucccggcaa

SEQ ID NO: 693289 - RNA, 19 nt, Artificial Sequence
  Description of Artificial Sequence: Synthetic oligonucleotide
  Antisense strand to SEQ ID NO: 693288
uugccgggaauuaacguca

SEQ ID NO: 693290 - RNA, 19 nt, Artificial Sequence
  Description of Artificial Sequence: Synthetic oligonucleotide
  Sense strand starting at position 2374 of SEQ ID NO: 586116
acguuaauucccggcaaau

SEQ ID NO: 693291 - RNA, 19 nt, Artificial Sequence
  Description of Artificial Sequence: Synthetic oligonucleotide
  Antisense strand to SEQ ID NO: 693290
auuugccgggaauuaacgu

SEQ ID NO: 693292 - RNA, 19 nt, Artificial Sequence
  Description of Artificial Sequence: Synthetic oligonucleotide
  Sense strand starting at position 2404 of SEQ ID NO: 586116
acucuagacuguguagagu

SEQ ID NO: 693293 - RNA, 19 nt, Artificial Sequence
  Description of Artificial Sequence: Synthetic oligonucleotide
  Antisense strand to SEQ ID NO: 693292
acucuacacagucuagagu

SEQ ID NO: 693294 - RNA, 19 nt, Artificial Sequence
  Description of Artificial Sequence: Synthetic oligonucleotide
  Sense strand starting at position 2509 of SEQ ID NO: 586116
gagcaagagugcuuuacua

SEQ ID NO: 693295 - RNA, 19 nt, Artificial Sequence
  Description of Artificial Sequence: Synthetic oligonucleotide
  Antisense strand to SEQ ID NO: 693294
uaguaaagcacucuugcuc

SEQ ID NO: 693296 - RNA, 19 nt, Artificial Sequence
  Description of Artificial Sequence: Synthetic oligonucleotide
  Sense strand starting at position 2511 of SEQ ID NO: 586116
gcaagagugcuuuacuaga

SEQ ID NO: 693297 - RNA, 19 nt, Artificial Sequence
  Description of Artificial Sequence: Synthetic oligonucleotide
  Antisense strand to SEQ ID NO: 693296
ucuaguaaagcacucuugc

SEQ ID NO: 693298 - RNA, 19 nt, Artificial Sequence
  Description of Artificial Sequence: Synthetic oligonucleotide
  Sense strand starting at position 2516 of SEQ ID NO: 586116
agugcuuuacuagaccagu

SEQ ID NO: 693299 - RNA, 19 nt, Artificial Sequence
  Description of Artificial Sequence: Synthetic oligonucleotide
  Antisense strand to SEQ ID NO: 693298
acuggucuaguaaagcacu

SEQ ID NO: 693300 - RNA, 19 nt, Artificial Sequence
  Description of Artificial Sequence: Synthetic oligonucleotide
  Sense strand starting at position 2522 of SEQ ID NO: 586116
uuacuagaccagugcucua

SEQ ID NO: 693301 - RNA, 19 nt, Artificial Sequence
  Description of Artificial Sequence: Synthetic oligonucleotide
  Antisense strand to SEQ ID NO: 693300
uagagcacuggucuaguaa

SEQ ID NO: 693302 - RNA, 19 nt, Artificial Sequence
  Description of Artificial Sequence: Synthetic oligonucleotide
  Sense strand starting at position 2525 of SEQ ID NO: 586116
cuagaccagugcucuaauu

SEQ ID NO: 693303 - RNA, 19 nt, Artificial Sequence
  Description of Artificial Sequence: Synthetic oligonucleotide
  Antisense strand to SEQ ID NO: 693302
aauuagagcacuggucuag

SEQ ID NO: 693304 - RNA, 19 nt, Artificial Sequence
  Description of Artificial Sequence: Synthetic oligonucleotide
  Sense strand starting at position 2535 of SEQ ID NO: 586116
gcucuaauuccugagccac

SEQ ID NO: 693305 - RNA, 19 nt, Artificial Sequence
  Description of Artificial Sequence: Synthetic oligonucleotide
  Antisense strand to SEQ ID NO: 693304
guggcucaggaauuagagc

SEQ ID NO: 693306 - RNA, 19 nt, Artificial Sequence
  Description of Artificial Sequence: Synthetic oligonucleotide
  Sense strand starting at position 2555 of SEQ ID NO: 586116
gagcgaagggagugcuuua

SEQ ID NO: 693307 - RNA, 19 nt, Artificial Sequence
  Description of Artificial Sequence: Synthetic oligonucleotide
  Antisense strand to SEQ ID NO: 693306
uaaagcacucccuucgcuc

SEQ ID NO: 693308 - RNA, 19 nt, Artificial Sequence
  Description of Artificial Sequence: Synthetic oligonucleotide
  Sense strand starting at position 2596 of SEQ ID NO: 586116
gccuaucccagagguggaa

SEQ ID NO: 693309 - RNA, 19 nt, Artificial Sequence
  Description of Artificial Sequence: Synthetic oligonucleotide
  Antisense strand to SEQ ID NO: 693308
uuccaccucugggauaggc

SEQ ID NO: 693310 - RNA, 19 nt, Artificial Sequence
  Description of Artificial Sequence: Synthetic oligonucleotide
  Sense strand starting at position 2730 of SEQ ID NO: 586116
gguggacuauuauucgauu

SEQ ID NO: 693311 - RNA, 19 nt, Artificial Sequence
  Description of Artificial Sequence: Synthetic oligonucleotide
  Antisense strand to SEQ ID NO: 693310
aaucgaauaauaguccacc

SEQ ID NO: 693312 - RNA, 19 nt, Artificial Sequence
  Description of Artificial Sequence: Synthetic oligonucleotide
  Sense strand starting at position 2731 of SEQ ID NO: 586116
guggacuauuauucgauua

SEQ ID NO: 693313 - RNA, 19 nt, Artificial Sequence
  Description of Artificial Sequence: Synthetic oligonucleotide
  Antisense strand to SEQ ID NO: 693312
uaaucgaauaauaguccac

SEQ ID NO: 693314 - RNA, 19 nt, Artificial Sequence
  Description of Artificial Sequence: Synthetic oligonucleotide
  Sense strand starting at position 2790 of SEQ ID NO: 586116
cguucuagacacugggaau

SEQ ID NO: 693315 - RNA, 19 nt, Artificial Sequence
  Description of Artificial Sequence: Synthetic oligonucleotide
  Antisense strand to SEQ ID NO: 693314
auucccagugucuagaacg

SEQ ID NO: 693316 - RNA, 19 nt, Artificial Sequence
  Description of Artificial Sequence: Synthetic oligonucleotide
  Sense strand starting at position 13 of SEQ ID NO: 586117
gagccuucgggagauaauu

SEQ ID NO: 693317 - RNA, 19 nt, Artificial Sequence
  Description of Artificial Sequence: Synthetic oligonucleotide
  Antisense strand to SEQ ID NO: 693316
aauuaucucccgaaggcuc

SEQ ID NO: 693318 - RNA, 19 nt, Artificial Sequence
  Description of Artificial Sequence: Synthetic oligonucleotide
  Sense strand starting at position 46 of SEQ ID NO: 586117
gcucccaugaaagggauua

SEQ ID NO: 693319 - RNA, 19 nt, Artificial Sequence
  Description of Artificial Sequence: Synthetic oligonucleotide
  Antisense strand to SEQ ID NO: 693318
uaaucccuuucaugggagc

SEQ ID NO: 693320 - RNA, 19 nt, Artificial Sequence
  Description of Artificial Sequence: Synthetic oligonucleotide
  Sense strand starting at position 57 of SEQ ID NO: 586117
agggauuaguguccuuaug

SEQ ID NO: 693321 - RNA, 19 nt, Artificial Sequence
  Description of Artificial Sequence: Synthetic oligonucleotide
  Antisense strand to SEQ ID NO: 693320
cauaaggacacuaaucccu

SEQ ID NO: 693322 - RNA, 19 nt, Artificial Sequence
  Description of Artificial Sequence: Synthetic oligonucleotide
  Sense strand starting at position 309 of SEQ ID NO: 586117
acaguaaaguguguugaga

SEQ ID NO: 693323 - RNA, 19 nt, Artificial Sequence
  Description of Artificial Sequence: Synthetic oligonucleotide
  Antisense strand to SEQ ID NO: 693322
ucucaacacacuuuacugu

SEQ ID NO: 693324 - RNA, 19 nt, Artificial Sequence
  Description of Artificial Sequence: Synthetic oligonucleotide
  Sense strand starting at position 328 of SEQ ID NO: 586117
gaaacauacguagauaguu

SEQ ID NO: 693325 - RNA, 19 nt, Artificial Sequence
  Description of Artificial Sequence: Synthetic oligonucleotide
  Antisense strand to SEQ ID NO: 693324
aacuaucuacguauguuuc

SEQ ID NO: 693326 - RNA, 19 nt, Artificial Sequence
  Description of Artificial Sequence: Synthetic oligonucleotide
  Sense strand starting at position 426 of SEQ ID NO: 586117
aggccuauuuguucugauu

SEQ ID NO: 693327 - RNA, 19 nt, Artificial Sequence
  Description of Artificial Sequence: Synthetic oligonucleotide
  Antisense strand to SEQ ID NO: 693326
aaucagaacaaauaggccu

SEQ ID NO: 693328 - RNA, 19 nt, Artificial Sequence
  Description of Artificial Sequence: Synthetic oligonucleotide
  Sense strand starting at position 773 of SEQ ID NO: 586117
gcaagagucucauuuguuc

SEQ ID NO: 693329 - RNA, 19 nt, Artificial Sequence
  Description of Artificial Sequence: Synthetic oligonucleotide
  Antisense strand to SEQ ID NO: 693328
gaacaaaugagacucuugc

SEQ ID NO: 693330 - RNA, 19 nt, Artificial Sequence
  Description of Artificial Sequence: Synthetic oligonucleotide
  Sense strand starting at position 991 of SEQ ID NO: 586117
uaagcaggugagugauaua

SEQ ID NO: 693331 - RNA, 19 nt, Artificial Sequence
  Description of Artificial Sequence: Synthetic oligonucleotide
  Antisense strand to SEQ ID NO: 693330
uauaucacucaccugcuua

SEQ ID NO: 693332 - RNA, 19 nt, Artificial Sequence
  Description of Artificial Sequence: Synthetic oligonucleotide
  Sense strand starting at position 1197 of SEQ ID NO: 586117
guccauugacuguaguaag

SEQ ID NO: 693333 - RNA, 19 nt, Artificial Sequence
  Description of Artificial Sequence: Synthetic oligonucleotide
  Antisense strand to SEQ ID NO: 693332
cuuacuacagucaauggac

SEQ ID NO: 693334 - RNA, 19 nt, Artificial Sequence
  Description of Artificial Sequence: Synthetic oligonucleotide
  Sense strand starting at position 1204 of SEQ ID NO: 586117
gacuguaguaagugagaga

SEQ ID NO: 693335 - RNA, 19 nt, Artificial Sequence
  Description of Artificial Sequence: Synthetic oligonucleotide
  Antisense strand to SEQ ID NO: 693334
ucucucacuuacuacaguc

SEQ ID NO: 693336 - RNA, 19 nt, Artificial Sequence
  Description of Artificial Sequence: Synthetic oligonucleotide
  Sense strand starting at position 1249 of SEQ ID NO: 586117
uugggugacugguugaaua

SEQ ID NO: 693337 - RNA, 19 nt, Artificial Sequence
  Description of Artificial Sequence: Synthetic oligonucleotide
  Antisense strand to SEQ ID NO: 693336
uauucaaccagucacccaa

SEQ ID NO: 693338 - RNA, 19 nt, Artificial Sequence
  Description of Artificial Sequence: Synthetic oligonucleotide
  Sense strand starting at position 1251 of SEQ ID NO: 586117
gggugacugguugaauagu

SEQ ID NO: 693339 - RNA, 19 nt, Artificial Sequence
  Description of Artificial Sequence: Synthetic oligonucleotide
  Antisense strand to SEQ ID NO: 693338
acuauucaaccagucaccc

SEQ ID NO: 693340 - RNA, 19 nt, Artificial Sequence
  Description of Artificial Sequence: Synthetic oligonucleotide
  Sense strand starting at position 1291 of SEQ ID NO: 586117
agugguagguuuguggaga

SEQ ID NO: 693341 - RNA, 19 nt, Artificial Sequence
  Description of Artificial Sequence: Synthetic oligonucleotide
  Antisense strand to SEQ ID NO: 693340
ucuccacaaaccuaccacu

SEQ ID NO: 693342 - RNA, 19 nt, Artificial Sequence
  Description of Artificial Sequence: Synthetic oligonucleotide
  Sense strand starting at position 1312 of SEQ ID NO: 586117
aguagugcgguuuaggaga

SEQ ID NO: 693343 - RNA, 19 nt, Artificial Sequence
  Description of Artificial Sequence: Synthetic oligonucleotide
  Antisense strand to SEQ ID NO: 693342
ucuccuaaaccgcacuacu

SEQ ID NO: 693344 - RNA, 19 nt, Artificial Sequence
  Description of Artificial Sequence: Synthetic oligonucleotide
  Sense strand starting at position 1352 of SEQ ID NO: 586117
ggaguauccagguggaaau

SEQ ID NO: 693345 - RNA, 19 nt, Artificial Sequence
  Description of Artificial Sequence: Synthetic oligonucleotide
  Antisense strand to SEQ ID NO: 693344
auuuccaccuggauacucc

SEQ ID NO: 693346 - RNA, 19 nt, Artificial Sequence
  Description of Artificial Sequence: Synthetic oligonucleotide
  Sense strand starting at position 1438 of SEQ ID NO: 586117
aguaaagcgccagaaugaa

SEQ ID NO: 693347 - RNA, 19 nt, Artificial Sequence
  Description of Artificial Sequence: Synthetic oligonucleotide
  Antisense strand to SEQ ID NO: 693346
uucauucuggcgcuuuacu

SEQ ID NO: 693348 - RNA, 19 nt, Artificial Sequence
  Description of Artificial Sequence: Synthetic oligonucleotide
  Sense strand starting at position 2053 of SEQ ID NO: 586117
cggcguucccucguuuauu

SEQ ID NO: 693349 - RNA, 19 nt, Artificial Sequence
  Description of Artificial Sequence: Synthetic oligonucleotide
  Antisense strand to SEQ ID NO: 693348
aauaaacgagggaacgccg

SEQ ID NO: 693350 - RNA, 19 nt, Artificial Sequence
  Description of Artificial Sequence: Synthetic oligonucleotide
  Sense strand starting at position 2106 of SEQ ID NO: 586117
gcaacaauauuugauggga

SEQ ID NO: 693351 - RNA, 19 nt, Artificial Sequence
  Description of Artificial Sequence: Synthetic oligonucleotide
  Antisense strand to SEQ ID NO: 693350
ucccaucaaauauuguugc

SEQ ID NO: 693352 - RNA, 19 nt, Artificial Sequence
  Description of Artificial Sequence: Synthetic oligonucleotide
  Sense strand starting at position 2108 of SEQ ID NO: 586117
aacaauauuugaugggaag

SEQ ID NO: 693353 - RNA, 19 nt, Artificial Sequence
  Description of Artificial Sequence: Synthetic oligonucleotide
  Antisense strand to SEQ ID NO: 693352
cuucccaucaaauauuguu

SEQ ID NO: 693354 - RNA, 19 nt, Artificial Sequence
  Description of Artificial Sequence: Synthetic oligonucleotide
  Sense strand starting at position 2262 of SEQ ID NO: 586117
gggagaacugugugaaauu

SEQ ID NO: 693355 - RNA, 19 nt, Artificial Sequence
  Description of Artificial Sequence: Synthetic oligonucleotide
  Antisense strand to SEQ ID NO: 693354
aauuucacacaguucuccc

SEQ ID NO: 693356 - RNA, 19 nt, Artificial Sequence
  Description of Artificial Sequence: Synthetic oligonucleotide
  Sense strand starting at position 2289 of SEQ ID NO: 586117
ugcgcuaggccuucugagu

SEQ ID NO: 693357 - RNA, 19 nt, Artificial Sequence
  Description of Artificial Sequence: Synthetic oligonucleotide
  Antisense strand to SEQ ID NO: 693356
acucagaaggccuagcgca

SEQ ID NO: 693358 - RNA, 19 nt, Artificial Sequence
  Description of Artificial Sequence: Synthetic oligonucleotide
  Sense strand starting at position 2290 of SEQ ID NO: 586117
gcgcuaggccuucugagua

SEQ ID NO: 693359 - RNA, 19 nt, Artificial Sequence
  Description of Artificial Sequence: Synthetic oligonucleotide
  Antisense strand to SEQ ID NO: 693358
uacucagaaggccuagcgc

SEQ ID NO: 693360 - RNA, 19 nt, Artificial Sequence
  Description of Artificial Sequence: Synthetic oligonucleotide
  Sense strand starting at position 2318 of SEQ ID NO: 586117
uggucugagaccuggaugu

SEQ ID NO: 693361 - RNA, 19 nt, Artificial Sequence
  Description of Artificial Sequence: Synthetic oligonucleotide
  Antisense strand to SEQ ID NO: 693360
acauccaggucucagacca

SEQ ID NO: 693362 - RNA, 19 nt, Artificial Sequence
  Description of Artificial Sequence: Synthetic oligonucleotide
  Sense strand starting at position 2320 of SEQ ID NO: 586117
gucugagaccuggauguca

SEQ ID NO: 693363 - RNA, 19 nt, Artificial Sequence
  Description of Artificial Sequence: Synthetic oligonucleotide
  Antisense strand to SEQ ID NO: 693362
ugacauccaggucucagac

SEQ ID NO: 693364 - RNA, 19 nt, Artificial Sequence
  Description of Artificial Sequence: Synthetic oligonucleotide
  Sense strand starting at position 2519 of SEQ ID NO: 586117
ggaguuuggacaugacauu

SEQ ID NO: 693365 - RNA, 19 nt, Artificial Sequence
  Description of Artificial Sequence: Synthetic oligonucleotide
  Antisense strand to SEQ ID NO: 693364
aaugucauguccaaacucc

SEQ ID NO: 693366 - RNA, 19 nt, Artificial Sequence
  Description of Artificial Sequence: Synthetic oligonucleotide
  Sense strand starting at position 2616 of SEQ ID NO: 586117
acaggugcuugauuggauu

SEQ ID NO: 693367 - RNA, 19 nt, Artificial Sequence
  Description of Artificial Sequence: Synthetic oligonucleotide
  Antisense strand to SEQ ID NO: 693366
aauccaaucaagcaccugu

SEQ ID NO: 693368 - RNA, 19 nt, Artificial Sequence
  Description of Artificial Sequence: Synthetic oligonucleotide
  Sense strand starting at position 3175 of SEQ ID NO: 586117
gcacauuuccuacguguag

SEQ ID NO: 693369 - RNA, 19 nt, Artificial Sequence
  Description of Artificial Sequence: Synthetic oligonucleotide
  Antisense strand to SEQ ID NO: 693368
cuacacguaggaaaugugc

SEQ ID NO: 693370 - RNA, 19 nt, Artificial Sequence
  Description of Artificial Sequence: Synthetic oligonucleotide
  Sense strand starting at position 3176 of SEQ ID NO: 586117
cacauuuccuacguguaga

SEQ ID NO: 693371 - RNA, 19 nt, Artificial Sequence
  Description of Artificial Sequence: Synthetic oligonucleotide
  Antisense strand to SEQ ID NO: 693370
ucuacacguaggaaaugug

SEQ ID NO: 693372 - RNA, 19 nt, Artificial Sequence
  Description of Artificial Sequence: Synthetic oligonucleotide
  Sense strand starting at position 3187 of SEQ ID NO: 586117
cguguagacaugcauccua

SEQ ID NO: 693373 - RNA, 19 nt, Artificial Sequence
  Description of Artificial Sequence: Synthetic oligonucleotide
  Antisense strand to SEQ ID NO: 693372
uaggaugcaugucuacacg

SEQ ID NO: 693374 - RNA, 19 nt, Artificial Sequence
  Description of Artificial Sequence: Synthetic oligonucleotide
  Sense strand starting at position 3208 of SEQ ID NO: 586117
uaugucucccuaggugaau

SEQ ID NO: 693375 - RNA, 19 nt, Artificial Sequence
  Description of Artificial Sequence: Synthetic oligonucleotide
  Antisense strand to SEQ ID NO: 693374
auucaccuagggagacaua

SEQ ID NO: 693376 - RNA, 19 nt, Artificial Sequence
  Description of Artificial Sequence: Synthetic oligonucleotide
  Sense strand starting at position 3264 of SEQ ID NO: 586117
gaggcuauggugcaguaaa

SEQ ID NO: 693377 - RNA, 19 nt, Artificial Sequence
  Description of Artificial Sequence: Synthetic oligonucleotide
  Antisense strand to SEQ ID NO: 693376
uuuacugcaccauagccuc

SEQ ID NO: 693378 - RNA, 19 nt, Artificial Sequence
  Description of Artificial Sequence: Synthetic oligonucleotide
  Sense strand starting at position 3361 of SEQ ID NO: 586117
agucuccaucuguaaacua

SEQ ID NO: 693379 - RNA, 19 nt, Artificial Sequence
  Description of Artificial Sequence: Synthetic oligonucleotide
  Antisense strand to SEQ ID NO: 693378
uaguuuacagauggagacu

SEQ ID NO: 693380 - RNA, 19 nt, Artificial Sequence
  Description of Artificial Sequence: Synthetic oligonucleotide
  Sense strand starting at position 3429 of SEQ ID NO: 586117
guugucauaggguauggaa

SEQ ID NO: 693381 - RNA, 19 nt, Artificial Sequence
  Description of Artificial Sequence: Synthetic oligonucleotide
  Antisense strand to SEQ ID NO: 693380
uuccauacccuaugacaac

SEQ ID NO: 693382 - RNA, 19 nt, Artificial Sequence
  Description of Artificial Sequence: Synthetic oligonucleotide
  Sense strand starting at position 3431 of SEQ ID NO: 586117
ugucauaggguauggaaga

SEQ ID NO: 693383 - RNA, 19 nt, Artificial Sequence
  Description of Artificial Sequence: Synthetic oligonucleotide
  Antisense strand to SEQ ID NO: 693382
ucuuccauacccuaugaca

SEQ ID NO: 693384 - RNA, 19 nt, Artificial Sequence
  Description of Artificial Sequence: Synthetic oligonucleotide
  Sense strand starting at position 3478 of SEQ ID NO: 586117
uaucuaaagcguuuguguu

SEQ ID NO: 693385 - RNA, 19 nt, Artificial Sequence
  Description of Artificial Sequence: Synthetic oligonucleotide
  Antisense strand to SEQ ID NO: 693384
aacacaaacgcuuuagaua

SEQ ID NO: 693386 - RNA, 19 nt, Artificial Sequence
  Description of Artificial Sequence: Synthetic oligonucleotide
  Sense strand starting at position 3554 of SEQ ID NO: 586117
ugauguuccaagggucaga

SEQ ID NO: 693387 - RNA, 19 nt, Artificial Sequence
  Description of Artificial Sequence: Synthetic oligonucleotide
  Antisense strand to SEQ ID NO: 693386
ucugacccuuggaacauca

SEQ ID NO: 693388 - RNA, 19 nt, Artificial Sequence
  Description of Artificial Sequence: Synthetic oligonucleotide
  Sense strand starting at position 3588 of SEQ ID NO: 586117
agggcuucagcaugaaagu

SEQ ID NO: 693389 - RNA, 19 nt, Artificial Sequence
  Description of Artificial Sequence: Synthetic oligonucleotide
  Antisense strand to SEQ ID NO: 693388
acuuucaugcugaagcccu

SEQ ID NO: 693390 - RNA, 19 nt, Artificial Sequence
  Description of Artificial Sequence: Synthetic oligonucleotide
  Sense strand starting at position 3627 of SEQ ID NO: 586117
gucagcuuugaugaaggau

SEQ ID NO: 693391 - RNA, 19 nt, Artificial Sequence
  Description of Artificial Sequence: Synthetic oligonucleotide
  Antisense strand to SEQ ID NO: 693390
auccuucaucaaagcugac

SEQ ID NO: 693392 - RNA, 19 nt, Artificial Sequence
  Description of Artificial Sequence: Synthetic oligonucleotide
  Sense strand starting at position 3654 of SEQ ID NO: 586117
auggaaauauaggagauua

SEQ ID NO: 693393 - RNA, 19 nt, Artificial Sequence
  Description of Artificial Sequence: Synthetic oligonucleotide
  Antisense strand to SEQ ID NO: 693392
uaaucuccuauauuuccau

SEQ ID NO: 693394 - RNA, 19 nt, Artificial Sequence
  Description of Artificial Sequence: Synthetic oligonucleotide
  Sense strand starting at position 3700 of SEQ ID NO: 586117
agauguguagguuggaguu

SEQ ID NO: 693395 - RNA, 19 nt, Artificial Sequence
  Description of Artificial Sequence: Synthetic oligonucleotide
  Antisense strand to SEQ ID NO: 693394
aacuccaaccuacacaucu

SEQ ID NO: 693396 - RNA, 19 nt, Artificial Sequence
  Description of Artificial Sequence: Synthetic oligonucleotide
  Sense strand starting at position 147 of SEQ ID NO: 586118
ccagcugagauugacguua

SEQ ID NO: 693397 - RNA, 19 nt, Artificial Sequence
  Description of Artificial Sequence: Synthetic oligonucleotide
  Antisense strand to SEQ ID NO: 693396
uaacgucaaucucagcugg

SEQ ID NO: 693398 - RNA, 19 nt, Artificial Sequence
  Description of Artificial Sequence: Synthetic oligonucleotide
  Sense strand starting at position 152 of SEQ ID NO: 586118
ugagauugacguuaaagca

SEQ ID NO: 693399 - RNA, 19 nt, Artificial Sequence
  Description of Artificial Sequence: Synthetic oligonucleotide
  Antisense strand to SEQ ID NO: 693398
ugcuuuaacgucaaucuca

SEQ ID NO: 693400 - RNA, 19 nt, Artificial Sequence
  Description of Artificial Sequence: Synthetic oligonucleotide
  Sense strand starting at position 246 of SEQ ID NO: 586118
aauggaguugccuggaaag

SEQ ID NO: 693401 - RNA, 19 nt, Artificial Sequence
  Description of Artificial Sequence: Synthetic oligonucleotide
  Antisense strand to SEQ ID NO: 693400
cuuuccaggcaacuccauu

SEQ ID NO: 693402 - RNA, 19 nt, Artificial Sequence
  Description of Artificial Sequence: Synthetic oligonucleotide
  Sense strand starting at position 582 of SEQ ID NO: 586118
uaauuagaggucuauuguc

SEQ ID NO: 693403 - RNA, 19 nt, Artificial Sequence
  Description of Artificial Sequence: Synthetic oligonucleotide
  Antisense strand to SEQ ID NO: 693402
gacaauagaccucuaauua

SEQ ID NO: 693404 - RNA, 19 nt, Artificial Sequence
  Description of Artificial Sequence: Synthetic oligonucleotide
  Sense strand starting at position 626 of SEQ ID NO: 586118
ucaagaggcuuuccuuaaa

SEQ ID NO: 693405 - RNA, 19 nt, Artificial Sequence
  Description of Artificial Sequence: Synthetic oligonucleotide
  Antisense strand to SEQ ID NO: 693404
uuuaaggaaagccucuuga

SEQ ID NO: 693406 - RNA, 19 nt, Artificial Sequence
  Description of Artificial Sequence: Synthetic oligonucleotide
  Sense strand starting at position 872 of SEQ ID NO: 586118
uugauauugcaguauaaac

SEQ ID NO: 693407 - RNA, 19 nt, Artificial Sequence
  Description of Artificial Sequence: Synthetic oligonucleotide
  Antisense strand to SEQ ID NO: 693406
guuuauacugcaauaucaa

SEQ ID NO: 693408 - RNA, 19 nt, Artificial Sequence
  Description of Artificial Sequence: Synthetic oligonucleotide
  Sense strand starting at position 991 of SEQ ID NO: 586118
uuggaagcuaaucaugagu

SEQ ID NO: 693409 - RNA, 19 nt, Artificial Sequence
  Description of Artificial Sequence: Synthetic oligonucleotide
  Antisense strand to SEQ ID NO: 693408
acucaugauuagcuuccaa

SEQ ID NO: 693410 - RNA, 19 nt, Artificial Sequence
  Description of Artificial Sequence: Synthetic oligonucleotide
  Sense strand starting at position 1075 of SEQ ID NO: 586118
ccaugaacuagugaguguu

SEQ ID NO: 693411 - RNA, 19 nt, Artificial Sequence
  Description of Artificial Sequence: Synthetic oligonucleotide
  Antisense strand to SEQ ID NO: 693410
aacacucacuaguucaugg

SEQ ID NO: 693412 - RNA, 19 nt, Artificial Sequence
  Description of Artificial Sequence: Synthetic oligonucleotide
  Sense strand starting at position 1313 of SEQ ID NO: 586118
aggaaauaguuucccugga

SEQ ID NO: 693413 - RNA, 19 nt, Artificial Sequence
  Description of Artificial Sequence: Synthetic oligonucleotide
  Antisense strand to SEQ ID NO: 693412
uccagggaaacuauuuccu

SEQ ID NO: 693414 - RNA, 19 nt, Artificial Sequence
  Description of Artificial Sequence: Synthetic oligonucleotide
  Sense strand starting at position 1314 of SEQ ID NO: 586118
ggaaauaguuucccuggaa

SEQ ID NO: 693415 - RNA, 19 nt, Artificial Sequence
  Description of Artificial Sequence: Synthetic oligonucleotide
  Antisense strand to SEQ ID NO: 693414
uuccagggaaacuauuucc

SEQ ID NO: 693416 - RNA, 19 nt, Artificial Sequence
  Description of Artificial Sequence: Synthetic oligonucleotide
  Sense strand starting at position 1315 of SEQ ID NO: 586118
gaaauaguuucccuggaag

SEQ ID NO: 693417 - RNA, 19 nt, Artificial Sequence
  Description of Artificial Sequence: Synthetic oligonucleotide
  Antisense strand to SEQ ID NO: 693416
cuuccagggaaacuauuuc

SEQ ID NO: 693418 - RNA, 19 nt, Artificial Sequence
  Description of Artificial Sequence: Synthetic oligonucleotide
  Sense strand starting at position 1379 of SEQ ID NO: 586118
acugaugugguguaacuau

SEQ ID NO: 693419 - RNA, 19 nt, Artificial Sequence
  Description of Artificial Sequence: Synthetic oligonucleotide
  Antisense strand to SEQ ID NO: 693418
auaguuacaccacaucagu

SEQ ID NO: 693420 - RNA, 19 nt, Artificial Sequence
  Description of Artificial Sequence: Synthetic oligonucleotide
  Sense strand starting at position 1386 of SEQ ID NO: 586118
ugguguaacuauuugucau

SEQ ID NO: 693421 - RNA, 19 nt, Artificial Sequence
  Description of Artificial Sequence: Synthetic oligonucleotide
  Antisense strand to SEQ ID NO: 693420
augacaaauaguuacacca

SEQ ID NO: 693422 - RNA, 19 nt, Artificial Sequence
  Description of Artificial Sequence: Synthetic oligonucleotide
  Sense strand starting at position 1387 of SEQ ID NO: 586118
gguguaacuauuugucauu

SEQ ID NO: 693423 - RNA, 19 nt, Artificial Sequence
  Description of Artificial Sequence: Synthetic oligonucleotide
  Antisense strand to SEQ ID NO: 693422
aaugacaaauaguuacacc

SEQ ID NO: 693424 - RNA, 19 nt, Artificial Sequence
  Description of Artificial Sequence: Synthetic oligonucleotide
  Sense strand starting at position 1393 of SEQ ID NO: 586118
acuauuugucauugagcuu

SEQ ID NO: 693425 - RNA, 19 nt, Artificial Sequence
  Description of Artificial Sequence: Synthetic oligonucleotide
  Antisense strand to SEQ ID NO: 693424
aagcucaaugacaaauagu

SEQ ID NO: 693426 - RNA, 19 nt, Artificial Sequence
  Description of Artificial Sequence: Synthetic oligonucleotide
  Sense strand starting at position 1468 of SEQ ID NO: 586118
ugucauauucuggagugac

SEQ ID NO: 693427 - RNA, 19 nt, Artificial Sequence
  Description of Artificial Sequence: Synthetic oligonucleotide
  Antisense strand to SEQ ID NO: 693426
gucacuccagaauaugaca

SEQ ID NO: 693428 - RNA, 19 nt, Artificial Sequence
  Description of Artificial Sequence: Synthetic oligonucleotide
  Sense strand starting at position 1471 of SEQ ID NO: 586118
cauauucuggagugacaua

SEQ ID NO: 693429 - RNA, 19 nt, Artificial Sequence
  Description of Artificial Sequence: Synthetic oligonucleotide
  Antisense strand to SEQ ID NO: 693428
uaugucacuccagaauaug

SEQ ID NO: 693430 - RNA, 19 nt, Artificial Sequence
  Description of Artificial Sequence: Synthetic oligonucleotide
  Sense strand starting at position 1510 of SEQ ID NO: 586118
ugaagauggcuauggauug

SEQ ID NO: 693431 - RNA, 19 nt, Artificial Sequence
  Description of Artificial Sequence: Synthetic oligonucleotide
  Antisense strand to SEQ ID NO: 693430
caauccauagccaucuuca

SEQ ID NO: 693432 - RNA, 19 nt, Artificial Sequence
  Description of Artificial Sequence: Synthetic oligonucleotide
  Sense strand starting at position 1515 of SEQ ID NO: 586118
auggcuauggauuguaaga

SEQ ID NO: 693433 - RNA, 19 nt, Artificial Sequence
  Description of Artificial Sequence: Synthetic oligonucleotide
  Antisense strand to SEQ ID NO: 693432
ucuuacaauccauagccau

SEQ ID NO: 693434 - RNA, 19 nt, Artificial Sequence
  Description of Artificial Sequence: Synthetic oligonucleotide
  Sense strand starting at position 1727 of SEQ ID NO: 586118
ucuucuaauguuuggaaug

SEQ ID NO: 693435 - RNA, 19 nt, Artificial Sequence
  Description of Artificial Sequence: Synthetic oligonucleotide
  Antisense strand to SEQ ID NO: 693434
cauuccaaacauuagaaga

SEQ ID NO: 693436 - RNA, 19 nt, Artificial Sequence
  Description of Artificial Sequence: Synthetic oligonucleotide
  Sense strand starting at position 1732 of SEQ ID NO: 586118
uaauguuuggaaugaaguu

SEQ ID NO: 693437 - RNA, 19 nt, Artificial Sequence
  Description of Artificial Sequence: Synthetic oligonucleotide
  Antisense strand to SEQ ID NO: 693436
aacuucauuccaaacauua

SEQ ID NO: 693438 - RNA, 19 nt, Artificial Sequence
  Description of Artificial Sequence: Synthetic oligonucleotide
  Sense strand starting at position 1778 of SEQ ID NO: 586118
augcgaaaucccugggaaa

SEQ ID NO: 693439 - RNA, 19 nt, Artificial Sequence
  Description of Artificial Sequence: Synthetic oligonucleotide
  Antisense strand to SEQ ID NO: 693438
uuucccagggauuucgcau

SEQ ID NO: 693440 - RNA, 19 nt, Artificial Sequence
  Description of Artificial Sequence: Synthetic oligonucleotide
  Sense strand starting at position 1779 of SEQ ID NO: 586118
ugcgaaaucccugggaaac

SEQ ID NO: 693441 - RNA, 19 nt, Artificial Sequence
  Description of Artificial Sequence: Synthetic oligonucleotide
  Antisense strand to SEQ ID NO: 693440
guuucccagggauuucgca

SEQ ID NO: 693442 - RNA, 19 nt, Artificial Sequence
  Description of Artificial Sequence: Synthetic oligonucleotide
  Sense strand starting at position 1780 of SEQ ID NO: 586118
gcgaaaucccugggaaacu

SEQ ID NO: 693443 - RNA, 19 nt, Artificial Sequence
  Description of Artificial Sequence: Synthetic oligonucleotide
  Antisense strand to SEQ ID NO: 693442
aguuucccagggauuucgc

SEQ ID NO: 693444 - RNA, 19 nt, Artificial Sequence
  Description of Artificial Sequence: Synthetic oligonucleotide
  Sense strand starting at position 1843 of SEQ ID NO: 586118
cugauucccagcuggagaa

SEQ ID NO: 693445 - RNA, 19 nt, Artificial Sequence
  Description of Artificial Sequence: Synthetic oligonucleotide
  Antisense strand to SEQ ID NO: 693444
uucuccagcugggaaucag

SEQ ID NO: 693446 - RNA, 19 nt, Artificial Sequence
  Description of Artificial Sequence: Synthetic oligonucleotide
  Sense strand starting at position 1844 of SEQ ID NO: 586118
ugauucccagcuggagaau

SEQ ID NO: 693447 - RNA, 19 nt, Artificial Sequence
  Description of Artificial Sequence: Synthetic oligonucleotide
  Antisense strand to SEQ ID NO: 693446
auucuccagcugggaauca

SEQ ID NO: 693448 - RNA, 19 nt, Artificial Sequence
  Description of Artificial Sequence: Synthetic oligonucleotide
  Sense strand starting at position 1847 of SEQ ID NO: 586118
uucccagcuggagaauauu

SEQ ID NO: 693449 - RNA, 19 nt, Artificial Sequence
  Description of Artificial Sequence: Synthetic oligonucleotide
  Antisense strand to SEQ ID NO: 693448
aauauucuccagcugggaa

SEQ ID NO: 693450 - RNA, 19 nt, Artificial Sequence
  Description of Artificial Sequence: Synthetic oligonucleotide
  Sense strand starting at position 2297 of SEQ ID NO: 586118
guguucaagcuuguaguuu

SEQ ID NO: 693451 - RNA, 19 nt, Artificial Sequence
  Description of Artificial Sequence: Synthetic oligonucleotide
  Antisense strand to SEQ ID NO: 693450
aaacuacaagcuugaacac

SEQ ID NO: 693452 - RNA, 19 nt, Artificial Sequence
  Description of Artificial Sequence: Synthetic oligonucleotide
  Sense strand starting at position 2309 of SEQ ID NO: 586118
guaguuucuuuauuuccua

SEQ ID NO: 693453 - RNA, 19 nt, Artificial Sequence
  Description of Artificial Sequence: Synthetic oligonucleotide
  Antisense strand to SEQ ID NO: 693452
uaggaaauaaagaaacuac

SEQ ID NO: 693454 - RNA, 19 nt, Artificial Sequence
  Description of Artificial Sequence: Synthetic oligonucleotide
  Sense strand starting at position 2402 of SEQ ID NO: 586118
gccuaucuauauuucugua

SEQ ID NO: 693455 - RNA, 19 nt, Artificial Sequence
  Description of Artificial Sequence: Synthetic oligonucleotide
  Antisense strand to SEQ ID NO: 693454
uacagaaauauagauaggc

SEQ ID NO: 693456 - RNA, 19 nt, Artificial Sequence
  Description of Artificial Sequence: Synthetic oligonucleotide
  Sense strand starting at position 2610 of SEQ ID NO: 586118
gaaagagcuuaagugauug

SEQ ID NO: 693457 - RNA, 19 nt, Artificial Sequence
  Description of Artificial Sequence: Synthetic oligonucleotide
  Antisense strand to SEQ ID NO: 693456
caaucacuuaagcucuuuc

SEQ ID NO: 693458 - RNA, 19 nt, Artificial Sequence
  Description of Artificial Sequence: Synthetic oligonucleotide
  Sense strand starting at position 2659 of SEQ ID NO: 586118
uuuauuacauuaccaguga

SEQ ID NO: 693459 - RNA, 19 nt, Artificial Sequence
  Description of Artificial Sequence: Synthetic oligonucleotide
  Antisense strand to SEQ ID NO: 693458
ucacugguaauguaauaaa

SEQ ID NO: 693460 - RNA, 19 nt, Artificial Sequence
  Description of Artificial Sequence: Synthetic oligonucleotide
  Sense strand starting at position 3068 of SEQ ID NO: 586118
acguuacaugguuaagaua

SEQ ID NO: 693461 - RNA, 19 nt, Artificial Sequence
  Description of Artificial Sequence: Synthetic oligonucleotide
  Antisense strand to SEQ ID NO: 693460
uaucuuaaccauguaacgu

SEQ ID NO: 693462 - RNA, 19 nt, Artificial Sequence
  Description of Artificial Sequence: Synthetic oligonucleotide
  Sense strand starting at position 3195 of SEQ ID NO: 586118
ugaaauguggguuaucuga

SEQ ID NO: 693463 - RNA, 19 nt, Artificial Sequence
  Description of Artificial Sequence: Synthetic oligonucleotide
  Antisense strand to SEQ ID NO: 693462
ucagauaacccacauuuca

SEQ ID NO: 693464 - RNA, 19 nt, Artificial Sequence
  Description of Artificial Sequence: Synthetic oligonucleotide
  Sense strand starting at position 3197 of SEQ ID NO: 586118
aaauguggguuaucugaaa

SEQ ID NO: 693465 - RNA, 19 nt, Artificial Sequence
  Description of Artificial Sequence: Synthetic oligonucleotide
  Antisense strand to SEQ ID NO: 693464
uuucagauaacccacauuu

SEQ ID NO: 693466 - RNA, 19 nt, Artificial Sequence
  Description of Artificial Sequence: Synthetic oligonucleotide
  Sense strand starting at position 3229 of SEQ ID NO: 586118
ugcaauaugacauaugggu

SEQ ID NO: 693467 - RNA, 19 nt, Artificial Sequence
  Description of Artificial Sequence: Synthetic oligonucleotide
  Antisense strand to SEQ ID NO: 693466
acccauaugucauauugca

SEQ ID NO: 693468 - RNA, 19 nt, Artificial Sequence
  Description of Artificial Sequence: Synthetic oligonucleotide
  Sense strand starting at position 3234 of SEQ ID NO: 586118
uaugacauaugggugucaa

SEQ ID NO: 693469 - RNA, 19 nt, Artificial Sequence
  Description of Artificial Sequence: Synthetic oligonucleotide
  Antisense strand to SEQ ID NO: 693468
uugacacccauaugucaua

SEQ ID NO: 693470 - RNA, 19 nt, Artificial Sequence
  Description of Artificial Sequence: Synthetic oligonucleotide
  Sense strand starting at position 3235 of SEQ ID NO: 586118
augacauaugggugucaag

SEQ ID NO: 693471 - RNA, 19 nt, Artificial Sequence
  Description of Artificial Sequence: Synthetic oligonucleotide
  Antisense strand to SEQ ID NO: 693470
cuugacacccauaugucau

SEQ ID NO: 693472 - RNA, 19 nt, Artificial Sequence
  Description of Artificial Sequence: Synthetic oligonucleotide
  Sense strand starting at position 3288 of SEQ ID NO: 586118
auaagugguggguguauuu

SEQ ID NO: 693473 - RNA, 19 nt, Artificial Sequence
  Description of Artificial Sequence: Synthetic oligonucleotide
  Antisense strand to SEQ ID NO: 693472
aaauacacccaccacuuau

SEQ ID NO: 693474 - RNA, 19 nt, Artificial Sequence
  Description of Artificial Sequence: Synthetic oligonucleotide
  Sense strand starting at position 3460 of SEQ ID NO: 586118
cauguuauagcagaauuga

SEQ ID NO: 693475 - RNA, 19 nt, Artificial Sequence
  Description of Artificial Sequence: Synthetic oligonucleotide
  Antisense strand to SEQ ID NO: 693474
ucaauucugcuauaacaug

SEQ ID NO: 693476 - RNA, 19 nt, Artificial Sequence
  Description of Artificial Sequence: Synthetic oligonucleotide
  Sense strand starting at position 18 of SEQ ID NO: 586119
gcugauaucuuaguuaaau

SEQ ID NO: 693477 - RNA, 19 nt, Artificial Sequence
  Description of Artificial Sequence: Synthetic oligonucleotide
  Antisense strand to SEQ ID NO: 693476
auuuaacuaagauaucagc

SEQ ID NO: 693478 - RNA, 19 nt, Artificial Sequence
  Description of Artificial Sequence: Synthetic oligonucleotide
  Sense strand starting at position 58 of SEQ ID NO: 586119
cacaguugauucccaggaa

SEQ ID NO: 693479 - RNA, 19 nt, Artificial Sequence
  Description of Artificial Sequence: Synthetic oligonucleotide
  Antisense strand to SEQ ID NO: 693478
uuccugggaaucaacugug

SEQ ID NO: 693480 - RNA, 19 nt, Artificial Sequence
  Description of Artificial Sequence: Synthetic oligonucleotide
  Sense strand starting at position 100 of SEQ ID NO: 586119
aguacauggcaagauaagu

SEQ ID NO: 693481 - RNA, 19 nt, Artificial Sequence
  Description of Artificial Sequence: Synthetic oligonucleotide
  Antisense strand to SEQ ID NO: 693480
acuuaucuugccauguacu

SEQ ID NO: 693482 - RNA, 19 nt, Artificial Sequence
  Description of Artificial Sequence: Synthetic oligonucleotide
  Sense strand starting at position 160 of SEQ ID NO: 586119
cuagcaagucacuaagguu

SEQ ID NO: 693483 - RNA, 19 nt, Artificial Sequence
  Description of Artificial Sequence: Synthetic oligonucleotide
  Antisense strand to SEQ ID NO: 693482
aaccuuagugacuugcuag

SEQ ID NO: 693484 - RNA, 19 nt, Artificial Sequence
  Description of Artificial Sequence: Synthetic oligonucleotide
  Sense strand starting at position 268 of SEQ ID NO: 586119
ggcaccuaacucuaguauu

SEQ ID NO: 693485 - RNA, 19 nt, Artificial Sequence
  Description of Artificial Sequence: Synthetic oligonucleotide
  Antisense strand to SEQ ID NO: 693484
aauacuagaguuaggugcc

SEQ ID NO: 693486 - RNA, 19 nt, Artificial Sequence
  Description of Artificial Sequence: Synthetic oligonucleotide
  Sense strand starting at position 276 of SEQ ID NO: 586119
acucuaguauuggugaaug

SEQ ID NO: 693487 - RNA, 19 nt, Artificial Sequence
  Description of Artificial Sequence: Synthetic oligonucleotide
  Antisense strand to SEQ ID NO: 693486
cauucaccaauacuagagu

SEQ ID NO: 693488 - RNA, 19 nt, Artificial Sequence
  Description of Artificial Sequence: Synthetic oligonucleotide
  Sense strand starting at position 278 of SEQ ID NO: 586119
ucuaguauuggugaauggu

SEQ ID NO: 693489 - RNA, 19 nt, Artificial Sequence
  Description of Artificial Sequence: Synthetic oligonucleotide
  Antisense strand to SEQ ID NO: 693488
accauucaccaauacuaga

SEQ ID NO: 693490 - RNA, 19 nt, Artificial Sequence
  Description of Artificial Sequence: Synthetic oligonucleotide
  Sense strand starting at position 330 of SEQ ID NO: 586119
uacuauuguuaagcaggaa

SEQ ID NO: 693491 - RNA, 19 nt, Artificial Sequence
  Description of Artificial Sequence: Synthetic oligonucleotide
  Antisense strand to SEQ ID NO: 693490
uuccugcuuaacaauagua

SEQ ID NO: 693492 - RNA, 19 nt, Artificial Sequence
  Description of Artificial Sequence: Synthetic oligonucleotide
  Sense strand starting at position 334 of SEQ ID NO: 586119
auuguuaagcaggaaguuu

SEQ ID NO: 693493 - RNA, 19 nt, Artificial Sequence
  Description of Artificial Sequence: Synthetic oligonucleotide
  Antisense strand to SEQ ID NO: 693492
aaacuuccugcuuaacaau

SEQ ID NO: 693494 - RNA, 19 nt, Artificial Sequence
  Description of Artificial Sequence: Synthetic oligonucleotide
  Sense strand starting at position 361 of SEQ ID NO: 586119
cuaauaucuugaguggaaa

SEQ ID NO: 693495 - RNA, 19 nt, Artificial Sequence
  Description of Artificial Sequence: Synthetic oligonucleotide
  Antisense strand to SEQ ID NO: 693494
uuuccacucaagauauuag

SEQ ID NO: 693496 - RNA, 19 nt, Artificial Sequence
  Description of Artificial Sequence: Synthetic oligonucleotide
  Sense strand starting at position 362 of SEQ ID NO: 586119
uaauaucuugaguggaaac

SEQ ID NO: 693497 - RNA, 19 nt, Artificial Sequence
  Description of Artificial Sequence: Synthetic oligonucleotide
  Antisense strand to SEQ ID NO: 693496
guuuccacucaagauauua

SEQ ID NO: 693498 - RNA, 19 nt, Artificial Sequence
  Description of Artificial Sequence: Synthetic oligonucleotide
  Sense strand starting at position 425 of SEQ ID NO: 586119
accagaucgaaaugauguu

SEQ ID NO: 693499 - RNA, 19 nt, Artificial Sequence
  Description of Artificial Sequence: Synthetic oligonucleotide
  Antisense strand to SEQ ID NO: 693498
aacaucauuucgaucuggu

SEQ ID NO: 693500 - RNA, 19 nt, Artificial Sequence
  Description of Artificial Sequence: Synthetic oligonucleotide
  Sense strand starting at position 1049 of SEQ ID NO: 586119
ucguaaugugaauagauuc

SEQ ID NO: 693501 - RNA, 19 nt, Artificial Sequence
  Description of Artificial Sequence: Synthetic oligonucleotide
  Antisense strand to SEQ ID NO: 693500
gaaucuauucacauuacga

SEQ ID NO: 693502 - RNA, 19 nt, Artificial Sequence
  Description of Artificial Sequence: Synthetic oligonucleotide
  Sense strand starting at position 1266 of SEQ ID NO: 586119
uagugucccuauuuguaga

SEQ ID NO: 693503 - RNA, 19 nt, Artificial Sequence
  Description of Artificial Sequence: Synthetic oligonucleotide
  Antisense strand to SEQ ID NO: 693502
ucuacaaauagggacacua

SEQ ID NO: 693504 - RNA, 19 nt, Artificial Sequence
  Description of Artificial Sequence: Synthetic oligonucleotide
  Sense strand starting at position 1267 of SEQ ID NO: 586119
agugucccuauuuguagau

SEQ ID NO: 693505 - RNA, 19 nt, Artificial Sequence
  Description of Artificial Sequence: Synthetic oligonucleotide
  Antisense strand to SEQ ID NO: 693504
aucuacaaauagggacacu

SEQ ID NO: 693506 - RNA, 19 nt, Artificial Sequence
  Description of Artificial Sequence: Synthetic oligonucleotide
  Sense strand starting at position 1898 of SEQ ID NO: 586119
cugagucucuauuuaugca

SEQ ID NO: 693507 - RNA, 19 nt, Artificial Sequence
  Description of Artificial Sequence: Synthetic oligonucleotide
  Antisense strand to SEQ ID NO: 693506
ugcauaaauagagacucag

SEQ ID NO: 693508 - RNA, 19 nt, Artificial Sequence
  Description of Artificial Sequence: Synthetic oligonucleotide
  Sense strand starting at position 1949 of SEQ ID NO: 586119
ugcauuuacuuguugcuaa

SEQ ID NO: 693509 - RNA, 19 nt, Artificial Sequence
  Description of Artificial Sequence: Synthetic oligonucleotide
  Antisense strand to SEQ ID NO: 693508
uuagcaacaaguaaaugca

SEQ ID NO: 693510 - RNA, 19 nt, Artificial Sequence
  Description of Artificial Sequence: Synthetic oligonucleotide
  Sense strand starting at position 1956 of SEQ ID NO: 586119
acuuguugcuaacucagaa

SEQ ID NO: 693511 - RNA, 19 nt, Artificial Sequence
  Description of Artificial Sequence: Synthetic oligonucleotide
  Antisense strand to SEQ ID NO: 693510
uucugaguuagcaacaagu

SEQ ID NO: 693512 - RNA, 19 nt, Artificial Sequence
  Description of Artificial Sequence: Synthetic oligonucleotide
  Sense strand starting at position 1997 of SEQ ID NO: 586119
gauuaucuucccuggguua

SEQ ID NO: 693513 - RNA, 19 nt, Artificial Sequence
  Description of Artificial Sequence: Synthetic oligonucleotide
  Antisense strand to SEQ ID NO: 693512
uaacccagggaagauaauc

SEQ ID NO: 693514 - RNA, 19 nt, Artificial Sequence
  Description of Artificial Sequence: Synthetic oligonucleotide
  Sense strand starting at position 1998 of SEQ ID NO: 586119
auuaucuucccuggguuaa

SEQ ID NO: 693515 - RNA, 19 nt, Artificial Sequence
  Description of Artificial Sequence: Synthetic oligonucleotide
  Antisense strand to SEQ ID NO: 693514
uuaacccagggaagauaau

SEQ ID NO: 693516 - RNA, 19 nt, Artificial Sequence
  Description of Artificial Sequence: Synthetic oligonucleotide
  Sense strand starting at position 1999 of SEQ ID NO: 586119
uuaucuucccuggguuaaa

SEQ ID NO: 693517 - RNA, 19 nt, Artificial Sequence
  Description of Artificial Sequence: Synthetic oligonucleotide
  Antisense strand to SEQ ID NO: 693516
uuuaacccagggaagauaa

SEQ ID NO: 693518 - RNA, 19 nt, Artificial Sequence
  Description of Artificial Sequence: Synthetic oligonucleotide
  Sense strand starting at position 2000 of SEQ ID NO: 586119
uaucuucccuggguuaaag

SEQ ID NO: 693519 - RNA, 19 nt, Artificial Sequence
  Description of Artificial Sequence: Synthetic oligonucleotide
  Antisense strand to SEQ ID NO: 693518
cuuuaacccagggaagaua

SEQ ID NO: 693520 - RNA, 19 nt, Artificial Sequence
  Description of Artificial Sequence: Synthetic oligonucleotide
  Sense strand starting at position 2134 of SEQ ID NO: 586119
ccagguagacuuugaauga

SEQ ID NO: 693521 - RNA, 19 nt, Artificial Sequence
  Description of Artificial Sequence: Synthetic oligonucleotide
  Antisense strand to SEQ ID NO: 693520
ucauucaaagucuaccugg

SEQ ID NO: 693522 - RNA, 19 nt, Artificial Sequence
  Description of Artificial Sequence: Synthetic oligonucleotide
  Sense strand starting at position 2174 of SEQ ID NO: 586119
gcugauuugucuuuacaug

SEQ ID NO: 693523 - RNA, 19 nt, Artificial Sequence
  Description of Artificial Sequence: Synthetic oligonucleotide
  Antisense strand to SEQ ID NO: 693522
cauguaaagacaaaucagc

SEQ ID NO: 693524 - RNA, 19 nt, Artificial Sequence
  Description of Artificial Sequence: Synthetic oligonucleotide
  Sense strand starting at position 2180 of SEQ ID NO: 586119
uugucuuuacaugauugga

SEQ ID NO: 693525 - RNA, 19 nt, Artificial Sequence
  Description of Artificial Sequence: Synthetic oligonucleotide
  Antisense strand to SEQ ID NO: 693524
uccaaucauguaaagacaa

SEQ ID NO: 693526 - RNA, 19 nt, Artificial Sequence
  Description of Artificial Sequence: Synthetic oligonucleotide
  Sense strand starting at position 2182 of SEQ ID NO: 586119
gucuuuacaugauuggaca

SEQ ID NO: 693527 - RNA, 19 nt, Artificial Sequence
  Description of Artificial Sequence: Synthetic oligonucleotide
  Antisense strand to SEQ ID NO: 693526
uguccaaucauguaaagac

SEQ ID NO: 693528 - RNA, 19 nt, Artificial Sequence
  Description of Artificial Sequence: Synthetic oligonucleotide
  Sense strand starting at position 2818 of SEQ ID NO: 586119
ggaugcaagcccuauauaa

SEQ ID NO: 693529 - RNA, 19 nt, Artificial Sequence
  Description of Artificial Sequence: Synthetic oligonucleotide
  Antisense strand to SEQ ID NO: 693528
uuauauagggcuugcaucc

SEQ ID NO: 693530 - RNA, 19 nt, Artificial Sequence
  Description of Artificial Sequence: Synthetic oligonucleotide
  Sense strand starting at position 3004 of SEQ ID NO: 586119
aaacgaugauuugagcaaa

SEQ ID NO: 693531 - RNA, 19 nt, Artificial Sequence
  Description of Artificial Sequence: Synthetic oligonucleotide
  Antisense strand to SEQ ID NO: 693530
uuugcucaaaucaucguuu

SEQ ID NO: 693532 - RNA, 19 nt, Artificial Sequence
  Description of Artificial Sequence: Synthetic oligonucleotide
  Sense strand starting at position 3140 of SEQ ID NO: 586119
acuaguuuagggcagaguu

SEQ ID NO: 693533 - RNA, 19 nt, Artificial Sequence
  Description of Artificial Sequence: Synthetic oligonucleotide
  Antisense strand to SEQ ID NO: 693532
aacucugcccuaaacuagu

SEQ ID NO: 693534 - RNA, 19 nt, Artificial Sequence
  Description of Artificial Sequence: Synthetic oligonucleotide
  Sense strand starting at position 3194 of SEQ ID NO: 586119
guaacaaguggaugggauu

SEQ ID NO: 693535 - RNA, 19 nt, Artificial Sequence
  Description of Artificial Sequence: Synthetic oligonucleotide
  Antisense strand to SEQ ID NO: 693534
aaucccauccacuuguuac

SEQ ID NO: 693536 - RNA, 19 nt, Artificial Sequence
  Description of Artificial Sequence: Synthetic oligonucleotide
  Sense strand starting at position 3398 of SEQ ID NO: 586119
guaccugucugugucauuu

SEQ ID NO: 693537 - RNA, 19 nt, Artificial Sequence
  Description of Artificial Sequence: Synthetic oligonucleotide
  Antisense strand to SEQ ID NO: 693536
aaaugacacagacagguac

SEQ ID NO: 693538 - RNA, 19 nt, Artificial Sequence
  Description of Artificial Sequence: Synthetic oligonucleotide
  Sense strand starting at position 3653 of SEQ ID NO: 586119
acguuuacugauggaacaa

SEQ ID NO: 693539 - RNA, 19 nt, Artificial Sequence
  Description of Artificial Sequence: Synthetic oligonucleotide
  Antisense strand to SEQ ID NO: 693538
uuguuccaucaguaaacgu

SEQ ID NO: 693540 - RNA, 19 nt, Artificial Sequence
  Description of Artificial Sequence: Synthetic oligonucleotide
  Sense strand starting at position 3715 of SEQ ID NO: 586119
gucuuugauuuguuacagu

SEQ ID NO: 693541 - RNA, 19 nt, Artificial Sequence
  Description of Artificial Sequence: Synthetic oligonucleotide
  Antisense strand to SEQ ID NO: 693540
acuguaacaaaucaaagac

SEQ ID NO: 693542 - RNA, 19 nt, Artificial Sequence
  Description of Artificial Sequence: Synthetic oligonucleotide
  Sense strand starting at position 3830 of SEQ ID NO: 586119
agguaauuauuagcagaua

SEQ ID NO: 693543 - RNA, 19 nt, Artificial Sequence
  Description of Artificial Sequence: Synthetic oligonucleotide
  Antisense strand to SEQ ID NO: 693542
uaucugcuaauaauuaccu

SEQ ID NO: 693544 - RNA, 19 nt, Artificial Sequence
  Description of Artificial Sequence: Synthetic oligonucleotide
  Sense strand starting at position 3874 of SEQ ID NO: 586119
gaaucuuuggcauaucugu

SEQ ID NO: 693545 - RNA, 19 nt, Artificial Sequence
  Description of Artificial Sequence: Synthetic oligonucleotide
  Antisense strand to SEQ ID NO: 693544
acagauaugccaaagauuc

SEQ ID NO: 693546 - RNA, 19 nt, Artificial Sequence
  Description of Artificial Sequence: Synthetic oligonucleotide
  Sense strand starting at position 3897 of SEQ ID NO: 586119
gugugagguaacuaggguu

SEQ ID NO: 693547 - RNA, 19 nt, Artificial Sequence
  Description of Artificial Sequence: Synthetic oligonucleotide
  Antisense strand to SEQ ID NO: 693546
aacccuaguuaccucacac

SEQ ID NO: 693548 - RNA, 19 nt, Artificial Sequence
  Description of Artificial Sequence: Synthetic oligonucleotide
  Sense strand starting at position 3909 of SEQ ID NO: 586119
uaggguucuguagauggua

SEQ ID NO: 693549 - RNA, 19 nt, Artificial Sequence
  Description of Artificial Sequence: Synthetic oligonucleotide
  Antisense strand to SEQ ID NO: 693548
uaccaucuacagaacccua

SEQ ID NO: 693550 - RNA, 19 nt, Artificial Sequence
  Description of Artificial Sequence: Synthetic oligonucleotide
  Sense strand starting at position 3918 of SEQ ID NO: 586119
guagaugguacauauagua

SEQ ID NO: 693551 - RNA, 19 nt, Artificial Sequence
  Description of Artificial Sequence: Synthetic oligonucleotide
  Antisense strand to SEQ ID NO: 693550
uacuauauguaccaucuac

SEQ ID NO: 693552 - RNA, 19 nt, Artificial Sequence
  Description of Artificial Sequence: Synthetic oligonucleotide
  Sense strand starting at position 3928 of SEQ ID NO: 586119
cauauaguaugcuuugaga

SEQ ID NO: 693553 - RNA, 19 nt, Artificial Sequence
  Description of Artificial Sequence: Synthetic oligonucleotide
  Antisense strand to SEQ ID NO: 693552
ucucaaagcauacuauaug

SEQ ID NO: 693554 - RNA, 19 nt, Artificial Sequence
  Description of Artificial Sequence: Synthetic oligonucleotide
  Sense strand starting at position 3930 of SEQ ID NO: 586119
uauaguaugcuuugagaca

SEQ ID NO: 693555 - RNA, 19 nt, Artificial Sequence
  Description of Artificial Sequence: Synthetic oligonucleotide
  Antisense strand to SEQ ID NO: 693554
ugucucaaagcauacuaua

SEQ ID NO: 693556 - RNA, 19 nt, Artificial Sequence
  Description of Artificial Sequence: Synthetic oligonucleotide
  Sense strand starting at position 805 of SEQ ID NO: 586120
gacaguugacucuggaaca

SEQ ID NO: 693557 - RNA, 19 nt, Artificial Sequence
  Description of Artificial Sequence: Synthetic oligonucleotide
  Antisense strand to SEQ ID NO: 693556
uguuccagagucaacuguc

SEQ ID NO: 693558 - RNA, 19 nt, Artificial Sequence
  Description of Artificial Sequence: Synthetic oligonucleotide
  Sense strand starting at position 865 of SEQ ID NO: 586120
gggaguugcaguggaggaa

SEQ ID NO: 693559 - RNA, 19 nt, Artificial Sequence
  Description of Artificial Sequence: Synthetic oligonucleotide
  Antisense strand to SEQ ID NO: 693558
uuccuccacugcaacuccc

SEQ ID NO: 693560 - RNA, 19 nt, Artificial Sequence
  Description of Artificial Sequence: Synthetic oligonucleotide
  Sense strand starting at position 905 of SEQ ID NO: 586120
ggaucuuaaccuggaucca

SEQ ID NO: 693561 - RNA, 19 nt, Artificial Sequence
  Description of Artificial Sequence: Synthetic oligonucleotide
  Antisense strand to SEQ ID NO: 693560
uggauccagguuaagaucc

SEQ ID NO: 693562 - RNA, 19 nt, Artificial Sequence
  Description of Artificial Sequence: Synthetic oligonucleotide
  Sense strand starting at position 1119 of SEQ ID NO: 586120
cuauguuagcuacagagac

SEQ ID NO: 693563 - RNA, 19 nt, Artificial Sequence
  Description of Artificial Sequence: Synthetic oligonucleotide
  Antisense strand to SEQ ID NO: 693562
gucucuguagcuaacauag

SEQ ID NO: 693564 - RNA, 19 nt, Artificial Sequence
  Description of Artificial Sequence: Synthetic oligonucleotide
  Sense strand starting at position 1140 of SEQ ID NO: 586120
gcagguggaaucugcauuu

SEQ ID NO: 693565 - RNA, 19 nt, Artificial Sequence
  Description of Artificial Sequence: Synthetic oligonucleotide
  Antisense strand to SEQ ID NO: 693564
aaaugcagauuccaccugc

SEQ ID NO: 693566 - RNA, 19 nt, Artificial Sequence
  Description of Artificial Sequence: Synthetic oligonucleotide
  Sense strand starting at position 1214 of SEQ ID NO: 586120
agaguuaagcgggaaccau

SEQ ID NO: 693567 - RNA, 19 nt, Artificial Sequence
  Description of Artificial Sequence: Synthetic oligonucleotide
  Antisense strand to SEQ ID NO: 693566
augguucccgcuuaacucu

SEQ ID NO: 693568 - RNA, 19 nt, Artificial Sequence
  Description of Artificial Sequence: Synthetic oligonucleotide
  Sense strand starting at position 1533 of SEQ ID NO: 586120
ggcacauaaccauauguca

SEQ ID NO: 693569 - RNA, 19 nt, Artificial Sequence
  Description of Artificial Sequence: Synthetic oligonucleotide
  Antisense strand to SEQ ID NO: 693568
ugacauaugguuaugugcc

SEQ ID NO: 693570 - RNA, 19 nt, Artificial Sequence
  Description of Artificial Sequence: Synthetic oligonucleotide
  Sense strand starting at position 1541 of SEQ ID NO: 586120
accauaugucagcaauuag

SEQ ID NO: 693571 - RNA, 19 nt, Artificial Sequence
  Description of Artificial Sequence: Synthetic oligonucleotide
  Antisense strand to SEQ ID NO: 693570
cuaauugcugacauauggu

SEQ ID NO: 693572 - RNA, 19 nt, Artificial Sequence
  Description of Artificial Sequence: Synthetic oligonucleotide
  Sense strand starting at position 1561 of SEQ ID NO: 586120
uuguauaaacauuggucaa

SEQ ID NO: 693573 - RNA, 19 nt, Artificial Sequence
  Description of Artificial Sequence: Synthetic oligonucleotide
  Antisense strand to SEQ ID NO: 693572
uugaccaauguuuauacaa

SEQ ID NO: 693574 - RNA, 19 nt, Artificial Sequence
  Description of Artificial Sequence: Synthetic oligonucleotide
  Sense strand starting at position 1563 of SEQ ID NO: 586120
guauaaacauuggucaauu

SEQ ID NO: 693575 - RNA, 19 nt, Artificial Sequence
  Description of Artificial Sequence: Synthetic oligonucleotide
  Antisense strand to SEQ ID NO: 693574
aauugaccaauguuuauac

SEQ ID NO: 693576 - RNA, 19 nt, Artificial Sequence
  Description of Artificial Sequence: Synthetic oligonucleotide
  Sense strand starting at position 1913 of SEQ ID NO: 586120
cuugaccacugauuaagua

SEQ ID NO: 693577 - RNA, 19 nt, Artificial Sequence
  Description of Artificial Sequence: Synthetic oligonucleotide
  Antisense strand to SEQ ID NO: 693576
uacuuaaucaguggucaag

SEQ ID NO: 693578 - RNA, 19 nt, Artificial Sequence
  Description of Artificial Sequence: Synthetic oligonucleotide
  Sense strand starting at position 1921 of SEQ ID NO: 586120
cugauuaaguaaucuggaa

SEQ ID NO: 693579 - RNA, 19 nt, Artificial Sequence
  Description of Artificial Sequence: Synthetic oligonucleotide
  Antisense strand to SEQ ID NO: 693578
uuccagauuacuuaaucag

SEQ ID NO: 693580 - RNA, 19 nt, Artificial Sequence
  Description of Artificial Sequence: Synthetic oligonucleotide
  Sense strand starting at position 1976 of SEQ ID NO: 586120
uuggaaauguauucuggau

SEQ ID NO: 693581 - RNA, 19 nt, Artificial Sequence
  Description of Artificial Sequence: Synthetic oligonucleotide
  Antisense strand to SEQ ID NO: 693580
auccagaauacauuuccaa

SEQ ID NO: 693582 - RNA, 19 nt, Artificial Sequence
  Description of Artificial Sequence: Synthetic oligonucleotide
  Sense strand starting at position 1980 of SEQ ID NO: 586120
aaauguauucuggauguuu

SEQ ID NO: 693583 - RNA, 19 nt, Artificial Sequence
  Description of Artificial Sequence: Synthetic oligonucleotide
  Antisense strand to SEQ ID NO: 693582
aaacauccagaauacauuu

SEQ ID NO: 693584 - RNA, 19 nt, Artificial Sequence
  Description of Artificial Sequence: Synthetic oligonucleotide
  Sense strand starting at position 2073 of SEQ ID NO: 586120
agagcauaguuaccggaaa

SEQ ID NO: 693585 - RNA, 19 nt, Artificial Sequence
  Description of Artificial Sequence: Synthetic oligonucleotide
  Antisense strand to SEQ ID NO: 693584
uuuccgguaacuaugcucu

SEQ ID NO: 693586 - RNA, 19 nt, Artificial Sequence
  Description of Artificial Sequence: Synthetic oligonucleotide
  Sense strand starting at position 2380 of SEQ ID NO: 586120
gguuacucuguuuacagga

SEQ ID NO: 693587 - RNA, 19 nt, Artificial Sequence
  Description of Artificial Sequence: Synthetic oligonucleotide
  Antisense strand to SEQ ID NO: 693586
uccuguaaacagaguaacc

SEQ ID NO: 693588 - RNA, 19 nt, Artificial Sequence
  Description of Artificial Sequence: Synthetic oligonucleotide
  Sense strand starting at position 2413 of SEQ ID NO: 586120
uaaagagauuggguccuuu

SEQ ID NO: 693589 - RNA, 19 nt, Artificial Sequence
  Description of Artificial Sequence: Synthetic oligonucleotide
  Antisense strand to SEQ ID NO: 693588
aaaggacccaaucucuuua

SEQ ID NO: 693590 - RNA, 19 nt, Artificial Sequence
  Description of Artificial Sequence: Synthetic oligonucleotide
  Sense strand starting at position 2549 of SEQ ID NO: 586120
gccauuagauaaguuuaaa

SEQ ID NO: 693591 - RNA, 19 nt, Artificial Sequence
  Description of Artificial Sequence: Synthetic oligonucleotide
  Antisense strand to SEQ ID NO: 693590
uuuaaacuuaucuaauggc

SEQ ID NO: 693592 - RNA, 19 nt, Artificial Sequence
  Description of Artificial Sequence: Synthetic oligonucleotide
  Sense strand starting at position 2588 of SEQ ID NO: 586120
uguugaauuaauugagagu

SEQ ID NO: 693593 - RNA, 19 nt, Artificial Sequence
  Description of Artificial Sequence: Synthetic oligonucleotide
  Antisense strand to SEQ ID NO: 693592
acucucaauuaauucaaca

SEQ ID NO: 693594 - RNA, 19 nt, Artificial Sequence
  Description of Artificial Sequence: Synthetic oligonucleotide
  Sense strand starting at position 2825 of SEQ ID NO: 586120
ugugcauuugcuuacuagu

SEQ ID NO: 693595 - RNA, 19 nt, Artificial Sequence
  Description of Artificial Sequence: Synthetic oligonucleotide
  Antisense strand to SEQ ID NO: 693594
acuaguaagcaaaugcaca

SEQ ID NO: 693596 - RNA, 19 nt, Artificial Sequence
  Description of Artificial Sequence: Synthetic oligonucleotide
  Sense strand starting at position 2942 of SEQ ID NO: 586120
gcguaacccacagauauga

SEQ ID NO: 693597 - RNA, 19 nt, Artificial Sequence
  Description of Artificial Sequence: Synthetic oligonucleotide
  Antisense strand to SEQ ID NO: 693596
ucauaucuguggguuacgc

SEQ ID NO: 693598 - RNA, 19 nt, Artificial Sequence
  Description of Artificial Sequence: Synthetic oligonucleotide
  Sense strand starting at position 3022 of SEQ ID NO: 586120
uuugguuguggauacagaa

SEQ ID NO: 693599 - RNA, 19 nt, Artificial Sequence
  Description of Artificial Sequence: Synthetic oligonucleotide
  Antisense strand to SEQ ID NO: 693598
uucuguauccacaaccaaa

SEQ ID NO: 693600 - RNA, 19 nt, Artificial Sequence
  Description of Artificial Sequence: Synthetic oligonucleotide
  Sense strand starting at position 3043 of SEQ ID NO: 586120
ugcccauaugaaggaauau

SEQ ID NO: 693601 - RNA, 19 nt, Artificial Sequence
  Description of Artificial Sequence: Synthetic oligonucleotide
  Antisense strand to SEQ ID NO: 693600
auauuccuucauaugggca

SEQ ID NO: 693602 - RNA, 19 nt, Artificial Sequence
  Description of Artificial Sequence: Synthetic oligonucleotide
  Sense strand starting at position 3140 of SEQ ID NO: 586120
gggacuguaugaucugcaa

SEQ ID NO: 693603 - RNA, 19 nt, Artificial Sequence
  Description of Artificial Sequence: Synthetic oligonucleotide
  Antisense strand to SEQ ID NO: 693602
uugcagaucauacaguccc

SEQ ID NO: 693604 - RNA, 19 nt, Artificial Sequence
  Description of Artificial Sequence: Synthetic oligonucleotide
  Sense strand starting at position 3211 of SEQ ID NO: 586120
accuuaauccaggguauug

SEQ ID NO: 693605 - RNA, 19 nt, Artificial Sequence
  Description of Artificial Sequence: Synthetic oligonucleotide
  Antisense strand to SEQ ID NO: 693604
caauacccuggauuaaggu

SEQ ID NO: 693606 - RNA, 19 nt, Artificial Sequence
  Description of Artificial Sequence: Synthetic oligonucleotide
  Sense strand starting at position 3220 of SEQ ID NO: 586120
caggguauuguuuauaaau

SEQ ID NO: 693607 - RNA, 19 nt, Artificial Sequence
  Description of Artificial Sequence: Synthetic oligonucleotide
  Antisense strand to SEQ ID NO: 693606
auuuauaaacaauacccug

SEQ ID NO: 693608 - RNA, 19 nt, Artificial Sequence
  Description of Artificial Sequence: Synthetic oligonucleotide
  Sense strand starting at position 3455 of SEQ ID NO: 586120
acaaauauacugugcaaga

SEQ ID NO: 693609 - RNA, 19 nt, Artificial Sequence
  Description of Artificial Sequence: Synthetic oligonucleotide
  Antisense strand to SEQ ID NO: 693608
ucuugcacaguauauuugu

SEQ ID NO: 693610 - RNA, 19 nt, Artificial Sequence
  Description of Artificial Sequence: Synthetic oligonucleotide
  Sense strand starting at position 3509 of SEQ ID NO: 586120
gcgggugugcuuccaguau

SEQ ID NO: 693611 - RNA, 19 nt, Artificial Sequence
  Description of Artificial Sequence: Synthetic oligonucleotide
  Antisense strand to SEQ ID NO: 693610
auacuggaagcacacccgc

SEQ ID NO: 693612 - RNA, 19 nt, Artificial Sequence
  Description of Artificial Sequence: Synthetic oligonucleotide
  Sense strand starting at position 3546 of SEQ ID NO: 586120
gcuggauuuggcugaguug

SEQ ID NO: 693613 - RNA, 19 nt, Artificial Sequence
  Description of Artificial Sequence: Synthetic oligonucleotide
  Antisense strand to SEQ ID NO: 693612
caacucagccaaauccagc

SEQ ID NO: 693614 - RNA, 19 nt, Artificial Sequence
  Description of Artificial Sequence: Synthetic oligonucleotide
  Sense strand starting at position 3630 of SEQ ID NO: 586120
guucuauaaagaugggcau

SEQ ID NO: 693615 - RNA, 19 nt, Artificial Sequence
  Description of Artificial Sequence: Synthetic oligonucleotide
  Antisense strand to SEQ ID NO: 693614
augcccaucuuuauagaac

SEQ ID NO: 693616 - RNA, 19 nt, Artificial Sequence
  Description of Artificial Sequence: Synthetic oligonucleotide
  Sense strand starting at position 3631 of SEQ ID NO: 586120
uucuauaaagaugggcaua

SEQ ID NO: 693617 - RNA, 19 nt, Artificial Sequence
  Description of Artificial Sequence: Synthetic oligonucleotide
  Antisense strand to SEQ ID NO: 693616
uaugcccaucuuuauagaa

SEQ ID NO: 693618 - RNA, 19 nt, Artificial Sequence
  Description of Artificial Sequence: Synthetic oligonucleotide
  Sense strand starting at position 3756 of SEQ ID NO: 586120
ugcugauuuguguacuugu

SEQ ID NO: 693619 - RNA, 19 nt, Artificial Sequence
  Description of Artificial Sequence: Synthetic oligonucleotide
  Antisense strand to SEQ ID NO: 693618
acaaguacacaaaucagca

SEQ ID NO: 693620 - RNA, 19 nt, Artificial Sequence
  Description of Artificial Sequence: Synthetic oligonucleotide
  Sense strand starting at position 3759 of SEQ ID NO: 586120
ugauuuguguacuugucua

SEQ ID NO: 693621 - RNA, 19 nt, Artificial Sequence
  Description of Artificial Sequence: Synthetic oligonucleotide
  Antisense strand to SEQ ID NO: 693620
uagacaaguacacaaauca

SEQ ID NO: 693622 - RNA, 19 nt, Artificial Sequence
  Description of Artificial Sequence: Synthetic oligonucleotide
  Sense strand starting at position 3851 of SEQ ID NO: 586120
cuugcugaagguuaugaaa

SEQ ID NO: 693623 - RNA, 19 nt, Artificial Sequence
  Description of Artificial Sequence: Synthetic oligonucleotide
  Antisense strand to SEQ ID NO: 693622
uuucauaaccuucagcaag

SEQ ID NO: 693624 - RNA, 19 nt, Artificial Sequence
  Description of Artificial Sequence: Synthetic oligonucleotide
  Sense strand starting at position 3916 of SEQ ID NO: 586120
aaagaaauggcugggcaau

SEQ ID NO: 693625 - RNA, 19 nt, Artificial Sequence
  Description of Artificial Sequence: Synthetic oligonucleotide
  Antisense strand to SEQ ID NO: 693624
auugcccagccauuucuuu

SEQ ID NO: 693626 - RNA, 19 nt, Artificial Sequence
  Description of Artificial Sequence: Synthetic oligonucleotide
  Sense strand starting at position 3917 of SEQ ID NO: 586120
aagaaauggcugggcaaua

SEQ ID NO: 693627 - RNA, 19 nt, Artificial Sequence
  Description of Artificial Sequence: Synthetic oligonucleotide
  Antisense strand to SEQ ID NO: 693626
uauugcccagccauuucuu

SEQ ID NO: 693628 - RNA, 19 nt, Artificial Sequence
  Description of Artificial Sequence: Synthetic oligonucleotide
  Sense strand starting at position 3918 of SEQ ID NO: 586120
agaaauggcugggcaauaa

SEQ ID NO: 693629 - RNA, 19 nt, Artificial Sequence
  Description of Artificial Sequence: Synthetic oligonucleotide
  Antisense strand to SEQ ID NO: 693628
uuauugcccagccauuucu

SEQ ID NO: 693630 - RNA, 19 nt, Artificial Sequence
  Description of Artificial Sequence: Synthetic oligonucleotide
  Sense strand starting at position 3928 of SEQ ID NO: 586120
gggcaauaauccuuauauu

SEQ ID NO: 693631 - RNA, 19 nt, Artificial Sequence
  Description of Artificial Sequence: Synthetic oligonucleotide
  Antisense strand to SEQ ID NO: 693630
aauauaaggauuauugccc

SEQ ID NO: 693632 - RNA, 19 nt, Artificial Sequence
  Description of Artificial Sequence: Synthetic oligonucleotide
  Sense strand starting at position 3939 of SEQ ID NO: 586120
cuuauauuucucuguuagu

SEQ ID NO: 693633 - RNA, 19 nt, Artificial Sequence
  Description of Artificial Sequence: Synthetic oligonucleotide
  Antisense strand to SEQ ID NO: 693632
acuaacagagaaauauaag

SEQ ID NO: 693634 - RNA, 19 nt, Artificial Sequence
  Description of Artificial Sequence: Synthetic oligonucleotide
  Sense strand starting at position 3940 of SEQ ID NO: 586120
uuauauuucucuguuagug

SEQ ID NO: 693635 - RNA, 19 nt, Artificial Sequence
  Description of Artificial Sequence: Synthetic oligonucleotide
  Antisense strand to SEQ ID NO: 693634
cacuaacagagaaauauaa

SEQ ID NO: 693636 - RNA, 19 nt, Artificial Sequence
  Description of Artificial Sequence: Synthetic oligonucleotide
  Sense strand starting at position 112 of SEQ ID NO: 586121
ucagaaguaugcuuuggau

SEQ ID NO: 693637 - RNA, 19 nt, Artificial Sequence
  Description of Artificial Sequence: Synthetic oligonucleotide
  Antisense strand to SEQ ID NO: 693636
auccaaagcauacuucuga

SEQ ID NO: 693638 - RNA, 19 nt, Artificial Sequence
  Description of Artificial Sequence: Synthetic oligonucleotide
  Sense strand starting at position 240 of SEQ ID NO: 586121
ucuaauucuucccagagga

SEQ ID NO: 693639 - RNA, 19 nt, Artificial Sequence
  Description of Artificial Sequence: Synthetic oligonucleotide
  Antisense strand to SEQ ID NO: 693638
uccucugggaagaauuaga

SEQ ID NO: 693640 - RNA, 19 nt, Artificial Sequence
  Description of Artificial Sequence: Synthetic oligonucleotide
  Sense strand starting at position 274 of SEQ ID NO: 586121
cgacaaagacauugucuaa

SEQ ID NO: 693641 - RNA, 19 nt, Artificial Sequence
  Description of Artificial Sequence: Synthetic oligonucleotide
  Antisense strand to SEQ ID NO: 693640
uuagacaaugucuuugucg

SEQ ID NO: 693642 - RNA, 19 nt, Artificial Sequence
  Description of Artificial Sequence: Synthetic oligonucleotide
  Sense strand starting at position 354 of SEQ ID NO: 586121
augaaaggauuauccgcua

SEQ ID NO: 693643 - RNA, 19 nt, Artificial Sequence
  Description of Artificial Sequence: Synthetic oligonucleotide
  Antisense strand to SEQ ID NO: 693642
uagcggauaauccuuucau

SEQ ID NO: 693644 - RNA, 19 nt, Artificial Sequence
  Description of Artificial Sequence: Synthetic oligonucleotide
  Sense strand starting at position 359 of SEQ ID NO: 586121
aggauuauccgcuauaccu

SEQ ID NO: 693645 - RNA, 19 nt, Artificial Sequence
  Description of Artificial Sequence: Synthetic oligonucleotide
  Antisense strand to SEQ ID NO: 693644
agguauagcggauaauccu

SEQ ID NO: 693646 - RNA, 19 nt, Artificial Sequence
  Description of Artificial Sequence: Synthetic oligonucleotide
  Sense strand starting at position 542 of SEQ ID NO: 586121
cccauacugugucuacgaa

SEQ ID NO: 693647 - RNA, 19 nt, Artificial Sequence
  Description of Artificial Sequence: Synthetic oligonucleotide
  Antisense strand to SEQ ID NO: 693646
uucguagacacaguauggg

SEQ ID NO: 693648 - RNA, 19 nt, Artificial Sequence
  Description of Artificial Sequence: Synthetic oligonucleotide
  Sense strand starting at position 543 of SEQ ID NO: 586121
ccauacugugucuacgaaa

SEQ ID NO: 693649 - RNA, 19 nt, Artificial Sequence
  Description of Artificial Sequence: Synthetic oligonucleotide
  Antisense strand to SEQ ID NO: 693648
uuucguagacacaguaugg

SEQ ID NO: 693650 - RNA, 19 nt, Artificial Sequence
  Description of Artificial Sequence: Synthetic oligonucleotide
  Sense strand starting at position 692 of SEQ ID NO: 586121
agacaauguacggguaaua

SEQ ID NO: 693651 - RNA, 19 nt, Artificial Sequence
  Description of Artificial Sequence: Synthetic oligonucleotide
  Antisense strand to SEQ ID NO: 693650
uauuacccguacauugucu

SEQ ID NO: 693652 - RNA, 19 nt, Artificial Sequence
  Description of Artificial Sequence: Synthetic oligonucleotide
  Sense strand starting at position 705 of SEQ ID NO: 586121
guaauacagggcuaucauc

SEQ ID NO: 693653 - RNA, 19 nt, Artificial Sequence
  Description of Artificial Sequence: Synthetic oligonucleotide
  Antisense strand to SEQ ID NO: 693652
gaugauagcccuguauuac

SEQ ID NO: 693654 - RNA, 19 nt, Artificial Sequence
  Description of Artificial Sequence: Synthetic oligonucleotide
  Sense strand starting at position 730 of SEQ ID NO: 586121
ggcaguuacuucuugguau

SEQ ID NO: 693655 - RNA, 19 nt, Artificial Sequence
  Description of Artificial Sequence: Synthetic oligonucleotide
  Antisense strand to SEQ ID NO: 693654
auaccaagaaguaacugcc

SEQ ID NO: 693656 - RNA, 19 nt, Artificial Sequence
  Description of Artificial Sequence: Synthetic oligonucleotide
  Sense strand starting at position 737 of SEQ ID NO: 586121
acuucuugguauucugaga

SEQ ID NO: 693657 - RNA, 19 nt, Artificial Sequence
  Description of Artificial Sequence: Synthetic oligonucleotide
  Antisense strand to SEQ ID NO: 693656
ucucagaauaccaagaagu

SEQ ID NO: 693658 - RNA, 19 nt, Artificial Sequence
  Description of Artificial Sequence: Synthetic oligonucleotide
  Sense strand starting at position 955 of SEQ ID NO: 586121
acgaaagagugaggagaau

SEQ ID NO: 693659 - RNA, 19 nt, Artificial Sequence
  Description of Artificial Sequence: Synthetic oligonucleotide
  Antisense strand to SEQ ID NO: 693658
auucuccucacucuuucgu

SEQ ID NO: 693660 - RNA, 19 nt, Artificial Sequence
  Description of Artificial Sequence: Synthetic oligonucleotide
  Sense strand starting at position 1079 of SEQ ID NO: 586121
ggcagaaagucaucaacug

SEQ ID NO: 693661 - RNA, 19 nt, Artificial Sequence
  Description of Artificial Sequence: Synthetic oligonucleotide
  Antisense strand to SEQ ID NO: 693660
caguugaugacuuucugcc

SEQ ID NO: 693662 - RNA, 19 nt, Artificial Sequence
  Description of Artificial Sequence: Synthetic oligonucleotide
  Sense strand starting at position 1080 of SEQ ID NO: 586121
gcagaaagucaucaacugu

SEQ ID NO: 693663 - RNA, 19 nt, Artificial Sequence
  Description of Artificial Sequence: Synthetic oligonucleotide
  Antisense strand to SEQ ID NO: 693662
acaguugaugacuuucugc

SEQ ID NO: 693664 - RNA, 19 nt, Artificial Sequence
  Description of Artificial Sequence: Synthetic oligonucleotide
  Sense strand starting at position 1108 of SEQ ID NO: 586121
agacaacucugacgauuuc

SEQ ID NO: 693665 - RNA, 19 nt, Artificial Sequence
  Description of Artificial Sequence: Synthetic oligonucleotide
  Antisense strand to SEQ ID NO: 693664
gaaaucgucagaguugucu

SEQ ID NO: 693666 - RNA, 19 nt, Artificial Sequence
  Description of Artificial Sequence: Synthetic oligonucleotide
  Sense strand starting at position 1115 of SEQ ID NO: 586121
ucugacgauuucuaugcaa

SEQ ID NO: 693667 - RNA, 19 nt, Artificial Sequence
  Description of Artificial Sequence: Synthetic oligonucleotide
  Antisense strand to SEQ ID NO: 693666
uugcauagaaaucgucaga

SEQ ID NO: 693668 - RNA, 19 nt, Artificial Sequence
  Description of Artificial Sequence: Synthetic oligonucleotide
  Sense strand starting at position 1145 of SEQ ID NO: 586121
cuuacucguucuccaagua

SEQ ID NO: 693669 - RNA, 19 nt, Artificial Sequence
  Description of Artificial Sequence: Synthetic oligonucleotide
  Antisense strand to SEQ ID NO: 693668
uacuuggagaacgaguaag

SEQ ID NO: 693670 - RNA, 19 nt, Artificial Sequence
  Description of Artificial Sequence: Synthetic oligonucleotide
  Sense strand starting at position 1146 of SEQ ID NO: 586121
uuacucguucuccaaguau

SEQ ID NO: 693671 - RNA, 19 nt, Artificial Sequence
  Description of Artificial Sequence: Synthetic oligonucleotide
  Antisense strand to SEQ ID NO: 693670
auacuuggagaacgaguaa

SEQ ID NO: 693672 - RNA, 19 nt, Artificial Sequence
  Description of Artificial Sequence: Synthetic oligonucleotide
  Sense strand starting at position 1179 of SEQ ID NO: 586121
uccuuauugcugugugaac

SEQ ID NO: 693673 - RNA, 19 nt, Artificial Sequence
  Description of Artificial Sequence: Synthetic oligonucleotide
  Antisense strand to SEQ ID NO: 693672
guucacacagcaauaagga

SEQ ID NO: 693674 - RNA, 19 nt, Artificial Sequence
  Description of Artificial Sequence: Synthetic oligonucleotide
  Sense strand starting at position 1180 of SEQ ID NO: 586121
ccuuauugcugugugaacu

SEQ ID NO: 693675 - RNA, 19 nt, Artificial Sequence
  Description of Artificial Sequence: Synthetic oligonucleotide
  Antisense strand to SEQ ID NO: 693674
aguucacacagcaauaagg

SEQ ID NO: 693676 - RNA, 19 nt, Artificial Sequence
  Description of Artificial Sequence: Synthetic oligonucleotide
  Sense strand starting at position 1181 of SEQ ID NO: 586121
cuuauugcugugugaacuc

SEQ ID NO: 693677 - RNA, 19 nt, Artificial Sequence
  Description of Artificial Sequence: Synthetic oligonucleotide
  Antisense strand to SEQ ID NO: 693676
gaguucacacagcaauaag

SEQ ID NO: 693678 - RNA, 19 nt, Artificial Sequence
  Description of Artificial Sequence: Synthetic oligonucleotide
  Sense strand starting at position 1198 of SEQ ID NO: 586121
ucccgugagcgguaagguu

SEQ ID NO: 693679 - RNA, 19 nt, Artificial Sequence
  Description of Artificial Sequence: Synthetic oligonucleotide
  Antisense strand to SEQ ID NO: 693678
aaccuuaccgcucacggga

SEQ ID NO: 693680 - RNA, 19 nt, Artificial Sequence
  Description of Artificial Sequence: Synthetic oligonucleotide
  Sense strand starting at position 1339 of SEQ ID NO: 586121
gagcgcuaccuccauguua

SEQ ID NO: 693681 - RNA, 19 nt, Artificial Sequence
  Description of Artificial Sequence: Synthetic oligonucleotide
  Antisense strand to SEQ ID NO: 693680
uaacauggagguagcgcuc

SEQ ID NO: 693682 - RNA, 19 nt, Artificial Sequence
  Description of Artificial Sequence: Synthetic oligonucleotide
  Sense strand starting at position 1353 of SEQ ID NO: 586121
uguuauucagagcgaagua

SEQ ID NO: 693683 - RNA, 19 nt, Artificial Sequence
  Description of Artificial Sequence: Synthetic oligonucleotide
  Antisense strand to SEQ ID NO: 693682
uacuucgcucugaauaaca

SEQ ID NO: 693684 - RNA, 19 nt, Artificial Sequence
  Description of Artificial Sequence: Synthetic oligonucleotide
  Sense strand starting at position 2286 of SEQ ID NO: 586121
gugagauucagccgaggag

SEQ ID NO: 693685 - RNA, 19 nt, Artificial Sequence
  Description of Artificial Sequence: Synthetic oligonucleotide
  Antisense strand to SEQ ID NO: 693684
cuccucggcugaaucucac

SEQ ID NO: 693686 - RNA, 19 nt, Artificial Sequence
  Description of Artificial Sequence: Synthetic oligonucleotide
  Sense strand starting at position 2445 of SEQ ID NO: 586121
agaggaauggcucguuguc

SEQ ID NO: 693687 - RNA, 19 nt, Artificial Sequence
  Description of Artificial Sequence: Synthetic oligonucleotide
  Antisense strand to SEQ ID NO: 693686
gacaacgagccauuccucu

SEQ ID NO: 693688 - RNA, 19 nt, Artificial Sequence
  Description of Artificial Sequence: Synthetic oligonucleotide
  Sense strand starting at position 2501 of SEQ ID NO: 586121
gaucacgugagcgaguauu

SEQ ID NO: 693689 - RNA, 19 nt, Artificial Sequence
  Description of Artificial Sequence: Synthetic oligonucleotide
  Antisense strand to SEQ ID NO: 693688
aauacucgcucacgugauc

SEQ ID NO: 693690 - RNA, 19 nt, Artificial Sequence
  Description of Artificial Sequence: Synthetic oligonucleotide
  Sense strand starting at position 2566 of SEQ ID NO: 586121
uugugauauugagaacuca

SEQ ID NO: 693691 - RNA, 19 nt, Artificial Sequence
  Description of Artificial Sequence: Synthetic oligonucleotide
  Antisense strand to SEQ ID NO: 693690
ugaguucucaauaucacaa

SEQ ID NO: 693692 - RNA, 19 nt, Artificial Sequence
  Description of Artificial Sequence: Synthetic oligonucleotide
  Sense strand starting at position 2647 of SEQ ID NO: 586121
uggcgcuuucugucacauu

SEQ ID NO: 693693 - RNA, 19 nt, Artificial Sequence
  Description of Artificial Sequence: Synthetic oligonucleotide
  Antisense strand to SEQ ID NO: 693692
aaugugacagaaagcgcca

SEQ ID NO: 693694 - RNA, 19 nt, Artificial Sequence
  Description of Artificial Sequence: Synthetic oligonucleotide
  Sense strand starting at position 2658 of SEQ ID NO: 586121
gucacauucuggguuugga

SEQ ID NO: 693695 - RNA, 19 nt, Artificial Sequence
  Description of Artificial Sequence: Synthetic oligonucleotide
  Antisense strand to SEQ ID NO: 693694
uccaaacccagaaugugac

SEQ ID NO: 693696 - RNA, 19 nt, Artificial Sequence
  Description of Artificial Sequence: Synthetic oligonucleotide
  Sense strand starting at position 2733 of SEQ ID NO: 586121
ggaauuacacguugccuua

SEQ ID NO: 693697 - RNA, 19 nt, Artificial Sequence
  Description of Artificial Sequence: Synthetic oligonucleotide
  Antisense strand to SEQ ID NO: 693696
uaaggcaacguguaauucc

SEQ ID NO: 693698 - RNA, 19 nt, Artificial Sequence
  Description of Artificial Sequence: Synthetic oligonucleotide
  Sense strand starting at position 2828 of SEQ ID NO: 586121
ggauaugaauagugaauau

SEQ ID NO: 693699 - RNA, 19 nt, Artificial Sequence
  Description of Artificial Sequence: Synthetic oligonucleotide
  Antisense strand to SEQ ID NO: 693698
auauucacuauucauaucc

SEQ ID NO: 693700 - RNA, 19 nt, Artificial Sequence
  Description of Artificial Sequence: Synthetic oligonucleotide
  Sense strand starting at position 2837 of SEQ ID NO: 586121
uagugaauaugaguaguua

SEQ ID NO: 693701 - RNA, 19 nt, Artificial Sequence
  Description of Artificial Sequence: Synthetic oligonucleotide
  Antisense strand to SEQ ID NO: 693700
uaacuacucauauucacua

SEQ ID NO: 693702 - RNA, 19 nt, Artificial Sequence
  Description of Artificial Sequence: Synthetic oligonucleotide
  Sense strand starting at position 3435 of SEQ ID NO: 586121
aacucuugugucugguaca

SEQ ID NO: 693703 - RNA, 19 nt, Artificial Sequence
  Description of Artificial Sequence: Synthetic oligonucleotide
  Antisense strand to SEQ ID NO: 693702
uguaccagacacaagaguu

SEQ ID NO: 693704 - RNA, 19 nt, Artificial Sequence
  Description of Artificial Sequence: Synthetic oligonucleotide
  Sense strand starting at position 3453 of SEQ ID NO: 586121
acuugugagcucuguggaa

SEQ ID NO: 693705 - RNA, 19 nt, Artificial Sequence
  Description of Artificial Sequence: Synthetic oligonucleotide
  Antisense strand to SEQ ID NO: 693704
uuccacagagcucacaagu

SEQ ID NO: 693706 - RNA, 19 nt, Artificial Sequence
  Description of Artificial Sequence: Synthetic oligonucleotide
  Sense strand starting at position 3455 of SEQ ID NO: 586121
uugugagcucuguggaaau

SEQ ID NO: 693707 - RNA, 19 nt, Artificial Sequence
  Description of Artificial Sequence: Synthetic oligonucleotide
  Antisense strand to SEQ ID NO: 693706
auuuccacagagcucacaa

SEQ ID NO: 693708 - RNA, 19 nt, Artificial Sequence
  Description of Artificial Sequence: Synthetic oligonucleotide
  Sense strand starting at position 3485 of SEQ ID NO: 586121
gacgccuuccgauacauag

SEQ ID NO: 693709 - RNA, 19 nt, Artificial Sequence
  Description of Artificial Sequence: Synthetic oligonucleotide
  Antisense strand to SEQ ID NO: 693708
cuauguaucggaaggcguc

SEQ ID NO: 693710 - RNA, 19 nt, Artificial Sequence
  Description of Artificial Sequence: Synthetic oligonucleotide
  Sense strand starting at position 3580 of SEQ ID NO: 586121
aucguaauagcacaggaaa

SEQ ID NO: 693711 - RNA, 19 nt, Artificial Sequence
  Description of Artificial Sequence: Synthetic oligonucleotide
  Antisense strand to SEQ ID NO: 693710
uuuccugugcuauuacgau

SEQ ID NO: 693712 - RNA, 19 nt, Artificial Sequence
  Description of Artificial Sequence: Synthetic oligonucleotide
  Sense strand starting at position 3582 of SEQ ID NO: 586121
cguaauagcacaggaaaga

SEQ ID NO: 693713 - RNA, 19 nt, Artificial Sequence
  Description of Artificial Sequence: Synthetic oligonucleotide
  Antisense strand to SEQ ID NO: 693712
ucuuuccugugcuauuacg

SEQ ID NO: 693714 - RNA, 19 nt, Artificial Sequence
  Description of Artificial Sequence: Synthetic oligonucleotide
  Sense strand starting at position 3673 of SEQ ID NO: 586121
uugcacaugccauaagauu

SEQ ID NO: 693715 - RNA, 19 nt, Artificial Sequence
  Description of Artificial Sequence: Synthetic oligonucleotide
  Antisense strand to SEQ ID NO: 693714
aaucuuauggcaugugcaa

SEQ ID NO: 693716 - RNA, 19 nt, Artificial Sequence
  Description of Artificial Sequence: Synthetic oligonucleotide
  Sense strand starting at position 39 of SEQ ID NO: 586122
gguuccuugaugggcagaa

SEQ ID NO: 693717 - RNA, 19 nt, Artificial Sequence
  Description of Artificial Sequence: Synthetic oligonucleotide
  Antisense strand to SEQ ID NO: 693716
uucugcccaucaaggaacc

SEQ ID NO: 693718 - RNA, 19 nt, Artificial Sequence
  Description of Artificial Sequence: Synthetic oligonucleotide
  Sense strand starting at position 104 of SEQ ID NO: 586122
ugcaguuagagguaacuaa

SEQ ID NO: 693719 - RNA, 19 nt, Artificial Sequence
  Description of Artificial Sequence: Synthetic oligonucleotide
  Antisense strand to SEQ ID NO: 693718
uuaguuaccucuaacugca

SEQ ID NO: 693720 - RNA, 19 nt, Artificial Sequence
  Description of Artificial Sequence: Synthetic oligonucleotide
  Sense strand starting at position 118 of SEQ ID NO: 586122
acuaaugagucacuugagu

SEQ ID NO: 693721 - RNA, 19 nt, Artificial Sequence
  Description of Artificial Sequence: Synthetic oligonucleotide
  Antisense strand to SEQ ID NO: 693720
acucaagugacucauuagu

SEQ ID NO: 693722 - RNA, 19 nt, Artificial Sequence
  Description of Artificial Sequence: Synthetic oligonucleotide
  Sense strand starting at position 132 of SEQ ID NO: 586122
ugaguauugcgacaaggga

SEQ ID NO: 693723 - RNA, 19 nt, Artificial Sequence
  Description of Artificial Sequence: Synthetic oligonucleotide
  Antisense strand to SEQ ID NO: 693722
ucccuugucgcaauacuca

SEQ ID NO: 693724 - RNA, 19 nt, Artificial Sequence
  Description of Artificial Sequence: Synthetic oligonucleotide
  Sense strand starting at position 468 of SEQ ID NO: 586122
accgguauucucuauaaac

SEQ ID NO: 693725 - RNA, 19 nt, Artificial Sequence
  Description of Artificial Sequence: Synthetic oligonucleotide
  Antisense strand to SEQ ID NO: 693724
guuuauagagaauaccggu

SEQ ID NO: 693726 - RNA, 19 nt, Artificial Sequence
  Description of Artificial Sequence: Synthetic oligonucleotide
  Sense strand starting at position 470 of SEQ ID NO: 586122
cgguauucucuauaaacua

SEQ ID NO: 693727 - RNA, 19 nt, Artificial Sequence
  Description of Artificial Sequence: Synthetic oligonucleotide
  Antisense strand to SEQ ID NO: 693726
uaguuuauagagaauaccg

SEQ ID NO: 693728 - RNA, 19 nt, Artificial Sequence
  Description of Artificial Sequence: Synthetic oligonucleotide
  Sense strand starting at position 581 of SEQ ID NO: 586122
ucugaaguagccuauucua

SEQ ID NO: 693729 - RNA, 19 nt, Artificial Sequence
  Description of Artificial Sequence: Synthetic oligonucleotide
  Antisense strand to SEQ ID NO: 693728
uagaauaggcuacuucaga

SEQ ID NO: 693730 - RNA, 19 nt, Artificial Sequence
  Description of Artificial Sequence: Synthetic oligonucleotide
  Sense strand starting at position 608 of SEQ ID NO: 586122
gucuauacuuguuugaaua

SEQ ID NO: 693731 - RNA, 19 nt, Artificial Sequence
  Description of Artificial Sequence: Synthetic oligonucleotide
  Antisense strand to SEQ ID NO: 693730
uauucaaacaaguauagac

SEQ ID NO: 693732 - RNA, 19 nt, Artificial Sequence
  Description of Artificial Sequence: Synthetic oligonucleotide
  Sense strand starting at position 783 of SEQ ID NO: 586122
gucacaugucuuuauucuu

SEQ ID NO: 693733 - RNA, 19 nt, Artificial Sequence
  Description of Artificial Sequence: Synthetic oligonucleotide
  Antisense strand to SEQ ID NO: 693732
aagaauaaagacaugugac

SEQ ID NO: 693734 - RNA, 19 nt, Artificial Sequence
  Description of Artificial Sequence: Synthetic oligonucleotide
  Sense strand starting at position 990 of SEQ ID NO: 586122
ucuuauacucuagauugua

SEQ ID NO: 693735 - RNA, 19 nt, Artificial Sequence
  Description of Artificial Sequence: Synthetic oligonucleotide
  Antisense strand to SEQ ID NO: 693734
uacaaucuagaguauaaga

SEQ ID NO: 693736 - RNA, 19 nt, Artificial Sequence
  Description of Artificial Sequence: Synthetic oligonucleotide
  Sense strand starting at position 1006 of SEQ ID NO: 586122
guaggcucaaggugaauaa

SEQ ID NO: 693737 - RNA, 19 nt, Artificial Sequence
  Description of Artificial Sequence: Synthetic oligonucleotide
  Antisense strand to SEQ ID NO: 693736
uuauucaccuugagccuac

SEQ ID NO: 693738 - RNA, 19 nt, Artificial Sequence
  Description of Artificial Sequence: Synthetic oligonucleotide
  Sense strand starting at position 1017 of SEQ ID NO: 586122
gugaauaaaccauauagcu

SEQ ID NO: 693739 - RNA, 19 nt, Artificial Sequence
  Description of Artificial Sequence: Synthetic oligonucleotide
  Antisense strand to SEQ ID NO: 693738
agcuauaugguuuauucac

SEQ ID NO: 693740 - RNA, 19 nt, Artificial Sequence
  Description of Artificial Sequence: Synthetic oligonucleotide
  Sense strand starting at position 1153 of SEQ ID NO: 586122
uaaagaagacuagguugua

SEQ ID NO: 693741 - RNA, 19 nt, Artificial Sequence
  Description of Artificial Sequence: Synthetic oligonucleotide
  Antisense strand to SEQ ID NO: 693740
uacaaccuagucuucuuua

SEQ ID NO: 693742 - RNA, 19 nt, Artificial Sequence
  Description of Artificial Sequence: Synthetic oligonucleotide
  Sense strand starting at position 1156 of SEQ ID NO: 586122
agaagacuagguuguacaa

SEQ ID NO: 693743 - RNA, 19 nt, Artificial Sequence
  Description of Artificial Sequence: Synthetic oligonucleotide
  Antisense strand to SEQ ID NO: 693742
uuguacaaccuagucuucu

SEQ ID NO: 693744 - RNA, 19 nt, Artificial Sequence
  Description of Artificial Sequence: Synthetic oligonucleotide
  Sense strand starting at position 1263 of SEQ ID NO: 586122
gagugagauuaaccacuua

SEQ ID NO: 693745 - RNA, 19 nt, Artificial Sequence
  Description of Artificial Sequence: Synthetic oligonucleotide
  Antisense strand to SEQ ID NO: 693744
uaagugguuaaucucacuc

SEQ ID NO: 693746 - RNA, 19 nt, Artificial Sequence
  Description of Artificial Sequence: Synthetic oligonucleotide
  Sense strand starting at position 1304 of SEQ ID NO: 586122
gcaagaaacgaguaucuuu

SEQ ID NO: 693747 - RNA, 19 nt, Artificial Sequence
  Description of Artificial Sequence: Synthetic oligonucleotide
  Antisense strand to SEQ ID NO: 693746
aaagauacucguuucuugc

SEQ ID NO: 693748 - RNA, 19 nt, Artificial Sequence
  Description of Artificial Sequence: Synthetic oligonucleotide
  Sense strand starting at position 1313 of SEQ ID NO: 586122
gaguaucuuucucugacga

SEQ ID NO: 693749 - RNA, 19 nt, Artificial Sequence
  Description of Artificial Sequence: Synthetic oligonucleotide
  Antisense strand to SEQ ID NO: 693748
ucgucagagaaagauacuc

SEQ ID NO: 693750 - RNA, 19 nt, Artificial Sequence
  Description of Artificial Sequence: Synthetic oligonucleotide
  Sense strand starting at position 1328 of SEQ ID NO: 586122
acgaccagaacaugaguua

SEQ ID NO: 693751 - RNA, 19 nt, Artificial Sequence
  Description of Artificial Sequence: Synthetic oligonucleotide
  Antisense strand to SEQ ID NO: 693750
uaacucauguucuggucgu

SEQ ID NO: 693752 - RNA, 19 nt, Artificial Sequence
  Description of Artificial Sequence: Synthetic oligonucleotide
  Sense strand starting at position 1331 of SEQ ID NO: 586122
accagaacaugaguuaagu

SEQ ID NO: 693753 - RNA, 19 nt, Artificial Sequence
  Description of Artificial Sequence: Synthetic oligonucleotide
  Antisense strand to SEQ ID NO: 693752
acuuaacucauguucuggu

SEQ ID NO: 693754 - RNA, 19 nt, Artificial Sequence
  Description of Artificial Sequence: Synthetic oligonucleotide
  Sense strand starting at position 1536 of SEQ ID NO: 586122
gccuaauuccaacaggcau

SEQ ID NO: 693755 - RNA, 19 nt, Artificial Sequence
  Description of Artificial Sequence: Synthetic oligonucleotide
  Antisense strand to SEQ ID NO: 693754
augccuguuggaauuaggc

SEQ ID NO: 693756 - RNA, 19 nt, Artificial Sequence
  Description of Artificial Sequence: Synthetic oligonucleotide
  Sense strand starting at position 2391 of SEQ ID NO: 586122
cagcucugucaccaaggaa

SEQ ID NO: 693757 - RNA, 19 nt, Artificial Sequence
  Description of Artificial Sequence: Synthetic oligonucleotide
  Antisense strand to SEQ ID NO: 693756
uuccuuggugacagagcug

SEQ ID NO: 693758 - RNA, 19 nt, Artificial Sequence
  Description of Artificial Sequence: Synthetic oligonucleotide
  Sense strand starting at position 2394 of SEQ ID NO: 586122
cucugucaccaaggaaauc

SEQ ID NO: 693759 - RNA, 19 nt, Artificial Sequence
  Description of Artificial Sequence: Synthetic oligonucleotide
  Antisense strand to SEQ ID NO: 693758
gauuuccuuggugacagag

SEQ ID NO: 693760 - RNA, 19 nt, Artificial Sequence
  Description of Artificial Sequence: Synthetic oligonucleotide
  Sense strand starting at position 2479 of SEQ ID NO: 586122
cuagucccagcucaagauu

SEQ ID NO: 693761 - RNA, 19 nt, Artificial Sequence
  Description of Artificial Sequence: Synthetic oligonucleotide
  Antisense strand to SEQ ID NO: 693760
aaucuugagcugggacuag

SEQ ID NO: 693762 - RNA, 19 nt, Artificial Sequence
  Description of Artificial Sequence: Synthetic oligonucleotide
  Sense strand starting at position 2494 of SEQ ID NO: 586122
gauuguugcugauuuggca

SEQ ID NO: 693763 - RNA, 19 nt, Artificial Sequence
  Description of Artificial Sequence: Synthetic oligonucleotide
  Antisense strand to SEQ ID NO: 693762
ugccaaaucagcaacaauc

SEQ ID NO: 693764 - RNA, 19 nt, Artificial Sequence
  Description of Artificial Sequence: Synthetic oligonucleotide
  Sense strand starting at position 2498 of SEQ ID NO: 586122
guugcugauuuggcacaga

SEQ ID NO: 693765 - RNA, 19 nt, Artificial Sequence
  Description of Artificial Sequence: Synthetic oligonucleotide
  Antisense strand to SEQ ID NO: 693764
ucugugccaaaucagcaac

SEQ ID NO: 693766 - RNA, 19 nt, Artificial Sequence
  Description of Artificial Sequence: Synthetic oligonucleotide
  Sense strand starting at position 2571 of SEQ ID NO: 586122
aagggaaguuucuuaucuc

SEQ ID NO: 693767 - RNA, 19 nt, Artificial Sequence
  Description of Artificial Sequence: Synthetic oligonucleotide
  Antisense strand to SEQ ID NO: 693766
gagauaagaaacuucccuu

SEQ ID NO: 693768 - RNA, 19 nt, Artificial Sequence
  Description of Artificial Sequence: Synthetic oligonucleotide
  Sense strand starting at position 2577 of SEQ ID NO: 586122
aguuucuuaucuccucaga

SEQ ID NO: 693769 - RNA, 19 nt, Artificial Sequence
  Description of Artificial Sequence: Synthetic oligonucleotide
  Antisense strand to SEQ ID NO: 693768
ucugaggagauaagaaacu

SEQ ID NO: 693770 - RNA, 19 nt, Artificial Sequence
  Description of Artificial Sequence: Synthetic oligonucleotide
  Sense strand starting at position 2580 of SEQ ID NO: 586122
uucuuaucuccucagaguc

SEQ ID NO: 693771 - RNA, 19 nt, Artificial Sequence
  Description of Artificial Sequence: Synthetic oligonucleotide
  Antisense strand to SEQ ID NO: 693770
gacucugaggagauaagaa

SEQ ID NO: 693772 - RNA, 19 nt, Artificial Sequence
  Description of Artificial Sequence: Synthetic oligonucleotide
  Sense strand starting at position 2713 of SEQ ID NO: 586122
aacugucugcuacagagau

SEQ ID NO: 693773 - RNA, 19 nt, Artificial Sequence
  Description of Artificial Sequence: Synthetic oligonucleotide
  Antisense strand to SEQ ID NO: 693772
aucucuguagcagacaguu

SEQ ID NO: 693774 - RNA, 19 nt, Artificial Sequence
  Description of Artificial Sequence: Synthetic oligonucleotide
  Sense strand starting at position 2781 of SEQ ID NO: 586122
cugcuuguugagcacaaga

SEQ ID NO: 693775 - RNA, 19 nt, Artificial Sequence
  Description of Artificial Sequence: Synthetic oligonucleotide
  Antisense strand to SEQ ID NO: 693774
ucuugugcucaacaagcag

SEQ ID NO: 693776 - RNA, 19 nt, Artificial Sequence
  Description of Artificial Sequence: Synthetic oligonucleotide
  Sense strand starting at position 2783 of SEQ ID NO: 586122
gcuuguugagcacaagaaa

SEQ ID NO: 693777 - RNA, 19 nt, Artificial Sequence
  Description of Artificial Sequence: Synthetic oligonucleotide
  Antisense strand to SEQ ID NO: 693776
uuucuugugcucaacaagc

SEQ ID NO: 693778 - RNA, 19 nt, Artificial Sequence
  Description of Artificial Sequence: Synthetic oligonucleotide
  Sense strand starting at position 3379 of SEQ ID NO: 586122
ggaauuugagccuguguuu

SEQ ID NO: 693779 - RNA, 19 nt, Artificial Sequence
  Description of Artificial Sequence: Synthetic oligonucleotide
  Antisense strand to SEQ ID NO: 693778
aaacacaggcucaaauucc

SEQ ID NO: 693780 - RNA, 19 nt, Artificial Sequence
  Description of Artificial Sequence: Synthetic oligonucleotide
  Sense strand starting at position 3382 of SEQ ID NO: 586122
auuugagccuguguuuaug

SEQ ID NO: 693781 - RNA, 19 nt, Artificial Sequence
  Description of Artificial Sequence: Synthetic oligonucleotide
  Antisense strand to SEQ ID NO: 693780
cauaaacacaggcucaaau

SEQ ID NO: 693782 - RNA, 19 nt, Artificial Sequence
  Description of Artificial Sequence: Synthetic oligonucleotide
  Sense strand starting at position 3473 of SEQ ID NO: 586122
guguacuagccucaaauca

SEQ ID NO: 693783 - RNA, 19 nt, Artificial Sequence
  Description of Artificial Sequence: Synthetic oligonucleotide
  Antisense strand to SEQ ID NO: 693782
ugauuugaggcuaguacac

SEQ ID NO: 693784 - RNA, 19 nt, Artificial Sequence
  Description of Artificial Sequence: Synthetic oligonucleotide
  Sense strand starting at position 3543 of SEQ ID NO: 586122
uucguaucagauuacaucu

SEQ ID NO: 693785 - RNA, 19 nt, Artificial Sequence
  Description of Artificial Sequence: Synthetic oligonucleotide
  Antisense strand to SEQ ID NO: 693784
agauguaaucugauacgaa

SEQ ID NO: 693786 - RNA, 19 nt, Artificial Sequence
  Description of Artificial Sequence: Synthetic oligonucleotide
  Sense strand starting at position 3568 of SEQ ID NO: 586122
ugacaucaucccggauaau

SEQ ID NO: 693787 - RNA, 19 nt, Artificial Sequence
  Description of Artificial Sequence: Synthetic oligonucleotide
  Antisense strand to SEQ ID NO: 693786
auuauccgggaugauguca

SEQ ID NO: 693788 - RNA, 19 nt, Artificial Sequence
  Description of Artificial Sequence: Synthetic oligonucleotide
  Sense strand starting at position 3669 of SEQ ID NO: 586122
gcccaaugucacuaccaga

SEQ ID NO: 693789 - RNA, 19 nt, Artificial Sequence
  Description of Artificial Sequence: Synthetic oligonucleotide
  Antisense strand to SEQ ID NO: 693788
ucugguagugacauugggc

SEQ ID NO: 693790 - RNA, 19 nt, Artificial Sequence
  Description of Artificial Sequence: Synthetic oligonucleotide
  Sense strand starting at position 3781 of SEQ ID NO: 586122
agaucauuugcuugcuuga

SEQ ID NO: 693791 - RNA, 19 nt, Artificial Sequence
  Description of Artificial Sequence: Synthetic oligonucleotide
  Antisense strand to SEQ ID NO: 693790
ucaagcaagcaaaugaucu

SEQ ID NO: 693792 - RNA, 19 nt, Artificial Sequence
  Description of Artificial Sequence: Synthetic oligonucleotide
  Sense strand starting at position 3784 of SEQ ID NO: 586122
ucauuugcuugcuugauga

SEQ ID NO: 693793 - RNA, 19 nt, Artificial Sequence
  Description of Artificial Sequence: Synthetic oligonucleotide
  Antisense strand to SEQ ID NO: 693792
ucaucaagcaagcaaauga

SEQ ID NO: 693794 - RNA, 19 nt, Artificial Sequence
  Description of Artificial Sequence: Synthetic oligonucleotide
  Sense strand starting at position 3931 of SEQ ID NO: 586122
gccagaaggacuggcauau

SEQ ID NO: 693795 - RNA, 19 nt, Artificial Sequence
  Description of Artificial Sequence: Synthetic oligonucleotide
  Antisense strand to SEQ ID NO: 693794
auaugccaguccuucuggc

SEQ ID NO: 693796 - RNA, 19 nt, Artificial Sequence
  Description of Artificial Sequence: Synthetic oligonucleotide
  Sense strand starting at position 17 of SEQ ID NO: 586123
ucaguagaauucuucugua

SEQ ID NO: 693797 - RNA, 19 nt, Artificial Sequence
  Description of Artificial Sequence: Synthetic oligonucleotide
  Antisense strand to SEQ ID NO: 693796
uacagaagaauucuacuga

SEQ ID NO: 693798 - RNA, 19 nt, Artificial Sequence
  Description of Artificial Sequence: Synthetic oligonucleotide
  Sense strand starting at position 76 of SEQ ID NO: 586123
uggcccuucccuuaagaaa

SEQ ID NO: 693799 - RNA, 19 nt, Artificial Sequence
  Description of Artificial Sequence: Synthetic oligonucleotide
  Antisense strand to SEQ ID NO: 693798
uuucuuaagggaagggcca

SEQ ID NO: 693800 - RNA, 19 nt, Artificial Sequence
  Description of Artificial Sequence: Synthetic oligonucleotide
  Sense strand starting at position 120 of SEQ ID NO: 586123
guuauuagugaguagcaag

SEQ ID NO: 693801 - RNA, 19 nt, Artificial Sequence
  Description of Artificial Sequence: Synthetic oligonucleotide
  Antisense strand to SEQ ID NO: 693800
cuugcuacucacuaauaac

SEQ ID NO: 693802 - RNA, 19 nt, Artificial Sequence
  Description of Artificial Sequence: Synthetic oligonucleotide
  Sense strand starting at position 199 of SEQ ID NO: 586123
acacuauguuacuuggaau

SEQ ID NO: 693803 - RNA, 19 nt, Artificial Sequence
  Description of Artificial Sequence: Synthetic oligonucleotide
  Antisense strand to SEQ ID NO: 693802
auuccaaguaacauagugu

SEQ ID NO: 693804 - RNA, 19 nt, Artificial Sequence
  Description of Artificial Sequence: Synthetic oligonucleotide
  Sense strand starting at position 211 of SEQ ID NO: 586123
uuggaauaagcuuguagau

SEQ ID NO: 693805 - RNA, 19 nt, Artificial Sequence
  Description of Artificial Sequence: Synthetic oligonucleotide
  Antisense strand to SEQ ID NO: 693804
aucuacaagcuuauuccaa

SEQ ID NO: 693806 - RNA, 19 nt, Artificial Sequence
  Description of Artificial Sequence: Synthetic oligonucleotide
  Sense strand starting at position 221 of SEQ ID NO: 586123
cuuguagauggauagguuu

SEQ ID NO: 693807 - RNA, 19 nt, Artificial Sequence
  Description of Artificial Sequence: Synthetic oligonucleotide
  Antisense strand to SEQ ID NO: 693806
aaaccuauccaucuacaag

SEQ ID NO: 693808 - RNA, 19 nt, Artificial Sequence
  Description of Artificial Sequence: Synthetic oligonucleotide
  Sense strand starting at position 642 of SEQ ID NO: 586123
aguuguaacaaugaguuga

SEQ ID NO: 693809 - RNA, 19 nt, Artificial Sequence
  Description of Artificial Sequence: Synthetic oligonucleotide
  Antisense strand to SEQ ID NO: 693808
ucaacucauuguuacaacu

SEQ ID NO: 693810 - RNA, 19 nt, Artificial Sequence
  Description of Artificial Sequence: Synthetic oligonucleotide
  Sense strand starting at position 644 of SEQ ID NO: 586123
uuguaacaaugaguugaaa

SEQ ID NO: 693811 - RNA, 19 nt, Artificial Sequence
  Description of Artificial Sequence: Synthetic oligonucleotide
  Antisense strand to SEQ ID NO: 693810
uuucaacucauuguuacaa

SEQ ID NO: 693812 - RNA, 19 nt, Artificial Sequence
  Description of Artificial Sequence: Synthetic oligonucleotide
  Sense strand starting at position 646 of SEQ ID NO: 586123
guaacaaugaguugaaaug

SEQ ID NO: 693813 - RNA, 19 nt, Artificial Sequence
  Description of Artificial Sequence: Synthetic oligonucleotide
  Antisense strand to SEQ ID NO: 693812
cauuucaacucauuguuac

SEQ ID NO: 693814 - RNA, 19 nt, Artificial Sequence
  Description of Artificial Sequence: Synthetic oligonucleotide
  Sense strand starting at position 682 of SEQ ID NO: 586123
cuuuguuaggccuacuaua

SEQ ID NO: 693815 - RNA, 19 nt, Artificial Sequence
  Description of Artificial Sequence: Synthetic oligonucleotide
  Antisense strand to SEQ ID NO: 693814
uauaguaggccuaacaaag

SEQ ID NO: 693816 - RNA, 19 nt, Artificial Sequence
  Description of Artificial Sequence: Synthetic oligonucleotide
  Sense strand starting at position 778 of SEQ ID NO: 586123
uagagagucuaacuaguuu

SEQ ID NO: 693817 - RNA, 19 nt, Artificial Sequence
  Description of Artificial Sequence: Synthetic oligonucleotide
  Antisense strand to SEQ ID NO: 693816
aaacuaguuagacucucua

SEQ ID NO: 693818 - RNA, 19 nt, Artificial Sequence
  Description of Artificial Sequence: Synthetic oligonucleotide
  Sense strand starting at position 833 of SEQ ID NO: 586123
cugugugggcuguaagaaa

SEQ ID NO: 693819 - RNA, 19 nt, Artificial Sequence
  Description of Artificial Sequence: Synthetic oligonucleotide
  Antisense strand to SEQ ID NO: 693818
uuucuuacagcccacacag

SEQ ID NO: 693820 - RNA, 19 nt, Artificial Sequence
  Description of Artificial Sequence: Synthetic oligonucleotide
  Sense strand starting at position 841 of SEQ ID NO: 586123
gcuguaagaaaucaggcua

SEQ ID NO: 693821 - RNA, 19 nt, Artificial Sequence
  Description of Artificial Sequence: Synthetic oligonucleotide
  Antisense strand to SEQ ID NO: 693820
uagccugauuucuuacagc

SEQ ID NO: 693822 - RNA, 19 nt, Artificial Sequence
  Description of Artificial Sequence: Synthetic oligonucleotide
  Sense strand starting at position 886 of SEQ ID NO: 586123
uaaggaugguuauugucuu

SEQ ID NO: 693823 - RNA, 19 nt, Artificial Sequence
  Description of Artificial Sequence: Synthetic oligonucleotide
  Antisense strand to SEQ ID NO: 693822
aagacaauaaccauccuua

SEQ ID NO: 693824 - RNA, 19 nt, Artificial Sequence
  Description of Artificial Sequence: Synthetic oligonucleotide
  Sense strand starting at position 890 of SEQ ID NO: 586123
gaugguuauugucuuuaaa

SEQ ID NO: 693825 - RNA, 19 nt, Artificial Sequence
  Description of Artificial Sequence: Synthetic oligonucleotide
  Antisense strand to SEQ ID NO: 693824
uuuaaagacaauaaccauc

SEQ ID NO: 693826 - RNA, 19 nt, Artificial Sequence
  Description of Artificial Sequence: Synthetic oligonucleotide
  Sense strand starting at position 1007 of SEQ ID NO: 586123
ugguauucugaagaacugu

SEQ ID NO: 693827 - RNA, 19 nt, Artificial Sequence
  Description of Artificial Sequence: Synthetic oligonucleotide
  Antisense strand to SEQ ID NO: 693826
acaguucuucagaauacca

SEQ ID NO: 693828 - RNA, 19 nt, Artificial Sequence
  Description of Artificial Sequence: Synthetic oligonucleotide
  Sense strand starting at position 1039 of SEQ ID NO: 586123
caguuccugccauagagaa

SEQ ID NO: 693829 - RNA, 19 nt, Artificial Sequence
  Description of Artificial Sequence: Synthetic oligonucleotide
  Antisense strand to SEQ ID NO: 693828
uucucuauggcaggaacug

SEQ ID NO: 693830 - RNA, 19 nt, Artificial Sequence
  Description of Artificial Sequence: Synthetic oligonucleotide
  Sense strand starting at position 1131 of SEQ ID NO: 586123
gggagaaauguuugcaauc

SEQ ID NO: 693831 - RNA, 19 nt, Artificial Sequence
  Description of Artificial Sequence: Synthetic oligonucleotide
  Antisense strand to SEQ ID NO: 693830
gauugcaaacauuucuccc

SEQ ID NO: 693832 - RNA, 19 nt, Artificial Sequence
  Description of Artificial Sequence: Synthetic oligonucleotide
  Sense strand starting at position 1132 of SEQ ID NO: 586123
ggagaaauguuugcaaucu

SEQ ID NO: 693833 - RNA, 19 nt, Artificial Sequence
  Description of Artificial Sequence: Synthetic oligonucleotide
  Antisense strand to SEQ ID NO: 693832
agauugcaaacauuucucc

SEQ ID NO: 693834 - RNA, 19 nt, Artificial Sequence
  Description of Artificial Sequence: Synthetic oligonucleotide
  Sense strand starting at position 1166 of SEQ ID NO: 586123
agcaccauuucuguaaguu

SEQ ID NO: 693835 - RNA, 19 nt, Artificial Sequence
  Description of Artificial Sequence: Synthetic oligonucleotide
  Antisense strand to SEQ ID NO: 693834
aacuuacagaaauggugcu

SEQ ID NO: 693836 - RNA, 19 nt, Artificial Sequence
  Description of Artificial Sequence: Synthetic oligonucleotide
  Sense strand starting at position 1379 of SEQ ID NO: 586123
cccagcuucguggauaauu

SEQ ID NO: 693837 - RNA, 19 nt, Artificial Sequence
  Description of Artificial Sequence: Synthetic oligonucleotide
  Antisense strand to SEQ ID NO: 693836
aauuauccacgaagcuggg

SEQ ID NO: 693838 - RNA, 19 nt, Artificial Sequence
  Description of Artificial Sequence: Synthetic oligonucleotide
  Sense strand starting at position 1381 of SEQ ID NO: 586123
cagcuucguggauaauuaa

SEQ ID NO: 693839 - RNA, 19 nt, Artificial Sequence
  Description of Artificial Sequence: Synthetic oligonucleotide
  Antisense strand to SEQ ID NO: 693838
uuaauuauccacgaagcug

SEQ ID NO: 693840 - RNA, 19 nt, Artificial Sequence
  Description of Artificial Sequence: Synthetic oligonucleotide
  Sense strand starting at position 1384 of SEQ ID NO: 586123
cuucguggauaauuaagaa

SEQ ID NO: 693841 - RNA, 19 nt, Artificial Sequence
  Description of Artificial Sequence: Synthetic oligonucleotide
  Antisense strand to SEQ ID NO: 693840
uucuuaauuauccacgaag

SEQ ID NO: 693842 - RNA, 19 nt, Artificial Sequence
  Description of Artificial Sequence: Synthetic oligonucleotide
  Sense strand starting at position 1428 of SEQ ID NO: 586123
cuaaucagaacguagagua

SEQ ID NO: 693843 - RNA, 19 nt, Artificial Sequence
  Description of Artificial Sequence: Synthetic oligonucleotide
  Antisense strand to SEQ ID NO: 693842
uacucuacguucugauuag

SEQ ID NO: 693844 - RNA, 19 nt, Artificial Sequence
  Description of Artificial Sequence: Synthetic oligonucleotide
  Sense strand starting at position 1498 of SEQ ID NO: 586123
cuugucacccgucagaaau

SEQ ID NO: 693845 - RNA, 19 nt, Artificial Sequence
  Description of Artificial Sequence: Synthetic oligonucleotide
  Antisense strand to SEQ ID NO: 693844
auuucugacgggugacaag

SEQ ID NO: 693846 - RNA, 19 nt, Artificial Sequence
  Description of Artificial Sequence: Synthetic oligonucleotide
  Sense strand starting at position 1510 of SEQ ID NO: 586123
cagaaaugguugccucuca

SEQ ID NO: 693847 - RNA, 19 nt, Artificial Sequence
  Description of Artificial Sequence: Synthetic oligonucleotide
  Antisense strand to SEQ ID NO: 693846
ugagaggcaaccauuucug

SEQ ID NO: 693848 - RNA, 19 nt, Artificial Sequence
  Description of Artificial Sequence: Synthetic oligonucleotide
  Sense strand starting at position 1511 of SEQ ID NO: 586123
agaaaugguugccucucau

SEQ ID NO: 693849 - RNA, 19 nt, Artificial Sequence
  Description of Artificial Sequence: Synthetic oligonucleotide
  Antisense strand to SEQ ID NO: 693848
augagaggcaaccauuucu

SEQ ID NO: 693850 - RNA, 19 nt, Artificial Sequence
  Description of Artificial Sequence: Synthetic oligonucleotide
  Sense strand starting at position 2060 of SEQ ID NO: 586123
ugcggauaccaagaucaau

SEQ ID NO: 693851 - RNA, 19 nt, Artificial Sequence
  Description of Artificial Sequence: Synthetic oligonucleotide
  Antisense strand to SEQ ID NO: 693850
auugaucuugguauccgca

SEQ ID NO: 693852 - RNA, 19 nt, Artificial Sequence
  Description of Artificial Sequence: Synthetic oligonucleotide
  Sense strand starting at position 2109 of SEQ ID NO: 586123
ucucaagaguugcuugauu

SEQ ID NO: 693853 - RNA, 19 nt, Artificial Sequence
  Description of Artificial Sequence: Synthetic oligonucleotide
  Antisense strand to SEQ ID NO: 693852
aaucaagcaacucuugaga

SEQ ID NO: 693854 - RNA, 19 nt, Artificial Sequence
  Description of Artificial Sequence: Synthetic oligonucleotide
  Sense strand starting at position 2141 of SEQ ID NO: 586123
aggcguuuccuugaaauca

SEQ ID NO: 693855 - RNA, 19 nt, Artificial Sequence
  Description of Artificial Sequence: Synthetic oligonucleotide
  Antisense strand to SEQ ID NO: 693854
ugauuucaaggaaacgccu

SEQ ID NO: 693856 - RNA, 19 nt, Artificial Sequence
  Description of Artificial Sequence: Synthetic oligonucleotide
  Sense strand starting at position 2181 of SEQ ID NO: 586123
uuuaaacagcuaugcagaa

SEQ ID NO: 693857 - RNA, 19 nt, Artificial Sequence
  Description of Artificial Sequence: Synthetic oligonucleotide
  Antisense strand to SEQ ID NO: 693856
uucugcauagcuguuuaaa

SEQ ID NO: 693858 - RNA, 19 nt, Artificial Sequence
  Description of Artificial Sequence: Synthetic oligonucleotide
  Sense strand starting at position 2260 of SEQ ID NO: 586123
ucuuauugcaugggagguu

SEQ ID NO: 693859 - RNA, 19 nt, Artificial Sequence
  Description of Artificial Sequence: Synthetic oligonucleotide
  Antisense strand to SEQ ID NO: 693858
aaccucccaugcaauaaga

SEQ ID NO: 693860 - RNA, 19 nt, Artificial Sequence
  Description of Artificial Sequence: Synthetic oligonucleotide
  Sense strand starting at position 2845 of SEQ ID NO: 586123
guuaauucccauugaagag

SEQ ID NO: 693861 - RNA, 19 nt, Artificial Sequence
  Description of Artificial Sequence: Synthetic oligonucleotide
  Antisense strand to SEQ ID NO: 693860
cucuucaaugggaauuaac

SEQ ID NO: 693862 - RNA, 19 nt, Artificial Sequence
  Description of Artificial Sequence: Synthetic oligonucleotide
  Sense strand starting at position 2860 of SEQ ID NO: 586123
agaggauaguuucucuaca

SEQ ID NO: 693863 - RNA, 19 nt, Artificial Sequence
  Description of Artificial Sequence: Synthetic oligonucleotide
  Antisense strand to SEQ ID NO: 693862
uguagagaaacuauccucu

SEQ ID NO: 693864 - RNA, 19 nt, Artificial Sequence
  Description of Artificial Sequence: Synthetic oligonucleotide
  Sense strand starting at position 2861 of SEQ ID NO: 586123
gaggauaguuucucuacag

SEQ ID NO: 693865 - RNA, 19 nt, Artificial Sequence
  Description of Artificial Sequence: Synthetic oligonucleotide
  Antisense strand to SEQ ID NO: 693864
cuguagagaaacuauccuc

SEQ ID NO: 693866 - RNA, 19 nt, Artificial Sequence
  Description of Artificial Sequence: Synthetic oligonucleotide
  Sense strand starting at position 2905 of SEQ ID NO: 586123
gauuauaggcucugugaaa

SEQ ID NO: 693867 - RNA, 19 nt, Artificial Sequence
  Description of Artificial Sequence: Synthetic oligonucleotide
  Antisense strand to SEQ ID NO: 693866
uuucacagagccuauaauc

SEQ ID NO: 693868 - RNA, 19 nt, Artificial Sequence
  Description of Artificial Sequence: Synthetic oligonucleotide
  Sense strand starting at position 2906 of SEQ ID NO: 586123
auuauaggcucugugaaag

SEQ ID NO: 693869 - RNA, 19 nt, Artificial Sequence
  Description of Artificial Sequence: Synthetic oligonucleotide
  Antisense strand to SEQ ID NO: 693868
cuuucacagagccuauaau

SEQ ID NO: 693870 - RNA, 19 nt, Artificial Sequence
  Description of Artificial Sequence: Synthetic oligonucleotide
  Sense strand starting at position 3716 of SEQ ID NO: 586123
agagaaugguccuuuggau

SEQ ID NO: 693871 - RNA, 19 nt, Artificial Sequence
  Description of Artificial Sequence: Synthetic oligonucleotide
  Antisense strand to SEQ ID NO: 693870
auccaaaggaccauucucu

SEQ ID NO: 693872 - RNA, 19 nt, Artificial Sequence
  Description of Artificial Sequence: Synthetic oligonucleotide
  Sense strand starting at position 3875 of SEQ ID NO: 586123
agacguaucaagggaucac

SEQ ID NO: 693873 - RNA, 19 nt, Artificial Sequence
  Description of Artificial Sequence: Synthetic oligonucleotide
  Antisense strand to SEQ ID NO: 693872
gugaucccuugauacgucu

SEQ ID NO: 693874 - RNA, 19 nt, Artificial Sequence
  Description of Artificial Sequence: Synthetic oligonucleotide
  Sense strand starting at position 3977 of SEQ ID NO: 586123
ggcgacuugagugauguca

SEQ ID NO: 693875 - RNA, 19 nt, Artificial Sequence
  Description of Artificial Sequence: Synthetic oligonucleotide
  Antisense strand to SEQ ID NO: 693874
ugacaucacucaagucgcc

SEQ ID NO: 693876 - RNA, 19 nt, Artificial Sequence
  Description of Artificial Sequence: Synthetic oligonucleotide
  Sense strand starting at position 82 of SEQ ID NO: 586124
agauuauuauccucuguua

SEQ ID NO: 693877 - RNA, 19 nt, Artificial Sequence
  Description of Artificial Sequence: Synthetic oligonucleotide
  Antisense strand to SEQ ID NO: 693876
uaacagaggauaauaaucu

SEQ ID NO: 693878 - RNA, 19 nt, Artificial Sequence
  Description of Artificial Sequence: Synthetic oligonucleotide
  Sense strand starting at position 226 of SEQ ID NO: 586124
ucugguucccauuagugau

SEQ ID NO: 693879 - RNA, 19 nt, Artificial Sequence
  Description of Artificial Sequence: Synthetic oligonucleotide
  Antisense strand to SEQ ID NO: 693878
aucacuaaugggaaccaga

SEQ ID NO: 693880 - RNA, 19 nt, Artificial Sequence
  Description of Artificial Sequence: Synthetic oligonucleotide
  Sense strand starting at position 230 of SEQ ID NO: 586124
guucccauuagugauaguu

SEQ ID NO: 693881 - RNA, 19 nt, Artificial Sequence
  Description of Artificial Sequence: Synthetic oligonucleotide
  Antisense strand to SEQ ID NO: 693880
aacuaucacuaaugggaac

SEQ ID NO: 693882 - RNA, 19 nt, Artificial Sequence
  Description of Artificial Sequence: Synthetic oligonucleotide
  Sense strand starting at position 243 of SEQ ID NO: 586124
auaguuggagucuaagcaa

SEQ ID NO: 693883 - RNA, 19 nt, Artificial Sequence
  Description of Artificial Sequence: Synthetic oligonucleotide
  Antisense strand to SEQ ID NO: 693882
uugcuuagacuccaacuau

SEQ ID NO: 693884 - RNA, 19 nt, Artificial Sequence
  Description of Artificial Sequence: Synthetic oligonucleotide
  Sense strand starting at position 273 of SEQ ID NO: 586124
cugauuuggucugagaaga

SEQ ID NO: 693885 - RNA, 19 nt, Artificial Sequence
  Description of Artificial Sequence: Synthetic oligonucleotide
  Antisense strand to SEQ ID NO: 693884
ucuucucagaccaaaucag

SEQ ID NO: 693886 - RNA, 19 nt, Artificial Sequence
  Description of Artificial Sequence: Synthetic oligonucleotide
  Sense strand starting at position 284 of SEQ ID NO: 586124
ugagaagacguuuaagagu

SEQ ID NO: 693887 - RNA, 19 nt, Artificial Sequence
  Description of Artificial Sequence: Synthetic oligonucleotide
  Antisense strand to SEQ ID NO: 693886
acucuuaaacgucuucuca

SEQ ID NO: 693888 - RNA, 19 nt, Artificial Sequence
  Description of Artificial Sequence: Synthetic oligonucleotide
  Sense strand starting at position 553 of SEQ ID NO: 586124
auuagagguagauguuaag

SEQ ID NO: 693889 - RNA, 19 nt, Artificial Sequence
  Description of Artificial Sequence: Synthetic oligonucleotide
  Antisense strand to SEQ ID NO: 693888
cuuaacaucuaccucuaau

SEQ ID NO: 693890 - RNA, 19 nt, Artificial Sequence
  Description of Artificial Sequence: Synthetic oligonucleotide
  Sense strand starting at position 733 of SEQ ID NO: 586124
ccacuuuaccgauaugguc

SEQ ID NO: 693891 - RNA, 19 nt, Artificial Sequence
  Description of Artificial Sequence: Synthetic oligonucleotide
  Antisense strand to SEQ ID NO: 693890
gaccauaucgguaaagugg

SEQ ID NO: 693892 - RNA, 19 nt, Artificial Sequence
  Description of Artificial Sequence: Synthetic oligonucleotide
  Sense strand starting at position 772 of SEQ ID NO: 586124
gcugccaaauaaguaaaua

SEQ ID NO: 693893 - RNA, 19 nt, Artificial Sequence
  Description of Artificial Sequence: Synthetic oligonucleotide
  Antisense strand to SEQ ID NO: 693892
uauuuacuuauuuggcagc

SEQ ID NO: 693894 - RNA, 19 nt, Artificial Sequence
  Description of Artificial Sequence: Synthetic oligonucleotide
  Sense strand starting at position 2264 of SEQ ID NO: 586124
gccaaauauugagcuuaac

SEQ ID NO: 693895 - RNA, 19 nt, Artificial Sequence
  Description of Artificial Sequence: Synthetic oligonucleotide
  Antisense strand to SEQ ID NO: 693894
guuaagcucaauauuuggc

SEQ ID NO: 693896 - RNA, 19 nt, Artificial Sequence
  Description of Artificial Sequence: Synthetic oligonucleotide
  Sense strand starting at position 2311 of SEQ ID NO: 586124
cuaacuuguggcuaagaau

SEQ ID NO: 693897 - RNA, 19 nt, Artificial Sequence
  Description of Artificial Sequence: Synthetic oligonucleotide
  Antisense strand to SEQ ID NO: 693896
auucuuagccacaaguuag

SEQ ID NO: 693898 - RNA, 19 nt, Artificial Sequence
  Description of Artificial Sequence: Synthetic oligonucleotide
  Sense strand starting at position 2359 of SEQ ID NO: 586124
aaccaaugggacuguauau

SEQ ID NO: 693899 - RNA, 19 nt, Artificial Sequence
  Description of Artificial Sequence: Synthetic oligonucleotide
  Antisense strand to SEQ ID NO: 693898
auauacagucccauugguu

SEQ ID NO: 693900 - RNA, 19 nt, Artificial Sequence
  Description of Artificial Sequence: Synthetic oligonucleotide
  Sense strand starting at position 2421 of SEQ ID NO: 586124
acuugaaggcuaggaguuu

SEQ ID NO: 693901 - RNA, 19 nt, Artificial Sequence
  Description of Artificial Sequence: Synthetic oligonucleotide
  Antisense strand to SEQ ID NO: 693900
aaacuccuagccuucaagu

SEQ ID NO: 693902 - RNA, 19 nt, Artificial Sequence
  Description of Artificial Sequence: Synthetic oligonucleotide
  Sense strand starting at position 2430 of SEQ ID NO: 586124
cuaggaguuuccuugaccu

SEQ ID NO: 693903 - RNA, 19 nt, Artificial Sequence
  Description of Artificial Sequence: Synthetic oligonucleotide
  Antisense strand to SEQ ID NO: 693902
aggucaaggaaacuccuag

SEQ ID NO: 693904 - RNA, 19 nt, Artificial Sequence
  Description of Artificial Sequence: Synthetic oligonucleotide
  Sense strand starting at position 2432 of SEQ ID NO: 586124
aggaguuuccuugaccuuu

SEQ ID NO: 693905 - RNA, 19 nt, Artificial Sequence
  Description of Artificial Sequence: Synthetic oligonucleotide
  Antisense strand to SEQ ID NO: 693904
aaaggucaaggaaacuccu

SEQ ID NO: 693906 - RNA, 19 nt, Artificial Sequence
  Description of Artificial Sequence: Synthetic oligonucleotide
  Sense strand starting at position 2626 of SEQ ID NO: 586124
uguguagucacugaugacu

SEQ ID NO: 693907 - RNA, 19 nt, Artificial Sequence
  Description of Artificial Sequence: Synthetic oligonucleotide
  Antisense strand to SEQ ID NO: 693906
agucaucagugacuacaca

SEQ ID NO: 693908 - RNA, 19 nt, Artificial Sequence
  Description of Artificial Sequence: Synthetic oligonucleotide
  Sense strand starting at position 2638 of SEQ ID NO: 586124
gaugacuuucgugaaugca

SEQ ID NO: 693909 - RNA, 19 nt, Artificial Sequence
  Description of Artificial Sequence: Synthetic oligonucleotide
  Antisense strand to SEQ ID NO: 693908
ugcauucacgaaagucauc

SEQ ID NO: 693910 - RNA, 19 nt, Artificial Sequence
  Description of Artificial Sequence: Synthetic oligonucleotide
  Sense strand starting at position 2752 of SEQ ID NO: 586124
caaguuuagcuguggauga

SEQ ID NO: 693911 - RNA, 19 nt, Artificial Sequence
  Description of Artificial Sequence: Synthetic oligonucleotide
  Antisense strand to SEQ ID NO: 693910
ucauccacagcuaaacuug

SEQ ID NO: 693912 - RNA, 19 nt, Artificial Sequence
  Description of Artificial Sequence: Synthetic oligonucleotide
  Sense strand starting at position 2754 of SEQ ID NO: 586124
aguuuagcuguggaugaga

SEQ ID NO: 693913 - RNA, 19 nt, Artificial Sequence
  Description of Artificial Sequence: Synthetic oligonucleotide
  Antisense strand to SEQ ID NO: 693912
ucucauccacagcuaaacu

SEQ ID NO: 693914 - RNA, 19 nt, Artificial Sequence
  Description of Artificial Sequence: Synthetic oligonucleotide
  Sense strand starting at position 2756 of SEQ ID NO: 586124
uuuagcuguggaugagaga

SEQ ID NO: 693915 - RNA, 19 nt, Artificial Sequence
  Description of Artificial Sequence: Synthetic oligonucleotide
  Antisense strand to SEQ ID NO: 693914
ucucucauccacagcuaaa

SEQ ID NO: 693916 - RNA, 19 nt, Artificial Sequence
  Description of Artificial Sequence: Synthetic oligonucleotide
  Sense strand starting at position 2773 of SEQ ID NO: 586124
gacacaucagauuguaugu

SEQ ID NO: 693917 - RNA, 19 nt, Artificial Sequence
  Description of Artificial Sequence: Synthetic oligonucleotide
  Antisense strand to SEQ ID NO: 693916
acauacaaucugauguguc

SEQ ID NO: 693918 - RNA, 19 nt, Artificial Sequence
  Description of Artificial Sequence: Synthetic oligonucleotide
  Sense strand starting at position 2967 of SEQ ID NO: 586124
augggagauuaggacuaau

SEQ ID NO: 693919 - RNA, 19 nt, Artificial Sequence
  Description of Artificial Sequence: Synthetic oligonucleotide
  Antisense strand to SEQ ID NO: 693918
auuaguccuaaucucccau

SEQ ID NO: 693920 - RNA, 19 nt, Artificial Sequence
  Description of Artificial Sequence: Synthetic oligonucleotide
  Sense strand starting at position 3113 of SEQ ID NO: 586124
caggaacucccaggugauu

SEQ ID NO: 693921 - RNA, 19 nt, Artificial Sequence
  Description of Artificial Sequence: Synthetic oligonucleotide
  Antisense strand to SEQ ID NO: 693920
aaucaccugggaguuccug

SEQ ID NO: 693922 - RNA, 19 nt, Artificial Sequence
  Description of Artificial Sequence: Synthetic oligonucleotide
  Sense strand starting at position 3151 of SEQ ID NO: 586124
aggagcaguucucuaccau

SEQ ID NO: 693923 - RNA, 19 nt, Artificial Sequence
  Description of Artificial Sequence: Synthetic oligonucleotide
  Antisense strand to SEQ ID NO: 693922
augguagagaacugcuccu

SEQ ID NO: 693924 - RNA, 19 nt, Artificial Sequence
  Description of Artificial Sequence: Synthetic oligonucleotide
  Sense strand starting at position 3152 of SEQ ID NO: 586124
ggagcaguucucuaccaua

SEQ ID NO: 693925 - RNA, 19 nt, Artificial Sequence
  Description of Artificial Sequence: Synthetic oligonucleotide
  Antisense strand to SEQ ID NO: 693924
uaugguagagaacugcucc

SEQ ID NO: 693926 - RNA, 19 nt, Artificial Sequence
  Description of Artificial Sequence: Synthetic oligonucleotide
  Sense strand starting at position 3196 of SEQ ID NO: 586124
gagauauaguaggcuacua

SEQ ID NO: 693927 - RNA, 19 nt, Artificial Sequence
  Description of Artificial Sequence: Synthetic oligonucleotide
  Antisense strand to SEQ ID NO: 693926
uaguagccuacuauaucuc

SEQ ID NO: 693928 - RNA, 19 nt, Artificial Sequence
  Description of Artificial Sequence: Synthetic oligonucleotide
  Sense strand starting at position 3333 of SEQ ID NO: 586124
gugaaagugaucugggaag

SEQ ID NO: 693929 - RNA, 19 nt, Artificial Sequence
  Description of Artificial Sequence: Synthetic oligonucleotide
  Antisense strand to SEQ ID NO: 693928
cuucccagaucacuuucac

SEQ ID NO: 693930 - RNA, 19 nt, Artificial Sequence
  Description of Artificial Sequence: Synthetic oligonucleotide
  Sense strand starting at position 3335 of SEQ ID NO: 586124
gaaagugaucugggaagug

SEQ ID NO: 693931 - RNA, 19 nt, Artificial Sequence
  Description of Artificial Sequence: Synthetic oligonucleotide
  Antisense strand to SEQ ID NO: 693930
cacuucccagaucacuuuc

SEQ ID NO: 693932 - RNA, 19 nt, Artificial Sequence
  Description of Artificial Sequence: Synthetic oligonucleotide
  Sense strand starting at position 3380 of SEQ ID NO: 586124
cccuguauccugugauaag

SEQ ID NO: 693933 - RNA, 19 nt, Artificial Sequence
  Description of Artificial Sequence: Synthetic oligonucleotide
  Antisense strand to SEQ ID NO: 693932
cuuaucacaggauacaggg

SEQ ID NO: 693934 - RNA, 19 nt, Artificial Sequence
  Description of Artificial Sequence: Synthetic oligonucleotide
  Sense strand starting at position 3436 of SEQ ID NO: 586124
aagugauagccucaguaag

SEQ ID NO: 693935 - RNA, 19 nt, Artificial Sequence
  Description of Artificial Sequence: Synthetic oligonucleotide
  Antisense strand to SEQ ID NO: 693934
cuuacugaggcuaucacuu

SEQ ID NO: 693936 - RNA, 19 nt, Artificial Sequence
  Description of Artificial Sequence: Synthetic oligonucleotide
  Sense strand starting at position 3500 of SEQ ID NO: 586124
gacaguguacacugggaaa

SEQ ID NO: 693937 - RNA, 19 nt, Artificial Sequence
  Description of Artificial Sequence: Synthetic oligonucleotide
  Antisense strand to SEQ ID NO: 693936
uuucccaguguacacuguc

SEQ ID NO: 693938 - RNA, 19 nt, Artificial Sequence
  Description of Artificial Sequence: Synthetic oligonucleotide
  Sense strand starting at position 3502 of SEQ ID NO: 586124
caguguacacugggaaagu

SEQ ID NO: 693939 - RNA, 19 nt, Artificial Sequence
  Description of Artificial Sequence: Synthetic oligonucleotide
  Antisense strand to SEQ ID NO: 693938
acuuucccaguguacacug

SEQ ID NO: 693940 - RNA, 19 nt, Artificial Sequence
  Description of Artificial Sequence: Synthetic oligonucleotide
  Sense strand starting at position 3592 of SEQ ID NO: 586124
ucauuuaucugugcuuacu

SEQ ID NO: 693941 - RNA, 19 nt, Artificial Sequence
  Description of Artificial Sequence: Synthetic oligonucleotide
  Antisense strand to SEQ ID NO: 693940
aguaagcacagauaaauga

SEQ ID NO: 693942 - RNA, 19 nt, Artificial Sequence
  Description of Artificial Sequence: Synthetic oligonucleotide
  Sense strand starting at position 3594 of SEQ ID NO: 586124
auuuaucugugcuuacuua

SEQ ID NO: 693943 - RNA, 19 nt, Artificial Sequence
  Description of Artificial Sequence: Synthetic oligonucleotide
  Antisense strand to SEQ ID NO: 693942
uaaguaagcacagauaaau

SEQ ID NO: 693944 - RNA, 19 nt, Artificial Sequence
  Description of Artificial Sequence: Synthetic oligonucleotide
  Sense strand starting at position 3707 of SEQ ID NO: 586124
uugauucuguagcuuauaa

SEQ ID NO: 693945 - RNA, 19 nt, Artificial Sequence
  Description of Artificial Sequence: Synthetic oligonucleotide
  Antisense strand to SEQ ID NO: 693944
uuauaagcuacagaaucaa

SEQ ID NO: 693946 - RNA, 19 nt, Artificial Sequence
  Description of Artificial Sequence: Synthetic oligonucleotide
  Sense strand starting at position 3813 of SEQ ID NO: 586124
ggcuauuuggugcagucau

SEQ ID NO: 693947 - RNA, 19 nt, Artificial Sequence
  Description of Artificial Sequence: Synthetic oligonucleotide
  Antisense strand to SEQ ID NO: 693946
augacugcaccaaauagcc

SEQ ID NO: 693948 - RNA, 19 nt, Artificial Sequence
  Description of Artificial Sequence: Synthetic oligonucleotide
  Sense strand starting at position 3869 of SEQ ID NO: 586124
uaugguuaaguuuaggauu

SEQ ID NO: 693949 - RNA, 19 nt, Artificial Sequence
  Description of Artificial Sequence: Synthetic oligonucleotide
  Antisense strand to SEQ ID NO: 693948
aauccuaaacuuaaccaua

SEQ ID NO: 693950 - RNA, 19 nt, Artificial Sequence
  Description of Artificial Sequence: Synthetic oligonucleotide
  Sense strand starting at position 3904 of SEQ ID NO: 586124
agucauaugcuauauuaug

SEQ ID NO: 693951 - RNA, 19 nt, Artificial Sequence
  Description of Artificial Sequence: Synthetic oligonucleotide
  Antisense strand to SEQ ID NO: 693950
cauaauauagcauaugacu

SEQ ID NO: 693952 - RNA, 19 nt, Artificial Sequence
  Description of Artificial Sequence: Synthetic oligonucleotide
  Sense strand starting at position 3940 of SEQ ID NO: 586124
aguaacagaucuuugcaua

SEQ ID NO: 693953 - RNA, 19 nt, Artificial Sequence
  Description of Artificial Sequence: Synthetic oligonucleotide
  Antisense strand to SEQ ID NO: 693952
uaugcaaagaucuguuacu

SEQ ID NO: 693954 - RNA, 19 nt, Artificial Sequence
  Description of Artificial Sequence: Synthetic oligonucleotide
  Sense strand starting at position 3941 of SEQ ID NO: 586124
guaacagaucuuugcauaa

SEQ ID NO: 693955 - RNA, 19 nt, Artificial Sequence
  Description of Artificial Sequence: Synthetic oligonucleotide
  Antisense strand to SEQ ID NO: 693954
uuaugcaaagaucuguuac

SEQ ID NO: 693956 - RNA, 19 nt, Artificial Sequence
  Description of Artificial Sequence: Synthetic oligonucleotide
  Sense strand starting at position 86 of SEQ ID NO: 586125
uccucuguauaagaguauu

SEQ ID NO: 693957 - RNA, 19 nt, Artificial Sequence
  Description of Artificial Sequence: Synthetic oligonucleotide
  Antisense strand to SEQ ID NO: 693956
aauacucuuauacagagga

SEQ ID NO: 693958 - RNA, 19 nt, Artificial Sequence
  Description of Artificial Sequence: Synthetic oligonucleotide
  Sense strand starting at position 173 of SEQ ID NO: 586125
uaaguauaugguggagagu

SEQ ID NO: 693959 - RNA, 19 nt, Artificial Sequence
  Description of Artificial Sequence: Synthetic oligonucleotide
  Antisense strand to SEQ ID NO: 693958
acucuccaccauauacuua

SEQ ID NO: 693960 - RNA, 19 nt, Artificial Sequence
  Description of Artificial Sequence: Synthetic oligonucleotide
  Sense strand starting at position 176 of SEQ ID NO: 586125
guauaugguggagagucau

SEQ ID NO: 693961 - RNA, 19 nt, Artificial Sequence
  Description of Artificial Sequence: Synthetic oligonucleotide
  Antisense strand to SEQ ID NO: 693960
augacucuccaccauauac

SEQ ID NO: 693962 - RNA, 19 nt, Artificial Sequence
  Description of Artificial Sequence: Synthetic oligonucleotide
  Sense strand starting at position 182 of SEQ ID NO: 586125
gguggagagucaugcaaua

SEQ ID NO: 693963 - RNA, 19 nt, Artificial Sequence
  Description of Artificial Sequence: Synthetic oligonucleotide
  Antisense strand to SEQ ID NO: 693962
uauugcaugacucuccacc

SEQ ID NO: 693964 - RNA, 19 nt, Artificial Sequence
  Description of Artificial Sequence: Synthetic oligonucleotide
  Sense strand starting at position 192 of SEQ ID NO: 586125
caugcaauagaacgguaua

SEQ ID NO: 693965 - RNA, 19 nt, Artificial Sequence
  Description of Artificial Sequence: Synthetic oligonucleotide
  Antisense strand to SEQ ID NO: 693964
uauaccguucuauugcaug

SEQ ID NO: 693966 - RNA, 19 nt, Artificial Sequence
  Description of Artificial Sequence: Synthetic oligonucleotide
  Sense strand starting at position 195 of SEQ ID NO: 586125
gcaauagaacgguauagua

SEQ ID NO: 693967 - RNA, 19 nt, Artificial Sequence
  Description of Artificial Sequence: Synthetic oligonucleotide
  Antisense strand to SEQ ID NO: 693966
uacuauaccguucuauugc

SEQ ID NO: 693968 - RNA, 19 nt, Artificial Sequence
  Description of Artificial Sequence: Synthetic oligonucleotide
  Sense strand starting at position 204 of SEQ ID NO: 586125
cgguauaguacagagauga

SEQ ID NO: 693969 - RNA, 19 nt, Artificial Sequence
  Description of Artificial Sequence: Synthetic oligonucleotide
  Antisense strand to SEQ ID NO: 693968
ucaucucuguacuauaccg

SEQ ID NO: 693970 - RNA, 19 nt, Artificial Sequence
  Description of Artificial Sequence: Synthetic oligonucleotide
  Sense strand starting at position 291 of SEQ ID NO: 586125
gacccaguggcucauguuu

SEQ ID NO: 693971 - RNA, 19 nt, Artificial Sequence
  Description of Artificial Sequence: Synthetic oligonucleotide
  Antisense strand to SEQ ID NO: 693970
aaacaugagccacuggguc

SEQ ID NO: 693972 - RNA, 19 nt, Artificial Sequence
  Description of Artificial Sequence: Synthetic oligonucleotide
  Sense strand starting at position 397 of SEQ ID NO: 586125
uauguagagaugugguaag

SEQ ID NO: 693973 - RNA, 19 nt, Artificial Sequence
  Description of Artificial Sequence: Synthetic oligonucleotide
  Antisense strand to SEQ ID NO: 693972
cuuaccacaucucuacaua

SEQ ID NO: 693974 - RNA, 19 nt, Artificial Sequence
  Description of Artificial Sequence: Synthetic oligonucleotide
  Sense strand starting at position 460 of SEQ ID NO: 586125
gacuauacgcuguaugcuu

SEQ ID NO: 693975 - RNA, 19 nt, Artificial Sequence
  Description of Artificial Sequence: Synthetic oligonucleotide
  Antisense strand to SEQ ID NO: 693974
aagcauacagcguauaguc

SEQ ID NO: 693976 - RNA, 19 nt, Artificial Sequence
  Description of Artificial Sequence: Synthetic oligonucleotide
  Sense strand starting at position 484 of SEQ ID NO: 586125
uaugaagacuauuguuuag

SEQ ID NO: 693977 - RNA, 19 nt, Artificial Sequence
  Description of Artificial Sequence: Synthetic oligonucleotide
  Antisense strand to SEQ ID NO: 693976
cuaaacaauagucuucaua

SEQ ID NO: 693978 - RNA, 19 nt, Artificial Sequence
  Description of Artificial Sequence: Synthetic oligonucleotide
  Sense strand starting at position 908 of SEQ ID NO: 586125
agggaagguuuaaguggaa

SEQ ID NO: 693979 - RNA, 19 nt, Artificial Sequence
  Description of Artificial Sequence: Synthetic oligonucleotide
  Antisense strand to SEQ ID NO: 693978
uuccacuuaaaccuucccu

SEQ ID NO: 693980 - RNA, 19 nt, Artificial Sequence
  Description of Artificial Sequence: Synthetic oligonucleotide
  Sense strand starting at position 936 of SEQ ID NO: 586125
uggugacaaugugugucaa

SEQ ID NO: 693981 - RNA, 19 nt, Artificial Sequence
  Description of Artificial Sequence: Synthetic oligonucleotide
  Antisense strand to SEQ ID NO: 693980
uugacacacauugucacca

SEQ ID NO: 693982 - RNA, 19 nt, Artificial Sequence
  Description of Artificial Sequence: Synthetic oligonucleotide
  Sense strand starting at position 1031 of SEQ ID NO: 586125
gguagaaucucugaaccaa

SEQ ID NO: 693983 - RNA, 19 nt, Artificial Sequence
  Description of Artificial Sequence: Synthetic oligonucleotide
  Antisense strand to SEQ ID NO: 693982
uugguucagagauucuacc

SEQ ID NO: 693984 - RNA, 19 nt, Artificial Sequence
  Description of Artificial Sequence: Synthetic oligonucleotide
  Sense strand starting at position 1142 of SEQ ID NO: 586125
cuauguugcugagaguggu

SEQ ID NO: 693985 - RNA, 19 nt, Artificial Sequence
  Description of Artificial Sequence: Synthetic oligonucleotide
  Antisense strand to SEQ ID NO: 693984
accacucucagcaacauag

SEQ ID NO: 693986 - RNA, 19 nt, Artificial Sequence
  Description of Artificial Sequence: Synthetic oligonucleotide
  Sense strand starting at position 1148 of SEQ ID NO: 586125
ugcugagaguggucucaaa

SEQ ID NO: 693987 - RNA, 19 nt, Artificial Sequence
  Description of Artificial Sequence: Synthetic oligonucleotide
  Antisense strand to SEQ ID NO: 693986
uuugagaccacucucagca

SEQ ID NO: 693988 - RNA, 19 nt, Artificial Sequence
  Description of Artificial Sequence: Synthetic oligonucleotide
  Sense strand starting at position 2051 of SEQ ID NO: 586125
gaagucgaccuuugacaga

SEQ ID NO: 693989 - RNA, 19 nt, Artificial Sequence
  Description of Artificial Sequence: Synthetic oligonucleotide
  Antisense strand to SEQ ID NO: 693988
ucugucaaaggucgacuuc

SEQ ID NO: 693990 - RNA, 19 nt, Artificial Sequence
  Description of Artificial Sequence: Synthetic oligonucleotide
  Sense strand starting at position 2056 of SEQ ID NO: 586125
cgaccuuugacagagccaa

SEQ ID NO: 693991 - RNA, 19 nt, Artificial Sequence
  Description of Artificial Sequence: Synthetic oligonucleotide
  Antisense strand to SEQ ID NO: 693990
uuggcucugucaaaggucg

SEQ ID NO: 693992 - RNA, 19 nt, Artificial Sequence
  Description of Artificial Sequence: Synthetic oligonucleotide
  Sense strand starting at position 2395 of SEQ ID NO: 586125
accucaguguugcagcgau

SEQ ID NO: 693993 - RNA, 19 nt, Artificial Sequence
  Description of Artificial Sequence: Synthetic oligonucleotide
  Antisense strand to SEQ ID NO: 693992
aucgcugcaacacugaggu

SEQ ID NO: 693994 - RNA, 19 nt, Artificial Sequence
  Description of Artificial Sequence: Synthetic oligonucleotide
  Sense strand starting at position 2754 of SEQ ID NO: 586125
gaauuaaaggcaugaugca

SEQ ID NO: 693995 - RNA, 19 nt, Artificial Sequence
  Description of Artificial Sequence: Synthetic oligonucleotide
  Antisense strand to SEQ ID NO: 693994
ugcaucaugccuuuaauuc

SEQ ID NO: 693996 - RNA, 19 nt, Artificial Sequence
  Description of Artificial Sequence: Synthetic oligonucleotide
  Sense strand starting at position 2875 of SEQ ID NO: 586125
guuucuaccuguuaggaug

SEQ ID NO: 693997 - RNA, 19 nt, Artificial Sequence
  Description of Artificial Sequence: Synthetic oligonucleotide
  Antisense strand to SEQ ID NO: 693996
cauccuaacagguagaaac

SEQ ID NO: 693998 - RNA, 19 nt, Artificial Sequence
  Description of Artificial Sequence: Synthetic oligonucleotide
  Sense strand starting at position 2882 of SEQ ID NO: 586125
ccuguuaggaugugugauu

SEQ ID NO: 693999 - RNA, 19 nt, Artificial Sequence
  Description of Artificial Sequence: Synthetic oligonucleotide
  Antisense strand to SEQ ID NO: 693998
aaucacacauccuaacagg

SEQ ID NO: 694000 - RNA, 19 nt, Artificial Sequence
  Description of Artificial Sequence: Synthetic oligonucleotide
  Sense strand starting at position 2883 of SEQ ID NO: 586125
cuguuaggaugugugauuu

SEQ ID NO: 694001 - RNA, 19 nt, Artificial Sequence
  Description of Artificial Sequence: Synthetic oligonucleotide
  Antisense strand to SEQ ID NO: 694000
aaaucacacauccuaacag

SEQ ID NO: 694002 - RNA, 19 nt, Artificial Sequence
  Description of Artificial Sequence: Synthetic oligonucleotide
  Sense strand starting at position 2940 of SEQ ID NO: 586125
ugcauuccaugucagauuu

SEQ ID NO: 694003 - RNA, 19 nt, Artificial Sequence
  Description of Artificial Sequence: Synthetic oligonucleotide
  Antisense strand to SEQ ID NO: 694002
aaaucugacauggaaugca

SEQ ID NO: 694004 - RNA, 19 nt, Artificial Sequence
  Description of Artificial Sequence: Synthetic oligonucleotide
  Sense strand starting at position 3413 of SEQ ID NO: 586125
gccuauagugugcugccaa

SEQ ID NO: 694005 - RNA, 19 nt, Artificial Sequence
  Description of Artificial Sequence: Synthetic oligonucleotide
  Antisense strand to SEQ ID NO: 694004
uuggcagcacacuauaggc

SEQ ID NO: 694006 - RNA, 19 nt, Artificial Sequence
  Description of Artificial Sequence: Synthetic oligonucleotide
  Sense strand starting at position 3414 of SEQ ID NO: 586125
ccuauagugugcugccaaa

SEQ ID NO: 694007 - RNA, 19 nt, Artificial Sequence
  Description of Artificial Sequence: Synthetic oligonucleotide
  Antisense strand to SEQ ID NO: 694006
uuuggcagcacacuauagg

SEQ ID NO: 694008 - RNA, 19 nt, Artificial Sequence
  Description of Artificial Sequence: Synthetic oligonucleotide
  Sense strand starting at position 3659 of SEQ ID NO: 586125
auuaaacuguuugcuggaa

SEQ ID NO: 694009 - RNA, 19 nt, Artificial Sequence
  Description of Artificial Sequence: Synthetic oligonucleotide
  Antisense strand to SEQ ID NO: 694008
uuccagcaaacaguuuaau

SEQ ID NO: 694010 - RNA, 19 nt, Artificial Sequence
  Description of Artificial Sequence: Synthetic oligonucleotide
  Sense strand starting at position 3660 of SEQ ID NO: 586125
uuaaacuguuugcuggaaa

SEQ ID NO: 694011 - RNA, 19 nt, Artificial Sequence
  Description of Artificial Sequence: Synthetic oligonucleotide
  Antisense strand to SEQ ID NO: 694010
uuuccagcaaacaguuuaa

SEQ ID NO: 694012 - RNA, 19 nt, Artificial Sequence
  Description of Artificial Sequence: Synthetic oligonucleotide
  Sense strand starting at position 3661 of SEQ ID NO: 586125
uaaacuguuugcuggaaau

SEQ ID NO: 694013 - RNA, 19 nt, Artificial Sequence
  Description of Artificial Sequence: Synthetic oligonucleotide
  Antisense strand to SEQ ID NO: 694012
auuuccagcaaacaguuua

SEQ ID NO: 694014 - RNA, 19 nt, Artificial Sequence
  Description of Artificial Sequence: Synthetic oligonucleotide
  Sense strand starting at position 3663 of SEQ ID NO: 586125
aacuguuugcuggaaauug

SEQ ID NO: 694015 - RNA, 19 nt, Artificial Sequence
  Description of Artificial Sequence: Synthetic oligonucleotide
  Antisense strand to SEQ ID NO: 694014
caauuuccagcaaacaguu

SEQ ID NO: 694016 - RNA, 19 nt, Artificial Sequence
  Description of Artificial Sequence: Synthetic oligonucleotide
  Sense strand starting at position 3671 of SEQ ID NO: 586125
gcuggaaauugcuaaguua

SEQ ID NO: 694017 - RNA, 19 nt, Artificial Sequence
  Description of Artificial Sequence: Synthetic oligonucleotide
  Antisense strand to SEQ ID NO: 694016
uaacuuagcaauuuccagc

SEQ ID NO: 694018 - RNA, 19 nt, Artificial Sequence
  Description of Artificial Sequence: Synthetic oligonucleotide
  Sense strand starting at position 3700 of SEQ ID NO: 586125
gggauacauucuuugagca

SEQ ID NO: 694019 - RNA, 19 nt, Artificial Sequence
  Description of Artificial Sequence: Synthetic oligonucleotide
  Antisense strand to SEQ ID NO: 694018
ugcucaaagaauguauccc

SEQ ID NO: 694020 - RNA, 19 nt, Artificial Sequence
  Description of Artificial Sequence: Synthetic oligonucleotide
  Sense strand starting at position 3701 of SEQ ID NO: 586125
ggauacauucuuugagcag

SEQ ID NO: 694021 - RNA, 19 nt, Artificial Sequence
  Description of Artificial Sequence: Synthetic oligonucleotide
  Antisense strand to SEQ ID NO: 694020
cugcucaaagaauguaucc

SEQ ID NO: 694022 - RNA, 19 nt, Artificial Sequence
  Description of Artificial Sequence: Synthetic oligonucleotide
  Sense strand starting at position 3702 of SEQ ID NO: 586125
gauacauucuuugagcaga

SEQ ID NO: 694023 - RNA, 19 nt, Artificial Sequence
  Description of Artificial Sequence: Synthetic oligonucleotide
  Antisense strand to SEQ ID NO: 694022
ucugcucaaagaauguauc

SEQ ID NO: 694024 - RNA, 19 nt, Artificial Sequence
  Description of Artificial Sequence: Synthetic oligonucleotide
  Sense strand starting at position 3705 of SEQ ID NO: 586125
acauucuuugagcagacau

SEQ ID NO: 694025 - RNA, 19 nt, Artificial Sequence
  Description of Artificial Sequence: Synthetic oligonucleotide
  Antisense strand to SEQ ID NO: 694024
augucugcucaaagaaugu

SEQ ID NO: 694026 - RNA, 19 nt, Artificial Sequence
  Description of Artificial Sequence: Synthetic oligonucleotide
  Sense strand starting at position 3777 of SEQ ID NO: 586125
acuguagugucucaaagag

SEQ ID NO: 694027 - RNA, 19 nt, Artificial Sequence
  Description of Artificial Sequence: Synthetic oligonucleotide
  Antisense strand to SEQ ID NO: 694026
cucuuugagacacuacagu

SEQ ID NO: 694028 - RNA, 19 nt, Artificial Sequence
  Description of Artificial Sequence: Synthetic oligonucleotide
  Sense strand starting at position 3786 of SEQ ID NO: 586125
ucucaaagagcuugugaug

SEQ ID NO: 694029 - RNA, 19 nt, Artificial Sequence
  Description of Artificial Sequence: Synthetic oligonucleotide
  Antisense strand to SEQ ID NO: 694028
caucacaagcucuuugaga

SEQ ID NO: 694030 - RNA, 19 nt, Artificial Sequence
  Description of Artificial Sequence: Synthetic oligonucleotide
  Sense strand starting at position 3795 of SEQ ID NO: 586125
gcuugugauguucaggaca

SEQ ID NO: 694031 - RNA, 19 nt, Artificial Sequence
  Description of Artificial Sequence: Synthetic oligonucleotide
  Antisense strand to SEQ ID NO: 694030
uguccugaacaucacaagc

SEQ ID NO: 694032 - RNA, 19 nt, Artificial Sequence
  Description of Artificial Sequence: Synthetic oligonucleotide
  Sense strand starting at position 3797 of SEQ ID NO: 586125
uugugauguucaggacagu

SEQ ID NO: 694033 - RNA, 19 nt, Artificial Sequence
  Description of Artificial Sequence: Synthetic oligonucleotide
  Antisense strand to SEQ ID NO: 694032
acuguccugaacaucacaa

SEQ ID NO: 694034 - RNA, 19 nt, Artificial Sequence
  Description of Artificial Sequence: Synthetic oligonucleotide
  Sense strand starting at position 3798 of SEQ ID NO: 586125
ugugauguucaggacaguu

SEQ ID NO: 694035 - RNA, 19 nt, Artificial Sequence
  Description of Artificial Sequence: Synthetic oligonucleotide
  Antisense strand to SEQ ID NO: 694034
aacuguccugaacaucaca

SEQ ID NO: 694036 - RNA, 19 nt, Artificial Sequence
  Description of Artificial Sequence: Synthetic oligonucleotide
  Sense strand starting at position 181 of SEQ ID NO: 586126
augaaauguguauguccaa

SEQ ID NO: 694037 - RNA, 19 nt, Artificial Sequence
  Description of Artificial Sequence: Synthetic oligonucleotide
  Antisense strand to SEQ ID NO: 694036
uuggacauacacauuucau

SEQ ID NO: 694038 - RNA, 19 nt, Artificial Sequence
  Description of Artificial Sequence: Synthetic oligonucleotide
  Sense strand starting at position 182 of SEQ ID NO: 586126
ugaaauguguauguccaaa

SEQ ID NO: 694039 - RNA, 19 nt, Artificial Sequence
  Description of Artificial Sequence: Synthetic oligonucleotide
  Antisense strand to SEQ ID NO: 694038
uuuggacauacacauuuca

SEQ ID NO: 694040 - RNA, 19 nt, Artificial Sequence
  Description of Artificial Sequence: Synthetic oligonucleotide
  Sense strand starting at position 344 of SEQ ID NO: 586126
acuacuuccguagaugcau

SEQ ID NO: 694041 - RNA, 19 nt, Artificial Sequence
  Description of Artificial Sequence: Synthetic oligonucleotide
  Antisense strand to SEQ ID NO: 694040
augcaucuacggaaguagu

SEQ ID NO: 694042 - RNA, 19 nt, Artificial Sequence
  Description of Artificial Sequence: Synthetic oligonucleotide
  Sense strand starting at position 610 of SEQ ID NO: 586126
ugcgguauggcccuucauu

SEQ ID NO: 694043 - RNA, 19 nt, Artificial Sequence
  Description of Artificial Sequence: Synthetic oligonucleotide
  Antisense strand to SEQ ID NO: 694042
aaugaagggccauaccgca

SEQ ID NO: 694044 - RNA, 19 nt, Artificial Sequence
  Description of Artificial Sequence: Synthetic oligonucleotide
  Sense strand starting at position 652 of SEQ ID NO: 586126
uccuuuguuuaugugagga

SEQ ID NO: 694045 - RNA, 19 nt, Artificial Sequence
  Description of Artificial Sequence: Synthetic oligonucleotide
  Antisense strand to SEQ ID NO: 694044
uccucacauaaacaaagga

SEQ ID NO: 694046 - RNA, 19 nt, Artificial Sequence
  Description of Artificial Sequence: Synthetic oligonucleotide
  Sense strand starting at position 876 of SEQ ID NO: 586126
uguuaaauuucucaugaag

SEQ ID NO: 694047 - RNA, 19 nt, Artificial Sequence
  Description of Artificial Sequence: Synthetic oligonucleotide
  Antisense strand to SEQ ID NO: 694046
cuucaugagaaauuuaaca

SEQ ID NO: 694048 - RNA, 19 nt, Artificial Sequence
  Description of Artificial Sequence: Synthetic oligonucleotide
  Sense strand starting at position 1038 of SEQ ID NO: 586126
gcaggaauucuauaggugu

SEQ ID NO: 694049 - RNA, 19 nt, Artificial Sequence
  Description of Artificial Sequence: Synthetic oligonucleotide
  Antisense strand to SEQ ID NO: 694048
acaccuauagaauuccugc

SEQ ID NO: 694050 - RNA, 19 nt, Artificial Sequence
  Description of Artificial Sequence: Synthetic oligonucleotide
  Sense strand starting at position 1306 of SEQ ID NO: 586126
ugaugaucagcgcacaaau

SEQ ID NO: 694051 - RNA, 19 nt, Artificial Sequence
  Description of Artificial Sequence: Synthetic oligonucleotide
  Antisense strand to SEQ ID NO: 694050
auuugugcgcugaucauca

SEQ ID NO: 694052 - RNA, 19 nt, Artificial Sequence
  Description of Artificial Sequence: Synthetic oligonucleotide
  Sense strand starting at position 1441 of SEQ ID NO: 586126
aguuuacagcaauacagua

SEQ ID NO: 694053 - RNA, 19 nt, Artificial Sequence
  Description of Artificial Sequence: Synthetic oligonucleotide
  Antisense strand to SEQ ID NO: 694052
uacuguauugcuguaaacu

SEQ ID NO: 694054 - RNA, 19 nt, Artificial Sequence
  Description of Artificial Sequence: Synthetic oligonucleotide
  Sense strand starting at position 2422 of SEQ ID NO: 586126
uuaacugcuugacucaaga

SEQ ID NO: 694055 - RNA, 19 nt, Artificial Sequence
  Description of Artificial Sequence: Synthetic oligonucleotide
  Antisense strand to SEQ ID NO: 694054
ucuugagucaagcaguuaa

SEQ ID NO: 694056 - RNA, 19 nt, Artificial Sequence
  Description of Artificial Sequence: Synthetic oligonucleotide
  Sense strand starting at position 2652 of SEQ ID NO: 586126
ucccuuuaacaguaguguu

SEQ ID NO: 694057 - RNA, 19 nt, Artificial Sequence
  Description of Artificial Sequence: Synthetic oligonucleotide
  Antisense strand to SEQ ID NO: 694056
aacacuacuguuaaaggga

SEQ ID NO: 694058 - RNA, 19 nt, Artificial Sequence
  Description of Artificial Sequence: Synthetic oligonucleotide
  Sense strand starting at position 2780 of SEQ ID NO: 586126
uuggaaggguuguuaauau

SEQ ID NO: 694059 - RNA, 19 nt, Artificial Sequence
  Description of Artificial Sequence: Synthetic oligonucleotide
  Antisense strand to SEQ ID NO: 694058
auauuaacaacccuuccaa

SEQ ID NO: 694060 - RNA, 19 nt, Artificial Sequence
  Description of Artificial Sequence: Synthetic oligonucleotide
  Sense strand starting at position 2797 of SEQ ID NO: 586126
auaugugacugcccugaca

SEQ ID NO: 694061 - RNA, 19 nt, Artificial Sequence
  Description of Artificial Sequence: Synthetic oligonucleotide
  Antisense strand to SEQ ID NO: 694060
ugucagggcagucacauau

SEQ ID NO: 694062 - RNA, 19 nt, Artificial Sequence
  Description of Artificial Sequence: Synthetic oligonucleotide
  Sense strand starting at position 2799 of SEQ ID NO: 586126
augugacugcccugacaua

SEQ ID NO: 694063 - RNA, 19 nt, Artificial Sequence
  Description of Artificial Sequence: Synthetic oligonucleotide
  Antisense strand to SEQ ID NO: 694062
uaugucagggcagucacau

SEQ ID NO: 694064 - RNA, 19 nt, Artificial Sequence
  Description of Artificial Sequence: Synthetic oligonucleotide
  Sense strand starting at position 2800 of SEQ ID NO: 586126
ugugacugcccugacauau

SEQ ID NO: 694065 - RNA, 19 nt, Artificial Sequence
  Description of Artificial Sequence: Synthetic oligonucleotide
  Antisense strand to SEQ ID NO: 694064
auaugucagggcagucaca

SEQ ID NO: 694066 - RNA, 19 nt, Artificial Sequence
  Description of Artificial Sequence: Synthetic oligonucleotide
  Sense strand starting at position 2887 of SEQ ID NO: 586126
uaauaauuugugugcgucu

SEQ ID NO: 694067 - RNA, 19 nt, Artificial Sequence
  Description of Artificial Sequence: Synthetic oligonucleotide
  Antisense strand to SEQ ID NO: 694066
agacgcacacaaauuauua

SEQ ID NO: 694068 - RNA, 19 nt, Artificial Sequence
  Description of Artificial Sequence: Synthetic oligonucleotide
  Sense strand starting at position 2889 of SEQ ID NO: 586126
auaauuugugugcgucuua

SEQ ID NO: 694069 - RNA, 19 nt, Artificial Sequence
  Description of Artificial Sequence: Synthetic oligonucleotide
  Antisense strand to SEQ ID NO: 694068
uaagacgcacacaaauuau

SEQ ID NO: 694070 - RNA, 19 nt, Artificial Sequence
  Description of Artificial Sequence: Synthetic oligonucleotide
  Sense strand starting at position 3020 of SEQ ID NO: 586126
gauugaauugagcaguguu

SEQ ID NO: 694071 - RNA, 19 nt, Artificial Sequence
  Description of Artificial Sequence: Synthetic oligonucleotide
  Antisense strand to SEQ ID NO: 694070
aacacugcucaauucaauc

SEQ ID NO: 694072 - RNA, 19 nt, Artificial Sequence
  Description of Artificial Sequence: Synthetic oligonucleotide
  Sense strand starting at position 3027 of SEQ ID NO: 586126
uugagcaguguuuauaaau

SEQ ID NO: 694073 - RNA, 19 nt, Artificial Sequence
  Description of Artificial Sequence: Synthetic oligonucleotide
  Antisense strand to SEQ ID NO: 694072
auuuauaaacacugcucaa

SEQ ID NO: 694074 - RNA, 19 nt, Artificial Sequence
  Description of Artificial Sequence: Synthetic oligonucleotide
  Sense strand starting at position 3126 of SEQ ID NO: 586126
acauccauuccuggaguga

SEQ ID NO: 694075 - RNA, 19 nt, Artificial Sequence
  Description of Artificial Sequence: Synthetic oligonucleotide
  Antisense strand to SEQ ID NO: 694074
ucacuccaggaauggaugu

SEQ ID NO: 694076 - RNA, 19 nt, Artificial Sequence
  Description of Artificial Sequence: Synthetic oligonucleotide
  Sense strand starting at position 3130 of SEQ ID NO: 586126
ccauuccuggagugaacua

SEQ ID NO: 694077 - RNA, 19 nt, Artificial Sequence
  Description of Artificial Sequence: Synthetic oligonucleotide
  Antisense strand to SEQ ID NO: 694076
uaguucacuccaggaaugg

SEQ ID NO: 694078 - RNA, 19 nt, Artificial Sequence
  Description of Artificial Sequence: Synthetic oligonucleotide
  Sense strand starting at position 3156 of SEQ ID NO: 586126
uaaugucucugguugauua

SEQ ID NO: 694079 - RNA, 19 nt, Artificial Sequence
  Description of Artificial Sequence: Synthetic oligonucleotide
  Antisense strand to SEQ ID NO: 694078
uaaucaaccagagacauua

SEQ ID NO: 694080 - RNA, 19 nt, Artificial Sequence
  Description of Artificial Sequence: Synthetic oligonucleotide
  Sense strand starting at position 3163 of SEQ ID NO: 586126
ucugguugauuacucagau

SEQ ID NO: 694081 - RNA, 19 nt, Artificial Sequence
  Description of Artificial Sequence: Synthetic oligonucleotide
  Antisense strand to SEQ ID NO: 694080
aucugaguaaucaaccaga

SEQ ID NO: 694082 - RNA, 19 nt, Artificial Sequence
  Description of Artificial Sequence: Synthetic oligonucleotide
  Sense strand starting at position 3164 of SEQ ID NO: 586126
cugguugauuacucagauu

SEQ ID NO: 694083 - RNA, 19 nt, Artificial Sequence
  Description of Artificial Sequence: Synthetic oligonucleotide
  Antisense strand to SEQ ID NO: 694082
aaucugaguaaucaaccag

SEQ ID NO: 694084 - RNA, 19 nt, Artificial Sequence
  Description of Artificial Sequence: Synthetic oligonucleotide
  Sense strand starting at position 3167 of SEQ ID NO: 586126
guugauuacucagauuuau

SEQ ID NO: 694085 - RNA, 19 nt, Artificial Sequence
  Description of Artificial Sequence: Synthetic oligonucleotide
  Antisense strand to SEQ ID NO: 694084
auaaaucugaguaaucaac

SEQ ID NO: 694086 - RNA, 19 nt, Artificial Sequence
  Description of Artificial Sequence: Synthetic oligonucleotide
  Sense strand starting at position 3196 of SEQ ID NO: 586126
cguugcuuugagcuagguu

SEQ ID NO: 694087 - RNA, 19 nt, Artificial Sequence
  Description of Artificial Sequence: Synthetic oligonucleotide
  Antisense strand to SEQ ID NO: 694086
aaccuagcucaaagcaacg

SEQ ID NO: 694088 - RNA, 19 nt, Artificial Sequence
  Description of Artificial Sequence: Synthetic oligonucleotide
  Sense strand starting at position 3578 of SEQ ID NO: 586126
agaacuaaguguucuaaua

SEQ ID NO: 694089 - RNA, 19 nt, Artificial Sequence
  Description of Artificial Sequence: Synthetic oligonucleotide
  Antisense strand to SEQ ID NO: 694088
uauuagaacacuuaguucu

SEQ ID NO: 694090 - RNA, 19 nt, Artificial Sequence
  Description of Artificial Sequence: Synthetic oligonucleotide
  Sense strand starting at position 3606 of SEQ ID NO: 586126
uuuaaauacugccuggauu

SEQ ID NO: 694091 - RNA, 19 nt, Artificial Sequence
  Description of Artificial Sequence: Synthetic oligonucleotide
  Antisense strand to SEQ ID NO: 694090
aauccaggcaguauuuaaa

SEQ ID NO: 694092 - RNA, 19 nt, Artificial Sequence
  Description of Artificial Sequence: Synthetic oligonucleotide
  Sense strand starting at position 3625 of SEQ ID NO: 586126
gagggauuaugaguguaga

SEQ ID NO: 694093 - RNA, 19 nt, Artificial Sequence
  Description of Artificial Sequence: Synthetic oligonucleotide
  Antisense strand to SEQ ID NO: 694092
ucuacacucauaaucccuc

SEQ ID NO: 694094 - RNA, 19 nt, Artificial Sequence
  Description of Artificial Sequence: Synthetic oligonucleotide
  Sense strand starting at position 3626 of SEQ ID NO: 586126
agggauuaugaguguagau

SEQ ID NO: 694095 - RNA, 19 nt, Artificial Sequence
  Description of Artificial Sequence: Synthetic oligonucleotide
  Antisense strand to SEQ ID NO: 694094
aucuacacucauaaucccu

SEQ ID NO: 694096 - RNA, 19 nt, Artificial Sequence
  Description of Artificial Sequence: Synthetic oligonucleotide
  Sense strand starting at position 3709 of SEQ ID NO: 586126
ugcuuucucggugacuaaa

SEQ ID NO: 694097 - RNA, 19 nt, Artificial Sequence
  Description of Artificial Sequence: Synthetic oligonucleotide
  Antisense strand to SEQ ID NO: 694096
uuuagucaccgagaaagca

SEQ ID NO: 694098 - RNA, 19 nt, Artificial Sequence
  Description of Artificial Sequence: Synthetic oligonucleotide
  Sense strand starting at position 3711 of SEQ ID NO: 586126
cuuucucggugacuaaaua

SEQ ID NO: 694099 - RNA, 19 nt, Artificial Sequence
  Description of Artificial Sequence: Synthetic oligonucleotide
  Antisense strand to SEQ ID NO: 694098
uauuuagucaccgagaaag

SEQ ID NO: 694100 - RNA, 19 nt, Artificial Sequence
  Description of Artificial Sequence: Synthetic oligonucleotide
  Sense strand starting at position 3712 of SEQ ID NO: 586126
uuucucggugacuaaauaa

SEQ ID NO: 694101 - RNA, 19 nt, Artificial Sequence
  Description of Artificial Sequence: Synthetic oligonucleotide
  Antisense strand to SEQ ID NO: 694100
uuauuuagucaccgagaaa

SEQ ID NO: 694102 - RNA, 19 nt, Artificial Sequence
  Description of Artificial Sequence: Synthetic oligonucleotide
  Sense strand starting at position 3820 of SEQ ID NO: 586126
ucauauacaugucuaguuu

SEQ ID NO: 694103 - RNA, 19 nt, Artificial Sequence
  Description of Artificial Sequence: Synthetic oligonucleotide
  Antisense strand to SEQ ID NO: 694102
aaacuagacauguauauga

SEQ ID NO: 694104 - RNA, 19 nt, Artificial Sequence
  Description of Artificial Sequence: Synthetic oligonucleotide
  Sense strand starting at position 3824 of SEQ ID NO: 586126
auacaugucuaguuuacau

SEQ ID NO: 694105 - RNA, 19 nt, Artificial Sequence
  Description of Artificial Sequence: Synthetic oligonucleotide
  Antisense strand to SEQ ID NO: 694104
auguaaacuagacauguau

SEQ ID NO: 694106 - RNA, 19 nt, Artificial Sequence
  Description of Artificial Sequence: Synthetic oligonucleotide
  Sense strand starting at position 3826 of SEQ ID NO: 586126
acaugucuaguuuacauaa

SEQ ID NO: 694107 - RNA, 19 nt, Artificial Sequence
  Description of Artificial Sequence: Synthetic oligonucleotide
  Antisense strand to SEQ ID NO: 694106
uuauguaaacuagacaugu

SEQ ID NO: 694108 - RNA, 19 nt, Artificial Sequence
  Description of Artificial Sequence: Synthetic oligonucleotide
  Sense strand starting at position 3837 of SEQ ID NO: 586126
uuacauaaugggugcucaa

SEQ ID NO: 694109 - RNA, 19 nt, Artificial Sequence
  Description of Artificial Sequence: Synthetic oligonucleotide
  Antisense strand to SEQ ID NO: 694108
uugagcacccauuauguaa

SEQ ID NO: 694110 - RNA, 19 nt, Artificial Sequence
  Description of Artificial Sequence: Synthetic oligonucleotide
  Sense strand starting at position 3840 of SEQ ID NO: 586126
cauaaugggugcucaauca

SEQ ID NO: 694111 - RNA, 19 nt, Artificial Sequence
  Description of Artificial Sequence: Synthetic oligonucleotide
  Antisense strand to SEQ ID NO: 694110
ugauugagcacccauuaug

SEQ ID NO: 694112 - RNA, 19 nt, Artificial Sequence
  Description of Artificial Sequence: Synthetic oligonucleotide
  Sense strand starting at position 3852 of SEQ ID NO: 586126
ucaaucaauguugaaaguu

SEQ ID NO: 694113 - RNA, 19 nt, Artificial Sequence
  Description of Artificial Sequence: Synthetic oligonucleotide
  Antisense strand to SEQ ID NO: 694112
aacuuucaacauugauuga

SEQ ID NO: 694114 - RNA, 19 nt, Artificial Sequence
  Description of Artificial Sequence: Synthetic oligonucleotide
  Sense strand starting at position 3920 of SEQ ID NO: 586126
cugacucuuccuuauggca

SEQ ID NO: 694115 - RNA, 19 nt, Artificial Sequence
  Description of Artificial Sequence: Synthetic oligonucleotide
  Antisense strand to SEQ ID NO: 694114
ugccauaaggaagagucag

SEQ ID NO: 694116 - RNA, 19 nt, Artificial Sequence
  Description of Artificial Sequence: Synthetic oligonucleotide
  Sense strand starting at position 71 of SEQ ID NO: 586127
cuagcuucuggagguauga

SEQ ID NO: 694117 - RNA, 19 nt, Artificial Sequence
  Description of Artificial Sequence: Synthetic oligonucleotide
  Antisense strand to SEQ ID NO: 694116
ucauaccuccagaagcuag

SEQ ID NO: 694118 - RNA, 19 nt, Artificial Sequence
  Description of Artificial Sequence: Synthetic oligonucleotide
  Sense strand starting at position 73 of SEQ ID NO: 586127
agcuucuggagguaugaca

SEQ ID NO: 694119 - RNA, 19 nt, Artificial Sequence
  Description of Artificial Sequence: Synthetic oligonucleotide
  Antisense strand to SEQ ID NO: 694118
ugucauaccuccagaagcu

SEQ ID NO: 694120 - RNA, 19 nt, Artificial Sequence
  Description of Artificial Sequence: Synthetic oligonucleotide
  Sense strand starting at position 220 of SEQ ID NO: 586127
ugcuauugccaagaaagca

SEQ ID NO: 694121 - RNA, 19 nt, Artificial Sequence
  Description of Artificial Sequence: Synthetic oligonucleotide
  Antisense strand to SEQ ID NO: 694120
ugcuuucuuggcaauagca

SEQ ID NO: 694122 - RNA, 19 nt, Artificial Sequence
  Description of Artificial Sequence: Synthetic oligonucleotide
  Sense strand starting at position 279 of SEQ ID NO: 586127
ggaaauuagcuugguguca

SEQ ID NO: 694123 - RNA, 19 nt, Artificial Sequence
  Description of Artificial Sequence: Synthetic oligonucleotide
  Antisense strand to SEQ ID NO: 694122
ugacaccaagcuaauuucc

SEQ ID NO: 694124 - RNA, 19 nt, Artificial Sequence
  Description of Artificial Sequence: Synthetic oligonucleotide
  Sense strand starting at position 365 of SEQ ID NO: 586127
ugaucauucuggccaagaa

SEQ ID NO: 694125 - RNA, 19 nt, Artificial Sequence
  Description of Artificial Sequence: Synthetic oligonucleotide
  Antisense strand to SEQ ID NO: 694124
uucuuggccagaaugauca

SEQ ID NO: 694126 - RNA, 19 nt, Artificial Sequence
  Description of Artificial Sequence: Synthetic oligonucleotide
  Sense strand starting at position 889 of SEQ ID NO: 586127
cugagaaacccagguuaug

SEQ ID NO: 694127 - RNA, 19 nt, Artificial Sequence
  Description of Artificial Sequence: Synthetic oligonucleotide
  Antisense strand to SEQ ID NO: 694126
cauaaccuggguuucucag

SEQ ID NO: 694128 - RNA, 19 nt, Artificial Sequence
  Description of Artificial Sequence: Synthetic oligonucleotide
  Sense strand starting at position 900 of SEQ ID NO: 586127
agguuauggcuguggaaua

SEQ ID NO: 694129 - RNA, 19 nt, Artificial Sequence
  Description of Artificial Sequence: Synthetic oligonucleotide
  Antisense strand to SEQ ID NO: 694128
uauuccacagccauaaccu

SEQ ID NO: 694130 - RNA, 19 nt, Artificial Sequence
  Description of Artificial Sequence: Synthetic oligonucleotide
  Sense strand starting at position 1004 of SEQ ID NO: 586127
ucaggcucaggcuauuauu

SEQ ID NO: 694131 - RNA, 19 nt, Artificial Sequence
  Description of Artificial Sequence: Synthetic oligonucleotide
  Antisense strand to SEQ ID NO: 694130
aauaauagccugagccuga

SEQ ID NO: 694132 - RNA, 19 nt, Artificial Sequence
  Description of Artificial Sequence: Synthetic oligonucleotide
  Sense strand starting at position 1321 of SEQ ID NO: 586127
gcuugagaugcuuauuccu

SEQ ID NO: 694133 - RNA, 19 nt, Artificial Sequence
  Description of Artificial Sequence: Synthetic oligonucleotide
  Antisense strand to SEQ ID NO: 694132
aggaauaagcaucucaagc

SEQ ID NO: 694134 - RNA, 19 nt, Artificial Sequence
  Description of Artificial Sequence: Synthetic oligonucleotide
  Sense strand starting at position 1323 of SEQ ID NO: 586127
uugagaugcuuauuccuca

SEQ ID NO: 694135 - RNA, 19 nt, Artificial Sequence
  Description of Artificial Sequence: Synthetic oligonucleotide
  Antisense strand to SEQ ID NO: 694134
ugaggaauaagcaucucaa

SEQ ID NO: 694136 - RNA, 19 nt, Artificial Sequence
  Description of Artificial Sequence: Synthetic oligonucleotide
  Sense strand starting at position 1327 of SEQ ID NO: 586127
gaugcuuauuccucaggga

SEQ ID NO: 694137 - RNA, 19 nt, Artificial Sequence
  Description of Artificial Sequence: Synthetic oligonucleotide
  Antisense strand to SEQ ID NO: 694136
ucccugaggaauaagcauc

SEQ ID NO: 694138 - RNA, 19 nt, Artificial Sequence
  Description of Artificial Sequence: Synthetic oligonucleotide
  Sense strand starting at position 1976 of SEQ ID NO: 586127
cggcgcguaccuuuaaaua

SEQ ID NO: 694139 - RNA, 19 nt, Artificial Sequence
  Description of Artificial Sequence: Synthetic oligonucleotide
  Antisense strand to SEQ ID NO: 694138
uauuuaaagguacgcgccg

SEQ ID NO: 694140 - RNA, 19 nt, Artificial Sequence
  Description of Artificial Sequence: Synthetic oligonucleotide
  Sense strand starting at position 2199 of SEQ ID NO: 586127
gcuguaucuggugggaaag

SEQ ID NO: 694141 - RNA, 19 nt, Artificial Sequence
  Description of Artificial Sequence: Synthetic oligonucleotide
  Antisense strand to SEQ ID NO: 694140
cuuucccaccagauacagc

SEQ ID NO: 694142 - RNA, 19 nt, Artificial Sequence
  Description of Artificial Sequence: Synthetic oligonucleotide
  Sense strand starting at position 2210 of SEQ ID NO: 586127
ugggaaagcgaaugcuuua

SEQ ID NO: 694143 - RNA, 19 nt, Artificial Sequence
  Description of Artificial Sequence: Synthetic oligonucleotide
  Antisense strand to SEQ ID NO: 694142
uaaagcauucgcuuuccca

SEQ ID NO: 694144 - RNA, 19 nt, Artificial Sequence
  Description of Artificial Sequence: Synthetic oligonucleotide
  Sense strand starting at position 2292 of SEQ ID NO: 586127
ccagaagaaugccuuuguu

SEQ ID NO: 694145 - RNA, 19 nt, Artificial Sequence
  Description of Artificial Sequence: Synthetic oligonucleotide
  Antisense strand to SEQ ID NO: 694144
aacaaaggcauucuucugg

SEQ ID NO: 694146 - RNA, 19 nt, Artificial Sequence
  Description of Artificial Sequence: Synthetic oligonucleotide
  Sense strand starting at position 2322 of SEQ ID NO: 586127
guuugaugcucuuugggaa

SEQ ID NO: 694147 - RNA, 19 nt, Artificial Sequence
  Description of Artificial Sequence: Synthetic oligonucleotide
  Antisense strand to SEQ ID NO: 694146
uucccaaagagcaucaaac

SEQ ID NO: 694148 - RNA, 19 nt, Artificial Sequence
  Description of Artificial Sequence: Synthetic oligonucleotide
  Sense strand starting at position 2323 of SEQ ID NO: 586127
uuugaugcucuuugggaau

SEQ ID NO: 694149 - RNA, 19 nt, Artificial Sequence
  Description of Artificial Sequence: Synthetic oligonucleotide
  Antisense strand to SEQ ID NO: 694148
auucccaaagagcaucaaa

SEQ ID NO: 694150 - RNA, 19 nt, Artificial Sequence
  Description of Artificial Sequence: Synthetic oligonucleotide
  Sense strand starting at position 2345 of SEQ ID NO: 586127
acgaauaccuuguccuuaa

SEQ ID NO: 694151 - RNA, 19 nt, Artificial Sequence
  Description of Artificial Sequence: Synthetic oligonucleotide
  Antisense strand to SEQ ID NO: 694150
uuaaggacaagguauucgu

SEQ ID NO: 694152 - RNA, 19 nt, Artificial Sequence
  Description of Artificial Sequence: Synthetic oligonucleotide
  Sense strand starting at position 2346 of SEQ ID NO: 586127
cgaauaccuuguccuuaau

SEQ ID NO: 694153 - RNA, 19 nt, Artificial Sequence
  Description of Artificial Sequence: Synthetic oligonucleotide
  Antisense strand to SEQ ID NO: 694152
auuaaggacaagguauucg

SEQ ID NO: 694154 - RNA, 19 nt, Artificial Sequence
  Description of Artificial Sequence: Synthetic oligonucleotide
  Sense strand starting at position 2356 of SEQ ID NO: 586127
guccuuaaucuaugugaau

SEQ ID NO: 694155 - RNA, 19 nt, Artificial Sequence
  Description of Artificial Sequence: Synthetic oligonucleotide
  Antisense strand to SEQ ID NO: 694154
auucacauagauuaaggac

SEQ ID NO: 694156 - RNA, 19 nt, Artificial Sequence
  Description of Artificial Sequence: Synthetic oligonucleotide
  Sense strand starting at position 2596 of SEQ ID NO: 586127
uuugauguucuugagguua

SEQ ID NO: 694157 - RNA, 19 nt, Artificial Sequence
  Description of Artificial Sequence: Synthetic oligonucleotide
  Antisense strand to SEQ ID NO: 694156
uaaccucaagaacaucaaa

SEQ ID NO: 694158 - RNA, 19 nt, Artificial Sequence
  Description of Artificial Sequence: Synthetic oligonucleotide
  Sense strand starting at position 2601 of SEQ ID NO: 586127
uguucuugagguuagaaag

SEQ ID NO: 694159 - RNA, 19 nt, Artificial Sequence
  Description of Artificial Sequence: Synthetic oligonucleotide
  Antisense strand to SEQ ID NO: 694158
cuuucuaaccucaagaaca

SEQ ID NO: 694160 - RNA, 19 nt, Artificial Sequence
  Description of Artificial Sequence: Synthetic oligonucleotide
  Sense strand starting at position 2620 of SEQ ID NO: 586127
ccuugaugggcuugaucca

SEQ ID NO: 694161 - RNA, 19 nt, Artificial Sequence
  Description of Artificial Sequence: Synthetic oligonucleotide
  Antisense strand to SEQ ID NO: 694160
uggaucaagcccaucaagg

SEQ ID NO: 694162 - RNA, 19 nt, Artificial Sequence
  Description of Artificial Sequence: Synthetic oligonucleotide
  Sense strand starting at position 2627 of SEQ ID NO: 586127
gggcuugauccagaacucu

SEQ ID NO: 694163 - RNA, 19 nt, Artificial Sequence
  Description of Artificial Sequence: Synthetic oligonucleotide
  Antisense strand to SEQ ID NO: 694162
agaguucuggaucaagccc

SEQ ID NO: 694164 - RNA, 19 nt, Artificial Sequence
  Description of Artificial Sequence: Synthetic oligonucleotide
  Sense strand starting at position 2703 of SEQ ID NO: 586127
gucuuuggaaagugagacu

SEQ ID NO: 694165 - RNA, 19 nt, Artificial Sequence
  Description of Artificial Sequence: Synthetic oligonucleotide
  Antisense strand to SEQ ID NO: 694164
agucucacuuuccaaagac

SEQ ID NO: 694166 - RNA, 19 nt, Artificial Sequence
  Description of Artificial Sequence: Synthetic oligonucleotide
  Sense strand starting at position 2737 of SEQ ID NO: 586127
guuccaguacaguaacuua

SEQ ID NO: 694167 - RNA, 19 nt, Artificial Sequence
  Description of Artificial Sequence: Synthetic oligonucleotide
  Antisense strand to SEQ ID NO: 694166
uaaguuacuguacuggaac

SEQ ID NO: 694168 - RNA, 19 nt, Artificial Sequence
  Description of Artificial Sequence: Synthetic oligonucleotide
  Sense strand starting at position 2874 of SEQ ID NO: 586127
cccuaauuggcagguagaa

SEQ ID NO: 694169 - RNA, 19 nt, Artificial Sequence
  Description of Artificial Sequence: Synthetic oligonucleotide
  Antisense strand to SEQ ID NO: 694168
uucuaccugccaauuaggg

SEQ ID NO: 694170 - RNA, 19 nt, Artificial Sequence
  Description of Artificial Sequence: Synthetic oligonucleotide
  Sense strand starting at position 3263 of SEQ ID NO: 586127
agccuaaagcugggaacuu

SEQ ID NO: 694171 - RNA, 19 nt, Artificial Sequence
  Description of Artificial Sequence: Synthetic oligonucleotide
  Antisense strand to SEQ ID NO: 694170
aaguucccagcuuuaggcu

SEQ ID NO: 694172 - RNA, 19 nt, Artificial Sequence
  Description of Artificial Sequence: Synthetic oligonucleotide
  Sense strand starting at position 3300 of SEQ ID NO: 586127
aguuccuuccuccaugaga

SEQ ID NO: 694173 - RNA, 19 nt, Artificial Sequence
  Description of Artificial Sequence: Synthetic oligonucleotide
  Antisense strand to SEQ ID NO: 694172
ucucauggaggaaggaacu

SEQ ID NO: 694174 - RNA, 19 nt, Artificial Sequence
  Description of Artificial Sequence: Synthetic oligonucleotide
  Sense strand starting at position 3302 of SEQ ID NO: 586127
uuccuuccuccaugagagu

SEQ ID NO: 694175 - RNA, 19 nt, Artificial Sequence
  Description of Artificial Sequence: Synthetic oligonucleotide
  Antisense strand to SEQ ID NO: 694174
acucucauggaggaaggaa

SEQ ID NO: 694176 - RNA, 19 nt, Artificial Sequence
  Description of Artificial Sequence: Synthetic oligonucleotide
  Sense strand starting at position 3311 of SEQ ID NO: 586127
ccaugagaguccucuugac

SEQ ID NO: 694177 - RNA, 19 nt, Artificial Sequence
  Description of Artificial Sequence: Synthetic oligonucleotide
  Antisense strand to SEQ ID NO: 694176
gucaagaggacucucaugg

SEQ ID NO: 694178 - RNA, 19 nt, Artificial Sequence
  Description of Artificial Sequence: Synthetic oligonucleotide
  Sense strand starting at position 3373 of SEQ ID NO: 586127
aagagcuaaucucuuguga

SEQ ID NO: 694179 - RNA, 19 nt, Artificial Sequence
  Description of Artificial Sequence: Synthetic oligonucleotide
  Antisense strand to SEQ ID NO: 694178
ucacaagagauuagcucuu

SEQ ID NO: 694180 - RNA, 19 nt, Artificial Sequence
  Description of Artificial Sequence: Synthetic oligonucleotide
  Sense strand starting at position 3503 of SEQ ID NO: 586127
gcuugauugcaugaaguua

SEQ ID NO: 694181 - RNA, 19 nt, Artificial Sequence
  Description of Artificial Sequence: Synthetic oligonucleotide
  Antisense strand to SEQ ID NO: 694180
uaacuucaugcaaucaagc

SEQ ID NO: 694182 - RNA, 19 nt, Artificial Sequence
  Description of Artificial Sequence: Synthetic oligonucleotide
  Sense strand starting at position 3517 of SEQ ID NO: 586127
aguuauaacugugucuaaa

SEQ ID NO: 694183 - RNA, 19 nt, Artificial Sequence
  Description of Artificial Sequence: Synthetic oligonucleotide
  Antisense strand to SEQ ID NO: 694182
uuuagacacaguuauaacu

SEQ ID NO: 694184 - RNA, 19 nt, Artificial Sequence
  Description of Artificial Sequence: Synthetic oligonucleotide
  Sense strand starting at position 3528 of SEQ ID NO: 586127
ugucuaaagcuggagugau

SEQ ID NO: 694185 - RNA, 19 nt, Artificial Sequence
  Description of Artificial Sequence: Synthetic oligonucleotide
  Antisense strand to SEQ ID NO: 694184
aucacuccagcuuuagaca

SEQ ID NO: 694186 - RNA, 19 nt, Artificial Sequence
  Description of Artificial Sequence: Synthetic oligonucleotide
  Sense strand starting at position 3538 of SEQ ID NO: 586127
uggagugauaccuguaguc

SEQ ID NO: 694187 - RNA, 19 nt, Artificial Sequence
  Description of Artificial Sequence: Synthetic oligonucleotide
  Antisense strand to SEQ ID NO: 694186
gacuacagguaucacucca

SEQ ID NO: 694188 - RNA, 19 nt, Artificial Sequence
  Description of Artificial Sequence: Synthetic oligonucleotide
  Sense strand starting at position 3540 of SEQ ID NO: 586127
gagugauaccuguagucuc

SEQ ID NO: 694189 - RNA, 19 nt, Artificial Sequence
  Description of Artificial Sequence: Synthetic oligonucleotide
  Antisense strand to SEQ ID NO: 694188
gagacuacagguaucacuc

SEQ ID NO: 694190 - RNA, 19 nt, Artificial Sequence
  Description of Artificial Sequence: Synthetic oligonucleotide
  Sense strand starting at position 3694 of SEQ ID NO: 586127
aaaguuguaucaguggaau

SEQ ID NO: 694191 - RNA, 19 nt, Artificial Sequence
  Description of Artificial Sequence: Synthetic oligonucleotide
  Antisense strand to SEQ ID NO: 694190
auuccacugauacaacuuu

SEQ ID NO: 694192 - RNA, 19 nt, Artificial Sequence
  Description of Artificial Sequence: Synthetic oligonucleotide
  Sense strand starting at position 3734 of SEQ ID NO: 586127
cuaguugggacaugcuauu

SEQ ID NO: 694193 - RNA, 19 nt, Artificial Sequence
  Description of Artificial Sequence: Synthetic oligonucleotide
  Antisense strand to SEQ ID NO: 694192
aauagcaugucccaacuag

SEQ ID NO: 694194 - RNA, 19 nt, Artificial Sequence
  Description of Artificial Sequence: Synthetic oligonucleotide
  Sense strand starting at position 3919 of SEQ ID NO: 586127
acacucuaguaauuggaau

SEQ ID NO: 694195 - RNA, 19 nt, Artificial Sequence
  Description of Artificial Sequence: Synthetic oligonucleotide
  Antisense strand to SEQ ID NO: 694194
auuccaauuacuagagugu

SEQ ID NO: 694196 - RNA, 19 nt, Artificial Sequence
  Description of Artificial Sequence: Synthetic oligonucleotide
  Sense strand starting at position 157 of SEQ ID NO: 586128
uuaugaaacugucugguaa

SEQ ID NO: 694197 - RNA, 19 nt, Artificial Sequence
  Description of Artificial Sequence: Synthetic oligonucleotide
  Antisense strand to SEQ ID NO: 694196
uuaccagacaguuucauaa

SEQ ID NO: 694198 - RNA, 19 nt, Artificial Sequence
  Description of Artificial Sequence: Synthetic oligonucleotide
  Sense strand starting at position 158 of SEQ ID NO: 586128
uaugaaacugucugguaaa

SEQ ID NO: 694199 - RNA, 19 nt, Artificial Sequence
  Description of Artificial Sequence: Synthetic oligonucleotide
  Antisense strand to SEQ ID NO: 694198
uuuaccagacaguuucaua

SEQ ID NO: 694200 - RNA, 19 nt, Artificial Sequence
  Description of Artificial Sequence: Synthetic oligonucleotide
  Sense strand starting at position 188 of SEQ ID NO: 586128
ugaguagauucccuggaga

SEQ ID NO: 694201 - RNA, 19 nt, Artificial Sequence
  Description of Artificial Sequence: Synthetic oligonucleotide
  Antisense strand to SEQ ID NO: 694200
ucuccagggaaucuacuca

SEQ ID NO: 694202 - RNA, 19 nt, Artificial Sequence
  Description of Artificial Sequence: Synthetic oligonucleotide
  Sense strand starting at position 190 of SEQ ID NO: 586128
aguagauucccuggagauc

SEQ ID NO: 694203 - RNA, 19 nt, Artificial Sequence
  Description of Artificial Sequence: Synthetic oligonucleotide
  Antisense strand to SEQ ID NO: 694202
gaucuccagggaaucuacu

SEQ ID NO: 694204 - RNA, 19 nt, Artificial Sequence
  Description of Artificial Sequence: Synthetic oligonucleotide
  Sense strand starting at position 279 of SEQ ID NO: 586128
aagagacgcucugcaugaa

SEQ ID NO: 694205 - RNA, 19 nt, Artificial Sequence
  Description of Artificial Sequence: Synthetic oligonucleotide
  Antisense strand to SEQ ID NO: 694204
uucaugcagagcgucucuu

SEQ ID NO: 694206 - RNA, 19 nt, Artificial Sequence
  Description of Artificial Sequence: Synthetic oligonucleotide
  Sense strand starting at position 280 of SEQ ID NO: 586128
agagacgcucugcaugaau

SEQ ID NO: 694207 - RNA, 19 nt, Artificial Sequence
  Description of Artificial Sequence: Synthetic oligonucleotide
  Antisense strand to SEQ ID NO: 694206
auucaugcagagcgucucu

SEQ ID NO: 694208 - RNA, 19 nt, Artificial Sequence
  Description of Artificial Sequence: Synthetic oligonucleotide
  Sense strand starting at position 282 of SEQ ID NO: 586128
agacgcucugcaugaauca

SEQ ID NO: 694209 - RNA, 19 nt, Artificial Sequence
  Description of Artificial Sequence: Synthetic oligonucleotide
  Antisense strand to SEQ ID NO: 694208
ugauucaugcagagcgucu

SEQ ID NO: 694210 - RNA, 19 nt, Artificial Sequence
  Description of Artificial Sequence: Synthetic oligonucleotide
  Sense strand starting at position 283 of SEQ ID NO: 586128
gacgcucugcaugaaucaa

SEQ ID NO: 694211 - RNA, 19 nt, Artificial Sequence
  Description of Artificial Sequence: Synthetic oligonucleotide
  Antisense strand to SEQ ID NO: 694210
uugauucaugcagagcguc

SEQ ID NO: 694212 - RNA, 19 nt, Artificial Sequence
  Description of Artificial Sequence: Synthetic oligonucleotide
  Sense strand starting at position 303 of SEQ ID NO: 586128
cuggaagugaucuguuccu

SEQ ID NO: 694213 - RNA, 19 nt, Artificial Sequence
  Description of Artificial Sequence: Synthetic oligonucleotide
  Antisense strand to SEQ ID NO: 694212
aggaacagaucacuuccag

SEQ ID NO: 694214 - RNA, 19 nt, Artificial Sequence
  Description of Artificial Sequence: Synthetic oligonucleotide
  Sense strand starting at position 308 of SEQ ID NO: 586128
agugaucuguuccuccaga

SEQ ID NO: 694215 - RNA, 19 nt, Artificial Sequence
  Description of Artificial Sequence: Synthetic oligonucleotide
  Antisense strand to SEQ ID NO: 694214
ucuggaggaacagaucacu

SEQ ID NO: 694216 - RNA, 19 nt, Artificial Sequence
  Description of Artificial Sequence: Synthetic oligonucleotide
  Sense strand starting at position 309 of SEQ ID NO: 586128
gugaucuguuccuccagau

SEQ ID NO: 694217 - RNA, 19 nt, Artificial Sequence
  Description of Artificial Sequence: Synthetic oligonucleotide
  Antisense strand to SEQ ID NO: 694216
aucuggaggaacagaucac

SEQ ID NO: 694218 - RNA, 19 nt, Artificial Sequence
  Description of Artificial Sequence: Synthetic oligonucleotide
  Sense strand starting at position 441 of SEQ ID NO: 586128
gcagaagucucagcaggga

SEQ ID NO: 694219 - RNA, 19 nt, Artificial Sequence
  Description of Artificial Sequence: Synthetic oligonucleotide
  Antisense strand to SEQ ID NO: 694218
ucccugcugagacuucugc

SEQ ID NO: 694220 - RNA, 19 nt, Artificial Sequence
  Description of Artificial Sequence: Synthetic oligonucleotide
  Sense strand starting at position 457 of SEQ ID NO: 586128
ggacauuagccaugaggga

SEQ ID NO: 694221 - RNA, 19 nt, Artificial Sequence
  Description of Artificial Sequence: Synthetic oligonucleotide
  Antisense strand to SEQ ID NO: 694220
ucccucauggcuaaugucc

SEQ ID NO: 694222 - RNA, 19 nt, Artificial Sequence
  Description of Artificial Sequence: Synthetic oligonucleotide
  Sense strand starting at position 630 of SEQ ID NO: 586128
ggaugugccuuaccacauu

SEQ ID NO: 694223 - RNA, 19 nt, Artificial Sequence
  Description of Artificial Sequence: Synthetic oligonucleotide
  Antisense strand to SEQ ID NO: 694222
aaugugguaaggcacaucc

SEQ ID NO: 694224 - RNA, 19 nt, Artificial Sequence
  Description of Artificial Sequence: Synthetic oligonucleotide
  Sense strand starting at position 649 of SEQ ID NO: 586128
uugccagcugucguuaaca

SEQ ID NO: 694225 - RNA, 19 nt, Artificial Sequence
  Description of Artificial Sequence: Synthetic oligonucleotide
  Antisense strand to SEQ ID NO: 694224
uguuaacgacagcuggcaa

SEQ ID NO: 694226 - RNA, 19 nt, Artificial Sequence
  Description of Artificial Sequence: Synthetic oligonucleotide
  Sense strand starting at position 1035 of SEQ ID NO: 586128
agaaauggauucuugccau

SEQ ID NO: 694227 - RNA, 19 nt, Artificial Sequence
  Description of Artificial Sequence: Synthetic oligonucleotide
  Antisense strand to SEQ ID NO: 694226
auggcaagaauccauuucu

SEQ ID NO: 694228 - RNA, 19 nt, Artificial Sequence
  Description of Artificial Sequence: Synthetic oligonucleotide
  Sense strand starting at position 1038 of SEQ ID NO: 586128
aauggauucuugccauguu

SEQ ID NO: 694229 - RNA, 19 nt, Artificial Sequence
  Description of Artificial Sequence: Synthetic oligonucleotide
  Antisense strand to SEQ ID NO: 694228
aacauggcaagaauccauu

SEQ ID NO: 694230 - RNA, 19 nt, Artificial Sequence
  Description of Artificial Sequence: Synthetic oligonucleotide
  Sense strand starting at position 1314 of SEQ ID NO: 586128
ccaauuaaguguccuagaa

SEQ ID NO: 694231 - RNA, 19 nt, Artificial Sequence
  Description of Artificial Sequence: Synthetic oligonucleotide
  Antisense strand to SEQ ID NO: 694230
uucuaggacacuuaauugg

SEQ ID NO: 694232 - RNA, 19 nt, Artificial Sequence
  Description of Artificial Sequence: Synthetic oligonucleotide
  Sense strand starting at position 1369 of SEQ ID NO: 586128
uccaacagcugcuugaaau

SEQ ID NO: 694233 - RNA, 19 nt, Artificial Sequence
  Description of Artificial Sequence: Synthetic oligonucleotide
  Antisense strand to SEQ ID NO: 694232
auuucaagcagcuguugga

SEQ ID NO: 694234 - RNA, 19 nt, Artificial Sequence
  Description of Artificial Sequence: Synthetic oligonucleotide
  Sense strand starting at position 1370 of SEQ ID NO: 586128
ccaacagcugcuugaaauu

SEQ ID NO: 694235 - RNA, 19 nt, Artificial Sequence
  Description of Artificial Sequence: Synthetic oligonucleotide
  Antisense strand to SEQ ID NO: 694234
aauuucaagcagcuguugg

SEQ ID NO: 694236 - RNA, 19 nt, Artificial Sequence
  Description of Artificial Sequence: Synthetic oligonucleotide
  Sense strand starting at position 1449 of SEQ ID NO: 586128
cugaaucagcucugagaaa

SEQ ID NO: 694237 - RNA, 19 nt, Artificial Sequence
  Description of Artificial Sequence: Synthetic oligonucleotide
  Antisense strand to SEQ ID NO: 694236
uuucucagagcugauucag

SEQ ID NO: 694238 - RNA, 19 nt, Artificial Sequence
  Description of Artificial Sequence: Synthetic oligonucleotide
  Sense strand starting at position 1532 of SEQ ID NO: 586128
aggcuuuccuggcugaaug

SEQ ID NO: 694239 - RNA, 19 nt, Artificial Sequence
  Description of Artificial Sequence: Synthetic oligonucleotide
  Antisense strand to SEQ ID NO: 694238
cauucagccaggaaagccu

SEQ ID NO: 694240 - RNA, 19 nt, Artificial Sequence
  Description of Artificial Sequence: Synthetic oligonucleotide
  Sense strand starting at position 2007 of SEQ ID NO: 586128
gccacaggcugcuuaagaa

SEQ ID NO: 694241 - RNA, 19 nt, Artificial Sequence
  Description of Artificial Sequence: Synthetic oligonucleotide
  Antisense strand to SEQ ID NO: 694240
uucuuaagcagccuguggc

SEQ ID NO: 694242 - RNA, 19 nt, Artificial Sequence
  Description of Artificial Sequence: Synthetic oligonucleotide
  Sense strand starting at position 2180 of SEQ ID NO: 586128
gugacaguaucauuggagu

SEQ ID NO: 694243 - RNA, 19 nt, Artificial Sequence
  Description of Artificial Sequence: Synthetic oligonucleotide
  Antisense strand to SEQ ID NO: 694242
acuccaaugauacugucac

SEQ ID NO: 694244 - RNA, 19 nt, Artificial Sequence
  Description of Artificial Sequence: Synthetic oligonucleotide
  Sense strand starting at position 2201 of SEQ ID NO: 586128
cugcuuguucaggaugagu

SEQ ID NO: 694245 - RNA, 19 nt, Artificial Sequence
  Description of Artificial Sequence: Synthetic oligonucleotide
  Antisense strand to SEQ ID NO: 694244
acucauccugaacaagcag

SEQ ID NO: 694246 - RNA, 19 nt, Artificial Sequence
  Description of Artificial Sequence: Synthetic oligonucleotide
  Sense strand starting at position 2203 of SEQ ID NO: 586128
gcuuguucaggaugaguca

SEQ ID NO: 694247 - RNA, 19 nt, Artificial Sequence
  Description of Artificial Sequence: Synthetic oligonucleotide
  Antisense strand to SEQ ID NO: 694246
ugacucauccugaacaagc

SEQ ID NO: 694248 - RNA, 19 nt, Artificial Sequence
  Description of Artificial Sequence: Synthetic oligonucleotide
  Sense strand starting at position 2297 of SEQ ID NO: 586128
gggaaagaagucuggccaa

SEQ ID NO: 694249 - RNA, 19 nt, Artificial Sequence
  Description of Artificial Sequence: Synthetic oligonucleotide
  Antisense strand to SEQ ID NO: 694248
uuggccagacuucuuuccc

SEQ ID NO: 694250 - RNA, 19 nt, Artificial Sequence
  Description of Artificial Sequence: Synthetic oligonucleotide
  Sense strand starting at position 2675 of SEQ ID NO: 586128
gaugguuuccucugugaaa

SEQ ID NO: 694251 - RNA, 19 nt, Artificial Sequence
  Description of Artificial Sequence: Synthetic oligonucleotide
  Antisense strand to SEQ ID NO: 694250
uuucacagaggaaaccauc

SEQ ID NO: 694252 - RNA, 19 nt, Artificial Sequence
  Description of Artificial Sequence: Synthetic oligonucleotide
  Sense strand starting at position 2676 of SEQ ID NO: 586128
augguuuccucugugaaau

SEQ ID NO: 694253 - RNA, 19 nt, Artificial Sequence
  Description of Artificial Sequence: Synthetic oligonucleotide
  Antisense strand to SEQ ID NO: 694252
auuucacagaggaaaccau

SEQ ID NO: 694254 - RNA, 19 nt, Artificial Sequence
  Description of Artificial Sequence: Synthetic oligonucleotide
  Sense strand starting at position 2677 of SEQ ID NO: 586128
ugguuuccucugugaaaua

SEQ ID NO: 694255 - RNA, 19 nt, Artificial Sequence
  Description of Artificial Sequence: Synthetic oligonucleotide
  Antisense strand to SEQ ID NO: 694254
uauuucacagaggaaacca

SEQ ID NO: 694256 - RNA, 19 nt, Artificial Sequence
  Description of Artificial Sequence: Synthetic oligonucleotide
  Sense strand starting at position 2801 of SEQ ID NO: 586128
acuaguugguagucagcaa

SEQ ID NO: 694257 - RNA, 19 nt, Artificial Sequence
  Description of Artificial Sequence: Synthetic oligonucleotide
  Antisense strand to SEQ ID NO: 694256
uugcugacuaccaacuagu

SEQ ID NO: 694258 - RNA, 19 nt, Artificial Sequence
  Description of Artificial Sequence: Synthetic oligonucleotide
  Sense strand starting at position 2802 of SEQ ID NO: 586128
cuaguugguagucagcaau

SEQ ID NO: 694259 - RNA, 19 nt, Artificial Sequence
  Description of Artificial Sequence: Synthetic oligonucleotide
  Antisense strand to SEQ ID NO: 694258
auugcugacuaccaacuag

SEQ ID NO: 694260 - RNA, 19 nt, Artificial Sequence
  Description of Artificial Sequence: Synthetic oligonucleotide
  Sense strand starting at position 2805 of SEQ ID NO: 586128
guugguagucagcaaucua

SEQ ID NO: 694261 - RNA, 19 nt, Artificial Sequence
  Description of Artificial Sequence: Synthetic oligonucleotide
  Antisense strand to SEQ ID NO: 694260
uagauugcugacuaccaac

SEQ ID NO: 694262 - RNA, 19 nt, Artificial Sequence
  Description of Artificial Sequence: Synthetic oligonucleotide
  Sense strand starting at position 2812 of SEQ ID NO: 586128
gucagcaaucuagggaaca

SEQ ID NO: 694263 - RNA, 19 nt, Artificial Sequence
  Description of Artificial Sequence: Synthetic oligonucleotide
  Antisense strand to SEQ ID NO: 694262
uguucccuagauugcugac

SEQ ID NO: 694264 - RNA, 19 nt, Artificial Sequence
  Description of Artificial Sequence: Synthetic oligonucleotide
  Sense strand starting at position 3428 of SEQ ID NO: 586128
gccacaaagucuccuggau

SEQ ID NO: 694265 - RNA, 19 nt, Artificial Sequence
  Description of Artificial Sequence: Synthetic oligonucleotide
  Antisense strand to SEQ ID NO: 694264
auccaggagacuuuguggc

SEQ ID NO: 694266 - RNA, 19 nt, Artificial Sequence
  Description of Artificial Sequence: Synthetic oligonucleotide
  Sense strand starting at position 3474 of SEQ ID NO: 586128
guguauacuggaugacaug

SEQ ID NO: 694267 - RNA, 19 nt, Artificial Sequence
  Description of Artificial Sequence: Synthetic oligonucleotide
  Antisense strand to SEQ ID NO: 694266
caugucauccaguauacac

SEQ ID NO: 694268 - RNA, 19 nt, Artificial Sequence
  Description of Artificial Sequence: Synthetic oligonucleotide
  Sense strand starting at position 3512 of SEQ ID NO: 586128
auaguaaauccuuagugac

SEQ ID NO: 694269 - RNA, 19 nt, Artificial Sequence
  Description of Artificial Sequence: Synthetic oligonucleotide
  Antisense strand to SEQ ID NO: 694268
gucacuaaggauuuacuau

SEQ ID NO: 694270 - RNA, 19 nt, Artificial Sequence
  Description of Artificial Sequence: Synthetic oligonucleotide
  Sense strand starting at position 3514 of SEQ ID NO: 586128
aguaaauccuuagugacug

SEQ ID NO: 694271 - RNA, 19 nt, Artificial Sequence
  Description of Artificial Sequence: Synthetic oligonucleotide
  Antisense strand to SEQ ID NO: 694270
cagucacuaaggauuuacu

SEQ ID NO: 694272 - RNA, 19 nt, Artificial Sequence
  Description of Artificial Sequence: Synthetic oligonucleotide
  Sense strand starting at position 3604 of SEQ ID NO: 586128
auaugcaugccacaguaaa

SEQ ID NO: 694273 - RNA, 19 nt, Artificial Sequence
  Description of Artificial Sequence: Synthetic oligonucleotide
  Antisense strand to SEQ ID NO: 694272
uuuacuguggcaugcauau

SEQ ID NO: 694274 - RNA, 19 nt, Artificial Sequence
  Description of Artificial Sequence: Synthetic oligonucleotide
  Sense strand starting at position 3677 of SEQ ID NO: 586128
aggauuaucuaauugcuuu

SEQ ID NO: 694275 - RNA, 19 nt, Artificial Sequence
  Description of Artificial Sequence: Synthetic oligonucleotide
  Antisense strand to SEQ ID NO: 694274
aaagcaauuagauaauccu

SEQ ID NO: 694276 - RNA, 19 nt, Artificial Sequence
  Description of Artificial Sequence: Synthetic oligonucleotide
  Sense strand starting at position 63 of SEQ ID NO: 586129
cacgaauggcuacagaguu

SEQ ID NO: 694277 - RNA, 19 nt, Artificial Sequence
  Description of Artificial Sequence: Synthetic oligonucleotide
  Antisense strand to SEQ ID NO: 694276
aacucuguagccauucgug

SEQ ID NO: 694278 - RNA, 19 nt, Artificial Sequence
  Description of Artificial Sequence: Synthetic oligonucleotide
  Sense strand starting at position 101 of SEQ ID NO: 586129
gaaggagagcucuggacua

SEQ ID NO: 694279 - RNA, 19 nt, Artificial Sequence
  Description of Artificial Sequence: Synthetic oligonucleotide
  Antisense strand to SEQ ID NO: 694278
uaguccagagcucuccuuc

SEQ ID NO: 694280 - RNA, 19 nt, Artificial Sequence
  Description of Artificial Sequence: Synthetic oligonucleotide
  Sense strand starting at position 298 of SEQ ID NO: 586129
cccguaaucaucugagaag

SEQ ID NO: 694281 - RNA, 19 nt, Artificial Sequence
  Description of Artificial Sequence: Synthetic oligonucleotide
  Antisense strand to SEQ ID NO: 694280
cuucucagaugauuacggg

SEQ ID NO: 694282 - RNA, 19 nt, Artificial Sequence
  Description of Artificial Sequence: Synthetic oligonucleotide
  Sense strand starting at position 379 of SEQ ID NO: 586129
agaguuuacuauucuggag

SEQ ID NO: 694283 - RNA, 19 nt, Artificial Sequence
  Description of Artificial Sequence: Synthetic oligonucleotide
  Antisense strand to SEQ ID NO: 694282
cuccagaauaguaaacucu

SEQ ID NO: 694284 - RNA, 19 nt, Artificial Sequence
  Description of Artificial Sequence: Synthetic oligonucleotide
  Sense strand starting at position 383 of SEQ ID NO: 586129
uuuacuauucuggaggcaa

SEQ ID NO: 694285 - RNA, 19 nt, Artificial Sequence
  Description of Artificial Sequence: Synthetic oligonucleotide
  Antisense strand to SEQ ID NO: 694284
uugccuccagaauaguaaa

SEQ ID NO: 694286 - RNA, 19 nt, Artificial Sequence
  Description of Artificial Sequence: Synthetic oligonucleotide
  Sense strand starting at position 397 of SEQ ID NO: 586129
ggcaauuaacaagguuuga

SEQ ID NO: 694287 - RNA, 19 nt, Artificial Sequence
  Description of Artificial Sequence: Synthetic oligonucleotide
  Antisense strand to SEQ ID NO: 694286
ucaaaccuuguuaauugcc

SEQ ID NO: 694288 - RNA, 19 nt, Artificial Sequence
  Description of Artificial Sequence: Synthetic oligonucleotide
  Sense strand starting at position 484 of SEQ ID NO: 586129
gaaguauuauagcuagaag

SEQ ID NO: 694289 - RNA, 19 nt, Artificial Sequence
  Description of Artificial Sequence: Synthetic oligonucleotide
  Antisense strand to SEQ ID NO: 694288
cuucuagcuauaauacuuc

SEQ ID NO: 694290 - RNA, 19 nt, Artificial Sequence
  Description of Artificial Sequence: Synthetic oligonucleotide
  Sense strand starting at position 560 of SEQ ID NO: 586129
cuucgagaucuauggagag

SEQ ID NO: 694291 - RNA, 19 nt, Artificial Sequence
  Description of Artificial Sequence: Synthetic oligonucleotide
  Antisense strand to SEQ ID NO: 694290
cucuccauagaucucgaag

SEQ ID NO: 694292 - RNA, 19 nt, Artificial Sequence
  Description of Artificial Sequence: Synthetic oligonucleotide
  Sense strand starting at position 583 of SEQ ID NO: 586129
agagguggguccaagggau

SEQ ID NO: 694293 - RNA, 19 nt, Artificial Sequence
  Description of Artificial Sequence: Synthetic oligonucleotide
  Antisense strand to SEQ ID NO: 694292
aucccuuggacccaccucu

SEQ ID NO: 694294 - RNA, 19 nt, Artificial Sequence
  Description of Artificial Sequence: Synthetic oligonucleotide
  Sense strand starting at position 1083 of SEQ ID NO: 586129
auccuaaacgggugaaugu

SEQ ID NO: 694295 - RNA, 19 nt, Artificial Sequence
  Description of Artificial Sequence: Synthetic oligonucleotide
  Antisense strand to SEQ ID NO: 694294
acauucacccguuuaggau

SEQ ID NO: 694296 - RNA, 19 nt, Artificial Sequence
  Description of Artificial Sequence: Synthetic oligonucleotide
  Sense strand starting at position 1092 of SEQ ID NO: 586129
gggugaaugucuuccacac

SEQ ID NO: 694297 - RNA, 19 nt, Artificial Sequence
  Description of Artificial Sequence: Synthetic oligonucleotide
  Antisense strand to SEQ ID NO: 694296
guguggaagacauucaccc

SEQ ID NO: 694298 - RNA, 19 nt, Artificial Sequence
  Description of Artificial Sequence: Synthetic oligonucleotide
  Sense strand starting at position 1130 of SEQ ID NO: 586129
uaauuuguuucugacagga

SEQ ID NO: 694299 - RNA, 19 nt, Artificial Sequence
  Description of Artificial Sequence: Synthetic oligonucleotide
  Antisense strand to SEQ ID NO: 694298
uccugucagaaacaaauua

SEQ ID NO: 694300 - RNA, 19 nt, Artificial Sequence
  Description of Artificial Sequence: Synthetic oligonucleotide
  Sense strand starting at position 1132 of SEQ ID NO: 586129
auuuguuucugacaggaaa

SEQ ID NO: 694301 - RNA, 19 nt, Artificial Sequence
  Description of Artificial Sequence: Synthetic oligonucleotide
  Antisense strand to SEQ ID NO: 694300
uuuccugucagaaacaaau

SEQ ID NO: 694302 - RNA, 19 nt, Artificial Sequence
  Description of Artificial Sequence: Synthetic oligonucleotide
  Sense strand starting at position 1267 of SEQ ID NO: 586129
cgauccgacauaugaaauu

SEQ ID NO: 694303 - RNA, 19 nt, Artificial Sequence
  Description of Artificial Sequence: Synthetic oligonucleotide
  Antisense strand to SEQ ID NO: 694302
aauuucauaugucggaucg

SEQ ID NO: 694304 - RNA, 19 nt, Artificial Sequence
  Description of Artificial Sequence: Synthetic oligonucleotide
  Sense strand starting at position 1845 of SEQ ID NO: 586129
uuaccuucccgggacuaga

SEQ ID NO: 694305 - RNA, 19 nt, Artificial Sequence
  Description of Artificial Sequence: Synthetic oligonucleotide
  Antisense strand to SEQ ID NO: 694304
ucuagucccgggaagguaa

SEQ ID NO: 694306 - RNA, 19 nt, Artificial Sequence
  Description of Artificial Sequence: Synthetic oligonucleotide
  Sense strand starting at position 2129 of SEQ ID NO: 586129
agagcuagagcuugaaauu

SEQ ID NO: 694307 - RNA, 19 nt, Artificial Sequence
  Description of Artificial Sequence: Synthetic oligonucleotide
  Antisense strand to SEQ ID NO: 694306
aauuucaagcucuagcucu

SEQ ID NO: 694308 - RNA, 19 nt, Artificial Sequence
  Description of Artificial Sequence: Synthetic oligonucleotide
  Sense strand starting at position 2130 of SEQ ID NO: 586129
gagcuagagcuugaaauuc

SEQ ID NO: 694309 - RNA, 19 nt, Artificial Sequence
  Description of Artificial Sequence: Synthetic oligonucleotide
  Antisense strand to SEQ ID NO: 694308
gaauuucaagcucuagcuc

SEQ ID NO: 694310 - RNA, 19 nt, Artificial Sequence
  Description of Artificial Sequence: Synthetic oligonucleotide
  Sense strand starting at position 2312 of SEQ ID NO: 586129
ggcuuaaaguaucccaaag

SEQ ID NO: 694311 - RNA, 19 nt, Artificial Sequence
  Description of Artificial Sequence: Synthetic oligonucleotide
  Antisense strand to SEQ ID NO: 694310
cuuugggauacuuuaagcc

SEQ ID NO: 694312 - RNA, 19 nt, Artificial Sequence
  Description of Artificial Sequence: Synthetic oligonucleotide
  Sense strand starting at position 2451 of SEQ ID NO: 586129
ccaguuauguccuuaagga

SEQ ID NO: 694313 - RNA, 19 nt, Artificial Sequence
  Description of Artificial Sequence: Synthetic oligonucleotide
  Antisense strand to SEQ ID NO: 694312
uccuuaaggacauaacugg

SEQ ID NO: 694314 - RNA, 19 nt, Artificial Sequence
  Description of Artificial Sequence: Synthetic oligonucleotide
  Sense strand starting at position 2452 of SEQ ID NO: 586129
caguuauguccuuaaggag

SEQ ID NO: 694315 - RNA, 19 nt, Artificial Sequence
  Description of Artificial Sequence: Synthetic oligonucleotide
  Antisense strand to SEQ ID NO: 694314
cuccuuaaggacauaacug

SEQ ID NO: 694316 - RNA, 19 nt, Artificial Sequence
  Description of Artificial Sequence: Synthetic oligonucleotide
  Sense strand starting at position 2528 of SEQ ID NO: 586129
ucucgauauugacucucaa

SEQ ID NO: 694317 - RNA, 19 nt, Artificial Sequence
  Description of Artificial Sequence: Synthetic oligonucleotide
  Antisense strand to SEQ ID NO: 694316
uugagagucaauaucgaga

SEQ ID NO: 694318 - RNA, 19 nt, Artificial Sequence
  Description of Artificial Sequence: Synthetic oligonucleotide
  Sense strand starting at position 2564 of SEQ ID NO: 586129
uugacucucucagcuaaga

SEQ ID NO: 694319 - RNA, 19 nt, Artificial Sequence
  Description of Artificial Sequence: Synthetic oligonucleotide
  Antisense strand to SEQ ID NO: 694318
ucuuagcugagagagucaa

SEQ ID NO: 694320 - RNA, 19 nt, Artificial Sequence
  Description of Artificial Sequence: Synthetic oligonucleotide
  Sense strand starting at position 2621 of SEQ ID NO: 586129
uuugaucugcaagauuauu

SEQ ID NO: 694321 - RNA, 19 nt, Artificial Sequence
  Description of Artificial Sequence: Synthetic oligonucleotide
  Antisense strand to SEQ ID NO: 694320
aauaaucuugcagaucaaa

SEQ ID NO: 694322 - RNA, 19 nt, Artificial Sequence
  Description of Artificial Sequence: Synthetic oligonucleotide
  Sense strand starting at position 2648 of SEQ ID NO: 586129
uugugaaaggcgagucguu

SEQ ID NO: 694323 - RNA, 19 nt, Artificial Sequence
  Description of Artificial Sequence: Synthetic oligonucleotide
  Antisense strand to SEQ ID NO: 694322
aacgacucgccuuucacaa

SEQ ID NO: 694324 - RNA, 19 nt, Artificial Sequence
  Description of Artificial Sequence: Synthetic oligonucleotide
  Sense strand starting at position 2649 of SEQ ID NO: 586129
ugugaaaggcgagucguuu

SEQ ID NO: 694325 - RNA, 19 nt, Artificial Sequence
  Description of Artificial Sequence: Synthetic oligonucleotide
  Antisense strand to SEQ ID NO: 694324
aaacgacucgccuuucaca

SEQ ID NO: 694326 - RNA, 19 nt, Artificial Sequence
  Description of Artificial Sequence: Synthetic oligonucleotide
  Sense strand starting at position 2729 of SEQ ID NO: 586129
gagcaucaguucucuauga

SEQ ID NO: 694327 - RNA, 19 nt, Artificial Sequence
  Description of Artificial Sequence: Synthetic oligonucleotide
  Antisense strand to SEQ ID NO: 694326
ucauagagaacugaugcuc

SEQ ID NO: 694328 - RNA, 19 nt, Artificial Sequence
  Description of Artificial Sequence: Synthetic oligonucleotide
  Sense strand starting at position 2730 of SEQ ID NO: 586129
agcaucaguucucuaugaa

SEQ ID NO: 694329 - RNA, 19 nt, Artificial Sequence
  Description of Artificial Sequence: Synthetic oligonucleotide
  Antisense strand to SEQ ID NO: 694328
uucauagagaacugaugcu

SEQ ID NO: 694330 - RNA, 19 nt, Artificial Sequence
  Description of Artificial Sequence: Synthetic oligonucleotide
  Sense strand starting at position 2731 of SEQ ID NO: 586129
gcaucaguucucuaugaac

SEQ ID NO: 694331 - RNA, 19 nt, Artificial Sequence
  Description of Artificial Sequence: Synthetic oligonucleotide
  Antisense strand to SEQ ID NO: 694330
guucauagagaacugaugc

SEQ ID NO: 694332 - RNA, 19 nt, Artificial Sequence
  Description of Artificial Sequence: Synthetic oligonucleotide
  Sense strand starting at position 2995 of SEQ ID NO: 586129
uuuaaucaccugggagguu

SEQ ID NO: 694333 - RNA, 19 nt, Artificial Sequence
  Description of Artificial Sequence: Synthetic oligonucleotide
  Antisense strand to SEQ ID NO: 694332
aaccucccaggugauuaaa

SEQ ID NO: 694334 - RNA, 19 nt, Artificial Sequence
  Description of Artificial Sequence: Synthetic oligonucleotide
  Sense strand starting at position 3009 of SEQ ID NO: 586129
agguuccaucuaugaauaa

SEQ ID NO: 694335 - RNA, 19 nt, Artificial Sequence
  Description of Artificial Sequence: Synthetic oligonucleotide
  Antisense strand to SEQ ID NO: 694334
uuauucauagauggaaccu

SEQ ID NO: 694336 - RNA, 19 nt, Artificial Sequence
  Description of Artificial Sequence: Synthetic oligonucleotide
  Sense strand starting at position 3055 of SEQ ID NO: 586129
uccuaagucugguugaacu

SEQ ID NO: 694337 - RNA, 19 nt, Artificial Sequence
  Description of Artificial Sequence: Synthetic oligonucleotide
  Antisense strand to SEQ ID NO: 694336
aguucaaccagacuuagga

SEQ ID NO: 694338 - RNA, 19 nt, Artificial Sequence
  Description of Artificial Sequence: Synthetic oligonucleotide
  Sense strand starting at position 3057 of SEQ ID NO: 586129
cuaagucugguugaacuuu

SEQ ID NO: 694339 - RNA, 19 nt, Artificial Sequence
  Description of Artificial Sequence: Synthetic oligonucleotide
  Antisense strand to SEQ ID NO: 694338
aaaguucaaccagacuuag

SEQ ID NO: 694340 - RNA, 19 nt, Artificial Sequence
  Description of Artificial Sequence: Synthetic oligonucleotide
  Sense strand starting at position 3195 of SEQ ID NO: 586129
ccagaaagauagccucaua

SEQ ID NO: 694341 - RNA, 19 nt, Artificial Sequence
  Description of Artificial Sequence: Synthetic oligonucleotide
  Antisense strand to SEQ ID NO: 694340
uaugaggcuaucuuucugg

SEQ ID NO: 694342 - RNA, 19 nt, Artificial Sequence
  Description of Artificial Sequence: Synthetic oligonucleotide
  Sense strand starting at position 3309 of SEQ ID NO: 586129
cuugaaaccucagcugaag

SEQ ID NO: 694343 - RNA, 19 nt, Artificial Sequence
  Description of Artificial Sequence: Synthetic oligonucleotide
  Antisense strand to SEQ ID NO: 694342
cuucagcugagguuucaag

SEQ ID NO: 694344 - RNA, 19 nt, Artificial Sequence
  Description of Artificial Sequence: Synthetic oligonucleotide
  Sense strand starting at position 3440 of SEQ ID NO: 586129
gaaggugauuuagaggauc

SEQ ID NO: 694345 - RNA, 19 nt, Artificial Sequence
  Description of Artificial Sequence: Synthetic oligonucleotide
  Antisense strand to SEQ ID NO: 694344
gauccucuaaaucaccuuc

SEQ ID NO: 694346 - RNA, 19 nt, Artificial Sequence
  Description of Artificial Sequence: Synthetic oligonucleotide
  Sense strand starting at position 3507 of SEQ ID NO: 586129
uuuagaaagguugguuucu

SEQ ID NO: 694347 - RNA, 19 nt, Artificial Sequence
  Description of Artificial Sequence: Synthetic oligonucleotide
  Antisense strand to SEQ ID NO: 694346
agaaaccaaccuuucuaaa

SEQ ID NO: 694348 - RNA, 19 nt, Artificial Sequence
  Description of Artificial Sequence: Synthetic oligonucleotide
  Sense strand starting at position 3509 of SEQ ID NO: 586129
uagaaagguugguuucuga

SEQ ID NO: 694349 - RNA, 19 nt, Artificial Sequence
  Description of Artificial Sequence: Synthetic oligonucleotide
  Antisense strand to SEQ ID NO: 694348
ucagaaaccaaccuuucua

SEQ ID NO: 694350 - RNA, 19 nt, Artificial Sequence
  Description of Artificial Sequence: Synthetic oligonucleotide
  Sense strand starting at position 3698 of SEQ ID NO: 586129
aaggauggguucucgaacu

SEQ ID NO: 694351 - RNA, 19 nt, Artificial Sequence
  Description of Artificial Sequence: Synthetic oligonucleotide
  Antisense strand to SEQ ID NO: 694350
aguucgagaacccauccuu

SEQ ID NO: 694352 - RNA, 19 nt, Artificial Sequence
  Description of Artificial Sequence: Synthetic oligonucleotide
  Sense strand starting at position 3758 of SEQ ID NO: 586129
auacuugguucucuuauua

SEQ ID NO: 694353 - RNA, 19 nt, Artificial Sequence
  Description of Artificial Sequence: Synthetic oligonucleotide
  Antisense strand to SEQ ID NO: 694352
uaauaagagaaccaaguau

SEQ ID NO: 694354 - RNA, 19 nt, Artificial Sequence
  Description of Artificial Sequence: Synthetic oligonucleotide
  Sense strand starting at position 3832 of SEQ ID NO: 586129
ucucuagacucuuuaguuu

SEQ ID NO: 694355 - RNA, 19 nt, Artificial Sequence
  Description of Artificial Sequence: Synthetic oligonucleotide
  Antisense strand to SEQ ID NO: 694354
aaacuaaagagucuagaga

SEQ ID NO: 694356 - RNA, 19 nt, Artificial Sequence
  Description of Artificial Sequence: Synthetic oligonucleotide
  Sense strand starting at position 26 of SEQ ID NO: 586130
gguaguuuauuucuccuca

SEQ ID NO: 694357 - RNA, 19 nt, Artificial Sequence
  Description of Artificial Sequence: Synthetic oligonucleotide
  Antisense strand to SEQ ID NO: 694356
ugaggagaaauaaacuacc

SEQ ID NO: 694358 - RNA, 19 nt, Artificial Sequence
  Description of Artificial Sequence: Synthetic oligonucleotide
  Sense strand starting at position 27 of SEQ ID NO: 586130
guaguuuauuucuccucau

SEQ ID NO: 694359 - RNA, 19 nt, Artificial Sequence
  Description of Artificial Sequence: Synthetic oligonucleotide
  Antisense strand to SEQ ID NO: 694358
augaggagaaauaaacuac

SEQ ID NO: 694360 - RNA, 19 nt, Artificial Sequence
  Description of Artificial Sequence: Synthetic oligonucleotide
  Sense strand starting at position 119 of SEQ ID NO: 586130
gcuucuaaacuuuagauga

SEQ ID NO: 694361 - RNA, 19 nt, Artificial Sequence
  Description of Artificial Sequence: Synthetic oligonucleotide
  Antisense strand to SEQ ID NO: 694360
ucaucuaaaguuuagaagc

SEQ ID NO: 694362 - RNA, 19 nt, Artificial Sequence
  Description of Artificial Sequence: Synthetic oligonucleotide
  Sense strand starting at position 129 of SEQ ID NO: 586130
uuuagaugaugucucauua

SEQ ID NO: 694363 - RNA, 19 nt, Artificial Sequence
  Description of Artificial Sequence: Synthetic oligonucleotide
  Antisense strand to SEQ ID NO: 694362
uaaugagacaucaucuaaa

SEQ ID NO: 694364 - RNA, 19 nt, Artificial Sequence
  Description of Artificial Sequence: Synthetic oligonucleotide
  Sense strand starting at position 358 of SEQ ID NO: 586130
ucagaaugauugcuugagu

SEQ ID NO: 694365 - RNA, 19 nt, Artificial Sequence
  Description of Artificial Sequence: Synthetic oligonucleotide
  Antisense strand to SEQ ID NO: 694364
acucaagcaaucauucuga

SEQ ID NO: 694366 - RNA, 19 nt, Artificial Sequence
  Description of Artificial Sequence: Synthetic oligonucleotide
  Sense strand starting at position 439 of SEQ ID NO: 586130
guaagacccugccuuaaac

SEQ ID NO: 694367 - RNA, 19 nt, Artificial Sequence
  Description of Artificial Sequence: Synthetic oligonucleotide
  Antisense strand to SEQ ID NO: 694366
guuuaaggcagggucuuac

SEQ ID NO: 694368 - RNA, 19 nt, Artificial Sequence
  Description of Artificial Sequence: Synthetic oligonucleotide
  Sense strand starting at position 666 of SEQ ID NO: 586130
ugugcuucucugucuggua

SEQ ID NO: 694369 - RNA, 19 nt, Artificial Sequence
  Description of Artificial Sequence: Synthetic oligonucleotide
  Antisense strand to SEQ ID NO: 694368
uaccagacagagaagcaca

SEQ ID NO: 694370 - RNA, 19 nt, Artificial Sequence
  Description of Artificial Sequence: Synthetic oligonucleotide
  Sense strand starting at position 754 of SEQ ID NO: 586130
gucacuauuuauucucgua

SEQ ID NO: 694371 - RNA, 19 nt, Artificial Sequence
  Description of Artificial Sequence: Synthetic oligonucleotide
  Antisense strand to SEQ ID NO: 694370
uacgagaauaaauagugac

SEQ ID NO: 694372 - RNA, 19 nt, Artificial Sequence
  Description of Artificial Sequence: Synthetic oligonucleotide
  Sense strand starting at position 973 of SEQ ID NO: 586130
gaccgagggagagguaauu

SEQ ID NO: 694373 - RNA, 19 nt, Artificial Sequence
  Description of Artificial Sequence: Synthetic oligonucleotide
  Antisense strand to SEQ ID NO: 694372
aauuaccucucccucgguc

SEQ ID NO: 694374 - RNA, 19 nt, Artificial Sequence
  Description of Artificial Sequence: Synthetic oligonucleotide
  Sense strand starting at position 1038 of SEQ ID NO: 586130
gaguucucaugacauuuga

SEQ ID NO: 694375 - RNA, 19 nt, Artificial Sequence
  Description of Artificial Sequence: Synthetic oligonucleotide
  Antisense strand to SEQ ID NO: 694374
ucaaaugucaugagaacuc

SEQ ID NO: 694376 - RNA, 19 nt, Artificial Sequence
  Description of Artificial Sequence: Synthetic oligonucleotide
  Sense strand starting at position 1231 of SEQ ID NO: 586130
uaggguaugucuuuaauag

SEQ ID NO: 694377 - RNA, 19 nt, Artificial Sequence
  Description of Artificial Sequence: Synthetic oligonucleotide
  Antisense strand to SEQ ID NO: 694376
cuauuaaagacauacccua

SEQ ID NO: 694378 - RNA, 19 nt, Artificial Sequence
  Description of Artificial Sequence: Synthetic oligonucleotide
  Sense strand starting at position 1232 of SEQ ID NO: 586130
aggguaugucuuuaauagc

SEQ ID NO: 694379 - RNA, 19 nt, Artificial Sequence
  Description of Artificial Sequence: Synthetic oligonucleotide
  Antisense strand to SEQ ID NO: 694378
gcuauuaaagacauacccu

SEQ ID NO: 694380 - RNA, 19 nt, Artificial Sequence
  Description of Artificial Sequence: Synthetic oligonucleotide
  Sense strand starting at position 1297 of SEQ ID NO: 586130
agaguucuagaauagcauu

SEQ ID NO: 694381 - RNA, 19 nt, Artificial Sequence
  Description of Artificial Sequence: Synthetic oligonucleotide
  Antisense strand to SEQ ID NO: 694380
aaugcuauucuagaacucu

SEQ ID NO: 694382 - RNA, 19 nt, Artificial Sequence
  Description of Artificial Sequence: Synthetic oligonucleotide
  Sense strand starting at position 1303 of SEQ ID NO: 586130
cuagaauagcauugauccu

SEQ ID NO: 694383 - RNA, 19 nt, Artificial Sequence
  Description of Artificial Sequence: Synthetic oligonucleotide
  Antisense strand to SEQ ID NO: 694382
aggaucaaugcuauucuag

SEQ ID NO: 694384 - RNA, 19 nt, Artificial Sequence
  Description of Artificial Sequence: Synthetic oligonucleotide
  Sense strand starting at position 1310 of SEQ ID NO: 586130
agcauugauccuuaucuug

SEQ ID NO: 694385 - RNA, 19 nt, Artificial Sequence
  Description of Artificial Sequence: Synthetic oligonucleotide
  Antisense strand to SEQ ID NO: 694384
caagauaaggaucaaugcu
